United States Patent Application Publication US 2007/0054278 A1 - sequence listing, part 145

SEQ ID NO: 517968 - DNA, 201 bp, Homo sapiens
atcttagtcttttgggaacaagcgaaggcacattggtcatctcataaattaggattgagattctacggctgaggatctggtgcttcttcattctattttgyttgtttgcaaactgaaaataaaatgagtcacaaagataacctatggatgtcaaaagataattgtttttatgtcaaaagataattgttttatggatcacaa

SEQ ID NO: 517969 - DNA, 201 bp, Homo sapiens
ggctgggttctggagcaaaccagagcagtctgagaattcatttctattggcaacaactgaaggaatgccaggcagactttgaaatctgtgctgggtctaayttggtgatagtgggtttgttttgattcttttaagattctgagtcactattcagcccagttactacttgatgcttgctctgctagtcatcttcagtgattc

SEQ ID NO: 517970 - DNA, 201 bp, Homo sapiens
gaaaataaaaattacattgagcagtcagttatgtcctgtaaagccataagtttgtgccaaacagcttaggtgctttaccattttgccaaagaacaaaaaayaaaacttgaccaggtgttattaatttattctatttttaatatataatttgcacttaggtagtaaatcaagtataacaactaaagaagtcatgtgcccttt

SEQ ID NO: 517971 - DNA, 201 bp, Homo sapiens
tagatatttcaagccatgaagaatttacttcaggcaattacaggcttacaaacctgttaggaagggctagacagtaatgtaagagaaactgccccattcaraaagtcagaaagaacaggaattgttgaaaaactgctgctgctgattccacttgtctcttatgtttgaagcaggtggttcacagaagagtacctgaaagct

SEQ ID NO: 517972 - DNA, 201 bp, Homo sapiens
tgcccaggtgaagaatgtaattttcaagattcagtgaaatctcttctggaacaaggcaaggaatgtgtatacgtaaataaataggcaaataaataaattarcaaatggtagtagctgaaatggtaggtctttggagtctggcctgattataaaaggaagtgtaagtaggagtaagctgtaattaggagaaaaaggaaatat

SEQ ID NO: 517973 - DNA, 201 bp, Homo sapiens
gtgcttaaaattctaacctggctctagtcttgcaagttttaaatcttttttatgcagttatggaaaaaatatgtttctgcttgaagcagttgtcaaacaakcttctttcatcaacagtcagacacagggcagctgaatgaggctgtttagtctagagtgaatgctcatgagattacaaggtcactgaggaaatataattgt

SEQ ID NO: 517974 - DNA, 201 bp, Homo sapiens
atctaatagtatatatgtaagctattaacatctttatttctcgttctttaataacattttatgtatgcagaaattagttcagagaactttgagttttacartcatccccaagctccacctttccaccccccaaccccaatagccacaaacttagctatatttagcctcactcaagagtaaatttatatggttttggaattt

SEQ ID NO: 517975 - DNA, 201 bp, Homo sapiens
atcttggcccctccccccaacttttttattattatcatatctgttgtgctgaaatatgatcaatgatctttgatgttaccattgtaattgttttaggctgycaggaaccacacccatataagataggaaacttaatcgataaatgttgcgtgtgttctactccaccaattgccccatctctcttctctctccttctcctca

SEQ ID NO: 517976 - DNA, 201 bp, Homo sapiens
agaaacccaaacctgtaaaaccagtgacgttttccacaggcatcaaaatggtaagccttattttaattgcttgtttgaaagatattttttcaaggattatrctttataattttacacgatttctatagtaaaccgaaatgttcagatgtttaagaacagtgtctgatctagttttaggtgtctggaaatatggatgggtgc

SEQ ID NO: 517977 - DNA, 201 bp, Homo sapiens
cactgccaccaccctaattcaaatcaccattgcatcaagcctggactagagaaacatcctcctaaggaatctctctgtatctactcttgcttttctctaatccattgggcagccaaagtggaccatttacattatcaggtttcctttttactttcttttttctttttttttctttttttgagacggagtgttgctcttgtt

SEQ ID NO: 517978 - DNA, 201 bp, Homo sapiens
ggtgtcactctgtcacccagtgtggagtgaagtggcatgatctcagctcactgcaacctccccatctcacgttcaagtggttctcccgcctcagcctcctragtggctgggattacaggtgcctggcaccacaccaggctagttgttgtatttttagtagagatgggatttcaccattttgaccatgctggtatcaaactc

SEQ ID NO: 517979 - DNA, 201 bp, Homo sapiens
ggatttaacatcaaatgtttgattctaaagctatatggtaatagtctatttgtctacttcaactgctataaccaaataccacacactcagtggcttaaacratagaagtctatttctcataattctggaggctgggaagtcctggctgatttgattgctggcgagggctctcttcctggccttctatctgtgtcctcatgt

SEQ ID NO: 517980 - DNA, 201 bp, Homo sapiens
aattctttttctttttcaagatttctttttgcatatccttaacattttagattcagtttgtcagtttttacaaaaattcttggtaaaagtataattgataytctgattggatctatagatcaatgtggggagaattaagatctaaaatactgagtcttccactacatgtacatggtatgcttcatttatttagggcctctt

SEQ ID NO: 517981 - DNA, 201 bp, Homo sapiens
tttgtaaaatgttttacaatgtgttgaacataagtcctttgtcagacatctgttttatgaataatttctcttgtctgtggctcactttttctttttcttaktaatgttttttgatgaactgaagttataaattttgatgaagtcagatttatgaatgtttttcttttaaggtaatttttgtgtcctatctaaggaaccttt

SEQ ID NO: 517982 - DNA, 201 bp, Homo sapiens
cctaacctgctgaacatcataatttagtataggcttccttaatacaagtactcagaacacttacattagcccagcatcatgagagagcatcctattgcatrttgctagcccaggaaaagatcaaaattcgaattacagtttctactgaatgcctgttgattttgcgtcatcatgaagtcaaaaacttgtaagtcaaaccgt

SEQ ID NO: 517983 - DNA, 201 bp, Homo sapiens
agatttagatggtaaattgagaggatttggtgattctgtggctgtgagggtaagaagaagcggtctaagataattctcacattctggattttgatgcccargtgaagaatgtaattttcaagattcagtgaaatctcttctggaacaaggcaaggaatgtgtatacgtaaataaataggcaaataaataaattaacaaatg

SEQ ID NO: 517984 - DNA, 201 bp, Homo sapiens
ttgctagctatacacagtactgtcttttaatgatcactttttaatgcggttaagcctgacttaattgttctctttttagagtgttatgtaatagttgttartggtatgatatatctgttaaactacttatatatgtaaagtgaaaagtttatgtgtacatgttattttctgcaataatgttgaagctcaaaaataaaaggg

SEQ ID NO: 517985 - DNA, 201 bp, Homo sapiens
gttgattttgctagctatacacagtactgtcttttaatgatcactttttaatgcggttaagcctgacttaattgttctctttttagagtgttatgtaatakttgttaatggtatgatatatctgttaaactacttatatatgtaaagtgaaaagtttatgtgtacatgttattttctgcaataatgttgaagctcaaaaat

SEQ ID NO: 517986 - DNA, 201 bp, Homo sapiens
agaaagtggtcagattatggatataattttgatagcaggggcaaaataatttttgatggattcgttaaggggggtatgaaaaagagaagattacttccaargtttttatctgagcaaatggttgctcctagggttttatctgaacaacaaagctgcaagcaataaggggttgtgttgtttatagagattttttaaaataat

SEQ ID NO: 517987 - DNA, 201 bp, Homo sapiens
aacatgtaaaaatgaggagacatcatgtaaaaatttggatctctcagttttgttgaaaaactgctagatctggtaacattttggctccatattctcaacarcatggagttgatgagtagccatcattaacatgagatgcattctttagttggccagtttgatgaatgttggaaattgttgatgctttgaatagaaggtata

SEQ ID NO: 517988 - DNA, 201 bp, Homo sapiens
attatgttttattgaaaaaatgccacaagataatattaaaaaatgttttgacaaaagaaaaaaattatacataatactttcacagaggagttcttttaatktttatcttcttatttgtatgtgtgtgtgctgtgtagtctcagctgctctggaggctggggtaggaggattgcttgagcccagggggtcaaggctgcagtg

SEQ ID NO: 517989 - DNA, 201 bp, Homo sapiens
ttgatgaaattcagcttaccaattttttcttttatggatcatgcttttggtgttgtatctaagacacttttgcctaaccaaaggccaagaagatttcctcktatgttttcctgtaaaagttttgtaatattacctcttacatttgggcctcagatccatgttaaattaatttttgtatgtggtgtgggctaaaggtccaag

SEQ ID NO: 517990 - DNA, 201 bp, Homo sapiens
tattcaataatgatatttttcctgatattgtatttgccacatctttattttttattgatgatatataagcaatgacatagtatttggtttttgaggtatartcagatgtcaactaggaagcctaaatgaattgtattgttgatgcagtgaaatgatttgtaggataacttattttatagtatttttatttttcatatttat

SEQ ID NO: 517991 - DNA, 201 bp, Homo sapiens
agattctatatacatagatttgggccctcacagatgctgcttttttcaaacatatagttgaagatgcagtattggatttgaaattccctgtagataaggamattgaacatcaagctgttgccgaattttgctccttagttcagctaaaaccgggctcttgtcacgcaaccagggaaatttaggcatgcagacacattgaaa

SEQ ID NO: 517992 - DNA, 201 bp, Homo sapiens
ctggctgaaacaggcgcctgcgagagtctgtaggagggaaaccgccatggacgatcagggttgccctcggtgtaagaccaccaaatatcggaacccctccytgaagctgatggtgaatgtgtgcggacacactctgtgagttgggcggcagtggattccctgggggagagacgcgctgggtgggaggagaggaccgggaga

SEQ ID NO: 517993 - DNA, 201 bp, Homo sapiens
tgttagtttcaacactggggaggaaaatgggaaaagaaggcgttgtgactttaaatagactgtagccgctagccccgagcggctctggcctgctttgaacwgcgggttctcagtgtggcatccagcagtttgtcaggttcccccttccatagccaatgagtatcccgactgtatttccaggctttgtgttgtttactgggc

SEQ ID NO: 517994 - DNA, 201 bp, Homo sapiens
aataaatgcattattttgccctccatgttgctggttgctagggcacccatgcctaatttaaaatatatacatcttttgaatgtagcattttaagttttcaratttatgcaaggtatggagaggaagggagactgttagcatgttttaaaacaaggttaactccatatggagccctgccttctcaagcaatgaattttccag

SEQ ID NO: 517995 - DNA, 201 bp, Homo sapiens
aattttgtaccgtgtagtttttactagttattttatctatagactcctatatagtaggaaaaaaacaactcattttcccctgctgcacatatccagcacaraacacttttggtcaccaaaatgtgttttttttttttggttgttatttcgttttcttttctgtaccacaccaaccatttctgcagcagacaccaataggat

SEQ ID NO: 517996 - DNA, 201 bp, Homo sapiens
gaaactcctgtcctcaggtgatccacctgcctcggcttcccagagtgctgggctcacaggtgtgcgccaccacacccagacaacaatgactaattaataayagtagtctctaaagtgggatgtgtcccatgaggatatgtaagatacagtttatggagaaaatattaaaacattcattcattaatttatttagagatggag

SEQ ID NO: 517997 - DNA, 201 bp, Homo sapiens
aatgggattgctgggtcaaatggtatttctgattctagatccttgaggaattgccacactgtcttccataatggttgaattaatttacactcccaccaacmgtgtaaaagcattcctatttctccacaccctctctagcatctattgtttcctgactttttaatgatcgccattctaactggcatgagatggtatctcatt

SEQ ID NO: 517998 - DNA, 201 bp, Homo sapiens
ggctcacaggtgtgcgccaccacacccagacaacaatgactaattaataacagtagtctctaaagtgggatgtgtcccatgaggatatgtaagatacagtwtatggagaaaatattaaaacattcattcattaatttatttagagatggagtctcgctctgtcacccaggctggagtgcagtggcgaaatctcggctcact

SEQ ID NO: 517999 - DNA, 201 bp, Homo sapiens
gtggcgcgacctcagctcactgcaagctccgcctcccgggttcacgctattctcctgcctcagcctcccaagctgctgggattacaggcacccaccaccakgcccggctaatttttggtatttttagtagagacggggtttcaccgtgttggccaggctggtctcaatctcctgacctcgtgatccgcctgtctcggcctc

SEQ ID NO: 518000 - DNA, 201 bp, Homo sapiens
tgtaattgttttaggctgtcaggaaccacacccatataagataggaaacttaatcgataaatgttgcgtgtgttctactccaccaattgccccatctctcwtctctctccttctcctcaggcctccctattcctttagacacaacaatatttaaaataggccaattaacaaccctacagtgtcctctaagtgttcaagtga

SEQ ID NO: 518001 - DNA, 201 bp, Homo sapiens
taacataaaagttgctacccggaacaacatatttttcagtgtagattaaacatccttctactgaaagatgatgccatctaggatttttgtagctaaagagragaagtcaatgcccggtttcaaagtttcaaaaggcaaggctgctgactctctttttagaggctaatgcagctggtgactttaagttgaagccagtgctca

SEQ ID NO: 518002 - DNA, 201 bp, Homo sapiens
ggaaacgtgatcatcttgcagttgccttagtgttcatactattacatcacatgacaacttttttatattgtgttattttatacatatatatatatatatatttttttttttttttttgagacggagtctcgctctgttgccaggctggagtgcagtggcatgatctcggctcactgcaacctccacctcccgggttcaagc

SEQ ID NO: 518003 - DNA, 201 bp, Homo sapiens
gaaacgtgatcatcttgcagttgccttagtgttcatactattacatcacatgacaacttttttatattgtgttattttatacatatatatatatatatatwtttttttttttttttgagacggagtctcgctctgttgccaggctggagtgcagtggcatgatctcggctcactgcaacctccacctcccgggttcaagca

SEQ ID NO: 518004 - DNA, 201 bp, Homo sapiens
ataaaatatgtggcttgcaagtattttcttctggtctgcattttgtctttttaaaattttctctttttattagtatgttttgcattgctatgaaggaatacctgagactggataattcattaaggaaagatgtttatttggctcatggttctgcaggctgtatgaggaagcttttactcatggtggatggcacagggggag

SEQ ID NO: 518005 - DNA, 201 bp, Homo sapiens
tatgaatatccaattttcccagcaccacttattaaagaaggaattctttccccagtgtacgtacttggtatcattgttgattattaattggccgtaaacaygtggctttatttccgggttctctattatgttccactgatcttgtagaatgaaatttttatcttaatttcatgtagagcttgtctttatactgctttgtgg

SEQ ID NO: 518006 - DNA, 201 bp, Homo sapiens
ataaaaagcaggatatatatcaattggggtttggtcaggaaagcaaaaaccaccctagatatttcaagccatgaagaatttacttcaggcaattacaggcktacaaacctgttaggaagggctagacagtaatgtaagagaaactgccccattcagaaagtcagaaagaacaggaattgttgaaaaactgctgctgctgat

SEQ ID NO: 518007 - DNA, 201 bp, Homo sapiens
gtgggccataaaaagcaggatatatatcaattggggtttggtcaggaaagcaaaaaccaccctagatatttcaagccatgaagaatttacttcaggcaatwacaggcttacaaacctgttaggaagggctagacagtaatgtaagagaaactgccccattcagaaagtcagaaagaacaggaattgttgaaaaactgctgc

SEQ ID NO: 518008 - DNA, 201 bp, Homo sapiens
tcacacatgaatggtaaatagtggaatgatatctgtataatgtagattccatattgtagaagctattttgtttgcacatgatttttcccagtaagtaaatrtgttacattgttaattaataatagcagctgaactcagatacagttggctgtccattcatgggtccacatccatagattcaactaacggcaaattgaaagt

SEQ ID NO: 518009 - DNA, 201 bp, Homo sapiens
tagtggcttgtcccagcatggtagcagtatagttcataagaaagtggtcagattatggatataattttgatagcaggggcaaaataatttttgatggattsgttaaggggggtatgaaaaagagaagattacttccaaagtttttatctgagcaaatggttgctcctagggttttatctgaacaacaaagctgcaagcaat

SEQ ID NO: 518010 - DNA, 201 bp, Homo sapiens
gatggggtcttgctatgtttcccaagctggtctcaaacgcctgagcgcaagtgatcctcctgcctgggcctcccaaaatgtaggtattacaagagtgagcygctgtacctggcccccatccatttactttcaaccaatttgtgtctgtctctgggagactctacttcactgggtcttgccattttatctggattgacaatc

SEQ ID NO: 518011 - DNA, 201 bp, Homo sapiens
gagatggttatagtctctctcatgggagcaagtgggtatttgtatacttgaaaagcgcaggcacagatgttgctagatggagcaaatcatttcttggtctsattttaaaatgtgaactattgaatgaaaggctgatccagaaactgttgttgcttaacaaaagaaaatagtggaaagaatatactatgaaaaaaaagtggg

SEQ ID NO: 518012 - DNA, 201 bp, Homo sapiens
tataggggatatatatttgtgaaaaataatttttacttatatttttcagaggatttgacacgataagcctcatctgatggaagagaggaataaataattcmcctatatgtgtttgaggttgtgacagacttataaaatctttttaaaaaataaagctataatttatattaagttctgtggtttttctcttattacagtgtt

SEQ ID NO: 518013 - DNA, 201 bp, Homo sapiens
cagtaccttgaaaaatgcaactgggtgcgtggagataaggctttgtataatttgccattttaaaagttcccctgtcaaattcaaggtattaagttgctttrtggaaggctaagaccaagccctagatgcaagaccgggggaactgactgccggaacgtttgtgttgcagcgcctcgccccttgccggtgctctttcgcgaa

SEQ ID NO: 518014 - DNA, 201 bp, Homo sapiens
ggagtcaccatcctggtaagggtaattgactctgatcattatcacggtatggacagagaagaatatgtctggcattcaggggatccgctgatatgtctcayggtgttcctaagcccattattttaataaatgtacaaatacagtagccattgcctaaaaagggcatggtaaccagagtttcaaacctcttagataaaagga

SEQ ID NO: 518015 - DNA, 201 bp, Homo sapiens
actgaagaaaccaggccacttgtcttgcagtatgtttttttctgattttttctctgtggcattgttcaatagtagtttttttatagccataaatataaaayatacccattttatacccattttggacaattcagaaaatagtgcaacaaagataaataatttcatcacctagggatagtttttctttagttttcttttgca

SEQ ID NO: 518016 - DNA, 201 bp, Homo sapiens
catgttgtcatatgtcaaaatttccttcctttcaaagactgaataatactctattgtatttatgtgtatatacacaccacatattgtttattcatttattmcttgatggacactgcgttgcttccacatttttgctactgaaaataatgctgctgtaaatatgcattggtgtacaaatatttctttgagaccctgctttca

SEQ ID NO: 518017 - DNA, 201 bp, Homo sapiens
agattgctttgggtactatggccattttaacattattgattcttccaatccatgaacatggaatatcttttgtgtgtgtgtgtcctcttcaattttttgcrtcagtattttatagttttcatagtagagatctttcacttatttggttaattcctaggtattttattctagctattgtaaatgggattactttcttgattt

SEQ ID NO: 518018 - DNA, 201 bp, Homo sapiens
ttattaaataataagtgactagtgtgttttatgcttccaataaagaaagtattagagtgtggtatatgattgctcttggctcctaaatttattccacgccrtatataaatttttgttttagactcgagaacaggaagaactggaagaagctttagaagtggaacgacaggaaaatgaacaaagaagattatttatacaaaa

SEQ ID NO: 518019 - DNA, 201 bp, Homo sapiens
tagttataagtaagaaatttaaaacttgattttaaacatttataatttatatccgcatgattttttgtaaattttggtttggattcttagaagttcatatmacattttaatgaatgtttatgagtaaatttctgtattactcaaatacttgaatagtgaaaaataattaaaaattacagagtatttaaggtagatataaat

SEQ ID NO: 518020 - DNA, 201 bp, Homo sapiens
gtgtctggtttattttacttaacctgatgaactccaattccctccatgttgctgcaaatgacgtggtttaattcctttgaatggctaaatagtaatacattgtgtgtgtgtgtgtgtgtgtgtgtgtgtgtgtgtgtgtgcgcgccacatttttttaatccatttgtccatagatggatacttagattgattctacagttt

SEQ ID NO: 518021 - DNA, 201 bp, Homo sapiens
aaagatgctttgattatttttaaaattacaacaaagggtttagaatattatataaacttagttgataaagcagtggcagtttttttttattattatacttwaagttctgcggtacatttgtacaatgtgcaggtttgttacataggtatacatgtgccatgttggtttgctgtccccatcaacttgtcatttacattagtt

SEQ ID NO: 518022 - DNA, 201 bp, Homo sapiens
tgtctggtttattttacttaacctgatgaactccaattccctccatgttgctgcaaatgacgtggtttaattcctttgaatggctaaatagtaatacattgtgtgtgtgtgtgtgtgtgtgtgtgtgtgtgtgtgtgtgcgcgccacatttttttaatccatttgtccatagatggatacttagattgattctacagtttt

SEQ ID NO: 518023 - DNA, 201 bp, Homo sapiens
cttataatattgacttattatatatggattgtgtaagaatggtgaaaacgtagttgtttcatttaagttttgttttgtttttgatgctacccatgtaagtttttttttttttttttttttctttttgatggagtttctctctgtcgcctggctggagtgcagtggcacaatcttggcctactgcaacttctgcctcccagg

SEQ ID NO: 518024 - DNA, 201 bp, Homo sapiens
cttgtaactttttgtcaaggtttttaactttcttgcattgagttagaacgtgctcctttagctcagaggagtttgttatttcccagcttctgaagcctacytctgtcagttcatcaatctcattctccatccagttttgtgcccttgcttgagaggagttgtaatcatttggagaagaagaggcattctggtttttggaat

SEQ ID NO: 518025 - DNA, 201 bp, Homo sapiens
agatcccgtggatcttatttaaaattgtctccattgggaaatgaaacctcattgtatagctcaggttaactgagaaaacaatagattgttcagcagttccytttttttttttttttttttttttttttgacggagtctcgctctgttgcccaggctggagtgcagtggcatgatcttggctcactgttcagcagttctttt

SEQ ID NO: 518026 - DNA, 201 bp, Homo sapiens
tctccattgggaaatgaaacctcattgtatagctcaggttaactgagaaaacaatagattgttcagcagttcctttttttttttttttttttttttttttkgacggagtctcgctctgttgcccaggctggagtgcagtggcatgatcttggctcactgttcagcagttcttttacttttgttattcatttggttgtcagt

SEQ ID NO: 518027 - DNA, 201 bp, Homo sapiens
ggcaggagaatcgcttgaacctgggaagcagaggttgcagtgagctgagaccatgccattgcactccagcctgtgtgacagagcaagactctgtctcaccaaaaaaaaaaaaaaaaaaagatgaagaaacagaacttaggttctgagaagttttatttgtgtttaaagttttcaattgtggggacatttgaaagttcctag

SEQ ID NO: 518028 - DNA, 201 bp, Homo sapiens
tgtctgctcataaataggtggttgtcttcaatagtatttgtaattttgaagagttacatgtttaataactttctccctggttgacttttaaaggtcttggytgacttcttaaaagttttgttttggttttaaatgatatgttctacagaaacacaaggacaaattacaaaggttttaggagttatatctctgaacaggatt

SEQ ID NO: 518029 - DNA, 201 bp, Homo sapiens
ttttaaaatgttacctatttatatttgctttgtatatcaatgctacacttcttgttttgttttaggtatttaaaccatgtcagagctgcctcaccacaggmccttgctggaggctatacttcttctcttgcttgtcacagagcactacaggatgcattcagtgggcttttctggcagcccagttaaccatttataagattt

SEQ ID NO: 518030 - DNA, 201 bp, Homo sapiens
aactctcaggatgcctggctcgttgtaaagatactaagtataaataggtatagatacaaataaaaactataatagaccagtaaattgtgattgaaggtagrgtttgtgacttataactgttaattttgtaccgtgtagtttttactagttattttatctatagactcctatatagtaggaaaaaaacaactcattttcccc

SEQ ID NO: 518031 - DNA, 201 bp, Homo sapiens
agtattttgtgaagtaattttataaaactctcaggatgcctggctcgttgtaaagatactaagtataaataggtatagatacaaataaaaactataatagmccagtaaattgtgattgaaggtagggtttgtgacttataactgttaattttgtaccgtgtagtttttactagttattttatctatagactcctatatagt

SEQ ID NO: 518032 - DNA, 201 bp, Homo sapiens
ctctctttaaaaagttttattgtttccttttttcatttttttctccattatgccacttacttcaaagaattttgtttaattttttttttttttttttttttaaagagacagatctcactatgttgcccaggctggtcttgaactcctggcctcaagcaatccccctacctcagcctcctaagtagctgggattacaggcga

SEQ ID NO: 518033 - DNA, 201 bp, Homo sapiens
acttttgttctcacctaagccatccttagtttctgtacagctttattgcctcaacccaagaacttgctgctaccccataaattcttttttcttttcttttsttttttttttttttgagacagagtctcgctctgttgcccacgctgggtgcaatggcatgatctcggctcactgcaacctccatctcctgggttcaagtga

SEQ ID NO: 518034 - DNA, 201 bp, Homo sapiens
taaaaagtgcaaagtggaagttgactacactatcacctcccagaatagtttgatgtgcatccttcagatgtgtgtgtgtgtgtgtgtgtgtgtgtgtgtgtataaacacataaagatggcatgtattttcaaccttatgaaagtaatttttaaaaagcaatggagccacactctatattatgttctatggtttgcttaaaa

SEQ ID NO: 518035 - DNA, 201 bp, Homo sapiens
tgtcatggcatcttcttcttcttcttcttcttttttttttttgagatggagtctcgctctgttgcccagggtggagtgcagcggcactatcttggctcacygcaacctgcgcctcccgggttcaagcaattctcctgcctcagcctcccgaatagctgggactacaggcaaatgccaccatgctggactaattttttatat

SEQ ID NO: 518036 - DNA, 201 bp, Homo sapiens
gtaaaaagtgcaaagtggaagttgactacactatcacctcccagaatagtttgatgtgcatccttcagatgtgtgtgtgtgtgtgtgtgtgtgtgtgtgtgtataaacacataaagatggcatgtattttcaaccttatgaaagtaatttttaaaaagcaatggagccacactctatattatgttctatggtttgcttaaa

SEQ ID NO: 518037 - DNA, 201 bp, Homo sapiens
tatttaggttggtgcaaaagtaatttttgcaattacttttcattgcaaaaaccacagttacttttgcaccaacctaatagtgaagggtaagggataaagtrtaaggaggacattctcctgtttggaattattaaatagtggtctgctgtcatggcatcttcttcttcttcttcttcttttttttttttgagatggagtctc

SEQ ID NO: 518038 - DNA, 201 bp, Homo sapiens
tatatatatatatatatatatatatatatatattccttaatctatcaattttacttttttagaaatgaaagtaccaatattcagtggagaaggctaggaastaggaacaaaacgaatcagtggaagaaaggctgaatgaattgtggtataccatgggctattatgcagctatgaaaaaggatgcattcatgctctaggaga

SEQ ID NO: 518039 - DNA, 201 bp, Homo sapiens
tatttttttattttctttttttttttgagacttgagttttgcccttgttgcccaggctggagtgcaatggtgccatcttggttcactgtaacctccacctsccgggttcaagcgcttctcctgtttcagcctcccaagtagctgggattacaggcatgtacaaccacccccagctaattttttgtatttttagtagagacg

SEQ ID NO: 518040 - DNA, 201 bp, Homo sapiens
tccttgtatattgagctcacttttagcccctgacttttgttccaattttcttattcttcttttcaatcctgtcagttcctacttctaaatagattcactcrgaatatattgagcactgtccagagtggttggggaaagaaggagatccaggttaattggccatgctgtccttgggttcctatgtattttccttgtagaatc

SEQ ID NO: 518041 - DNA, 201 bp, Homo sapiens
ttttttttatggtattaagtgcctgttcaaatcttttggcaacatattaaaaaaaaaaaaaatatatatatatatatatatatatatatatatattccttmatctatcaattttacttttttagaaatgaaagtaccaatattcagtggagaaggctaggaactaggaacaaaacgaatcagtggaagaaaggctgaatga

SEQ ID NO: 518042 - DNA, 201 bp, Homo sapiens
ggcatcatattttttttatggtattaagtgcctgttcaaatcttttggcaacatattaaaaaaaaaaaaaatatatatatatatatatatatatatatatatattccttaatctatcaattttacttttttagaaatgaaagtaccaatattcagtggagaaggctaggaactaggaacaaaacgaatcagtggaagaaag

SEQ ID NO: 518043 - DNA, 201 bp, Homo sapiens
gatttcacccatgagccaattgcagaggcaacagaagaccagtgcaccaaccaggctgggtccctccgccagagggtgtcaccatctaagctgaaagtgtytggggagatcagacattgctgtctggtgctcctctctcagtggccatcatgtctttgacatctgcttaccagcataaattagcagagaagctcactatcc

SEQ ID NO: 518044 - DNA, 201 bp, Homo sapiens
ctgggattacaggtgtgaaccgccatgcttggcatcatattttttttatggtattaagtgcctgttcaaatcttttggcaacatattaaaaaaaaaaaaaatatatatatatatatatatatatatatatatattccttaatctatcaattttacttttttagaaatgaaagtaccaatattcagtggagaaggctaggaa

SEQ ID NO: 518045 - DNA, 201 bp, Homo sapiens
tgggtaaatctagaagttgaattgctgaatcatatggtaagagtatatttaattttataagaaaccgccaaaccttttttcagagttgttccattttatcytcccaccagtaatgtatgagagcttcagtttctctatattctcatcagcacttgctattattagacttacattttagttattccagtgggtgtgtcatgg

SEQ ID NO: 518046 - DNA, 201 bp, Homo sapiens
aagtaatcaggtagcgctttacagagaagatgagatctaagggatggacgtaacagatataaatagaggagagaaaaggaccctcaaaagagggaagcacytgaaccagagtatgagagaggaagttgtagtttggggacagtgaataaattatcctggcagcaccgaataaaggaagtatttaggaaaatgaagttgaaa

SEQ ID NO: 518047 - DNA, 201 bp, Homo sapiens
gaccctgtctttaaaaaaagaaaaaaaaaagaaaagaaaaggaacaaaacaccaaaacaccccctaccctgaaaaaaaaaaaaccagaatgagagaatgarctatgcataattcgatttcaataagatttcataggaatatcctgcctctaatctcaaaatgccttctcatccttttggtgtcaaatactggtggctcagc

SEQ ID NO: 518048 - DNA, 201 bp, Homo sapiens
tttgtgcttataaggaagaaaatttcatggacctgcccaaaatgaaatggttctatttagccatagcttagtaacctgatcctggagtggggtatctttayatgtaatttacagtgtagtatgtatatctttggaggtggtggggagtgccagcctatgcacatatctttatcctatatgcaaacataagagttcaagtca

SEQ ID NO: 518049 - DNA, 201 bp, Homo sapiens
actcacctcaaggaatttctggtggtgagtgggtctaggttataaagaatggaagattgcaaagggctggaattggtttgacttaaatctgtagacaattrtcgttgaacaggcttttgagtctaacttcccacctaattcattcagtaaagagtgagaagctactatgtgaaaggcaagagtttcttctaaatttcctaa

SEQ ID NO: 518050 - DNA, 201 bp, Homo sapiens
taaaaaaacttactatgttttggatatctttgaatatcagtctatagagacttattatttttaacagttgaataatattacattatgtggttgtaacatartttatttacaaaatcctctattgatggatatttaagctgtttccattttaaaaaatcattgtaaacaatgctgtaatgaacattcttaggcatatatctt

SEQ ID NO: 518051 - DNA, 201 bp, Homo sapiens
aacatgtaattgcaaacaggtaaagggtggtgaatgcactctctgagaggggatggaataggaatctcttctcacttttgttctcacctaagccatccttwgtttctgtacagctttattgcctcaacccaagaacttgctgctaccccataaattcttttttcttttcttttcttttttttttttttgagacagagtctc

SEQ ID NO: 518052 - DNA, 201 bp, Homo sapiens
ctgcaacctctgcctcccaggctcaaacaattctcgtgcctcagcctcttgagtggctgtgattacaggcatgtgccaccacacccagctaattttttttwtttttatttttagtagagatggggttttgtcatgttggccaggctctcttgaactcctggcctcaagtgaacctcccacctcagccttccaaaatgctgg

SEQ ID NO: 518053 - DNA, 201 bp, Homo sapiens
tgattcagtaccccgtcctccctttttttttttttgagatggagtttcactcttgttgcccaggctggagtgcaatggtgtgatcttggctcactgcaacmtctgcctcctgggttgaagggagtcccctgcctcagcctcccaagtagctgggattacaggaatgcgccaccacacctggctaattttgtatttttagta

SEQ ID NO: 518054 - DNA, 201 bp, Homo sapiens
actgactataatctacataatcactcagattatacaggccagccagttcaggaaggcagaagtggaggcttcttttcaaggcttcccctttctagatatgwttcttgccccaacgatggcatctgctttcctctggggatgggggtgagggtggggatggggaaacaacagtggtattccaagtgacttggataaaggtct

SEQ ID NO: 518055 - DNA, 201 bp, Homo sapiens
gctgggattacaggtgtgaaccgccatgcttggcatcatattttttttatggtattaagtgcctgttcaaatcttttggcaacatattaaaaaaaaaaaawatatatatatatatatatatatatatatatatattccttaatctatcaattttacttttttagaaatgaaagtaccaatattcagtggagaaggctagga

SEQ ID NO: 518056 - DNA, 201 bp, Homo sapiens
gggaggcctaggcgggcagatcacgaggtcaggagatcgagaccatcctggctaacatggtgaaaccccgtctctactaaaaatgcaaaaaaaattagccrggcatggtggtgggcacctgtagtcccagctactcaggaggctgaggcaggagaacggcgtgaacccgagaggcagagcttgcagtgagccgagatcgcg

SEQ ID NO: 518057 - DNA, 201 bp, Homo sapiens
ccaccttcagtacttggcaagatttgatgctcttgtgctcagtgacatcattcaggtatgatatttaattgattatactttggaaatttcaggatgatccytagtgattttcctattgaaaccactctggctgaatctcatgctctgtaagttgggtgtcaaaaggtccaatctaggctgggcgcggtggctcacgtctgt

SEQ ID NO: 518058 - DNA, 201 bp, Homo sapiens
gaagattatcattaaacttgcctggggtcctttataaaagtctggaaggattaagtttcttgggttccgttctatcttaagggttacagaaattaaggagrgagtggtaaatatcggtaaatgttttttgaaagaatgaatatcctctccgcctcaaagggactagctcttaaactctatttttcttttcctttatttttc

SEQ ID NO: 518059 - DNA, 201 bp, Homo sapiens
ttgagaattacccataattgagagttggtagagaattaaagttagtaatgagtgcaaagctcctgacatatgttaggctttaataaaatacatccctagcytccactttgcgcttcactccattgccccataaagtaagatgcacattggaattgggcactacagtctgcaagtgggtgaatgggaggaagaattattatg

SEQ ID NO: 518060 - DNA, 201 bp, Homo sapiens
gctttccccctgatttgtgctcactttgtccactgcactcatgagatgtgcccagaggaggtaggtatcctgatctccagaccctgtcatctttctagtcrtcatccttatcacccaaaacacaattccaagggttgattttggtcccagaaagggtataaacatagatgtatgatatgagtccctaaatatctcagcttg

SEQ ID NO: 518061 - DNA, 201 bp, Homo sapiens
ctccttaaggtgctcaaactccgcagctcacttgtgtcagctttttaccaataatcttaagtgataggaatttgaagttgattccttttgttctgtattcycttttgttcttttgtggaaagccatttggattttacatagtcttcgcttctctggggtagttagcccatatgtctagtttcaatctcctctctttggaaa

SEQ ID NO: 518062 - DNA, 201 bp, Homo sapiens
gaaaacctgatgtggcatgtgacctctcagattgtggagctgaaggtactatggaaacaatcccttggggaaaagatcctaccttgaggaaagagggtggktataggagactgggggggaagatgtaacattggtctcttcttttcctgcttaatgtctctgtgttcctggactacagaagctggtggtggaaaacatgga

SEQ ID NO: 518063 - DNA, 201 bp, Homo sapiens
tcagatacttgggggaggtattttgaaaggagttgggggtccagtggtgaggggtcttgctggtgtgcccctacaataatatagtgtggatagttattctmccctctctaatgttgcctatagctgcatgccagccacgcatgatctctattcagccctggcgtgccatggctactcaggattataatatacttccaagga

SEQ ID NO: 518064 - DNA, 201 bp, Homo sapiens
tagagagagtataggtgtctctttagagaagtttggtggtgtgggaaaataaacagaattcggtggattgtcagggtcaagcaaggatcttcttagaatamgggaggctttgaacttatttgttgggagaagagaataagccagtggagaaggagagattaaagtattaaatagataactgatacagtgaaattctaaaag

SEQ ID NO: 518065 - DNA, 201 bp, Homo sapiens
ctgcagcagacacaaccactggattcctgtggggaacagacaatcaccacactctacacaaactggtcagtgttgcttaggcttttccactgccttacttygtgttggcactttttcctttacacggtaggacctcagggcccgagcattttagctcccagggtcatagactccaaaatggagggttgcttctccttgagg

SEQ ID NO: 518066 - DNA, 201 bp, Homo sapiens
cctgtggggaacagacaatcaccacactctacacaaactggtcagtgttgcttaggcttttccactgccttactttgtgttggcactttttcctttacacrgtaggacctcagggcccgagcattttagctcccagggtcatagactccaaaatggagggttgcttctccttgaggaatggagcaataacctgagacaagc

SEQ ID NO: 518067 - DNA, 201 bp, Homo sapiens
ctttgtgttggcactttttcctttacacggtaggacctcagggcccgagcattttagctcccagggtcatagactccaaaatggagggttgcttctccttsaggaatggagcaataacctgagacaagcccagatccccttctgtccaccacgaagtttccttctcaccctcactggaacatccttcagcctaccctgcag

SEQ ID NO: 518068 - DNA, 201 bp, Homo sapiens
accctatagctgttgtacaaatactccagtgccttctgagtcccatctggggcctctgtaactctgttccagagatgcgggccttggcagaactcctgggyccctatggcatgaagttcctgagtgaaaacctgatgtggcatgtgacctctcagattgtggagctgaaggtactatggaaacaatcccttggggaaaaga

SEQ ID NO: 518069 - DNA, 201 bp, Homo sapiens
ttgttgatcctctacactctgaagagatctgaagctgggtctctggcaaaaacttttctgtggaagtgcttccctaaaaggaaaaaaaatagataattagstatttagattaaaaagggtaggtgtcttctgagctgctcctggggtagttcatgctgtggtggttgtgtgtgtgtgtgtgtgtgtgtgtgtgtgtgtgtg

SEQ ID NO: 518070 - DNA, 201 bp, Homo sapiens
acaaatgccctacctgaggttctcatctcttggccccatctctttcaggtggtggaggagtcatccttcctgaccctggacatgctggagtcctgtttccmttatgtcctgcttcgaaatgcctatcgggaggtgtctcgggccttccacctaaactgaatgcctgccagtacccactgaagagccctttggaccttccta

SEQ ID NO: 518071 - DNA, 201 bp, Homo sapiens
ctgttgtacaaatactccagtgccttctgagtcccatctggggcctctgtaactctgttccagagatgcgggccttggcagaactcctgggcccctatggmatgaagttcctgagtgaaaacctgatgtggcatgtgacctctcagattgtggagctgaaggtactatggaaacaatcccttggggaaaagatcctacctt

SEQ ID NO: 518072 - DNA, 201 bp, Homo sapiens
gtttcctactggggcaaggaggaagtgcccttcagagatgttcactgcccacctactctactacattgtttgttacaagttctctcttgctttaacccctyctgctttgatatctccacaacccagagcagagggtcagttagtctccgtcaattctaggttacatgacaactgattggcccagacttaggtgggttttcc

SEQ ID NO: 518073 - DNA, 201 bp, Homo sapiens
tgctagttcaataaagtagtggtttggagaagggaaaggagaggtgatgaagtcccaataatgtggtggcaatagtgatacaggacaagagaaaacaaatrtaaggaacatagagagcaaagagtctaagataatgctgggattctgagcatgggtcactagtagaaaaaaagagatgtggttaggagaatcaaatattgc

SEQ ID NO: 518074 - DNA, 201 bp, Homo sapiens
gactgtgttggctgatgaaccgggactactgggtcctaaggcaagaggaagaaatgttgggaggggaatgatggccagtgataagagactgtgtagctacrtggcactcacgagattttgcctttctgagtcttttgtcattcatttgtatgtatatatgcgattcccttgaacattcttggagtatcccaaaaccttttg

SEQ ID NO: 518075 - DNA, 201 bp, Homo sapiens
tgttcccaaagccctaaggttggcctagaggtttggcctcagtgttaactctaaattagatcagtcttgcccttagtctgtcccttctgtattatcttccyttaagtggtacttgagaaccttttccctttcatttgtggagcagaccagccccacctttcccatcccctcccctgccataagcattttgccaaaaaacac

SEQ ID NO: 518076 - DNA, 201 bp, Homo sapiens
tagggtttggaaagatcctgcctgtgagggctgcccatgctcccaccagggtataggctggactctctgaggactgggaaggtgaggcaagggccctaatrggtagcatggtcaaccccattgtgcttgtgtcaatcctcaggtatggcaagagagtggcagacataaaggagagcaaggaacatgtaattgcaaacaggt

SEQ ID NO: 518077 - DNA, 201 bp, Homo sapiens
gcagctgggccaggagactgacaagcttaaaaccagaaatcgagaatccatttctctgctcatgcgcttggtaagtaccttatttaaattggtgtgagaayagggaatggaagggccagagggagacttctgtttagggtctttgcatccttgccattcttgtcacccaaaagcattaactaaggacttaactctgcataa

SEQ ID NO: 518078 - DNA, 201 bp, Homo sapiens
tctgtgtctcagtttcctcatctataaaaatgaggataataactgtctctagcttattaggttactatgaggtttacatgagataatatgtgtagtaaaakcctagcacagcacctggaacacaatatacactcaacaattgttactgtatttgccattatgattgtaattctaattttttttttttaaatcacctagagc

SEQ ID NO: 518079 - DNA, 201 bp, Homo sapiens
ccagacttaggtgggttttccctcctgtaccatttgggggtactctgccttttattgggagggactaatttaaccccaaatccttttgtcagcctgggtayagctgttgctccaggaagggatttctcttctggatcttaaatttcacagacctcattaggttgtatggccctgagagtgggtatccttgagggagtacaa

SEQ ID NO: 518080 - DNA, 201 bp, Homo sapiens
tttaaagttgaaaattctaatagtctctaccccctccataggctctttttgctttcatggccctgtccttcattcgtgatgaggtcacctggctggttcgycacacagagaatgtcaccaagacaaagacacctgaggactatgctgactcgttagtacttgacatggctaagaaccttgtccttagatggactggggaca

SEQ ID NO: 518081 - DNA, 201 bp, Homo sapiens
atggttttccctgctgggatggcccacagccagagatcatagctagagctccttcctatctggatttgtcactagtgtttctgacatgggatttccccagrcaggctttatttaattcacaaagggccagagcaggctgggtggcaagggataaagcactgggactactagagaaaagaaggatttagaggaataaagaac

SEQ ID NO: 518082 - DNA, 201 bp, Homo sapiens
ccaggctcagagaggttcaatgacttaaggtcttacgtctaataaaactagtatagctagtacagcaagagtcaaacccaagtgtcatataaaggaacacrggaaagtatagattcttataggaaagtaaagtaattagttatcatttgtggtaagtcttggtgtgagtaccagtggagagagggtaaatgtcccatggac

SEQ ID NO: 518083 - DNA, 201 bp, Homo sapiens
agtgctgaaggctttgtgggattcaagggtcagtgagaggtgaggaagtagagagagtataggtgtctctttagagaagtttggtggtgtgggaaaataarcagaattcggtggattgtcagggtcaagcaaggatcttcttagaatacgggaggctttgaacttatttgttgggagaagagaataagccagtggagaagg

SEQ ID NO: 518084 - DNA, 201 bp, Homo sapiens; identical to SEQ ID NO: 289944

SEQ ID NO: 518085 - DNA, 201 bp, Homo sapiens
gtcattaaaaaccattgccagagttagaaagagtaaatctgagattaataattagaagttacaggaggtggatttgggcatatgcatgaaaaaactttctratgattactgcttctaaggaatggaagagatgttcgaagggtgttcagttctccatcactaagagcagcaactaacttgtgtgatttatagtttagggag

SEQ ID NO: 518086 - DNA, 201 bp, Homo sapiens
ggagtcagccataaacagcctgatgacagtggtgtctggaggctgcctaggaaaagagaggttaatctcctggcatacatcacctgcctttgctctaggtygtttccctgccccttgcaatctctcccctagcactcctggcaacctgttgtctgcactgggaggtcagtgagatccaggctggcttataggcaacatgta

SEQ ID NO: 518087 - DNA, 201 bp, Homo sapiens
acctgagacaagcccagatccccttctgtccaccacgaagtttccttctcaccctcactggaacatccttcagcctaccctgcagttatttgaccttttcyctctaatatctagttcttaacctttcttttttggattcttactgtttcaatttcaaatgatctctcttcctctttccaaagttctcttatttctcttttt

SEQ ID NO: 518088 - DNA, 201 bp, Homo sapiens
gctcaaagccatttacaatctggttgggaaaataaattaatgcaaatgaaacaatgagagaacaatacaaaatagtgggttgtgtggtatagcacccaaaytccccatagtgattttgtgctttctccctccacataatcaccttgacactgtttatttcttcccatctcacacttaacacttttattttccattacacat

SEQ ID NO: 518089 - DNA, 201 bp, Homo sapiens
tgtgttggctgatgaaccgggactactgggtcctaaggcaagaggaagaaatgttgggaggggaatgatggccagtgataagagactgtgtagctacatgrcactcacgagattttgcctttctgagtcttttgtcattcatttgtatgtatatatgcgattcccttgaacattcttggagtatcccaaaaccttttgtat

SEQ ID NO: 518090 - DNA, 201 bp, Homo sapiens
atccctagtgattttcctattgaaaccactctggctgaatctcatgctctgtaagttgggtgtcaaaaggtccaatctaggctgggcgcggtggctcacgyctgtaatccaagcactttgggaggcctaggcgggcagatcacgaggtcaggagatcgagaccatcctggctaacatggtgaaaccccgtctctactaaaa

SEQ ID NO: 518091 - DNA, 201 bp, Homo sapiens
gagtgtagtggtgcaatcacagctcactgctgcctcgacctcctaggctcaggtgatcctcccacctcagcctcttgaatagctggggctaaaggcacatkccaccacacctggctaagtttttatattttttgtagagatggggtatccccatgttggccagggtggtctcaaactcctgggctcaagctatccacccac

SEQ ID NO: 518092 - DNA, 201 bp, Homo sapiens
agtttcagggccatggcccaagagggacttcgggaggtgagttggtggggaggggtctgtcacagagtcacagatacctctgtgggtagggtttgtatgakaatttgtggaagtattgcgggaatcagttttaacttctgcttcagaaggggttggtgagcattgagaagagggagcgtaatttggcagagatcctagaag

SEQ ID NO: 518093 - DNA, 201 bp, Homo sapiens
gaggaactgctatactgttttccacagtggctgtactcttttacattctcaccaacggtgcataagggctataattcctccacatcctcgccaacaattgytatttcgtttttttgacagtagccatcccagtgggtgtgaggtattatctcatctaagtttttatttgaatttttgctaatgattagtgataatgagcat

SEQ ID NO: 518094 - DNA, 201 bp, Homo sapiens
ttagtgataatgagcatttttcataggcttattggccatttatatatcttctttgaagaaatgtctgtttcattctttgaccatttttgaattggattttktgtgtgtgttgagacttaggagttctctatacaggttgagtattccttatggaaaattcttgagaccagagtgttttgaatttcatatgtttgcagattt

SEQ ID NO: 518095 - DNA, 201 bp, Homo sapiens
atgtttgcagatttcagaatatttgcattaggcagttgagcatccctaatatgaaagtctgaaatttgaaatgtttcaatgagcatttcctttgagtgtcwtgttggtgctcaacaggtttcagattttggagcattttggattttcgggttagggaagctcaacctgtataaactatatatctttgcattatttgagctt

SEQ ID NO: 518096 - DNA, 201 bp, Homo sapiens
tcttacccaaccctaatataattatcatactcaggaaatcatacacaggaaatataacatacacaggaaatatatcatacacaggaaatataacattatgrctgggtgctgtggctcacgcctgtaatcccaacactttgggaggctgacggggatgaattgcttgagcccaggagtttgagaccagcctgggcaacatgg

SEQ ID NO: 518097 - DNA, 201 bp, Homo sapiens
ccagtttcattgtcaacggcggcaatttctgcggatggcagtgaaggagctggagactgtgttggctgatgaaccgggactactgggtcctaaggcaagargaagaaatgttgggaggggaatgatggccagtgataagagactgtgtagctacatggcactcacgagattttgcctttctgagtcttttgtcattcattt

SEQ ID NO: 518098 - DNA, 201 bp, Homo sapiens
ggcatcacattttctctgttagtcactagggtcgatgtgtggtctaatttaatcttcacaacaactatgtgaggtaaatgttattatgccagttttatagrtgggaaaatgagggatcaaagaggttaagtaacttttagtcaaggtcacacacttaataagtggtgttgctaggacttgaacccagatctgtctcactcc

SEQ ID NO: 518099 - DNA, 201 bp, Homo sapiens
acacaggaaatatatcatacacaggaaatataacattatggctgggtgctgtggctcacgcctgtaatcccaacactttgggaggctgacggggatgaatygcttgagcccaggagtttgagaccagcctgggcaacatggtgaaaccccatctacacaaaaaaaaaaaaaaaaaaaaaaaaaattagctgggcatggtag

SEQ ID NO: 518100 - DNA, 201 bp, Homo sapiens
ttcaaggacttctgcaagacagggccttcctggcccctaagctggctgggcccatgtcctgcaatgttcccgagtctgatctgatagggcagctgtgcccsttattggtaattacctgtccagtacatgtttggtttcacttgacaattttctaccactgcatttcttgtttttaagagtactatgaaaagagtgctggat

SEQ ID NO: 518101 - DNA, 201 bp, Homo sapiens
atcagcaaatcctccttccttgctatgggaagggcttatgttctaaagggtgattcagtgtcaggcttatgagactgagagtaaagttgatgaggaagagraggctcagaagtatctgaacaactactctatatgtttatatttttctgcttgaggggatagagatccctcctccatctgcatctgcatatagaactgctt

SEQ ID NO: 518102 - DNA, 201 bp, Homo sapiens
aaggtgatgaacctcattgtcttccactcccgaatgctggactccgtagaaaaattgctggtggaaacttctgatctgtctactttctggtatgtcttggytcagagctctctttaaaaagttttattgtttccttttttcatttttttctccattatgccacttacttcaaagaattttgtttaattttttttttttttt

SEQ ID NO: 518103 - DNA, 201 bp, Homo sapiens
aggcagcggattccactgtaggtcatatccaatttcttaaaaaaaatgttaaaaattttagccaaaatttgacttcctgtaactctcaccatggatcttarttttgcctctgggaaaactcagaacaaatacaataggccctagaattttccattctaaatcctccatggaggaattttgttcatatacttctgatacatg

SEQ ID NO: 518104 - DNA, 201 bp, Homo sapiens
tgcatttctgttcccaggtaatcttgatgctgcttgtctgggaatctcactagaaccaatggtctagatttctagggactggaacttaaaactaggcagcrgattccactgtaggtcatatccaatttcttaaaaaaaatgttaaaaattttagccaaaatttgacttcctgtaactctcaccatggatcttaattttgcc

SEQ ID NO: 518105 - DNA, 201 bp, Homo sapiens
agcatagtgacagagcaagaccctgtctttaaaaaaagaaaaaaaaaagaaaagaaaaggaacaaaacaccaaaacaccccctaccctgaaaaaaaaaaaaccagaatgagagaatgaactatgcataattcgatttcaataagatttcataggaatatcctgcctctaatctcaaaatgccttctcatccttttggtgtc

SEQ ID NO: 518106 - DNA, 201 bp, Homo sapiens
gaacctcattgtcttccactcccgaatgctggactccgtagaaaaattgctggtggaaacttctgatctgtctactttctggtatgtcttggttcagagckctctttaaaaagttttattgtttccttttttcatttttttctccattatgccacttacttcaaagaattttgtttaatttttttttttttttttttttta

SEQ ID NO: 518107 - DNA, 201 bp, Homo sapiens
gtttcttcaggaaaattaagtaataacttgcccataggctttataaagtgttttcatggatattttctcctgcgatcctcacagcaattctgtgaagtaggacccctgtaacagataacttctgtttgctgactttattcacttttcctcttttcctttttccctctcaccagatacttcatctcctgaggaggaatataa

SEQ ID NO: 518108 - DNA, 201 bp, Homo sapiens
taggaggatttcttgagcccaggagtttgaaaccagcctggacaaaatagcgagactctctctttctctacatatatataaaagcatctttaaaaaaaaaattaaacctgtgatccaaaagtcctggctatgcattccttctgtcaagccattgtgtcctgcgaatcctctctagaatgttattttcttctctccaggtga

SEQ ID NO: 518109 - DNA, 201 bp, Homo sapiens
agtaaggggcagtaagacattgcactaggcttccagtaccagcccctgctgtggttaagtggctccggacaagcacttaacccccttgcctgtaaaaccaygatgatccttcctatgccacataattcagaggactcataacatcatcataatactcctttatccatatattttccaaagtttttataatgtatcttattt

SEQ ID NO: 518110 - DNA, 201 bp, Homo sapiens
gcctcccgggttcaagcaattctcctgcctcagcctcccgaatagctgggactacaggcaaatgccaccatgctggactaattttttatatatatatatatttttagtagagatggggtttcaccatgttagccaggatggtctcgatctcctgaccttgtgatctgcccgcctcagccttccaaagcgctgggattacag

SEQ ID NO: 518111 - DNA, 201 bp, Homo sapiens
atcatagctagagctccttcctatctggatttgtcactagtgtttctgacatgggatttccccaggcaggctttatttaattcacaaagggccagagcagrctgggtggcaagggataaagcactgggactactagagaaaagaaggatttagaggaataaagaactgagactctgcgggatgtgtgttgattatgaaaaa

SEQ ID NO: 518112 - DNA, 201 bp, Homo sapiens
cgcctcccgggttcaagcaattctcctgcctcagcctcccgaatagctgggactacaggcaaatgccaccatgctggactaattttttatatatatatatatttttagtagagatggggtttcaccatgttagccaggatggtctcgatctcctgaccttgtgatctgcccgcctcagccttccaaagcgctgggattaca

SEQ ID NO: 518113 - DNA, 201 bp, Homo sapiens
tggttttccctgctgggatggcccacagccagagatcatagctagagctccttcctatctggatttgtcactagtgtttctgacatgggatttccccaggyaggctttatttaattcacaaagggccagagcaggctgggtggcaagggataaagcactgggactactagagaaaagaaggatttagaggaataaagaact

SEQ ID NO: 518114 - DNA, 201 bp, Homo sapiens
agtcttctgggttttccagactacccacctttcctgggtttgagtcaggcttggtaaaggggagtgtgtgtatgtgtgtgtgtgtgtgtgtgtgtgtgtgkatacagatgcacagttacattattacttaacctttttatttttcatatgcaaattacatacaatggggataaaaatagtttctttacagaagtgtcttaa

SEQ ID NO: 518115 - DNA, 201 bp, Homo sapiens
gagttcgactccaggcagtcaaactccaggaactgggggcttaagcactgtacagcgctgccttccagtgtctagaagtgcttttgtgtctcagggggagrcaggtaaggagtgtgtagtgaatgagatgggaagcctttccctttctcaagagggtttgaaactacaagatcctttttaataggtttgtttttaccaact

SEQ ID NO: 518116 - DNA, 201 bp, Homo sapiens
gatggccagtgataagagactgtgtagctacatggcactcacgagattttgcctttctgagtcttttgtcattcatttgtatgtatatatgcgattccctkgaacattcttggagtatcccaaaaccttttgtatctctttttttggcactatacgtagtatgtggtgtattaagattacttttatacatgtcttatcctc

SEQ ID NO: 518117 - DNA, 201 bp, Homo sapiens
gtttaaggaacttgcctaagtccacacattcataaatagtaggacttggagttcgactccaggcagtcaaactccaggaactgggggcttaagcactgtayagcgctgccttccagtgtctagaagtgcttttgtgtctcagggggagacaggtaaggagtgtgtagtgaatgagatgggaagcctttccctttctcaaga

SEQ ID NO: 518118 - DNA, 201 bp, Homo sapiens
gctttcatggccctgtccttcattcgtgatgaggtcacctggctggttcgccacacagagaatgtcaccaagacaaagacacctgaggactatgctgactygttagtacttgacatggctaagaaccttgtccttagatggactggggacagggaggcatcagatgaccttaggaggtctcaatttctgccctgatatcac

SEQ ID NO: 518119 - DNA, 201 bp, Homo sapiens
ctggaatacagtggcgtgatctcggctcactgctgcctccgcctttgggttaaagcgagtctcctgcctcagcctcctgagtagctgggattacaggcacrtgccaccacgcctcgttaatttttgtatttttagtagagatgggggatctcaccatgttggccaagctggcctcgaactcctgacctcaaatgatccacc

SEQ ID NO: 518120 - DNA, 201 bp, Homo sapiens
attagacagacttggtttcaaatctcagctttaccacttacaaactgtatgactttagataagaaactctttaaattccagtttccttatctataaaatgrggaaataagatttactgtgtgaggcgtctgtgagaattaaatgagataatgcatggacaacatctagcttggtgtttagcatatagtaaggcaatagacc

SEQ ID NO: 518121 - DNA, 201 bp, Homo sapiens
tgggtgtaggctggagttgtagaaaggcattcctagcaaatgaggaagtatagacctagacagaggtcatgtagcatacagggaaaatcaaaagctctggrttcaagttctagtaccattccttactagctctatgatcttaggccagtttctttatttttctgcattcattcagcaagtatttatgatgtcacctggctc

SEQ ID NO: 518122 - DNA, 201 bp, Homo sapiens
ctgttttcccacctacagttgggtttcttctttgtcatgggtgcctcaactccaatagccagtgccagaagctgtggaagctgtgtctgcagggctccctstacatcacccttatccgtgaggatgtgctgcaggtgcacaaagtcaccgaggacctgtttagcagtttgaaagggtgagagacacgagagccaaactgat

SEQ ID NO: 518123 - DNA, 201 bp, Homo sapiens
tctgggttcaagttctagtaccattccttactagctctatgatcttaggccagtttctttatttttctgcattcattcagcaagtatttatgatgtcaccyggctccccgccacattgcggaaacaagcatggagacggggcactgcctgcacagggcacattttgggggacagctaccctgtctggtgtgttaggcaagt

SEQ ID NO: 518124 - DNA, 201 bp, Homo sapiens
actcaatgtttagctcccacttataagtgagaacacgcagtatttggttttctgtttctgcataagtttgcttaggataatggcctccagctgcattaacrtggcattttttgaggtgtgttaagtaggctagcctggattatgttactgagtggttttgggtggggctttgatgcttccacgtgtacttgacctcttccc

SEQ ID NO: 518125 - DNA, 201 bp, Homo sapiens
agccaagggataggttgctgaagggcgtgggggccactatggcagcaggtcccaatgagaagatgggcgctagatggaagaagaacagctctgagaaggcrgggatgtcctcagtcctgaaggcaggaaggtggtggctagattgcagaatattctttgcttttggaaagatggagcagttctaggaaagggagggagacc

SEQ ID NO: 518126 - DNA, 201 bp, Homo sapiens
ctagatggaagaagaacagctctgagaaggcggggatgtcctcagtcctgaaggcaggaaggtggtggctagattgcagaatattctttgcttttggaaasatggagcagttctaggaaagggagggagaccacctggctcctaagccccccaggaattggggtggtcaactgagtgctggttgctgcgacaacagccttc

SEQ ID NO: 518127 - DNA, 201 bp, Homo sapiens
tctcaggggccactggggtatgggtgcagtgaggagaagcagttccctccccaacacctttatgaatgccacctcttcctcccacccctatgttccctccycagaaactgcagaatgcatccctaaaactcacgagagaggcagtaaggaacccagcacaaaagaaccctcaacccatataccaccactggattccaaggg

SEQ ID NO: 518128 - DNA, 201 bp, Homo sapiens
ttccaccttcccccagggaagaccatgtatcccagcaagtgaggagtatcccttgttcttaaagcctcttctcctatgcctcccttatctgtgaagaagartactttttatggtctagttttcattcctccttattgccagctaatgtcccctccttgttcagatctcagtggatgggaaagtcaaacacccagcaatgtg

SEQ ID NO: 518129 - DNA, 201 bp, Homo sapiens
gaagcagttccctccccaacacctttatgaatgccacctcttcctcccacccctatgttccctccccagaaactgcagaatgcatccctaaaactcacgaragaggcagtaaggaacccagcacaaaagaaccctcaacccatataccaccactggattccaagggagccaactcggtaagaccccagggctgggctgcca

SEQ ID NO: 518130 - DNA, 201 bp, Homo sapiens
tgctgaagggcgtgggggccactatggcagcaggtcccaatgagaagatgggcgctagatggaagaagaacagctctgagaaggcggggatgtcctcagtmctgaaggcaggaaggtggtggctagattgcagaatattctttgcttttggaaagatggagcagttctaggaaagggagggagaccacctggctcctaagc

SEQ ID NO: 518131 - DNA, 201 bp, Homo sapiens
gacagcaagccagagatcaatgcattagagcagatatgcttagatggagagctggggccaggaccagggggaggtggagagacagaacaggggaatggggscatgcagggaggcgaggtggtcttctggatccttaggattagctctccccaggggagggggaggagcccagggatgttcaccctggttcaccaatgtaac

SEQ ID NO: 518132 - DNA, 201 bp, Homo sapiens
gattgcacccaacttggtcctggggccctctcaggggccactggggtatgggtgcagtgaggagaagcagttccctccccaacacctttatgaatgccacytcttcctcccacccctatgttccctccccagaaactgcagaatgcatccctaaaactcacgagagaggcagtaaggaacccagcacaaaagaaccctcaa

SEQ ID NO: 518133 - DNA, 201 bp, Homo sapiens
cccaggagtcccgcccacctgggatcccagacacagaagtggagtcaaggctgggcacctctgggacagcaaaaagtatgttcaggctggggagggccccwggcatcctatttcccagcccagcaggaggcaagccttacccactgcggggaggggaaagagttggagcctgggagaggcctagtagtaggcaaaaactgt

SEQ ID NO: 518134 - DNA, 201 bp, Homo sapiens
gtggttggggaagcaggcgttttcttaccccactttttgaagctcacacctaccccaggctccaatccaaaagcctggcaaggcagaggaggaaggcaagsggggctggagggcatggggggctagagggcaagggaggggtctggagagcaagggggggctggcgcccatctgtgctctgtgcccttcacagtccacttt

SEQ ID NO: 518135 - DNA, 201 bp, Homo sapiens
ccctgttcccttcagagatagatgaagaccggatccccaacccacatctcaaggtgagctggcccatcccactaagcccagcccaaaaaacccccacattsattaggggattattccttaaaaccctgccgcccatctctaggatctttttgactcccgcttccctgtacctctaccccccaaatgtgcatgagtgaacat

SEQ ID NO: 518136 - DNA, 201 bp, Homo sapiens
ttcccccataacaggtctgagagaggaggaggtatcttgggatcaagactgcagtttgggaatgcatggacaccggatttgtttcttattccttcactttkggggaaaatctcttgtttttaaaaagtgataaatttggtgttaggtccttggcactttccttcttttccaactgggagaatcctttctccctgccttctt

SEQ ID NO: 518137 - DNA, 201 bp, Homo sapiens
gctcctggaatgggtgagagcagtaggccgtggattttttgataaaggggatttggaacccgaagggagatcctcacctgcccagctgaagtgggcagtgkctctccctgcctggaggatgcattgatgagataacttcctgagctttgatttcataatccgcagccccctgcatagactggacacaggaaggactgctct

SEQ ID NO: 518138 - DNA, 201 bp, Homo sapiens
ctaaggcctgtgccgtgtccagctgtgactgtgcggtgggctccatctgctggacaaaaggggaactgcaccatggcacttggcccatgggaaagagggtrtggtggtgtgccgatacctcctcgcctgccctccaagccccagctgccttccttttggattcccaagcttcaggatgtgttccctcttccagctgtggga

SEQ ID NO: 518139 - DNA, 201 bp, Homo sapiens
ttggaagctctgagttatagagcacagagtggcaggcggtggaggggtgcccacagcttccagatccttggcatgactgctttggaaagaaatccgaggcraagttatcacatgctcctgagagctaggatttgggataggtatgagaaaaggaaaagagaccatctacttatttcccactagttcaggtgcctgggaggt

SEQ ID NO: 518140 - DNA, 201 bp, Homo sapiens
aggcggggatgtcctcagtcctgaaggcaggaaggtggtggctagattgcagaatattctttgcttttggaaagatggagcagttctaggaaagggagggrgaccacctggctcctaagccccccaggaattggggtggtcaactgagtgctggttgctgcgacaacagccttccagatttctccagcaactgagatgctg

SEQ ID NO: 518141 - DNA, 201 bp, Homo sapiens
ctctgacagacaaaaagaaatggatagctgcagcaagaaggattgagattagactttgtgtaggacttctggctcctggaatgggtgagagcagtaggccrtggattttttgataaaggggatttggaacccgaagggagatcctcacctgcccagctgaagtgggcagtggctctccctgcctggaggatgcattgatga

SEQ ID NO: 518142 - DNA, 201 bp, Homo sapiens
tatttgcttatttgcctattgctccatctctttgtaatctctgtccatttgcctagacattcccattcctaaagaatatcaatttcccacaaggtcagttmtctgtttctctcaacaagctgccaggctctggctggccaccccccacctgaaaaaaactttgtgacctcttgggatgaggtggagagagtgttttttgtc

SEQ ID NO: 518143 - DNA, 201 bp, Homo sapiens
agttccctccccaacacctttatgaatgccacctcttcctcccacccctatgttccctccccagaaactgcagaatgcatccctaaaactcacgagagagrcagtaaggaacccagcacaaaagaaccctcaacccatataccaccactggattccaagggagccaactcggtaagaccccagggctgggctgccaggtca

SEQ ID NO: 518144 - DNA, 201 bp, Homo sapiens
gcagagcctgagaagcgtcaggtcccacttctgccatgcagctactatgagccctcggggcctcctcctgggcctcagcttgcccagatacatacctaaawatatatatatatatatgagggagaacgcctcacccagattttatcatgctggaaagagtgtatgtatgtgaagatgcttggtcaacttgtacccagtgaa

SEQ ID NO: 518145 - DNA, 201 bp, Homo sapiens
ctccctttctctgtgtccccagagctccagatgatggttgaacatcacctggggcaacagcagcaaggagaggaacctgagggggccgctgagagcacagraacccaggagtcccgcccacctgggatcccagacacagaagtggagtcaaggctgggcacctctgggacagcaaaaagtatgttcaggctggggagggcc

SEQ ID NO: 518146 - DNA, 201 bp, Homo sapiens
ctactccttgtttgccaaatatttgcttatttgcctattgctccatctctttgtaatctctgtccatttgcctagacattcccattcctaaagaatatcartttcccacaaggtcagttctctgtttctctcaacaagctgccaggctctggctggccaccccccacctgaaaaaaactttgtgacctcttgggatgaggt

SEQ ID NO: 518147 - DNA, 201 bp, Homo sapiens
accccccaaatgtgcatgagtgaacatatacacatgcaccccacacacacacactcacatacacacacacactcacagtctccttgctcaccattgtcgasgtggttggggaagcaggcgttttcttaccccactttttgaagctcacacctaccccaggctccaatccaaaagcctggcaaggcagaggaggaaggcaag

SEQ ID NO: 518148 - DNA, 201 bp, Homo sapiens
gaggggagaggggtggtcgagttgtaggctgaggctcccttcttcaagtctccgcacatggcccttattcccaactcctgccctttggagtggggagtccrggtgggactgagccagcagcactgggaggccagaggtggagtctttccaggggctggggtccaagctgaacaatatgcaagggagaagcactgtgacagc

SEQ ID NO: 518149 - DNA, 201 bp, Homo sapiens
gaggagatgcacgttcagatcctcctctgtgctgtcctcccaggctggggggcgcttgaaaaggatgctctctccaggcgctgtcacacaaaatgttaacrtcttgcttggggagtgggttagaacactgagagaaagccctgtgccctcttaagttatttctgaccattgatccaggatggacggaaggacagcaagcca

SEQ ID NO: 518150 - DNA, 201 bp, Homo sapiens
cccccattctttgcatcctgtttcttctttggaaagagttcccccctcaggcttaaacagcccatcttaccatagccagtaccccccacttttctgggcayagagaggggcagtgttcacctctgtcatccccccacggccagtggtgatgattctaaataatggacatgcaaagataagggtttgatcattcagtgtcct

SEQ ID NO: 518151 - DNA, 201 bp, Homo sapiens
ctccaggatggaaagaagtagaggagtcttctagttgaaggatggcccccaccccatatacatgaagcagatggtccccagcccatgtgtatcaggaatgwccagagacgactcacagttaatgtctgtgcggctcatccatgtgcacacttacacacatacacaaaggactggtactgcggggaccttgcaatgtcacca

SEQ ID NO: 518152 - DNA, 201 bp, Homo sapiens
gtcctctatcactgttccctcctatgcagggcttagttctggctgaccctggggtgggggaatgattggaaagagaaagagacatggatacttcagaggargaaaaaaagcaaaaagactacagatcctgcctttggggatctccaggtctgaggcaaagatgcagacgcaaattgaccacagagccaaggacgggactag

SEQ ID NO: 518153 - DNA, 201 bp, Homo sapiens
tggtggctagattgcagaatattctttgcttttggaaagatggagcagttctaggaaagggagggagaccacctggctcctaagccccccaggaattgggstggtcaactgagtgctggttgctgcgacaacagccttccagatttctccagcaactgagatgctgccacccccacccccagaggcagtgtcagctgtgag

SEQ ID NO: 518154 - DNA, 201 bp, Homo sapiens
catttgcctagacattcccattcctaaagaatatcaatttcccacaaggtcagttctctgtttctctcaacaagctgccaggctctggctggccacccccmacctgaaaaaaactttgtgacctcttgggatgaggtggagagagtgttttttgtcatttttgttgctccagctgtttggtagaataaggtctgatgtgaa

SEQ ID NO: 518155 - DNA, 201 bp, Homo sapiens
tgttcacctctgtcatccccccacggccagtggtgatgattctaaataatggacatgcaaagataagggtttgatcattcagtgtcctcatcctactcctstcagcccaggataattctagcccttttcccagccccatttgccttccctccccactgctaacctagagggtcatcctctaacccccatccttccacttgc

SEQ ID NO: 518156 - DNA, 201 bp, Homo sapiens; identical to SEQ ID NO: 218968

SEQ ID NO: 518157 - DNA, 201 bp, Homo sapiens
tatgtggagtttgggttgtatgctggcaagtatgatctttcggaaggagccatttttccatggacgtgacaattatgatcagttggtgaggatagccaagkttctggggacagaagatttatatggctatattgacaaatacaacattgaattagatccacgtttcaatgatatcttgggcagacactctcgaaagcgatg

SEQ ID NO: 518158 - DNA, 201 bp, Homo sapiens; identical to SEQ ID NO: 218977

SEQ ID NO: 518159 - DNA, 201 bp, Homo sapiens; identical to SEQ ID NO: 219040

SEQ ID NO: 518160 - DNA, 201 bp, Homo sapiens
attgtaaaagaccctgtgtcacgaacccccgccttggtttttgaacacgtaaacaacacagacttcaagcaattgtaccagacgttcacagactatgataytcgattttacatgtatgagattctgaaggccctggattattgtcacagcatgggaattatgcacagagatgtcaagccccataatgtcatgattgatcat

SEQ ID NO: 518161 - DNA, 201 bp, Homo sapiens; identical to SEQ ID NO: 219003

SEQ ID NO: 518162 - DNA, 201 bp, Homo sapiens; identical to SEQ ID NO: 218368

SEQ ID NO: 518163 - DNA, 201 bp, Homo sapiens
cttgtagactatcagatgtacgattatagtttggatatgtggagtttgggttgtatgctggcaagtatgatctttcggaaggagccatttttccatggacrtgacaattatgatcagttggtgaggatagccaaggttctggggacagaagatttatatggctatattgacaaatacaacattgaattagatccacgtttc

SEQ ID NO: 518164 - DNA, 201 bp, Homo sapiens; identical to SEQ ID NO: 218950

SEQ ID NO: 518165 - DNA, 201 bp, Homo sapiens; identical to SEQ ID NO: 218795

SEQ ID NO: 518166 - DNA, 201 bp, Homo sapiens; identical to SEQ ID NO: 218772

SEQ ID NO: 518167 - DNA, 201 bp, Homo sapiens; identical to SEQ ID NO: 218425

SEQ ID NO: 518168 - DNA, 201 bp, Homo sapiens
tcacactggcagacattgtaaaagaccctgtgtcacgaacccccgccttggtttttgaacacgtaaacaacacagacttcaagcaattgtaccagacgttmacagactatgatattcgattttacatgtatgagattctgaaggccctggattattgtcacagcatgggaattatgcacagagatgtcaagccccataatg

SEQ ID NO: 518169 - DNA, 201 bp, Homo sapiens
cacggcttactgcaagagaggccatggagcacccctatttctacactgttgtgaaggaccaggctcgaatgggttcatctagcatgccagggggcagtacrcccgtcagcagcgccaatgtgatgtcagggatttcttcagtgccaaccccttcaccccttggacctctggcaggctcaccagtgattgctgctgccaacc

SEQ ID NO: 518170 - DNA, 201 bp, Homo sapiens
tttatatggctatattgacaaatacaacattgaattagatccacgtttcaatgatatcttgggcagacactctcgaaagcgatgggaacgctttgtccacmgtgaaaatcagcaccttgtcagccctgaggccttggatttcctggacaaactgctgcgatatgaccaccagtcacggcttactgcaagagaggccatgga

SEQ ID NO: 518171 - DNA, 201 bp, Homo sapiens; identical to SEQ ID NO: 218479

SEQ ID NO: 518172 - DNA, 201 bp, Homo sapiens; identical to SEQ ID NO: 218967

SEQ ID NO: 518173 - DNA, 201 bp, Homo sapiens; identical to SEQ ID NO: 219023

SEQ ID NO: 518174 - DNA, 201 bp, Homo sapiens
ataagactttttgtggcgttagatttttatttttgccatgtgcatatattagtcggataaaaaattaaaatatatgtatatatatcataaggagactttcrgcctttggaaaggatggagaattcctctttctacatttgtttaaacctcccttgctcttcaggcacacagtccccagctgccggggggaagatgccaagg

SEQ ID NO: 518175 - DNA, 201 bp, Homo sapiens
tatttccaaaaatcatgcagaagtaaattaattaaacagccagttaaattgcatgagtaaatgggagagagggaaacttgcatggagaaaaaaagctactwtgtgaaatttttaaatgtatgatattgttattccttggaaggaaggaaagaaatttcttgtaatttagacaggcctcatgttttgctaaagctttaactt

SEQ ID NO: 518176 - DNA, 201 bp, Homo sapiens
ccacagaggagggactgactacggatgccatttgtgtctatgagtggaccaaggcaagaagtggcatcactcccgtgtgtctctggggccactctctgggyacagggtaagtgagatctgcaaatgtgtccttaggcaggtccttgaggctttagtgtcctatcaaaggcagcagccagtagtggagggagcaccgagcca

SEQ ID NO: 518177 - DNA, 201 bp, Homo sapiens
ataaataggaggtataaagttaacagggatttctacgggtctctttggaatcagttttgttactcagaattgaaaggcagcatgatgttgtggaaaagagyatgggctgtggagccactcagacttgggttcaaatctgtccttggccacataccctttgtgaccttggtaaattgtttctccctaagttttcccattttt

SEQ ID NO: 518178 - DNA, 201 bp, Homo sapiens
gccttttcttgctgccaggatttggggactctacaggtaagcccacagaggagggactgactacggatgccatttgtgtctatgagtggaccaaggcaagragtggcatcactcccgtgtgtctctggggccactctctgggtacagggtaagtgagatctgcaaatgtgtccttaggcaggtccttgaggctttagtgtc

SEQ ID NO: 518179 - DNA, 201 bp, Homo sapiens
gtccagagcacacctgaatgcagatcagttgctatgagaccaggccaaaaagttcaggccagacaaatcccacagaaccaaggagattccagctgggcacrgtggctggcgcctgtaatcccagcactttgggaggccgagacgggtggatcacctgaggtcaggagttcaagaccagcctggccaacatggcgagaccct

SEQ ID NO: 518180 - DNA, 201 bp, Homo sapiens
gggcaaatattaatttttttttcttttttaaaaatagatttaccggaacattccaggatttttacgtacacttatggatgccctgagaaaagacaaaatartctttcctaatgatgaaaagtaagttaatgatgaaaagacatgcattattactgtatctaaaggattctaggggcaactatcatgtgacttactggatgg

SEQ ID NO: 518181 - DNA, 201 bp, Homo sapiens
tctacagagatttcctgagcaagcagtggtcatgagtctgggaggagtggaaatcttcaatgaagacttggcccaaacaccacctgtgatgtatattgttytaatgtaaaattgtactgggctggtcggatgagctgaggccattgacttctctacaaatcacttgccattttaacaacagaaagtacgaatgttaggcag

SEQ ID NO: 518182 - DNA, 201 bp, Homo sapiens
ttagtactgttaatttttgttttagtttttttgaggttatgttgttaggtacataagcctaataatattatgatttagtttagttttttttttttttttttgagatggagtttcactcttgtcacccagactggagtgcagtggcgtgatctcagctcatggcaacctctgcctcctgagttcaagctattctcctgcccc

SEQ ID NO: 518183 - DNA, 201 bp, Homo sapiens
gaacaaactccccaagttagctgtttctgtacacttttagggaaattggactagaaaaatctacagctttgaatggccatcctttgagtctctttctgtcscttgcagctctatgaaattgcacgcaatgcatacaggaacaaagagagggtcaagatggttatctttcctcctggcttccaacacaacctgctttgtaaa

SEQ ID NO: 518184 - DNA, 201 bp, Homo sapiens
gagctgatctgggtcctttttctacagagatttcctgagcaagcagtggtcatgagtctgggaggagtggaaatcttcaatgaagacttggcccaaacacyacctgtgatgtatattgttctaatgtaaaattgtactgggctggtcggatgagctgaggccattgacttctctacaaatcacttgccattttaacaacag

SEQ ID NO: 518185 - DNA, 201 bp, Homo sapiens
tgccatggtctaggctggaggggaaggtatgacctgtgagtctcaaagggcactcctggctggaagggaatgaggaataatgagagtagattgaccggggyttgctttcttcctactctttcagaatttgagatgaattgctgaaggacttctcttactgaattctcctcaggggagtcttaattccaggggtgagagtac

SEQ ID NO: 518186 - DNA, 201 bp, Homo sapiens
aaagggtgtgagctgatctgggtcctttttctacagagatttcctgagcaagcagtggtcatgagtctgggaggagtggaaatcttcaatgaagacttggyccaaacaccacctgtgatgtatattgttctaatgtaaaattgtactgggctggtcggatgagctgaggccattgacttctctacaaatcacttgccattt

SEQ ID NO: 518187 - DNA, 201 bp, Homo sapiens
tttagtactgttaatttttgttttagtttttttgaggttatgttgttaggtacataagcctaataatattatgatttagtttagttttttttttttttttttgagatggagtttcactcttgtcacccagactggagtgcagtggcgtgatctcagctcatggcaacctctgcctcctgagttcaagctattctcctgccc

SEQ ID NO: 518188 - DNA, 201 bp, Homo sapiens
atttggtgccgtgactcggatcgggggacctcccttgggagatcaatcccccatcctcctgctctttgctccatgagaaaaatccacctatgaccttaggycctcagaccgaccagcccaagaaacatctcaccaatttcaaatccggtaagcggcctctttttactctcttctccaacctccctcactatccctcaacct

SEQ ID NO: 518189 - DNA, 201 bp, Homo sapiens
ttgaatggccatcctttgagtctctttctgtcgcttgcagctctatgaaattgcacgcaatgcatacaggaacaaagagagggtcaagatggttatctttsctcctggcttccaacacaacctgctttgtaaaagccccacactgttaataaccgtgaggtaagagttgctttgctaaatgtatgttgcccttcaaggcaa

SEQ ID NO: 518190 - DNA, 201 bp, Homo sapiens
gctttggcctgattcaggcggggtgctaagctttgaagcaaagggcctgttgtttctgccctccgctaaggtaggcagtggaggaggggcgggaggatggygtaacctcttaggagtgatggcttctgtcatctaagaataaggagaagcagccaacactcacagcagaagttaattaattttgtcagtcttttcaaagaa

SEQ ID NO: 518191 - DNA, 201 bp, Homo sapiens
taaccttcacaaataattttgatgcacgtagctcatgtacaagatcttgaataccccttatctaggaaagatggtatttgaataggggagttactgatttmtttctttctttctttcatttcaaggatgcccagttgatgctattgtcttggaagctccatttaccaacatgtgggttgcaagtatcaattatcccttgtt

SEQ ID NO: 518192 - DNA, 201 bp, Homo sapiens
cccgtgtgtctctggggccactctctgggtacagggtaagtgagatctgcaaatgtgtccttaggcaggtccttgaggctttagtgtcctatcaaaggcarcagccagtagtggagggagcaccgagccagaagacagggactctttgctgatcattttcacacactagaagtggctgaagatcttgccatcttaccatgc

SEQ ID NO: 518193 - DNA, 201 bp, Homo sapiens
gcccattctctgtagtcccaacctcgctctgtaacaaagaacgtctcccaggagtctggctccccttcgatgtgctgtcagagcctttttgggcctgtatrattatgttgggtgacgatcatcggctgtgactgtgcccctgaagcttggggcaggggcgatgtgcctcagaaacacacagatctccaccatcttgggagg

SEQ ID NO: 518194 - DNA, 201 bp, Homo sapiens
attactttttaaatcgtagaagttttttgtgaagtttaccttacttagagaagcactactctctgtgttaccctggttcatagtgaaagactatataacaratggcatagctatggggcaaatattaatttttttttcttttttaaaaatagatttaccggaacattccaggatttttacgtacacttatggatgccctga

SEQ ID NO: 518195 - DNA, 201 bp, Homo sapiens
gctttgaatggccatcctttgagtctctttctgtcgcttgcagctctatgaaattgcacgcaatgcatacaggaacaaagagagggtcaagatggttatcyttcctcctggcttccaacacaacctgctttgtaaaagccccacactgttaataaccgtgaggtaagagttgctttgctaaatgtatgttgcccttcaagg

SEQ ID NO: 518196 - DNA, 201 bp, Homo sapiens
caatttcaatgggctgtacctaagaactgcagtcttggaaaattaacaggtgcagaagtcagaagaacgaaaacagtaagtcgttaaaaggcattgtctctgtgcatggggacatggggtagggcagttgtggttctcgtcataagactttttgtggcgttagatttttatttttgccatgtgcatatattagtcggataa

SEQ ID NO: 518197 - DNA, 201 bp, Homo sapiens
acaatttcaatgggctgtacctaagaactgcagtcttggaaaattaacaggtgcagaagtcagaagaacgaaaacagtaagtcgttaaaaggcattgtctctgtgcatggggacatggggtagggcagttgtggttctcgtcataagactttttgtggcgttagatttttatttttgccatgtgcatatattagtcggata

SEQ ID NO: 518198 - DNA, 201 bp, Homo sapiens
aattgcttgatcccgggaggcagaggttgcagtgagctgagaacatgccattgcactccagcctgggcaacaagagcagaactctgtccaaaaaaaaaaaacaaagaaaaagaaaaaaacaaaccaagacaaatggattaatttcgaaaaccttgtgtgtttcccaataccttgcagatattttccacactcctgttcaat

SEQ ID NO: 518199 - DNA, 201 bp, Homo sapiens
gacttttgatcccttactgatctaggggaagtcaaattgacaaccccttagttaaaagaagctgctttgcattattgatgctctgaggatctggtcactckgttctcttcccgcagtgcatctcagaaaagtgcctcgagctatttgagagaaggactgtgtatgaattattccttaaaaaacagacacacatttccctct

SEQ ID NO: 518200 - DNA, 201 bp, Homo sapiens
tgctgccaggatttggggactctacaggtaagcccacagaggagggactgactacggatgccatttgtgtctatgagtggaccaaggcaagaagtggcatyactcccgtgtgtctctggggccactctctgggtacagggtaagtgagatctgcaaatgtgtccttaggcaggtccttgaggctttagtgtcctatcaaag

SEQ ID NO: 518201 - DNA, 201 bp, Homo sapiens
gaattgcttgatcccgggaggcagaggttgcagtgagctgagaacatgccattgcactccagcctgggcaacaagagcagaactctgtccaaaaaaaaaaaacaaagaaaaagaaaaaaacaaaccaagacaaatggattaatttcgaaaaccttgtgtgtttcccaataccttgcagatattttccacactcctgttcaa

SEQ ID NO: 518202 - DNA, 201 bp, Homo sapiens
agaattgcttgatcccgggaggcagaggttgcagtgagctgagaacatgccattgcactccagcctgggcaacaagagcagaactctgtccaaaaaaaaaaaacaaagaaaaagaaaaaaacaaaccaagacaaatggattaatttcgaaaaccttgtgtgtttcccaataccttgcagatattttccacactcctgttca

SEQ ID NO: 518203 - DNA, 201 bp, Homo sapiens
catcccaactacacgtgaggctgaagtaggaggatcacttgagcctgggaggttgaggttgcagtcaactgtgattgtgccactgcactccagcctgtgtkacagagtgacatcctgtaaaacaaacaaacaaacaaaaaaccagcctaacatttcttgaggcatctctgacttctaggcccttttccccatataatgaaa

SEQ ID NO: 518204 - DNA, 201 bp, Homo sapiens
gttttcattattcatatttaatataaatagcttcccctttttgattgcttctactacaactctgtgtagagttcttattctcaaggaatttttaaaaagaracatttatagacctaaaggcgactattattgtttctcacttttcagaataatatttacatatgtaaatgttaaataacttggccaaggtcacacagcagg

SEQ ID NO: 518205 - DNA, 201 bp, Homo sapiens
gacagatcaccttaatctaattagagattgagctgatctgaagctggtcttcagtctttatgatggctggcctatttctagttcacattactcctagactrtagttctttgagatcacaaccaaaagcctgagaaatgtactagggtcctcttttttgtcagatcctgaactctaatttctgtcatttggattaggtcaga

SEQ ID NO: 518206 - DNA, 201 bp, Homo sapiens
gtctggggctcaaagtcccaccggtggacttctgctcctacactgatcaaaacagaaccgagcttctctaggtcccaaagtaccttcgtgaacttaataayctcattgccaaatggaggtgaagacatttttatttgctttctctgagggctgggggatgggttgagagaggttttttttgttgtcgttgttgtggttgtt

SEQ ID NO: 518207 - DNA, 201 bp, Homo sapiens
tctgatgaatgagattagtgcccttataaattatgaccaaaagagctcttcactcctcctaccatttgaggatacagtgagaagccttcatctatgaaccmcaaagtagccctcatcagacactgaatcagccagtgccttgctcttggacttcccagcccccagaactgtgagaaataaatttctgttgtttataagcta

SEQ ID NO: 518208 - DNA, 201 bp, Homo sapiens
ctaatgccatacaatttaaacatttacattacaattatctgcttttgtgtgtgtgtgttttgctcatctttgtatggctatttttgattaagggctacacrtggtttatggaaaatcatagaaatgatttgaggtttgaactgatattatcttcttccagatataatttactcttctcctgaaaggcagttatggtaggga

SEQ ID NO: 518209 - DNA, 201 bp, Homo sapiens
gcatagaaatcagggcaggggagacaatttatcaaaaatgctttccagcccctcaaccttaccatttgattatattaaacagttttaacaatgatctcttrcaacatggaaagggacttacttaatggataatgtgggcaaaaactggaagcaggaggtgatgacattgacctcctgtatccctcacctctctaagaccct

SEQ ID NO: 518210 - DNA, 201 bp, Homo sapiens
gaaggcagtgatactgtgtttgccttttcttgctgccaggatttggggactctacaggtaagcccacagaggagggactgactacggatgccatttgtgtytatgagtggaccaaggcaagaagtggcatcactcccgtgtgtctctggggccactctctgggtacagggtaagtgagatctgcaaatgtgtccttaggca

SEQ ID NO: 518211 - DNA, 201 bp, Homo sapiens
atggtgacatgtcatatggcagtgtttgcatttgcagcattcactggtttaacaaagtggagaaactggaactcacacagatgtttaaaatcacaaggttwcttggtttctggagcaaaatagtttagtgttttagttcttttctcttacataaactggtttctctttaaattatttcctacttatctcttcggccgaact

SEQ ID NO: 518212 - DNA, 201 bp, Homo sapiens
agccttcctgctctccgtctctcccactgagcctcgccttctcaagttggaagtcaaacaccagatttcaaaaatacgtctttccccacctgttaaacttrtgtgtatgctttgaacatacagatacctagagcatcctagagatgtttctgacagtgcaacaaactttctttttaatcttcatcgaatataaaatagctg

SEQ ID NO: 518213 - DNA, 201 bp, Homo sapiens
ggaagccaaggcgggcagatcatgaggtcaggagatggagaccatcctggctaacacagtgaaaccctgtctctactaaaaatacaaaaaattagccaggmgtggtggcacatgcccgtagtcccagctactccggaggctgaggcaggagaattgcttgaacctgggaggcggaggttggagtgagccgagatcgcacca

SEQ ID NO: 518214 - DNA, 201 bp, Homo sapiens
agtaagtctccactttacaactggttttctttaaattagaaaaatgaggccaggcattgtggctcacatctgtaatcccagcactttgggaagccaaggcrggcagatcatgaggtcaggagatggagaccatcctggctaacacagtgaaaccctgtctctactaaaaatacaaaaaattagccaggcgtggtggcacat

SEQ ID NO: 518215 - DNA, 201 bp, Homo sapiens
aaggcttttgttactatatgactgtatctatatatacgtttaggttgtgctcttttacttcccactattttatagacattcttccatgttttcacagtcactagttagccagtttaaaaggttgtgtcattctccattgtatttataagcaattgtttacttaactgttacactgctattggatataagatttttcctccc

SEQ ID NO: 518216 - DNA, 201 bp, Homo sapiens
gattatttaacatttatttggcagtaaagggcatttattaggcagagaatcaaagttgcacatcatactcatagagaataacccactttgttgataatggrgtgggagatagggagttggggaccatctattacttgccttactaattagtgaaaaaagtctcaagagacacttcctgaaagaacaaaatactagcgtatg

SEQ ID NO: 518217 - DNA, 201 bp, Homo sapiens
tggagtgcagtggcacaatcttggctcattcccagggctccagcgatcctcccgtctcagcctccccagtagctgggactacaggcacctgccaccacacygagctgatttttgtattttgtgtagatatgggttttcactacattgttcaggttggtctcaaactcctggagctcacagattccacctgccttggcaccc

SEQ ID NO: 518218 - DNA, 201 bp, Homo sapiens
acagagggaaatgtaaaggaagcattctatgccatgttgttcttgttgtctgtggcctgatagagtggagaagacagggctaataatgggaaagccatcasagaacaattcaaggccagctgaggccccgttattatttgtgggaggaaagacaagagaggagaggtcaccatggaatgatctctccaggagactttgaca

SEQ ID NO: 518219 - DNA, 201 bp, Homo sapiens
aattgcttgaacctgggaggcggaggttggagtgagccgagatcgcaccactgcactccagcctgggtgacagagcgagactccgtctcaaaaaaaaaaaataataaaaaaagaaaaatggaaaatgtgctccagaaggaagttgggggaaaccaaaggtttattttcctcctcatttcccccattccaccccaagtcatt

SEQ ID NO: 518220 - DNA, 201 bp, Homo sapiens
agaattgcttgaacctgggaggcggaggttggagtgagccgagatcgcaccactgcactccagcctgggtgacagagcgagactccgtctcaaaaaaaaawaataataaaaaaagaaaaatggaaaatgtgctccagaaggaagttgggggaaaccaaaggtttattttcctcctcatttcccccattccaccccaagtca

SEQ ID NO: 518221 - DNA, 201 bp, Homo sapiens
agcctaacatttcttgaggcatctctgacttctaggcccttttccccatataatgaaaactcgtctaccatccaccttactaatgtgacagcaaatccaaygactagaatttatcaagttagcctgttacagttagagaatttaagaatgcttccaaatagacagttgtcaatatatttttctatgtcaacacacttgaga

SEQ ID NO: 518222 - DNA, 201 bp, Homo sapiens
acaaaatgttaacaatgatggtctatgatggcagaattatgtgtgctttgtttcttctacattcctttctttttttccaaattcccgacgtgcattacttyttaaatcgtagaagttttttgtgaagtttaccttacttagagaagcactactctctgtgttaccctggttcatagtgaaagactatataacagatggcat

SEQ ID NO: 518223 - DNA, 201 bp, Homo sapiens
gcaccaccacacccaacaatcattgtatttcatttcatgaaaaattatgttttcattattcatatttaatataaatagcttcccctttttgattgcttctrctacaactctgtgtagagttcttattctcaaggaatttttaaaaagaaacatttatagacctaaaggcgactattattgtttctcacttttcagaataat

SEQ ID NO: 518224 - DNA, 201 bp, Homo sapiens
gtcagaagaacgaaaacagtaagtcgttaaaaggcattgtctctgtgcatggggacatggggtagggcagttgtggttctcgtcataagactttttgtggygttagatttttatttttgccatgtgcatatattagtcggataaaaaattaaaatatatgtatatatatcataaggagactttcagcctttggaaaggatg

SEQ ID NO: 518225 - DNA, 201 bp, Homo sapiens
caacatgaaaatgtataatattttgcttatttaggtagggaaagggtgtgagctgatctgggtcctttttctacagagatttcctgagcaagcagtggtcmtgagtctgggaggagtggaaatcttcaatgaagacttggcccaaacaccacctgtgatgtatattgttctaatgtaaaattgtactgggctggtcggatg

SEQ ID NO: 518226 - DNA, 201 bp, Homo sapiens
tgatgtgatatggatggatatagggaggagaagccttttctgttttcatcttctaattaaagtgataacagctcctttgttacctaggtgctgagtgatgrtggctttcatgtcttgtctgttgactacagaggtatgtgttaagaacggtgtacaaagatgtttcagtaaccagggggcctctgatgacccctcattttg

SEQ ID NO: 518227 - DNA, 201 bp, Homo sapiens
gagtcagctatctcatcaagatcagctcatccagcaggcagcagtgcctatattcggagtacagaggccctggggatgatggcagactttctgtccttaartgatggagaggacagaagatttgtcacccttagccagttctccacatcccatggtgacatgtcatatggcagtgtttgcatttgcagcattcactggttt

SEQ ID NO: 518228 - DNA, 201 bp, Homo sapiens
tgcccccccaaattatgctgaaacctaatcaccagtgtgatggtaataggaggtgggactgagctctgatgaatgagattagtgcccttataaattatgaycaaaagagctcttcactcctcctaccatttgaggatacagtgagaagccttcatctatgaaccacaaagtagccctcatcagacactgaatcagccagtg

SEQ ID NO: 518229 - DNA, 201 bp, Homo sapiens
agaaacctctgagcatgagtgattcaccctgtagcagctcagactccaccagctttcaccagtaagaatcatccagttaggttctgagtcccctgtgggaygctgtgtggttacagctgcagctgatcaaagggcaagtgaaagaacaccaaagcaccaaggtggccgtttgatgtggctggccgttagcggggattgggc

SEQ ID NO: 518230 - DNA, 201 bp, Homo sapiens
accccgggtgtctgaccctgctcagccttcctgctctccgtctctcccactgagcctcgccttctcaagttggaagtcaaacaccagatttcaaaaatacrtctttccccacctgttaaacttatgtgtatgctttgaacatacagatacctagagcatcctagagatgtttctgacagtgcaacaaactttctttttaat

SEQ ID NO: 518231 - DNA, 201 bp, Homo sapiens
gaaacctctgagcatgagtgattcaccctgtagcagctcagactccaccagctttcaccagtaagaatcatccagttaggttctgagtcccctgtgggatrctgtgtggttacagctgcagctgatcaaagggcaagtgaaagaacaccaaagcaccaaggtggccgtttgatgtggctggccgttagcggggattgggct

SEQ ID NO: 518232 - DNA, 201 bp, Homo sapiens
ctactgcagtgatccagctgtatcactgaacttccctggcatcatagagttatattgtgccatttatggaaaaactctccccactgctcttggctttgacrgtaggaatcaggttatatatggtctctcggtttgaagatatttgtcattaaaaaccagaacaagggctctgagatagggtcctttcctgacctactctgg

SEQ ID NO: 518233 - DNA, 201 bp, Homo sapiens
ctctgtgccttcatccttgaatcggggataatatacttacctcctaaggttattgtaaggattaaatgcatgtagtataaataaagagctgagaacaatgyatggcgtaaagtgataggtattattatatgcttttgttggctgttgattgaaggtgttcgctgttttgggggtgtcctttaatagagtaacttggtactg

SEQ ID NO: 518234 - DNA, 201 bp, Homo sapiens
aagcaaaagcatgaggccacgcagtgtagaatgagtgtcttttcaccacgtagggaaatctgtagtcctaagaaaagagggagtgagaattctggcgaaargattgtgcctctgcacaaagtgcaggatcccagggttcagtacaggcgcgaacgctcctgtgtgttgaccacactcccacggttgctttttcagacatgc

SEQ ID NO: 518235 - DNA, 201 bp, Homo sapiens; identical to SEQ ID NO: 296342

SEQ ID NO: 518236 - DNA, 201 bp, Homo sapiens; identical to SEQ ID NO: 296388

SEQ ID NO: 518237 - DNA, 201 bp, Homo sapiens
tcccctccccactcctcctctcttcttcctcttctctctcactgccacgccttcctttccctcctcctccccctctccgctctgtgctcttcattctcacrggcccgcaacccctcctctctgtgtcccccgcccgttcctggaaactgagcttgacgtttgtaaactgtggttgcctgccttccccagctcccacgcggg

SEQ ID NO: 518238 - DNA, 201 bp, Homo sapiens
aaagtattggctattcggtagcttgaaaactctgtaatctcaatgctttaaactgagagtggaaaatcaataaagcaaaagcatgaggccacgcagtgtaraatgagtgtcttttcaccacgtagggaaatctgtagtcctaagaaaagagggagtgagaattctggcgaaaggattgtgcctctgcacaaagtgcaggat

SEQ ID NO: 518239 - DNA, 201 bp, Homo sapiens; identical to SEQ ID NO: 296366

SEQ ID NO: 518240 - DNA, 201 bp, Homo sapiens
tgtcaacgtgggctacttcctcatcgcagccggcgttgtggtctttgctcttggtttcctgggctgctatggtgctaagactgagagcaagtgtgccctcrtgacggtgtgtgaaacccagctccacaggctgatgaccaagagtcccctcgcccttgacaccaggccctgggattcccaaaccctgctttggacccccct

SEQ ID NO: 518241 - DNA, 201 bp, Homo sapiens
tctaactgggcctcaggtagggtgtctgtgggacaggcttcaggatccctatcatgttccctcatctctccctgttcctccctctccagctggctgccatrattgtgtccatgtatctgtactgcaatctacaataagtccacttctgcctctgccactactgctgccacatgggaactgtgaagaggcaccctggcaagc

SEQ ID NO: 518242 - DNA, 201 bp, Homo sapiens
gcatgagcagatgcatgtgcatgtgagcatgagcacagagggtatgtatgagtgtatcagcagatgcagggtaagaagcacattacactgttgtggtggarggcacgcagacattctgggaagccacttgccccacccctgggctgcttcttcttgagatcaggaggggcgttgcccagggctggtgttgccaggtggagg

SEQ ID NO: 518243 - DNA, 201 bp, Homo sapiens
acttgccagcactgtttaaggcctgcctgacctctctctccccagctgtgtggtgcagccctgttggcagtgggcatctgggtgtcaatcgatggggcatyctttctgaagatcttcgggccactgtcgtccagtgccatgcagtttgtcaacgtgggctacttcctcatcgcagccggcgttgtggtctttgctcttggt

SEQ ID NO: 518244 - DNA, 201 bp, Homo sapiens
gtgagcatgagcacagagggtatgtatgagtgtatcagcagatgcagggtaagaagcacattacactgttgtggtggagggcacgcagacattctgggaarccacttgccccacccctgggctgcttcttcttgagatcaggaggggcgttgcccagggctggtgttgccaggtggaggcctgctgaggcagtggttgtgg

SEQ ID NO: 518245 - DNA, 201 bp, Homo sapiens
tctggcatatctggctgaatatctgaagccagggccagcccaggtgggcccaggggaaacaaggccctaacttgcacatgtctacctcccaggagccaccrtgcagtgcttcagcttcattaagaccatgatgatcctcttcaatttgctcatctttgtaagtacggacattgtggactctttggggctccctataggagc

SEQ ID NO: 518246 - DNA, 201 bp, Homo sapiens
tctacaataagtccacttctgcctctgccactactgctgccacatgggaactgtgaagaggcaccctggcaagcagcagtgattgggggaggggacaggayctaacaatgtcacttgggccagaatggacctgccctttctgctccagacttggggctagatagggaccactccttttaggcgatgcctgactttccttcc

SEQ ID NO: 518247 - DNA, 201 bp, Homo sapiens
tacggattttgaggactcaccctacttcaaagagaacagtgcctttcccccattctgttgcaatgacaacgtcaccaacacagccaatgaaacctgcaccragcaaaaggctcacgaccaaaaagtagaggtgtgggctggcatgagtgggtggggactgttttcatggcctcagagtggcaaacggggatgggagtaggg

SEQ ID NO: 518248 - DNA, 201 bp, Homo sapiens
accagggctgctcaacccatctgaggcctctctggaggaaacagacttctaactgggcctcaggtagggtgtctgtgggacaggcttcaggatccctatcmtgttccctcatctctccctgttcctccctctccagctggctgccatgattgtgtccatgtatctgtactgcaatctacaataagtccacttctgcctctg

SEQ ID NO: 518249 - DNA, 201 bp, Homo sapiens
gatgcctgactttccttccattggtgggtggatgggtggggggcattccagagcctctaaggtagccagttctgttgcccattcccccagtctattaaacycttgatatgccccctaggcctagtggtgatcccagtgctctactgggggatgagagaaaggcattttatagcctgggcataagtgaaatcagcagagcct

SEQ ID NO: 518250 - DNA, 201 bp, Homo sapiens
ctagatagggaccactccttttaggcgatgcctgactttccttccattggtgggtggatgggtggggggcattccagagcctctaaggtagccagttctgwtgcccattcccccagtctattaaacccttgatatgccccctaggcctagtggtgatcccagtgctctactgggggatgagagaaaggcattttatagcct

SEQ ID NO: 518251 - DNA, 201 bp, Homo sapiens
agcccagattgcaccattgcactccagcctgggcaacaagagtgaaactctgtctcaaaaaaaaaaaaaatatatctatctatctatctatctatctatchaactatctatctatatttgagtcattgacattgaactcacagccaacagcattataacttgtgcctgaatgaaacttatctaaagcacatatttccccta

SEQ ID NO: 518252 - DNA, 201 bp, Homo sapiens
tggggtttcaccgtgttagccaggatggtctcgatctcctgaccttgtgatctgcccgccttggcctcccaaagtgccgggattacaggcatgagccaccrcacccagcctagtggctctgttttttaaaaccccaccctggctcacaggccccctggctaaccttgaggtgggaagatccacactatggtggtgtcagtg

SEQ ID NO: 518253 - DNA, 201 bp, Homo sapiens
cgtccagtgccatgcagtttgtcaacgtgggctacttcctcatcgcagccggcgttgtggtctttgctcttggtttcctgggctgctatggtgctaagackgagagcaagtgtgccctcgtgacggtgtgtgaaacccagctccacaggctgatgaccaagagtcccctcgcccttgacaccaggccctgggattcccaaa

SEQ ID NO: 518254 - DNA, 201 bp, Homo sapiens
gtggtgtggcagctggaattgggggcctcgaggtaagcagatgaggaggctgggactgggacatgggcatgagaccagggctgctcaacccatctgaggcytctctggaggaaacagacttctaactgggcctcaggtagggtgtctgtgggacaggcttcaggatccctatcatgttccctcatctctccctgttcctcc

SEQ ID NO: 518255 - DNA, 201 bp, Homo sapiens
gtgaaactctgtctcaaaaaaaaaaaaaatatatctatctatctatctatctatctatctaactatctatctatatttgagtcattgacattgaactcacrgccaacagcattataacttgtgcctgaatgaaacttatctaaagcacatatttcccctataaggcacatcacagccttcttgcacttagaaagactagag

SEQ ID NO: 518256 - DNA, 201 bp, Homo sapiens
agagcgctaagagaagactgggaaggagaaaaagaaaaagatggggaaggagaggagatggaaagatgaagggaggggaaaaatggggaatgtgaggtttmatggagggaagaggattaggaactatttgctactcgcaggagagagcggaagctgccaaatctcagtcatttccttgaaagtgagtgagagacagagaaa

SEQ ID NO: 518257 - DNA, 201 bp, Homo sapiens
taagcagatgaggaggctgggactgggacatgggcatgagaccagggctgctcaacccatctgaggcctctctggaggaaacagacttctaactgggcctsaggtagggtgtctgtgggacaggcttcaggatccctatcatgttccctcatctctccctgttcctccctctccagctggctgccatgattgtgtccatgt

SEQ ID NO: 518258 - DNA, 201 bp, Homo sapiens
gtgtcagaccaggtacaggagaagcttggtgagatatgggttcaggatcctggggtctggcatatctggctgaatatctgaagccagggccagcccaggtrggcccaggggaaacaaggccctaacttgcacatgtctacctcccaggagccaccatgcagtgcttcagcttcattaagaccatgatgatcctcttcaatt

SEQ ID NO: 518259 - DNA, 201 bp, Homo sapiens
aaggttgccagcaggtggaacctcagcctcgcctccattactatggtgactattgagcctgttctgctaccacccccgtctccacctatcagaggacagagtgttctaggcacccatagcccagaaaggaaataggaggctgggccctcacctgcctgttttcaatcctagctatgtggcaggaccctggcagcagtgagg

SEQ ID NO: 518260 - DNA, 201 bp, Homo sapiens
caatgaaacctgcaccaagcaaaaggctcacgaccaaaaagtagaggtgtgggctggcatgagtgggtggggactgttttcatggcctcagagtggcaaayggggatgggagtagggcagctgccaactataaatgctcttttctcttcctgaagggttgcttcaatcagcttttgtatgacatccgaactaatgcagtca

SEQ ID NO: 518261 - DNA, 201 bp, Homo sapiens
tgccccacccctgggctgcttcttcttgagatcaggaggggcgttgcccagggctggtgttgccaggtggaggcctgctgaggcagtggttgtggggatckgtctccaggcagcagggggcagcagggtcaaggagaggctaactggccacgggtggggccagcaggcgggcagaaggaggctttaaagcgcctaccctgc

SEQ ID NO: 518262 - DNA, 201 bp, Homo sapiens
ctccagctccatgaaatttgaccctgcaggctagaagtccagctttctgtccttgggcaaacatgcctggaatccagccacaatctgccacctcacttccygttctagcctcagtttttatagctggcaagtgaggactagtcaccaaggtggtgtcaggctgattcatccactgaagccctgggccgggaggctttcctc

SEQ ID NO: 518263 - DNA, 201 bp, Homo sapiens
tttcctgggctgctatggtgctaagactgagagcaagtgtgccctcgtgacggtgtgtgaaacccagctccacaggctgatgaccaagagtcccctcgccyttgacaccaggccctgggattcccaaaccctgctttggacccccctaggctcaggcttctgtctcacttttccggggggggggattagggcaaggagggc

SEQ ID NO: 518264 - DNA, 201 bp, Homo sapiens
ccaagagtcccctcgcccttgacaccaggccctgggattcccaaaccctgctttggacccccctaggctcaggcttctgtctcacttttccggggggggggattagggcaaggagggcatgagggactgtctctccctaaaacccagacccctgttccccactcagttcttcttcatcctcctcctcatcttcattgctga

SEQ ID NO: 518265 - DNA, 201 bp, Homo sapiens
tgagtgtatcagcagatgcagggtaagaagcacattacactgttgtggtggagggcacgcagacattctgggaagccacttgccccacccctgggctgctkcttcttgagatcaggaggggcgttgcccagggctggtgttgccaggtggaggcctgctgaggcagtggttgtggggatcggtctccaggcagcagggggc

SEQ ID NO: 518266 - DNA, 201 bp, Homo sapiens
tttgctcttggtttcctgggctgctatggtgctaagactgagagcaagtgtgccctcgtgacggtgtgtgaaacccagctccacaggctgatgaccaagaktcccctcgcccttgacaccaggccctgggattcccaaaccctgctttggacccccctaggctcaggcttctgtctcacttttccggggggggggattagg

SEQ ID NO: 518267 - DNA, 201 bp, Homo sapiens
ttcttcccccttatccctaagactttcataaacaactacagaaactccaacaacaaaaacatgcaaaatttccagaaagtttggcagttgctctctgctccactcaagaggagggaaaaaaaaaaaaaaaaagaaaaaataacataaagaaaaagcccaaacagaaggccctctacaaaacagtgactgaaaactttgtag

SEQ ID NO: 518268 - DNA, 201 bp, Homo sapiens
tagaggttgtggcttgttcatgccccttgtctgtcctcttcctcaggttgccaattttttgtcctttttattccatgttccagagaacatacaagaaaaawagagagagagagcgtaaaacttgttatactccttagctgaatttggaaaaaaagaaagagcaaaactaatgagcaacatttaagccacattacctaccag

SEQ ID NO: 518269 - DNA, 201 bp, Homo sapiens
cctaagactttcataaacaactacagaaactccaacaacaaaaacatgcaaaatttccagaaagtttggcagttgctctctgctccactcaagaggagggaaaaaaaaaaaaaaaaagaaaaaataacataaagaaaaagcccaaacagaaggccctctacaaaacagtgactgaaaactttgtagtcagtaaaatacaga

SEQ ID NO: 518270 - DNA, 201 bp, Homo sapiens
aagtcacattcaaaaatgtctcagtctccaattcataatgatattaatattattcttagaaaagaaaaggcacttagaataaatacaagtggtaacacaaygtcaggaaatcagaaatgtgtaattcagaaaagggtcaaagacaatataaattagtattaaaggcattcaaaatggagactactagaagaattcaattac

SEQ ID NO: 518271 - DNA, 201 bp, Homo sapiens
atatatcagctctgaagtaaccaagaaataaacctgcctaaccggcattcaaaccagccaagagccatttttcaggctcagaaagtgttttgcaattaaartaacattccaattttcgttaaaattaaaataagttttatcaatagctttttttggaaaaaaaaaaatcccatccaattttacaaacttttaggtaaaata

SEQ ID NO: 518272 - DNA, 201 bp, Homo sapiens
aaaaccaaatactgtatattctcacttataagtgggagctaaccactggggacacatggacataaagatgggaacaaataaacactggggaatacaagagyggtgagaaagggcaggggcaagggctgaataactgcctactgggtactatgctatctgggtgatgggttcaattgtacctcaaatctcagcatcatgcaa

SEQ ID NO: 518273 - DNA, 201 bp, Homo sapiens
taaagaatcccttaaaaattatacaaacaagcataaacatcaccagcataagaatgcatttttcaaaccatatattttgttcttctttactatactggtgmgtactcataaagaataggggcttaacagaaattatattttagactaggctaataccaagggttaagtaggaattaaagcaacatgcttttaaaagtagtg

SEQ ID NO: 518274 - DNA, 201 bp, Homo sapiens
acaaaaaaaaagcgtattaacaacacaaatctccagcatactaaaattatccaaagagcaactattcaacctaagatgtctgaaagcattttaaacttcarttaatttgttccttggctgtaagatagcttcatatttctttgaaaatattttctaaaaatatagaagactaaaaacaaatactcacatcgctcattttct

SEQ ID NO: 518275 - DNA, 201 bp, Homo sapiens
tttatagctgacttaagctttgaaagtttgtgcaaatttctacttaaatcttaccgtaattcataggttttgctactttacactttctatattttctttckaaagcatattttagaaaaaagtaattttgtgggttttcttaattacagtagcaattaaaaaacccttttaggtcactgatccctatgagaaactagaaaa

SEQ ID NO: 518276 - DNA, 201 bp, Homo sapiens
gcagtctagaataccatataccattttagagacagagaaactaggggatgaaagccaaaatgcttaagactaggccatgagaaaaagagagcagcattatytggtttgcaaaacgctgctctagttcactgctctaaataccaatattgtctcttgtatatgctcaatgtttcaccatcccgtcccagcaaaaaaaaaaaa

SEQ ID NO: 518277 - DNA, 201 bp, Homo sapiens
ttaagtcatctattgtttttcttacatctgaaacaatgaacacaaccattatgtaaagcatggcatatatacgacctgtaggaatattttaactgtagtcytatcacactacaagtatgatttaacagtaatgcttttcaaaaatcttacactattttccttttaaatggacttttaataagttatactgtgtatttttgt

SEQ ID NO: 518278 - DNA, 201 bp, Homo sapiens
ctcccaggttcaagcgattctcctgcctcagcctcctgagtagctgagattataggcacgcgccaccgcacccggctaatttttgtatttttagtagagayggggtttcaccatgttggtcaggctggtctcgaaccctgaccttgtgatctacccgcttcggcctcccagagtgctgggattacaggtgtgagccaccat

SEQ ID NO: 518279 - DNA, 201 bp, Homo sapiens
ccattttagagacagagaaactaggggatgaaagccaaaatgcttaagactaggccatgagaaaaagagagcagcattatctggtttgcaaaacgctgctytagttcactgctctaaataccaatattgtctcttgtatatgctcaatgtttcaccatcccgtcccagcaaaaaaaaaaaaaaaaaaaaaaaaaaaataca

SEQ ID NO: 518280 - DNA, 201 bp, Homo sapiens
agtggtattctttccagtatttattcggacctaaaatttcagagcaagaaattaagaatcttttgacaaattaaatcaaagtgaaaccaaaacaaataaastctataactaaaaaaataatagtaagagaggcagctgaaattttctgatgctgaaatgatgtgcattatcagatggaattttttaaaaagtccttatctc

SEQ ID NO: 518281 - DNA, 201 bp, Homo sapiens
caaaaaagaacagatgttggcaggactgcaaagaaaaggaatgcttttacactgttagtgggaatgtccagccactgtggacagcagtttggagatttctsaaagaactaaactgaacaaccattcaacccagcaatccattactgaatacagaccacccaaaaaaaaaaagcattctgccaaaaagatacatgcacctgt

SEQ ID NO: 518282 - DNA, 201 bp, Homo sapiens
agagaaactaggggatgaaagccaaaatgcttaagactaggccatgagaaaaagagagcagcattatctggtttgcaaaacgctgctctagttcactgctytaaataccaatattgtctcttgtatatgctcaatgtttcaccatcccgtcccagcaaaaaaaaaaaaaaaaaaaaaaaaaaaatacacacgatttttttt

SEQ ID NO: 518283 - DNA, 201 bp, Homo sapiens
gaagggaggccaggaggagtcaagcaatgtctctggaagaaactacagcttgaggaaccctctctctctaaaggctacattcgtggaaatgttcagggctyagtcaaacagtgatctccaaatagtatctctattatttcaggcttaaataatcctgttaaagatcacaaagcctatgcaacagaaaatgcaaaagttatg

SEQ ID NO: 518284 - DNA, 201 bp, Homo sapiens
aagccactaagttttgcagtaattttactaaggagcagtaaaataacagatatatcatcttagcaaggatatattttgagttcagagctatactctcagtsatgtagcaattatttatttaaaaaaaaatagttccaggtctcatttagtaatcctaaaagttaaatgtctgacatacagcaaaatgtatggaatgaggta

SEQ ID NO: 518285 - DNA, 201 bp, Homo sapiens
acagaactgagaattaggggacaaagttaggaggaacctatacatcatttacatcctttcatacctcctaaattttgaaacatgtaaatgtattgtctcaktaaatattttttatttaaatcttaaaaagttaatatatagtctttcttgtctcttaaagatatatactgaaatatttccagatggaatgatacggcttag

SEQ ID NO: 518286 - DNA, 201 bp, Homo sapiens
ttacaagttaaaaatcatttaactctttaaaaagagaaggaaaagaaaaatgcatttacagtttgaccttagtcacataaatacacatacagaattaagargctagagggaataaaagggaatgttttaaaaacagggagagaattagcttctctttacaattatgagtaaatttatctttattcctttcttatttcaact

SEQ ID NO: 518287 - DNA, 201 bp, Homo sapiens
gattcatttcataacatcagagctacttcagtatataaagagaggcttcgtcttcagtaaggtctttaagaaaaaagtatgcccattctctttcgctaatrtacatgacaaaaataatgcagcaaagccaaaagatttatcattgccagaaattacatacaggcctaacaataagattctgattagtgtcacaaaagatca

SEQ ID NO: 518288 - DNA, 201 bp, Homo sapiens
caaaaacatgatataaaagcttgaggactcctacaagtaataaattctaattacaagttaaaaatcatttaactctttaaaaagagaaggaaaagaaaaawgcatttacagtttgaccttagtcacataaatacacatacagaattaagaagctagagggaataaaagggaatgttttaaaaacagggagagaattagctt

SEQ ID NO: 518289 - DNA, 201 bp, Homo sapiens
ctggttgcttccaaaaacatgatataaaagcttgaggactcctacaagtaataaattctaattacaagttaaaaatcatttaactctttaaaaagagaagraaaagaaaaatgcatttacagtttgaccttagtcacataaatacacatacagaattaagaagctagagggaataaaagggaatgttttaaaaacagggag

SEQ ID NO: 518290 - DNA, 201 bp, Homo sapiens
aagtcaagttctctctactaccaacatatgatacaatcttatatgtaatatgcagaaaaccctaaagaatacacacacacacacacacacaaaacaccctygtaaagctaataaaaaaaattcagcaaagttgcaggatgcaaaatcaacacacaaaaatcaactgcatttctatgcactaacaatgagcaatctaaaaag

SEQ ID NO: 518291 - DNA, 201 bp, Homo sapiens
tgcctgtttcttcactcattactaatcttttgctctaagaaaatgagatgtgaattcaaagcaaaaaacctttaaaattatgtaaaaacacattcatctamgtttgaaagaaatatcctaaagtgcctagttaatttttactgatgagtttatatgtaatttttgttctttttattttccaaattttctataactaatata

SEQ ID NO: 518292 - DNA, 201 bp, Homo sapiens
ttatgtcatcagaagatgctgatgaaataatctatgttctttatattttatgagtccatcagaaaactttactattagacatagataccaagattaacccrcatataaaaacataatttttcaagtcaatgaaacaaaattatctaaagagagatgcagctaacattctactagatttcttcaatttaacttttcaacaat

SEQ ID NO: 518293 - DNA, 201 bp, Homo sapiens
atctgagttaacctgggacagagttaaatttttattttttaatttaagaaacgataaaaacggaagattctggaatatatacaatatataaccttctttaraaataatttttagtccatcatacccaccctacaacttcccattaagcatccaaaaaagacttgtttcaattgaatccaccatttactgagcagctcctct

SEQ ID NO: 518294 - DNA, 201 bp, Homo sapiens
ctgtgagatgcctaacggggaaagaggaaaaaaatttctatataagtgttaacatctgagttaacctgggacagagttaaatttttattttttaatttaaraaacgataaaaacggaagattctggaatatatacaatatataaccttctttagaaataatttttagtccatcatacccaccctacaacttcccattaagc

SEQ ID NO: 518295 - DNA, 201 bp, Homo sapiens
tttttttttttttttttaagaaaaaaaatcttctatcactctcttttcctctacctaacatcctaaacagacaagcagaaaatactgtgagatgcctaackgggaaagaggaaaaaaatttctatataagtgttaacatctgagttaacctgggacagagttaaatttttattttttaatttaagaaacgataaaaacgga

SEQ ID NO: 518296 - DNA, 201 bp, Homo sapiens
ctataaaaacgatactggatccaccactttttaaaatattacaataaaatctcagtagttctgctaataaaagctaatagtatctagagataaaatacagrtatctcagaaacatcaccttagccaagaaacaaaaatttcaacataatgcaattcttagaatcagatttaacaagatcttagtacaaggaaacctccctg

SEQ ID NO: 518297 - DNA, 201 bp, Homo sapiens
atgtaattccatccgtccatttcttcacatatgcatgacaaatggatataatttaagatcagcctcaaaacacattccaatcgtttcccatctcacaaatrtgaaaaccaaaactcttacaatgatctggtactgctctcatactggctagaaagctcttctctaaaatatcctccatatatccacacagctcactcccca

SEQ ID NO: 518298 - DNA, 201 bp, Homo sapiens
atgaaggaaacaattgttaaaattaaaaatgtctgttgatcaaaggacagacaccactgtaagtgctccaagtcaagccacagaccagggaagaaacttayaatatataattggaaaggcagtcattactatgaatcaattagaatataactaacatcccaatagaaagtagttaacagatgagcaggtatttcacaaaaa

SEQ ID NO: 518299 - DNA, 201 bp, Homo sapiens
gaacagtcaagaaactgatctacttacacagtcacctgatttatgacaaagatgacaatgcggtggagacatgacactctttccaataaatgctgatgggrcaactaggtatccatacagtaaaaatgaaacctgacctcaatctcccccatatacaaagccaattccaggtagaatgtagattctcaatgtgaaaagcaa

SEQ ID NO: 518300 - DNA, 201 bp, Homo sapiens
cagcactttgggaggccgaggagggtggatcacttgaattcaggagtttgagatcagcctggccaacatggtgaaaccccatctctactaaaatacaaaarttagccaggcattgtgacacgcacctgtaaccctagctactggggaggctgaggccagagaatcacttgaatcaagaaggaggaggttgcagtgagccaa

SEQ ID NO: 518301 - DNA, 201 bp, Homo sapiens
aaaatacacacgattttttttagacctgtcactaaattcctctattgtaacatttaattcctgaaataaatgtcctcttttgggacattttaaatactaaracagaaattctgtaccaaaatacatgctataatcagaaacccaaccatactacacattaactcagcataaaaagtccattttagaatgaagatctctcag

SEQ ID NO: 518302 - DNA, 201 bp, Homo sapiens
ccaacagaacagtcaagaaactgatctacttacacagtcacctgatttatgacaaagatgacaatgcggtggagacatgacactctttccaataaatgctratgggacaactaggtatccatacagtaaaaatgaaacctgacctcaatctcccccatatacaaagccaattccaggtagaatgtagattctcaatgtgaa

SEQ ID NO: 518303 - DNA, 201 bp, Homo sapiens
ttacattggaaacattagtcaaagacattaaatcaactgtcttacacccaatgagctaaaggaaaccaaaataatatatgaacaaatagggaaggccaatraagagatagtttaatcttataaaaaggaacaaaatagaaatcctggagccgaaaagtacaatagcttgaacttagaaattcactagagagatcaaaaagc

SEQ ID NO: 518304 - DNA, 201 bp, Homo sapiens
tacacacgattttttttagacctgtcactaaattcctctattgtaacatttaattcctgaaataaatgtcctcttttgggacattttaaatactaagacaraaattctgtaccaaaatacatgctataatcagaaacccaaccatactacacattaactcagcataaaaagtccattttagaatgaagatctctcagtaag

SEQ ID NO: 518305 - DNA, 201 bp, Homo sapiens
aaacttggaatataaggaaatttccttaatctgataaaagcaaatacaaaaattactcacagtaaataccacacttaatggtaaatgtttaaaagttgacycctgatgcccactaccagcacttgaactggccagtatcaaaagcaagaaaaagaaagaaacagcatacggactggaaaggagaaaataaaggcaatcttg

SEQ ID NO: 518306 - DNA, 201 bp, Homo sapiens
cactttgggaggctgaggtgggtggatcacgaggtcaggagatcgagaccatcctggctaacacagtgaaaccccatctctactaaaaatacaaaaaaatrgccgggcatggtggcaggtgcctgtagtcctggctactcgggaggctgaggtaggagaatggcatgaacctgggaggcagagcttgcagtgagccgagat

SEQ ID NO: 518307 - DNA, 201 bp, Homo sapiens
aatatactcttttcaataaattaccataattaaatcaatttagaaaaagcatttctaaaattcaacacccactcataaaaactcatagcaaacttggaatrtaaggaaatttccttaatctgataaaagcaaatacaaaaattactcacagtaaataccacacttaatggtaaatgtttaaaagttgacccctgatgccca

SEQ ID NO: 518308 - DNA, 201 bp, Homo sapiens
tgaacctgggaggcagagcttgcagtgagccgagatcgcgccactgcactccagcctggacaacagaaggagactccatctcaaaaaaaaaaaaaaaaaaraaagaaaaaattagtaaatttctacaacttagaaattttagaaggtgttataaaaacaaatatttttcccttaagttaaattattctaaataatcttatt

SEQ ID NO: 518309 - DNA, 201 bp, Homo sapiens
aggttcctaacagaaaaaaatgcaataagcactgggataaactgtaataaactgagtgttgctgtataaaaaccaccatagcctgagcagagtggctcacrcctgtaatcttagcactttgaggcccaggccagtagatcacatgatgccaggagttcagaccagcctagccaacatggtgaaaccccgtctctaccaaaa

SEQ ID NO: 518310 - DNA, 201 bp, Homo sapiens
gaaggttatgggatgacatatatttaaaaagtgctgagagagaaacaaaatacttcatccaagaattctatgtttagcaaaacaacagtcttttaaaaatkaggggaaatttaagatattcccagataaacaagagttgagggcattcctcaccactagacctgcaatccaagaaatgctaaaggaagttcttcgggtaga

SEQ ID NO: 518311 - DNA, 201 bp, Homo sapiens
tcttctatcactctcttttcctctacctaacatcctaaacagacaagcagaaaatactgtgagatgcctaacggggaaagaggaaaaaaatttctatatamgtgttaacatctgagttaacctgggacagagttaaatttttattttttaatttaagaaacgataaaaacggaagattctggaatatatacaatatataac

SEQ ID NO: 518312 - DNA, 201 bp, Homo sapiens
gaccagcctagccaacatggtgaaaccccgtctctaccaaaaatacaaaaattagccaggtgtggtggtgcatgcctgtaattccagctactcaggtagcytgaattgcttgaaccaaggaggtggaggttgcagtgagccgagatcacaccactgcactccagcctgggagacagacagagaccctgtccccaaaaataa

SEQ ID NO: 518313 - DNA, 201 bp, Homo sapiens
aaagtatctgactgaattaatgacagacacatagaaaactatgcaacaaaaaaagcagttaaattcaactaaaagcctgtacaagaacaaaatggaattayataatatctaagcatgaatactgattcaacaaaaattgtgatacaacaatagcaaaaagattagagaagcagagacagggaggacatgtaaaaatgctac

SEQ ID NO: 518314 - DNA, 201 bp, Homo sapiens
ggccgagacaggtggatcacctaagatcaggagtttgagatcagcctggccaagatggtgaagccctatctctacgaaaaatacaaaaaattggccaggcrttgtggcaggcgcctgtaatcccagctactcaggaggctgaggcaggaaaatcaaacccggaaagcagaggttgcagtgagccaaggtcacgccattgca

SEQ ID NO: 518315 - DNA, 201 bp, Homo sapiens
taatctcacaagaaaggtttctcctttcttgcttaaacaaaagattcacagcttagagtggtttgtagagatggtagggaatagggaagtggaaagagaayagaaaatgtcttagtgaaaccaggaggattaattccaagtgaacatactgaaccttgaaacgcccagcctggttctcagaacactagatgaagaagatca

SEQ ID NO: 518316 - DNA, 201 bp, Homo sapiens
caaacccggaaagcagaggttgcagtgagccaaggtcacgccattgcactccagcctgggcaacgagagcaaaactccgtctcaaaaaaaaaaaaaaaaamaaaacaaaaaacaaaaacaaaagaaaccaccactgtcagtgagactgtagtaaaaatctcaaatcacactaaatcactgcaagtagctatgtaaattcaa

SEQ ID NO: 518317 - DNA, 201 bp, Homo sapiens
aaaaatggatcatttaaacagactcaatcaattttaacgctccaaacatggctaagttgaaatctaattaagcaaaatttcaaaccacactgaaattatarcaaataacactactgagagaaaaagaaatatactttgtgatatagacaatatctgtattcattttaatctcaaacattttagttaccaattattatagaa

SEQ ID NO: 518318 - DNA, 201 bp, Homo sapiens
aaaatgcatgggagcaatcatgcaagaggtgggctggataaatgaatgaatgctatgatctctagagacaccagagacttacttagtgaaaaggaattgtaaaaaaaaaaaaaaaaaaagatactataaatacatattatatttagtactaaaccataagtacagtataaaagtagtaaaaaataatgtatcacaaacaag

SEQ ID NO: 518319 - DNA, 201 bp, Homo sapiens
atgcctggcccagtttttttttttttttttttttttttttaagaaaaaaaatcttctatcactctcttttcctctacctaacatcctaaacagacaagcaraaaatactgtgagatgcctaacggggaaagaggaaaaaaatttctatataagtgttaacatctgagttaacctgggacagagttaaatttttatttttta

SEQ ID NO: 518320 - DNA, 201 bp, Homo sapiens
atacccagaagaatcgaaagcagccgggcgcagtggcacacgcctgtaatcccagcactttgggaggccgaggtgggtggatcacccgaggtcaggagttsgagaccagcctgaccaacatggtgaaaccccaactctactaaacacaaaaaattagccaggggtggtggtgcatgcctgtaatctcagctacttgggagg

SEQ ID NO: 518321 - DNA, 201 bp, Homo sapiens
tcatgtttctgtaatcagagtagaaatctctgctaagcagtaaatggcaccatctaaaaaatacatggggtttctaactataattatatgctgaacaataycctacttttctccaaatacagaatttttatggccaagcgctgataaagaataatagacagtgatatgatacctcctcccccagatgctctgtgatttcct

SEQ ID NO: 518322 - DNA, 201 bp, Homo sapiens
ctcccagagtgctgggattacaggtgtgagccaccatgcctggcccagtttttttttttttttttttttttttttaagaaaaaaaatcttctatcactctyttttcctctacctaacatcctaaacagacaagcagaaaatactgtgagatgcctaacggggaaagaggaaaaaaatttctatataagtgttaacatctga

SEQ ID NO: 518323 - DNA, 201 bp, Homo sapiens
attacagagtacagaactagattgtagatgctgcctggtgctaccaggtttctataggataaatatctagttggatcatcacataaaatgcagtatttcayaacagttttgttgcacaggtaatttttgtccagctggataatgcatagataacatagattaagacaagttattctgttcctgaacagaaaatattcctaa

SEQ ID NO: 518324 - DNA, 201 bp, Homo sapiens
ataaatttccatttaccatccttactcaaggaaatctagttactacagtaacatgcaaaagccttgtgacaggatactttaaactccagggcactgccaargaatgagtaccctacaaggaaacaacggcggctcatctctgtaaagttctattatcattttacatatgaacatctctactttttaaactgcttcatttgt

SEQ ID NO: 518325 - DNA, 201 bp, Homo sapiens
gtacagctgaatgtaaccattcaggggctttggaaacaggactggtgtgagcaatcaatgggagaatgtctccataggactgactggtacagtgcctagasagtcaacactcactattaataacataacactaacagcttatttatgtttcagataagtaattctgcaaatgctcaaggactaaatacaccagcctagata

SEQ ID NO: 518326 - DNA, 201 bp, Homo sapiens
atggccacaatgcaccctggttataaggcgaaatgcaacacataaatgataaatttccatttaccatccttactcaaggaaatctagttactacagtaacrtgcaaaagccttgtgacaggatactttaaactccagggcactgccaaggaatgagtaccctacaaggaaacaacggcggctcatctctgtaaagttctat

SEQ ID NO: 518327 - DNA, 201 bp, Homo sapiens
agtcctcatcagaaaaccttaggctgaaaaatgcatcatcagctcttcaattattcataataatgtgattaaggtaagagagaatcaactgggggtagaakaaattaagtagagataatacaaaaggcgtttcaatttggcctaggagtctgtttcttgttacatcaaacagagctaccaaataagtaatttcaaacaacc

SEQ ID NO: 518328 - DNA, 201 bp, Homo sapiens
tcaaaaacataattttagcaaattcaagattaatgtggttttatttttagttttaaaatcctgtttttatacagtttagcaatggcattattctaccatamatttattgaagaattaagactcttcagggactctggcatttagaagcagaatactcaaattttgagaattactgttttttaagatacaagactatctgga

SEQ ID NO: 518329 - DNA, 201 bp, Homo sapiens
cgggtgtggtggctcacgcctgtaatcccagcaatttgggaggcccagtaggccaggtatcataaaacaagctaatcaaaaacataattttagcaaattcwagattaatgtggttttatttttagttttaaaatcctgtttttatacagtttagcaatggcattattctaccatacatttattgaagaattaagactcttc

SEQ ID NO: 518330 - DNA, 201 bp, Homo sapiens
aaacataaaacactgaaaagtacattttataaaacacttcgcattaaaagccttacataactgaatttttttatttatacattgggaaaaataaaatgccrgcttcacagaaattcaacactatattaaaattttactaggaaaatctaaagaaaattgctttatgttcataaatcaatgttaaaacaggaaaataaatcc

SEQ ID NO: 518331 - DNA, 201 bp, Homo sapiens
gatgcagagaactcaaacaactgaaaaaggataagggtgctgttttaggtagcaccttttcacacctggtctcctctatcaaatgaaaatatggttttttwtccaaaccaaaaagcatttttaagaattgtctacttatgtaaacaggtatttctcttagttcactaaggagaaaacacattatttctgtgtactaaagta

SEQ ID NO: 518332 - DNA, 201 bp, Homo sapiens
atcacttgaacccaggagatagaggttgcagtgagccgagattgtgccattgcactccagcctgggcaacaagagtgaaactccatctcaaaacaaacaamaaaaaaaaaaaaaacaaaaaaaaaagaatcaaaagcagatacttaaaccaaacacccatgttcacagcagcattactcaaaatcaccataaggtagaggc

SEQ ID NO: 518333 - DNA, 201 bp, Homo sapiens
tcatctctaagggctagaaaaattacaggcaaaggaaaatcttaaacaggaaaaaagagagaagaaatcagtaaagtagaaagcagacttagaaaagaggaaaaaaatcaaaggcaaaaatataaaatataaaattgataaacccttaagaagagaaatcaagggaggaaaaaacccacaaattaaaaattacagtaatta

SEQ ID NO: 518334 - DNA, 201 bp, Homo sapiens
gtgagactctgtctctacaaaaaatacagaaaaattagccaggcatggtggcgcattcctatagccccagctactcggggagactgaggcgagaggatcayctgagcctgggagttccaggatgcaatgagccaggattggccactgcactccagcctggatgagagcgagattctgtttcaaaaaaacaaaaacaaaaca

SEQ ID NO: 518335 - DNA, 201 bp, Homo sapiens
aagggccccagaggaaccctgcggaaggacttcaatcacatcaacgtagaactcagactccttggaaagaaaaaaaagaggctccgggttgacaaatggtsgggtaacagaaaggaactggctaccgttcggactatttgtagtcatgtacagaacatgatcaagggtgttacactgggcttccattacaagatgaggtct

SEQ ID NO: 518336 - DNA, 201 bp, Homo sapiens
gggagcccaaagcagatggatctcctgaggtcaggatttcgagaccagcctggccaatatggtgaaaccccatctctactaaagatacaaaaaattagacrggcaaacctcatgagacatgaataaacagccaggggagttcttgatgaaaaaagaggctgctggttgttggtaagagaacagcaacagggtggatgcaaa

SEQ ID NO: 518337 - DNA, 201 bp, Homo sapiens
tcaacgtagaactcagactccttggaaagaaaaaaaagaggctccgggttgacaaatggtcgggtaacagaaaggaactggctaccgttcggactatttgyagtcatgtacagaacatgatcaagggtgttacactgggcttccattacaagatgaggtctgtgtatgctcacttcccccatcaacgtcgttatccagaat

SEQ ID NO: 518338 - DNA, 201 bp, Homo sapiens
ttcattcctgtcttttcctcactgcatatccaaccatcatcacctctggaacagccaggacctgaccattgttaccatctcttctaccaccaccatcctcyctccatccccagccacctcagcaaccattgatctggccttgctgcccctactcttgtcccttgtaatggagatcggctgctgcccaccccacttcccctc

SEQ ID NO: 518339 - DNA, 201 bp, Homo sapiens
cttcaactcaccaatgcatatgccagagccctcttagaaacgtggcttccttgaagggaagaccatgttgtcatcagggcagtgacctccaaggagcctgsaaaagagtgagaagacccactgggaataatgtggaaagaattcccatctgtgacataggagagaggcccagaatctggtggacgtgaagattccagttct

SEQ ID NO: 518340 - DNA, 201 bp, Homo sapiens
gaggcaggagaattgcttgaacctgggatgtggaggttgcagtgagccgagattgcgccactgcactccagcctgggcaacaagagtgaaactctgtctcaaaaaaaaaaaaaaaaaaaagtttatctgtaggggtaagtaagagcaggaatgggaatgaatcagaattacctcagtagggataacttttgatttagttgt

SEQ ID NO: 518341 - DNA, 201 bp, Homo sapiens
gcaccaacacatcctgttaatttttctattttttgtagaggcggggtctccctatgttgcccaggctggtcttgacattaagcgagcctcctgtcttagckaacctcctgtcttggattccctgaagtgctaggattacaggtgtgagctaccacacctggccgttccaattattttagaactcctgtgcccacttcctcc

SEQ ID NO: 518342 - DNA, 201 bp, Homo sapiens
atcctgtgccagaaagcaaggtaacgatcaaataatgaaaaaagaatgcacaagccaggcacggtggctcacgcctgtaatcccagcactttgggaggccraggcaggtggatcacctgaggtcaggagatcgagaccagcctggccaacatggtgaaacctcgtctctactaaaaatacaaaaaagtagctgggcgtggt

SEQ ID NO: 518343 - DNA, 201 bp, Homo sapiens
aagaaattttccaaggataactttgcccccacttttcttttttttttttttttttttaagagactgagtcttggtctgtcgcccgggctggagtgcagtartgccatcatttctcactgcagcctcaaactcctagactcaagcgatcttcccacctcagcctcaggagtagctgggaccactggcccgcaccaacacatc

SEQ ID NO: 518344 - DNA, 201 bp, Homo sapiens
aacgatcaaataatgaaaaaagaatgcacaagccaggcacggtggctcacgcctgtaatcccagcactttgggaggccaaggcaggtggatcacctgaggycaggagatcgagaccagcctggccaacatggtgaaacctcgtctctactaaaaatacaaaaaagtagctgggcgtggtggcagaggcctgtaatcccagc

SEQ ID NO: 518345 - DNA, 201 bp, Homo sapiens
cgcgagtgatctgccagccttggccccccgacgtgccgggattgcagacggagtctcgttcactcagtgctcaatgttgcccaggctggagtgcagtggcrtgatctcggctggctacaacctccacctcccagccgcctgccttgacctcccaaagtgccgagattgcagcctctgcccagccaccaccccgtctgggaa

SEQ ID NO: 518346 - DNA, 201 bp, Homo sapiens
cgggtgcggtgactcaggcctataatcccaacactttgggaggcgaggtggggaagggtaggagggggaggatcgcttgaggccagaagttcgagattagsctgggcaacatagtgagactctcttttttttttaatgtttaaatggcattatattgtgacaaatattaaataaccaaatattgcacaggaagcattatca

SEQ ID NO: 518347 - DNA, 201 bp, Homo sapiens
gcagtggcgtgatctcggctggctacaacctccacctcccagccgcctgccttgacctcccaaagtgccgagattgcagcctctgcccagccaccaccccrtctgggaagtgaggagtgtctctgcctggccgcccatcgtctgggatgtgaggagcccctctgcccggctgcccagtctgggaagtggggagcgcctctt

SEQ ID NO: 518348 - DNA, 201 bp, Homo sapiens
atactgcttttcaaagtaacaatttcaagacacttgaggggacagaatcaatctgaaagaccacagaatccacagaaaaatcagatttaacaataaaactrtttcttaaattgggaatacttctttatataaagtcccactaggaaacacaaaactttgtacccttttcaccagtagtttaaaactcatttattatacgat

SEQ ID NO: 518349 - DNA, 201 bp, Homo sapiens
cggggggcagcccccgcctggccagccgccccgtccgggaggtggggggcgcctccgcccggccgcggtcccgtctgggaggtggggggtgcctctgcccrgccgccccttctgggaagtgaggactccctctgcctggccgccaccccgtgtggcaggtgtacccaacagctcactgagaacaggccatgatgacgatgg

SEQ ID NO: 518350 - DNA, 201 bp, Homo sapiens
aaatccaagtaggataaacccagacccacaccaagacacactataatcaaactgttgaacaacaacaaagagagaatcttgaaagcatcaagagaaaaacmactcatcacaaacaagaaatcttcaacaagattatcagatttctcagcagaaaccctgaagcacagaaggttatgggatgacatatatttaaaaagtgct

SEQ ID NO: 518351 - DNA, 201 bp, Homo sapiens
aatttagaacaatttgaacatcaaaaggaatgaagaaatcacatcactctcaacttgaaacaacaaaaaaatgagtttattgtgaaactaaaggggggggygctagagttcttgttgctcgaaaaacataaactaataaatacattgttagaaaatcactaattagcaaacaccaatataactgatttaggcaaggatcat

SEQ ID NO: 518352 - DNA, 201 bp, Homo sapiens
acaagcaacaaaatgtatagtcataaatgacttggggtttgggggaggggagaatgacagcgttattgcttaatgggtagagagtttctgtttggggtgaygaaaaagttttagaaagaatagtgatggttacctaacagtgaatgtaatcaatgtcactgaaaagtatacacacaagaaatgttaaatggcagattttat

SEQ ID NO: 518353 - DNA, 201 bp, Homo sapiens
cttgagtgtaaaaaaagatatggttatgtagaagaatgaccttgatgtaaaatgataagtgcttcagtattattgatgtgatgatgtctgcaattcacttytgaatggttctgcagggggaaaagggaaaaaaaaggaatatataaagagaaaagcaaataggacaaaatgctaactgattactctaaacagtggtcatca

SEQ ID NO: 518354 - DNA, 201 bp, Homo sapiens
tgaatatggtacatgtcaatgttaatttcttgagtgtaaaaaaagatatggttatgtagaagaatgaccttgatgtaaaatgataagtgcttcagtattaytgatgtgatgatgtctgcaattcacttttgaatggttctgcagggggaaaagggaaaaaaaaggaatatataaagagaaaagcaaataggacaaaatgct

SEQ ID NO: 518355 - DNA, 201 bp, Homo sapiens
agatcgcgccactgcactccagcctggacaacagaaggagactccatctcaaaaaaaaaaaaaaaaaaaaaagaaaaaattagtaaatttctacaacttaraaattttagaaggtgttataaaaacaaatatttttcccttaagttaaattattctaaataatcttatttctcctgaaaggggactcagattaattacttt

SEQ ID NO: 518356 - DNA, 201 bp, Homo sapiens
gcttcaaaaatgccaatttcataaagacagaaggtggcggggaataattttagatgaaagaagattaaggagctaagagagtcaaatgccatagtaatctytgattggctcttgcattgaaagagagttataaaggacatttttagaaaaactgagaaaatgtgaatatggtacatgtcaatgttaatttcttgagtgtaa

SEQ ID NO: 518357 - DNA, 201 bp, Homo sapiens
agtttcttttgattttcttgtggttcctcttccaaaatgctctcactggtgtcactgcaagtggcttcttcgcagctgatactcctcaaaactccccgccyatcatcaaattcagcagcactgctttcactagtgtcgctacacacactattctctctacttcgagacttcaggatggatttgcgagggacatattctcca

SEQ ID NO: 518358 - DNA, 201 bp, Homo sapiens
ccatctccaaaaaaataaaaaaaaaatgatgaggaatatctctatgaaccagagtaattcccaggtttatcatttaatgagatgaacaaaaggcaaaatawgctgccttttgtataagaaagcagtatggaggggagataaagtgaacacatgtatttttgaagaagaaacagaggaaggacaggtcaaaagtgaatgtaa

SEQ ID NO: 518359 - DNA, 201 bp, Homo sapiens
tacgttcaaaaacaggcaataccagagatcaatgtcaatatttcaagtcaaatataatcagttttcaacttattaataattctctctggaataaaaatgcrgacatactggagagcagtttaagattagagttgctatttataaattttgaattattttctaaaaatacaaaagtagaagatcacttaaaatgcagcccat

SEQ ID NO: 518360 - DNA, 201 bp, Homo sapiens
atgtacattttgttctcctctgtctaccaagtgctcaaaattagttaaaacaacgtaacacctaaataatttaaaaagccaccttcttctaccttgccccrccactgaaacaaaaacaaagaaagccatctctctcctacattatttttggagttcaactggtaaaagcagcttaaagcttactttcctaaaaactccact

SEQ ID NO: 518361 - DNA, 201 bp, Homo sapiens
aaaagaaaagaaaagaaaagaaaaggaaccagaggcccagaggcagtggaataacacagttaaagtcctggggaaaaaaaaaaaaaagactgtcaagcaaraatttcctaccagacaaactatccttcaggaataaaggagaaattaagacattttcagataaataaatgcagagaaagctcattgctagtagccctgctc

SEQ ID NO: 518362 - DNA, 201 bp, Homo sapiens
tcctgacctcaggtgatccacctgccttgtcctcccaaagtgctgggattacaggcatgagcccctgcgcccggcccagaatttattgtaacaggaaataygtactttgaaaattattttagataaatattgatcccaaaagtcatctatgtttggtcactttccaaaaccatatttaactactagaaagtgatttacaaa

SEQ ID NO: 518363 - DNA, 201 bp, Homo sapiens
acttcttaaactgacaatattgagggctggtagagacgcaaagataccactatcacacactgctgaaagagatgtaaatcatacagccactttggaaaacrgcttggtagtctcttaaaaattgaacatacatttatcatatgatctaacaatctcacttgtaggtatttaccaacagcaataaaaatgtatgttcgcaca

SEQ ID NO: 518364 - DNA, 201 bp, Homo sapiens
cagctgatactcctcaaaactccccgcctatcatcaaattcagcagcactgctttcactagtgtcgctacacacactattctctctacttcgagacttcargatggatttgcgagggacatattctccattcacaacatcaacaaaggctctgtgatattcaaaacacatatgcattcactatacgtaactcataaaactg

SEQ ID NO: 518365 - DNA, 201 bp, Homo sapiens
agagaaaagaaaagaaaagaaaagaaaaggaaccagaggcccagaggcagtggaataacacagttaaagtcctggggaaaaaaaaaaaaaagactgtcaascaaaaatttcctaccagacaaactatccttcaggaataaaggagaaattaagacattttcagataaataaatgcagagaaagctcattgctagtagccct

SEQ ID NO: 518366 - DNA, 201 bp, Homo sapiens
atggaatcatacaatatatggtcttttgtgactggtttctttaatttattctaatgttttcaaggtacacatctttttattgccaaacaacattccactgyatggatgtacgacacttattcacctgttattagttgatagacatttaggttgtttccatgtttcggctactataagcagtgctgctcttaatattcatgt

SEQ ID NO: 518367 - DNA, 201 bp, Homo sapiens
gcggttcatccagggaagaaaaatcaatcaatataatccaccacattaacagatacagaagaaaaactacaagatcatatcaatagatgcagaaaatacaytggacaaaattcaacatattttcatttaaaaaatccgcaaattagaaccaggtagaaagttccctaaacttatagggagtattaatttttttaaaaaacc

SEQ ID NO: 518368 - DNA, 201 bp, Homo sapiens
aaacttgtctatactgtagaaacctctgattaaatcctggtcttttcacttagtctcattgaagatgtactcctttctaagccaaaaattgctctctaacstaaaaaagaattcagcaaatctcaaagcaagtatttagagtaaaacttttaagttcacgtgaaatacattaatccctaatttgtaacattaaaaatactt

SEQ ID NO: 518369 - DNA, 201 bp, Homo sapiens
atcagtaagcagatcagaagaggatggaggagaaaagtacatagttctttctctaccaatgatgaatgcaggtctggcaaaggtctaagcagttaaaatawcttttaaaagaatgaaaataaggaagggagttaaaagtgaaatatcaccacatatgaagggcttctcgagagtggcacatgttctccgatacggctctca

SEQ ID NO: 518370 - DNA, 201 bp, Homo sapiens
ttgggaaccacaacattaaacaagactaaagggatatttttcattacagggcttctaagtaacgtgcctatgtgcattttactctctggtagagggaaagyagtgtgcagtgatctacaaacttacttgattatgtcaacaacattgcctctaggtcaccactcatccaatgcttcccctcaaccttcacattcaatcagt

SEQ ID NO: 518371 - DNA, 201 bp, Homo sapiens
aaaatggggagttatcacctaactggtacagttttaatttgagaagatgaaaaatatctggagatggatggtggttatagctgaccaaccatgtgaatgargggaagggaagggaggggaggggaggaaaaggaggaaaagacagtaagttagctagttagcagtgccagggggcctacaataaggtatcagtttcaaaac

SEQ ID NO: 518372 - DNA, 201 bp, Homo sapiens
gaatagccaaattcatatggaaagtagaatagtggttaccaggggatggggggaggaaggaaaaaatggggagttatcacctaactggtacagttttaatytgagaagatgaaaaatatctggagatggatggtggttatagctgaccaaccatgtgaatgaggggaagggaagggaggggaggggaggaaaaggaggaaa

SEQ ID NO: 518373 - DNA, 201 bp, Homo sapiens
catttctccaaagatgatatacatgtggccaataaacacatgaaaagatgctcaacataattaatcactgaagaaatacaaatcaaaaccctgctgatacwtcacttcaaatccacttcaaactatattccttgatgatatgccacttcaaaatatatttattttatatataaaaaatatagtaacaagtgttgacaagaa

SEQ ID NO: 518374 - DNA, 201 bp, Homo sapiens
ccgcccatcgtctgggatgtgaggagcccctctgcccggctgcccagtctgggaagtggggagcgcctcttcccggccgccatcccgtctaggaagtgagragcgtctctgcccagccgcccatcgtctgagatgtggggagcacctccgccccgccgccccgtctgggatgtggggagcgcctctgcccggccacgaccc

SEQ ID NO: 518375 - DNA, 201 bp, Homo sapiens
ccagtctgggaagtggggagcgcctcttcccggccgccatcccgtctaggaagtgaggagcgtctctgcccagccgcccatcgtctgagatgtggggagcrcctccgccccgccgccccgtctgggatgtggggagcgcctctgcccggccacgaccccgtctgggagatgaggagcgtctctgcccggccgccccgtctg

SEQ ID NO: 518376 - DNA, 201 bp, Homo sapiens
gagccccctctgccccacagccgccccatctgggaggtgaggagcccctccgcccggcagctgccccgtctgggaagtgaggagcgtctccgcccggcagmagccccgtccgggaggcggggggcagcccccgcccggccagctgccccgtccgggagggaggcggggggcagcccccgcctggccagccgccccgtccgg

SEQ ID NO: 518377 - DNA, 201 bp, Homo sapiens
cttcaagaccttggatctggcaatggattcttagatatgacaccaaaaaacacaagcaacaaaatgtatagtcataaatgacttggggtttgggggagggragaatgacagcgttattgcttaatgggtagagagtttctgtttggggtgacgaaaaagttttagaaagaatagtgatggttacctaacagtgaatgtaat

SEQ ID NO: 518378 - DNA, 201 bp, Homo sapiens
gagcgtctccgcccggcagaagccccgtccgggaggcggggggcagcccccgcccggccagctgccccgtccgggagggaggcggggggcagcccccgccyggccagccgccccgtccgggaggtggggggcgcctccgcccggccgcggtcccgtctgggaggtggggggtgcctctgcccggccgccccttctgggaag

SEQ ID NO: 518379 - DNA, 201 bp, Homo sapiens
tacacaaaagccaatgaaactgcaaagacattttgaactttacttcaggtttgccattggcagtggtattaatgcagtaattctgaagctattttgtatayattgtaggatagagcaaatgaataaatgcagatgttgagaaccaaggttttcactatgaaagaaggggagtttcaaatatagactggggaaaatttaaga

SEQ ID NO: 518380 - DNA, 201 bp, Homo sapiens
gaggcggggggcagcccccgcccggccagctgccccgtccgggagggaggcggggggcagcccccgcctggccagccgccccgtccgggaggtggggggcrcctccgcccggccgcggtcccgtctgggaggtggggggtgcctctgcccggccgccccttctgggaagtgaggactccctctgcctggccgccaccccgt

SEQ ID NO: 518381 - DNA, 201 bp, Homo sapiens
cggccagctgccccgtccgggagggaggcggggggcagcccccgcctggccagccgccccgtccgggaggtggggggcgcctccgcccggccgcggtcccrtctgggaggtggggggtgcctctgcccggccgccccttctgggaagtgaggactccctctgcctggccgccaccccgtgtggcaggtgtacccaacagct

SEQ ID NO: 518382 - DNA, 201 bp, Homo sapiens
ggggggtgcctctgcccggccgccccttctgggaagtgaggactccctctgcctggccgccaccccgtgtggcaggtgtacccaacagctcactgagaacrggccatgatgacgatggcggttttgtcgaatagaaaagggggaaatgtggggaaaagataaaggaatcggattgttgctgtctgtgtggaaagaagtaga

SEQ ID NO: 518383 - DNA, 201 bp, Homo sapiens
ccaggaagttattacaattttaaatttgtatacaatgaataacatagctgtaaaatatataaagcaaaggttaaaaaaagagagaaaaataaatctataaycctagtgactattttaatacatatctcaataaatgatagaattagcagacaaaaaaattaacaaggacataaaatactggaacaacatattcaagcagcc

SEQ ID NO: 518384 - DNA, 201 bp, Homo sapiens
ctcacctcagcctcccaagtacgtgggactacaagcgtgcaccaccatggcccggctaattttttgtatttttttgtatagacggaggtctccctgtgttrcccaggctgatctcgaactccttggcttcaagcaattccacgaccttgacatcccaagcagctgggattacaggtttgagtcaccaccctagccactgga

SEQ ID NO: 518385 - DNA, 201 bp, Homo sapiens
tactaatactaatatccaacaaaggagacttgaaggcaagtagcattactagagataaaaatatctcagaatggtgaaaaggtcaactgaccaggaagttwttacaattttaaatttgtatacaatgaataacatagctgtaaaatatataaagcaaaggttaaaaaaagagagaaaaataaatctataatcctagtgact

SEQ ID NO: 518386 - DNA, 201 bp, Homo sapiens
gaaaaaaatggtaactgggaaaatggcaatgaagatcacaggaaacagccaattcaaggaattcctagttttcagatataatattcttctatttctcttaygtatttttatttcacattataaattaaattaaacataatagttcattgagagggtggttataaatatggataaagctaaacaaatttaccctttgactca

SEQ ID NO: 518387 - DNA, 201 bp, Homo sapiens
tataaattaagctactgtactaattttaatatgctgctatgaatggactaagaaattttccaaggataactttgcccccacttttcttttttttttttttwtttttaagagactgagtcttggtctgtcgcccgggctggagtgcagtagtgccatcatttctcactgcagcctcaaactcctagactcaagcgatcttcc

SEQ ID NO: 518388 - DNA, 201 bp, Homo sapiens
aatactctaaataaaaggaaaagatatctagactgaatattaaaaccacaacaatatgctgtttataagacacacttcgaacccaaaagactgaagttaaraagattttttttaaagatagacaaaacaaacaaatttagctggtgtgaccatactaatactaatatccaacaaaggagacttgaaggcaagtagcattac

SEQ ID NO: 518389 - DNA, 201 bp, Homo sapiens
gttatagaagtaaataaattgatataccatgttcatagattttaaaacttaatattgtaaacatcttaattctcctcaaaccgatctttagatccagtgcmctccaagcaaaaccccagtaatgttattttttgagtattggaaaggtgatcctaaaatatatacaaaaaagcaaagggtcagaatagtaaagacaatctt

SEQ ID NO: 518390 - DNA, 201 bp, Homo sapiens
ggctggagtgcaatggtgccatcttggctcactgcaccctctgcctcttgggttcaagcgattctcctgcctcagcctcctgagtagctgggactacaggygcgtgccaccacacctggctaatttttgtatttttagtagaaacagggtttcaccatgttggccaggctggtctcaaactcctggcctcaagtgatccac

SEQ ID NO: 518391 - DNA, 201 bp, Homo sapiens
gaaccatttgacactccagtaatgaggatggtccttacagaaaacaaaaacagccaatgcaaatgccaaaagttgcccagtatgtggactggaacccttgygaatttgtccgggaatgtaaaatggtacagtcaccggagaaagcagtgtggcagttccttaaaaattaaacacagaattaccatatgatccagaaattcc

SEQ ID NO: 518392 - DNA, 201 bp, Homo sapiens
ataatgattaatatgttcaaggaaatagaggaaaagataaaaggaatatattttaaaaatagcaattttcactagagaactgaaatctacaggaagaaacmaatgaaaattgtacaactgaagaaccaaaaattaaaataaatggcattaaaagaagattaaacagcagaaatcaggatttttgaacttgacaggtcaaaa

SEQ ID NO: 518393 - DNA, 201 bp, Homo sapiens
cccaatggcatgcacctgtagtcccagctactcaggagactcaggcaggatcacttgagctcaggagttcaaggttgcagtgagctatgaccataccactrcactccagcctgggtgacaaagcaagacacagtctcttaaaataaaattattaaaatggtaaattttgttatatttactacaattttttgaataaaaaat

SEQ ID NO: 518394 - DNA, 201 bp, Homo sapiens
aaaaaaagcagagaaaaaagaacataaaagtacatcaattagaactataatggggaaccatttgacactccagtaatgaggatggtccttacagaaaacaraaacagccaatgcaaatgccaaaagttgcccagtatgtggactggaacccttgtgaatttgtccgggaatgtaaaatggtacagtcaccggagaaagcag

SEQ ID NO: 518395 - DNA, 201 bp, Homo sapiens
gacttcttacagtaaattatttcataatttcctaagcatctgtatgatttgcaactaagaaaactttagagtagcaaacttgccacacaggttaggaggasaatgtgcctgtgaaaggctcaaaggaaacaaacagtccactgaagagtaaatacaagtagaagaaaaaaaaaaaaaaacaggaaaatatactcccaggta

SEQ ID NO: 518396 - DNA, 201 bp, Homo sapiens
tataacactgtcaagcttcaactcaccaatgcatatgccagagccctcttagaaacgtggcttccttgaagggaagaccatgttgtcatcagggcagtgamctccaaggagcctggaaaagagtgagaagacccactgggaataatgtggaaagaattcccatctgtgacataggagagaggcccagaatctggtggacgt

SEQ ID NO: 518397 - DNA, 201 bp, Homo sapiens
aataatttcttagctgttgttcctcagaagctgctttttaaaaattattttataaaggagagcagtaacatgcagtaagatctccagtacttaaaattttyatttgtgctatttatattggtgacagaccacaagagggcataaacctatgagtttctaaggcaagttaaatacaatgccacactaaaactagactggaac

SEQ ID NO: 518398 - DNA, 201 bp, Homo sapiens
tagacctaatagacatatatagaaacctccacccaacaacaggaaaaatacacaccttctaagggaaacatggaacagtcaccaggataggtcatatgagrggccacaaaataagtctcgaaaaatttaacaagattgaaatcatataaagtatcttttctaactggaatgctcaataacattaaaaatcattaatagaag

SEQ ID NO: 518399 - DNA, 201 bp, Homo sapiens
gcagagtaaaaatagccaaaaacagaaagtaattacatctgaggaatgggaactgtgagccaaaagggataagtgaatgctgctcttttttttaaataacrtcttaagatggtttgtggttatttaaagctatatacatctatcataaactaaaatcataaatttgtattttgaaatgccttattggagatactcaagagc

SEQ ID NO: 518400 - DNA, 201 bp, Homo sapiens
atactgaaccttgaaacgcccagcctggttctcagaacactagatgaagaagatcagaagactcttttgtagaatctgctgatacttaaagattgctcaawttaaaaaaaataaataaatcagcttgctaccttaaatccctacaaaaaatacctatcagtcaacaaaccttgcctatgcacacagagcttcctgacagta

SEQ ID NO: 518401 - DNA, 201 bp, Homo sapiens
ctacaaggaaacaacggcggctcatctctgtaaagttctattatcattttacatatgaacatctctactttttaaactgcttcatttgtaatcttcatgtraggaaaaaagatgggtcaaatctgaactcagaggtatctgcttttcattttaaaaaatagattattttttaataaagcaaattaaggctttatttgcttt

SEQ ID NO: 518402 - DNA, 201 bp, Homo sapiens
gtttataaaaggaaagcaagaataaacattttactgtatcaaatttaaattcaaagtgtatttttgtttttcacaacacattcaaagatagagcactatcytgggtgtggcataaaaatacttcatttaaaatttaacattatatatattaaatccatgattattaaaagtcaactatctggtataattaattatataaaa

SEQ ID NO: 518403 - DNA, 201 bp, Homo sapiens
ctttaagtcataaaagtactattaaataatgcctatttagaatttttaaaacatctctaatttttagaaattgaaggagtaaaaaaataaaaaccaagccygttcagggttcacatggggttaacatgttatttttctatccctagtcagcacttagagcatactttccacaataatgaccactattacctgtaacgttcc

SEQ ID NO: 518404 - DNA, 201 bp, Homo sapiens
agagccttcttctccttcttctatttaaaatgcctttgaaaaagaggtattttagcatttaaaaagatactgaaaaggatatcttccaaagtacttaccayaatcatgaactatttctttgatgttaaaaaatgtatagcaactactattaaacatttccatacaaaatgcaaagctactaagggtgaaataaaaaatagg

SEQ ID NO: 518405 - DNA, 201 bp, Homo sapiens
ctatgatggccttgctgcctgctagccaatagcttagtttcaccagtactgacatttctaactgatatctctttggtggtgtttatgcaattatttaaatrttttactgcatattgcctcaattttaaaagatcagtggaagttgaaaaataaaagtgctgatactagtaggaataagtacaggtttcaaaattttaatat

SEQ ID NO: 518406 - DNA, 201 bp, Homo sapiens
ggcaaacttagataagagtgttgacagtattcagagaattcacaaaacaagctgatattaaagtattcagacagttaccttgatttttttcaaataccackggtaagggtaaaagaacttgttgccaaagtaactcaggataccttatttcaaactacatgtaacctattttgctatagatactctaaacaaatgaacaac

SEQ ID NO: 518407 - DNA, 201 bp, Homo sapiens
aggcaggagaatcacttgaaccctggaagtggaggttgcagtgagccgagatcatgccattgcaccccagcctgggcaacaagagtgaaactcctctcagaaaaaaaaaaaaaatggtaggccaggcacagtggctcatgtctgtaatcccagcactttgggaggctgaggtgggcagatcctgaggtcaggagatcgaga

SEQ ID NO: 518408 - DNA, 201 bp, Homo sapiens
ggagggtggatcacttgaattcaggagtttgagatcagcctggccaacatggtgaaaccccatctctactaaaatacaaaaattagccaggcattgtgacrcgcacctgtaaccctagctactggggaggctgaggccagagaatcacttgaatcaagaaggaggaggttgcagtgagccaagatcatgccactgcactcc

SEQ ID NO: 518409 - DNA, 201 bp, Homo sapiens
agagcaattaagcaagaaaaacaaataaaaagcctccaaattggaaagaagtcaagttctctctactaccaacatatgatacaatcttatatgtaatatgyagaaaaccctaaagaatacacacacacacacacacacaaaacaccctcgtaaagctaataaaaaaaattcagcaaagttgcaggatgcaaaatcaacaca

SEQ ID NO: 518410 - DNA, 201 bp, Homo sapiens
tcaggagtttgagatcagcctggccaacatggtgaaaccccatctctactaaaatacaaaaattagccaggcattgtgacacgcacctgtaaccctagctrctggggaggctgaggccagagaatcacttgaatcaagaaggaggaggttgcagtgagccaagatcatgccactgcactccagcctgggcaatagagtgag

SEQ ID NO: 518411 - DNA, 201 bp, Homo sapiens
gtggctcacacctgtaatcccagcactttgggaggccgagacaggtggatcacctaagatcaggagtttgagatcagcctggccaagatggtgaagccctmtctctacgaaaaatacaaaaaattggccaggcattgtggcaggcgcctgtaatcccagctactcaggaggctgaggcaggaaaatcaaacccggaaagca

SEQ ID NO: 518412 - DNA, 201 bp, Homo sapiens
tgaggcaggagaatcactggaacctgggaggcagaggttgcactgagccgagatggcaccactgcactccagcctgggtgacagagcaagacttcatctcaaaaaaaaaaaaagggaagaaaagaaaaagaaagaaggaataacaaagattagagtggagaaaaacaaaacagaaaacagaaaaatgatagaggaaatcaa

SEQ ID NO: 518413 - DNA, 201 bp, Homo sapiens
taaaagaaagaccactataggatctgcacaagctaaccaaccatctaaagcagctggtacaggaaacaacataaatgtacaagaaaacaaaacacagagasccaaaaaactcctacccttgactccctcctgacttcttacagtaaattatttcataatttcctaagcatctgtatgatttgcaactaagaaaactttaga

SEQ ID NO: 518414 - DNA, 201 bp, Homo sapiens
agaaaagaaaaagaaagaaggaataacaaagattagagtggagaaaaacaaaacagaaaacagaaaaatgatagaggaaatcaatgaaaataaaagttgattttttttttttaaagagatcgagtctcactctgttgcccaggctggagtgcagtagcacagtctcggctcactgcaacctccgcctcccgggttctagca

SEQ ID NO: 518415 - DNA, 201 bp, Homo sapiens
ccaattatatggagccacttctgaaaacacttacatgttcttatttaaaatgttagctaagatggaatcaaaagtctccttaatctttacctttatgtttkagccagattcctcctacacaggcttctaagcattttttcctgtatgccaatctagtctcgttttacacaaatatcggactatgtctaacgtgctctggca

SEQ ID NO: 518416 - DNA, 201 bp, Homo sapiens
tctgtctctactaaaaatacaaaaaattagctggatgtggtgatgggcacctgcaatcccagctactcaggaggctgaggcaggagaattgcttgaacccrggaggcagaggttgcagtgaaccaagatcgtgccactgcactccagcccgggcaacaagagggaaactcagtctaaaaaaaaaaaaaaaaggaatgaagg

SEQ ID NO: 518417 - DNA, 201 bp, Homo sapiens
taagcttaagttcaccaattcactaacattataatccttatttcttccaatgcctcctacagctcctgaccctttcagatgaaacaagtataaacacattycccaagcatcatttactagtatatctgtgtatgtttaggtgaaggtagaagggtaatgtgctagccctacaattactatcacacctcatcatatttttaa

SEQ ID NO: 518418 - DNA, 201 bp, Homo sapiens
ccccatctctactaaaaatacaaaaattagccgggtgcggtggcagacacctgtaatcccagttacttgggaggctgaggcaggagagtcacttgagcccrggaggcggaggttgcagtaagctgagatcacaccactgcactccagcctgggtgacagaccaagactgtgtctcaaataataataataatcatcatcatc

SEQ ID NO: 518419 - DNA, 201 bp, Homo sapiens
cagaaaaccctaaagaatacacacacacacacacacacaaaacaccctcgtaaagctaataaaaaaaattcagcaaagttgcaggatgcaaaatcaacacmcaaaaatcaactgcatttctatgcactaacaatgagcaatctaaaaaggaaatttgtaagcaattcatttaaactagaaccaaaaggactaaactcttaa

SEQ ID NO: 518420 - DNA, 201 bp, Homo sapiens
cttgagcccaggaggcggaggttgcagtaagctgagatcacaccactgcactccagcctgggtgacagaccaagactgtgtctcaaataataataataatmatcatcatcatcataatcatcatctcaaatgatgccgaaaaagcatttgacaatatccaacatcaagataaaacacttagtaaagtaggaatagaaacga

SEQ ID NO: 518421 - DNA, 201 bp, Homo sapiens
ctatttaggagtctttaccaacaacccagtggctacaaagtcatatggtatccattctttgcaacacaaaactgtctttaacctatgagcaataacaacasgagtatatgccaacactgcatgtgacaaaacgaactgcaaagagttcaatggaggcggtttaaatctttatttggagaggaaacctgtattcagagatga

SEQ ID NO: 518422 - DNA, 201 bp, Homo sapiens
ccaacacattgggaagccaaggcaggtagatcacttgaggtcaggaattcgaggccagcctggccaacatggtgaaaccctgtctgtactaaaactacagaaaaaaaaaaaaaaaagacaggcatggtggcagctagtagtattcctgtctactacttgggaggctgaggcacgagaatcacttgaatgcaggaggcagag

SEQ ID NO: 518423 - DNA, 201 bp, Homo sapiens
ttattttcatttttcttaaaaatagttactaggcttcaactttaaaatacctgaactagtaaattctttaacataatgacctcgtttacactcaagaattyataataaagtatgtacctacatagaagtacagcagtaagtccacagtaaagaaaaagaactatgagctgatttaccactatttaggagtctttaccaaca

SEQ ID NO: 518424 - DNA, 201 bp, Homo sapiens
cttgaggtcaggaattcgaggccagcctggccaacatggtgaaaccctgtctgtactaaaactacagaaaaaaaaaaaaaaaagacaggcatggtggcagytagtagtattcctgtctactacttgggaggctgaggcacgagaatcacttgaatgcaggaggcagaggttgcagtgagccgagatcgcaccactgcactc

SEQ ID NO: 518425 - DNA, 201 bp, Homo sapiens
caagcaacacttgaaaaacacagcaaaagaaacaaaaacatttcattactttgttgtcctccacaaaagtaagaccacaatggaagaacaaaactagtttytgtttattttttaaacctgccaaaacatgcaaatagtgcccctaaagaaaaaaaacttattgtattattttcatttttcttaaaaatagttactaggctt

SEQ ID NO: 518426 - DNA, 201 bp, Homo sapiens
aaaaaaaaaaaaaaaaaaaaaaaaaaaatacacacgattttttttagacctgtcactaaattcctctattgtaacatttaattcctgaaataaatgtcctyttttgggacattttaaatactaagacagaaattctgtaccaaaatacatgctataatcagaaacccaaccatactacacattaactcagcataaaaagtc

SEQ ID NO: 518427 - DNA, 201 bp, Homo sapiens
tgtttcaccatcccgtcccagcaaaaaaaaaaaaaaaaaaaaaaaaaaaatacacacgattttttttagacctgtcactaaattcctctattgtaacattwaattcctgaaataaatgtcctcttttgggacattttaaatactaagacagaaattctgtaccaaaatacatgctataatcagaaacccaaccatactaca

SEQ ID NO: 518428 - DNA, 201 bp, Homo sapiens
cttaagactaggccatgagaaaaagagagcagcattatctggtttgcaaaacgctgctctagttcactgctctaaataccaatattgtctcttgtatatgstcaatgtttcaccatcccgtcccagcaaaaaaaaaaaaaaaaaaaaaaaaaaaatacacacgattttttttagacctgtcactaaattcctctattgtaa

SEQ ID NO: 518429 - DNA, 201 bp, Homo sapiens
aactaggggatgaaagccaaaatgcttaagactaggccatgagaaaaagagagcagcattatctggtttgcaaaacgctgctctagttcactgctctaaawaccaatattgtctcttgtatatgctcaatgtttcaccatcccgtcccagcaaaaaaaaaaaaaaaaaaaaaaaaaaaatacacacgattttttttagacc

SEQ ID NO: 518430 - DNA, 201 bp, Homo sapiens
aaaaattttaaacagcagtctagaataccatataccattttagagacagagaaactaggggatgaaagccaaaatgcttaagactaggccatgagaaaaaragagcagcattatctggtttgcaaaacgctgctctagttcactgctctaaataccaatattgtctcttgtatatgctcaatgtttcaccatcccgtccca

SEQ ID NO: 518431 - DNA, 201 bp, Homo sapiens
taattatctacttttaaattacctattaataaaaattttaaacagcagtctagaataccatataccattttagagacagagaaactaggggatgaaagccmaaatgcttaagactaggccatgagaaaaagagagcagcattatctggtttgcaaaacgctgctctagttcactgctctaaataccaatattgtctcttgt

SEQ ID NO: 518432 - DNA, 201 bp, Homo sapiens
cgggctgcacacccctcactccgctgcgaagtcaaagggctgcagacaaagacaacagaagcacgtgacaaaagtttatccccgttccctccgggggcccrggcagctgggcctaggccacgcggggcggcggcccagagcacaggcaggggcagcccggcgggcggaggcggaagcggcgcggggctgctagttaccttt

SEQ ID NO: 518433 - DNA, 201 bp, Homo sapiens
ggagcgtctctgcccggccgccccgtctgaaaagtgaggagcccctccgcccggcagccgccccatctgggaagtcaggagccccctctgccccacagccrccccatctgggaggtgaggagcccctccgcccggcagctgccccgtctgggaagtgaggagcgtctccgcccggcagaagccccgtccgggaggcggggg

SEQ ID NO: 518434 - DNA, 201 bp, Homo sapiens
aaaaaaaaaaaaaaaaaaaaagccgggtgcagtggctcatgcttgtaatcccagtactttgggaggccgagacaggtggatcacctgaggtcaggagttcraaaccagcctggccaatatggtgaaaccccgtgtctactaaaataaaagattagccgggtgtggtggcatgtgcctgtaatcccagctactcaggaggct

SEQ ID NO: 518435 - DNA, 201 bp, Homo sapiens
gccgggtgtggtggcatgtgcctgtaatcccagctactcaggaggctgagggagaagaatcacttgaacctgggaggcagaggttgcagtgagccgagatkgcaccactgcactccagcctgagcaagacagcaagactccatttcagaaaaaaaaaaaaaaaaagagggatgaaattagacttcatctcttgatgggaca

SEQ ID NO: 518436 - DNA, 201 bp, Homo sapiens
agggagaagaatcacttgaacctgggaggcagaggttgcagtgagccgagattgcaccactgcactccagcctgagcaagacagcaagactccatttcagaaaaaaaaaaaaaaaaagagggatgaaattagacttcatctcttgatgggacaaatgccaaggaatttgtgatcctatgtgaagaccaccacagctaccac

SEQ ID NO: 518437 - DNA, 201 bp, Homo sapiens
caatttaagaattaacactgttttcaaggattgctaattatctacttttaaattacctattaataaaaattttaaacagcagtctagaataccatataccmttttagagacagagaaactaggggatgaaagccaaaatgcttaagactaggccatgagaaaaagagagcagcattatctggtttgcaaaacgctgctcta

SEQ ID NO: 518438 - DNA, 201 bp, Homo sapiens
tagacaataaagaaaaatgcaatttaaaaaaataacactatttttgaatgacaatttaagaattaacactgttttcaaggattgctaattatctacttttwaattacctattaataaaaattttaaacagcagtctagaataccatataccattttagagacagagaaactaggggatgaaagccaaaatgcttaagacta

SEQ ID NO: 518439 - DNA, 201 bp, Homo sapiens
aagttatttgttttccttggagatatgtcagtagattctcaaaatgctcagaaaataagaagactagacaataaagaaaaatgcaatttaaaaaaataacmctatttttgaatgacaatttaagaattaacactgttttcaaggattgctaattatctacttttaaattacctattaataaaaattttaaacagcagtcta

SEQ ID NO: 518440 - DNA, 201 bp, Homo sapiens
atcaaagagcaacaaacagtacacattttaagcaatgtttaggtcattacaagctacaaatattaaggcgaacgcttccgttgacagcgtgctgcccccgyccccaaattcccacgcgctgccgcacgccttcagctcagaagccccctttcctgggcaggcgaacgggctgcacacccctcactccgctgcgaagtcaaa

SEQ ID NO: 518441 - DNA, 201 bp, Homo sapiens
tgatcctcccacttcagcctcctgaagtgctagagttacaggcgtgagccactgcacctggcctcactcaaaagctttattaaatctcttctttcagtcgkgtgtggtggctcacgcctgtaatcccagcaatttgggaggcccagtaggccaggtatcataaaacaagctaatcaaaaacataattttagcaaattcaag

SEQ ID NO: 518442 - DNA, 201 bp, Homo sapiens
gcggacagatcatgaggtcaggagttcaagaccagcctgaccaacatggtgaaaccctgtctctactaaaaatacaaaaattagccgggcgtggtggtacrcacctgtaatctcagctactcaggaggctgagcaggagaatcacttgaacccgggaggcggaggttgcgatgaactgacatcgcgccactgcactccagc

SEQ ID NO: 518443 - DNA, 201 bp, Homo sapiens
ggggtcatgaggaccagggatgaaagcgaggtggctaaaaaatgacagaaaccccctataatgcacgtgtttgtttagatcgccagtacaccgagcaacartggggggctcctgtccttgaaactgactttgcctgtgcttgtggaggaggctggtaaaaccattgtaaaaggtgagtccgcaagcacccaggtgtttgtg

SEQ ID NO: 518444 - DNA, 201 bp, Homo sapiens
tggggaaaaaaaaaaaaaagactgtcaagcaaaaatttcctaccagacaaactatccttcaggaataaaggagaaattaagacattttcagataaataaaygcagagaaagctcattgctagtagccctgctctacaagagctgctaaaatgaatccatcaggctgaaatgaaaggaaacttgatagtaattcaaagccat

SEQ ID NO: 518445 - DNA, 201 bp, Homo sapiens
ggccttgccttatagcctgggcttctttgcagcacgcctgttgagttccaagggagccagacagaagtggcatggccttttctaatctagcctggagtgtygtgtagtatcccttcagccacattctactcatcagaagcaagtcactaaggccagctcacattcaagagggatggaattaggccgggcaccgtaggtcac

SEQ ID NO: 518446 - DNA, 201 bp, Homo sapiens
gaaaagagtcaaattactaaaatcagaaatgaaagtgagacagtactgttttgcagaaataaattggataatactataaacaattgtactccaaaaaatcrgaaaaccttagatgaaatgtacaaatttttagaaaaacacaaactaccaaaactaactcaagaagaaatagaaaatctgattggatctataacaagtaag

SEQ ID NO: 518447 - DNA, 201 bp, Homo sapiens
gtcatatagtccaataggctagaataaagagcccagaaaataaaccctctcgcgtactgatttttgacgagaatttcaagaccattcaataagaaaaggasagtctctttaataaatggtgccttacataagaagaatatatatggaaaaggaaaaaaaaaacacaaatggtgccaaggaagctggatatccacatgcaaa

SEQ ID NO: 518448 - DNA, 201 bp, Homo sapiens
ggcagaggttgcagtgagccgagattgcaccactgcactccagcctgagcaagacagcaagactccatttcagaaaaaaaaaaaaaaaaagagggatgaarttagacttcatctcttgatgggacaaatgccaaggaatttgtgatcctatgtgaagaccaccacagctaccactggaataaagtctccagaatccattct

SEQ ID NO: 518449 - DNA, 201 bp, Homo sapiens
agacctgttttcaatattacatattttgtagaatacataaatgttataaataacaagaaaccaatgtaacatccacgtttcgtcagttaaaaaaaatgackgtagtgacaatattttattttgtcagtatatctccaaacattttcacctgtaatttttattctgacgcattaaaaaatgaattcagtgatatttttctac

SEQ ID NO: 518450 - DNA, 201 bp, Homo sapiens
tggtgcgtactcataaagaataggggcttaacagaaattatattttagactaggctaataccaagggttaagtaggaattaaagcaacatgcttttaaaastagtgtgtgagacaccctaagaacggctccagcctctgaactcctgtagttgcttcatatctccgcaaatagcacaaaattatcgtgatttccctgttat

SEQ ID NO: 518451 - DNA, 201 bp, Homo sapiens
aataaacaagcatcagggactgacacactgatttcaaagtccctgccacttaaatggatccctttcatctaccaggaactgaagatggaaacaagtgggcrgagacaaaagagagctgagtgaagggaggtggtggaaaggaaaggggcgtttcgtgacatcggcccagactgctgtctccactgaggctcaggggcctca

SEQ ID NO: 518452 - DNA, 201 bp, Homo sapiens
gcaggggcaagggctgaataactgcctactgggtactatgctatctgggtgatgggttcaattgtacctcaaatctcagcatcatgcaatgcacctttgcracaaacctctacatgtacctcccaaatctaaaataaaagttaaaaaaaaattggaggtaggagtagatggcaagataagatgttgaaatgaacagtttag

SEQ ID NO: 518453 - DNA, 201 bp, Homo sapiens
gcaaaaacaaaaaaacactaactggacagtgaaaattaaaaatttttgtgcatcaaacaacattatcaagaaagtaaaagggcactctacctggcagctatttttttttttaagtaagacaaaataaaagaagaaagtaaaagggcaaccaacagaccaggagaaaatatttgcaaattacacttctgataagggactaat

SEQ ID NO: 518454 - DNA, 201 bp, Homo sapiens
gttaaagccagcactgtcaaagttaaaaatctacttcacttcatgccagcaattgtatcttaagtcatttatactacagatacacacaagtacaaatgatmcacacacacacacacacacatacacacagaggttattcactgcagcattgattttaacagcaaaaaaaaaggaagacgatctaaaggcctatcagtaaag

SEQ ID NO: 518455 - DNA, 201 bp, Homo sapiens
tcatcatctcaaatgatgccgaaaaagcatttgacaatatccaacatcaagataaaacacttagtaaagtaggaatagaaacgaacctcttcaacgttatwaggaccatataagaaaagcccataactaacataataatgagagactgaagatttttttcctctaaattgggaacaagacaaggatgcccacttttaccac

SEQ ID NO: 518456 - DNA, 201 bp, Homo sapiens
aaggaaagaccatccaaggacatagtaagaaggtggtcatggacaagccaggaagagaaacttcatgagaaactggcttttccaacaccttcatcatggayccttagtttccagagctgtgaggaatataaatttctattgtttaagccacctgtcatggtattttgttatagcagttcaagcagactaatacaacaatgt

SEQ ID NO: 518457 - DNA, 201 bp, Homo sapiens
cgggcgtggtggtacgcacctgtaatctcagctactcaggaggctgagcaggagaatcacttgaacccgggaggcggaggttgcgatgaactgacatcgcrccactgcactccagcctgggcgacagagtgagactccatctcaaaaaaaaagaaagaaaatatataacccaggccaggtgcgatggcacacgcctgtaat

SEQ ID NO: 518458 - DNA, 201 bp, Homo sapiens
gcgatgaactgacatcgcgccactgcactccagcctgggcgacagagtgagactccatctcaaaaaaaaagaaagaaaatatataacccaggccaggtgcratggcacacgcctgtaatcgcagcactttcagaggctgaggcgggtggatcacctgaggtcaggagttcaagaccagcctgaccaacatggtgaaacccc

SEQ ID NO: 518459 - DNA, 201 bp, Homo sapiens
ggagaattgctcgaacctcggaggctaaggttgcagtgagccaagatcgccccactgcactccagcctaggcgacagagtgagactccatctcaaaaaataaaaaaaaaaaagcatatataacccaatattttaaaatgggcaaaagagttcaacaggtaaaagaggacacaaagataaaataagtgcatgaatcaatgct

SEQ ID NO: 518460 - DNA, 201 bp, Homo sapiens
ccaacaccgtcacatacacattatatatgcagatatatatctctattaaattatcataagtcctatgtcctagagcaacaaaaaattagatagctatacaraaaatttaagacaagacaaaagaaagctgggcaaccgcaaggcaaacgaacctggtgctcacaataacataaaatacagcagaatggtaagcacctattt

SEQ ID NO: 518461 - DNA, 201 bp, Homo sapiens
tttgtcataatagaatatttttaaagggacgaggaaatatgaaagggatcaacatttttaatcctcttaaaagtgactgacaaaaataaaaatctctattaaaaaaaaaaagtctacatcctttgaggccagtgataaagactccaacctttaaataataaaaaagggagataaaatttaaatcaggttgaaacaataaga

SEQ ID NO: 518462 - DNA, 201 bp, Homo sapiens
caagtacctatcaagttcacccagcaattcttcctgtctctctagttcttcaagtcgagcccacagttctttatcagctagcaaatccttggatttcacaycatttgcaatatctgcttcaaaaatatctgaagtttttggtttggaatgcggtttatgagcaattcggtgttttgctatttagaaaaaggaaaagacgtg

SEQ ID NO: 518463 - DNA, 201 bp, Homo sapiens
aagtaagaagttaaaatagacagcaaatactaacattgaactttttttttttttttttttttggagatggagtctcactctttcacccagcctggagtgcygtggcgtgatctcggctcactgcaacctccacctcccaggttcaagcgattctcctgcctcagcctcctgagtagctgagattataggcacgcgccaccg

SEQ ID NO: 518464 - DNA, 201 bp, Homo sapiens
tcttcccccttatccctaagactttcataaacaactacagaaactccaacaacaaaaacatgcaaaatttccagaaagtttggcagttgctctctgctccactcaagaggagggaaaaaaaaaaaaaaaaagaaaaaataacataaagaaaaagcccaaacagaaggccctctacaaaacagtgactgaaaactttgtagt

SEQ ID NO: 518465 - DNA, 201 bp, Homo sapiens
gattcatactttggtacaaaacccgcttcataactattaggtgacatatgatataagataactagtattttgtacaatctacagacctgttttcaatattrcatattttgtagaatacataaatgttataaataacaagaaaccaatgtaacatccacgtttcgtcagttaaaaaaaatgacggtagtgacaatattttat

SEQ ID NO: 518466 - DNA, 201 bp, Homo sapiens
tatgtgaaaaatatattgttggtatagaattatctccaacccctaaagcctcatggtcgttatcaccatcatcgtcgtcaatgttgtcgtcgtcgtcgtcrtcatcatcatcatcatcatcatcactgtggtaagaactggaaccattcactgaacagttcaactgactattcacttgaccactgaatggttctgaacttg

SEQ ID NO: 518467 - DNA, 201 bp, Homo sapiens
atcttgccttcatggattggaagacaatattgttaagatgacaattgttatgggctgaatgttagtgttcttccaaaatgcatatgtcagtgccctaaccrccaatgggactgtttctgaagatagggcctttatggaagtaattaatgttaaatgaaggtggggccttggttcaataggattagtgtccctatcctggca

SEQ ID NO: 518468 - DNA, 201 bp, Homo sapiens
caatctgaaaagaaaattgagaaaacaattccatgtacagtaacatcaagaataaaatatttagtaaaaaaattaaccaaggaggagcaagtttgtacatygaaaactacaaaacactgctgaaagaaattaaacagaaatatacagaagaacatcttgccttcatggattggaagacaatattgttaagatgacaattgt

SEQ ID NO: 518469 - DNA, 201 bp, Homo sapiens
actccagcctggatgacagtgtgagactccatctcaaaaaaaaagaaaagagaaaagaaaagaaaagaaaagaaaaggaaccagaggcccagaggcagtgsaataacacagttaaagtcctggggaaaaaaaaaaaaaagactgtcaagcaaaaatttcctaccagacaaactatccttcaggaataaaggagaaattaag

SEQ ID NO: 518470 - DNA, 201 bp, Homo sapiens
gtcttgggggcggatccctcatgaatggtttgctgctcttctgcagtaatgagttcacatgaaagctggttgtttaaaagagcctggcacctcctccttcmtctcttgctccctagctcttacttccacttgccatgtgacgtgcagctccccatttgccttccaccatgattggaagcttcctgaggcctcaccagaaac

SEQ ID NO: 518471 - DNA, 201 bp, Homo sapiens
agcagagctgagaacagaacccaatccttgacagcatcacagaacttgatccagggctgaatcaaccagctctggagtctgcatcacttctgaacttcccrtttaaaaggccagtaaattttctaaatgaccaggacaattttctatcatgagcagccaaagacatccaattcgcacacctctaaactattatccactcag

SEQ ID NO: 518472 - DNA, 201 bp, Homo sapiens
cactccagcccgggcaacaagagggaaactcagtctaaaaaaaaaaaaaaaaggaatgaaggggggaaaaccacataataatctcaaatgggcctggcacrgtggctcacgcctgtaatcccagcactttgggaggccgaggcaggtgaatcacctgaggtcaggagttcaagacaagcctggccattatggtgaaacccc

SEQ ID NO: 518473 - DNA, 201 bp, Homo sapiens
taccaaaactaactcaagaagaaatagaaaatctgattggatctataacaagtaaggatattgaatcagtaatcaaaaagtttccaacaaaaaagcgcagraacagattgtttcaagatgaattctactaaacatttaaagaagtaacacaaatccttctcaaactcttctaaagattgaagaggaaagaacacattctat

SEQ ID NO: 518474 - DNA, 201 bp, Homo sapiens
agatcggctgctgcccaccccacttcccctcgtttaggggcttaacccgcgaccacatagtcctgtgcctgtaggaagctgacccaccccctagctccagrcaaagggggtgatgcatctcccttctaaatagttggttcaagaatgggtgtgcgatgtcgtccaaacagagacttcctggaggcttctgggaaggttctt

SEQ ID NO: 518475 - DNA, 201 bp, Homo sapiens
tgattcttcccccttatccctaagactttcataaacaactacagaaactccaacaacaaaaacatgcaaaatttccagaaagtttggcagttgctctctgctccactcaagaggagggaaaaaaaaaaaaaaaaagaaaaaataacataaagaaaaagcccaaacagaaggccctctacaaaacagtgactgaaaactttg

SEQ ID NO: 518476 - DNA, 201 bp, Homo sapiens
agcaaccattgatctggccttgctgcccctactcttgtcccttgtaatggagatcggctgctgcccaccccacttcccctcgtttaggggcttaacccgcraccacatagtcctgtgcctgtaggaagctgacccaccccctagctccaggcaaagggggtgatgcatctcccttctaaatagttggttcaagaatgggtg

SEQ ID NO: 518477 - DNA, 201 bp, Homo sapiens
gattcttcccccttatccctaagactttcataaacaactacagaaactccaacaacaaaaacatgcaaaatttccagaaagtttggcagttgctctctgctccactcaagaggagggaaaaaaaaaaaaaaaaagaaaaaataacataaagaaaaagcccaaacagaaggccctctacaaaacagtgactgaaaactttgt

SEQ ID NO: 518478 - DNA, 201 bp, Homo sapiens
gggcagcccggcgggcggaggcggaagcggcgcggggctgctagttaccttttcctgctcctcgcgcagccgcgccacatccggggcgcgcaacggaaccrgggcaggggccggggccgaagggggcgaggggtcggggggcgtctccacggtgggcgcctccatgacgggcccgcgggcctcagcgcggcgtgtgagtcc

SEQ ID NO: 518479 - DNA, 201 bp, Homo sapiens
attcttcccccttatccctaagactttcataaacaactacagaaactccaacaacaaaaacatgcaaaatttccagaaagtttggcagttgctctctgctccactcaagaggagggaaaaaaaaaaaaaaaaagaaaaaataacataaagaaaaagcccaaacagaaggccctctacaaaacagtgactgaaaactttgta

SEQ ID NO: 518480 - DNA, 201 bp, Homo sapiens
agcacgtttttatataaaaatcaatgtcctaaggtttaattctgtgaattacaaaacattatggcctattcctgctctggctaacaagaaacgacttagtrccatatttctgtcataattacattttttatatagtaagtttccatttgaaatatgtccaattttgtgctaatatttatgtcatttgtgtcaccatatata

SEQ ID NO: 518481 - DNA, 201 bp, Homo sapiens
ccaaacctcatgtataacaatgtaaaagtgtaaattagccaccagatttaattataaaaatgaacttagcaggaaaaaaactctttgtgtttatagttctwtagcatatatacttctgttaatgacttttccttagaaaattagacatgctgatatatttgcagctgctcatatcagcatatacatttagaatagtaatag

SEQ ID NO: 518482 - DNA, 201 bp, Homo sapiens
tctatttcctaattcccagaatttgtgaatatgttaggttgcatggcaaagggtaacattgctaagcagctgaccttaaactagggaggttatcctggatyatgtaggtgggccaaatattaacacagtggttcttaaaagtagaggagaagagtagaagaaaagagtcagagaaaaaggtctgaacatagaaacaacatc

SEQ ID NO: 518483 - DNA, 201 bp, Homo sapiens
tttatatacatagaaacacatgtatgcataagtatatgtgtacacacacacacacacacacacacacacacacacacatatatacatacatacaaacagcytgctaagtatgaggcacgcattaccattactattagctgcctttcagaattacctgttttctattgatatcataactacctttcctcaattgctttatct

SEQ ID NO: 518484 - DNA, 201 bp, Homo sapiens
aaggttacatcatgatttatgtatctgtttgcccctattaaattataaattactttaaattagggaccaattattaattcatagcaaaatgcacaaggtckaacacatattaaatgttaagtaaatctgtgtttgttgaaaattacacaactaataaggagcacaatggggctcaacttggaactttacctgaattcaaaa

SEQ ID NO: 518485 - DNA, 201 bp, Homo sapiens
gaaagcatgttcatataaatatactattaaaaaagaagtattaataactctgagatgttatttgctagttcattaaaatcaggcattatatttaggctgayctttgtcagtgagcagtctttgaatgtcagcattaatgggaacaacttgataaccctgtggagttatattgtttacttgatgacaagagtagcatataag

SEQ ID NO: 518486 - DNA, 201 bp, Homo sapiens
tgcttaatgcatttatatacatagaaacacatgtatgcataagtatatgtgtacacacacacacacacacacacacacacacacacacatatatacatacrtacaaacagcctgctaagtatgaggcacgcattaccattactattagctgcctttcagaattacctgttttctattgatatcataactacctttcctcaa

SEQ ID NO: 518487 - DNA, 201 bp, Homo sapiens
aatatataaagtgcttaatgcatttatatacatagaaacacatgtatgcataagtatatgtgtacacacacacacacacacacacacacacacacacacayatatacatacatacaaacagcctgctaagtatgaggcacgcattaccattactattagctgcctttcagaattacctgttttctattgatatcataacta

SEQ ID NO: 518488 - DNA, 201 bp, Homo sapiens
tcttaaactctgcgagcctgggttttctcttctacaagaactcttgtagaatttaaattaaaaaatatataaagtgcttaatgcatttatatacatagaarcacatgtatgcataagtatatgtgtacacacacacacacacacacacacacacacacacacatatatacatacatacaaacagcctgctaagtatgaggc

SEQ ID NO: 518489 - DNA, 201 bp, Homo sapiens
gatcccaaaaaactgttgccatgaactctgctctgttttttgtttgtttgttgttttttgtttgtttgttgttttttaagagacaaggtctttgtgtcacygaggctggagggcagtggcgcaatcatagctcactgcagcctggaactcaagtgatcctcttgtttcagccccctgagtagctgagactgtaggcctgtg

SEQ ID NO: 518490 - DNA, 201 bp, Homo sapiens
catgcaaattgcccttgtttgatgagaggaatgagcaggagcattgtcatggtggagaaggactctttggtgaagctttccatgggagtttttctgctaargttttggctaactttcccaaaacactctaataatcagatgttgttgttccttggccctccagagagtcaataaacaaaatgcctgaagatcccaaaaaac

SEQ ID NO: 518491 - DNA, 201 bp, Homo sapiens
gtttccatgaacatttacatacacagtttgtatggctatgctttcatttctcttcggtgtatatacctagagtttataattgtcgtatgttgttgctgctrcttctgtttgtttagtgattttcctgatctgattctgtaaaatctgtattcttttttatatatggctactgaaatctctctttggtttgcttaatgatca

SEQ ID NO: 518492 - DNA, 201 bp, Homo sapiens
aatgttacttgtcatttagtattattattaaggactattgtgttacaacattatacagttgctcaagcaaacagcgcctttgacatttggacatgtacacrcaaagttatataacttaaccctatgtcctttcatattgtgttaaaagtttttgcttgtctttttaagttcatatactgtaatctgaatgtagagtagaat

SEQ ID NO: 518493 - DNA, 201 bp, Homo sapiens
gggatactaaccttcaaagaacaggcagaggacataaaggaagccatctgagagttagtaggagaaacaggagagagaaataccaccaaaaagaggtatgrtgtctgatgaaatagaggttatagtaatctgagaactgaaaagtatccatggcttgttaattaatgggtattttgtgactgtttggtatccgtagagtgg

SEQ ID NO: 518494 - DNA, 201 bp, Homo sapiens
cataagggtctaccttgggcctaggtttgaaacctggggatactaaccttcaaagaacaggcagaggacataaaggaagccatctgagagttagtaggagraacaggagagagaaataccaccaaaaagaggtatggtgtctgatgaaatagaggttatagtaatctgagaactgaaaagtatccatggcttgttaattaa

SEQ ID NO: 518495 - DNA, 201 bp, Homo sapiens
cagtcccaggaaatcactaatctgttttctgcctgtataaatttgctttttctaggctcttcttcataaacgtgatcgttcaatatgtcatcttttgtgtmgagcttctttaacaatgcttttgagattcatgcatgacatagcatgtgccattaatttgttcctttttatagttgaataatattccattgtgtggatatg

SEQ ID NO: 518496 - DNA, 201 bp, Homo sapiens
ttaatcttgaaatatgaatttaaaggagggacagaggtcactggcatatgggtgataattaaaactatgggagatgaatgacataacataagggtctaccktgggcctaggtttgaaacctggggatactaaccttcaaagaacaggcagaggacataaaggaagccatctgagagttagtaggagaaacaggagagagaa

SEQ ID NO: 518497 - DNA, 201 bp, Homo sapiens
atgaaatggaagtaatagttaaataaaagtgaatgtacacacattcacagtaaattgattttacttttgaaattatgcaaattctaaacaagtgttaaatwttggttccaaataatgaaattatgtttcttctcaaatactagattagtgattgaattaaaatcagttgaattattctcacaattaggtaaatacgtgcta

SEQ ID NO: 518498 - DNA, 201 bp, Homo sapiens
agtgaaccacctgcctcagcctcccaaagtgctgggattacaggcatgagctgtcatgcttggcccttgaatttagttttgaatgtgttgaacttgagttrtttctgggatattaatcttgaaatatgaatttaaaggagggacagaggtcactggcatatgggtgataattaaaactatgggagatgaatgacataacat

SEQ ID NO: 518499 - DNA, 201 bp, Homo sapiens
gaaacacagacacacagacacacacacacacacacacacacacacacacacacactcttaatttttcatgatgggaattgtttaacatttacaaaagtaamgcggtgaaaccccatgcatgtcttattcaccttcaacagtagtcaattcattgttttatctacgccagattattttgaagcaaatctcaacattatcttt

SEQ ID NO: 518500 - DNA, 201 bp, Homo sapiens
gtatagctacttacttgagtaggccttcattaaatcgttgttcaacagatgaatgtttctaattgctcctgtcaaagtaggtattgatctggatatttacrtatatacatgataaattatggcaagattatttattattggtgtttttataattttatttctcatctactctttatgaatatggtatatctgacagtcttc

SEQ ID NO: 518501 - DNA, 201 bp, Homo sapiens
aaatttaggaaaaacaaaatgaaccactaatgggtgataattttgtagagctctttaactttttaatccaaaaaattgtgtggactataaattaaaatttrtttccatcaactcatatatggttactcagcaaaattggaaatttgaactagattccaaaccttttgagttttaaaatattctaaatagtgtattatttag

SEQ ID NO: 518502 - DNA, 201 bp, Homo sapiens
ggcaacagagtgagaccctgcctcaacacaaaacaaaaaactcttcttgtcccttcttaaaacaaattacctatttgtaaactgctgatttctttgagtcrttgttcccataaacttttcataaggcctcaatgatttcaccatacttccattaatgcttcgatataaatttgatgtttgtttttgctttaacattagcag

SEQ ID NO: 518503 - DNA, 201 bp, Homo sapiens
tctttttaaacagccttttatatgattaaagataatttataaaatcttgctatatgtctcttactctgaatgttagtatgttattaatatactttgttttwtcagaatcatttttcttcagattatatatactattaaaacaagaacagtgtgttcttattcaacatctcagtttctaaattataaatgaattataaggta

SEQ ID NO: 518504 - DNA, 201 bp, Homo sapiens
gtcaagatacttttgtaagcaatgatagcagccatttagtccattcctaaagaatttacagtcctcagagtttaaccatgtcagtgcagtcttttttacaygagtaactaaaagaaaataggtttgttttaaaggtgtgtgtgtgtttttttttaatattaggaaacaaagtcagaaggagccacatcagaactgtaagtt

SEQ ID NO: 518505 - DNA, 201 bp, Homo sapiens
tagcaaggtatagctttgaatcacagctccaaaattgattgcttatatgcaatttggttaagtgtcttaaactctgcgagcctgggttttctcttctacargaactcttgtagaatttaaattaaaaaatatataaagtgcttaatgcatttatatacatagaaacacatgtatgcataagtatatgtgtacacacacaca

SEQ ID NO: 518506 - DNA, 201 bp, Homo sapiens
attttattggctgggcacggtggctcatgcctgtaatcctagcactttgggaggccgaggcaggtgaatcacatgagaggccaggcattcaaaaccagccrgccaagatggcaaaaccctgtctctactaaaaatacaaaaaatgagctgggcatggtggtgcatgtctgtaatcccagctacttcagaggctgaggcagg

SEQ ID NO: 518507 - DNA, 201 bp, Homo sapiens
aaaaagactaggaagtgagagattaaagagaaagagatagaaaggtacaggctattgttgcctatttgtggtctataccttgtctttaatctaaaaacctrgaaactactttctctatttctcttccttctctaaatcatgaaacttatttattactatagctcagctagatttttggttcaatagattattttttccatg

SEQ ID NO: 518508 - DNA, 201 bp, Homo sapiens
agtttagggcacaatggaaggaagcatgaataaatgattatgttgatatgatagcacattttttttcctttttcttttctttagttggagaacatcaattracaggccataaagtggcagttaaaatcttaaatagacagaagattcgcagtttagatgttgttggaaaaataaaacgagaaattcaaaatctaaaactct

SEQ ID NO: 518509 - DNA, 201 bp, Homo sapiens
aaattcatggaaaaatggaattaaaagataaaaataaaaaatataaacatttttaatttttaattttaatttcaattttttaattaaatagagatgatttwaaaaaaaaattaaatacagacgaggtctcactatgttgcctaggctcgtctcaaactcctgagctcatgtgatcctcctgccttggcctcccaaagtgct

SEQ ID NO: 518510 - DNA, 201 bp, Homo sapiens
gcaacgtggtaggcactgttctaggcaatgaggatacagcaaggaaaaaacagatctttttgtttagctttctagtaggagaaggcagacagtaatcagawtatatatgtaaaaggtatgtttaattttattgagaaaaacgaatcagggaagggaagatagagagtcttgtgaggttggcagttttcaataaggtggtca

SEQ ID NO: 518511 - DNA, 201 bp, Homo sapiens
tgttaggcaagtgtgtcttacatatagtcatttgtcgttcaaaataatttagaaagtgccttcttaagatgaaagtgtcttcttaagatgaaagatttatragaacttgaatttaggaagaatctctttttttctgcagtttaacttttgattaaaaaggaaacatcagattatatttgggactatatatctttgagaaaa

SEQ ID NO: 518512 - DNA, 201 bp, Homo sapiens
tatcttttttgttgttactgattccatcagaagttttctcccatgtagtaaagattgatacatttgttaggcaagtgtgtcttacatatagtcatttgtcrttcaaaataatttagaaagtgccttcttaagatgaaagtgtcttcttaagatgaaagatttatgagaacttgaatttaggaagaatctctttttttctgc

SEQ ID NO: 518513 - DNA, 201 bp, Homo sapiens
ggctgccaattccaacttgtcttttaagtgcaattacatttgacccttgaacggtatgggtttgaaccacattggtctacttatgcttgggttttatgccrcctttgctatcctgagacagcaagaccaacccctcctcttcctcttcctcctcagtctactcaatatgaagatgacaaggataaagaccttgatggtgat

SEQ ID NO: 518514 - DNA, 201 bp, Homo sapiens
atctccctttccctaggctgccaattccaacttgtcttttaagtgcaattacatttgacccttgaacggtatgggtttgaaccacattggtctacttatgmttgggttttatgccgcctttgctatcctgagacagcaagaccaacccctcctcttcctcttcctcctcagtctactcaatatgaagatgacaaggataaa

SEQ ID NO: 518515 - DNA, 201 bp, Homo sapiens
aaaaaaagaaaagaaaagaaaacaacttatttaggtatattttatatatgaaattcatccattctaagtgtacaattcagtgatttttactaattttgccraatgttgcaaccatcattatagataggttttaggacatttgaggacaccacagtaagattctttatacccattcacagttaatctcatttctaccctcag

SEQ ID NO: 518516 - DNA, 201 bp, Homo sapiens
aaggttgctgaccaccccatgaggcccaactggctgatacatgtgtgatctcttggctcgtcacagcttaggtatatagtgtcctccaaatgttcttaacktttttattgtactccatatacaagagtatactggcatcttttacgtaaattctcaataaattttcacaaactgaacacatccacgtaaccaccactttga

SEQ ID NO: 518517 - DNA, 201 bp, Homo sapiens
ccagttctaccaggtaataatgcctaaacaatctcgaaggagtagtttgtgttagatgaaaatggtttggtattctaggataacaatagtaacatcaagcrcaaaggcccagaagtgtgagaaaataaggcttaggagagcagttctcagactttttgattttaaaatcttgtaactcttaaaaattattgaggacctcaa

SEQ ID NO: 518518 - DNA, 201 bp, Homo sapiens
tgtcatatttatcagtgttttcttgccttcatttctatatttactttcaatcattttatttttgtttgactgtctcatcctgattatttaattatttgctrttttctgaaggaattatagaagattgtcagagttggtcagaaagtaattggcagaggtgaatttgcagtttaaaacttttggcttccagccttgagatta

SEQ ID NO: 518519 - DNA, 201 bp, Homo sapiens
attaatatactttgttttttcagaatcatttttcttcagattatatatactattaaaacaagaacagtgtgttcttattcaacatctcagtttctaaattrtaaatgaattataaggtaagttaaactgactgtcataaaacaatagatctaacatttttaaatataccatacttttttttttctaaatgcttgttttact

SEQ ID NO: 518520 - DNA, 201 bp, Homo sapiens
tactgctttgtaataataataccaccccatttattcttctgagattcctgtggtttcctaaatgatagagaaaatattttgtagaggaagtattaataatktttgaagccaagcagataatttaatttgacctagcaggaagatctaatctcaaatcctttaagaaataatgagtaagtggctggcacaagacccttaaag

SEQ ID NO: 518521 - DNA, 201 bp, Homo sapiens
accatggctttctagaataccatatttattgttatttaagttgtttgagatgcaatacttttgaatccatacacaatactgtaacaggtacctgctaatayaatgttacaaccacaggtgttttttttcacttgtctttttgagttataatcttcactatgttgtaactatttagtatactaatttttaaagtaatcttta

SEQ ID NO: 518522 - DNA, 201 bp, Homo sapiens
gtgatctcttggctcgtcacagcttaggtatatagtgtcctccaaatgttcttaacgtttttattgtactccatatacaagagtatactggcatcttttaygtaaattctcaataaattttcacaaactgaacacatccacgtaaccaccactttgataaagacatggaaaatgaccagtatcccagaagtccccttgtgt

SEQ ID NO: 518523 - DNA, 201 bp, Homo sapiens
ggaaatttggagaagagcaatgagattgttttgtttcaccatgggcagaggtgaaaggagcgttgtgttgttttggcaggagtctggggatggtaggggtyggaacatatgtgcattacataacgctgctgatcaccagagttacggcttttgacatgaatgagttaaggttgctgaccaccccatgaggcccaactggct

SEQ ID NO: 518524 - DNA, 201 bp, Homo sapiens
agctggattttgaatggaaggtaggaaattataatgtaataagatcatttgtagaagccatttttctatattataagctgctctgagctcctgagttgagyattaagcccaactttttctagtaatatgctatgcacattaaaaacaaaacaaataacctctataaggatgaaaagtggttgatactgggaaccaacatat

SEQ ID NO: 518525 - DNA, 201 bp, Homo sapiens
aggaagatacaggatcaatggaaaagttttggagggtatatgatttggataggcttaagagaaatagccattagaaaaggaaaaaggttgaatatgaggasagtgtagaaaagatgggttcaaggccaaagttgacgagactggctttgaataggaggagggatgtggacagaagtaagcctttaagatagaggaaattgg

SEQ ID NO: 518526 - DNA, 201 bp, Homo sapiens
tggagtactctgactgagggtattactctgtggcagttatgctggctctgaagtcagacagcccaggtcagatgttatgccatcacttactgtgtgacctygggtgacttatttagctcctctgtgcctcaggtttctcatctatacactggagggtaataatacttcatagagttgagagagcagggaagctagcactta

SEQ ID NO: 518527 - DNA, 201 bp, Homo sapiens
tgccgcagcctcccaaagtgctgagattacaggcttgagccactgcgcccaggcccgaagacttatttttgatgtcatatttatcagtgttttcttgcctycatttctatatttactttcaatcattttatttttgtttgactgtctcatcctgattatttaattatttgctattttctgaaggaattatagaagattgtc

SEQ ID NO: 518528 - DNA, 201 bp, Homo sapiens
gcagtacttgattataaggttatcatccaggacctatgtattagatggtccagagtatgtatatagaggtttttaaagattgtcataagaattaaaattcyacccatgagcttggtgactcacctctcctatcctttgtttctttaactttaaaatgggacacctcatttgaggattaaatgtgttggcactggtataatg

SEQ ID NO: 518529 - DNA, 201 bp, Homo sapiens
gatcttaaaacaaaaaacaaacaaacaaaaaaacactcatgtatttttgctacagaagaagcttattgacatcgtctgtaacagtgttagtgatttaaacrgagagagcaaccttaccctttcagtggttttcttttgtgtagccttggactgtcaggaatagtttccttattgcaaaagtgggactctagaattagcaag

SEQ ID NO: 518530 - DNA, 201 bp, Homo sapiens
gctaaatctctttgctcttccccactgagtgtccacttcctatgagaagagaaagctgaaatagccagactaaaagtgtcatatgctagaatgaaagtggrgaagggaaagatctttccatatttgccttataccttgacctcatcacttttacaatgccaaccctgaaagactttgaggaaattttacccgtttgggtat

SEQ ID NO: 518531 - DNA, 201 bp, Homo sapiens
ggctggtctcaaactcctgacctcaggtaatccacctgccttggctgggattacaggcatgagccactgtgcccagccccagatattcttaatgcagtttyttttgtgcttgataggttgaagagatggaagccaggcggctctttcagcagattctgtctgctgtggattactgtcataggcatatggttgttcatcgag

SEQ ID NO: 518532 - DNA, 201 bp, Homo sapiens
gtctcttgcttccttgtgagaaccatcctttagagaactttaaaggattttcagggaaaggaaatttggagaagagcaatgagattgttttgtttcaccaygggcagaggtgaaaggagcgttgtgttgttttggcaggagtctggggatggtaggggttggaacatatgtgcattacataacgctgctgatcaccagagt

SEQ ID NO: 518533 - DNA, 201 bp, Homo sapiens
agttctgtgtcttgtatataaagacaaatgtgtcaaaactgaaaagcatccagaaagtggcaaccgaaatcgtcaagaggcaggagtggcttaaaagcttkatacccttcaatgtggaatgatcctcagggatatcattaggaaagtcttagagttggaaggggaattagctttgatctactccaacctgttatttaatgc

SEQ ID NO: 518534 - DNA, 201 bp, Homo sapiens
gaattatcttttagatgattaatagcagattagattccattgaagagaggattagtgaattagatgatgggtcagaagaaaatacccagactgaaagataracaaaaggatgaaaagaaagtataagacacatatgagaacacagtgaaaagtctaatacatgtattattggaagctatatagaaaaagttaattgcaaac

SEQ ID NO: 518535 - DNA, 201 bp, Homo sapiens
atacgggcttcccaacttcatgtacccctgtgtgatgaggaggcatggaagtagcagctgaatattttaaggacttctgatgaagatgtttttggttatgscatcctgacgttctgtgtttctgtcctaagttctcataaaaagctaagtaaaactgatgtaacattaccaccttttgtatcctgaggtatgaatgtcatc

SEQ ID NO: 518536 - DNA, 201 bp, Homo sapiens
ctgatttattatagccattctagtgggtgcgaaatagtatctcattgaggcattaattttgtgtttccctaaggactaatgatgttgaacattgtctcacrtaattactagtcatttatgtattttcattgatggaatgtctgtttatatctcttgcttattttctaattgggttacttgtcatcttataagttgagttgt

SEQ ID NO: 518537 - DNA, 201 bp, Homo sapiens
ttccaacataattctagcttgcttaattatatttagcctaattatgaaattaaaactcttgtcaaatagatgtctcagattttttttttttttttttttttgagacagactcttgctctgttgcccaggctggagcgcagtggcatgatctcagctcactgcaacctctgcctcctggtacaagcaattctcgtgtcccac

SEQ ID NO: 518538 - DNA, 201 bp, Homo sapiens
agtagagacggtgtttctccatgttggtcaggccggtctcgaactcccgacctcaggtgatccgcccgcctcggcctcccaaagtgctgggattacaggcrtgagccacggcgcccagcatcatttttatcttttcaattcattttctataccacaaacaaaatgatctttacagaatgataactaggttatgctaccctg

SEQ ID NO: 518539 - DNA, 201 bp, Homo sapiens
atgtgccaccacgcccggctaattttgtatttttagtagagacggtgtttctccatgttggtcaggccggtctcgaactcccgacctcaggtgatccgccygcctcggcctcccaaagtgctgggattacaggcatgagccacggcgcccagcatcatttttatcttttcaattcattttctataccacaaacaaaatgat

SEQ ID NO: 518540 - DNA, 201 bp, Homo sapiens
gcctcagcctccctagtagctgggattataggcatgtgccaccacgcccggctaattttgtatttttagtagagacggtgtttctccatgttggtcaggcyggtctcgaactcccgacctcaggtgatccgcccgcctcggcctcccaaagtgctgggattacaggcatgagccacggcgcccagcatcatttttatcttt

SEQ ID NO: 518541 - DNA, 201 bp, Homo sapiens
ccgggcgcggtggctcacacctgtaatcccagcactttgggaggccgaggcgggtggatcacgaggtcagcgaccatcctggctaacacggtgaaaccccrtctctactaaaaaaatacaacaaaaaattagctgggcatggtggcaggtgcttgtagtcccagctactcgggaggctgaggccggagaatggcgtgaacc

SEQ ID NO: 518542 - DNA, 201 bp, Homo sapiens
tttttttttttttaaggcagggtctcactctgtcgcccaggctggagtgcagtggtgtgatcacagctcactgtaggtagcctcaacctcccaagctgagktgttcctcccaccccaggctcctgagtagctgggactataggcacaagccaccacacccagctaattttttttaatttttttatttttagtagaaatgga

SEQ ID NO: 518543 - DNA, 201 bp, Homo sapiens
tgctgatgcgcctatgaatatgacctttgtatatcccacacctgtgtatagtagcaagatgattcactgcatcctgcctatgacttatcaaggcatgtttyttagaggttttttcttcttacctaagatttcatccgtgtttgtttacaaacatgttcttttgacatctttccagaactctttccccttttcatcattagc

SEQ ID NO: 518544 - DNA, 201 bp, Homo sapiens
acatatggttaaagacataaagcataaaaagttttgctaagtttttgaattcaatagctgctagtcagcttactgtgaaggcttttttgtcacttgagaaagtttggaaagtgccattgctgatgcgcctatgaatatgacctttgtatatcccacacctgtgtatagtagcaagatgattcactgcatcctgcctatgac

SEQ ID NO: 518545 - DNA, 201 bp, Homo sapiens
gcattttccttatttaatttaatattatcttcatgatcagtgtctaaagtaggcttactttatagacaaggaaactgcattatctaaaaagtaatagcagyttatccaaggccacacagctagtaagtcacagagctggtagttgaggtcaaacctgattccaaatgccatgctgttaatgctccagcattccagtttttc

SEQ ID NO: 518546 - DNA, 201 bp, Homo sapiens
ccagagcaggaattagcaacttataaactaattccagtcctctttcattattccaaatggttttcacttaactgaaacagttagtctctgacttcaactcygtattattcatgactttgttctagttactgggtaacatctaagctaaatctctttgctcttccccactgagtgtccacttcctatgagaagagaaagctg

SEQ ID NO: 518547 - DNA, 201 bp, Homo sapiens
gatacaggataaatactgtctacacagtactaattaagtactttaatgttttaaatatctctctctctatatatatgatatattatatatatatatatatatattttttgttttgagatagagtctcgctctgtcacctaggctagagtgcagtggcacaatctcagctcactgtaccacctcctgggctcagatgatcct

SEQ ID NO: 518548 - DNA, 201 bp, Homo sapiens
atgtgatacaggataaatactgtctacacagtactaattaagtactttaatgttttaaatatctctctctctatatatatgatatattatatatatatatrtatatattttttgttttgagatagagtctcgctctgtcacctaggctagagtgcagtggcacaatctcagctcactgtaccacctcctgggctcagatga

SEQ ID NO: 518549 - DNA, 201 bp, Homo sapiens
atgtgttggcactggtataatgcctagtgtttgataagcattggcccagagcaggaattagcaacttataaactaattccagtcctctttcattattccaratggttttcacttaactgaaacagttagtctctgacttcaactccgtattattcatgactttgttctagttactgggtaacatctaagctaaatctcttt

SEQ ID NO: 518550 - DNA, 201 bp, Homo sapiens
tcccgggttcacgccattctcctgcctcagcctcccgagtagctgggactacaggtgcccgccaccatgcccagctaattttttgtatttttagtagagayggggtttcaccgtgtttggtttagccaggatggtctcaatctcctgaccttgtgatctgtccgcctcggcctcccaaagtgctgggattacaggcgtgag

SEQ ID NO: 518551 - DNA, 201 bp, Homo sapiens
tccaggacctatgtattagatggtccagagtatgtatatagaggtttttaaagattgtcataagaattaaaattccacccatgagcttggtgactcacctytcctatcctttgtttctttaactttaaaatgggacacctcatttgaggattaaatgtgttggcactggtataatgcctagtgtttgataagcattggccc

SEQ ID NO: 518552 - DNA, 201 bp, Homo sapiens
aggttatcatccaggacctatgtattagatggtccagagtatgtatatagaggtttttaaagattgtcataagaattaaaattccacccatgagcttggtractcacctctcctatcctttgtttctttaactttaaaatgggacacctcatttgaggattaaatgtgttggcactggtataatgcctagtgtttgataag

SEQ ID NO: 518553 - DNA, 201 bp, Homo sapiens
taaaaatacaaaaattagccgggcatggtggtgcatgcctgtagtcccagctactcgggaggttgaggcaggagaatttcttgaacccaggaggtggggtrcgcagtgagccgagagcatggccgctgcactccagcctgagtggcagagcaagactctgtctcaaacaaaagaaaaaaagtaactaattttaacgtctcc

SEQ ID NO: 518554 - DNA, 201 bp, Homo sapiens
gaggggtggtggggaaatagacaataaatcccttattatatgttatatgttagacagtgaagaggtgaggggatatgccatgtagatatctgaagggggtraatgttacacatagagggaagagcaaatacaaaggaaagtagaaattcctgcaggtcagagatcaagggagcagaatgatctaggaagattagagtgaga

SEQ ID NO: 518555 - DNA, 201 bp, Homo sapiens
aaaaaggcaacaacaacaaaatccttgctattatagagattatattagtgtgtggtggaggggtggtggggaaatagacaataaatcccttattatatgtyatatgttagacagtgaagaggtgaggggatatgccatgtagatatctgaagggggtaaatgttacacatagagggaagagcaaatacaaaggaaagtaga

SEQ ID NO: 518556 - DNA, 201 bp, Homo sapiens
tgggaaaaaaatttattttatcaaataaagctaattttttttcttagtttttaatgtgcccagctttggatgcctagaaacacagacacacagacacacasacacacacacacacacacacacacacacactcttaatttttcatgatgggaattgtttaacatttacaaaagtaacgcggtgaaaccccatgcatgtctt

SEQ ID NO: 518557 - DNA, 201 bp, Homo sapiens
agttgtagtttttgggaaaaaaatttattttatcaaataaagctaattttttttcttagtttttaatgtgcccagctttggatgcctagaaacacagacasacagacacacacacacacacacacacacacacacacacacactcttaatttttcatgatgggaattgtttaacatttacaaaagtaacgcggtgaaaccc

SEQ ID NO: 518558 - DNA, 201 bp, Homo sapiens
agtagctgggattacaggcatgtgccaccacgcctggctaattttttatttttagtagacatggggtttctccatgttggtcaggctggtctcagactctygacctcaggtgattcacctgtctcggcctcccaaagtgctgggattacaggtatgagccaccgcacctggccaaaactctttagtggtagagtagatgaa

SEQ ID NO: 518559 - DNA, 201 bp, Homo sapiens
acaacctaaatactcttttttttttttttttgagacagagtttcactcttgttgcccaggctggagtgcaatggcgtgatctcagcttaccgcaacctccrcctcccaggttcaagcgattctcgtacctcagtctccctagtagctgggattacaggcatgtgccaccacgcctggctaattttttatttttagtagaca

SEQ ID NO: 518560 - DNA, 201 bp, Homo sapiens
agtggtagagctagcaatcaaattcagggttctcagactgcaaagtctctgctctatggactgtaaagtcaaaatgcctagtatgttctgagtttcaaacytacaaggatataattttctatgtctgctcatatttatcagaattgagaaaataagatttaaatgtctttcagtccatatttagagataaataacgttttt

SEQ ID NO: 518561 - DNA, 201 bp, Homo sapiens
cttggcaatgtgggctcttttttggttccatatgaactttaaagtcgttttttccaattctgtgaagaaagttattggtagtttgatggggatggcattgmatctataattaccttgggcagtatggccattttcacgatattgattcttcctatccatgagcatggaatgttcttccatttgtttgtgtcctcttttatt

SEQ ID NO: 518562 - DNA, 201 bp, Homo sapiens
gcttactttatagacaaggaaactgcattatctaaaaagtaatagcagtttatccaaggccacacagctagtaagtcacagagctggtagttgaggtcaarcctgattccaaatgccatgctgttaatgctccagcattccagtttttcttaaaactgagagttatataaattccttttaaagaaaaaataaatttatgga

SEQ ID NO: 518563 - DNA, 201 bp, Homo sapiens
tatgatatatgcacttgatttttttttattcccagagtaatcctctaagtttggtattatctccatttaacaaatgaagaaattgagaatcagatactttragtaacttgtccaaagttccagtgctattaagtggtagagctagcaatcaaattcagggttctcagactgcaaagtctctgctctatggactgtaaagtc

SEQ ID NO: 518564 - DNA, 201 bp, Homo sapiens
cttgttagtctggtagagatgatcttgtctaatttttttttttttttttgagacaaagtctcgctctgttgcccaggctggagtgcagtagcatgatctcrgctcactgcaacctccgcctcctgtgttcaagcgattctcctgcctcagcctcctgagtagctgggactacaggcacacaccaccacacccagctaattt

SEQ ID NO: 518565 - DNA, 201 bp, Homo sapiens
ataatacaaaatttgaaatttttgcttgaaagcttgaattttatcattggcaacaaatattgctggttgttttccttaaagcgatgggcttgcttttttcrtttttgagaaaatgttgtccaaatgccaagtcttaataaccatagttattcaagggtggtgggtaattaacttgctcaggatcacatagctagtaagtgg

SEQ ID NO: 518566 - DNA, 201 bp, Homo sapiens
gttttttaaaagtatatggaaatctttgtatttgttaataaagccttatttaaaatgttttaaattttgtccttcattagtctattgtattatcaggttgmtgagggactgtttttggaaacagattatatgggctgacagagtttaaaagtaatgctttttatctatttaaaatttttctctatattgactgttcaggct

SEQ ID NO: 518567 - DNA, 201 bp, Homo sapiens
gagttctctcctgtccaaacaatgttctaaagttgattatgtttttagtaagaatatagaattcagtaatcattttcacaaatattccacaaataggaacrtctctgttaggtgcaaaagatacagagatgactaagatacagtttctgtcctcagagagtgcatactctaatagaagaaatagaagtaaaaagaactgta

SEQ ID NO: 518568 - DNA, 201 bp, Homo sapiens
ctatgactcagcagttgcactcatcagtgtatatcaaggagaaaatcttgccatgtagaagaatgttcgtgttagtccatttttacattactataaaggartactgaaggctgggtaatttataaagaaaagaggtttaattggcccacagttctgcaggctgtacaggaaacatggtgctggcttttacttctagtaagg

SEQ ID NO: 518569 - DNA, 201 bp, Homo sapiens
aaagagatagagattccatcaaatgggggaaaataagaggactttatgaaaaaggcacaaaaaagggctaggtgtgaattctctgttgaaatagtaattaytgtgaatttttgatttattacactatttattcttctatgactggcattaaacagaagaagagaaacaaagagattaatgaaacagtgagttctctcctgt

SEQ ID NO: 518570 - DNA, 201 bp, Homo sapiens
tacagataaacaagaagtccaaggactgagctctagagcactatgatgttaacatgtctgtttatatcacagattatctataaagatatcacttacacctraaacagtgacagtagtagcaatggggaaaaagacattaattcagaatgagaaggagttagtaagaagattgattgatgactataatgtgaaaaggtatga

SEQ ID NO: 518571 - DNA, 201 bp, Homo sapiens
actgtgattgccacacttccaaagagaagaaaaacttttcaagcaccaaaaaagtagcttaaaaacaaattttgtacaccagtcagggactctttagagtrcactcataggtgggaattgaacaatgagatcacatggacacaggaaggggaacatcacactctggggactgttgtggggtggggggaagggggagggata

SEQ ID NO: 518572 - DNA, 201 bp, Homo sapiens
ttaggaaggcaaatgtgtttttttccccttggaataaattataaacttaaaagttaggtaaatattgagataaataagataagtaattgaaagataaatakattattttaaaattgactagaccctagaaaatttaaatattcattgtgcaataatgtgtttctttcagtcatttaaagttgcagtttaatatttgttggg

SEQ ID NO: 518573 - DNA, 201 bp, Homo sapiens
ctcctgcctcagccttgtgagtagctgggattacaggtgcccaccgccacacccagctagtttttgtatttttagtagagacagggtttcaccatgtttgycatgctggtctcaaactcctgacctcaagtgatctgcccaccttggcctcccaaagtactgggattacaggcttgagccaccacacccagcctagctagt

SEQ ID NO: 518574 - DNA, 201 bp, Homo sapiens
tggtggaggggtggtggggaaatagacaataaatcccttattatatgttatatgttagacagtgaagaggtgaggggatatgccatgtagatatctgaagkgggtaaatgttacacatagagggaagagcaaatacaaaggaaagtagaaattcctgcaggtcagagatcaagggagcagaatgatctaggaagattagag

SEQ ID NO: 518575 - DNA, 201 bp, Homo sapiens
agtagtaggtattcaataattacttgtagctccataatgacatttgaacaaggtcctgatggctctaggagtccaagcaagaacaaaagaatgaaagtgtraggaatatggtgtattgggaacaaacagtctggtttgtttggtgcacagagtatgtatagggaagtggaaaaataaagccagaaaggcaggttgttggtt

SEQ ID NO: 518576 - DNA, 201 bp, Homo sapiens
ttagtgttggctaatacagtagccagtggccacatgtggctgtgtaaatttaaattaattaaaatgaaaaatttggttgtctggtcacactagccacattycaagtacttaatagctgcatatgtttagtgaccactgtgttggacagagcagataaaaaacatttctatcgttgtaggaagttctgttcaacagtcctgg

SEQ ID NO: 518577 - DNA, 201 bp, Homo sapiens
catgaattatttccaggggcacacaatgctattgaaattactgaaaacaaaatatctgacatcttatttacttgtagaaatctgtaattctattgtgcctrtgataaattcacataggcaatatctttaataggttaatatcaatgaagatttttaattacaataatgagttcactacagacgattaacacaccacactgg

SEQ ID NO: 518578 - DNA, 201 bp, Homo sapiens
tagcgatgtttgttatgattgttggaaggaagaagactgtgtttctacaacacagaaacatgacattcattattaagttgcccttgctcagatgtgtttayttaatattctgaatatcataaattcataggaagggcttgggcatatatactttccatataaattgctcttctttggtccatttcagatgaagtagtggag

SEQ ID NO: 518579 - DNA, 201 bp, Homo sapiens
ctttcacatatgttctgttttagtttgttttactgtcaattccccaaaacattgtgcacatttaataatattaattgaaatttaaatatttctgcttagcracaaagacaaacttgtcttttgacatgttgagctttgacaagcttttggttggtttattttgtctgatttgttgagaattccaacataattctagcttgc

SEQ ID NO: 518580 - DNA, 201 bp, Homo sapiens
caccatttaggcactagggatacagcaacagacaaaaaggcaacaacaacaaaatccttgctattatagagattatattagtgtgtggtggaggggtggtrgggaaatagacaataaatcccttattatatgttatatgttagacagtgaagaggtgaggggatatgccatgtagatatctgaagggggtaaatgttacac

SEQ ID NO: 518581 - DNA, 201 bp, Homo sapiens
tcaccacctcaccccagtactcatgcttcagccacattgaacttgtccttgtttctcaaacctaacatagattttatgccttcatgtctttgtttatattrttcactttgccttgatgtcttttcttgtttcttttttgacctgatagacttccattcatccattaaagttcatgccaccccttttgtgatttccacacgt

SEQ ID NO: 518582 - DNA, 201 bp, Homo sapiens
gagtttagagttagggaagttgttttaaacgaagcatttaaattttactcttgaactaccatcaactatgtatggtagtgtttatatggatcccagacctrtttcatcgaaattacatgttgttgttattaaaacgcagatccctgggaaccactccagacctattaaatcagaatttctggagattggtcctgggaatcg

SEQ ID NO: 518583 - DNA, 201 bp, Homo sapiens
ggtcaggccggtctcgaactcccgacctcaggtgatccgcccgcctcggcctcccaaagtgctgggattacaggcatgagccacggcgcccagcatcattkttatcttttcaattcattttctataccacaaacaaaatgatctttacagaatgataactaggttatgctaccctgtctctttaaaatccttcaatgattt

SEQ ID NO: 518584 - DNA, 201 bp, Homo sapiens
gttgccagggacatttctgctttatatctcattggctggaacatactcaggtggccacatctattaatagttacaagagaggctaagatgcaggctgtackctgggtagccatgtactcagttgtaatttgggagtttgatgtatgggagaaagaaagatgcagaagatattgggggacaaccagcagtgtaatgtaatta

SEQ ID NO: 518585 - DNA, 201 bp, Homo sapiens
ctctacaaaaaataaaaaattagctgagcatagtggtgcacgcctatggttacagtttctctggaggctgaggtgggagaatcacttgacacagaaggtcrgggttgcagggagcagtgattgcatcactgccttccagcctgggcaacagagtgagaccctgcctcaacacaaaacaaaaaactcttcttgtcccttctt

SEQ ID NO: 518586 - DNA, 201 bp, Homo sapiens
agtgggtgcagcacaccagcatggcacatgtatacatatgtaacaaacctgcacattgtgcacatgtaccccaaaacttaaagtataaaaaaaaaaaaaaagaaataccaccttcagcaccttgtccagtggagcatgtgaaattaagtacttagattctttttgtggactgaagcttcattttctttgggctagttcaaa

SEQ ID NO: 518587 - DNA, 201 bp, Homo sapiens
cacttgagcacttttaatttatgcatttctgttggttataatacttgggagtgaaatcactgagtcatagagtatatacatgttcagttttagtagttacscattttgcatcaatttattgttttcccaagtgtttgcactaatttacattccctccagcaacctataaaagttccagttgctgtatttcttgactaatac

SEQ ID NO: 518588 - DNA, 201 bp, Homo sapiens
attaaaaaatatataaagtgcttaatgcatttatatacatagaaacacatgtatgcataagtatatgtgtacacacacacacacacacacacacacacacacacacatatatacatacatacaaacagcctgctaagtatgaggcacgcattaccattactattagctgcctttcagaattacctgttttctattgatatc

SEQ ID NO: 518589 - DNA, 201 bp, Homo sapiens
aattaaaaaatatataaagtgcttaatgcatttatatacatagaaacacatgtatgcataagtatatgtgtacacacacacacacacacacacacacacacacacacatatatacatacatacaaacagcctgctaagtatgaggcacgcattaccattactattagctgcctttcagaattacctgttttctattgatat

SEQ ID NO: 518590 - DNA, 201 bp, Homo sapiens
aaattaaaaaatatataaagtgcttaatgcatttatatacatagaaacacatgtatgcataagtatatgtgtacacacacacacacacacacacacacacmcacacacatatatacatacatacaaacagcctgctaagtatgaggcacgcattaccattactattagctgcctttcagaattacctgttttctattgata

SEQ ID NO: 518591 - DNA, 201 bp, Homo sapiens
gtctcactctgttgcccaggctggagtatagtggcacaatcatagctcactgtaatctcgaactcctgggctcaagtgatcctccgtgatcctcctgcctycttttttttttcttttttggaggcagagtgttcctctgtcccccaggctggagtgcaatggcatgatcttggctcactgcaacctctgtctcccgggctc

SEQ ID NO: 518592 - DNA, 201 bp, Homo sapiens
ctactcgggaggctgaggcaggagaattgcttgaaccggggaggcagaggttgcagtgagccgagatcgtgccactgcactccagcctgggtgacagagcragactccatctcaaaataaataaataaataaataaaactccagcctgggtgacagagcaagactccgtctcaaaataaataaatgaatgaaagaaggaag

SEQ ID NO: 518593 - DNA, 201 bp, Homo sapiens
tggtggctcatgcctgtaatcccagcactttgggaggccaaggcggggatcacctgaggtcaggagtttgggaccagcctggccaacatggtgaaaccccrtctttactgaaaatacaaaaattggccagatgtggtagcacacatctgtaatcccagctactcgggaggctgaggcaggagaattgcttgaaccggggag

SEQ ID NO: 518594 - DNA, 201 bp, Homo sapiens
gagtgattcagtcaagaggaaggaattgatacaaaagaaagaggggctaattatagaagccaagtcccttcgtaggtgtgggagataatccagtgcataaytggaggagttagtctttgaaagtatatgaccatggagtggttggctgtgtgtggtggaagaaaagataattagaaatgaggcattcaaagaacttaaagg

SEQ ID NO: 518595 - DNA, 201 bp, Homo sapiens
tgttcttcaaaaataaaggtaagctgggcgtggtggctcatgcctgtaatcccagcactttgggaggccaaggcggggatcacctgaggtcaggagtttgrgaccagcctggccaacatggtgaaaccccgtctttactgaaaatacaaaaattggccagatgtggtagcacacatctgtaatcccagctactcgggaggc

SEQ ID NO: 518596 - DNA, 201 bp, Homo sapiens
gtctttgaaaagaaccaatttattggaatgatgagggcaaaaacctgatgtaaagggtttaagagggaatatgagataaaaaaggggagatagtaactatmggcaggagaggagagacataggagtggtaaccagaaggaaatgaggagtctaaacaaggttagctttttaaaatgggagatattgtagaatgttggtatg

SEQ ID NO: 518597 - DNA, 201 bp, Homo sapiens
agtggtagagtagatgaataaatacaataggatataacaatggtcaaatcaaataactacagcaaacacaacaataggattgaatctcaataaaataactwctagaatattacatagagcgtgatacctggtttttaaagcaaagaacagtttaacatatatatgaatttgaattattcatatatatgaaatatacatatg

SEQ ID NO: 518598 - DNA, 201 bp, Homo sapiens
tgaggatcaactgtacccctgaaaacctactttactcactaagactaggttaggctctaactcctctttgctctcaaagcactcaatgttcaccttttccraagcccttaaattgtgttgtaattgcacattttcttattggtatttcccacaagactgaagtacttaggagcaggaattatggttttttttttaattcaa

SEQ ID NO: 518599 - DNA, 201 bp, Homo sapiens
taaaaaaatcattttactgtttctcacaatgtatgtatttatatacatatatatatatatatatatatattttttttttttttttttgtagagacagggtytcactgtattgttcaggtagtctcaaactcctgggctcaagtgatccacctatattggcctcccagaatgctgagattatagacatgagccaccatgccc

SEQ ID NO: 518600 - DNA, 201 bp, Homo sapiens
ctctagcttactttactataagaatacagtaaataatacatttaacatgcaaaatgtgtgttaattatttctgttatctgtaaggcttctgctcaacagtrggctattagtagttaagtttaggggtagtcaaaagttaaacgtggatttttgatgcacaggggttgacaccctaacccccacattgtctgaggatcaact

SEQ ID NO: 518601 - DNA, 201 bp, Homo sapiens
gttacacatagagggaagagcaaatacaaaggaaagtagaaattcctgcaggtcagagatcaagggagcagaatgatctaggaagattagagtgagagatraggtcagagacataaagggcattataggccattgtcagggctttggcttttactcttgtctaagatgggaagccattggaaggctttgattagtggtatg

SEQ ID NO: 518602 - DNA, 201 bp, Homo sapiens
agttattttcattttctttttaaaaaaatcattttactgtttctcacaatgtatgtatttatatacatatatatatatatatatatatattttttttttttttttttgtagagacagggtctcactgtattgttcaggtagtctcaaactcctgggctcaagtgatccacctatattggcctcccagaatgctgagattat

SEQ ID NO: 518603 - DNA, 201 bp, Homo sapiens
atgataagtataagttattttcattttctttttaaaaaaatcattttactgtttctcacaatgtatgtatttatatacatatatatatatatatatatatattttttttttttttttttgtagagacagggtctcactgtattgttcaggtagtctcaaactcctgggctcaagtgatccacctatattggcctcccagaa

SEQ ID NO: 518604 - DNA, 201 bp, Homo sapiens
gaaaatgttgtccaaatgccaagtcttaataaccatagttattcaagggtggtgggtaattaacttgctcaggatcacatagctagtaagtggcagagctrggtctagagaccagatcttttgattatattctattatattgccctatgtctaaattatttggacttgccaaaccatgtcttacaataatgtattgtggtg

SEQ ID NO: 518605 - DNA, 201 bp, Homo sapiens
ttgttttccttaaagcgatgggcttgcttttttcatttttgagaaaatgttgtccaaatgccaagtcttaataaccatagttattcaagggtggtgggtarttaacttgctcaggatcacatagctagtaagtggcagagctaggtctagagaccagatcttttgattatattctattatattgccctatgtctaaattat

SEQ ID NO: 518606 - DNA, 201 bp, Homo sapiens
atatcccagaatatctcaatcgttctgtcgccactctcctgatgcatatgctgcaggttgacccactgaaacgagcaactatcaaagacataaggtgattyttctttttgtttctgttctgcatattttctcataggaataataatgttaattaaatgattctcccaaagtctcatttcctgccctcaccacctcacccca

SEQ ID NO: 518607 - DNA, 201 bp, Homo sapiens
gaaatcaaatttagattgtttccttattgttttttaaaattaatttttaaaatataattcacatatcataaatttatccctttagattgtataattcactrgcttttagtgtattcacaaagttccataatcattacggccatctaattccagaactattttatcatccgtgaaagaaactatacacactaatagtcactc

SEQ ID NO: 518608 - DNA, 201 bp, Homo sapiens
ggggaacaaacactgaatattggggagcagccatggacttcattaaagaccttggaaatgaatatgtactgaatgtagactacctatatatagaagtaggrtacatagagaaaaagtgattcttgcatttcaggtttgtgttgtcatcttttttcttagattgtatgcaggtcctgaagttgatatctggagctgtggtgt

SEQ ID NO: 518609 - DNA, 201 bp, Homo sapiens
atatattttttgttttgagatagagtctcgctctgtcacctaggctagagtgcagtggcacaatctcagctcactgtaccacctcctgggctcagatgatyctcccacctcagccttctgagtagctgggactaagatgtgcaccaccatccctggctattttttgtatttttagtagaaacagcgtttcaccatgttgcc

SEQ ID NO: 518610 - DNA, 201 bp, Homo sapiens
aaccaagacattaattaccttagactctagaatgttatagaaagtttgacttattctatatgtccatacataaataagaaaagtactgtcaactcaataarcatgggcaaaagacacagcattttctacgaagaaatgtatatggtgttttgcaactgttggagaatatataaatccaccagttttctaaagattttagca

SEQ ID NO: 518611 - DNA, 201 bp, Homo sapiens
ctgaatgctaatacattctccaacggtgttaaagagtctactgaatgctaatacattctccaacagtgttgaagaatttataatggtaaatgttgttgttkttttttttcttccccccccccgccattttttgtttgtttgtttgttttgttttgagtctgggtctcactctgttgcccaggctggagtatagtggcacaa

SEQ ID NO: 518612 - DNA, 201 bp, Homo sapiens
tacaggataaatactgtctacacagtactaattaagtactttaatgttttaaatatctctctctctatatatatgatatattatatatatatatatatatattttttgttttgagatagagtctcgctctgtcacctaggctagagtgcagtggcacaatctcagctcactgtaccacctcctgggctcagatgatcctcc

SEQ ID NO: 518613 - DNA, 201 bp, Homo sapiens
acattaagagagggcatggtttatgacgctttgggataagtgttgctggcagagtctactgaatgctaatacattctccaacggtgttaaagagtctactraatgctaatacattctccaacagtgttgaagaatttataatggtaaatgttgttgttgttttttttcttccccccccccgccattttttgtttgtttgtt

SEQ ID NO: 518614 - DNA, 201 bp, Homo sapiens
tatgtattagatggtccagagtatgtatatagaggtttttaaagattgtcataagaattaaaattccacccatgagcttggtgactcacctctcctatccwttgtttctttaactttaaaatgggacacctcatttgaggattaaatgtgttggcactggtataatgcctagtgtttgataagcattggcccagagcagga

SEQ ID NO: 518615 - DNA, 201 bp, Homo sapiens
aacggtgttaaagagtctactgaatgctaatacattctccaacagtgttgaagaatttataatggtaaatgttgttgttgttttttttcttccccccccccgccattttttgtttgtttgtttgttttgttttgagtctgggtctcactctgttgcccaggctggagtatagtggcacaatcatagctcactgtaatctcg

SEQ ID NO: 518616 - DNA, 201 bp, Homo sapiens
agatttggaacattcatttagtctttactgctgtacttattgttagtgaactgtggcttattggtatttttaatgaagggacccatgtggtgcatcttacyggcagcaagagtatgccactgactgttcagagcaggcttttatgggattggtgtggatgaccggtgatgactcagttctcacatcactgctaggaaacct

SEQ ID NO: 518617 - DNA, 201 bp, Homo sapiens
attacagaatttaaagaggcttttgaaagcacagggcaaaaaagtagtagtctctattttattctttcaactatggaaataggtaaataatattttgatgytttcatgtttgggaaagttaatatgcttcagaataacctcatttgtgatgggaatcaacatttttatttagaaaggaaatttagtttcactcatatatgt

SEQ ID NO: 518618 - DNA, 201 bp, Homo sapiens
tgttcagaaaggtactagctaccttttaaagcataacaactcattgaactaagaactttacttttcaaccttgtacgttctgtaccatgaaaaggaattarctgaaatctcctcagtagcttttttttttcatttaattaaattttcattaattttcattaaatacactttaaaaatgcagatacctctagagaagttaga

SEQ ID NO: 518619 - DNA, 201 bp, Homo sapiens
aaagtgtgggcagcagatggcatttagtatgaatgggtcattttaaagtcctggtccacttgtagtagaaccaaaatgaggctatacatatattttcagtwcagataatacactctgagctaaaaatgcttttctaccaaactttatcttaacatatccatataaattagaaaggattttgtagtttggtcatatattgag

SEQ ID NO: 518620 - DNA, 201 bp, Homo sapiens
taatagttaaataaaagtgaatgtacacacattcacagtaaattgattttacttttgaaattatgcaaattctaaacaagtgttaaatattggttccaaataatgaaattatgtttcttctcaaatactagattagtgattgaattaaaatcagttgaattattctcacaattaggtaaatacgtgctatttaggtttctc

SEQ ID NO: 518621 - DNA, 201 bp, Homo sapiens
gccaggatggtctcgatctcctgacctcgtaatacgcccgcctcagcttcccaaagtgctgggagtaaaggcgtgagccattgcgcccggcctcacccggmtaattttctgtatttttggtagagacagggtttcaccgtgttagccaggatggtcttgctctcttgacctcgtgatccacctgcctcggcctcccaaagt

SEQ ID NO: 518622 - DNA, 201 bp, Homo sapiens
cacacaaataatacaaaatttgaaatttttgcttgaaagcttgaattttatcattggcaacaaatattgctggttgttttccttaaagcgatgggcttgcktttttcatttttgagaaaatgttgtccaaatgccaagtcttaataaccatagttattcaagggtggtgggtaattaacttgctcaggatcacatagctag

SEQ ID NO: 518623 - DNA, 201 bp, Homo sapiens
atatgataagtataagttattttcattttctttttaaaaaaatcattttactgtttctcacaatgtatgtatttatatacatatatatatatatatatatatattttttttttttttttttgtagagacagggtctcactgtattgttcaggtagtctcaaactcctgggctcaagtgatccacctatattggcctcccag

SEQ ID NO: 518624 - DNA, 201 bp, Homo sapiens
caatatgataagtataagttattttcattttctttttaaaaaaatcattttactgtttctcacaatgtatgtatttatatacatatatatatatatatatatatattttttttttttttttttgtagagacagggtctcactgtattgttcaggtagtctcaaactcctgggctcaagtgatccacctatattggcctccc

SEQ ID NO: 518625 - DNA, 201 bp, Homo sapiens
cttgttttacttgggcaatatgataagtataagttattttcattttctttttaaaaaaatcattttactgtttctcacaatgtatgtatttatatacatayatatatatatatatatatattttttttttttttttttgtagagacagggtctcactgtattgttcaggtagtctcaaactcctgggctcaagtgatccac

SEQ ID NO: 518626 - DNA, 201 bp, Homo sapiens
tagaaatgctgtttctgaaaaatttttaaactacattagtttatttctctgctgtactaggaaaataatactgagaagtatgagtgattcatgattgaatktcttgtaatgcttcaatatacttgtattttagacagcacaagagatttgacttactcaggccaggcttagaatgtaatcctggaatttgccttttccact

SEQ ID NO: 518627 - DNA, 201 bp, Homo sapiens
aatgcttgttttacttgggcaatatgataagtataagttattttcattttctttttaaaaaaatcattttactgtttctcacaatgtatgtatttatatayatatatatatatatatatatatattttttttttttttttttgtagagacagggtctcactgtattgttcaggtagtctcaaactcctgggctcaagtgat

SEQ ID NO: 518628 - DNA, 201 bp, Homo sapiens
acttggaattctaagtgtcacttctcccaaacccaaattattattacatatggtgtgtattaataaattctataatacctttaatatgatagcattatttyatatattatgagttaaatctttcgttgggtaaccacagattgcattatagtataatcattaggaacataggctttagaatcagatagatctggatttaaa

SEQ ID NO: 518629 - DNA, 201 bp, Homo sapiens
aaatcactgagtcatagagtatatacatgttcagttttagtagttacgcattttgcatcaatttattgttttcccaagtgtttgcactaatttacattccytccagcaacctataaaagttccagttgctgtatttcttgactaatacatggcattgtctgtcttttttattgtgctattctggtgggtgtattatggtat

SEQ ID NO: 518630 - DNA, 201 bp, Homo sapiens
aagctagtgtcatttatttattagatatagttctttaataataccttgcatattttccaaagtatatagagcattgttttatattttgtgtttggaaaaaygagattttgggggaaaatattgtttcatgaaattacacaagtagagattgtgtagttactcataacttattcattggtacattataaaaatgtttataca

SEQ ID NO: 518631 - DNA, 201 bp, Homo sapiens
tgggttacttgtcatcttataagttgagttgtgaggattctttgtaaattgtggatacagatcctttaatggatatattttgcaaatattttcttccagtytgttgtgtcttttcattttcttgtgtcttttgaagtataaaagttttgaattttcatgaggtccaatttattagtttttaaaattattttatggactatg

SEQ ID NO: 518632 - DNA, 201 bp, Homo sapiens
cttttctgagtatctttgccaacatttgttattgtctgcctgatttattatagccattctagtgggtgcgaaatagtatctcattgaggcattaattttgygtttccctaaggactaatgatgttgaacattgtctcacgtaattactagtcatttatgtattttcattgatggaatgtctgtttatatctcttgcttatt

SEQ ID NO: 518633 - DNA, 201 bp, Homo sapiens
ctgcttttgaaatgttatactttattcgagttaagtaactagtaagaatagttaagtatggaactttcatttgttttcttttttgttaattagtcacatgkgatttaattaacctgccttctctccagaatagagacagttgtttattaaaaatactttgttgcaaatccagaattataagtgaaatattgacctttattt

SEQ ID NO: 518634 - DNA, 201 bp, Homo sapiens
aggagctgtagcaggaggaggtacagcatgactaacactgaaaaatgtagtatgactcagtgttgtgactcaaaggtgagaccaaacaacagagatggcargggcctgatttattcaggacctaagagcaatgggaaacctttgaagattctaaattgagaggctactggagatcatatttgtgtttgaagagaatcttta

SEQ ID NO: 518635 - DNA, 201 bp, Homo sapiens
aaacatgggcaaaagacacagcattttctacgaagaaatgtatatggtgttttgcaactgttggagaatatataaatccaccagttttctaaagattttakcattgccaaactttctttggaaaactgtctttggtattatcttttcaattggaacatacacaataactatgactcagcagttgcactcatcagtgtatat

SEQ ID NO: 518636 - DNA, 201 bp, Homo sapiens
gtggaaggaagaaatgcaaaaagaaatgaagagcgttgggaagtctaagtatgtgggtaactaaatagatactgactatacaaaataatatcttgcgagaytgagaatatatgtaggaatgaaatgcaagaacagaaaagatatgagaaaaagtagagttatagtgttctaaagtccttgctttgtttgggaaatgtaaaa

SEQ ID NO: 518637 - DNA, 201 bp, Homo sapiens
gtgaatctggagttcaggggagaggtgtaagctagagagataaatttggaagccatcagcagacagactgtatttaagatatttaaagccctaagactggrtgaaatcaccaagataaacaagaagtccaaggactgggctctagaacactatgatgctaacatgtctgaaaaatgaggaggaaccagtaaaagagaatga

SEQ ID NO: 518638 - DNA, 201 bp, Homo sapiens
tagtgtggatgccatgaatgtgttatatgaaaaaacagaatgactatatttatcatagaatatattgatttagcacctctgtgtacaaagcactgtgcgcrtatacttcctgagagattcagatgagcactggtcatcttgtccaaggagagtatgagctaatagctcaggtcatgtgattgtcacaaatgcaaatgttta

SEQ ID NO: 518639 - DNA, 201 bp, Homo sapiens
gttgaataagtgaatctggagttcaggggagaggtgtaagctagagagataaatttggaagccatcagcagacagactgtatttaagatatttaaagcccyaagactggatgaaatcaccaagataaacaagaagtccaaggactgggctctagaacactatgatgctaacatgtctgaaaaatgaggaggaaccagtaaa

SEQ ID NO: 518640 - DNA, 201 bp, Homo sapiens
agtaataagttgactccccaactaaaacagtgaaaacaaggaaaaaatggaatggaatttttttttaccttcgaagaggtaaaagaaacaaactgccagcwtataattttatgcccagcaaaaatgttcttcaaaaataaaggtaagctgggcgtggtggctcatgcctgtaatcccagcactttgggaggccaaggcggg

SEQ ID NO: 518641 - DNA, 201 bp, Homo sapiens
tataattttatttctcatctactctttatgaatatggtatatctgacagtcttcaggcagatgtaatactgtacaagatttatttcagtttatttattgcrgtctccccaccccccaaaacttggaggcgtattaaaaaatctcttctcatgtgtctgtctatgatcaacgtttcttgcatatgctcggcaaatgttttga

SEQ ID NO: 518642 - DNA, 201 bp, Homo sapiens
ggcactagggatacagcaacagacaaaaaggcaacaacaacaaaatccttgctattatagagattatattagtgtgtggtggaggggtggtggggaaatakacaataaatcccttattatatgttatatgttagacagtgaagaggtgaggggatatgccatgtagatatctgaagggggtaaatgttacacatagaggga

SEQ ID NO: 518643 - DNA, 201 bp, Homo sapiens
atgcttgttttacttgggcaatatgataagtataagttattttcattttctttttaaaaaaatcattttactgtttctcacaatgtatgtatttatatacmtatatatatatatatatatatattttttttttttttttttgtagagacagggtctcactgtattgttcaggtagtctcaaactcctgggctcaagtgatc

SEQ ID NO: 518644 - DNA, 201 bp, Homo sapiens
atagctacttacttgagtaggccttcattaaatcgttgttcaacagatgaatgtttctaattgctcctgtcaaagtaggtattgatctggatatttacgtrtatacatgataaattatggcaagattatttattattggtgtttttataattttatttctcatctactctttatgaatatggtatatctgacagtcttcag

SEQ ID NO: 518645 - DNA, 201 bp, Homo sapiens
tcaaattgtttatcggatgttcacattctaaagtcacagagtcacctgaagctaaaattttctctctcttccaaatttacttctctgtttttggagggtgyggtgggagagtggagggaggtaaatgaaaataccattcatgcagtttcccaagccccaaacttgggcaaaatctttaatttcttcttttccctcatttct

SEQ ID NO: 518646 - DNA, 201 bp, Homo sapiens
tgatttctggcccttttgtttctccagatttctgagcacatttatcaaattgtttatcggatgttcacattctaaagtcacagagtcacctgaagctaaamttttctctctcttccaaatttacttctctgtttttggagggtgcggtgggagagtggagggaggtaaatgaaaataccattcatgcagtttcccaagccc

SEQ ID NO: 518647 - DNA, 201 bp, Homo sapiens
aagtttccttggtgtttggaggatttgaggctgaggaggtcaggactgctaaggcatattctgctaaggtctgtcttcatggagataggatccccttttgratgtagaaaaacaggctgcttttgaaatgttatactttattcgagttaagtaactagtaagaatagttaagtatggaactttcatttgttttcttttttg

SEQ ID NO: 518648 - DNA, 201 bp, Homo sapiens
gctagttcaaattattatgcagtatttccatagcctttacattttggcaactcttttctttgatcctagcagaaaaataggttataattttggccccaaakaattattttttaattgttccttttgttttattagatatgataatatcctaaactatataatatattaaaatagaatgaggatgtatctgatatgaattac

SEQ ID NO: 518649 - DNA, 201 bp, Homo sapiens
tgagaatagaaatagtaagtactcaggataatgtgatacaggataaatactgtctacacagtactaattaagtactttaatgttttaaatatctctctctmtatatatatgatatattatatatatatatatatatattttttgttttgagatagagtctcgctctgtcacctaggctagagtgcagtggcacaatctcag

SEQ ID NO: 518650 - DNA, 201 bp, Homo sapiens
tcaagcaattctcctgcctcagcctcctgagtagctgggattacaggcacatgccaacacacccggctaattttttctatttttagtagagatggggtttygccatattggccaggctggtcttgaactcctgtcctcaagtgatctgcccaccttggcctcccaaagtgctgggattacaggcatgagccaccatgccca

SEQ ID NO: 518651 - DNA, 201 bp, Homo sapiens
atttgttacataagtatacgcgtgccatggtggtttgctgcacccatcaaccatcatctacattcggtatttctcctaatgctatcccacccttaatcccrcatcccccaacaggccccagtgtgtgatgctcccctccctgtgtccatgtgttctcattgttcaactcccatttatgagtgagaacatgcggtgtttggt

SEQ ID NO: 518652 - DNA, 201 bp, Homo sapiens
caatttcatccatgtccctacaaaggacatgaactcatcattttttatggctgcatagtattccatggtgtatatgtgccacattttcttaatccagtctrtcattgttggacatttgggttggttccaagtctttgctattgtgaataatgccgcaataaacatacgtgtgcatgtgtctttatagcagcatgatttata

SEQ ID NO: 518653 - DNA, 201 bp, Homo sapiens
gggctctgttctgttccattgatctatatctctgttttggtaccagtaccatgctgttttggttactgtagccttgtagtatagtttgaagtcaggtagtktgatgcctccagctttgttcttttggcttaggattgacttggtgatgcgggctcttttttggttccatatgaactttaaagtagttttttccaattctgt

SEQ ID NO: 518654 - DNA, 201 bp, Homo sapiens
tttgtatcctgagactttgctgaagttgcttatcagcttaaggagattttgggctgagacaatggggttttctagataaacaatcatgtcgtctgcaaacmgggacaatttgacttcctcttttcctaattgaataccctttatttccttctcctgcctgattgccctggccagaacttccaacactatgttgaataggag

SEQ ID NO: 518655 - DNA, 201 bp, Homo sapiens
agggcagatgggttggagctggagagaagcaagggcagtggttttgaggcaggtgttgccgagggtccgtacttcaggtcctgactatgctgacactgagwcaatgtggtactccagaaccacatggattcaacttcactactacctaatccatggataagaggttagagtatgctagttctgacagttactcttgaaatg

SEQ ID NO: 518656 - DNA, 201 bp, Homo sapiens
gcacagagatagaaaacaccatagtacattcagggagcaataaataagcatttaaaccttgaggataagatgcagtggagaattctgttatggggtctgarctttaggcagtagggaaacacttgaagagctttaaaggggacagtaacaaggtcagatttgcattttagaaagatgatgttggtgactggaagatggaca

SEQ ID NO: 518657 - DNA, 201 bp, Homo sapiens
agtgaggatggcattaggtatgggatcagacaggtagacaacgaggtgcctgacttcccaagatctggaagatcaatttgaagagttaacaaatgcagatyctcccaccatactttttgtttttgaagtaattataatacagtttacaatattttgttttaagaagttttatttaaaagtacctagactattattttcaac

SEQ ID NO: 518658 - DNA, 201 bp, Homo sapiens
cctcctggtggcagaacttgagctcttgggatttgttggctagcagcatagggtaacaccatggttcccaaactgtgtgccaaggctcatgggggcaccayggtgaattcacaagagtgctgtggaatacttaaaagttttgaagtcaacatcctgaatattgtacaagctgctaccttgaagtagttcatagtttcaact

SEQ ID NO: 518659 - DNA, 201 bp, Homo sapiens
gttgatgtgagattcttttaattctccagacatctaaaaacatctgtcaacagtatggcagctaaatcctatccagggatgactcaccccatttcaaagtrgaaggagtcagtattattttgtgtacaaatataaaataggtaagtcaaatacaaatacaaatgagtcagtcaccacaaaataatgctgacccccctctac

SEQ ID NO: 518660 - DNA, 201 bp, Homo sapiens
gccctctagcttcaaaccaggtttcctggcccctgtaatgtatatagctgcctctcaagtcagggcttgtgtctaagcttttgaccatgagtctaatggamtttatgtagtattcagcttattgagacggggatatataagagtaatattagtttgagttgatgtgagattcttttaattctccagacatctaaaaacatc

SEQ ID NO: 518661 - DNA, 201 bp, Homo sapiens
aaacaggtatgtagagattaggtaactcatccaaggcagaagtttggcttcatagttcatgtttttaactatattcatagcactgatgttatcttcctaayatcaatctgtattagttttctattgctgcacaaaagattaaaagattatcattgctcctatctaatcaagataaaacatggaacttgctaagctagagat

SEQ ID NO: 518662 - DNA, 201 bp, Homo sapiens
ccacaccctccccaaatgcactaccctccagacacatccacatgttcttttttatggagggtttatcacgtgggtatgatcaattattagatctccagctmttccctcctcatggcttgttctttctggtgaccagccctgattcagaagcccaccatgtgttaccccattagaacaaaagatgctcctatcacccaggaa

SEQ ID NO: 518663 - DNA, 201 bp, Homo sapiens
atcccaaattttatgataactgctttcccattactttatgtttacctctaccagaaccttcttgtcttccttcttgattaggattttggaatttgccaccwcctccttctgtccccatgccctccactcatatttagccctcaaatccttatacctgatctccagtcaaactgctcttcctatccccaaaatcaccaggga

SEQ ID NO: 518664 - DNA, 201 bp, Homo sapiens
ccattcagtatgatattggctgtgggtttgtcatagatagctcttattattttgaaatacgtcccatcaatacctaatttattgagagtttttagcatgakgggttgttgaattttgtcaaaggctttttctgcatctattgagataatcatgtggtttttgtctttggctctgtttatatgctggattacatttattgat

SEQ ID NO: 518665 - DNA, 201 bp, Homo sapiens
tgcagatgtttgtaaaaaaggttttgtgaaaagtaaagtaagtaggaagcacaagcataaaagaaggaaaaataagcaaaaattatactttcatttttacrtaattatagtgaacagcactttctatatatctgttgtatgtatagtcccgaacaaagagatgatccatgccttaaagaacttgtgattcatttacaaacc

SEQ ID NO: 518666 - DNA, 201 bp, Homo sapiens
agctactggattgtatatattatcaatttggccatgataaatccaatatggataatgtttttggatagctagaaagtgccagaactgagattgactggtcyctctgcttctcagaccgagatatcatgtagacataatgatctcaaattgaaaaaaaatgatctcaaacatttgagaagacctggtgcgggttttggattg

SEQ ID NO: 518667 - DNA, 201 bp, Homo sapiens
gcatcccagggatgaagcccacttgatcatggtggataagctttttgatgtgctgctggattcggtttgccagtattttattgaggatttttgcatcaatrttcatcaaggatattggtctaaaattctcttttttggttgtgtctctgcctggctttggtatcagaatgatgctggcctcataaaatgagttagggagga

SEQ ID NO: 518668 - DNA, 201 bp, Homo sapiens
agtcattcaggagcaggttgttcagtttccatgtagttgagcggctttgagtgagattcttaatcctgagttctagtttgattgcactgtggtctgagagwtagtttgttataatttctgttcttttacatttgctgaggagagctttacttccaactatgtggtcaattttggaataggtgtggtgtggtgctgaaaaaa

SEQ ID NO: 518669 - DNA, 201 bp, Homo sapiens
agaaaggaactaatatccagagaactatatttttaatccttcgtactttaacataaagtacatggatcctttgattggaatatttgcctcctaacagctcrgaggtgttaggggaagcagtggatggttggatggagatgatgagtcattttagagcctgggacatggcagacatacatggcaggcagacactggggcttt

SEQ ID NO: 518670 - DNA, 201 bp, Homo sapiens
ttccaggtgcgtccgtcacccctttctttgactcggaaagggaactccctgaccccttgcgcttcccaggtgaggcaatgcctcgccctgcttcggctcgygcacggtgcgcgcacacactggcctgcgcccactgtctggcactccctagtgagatgaacccggtacctcagatggaaatgcagaaatcacccgtcttct

SEQ ID NO: 518671 - DNA, 201 bp, Homo sapiens
ccttttgtttcctgacaaatagtttgttgacactgaaaacaaaagatgtgttttctggcactgtttcaggctttctttttgagaacaagctgctctgtggrtgtgttcagtttctactatttcaaagtccagtgggtggcatttacatgggttttaaactatctttagttattaacattggtgttattattggtaattatt

SEQ ID NO: 518672 - DNA, 201 bp, Homo sapiens
gcagtggctattcacaggtgcgatcatagtgcactacagccttgaactcctgggctcaagtgatcctcctgcctcagtctcctgagttcctgtgactatargtgcataccaccatgcccagtcattgttttaatttctacatagtatttcattttatatctacaactgtttgtttatcttttctcctgtgatggacattta

SEQ ID NO: 518673 - DNA, 201 bp, Homo sapiens
cccgtctctactaaaaatacaaaaaattagccgggcgtagtggcgggcgcctgtagtcccagctacttgggaggctgaggcaggagaatggcgtgaacccrggaggcggagcttgcagtgagccgagatcccgccactgcactccagcctgggcgacagagcgagactccgtctcaaaaaaaaaaaaaaaaaaaaaaaaaa

SEQ ID NO: 518674 - DNA, 201 bp, Homo sapiens
aatctagtttggagtaagggttgggtaggaaatcaaactgctttgcatacagaaacatggagaattttgttgtaaaatccctggcacagagaaaggaggargaggagtggttcctcagcaacctattagggggccctagacataagggaaaaagttttgggaaattccctcttcagcagaaaggacattaaatttcaatga

SEQ ID NO: 518675 - DNA, 201 bp, Homo sapiens
gaacaatttatttttaaaaatttaatttattttatgagagatggaatctttctatgtcacccaggctgaagtgcagtggctattcacaggtgcgatcataktgcactacagccttgaactcctgggctcaagtgatcctcctgcctcagtctcctgagttcctgtgactataggtgcataccaccatgcccagtcattgtt

SEQ ID NO: 518676 - DNA, 201 bp, Homo sapiens
atgtatacatgtgccatgctggtgtgctgcatccattaactcgtcatttagcgttaggtatatctcccaatgctatccctcccccctccccccaccccacmacagtccccagagtgtgatgttccccttcttgtgtccatgtgttctcattgttcaattcccacctatgagtaagaacatgcggtgtttggttttttgtcc

SEQ ID NO: 518677 - DNA, 201 bp, Homo sapiens
acaccaaaagcaatggcaacaaaagacaaaattgacaaatgggatctaattaaactaaagagcttctgcatagcaaaagaaactaccatcagagtgaacargcaacctacaaaatgggagaaaattttcgcaacctactcatctgacaaagggctaatatccagaatctataatgaactcaaacaaatttacaagaaaaaa

SEQ ID NO: 518678 - DNA, 201 bp, Homo sapiens
tgagaacatgcagtgtttggttttctgttcttgtgttagtttgctgagaatgatggtttccagcttcatccatgttcctgcaaaggacatgaactcattcytttttatggctgcatagtgttccatggtgtatatgtgccacattttctttatccagtccaacattgatgggcatctgggttggttccaagtctttgctat

SEQ ID NO: 518679 - DNA, 201 bp, Homo sapiens
tatgcagaagaatgaaactggacccctctctctaaatacaaaaattaacccaagatggattaaagacttaaatgtgatgcttgaacctataaaagtcctakaggaaaacctaggaaaatatctttcagacattgacctaggcaaataatttattattaagatctcaaaaggaaatgcaacacaaacaaaaatagacaagtg

SEQ ID NO: 518680 - DNA, 201 bp, Homo sapiens
gtctttgctattgtgaatagtgccacaataaacatgcatgtgcatgtgtctttatagtagaatgatttataatcctttgggtatatacccagcaatgggaytgctgggtcaaatggtattttctagttctagatccttgaggaatcgccacactgtcctccacaatggttgaactaatttacactcccaccaacagtgtaa

SEQ ID NO: 518681 - DNA, 201 bp, Homo sapiens
tgtatgttttgtaaacaaaattctccaaaaaggaattcgaaagaagagactttattccagtgacatttgcagacccagaagatgcagccttctgtgtaaarcaaagatgcattccagagaacaaagggagggttatgatttcatagaaaagttactacccaggttcccagtcagtttcatttatgcaaatgagggattcaa

SEQ ID NO: 518682 - DNA, 201 bp, Homo sapiens
tgtttaaatctttaatccgtcttgagttaatttttgtacaaggtgtaaggaaggggtcccatttcagttttctgcatatggctagccagttttcccaacamcatttatttaatagggaatcctttccccattggttgtttttgtaaggtttgtcaaagatcagatggttgtagatgtgtggtgttatttctgaggcctctg

SEQ ID NO: 518683 - DNA, 201 bp, Homo sapiens
gacttggggtcacatggctttgtgggagtccatggactctaattctgattggcttagatgtacacagatccattgagttgatttcttactccaaattgggrtgatgtggagtttggaacataaattaaaagtattgttgtgaatgtgtactcatttctctgccatccaaattgttcaatatccactttaaatctaacttcc

SEQ ID NO: 518684 - DNA, 201 bp, Homo sapiens
aaaagccttcaatagctctcctttacaaacctcatacattcctatttaccttgacatttaagcccttcatagccttgctaaaagccatttcttgtctaatsgtttgtattactttaagttaaactatgctatgctatgacataagctattgcacgattaagacttgcacttcccatcttctaaacctttctctttactttc

SEQ ID NO: 518685 - DNA, 201 bp, Homo sapiens
tgaacttttacatcagttttgacctctgttggttgtattaaaagtatgtgttgatgtttacttaggcagtactgaggctactgcacccttcaaagtaggaratgtgtgtcactcaatttcctccagtattatgcctgtcagtgcaaacctttttctatccattgtaataggattagatgtcatatgtgatagttgaaataa

SEQ ID NO: 518686 - DNA, 201 bp, Homo sapiens
tgtcagacttggggtcacatggctttgtgggagtccatggactctaattctgattggcttagatgtacacagatccattgagttgatttcttactccaaaytggggtgatgtggagtttggaacataaattaaaagtattgttgtgaatgtgtactcatttctctgccatccaaattgttcaatatccactttaaatctaa

SEQ ID NO: 518687 - DNA, 201 bp, Homo sapiens
ttagtccctggcttggcaggaagggtagggaagatggatggggctcattgtttggcattgatgatgtccacgaattagggcttgagggaagcatcacccaygaggaagccatccacttcaggctggctggccagctccttgcaggttgcccccatcacagagcctccataaatggatacgggtgctctgagccaccacatc

SEQ ID NO: 518688 - DNA, 201 bp, Homo sapiens
ttatcagttagattgtcagtctctcctttttccttcatttttcatgtagatctgaatcaacctctcttcacctacaggtcataacatataaaccgtatacycctgatgcaccaacacatccagttactaggttgctctggctgaactgattctctttttgataactctgaagatttgtgatactgaggctcttactctact

SEQ ID NO: 518689 - DNA, 201 bp, Homo sapiens
tgggttttttttttttccctgaccactgctgttcattaaaccaatctgctcacaaatacctttttggtttcttcacttgtgcacatacccttgtctttcayttttttagatttctgtatctctttcaaatcctttcaaagtatatttttttaaaagaacacttccatcctccttatagcctatggttaatttcctactaca

SEQ ID NO: 518690 - DNA, 201 bp, Homo sapiens
atgtgagtgggaaagagtagcagggctaacttcctgggaaccaaggggatactgagccgaagaaggttttgtggaaagggagggaaataattaccttgacrggaagaactctcacagagattttcttcatagtgttgtggaaacacaggtagatgcaggtgagtcataccgaaccataatagttcaaggggcatgaatcaa

SEQ ID NO: 518691 - DNA, 201 bp, Homo sapiens
ccgaagaaggttttgtggaaagggagggaaataattaccttgacaggaagaactctcacagagattttcttcatagtgttgtggaaacacaggtagatgcmggtgagtcataccgaaccataatagttcaaggggcatgaatcaagcctttcatttagataccataaatgactaaatgtggttatgagtgtgccctgcaaa

SEQ ID NO: 518692 - DNA, 201 bp, Homo sapiens
tgtttttgtaaggtttgtcaaagatcagatggttgtagatgtgtggtgttatttctgaggcctctgttctgttccgttggtctagatatctgttttggtascactaccatgctgttttgtttactgtagcattgtagtatagtttgaagtcaggtagcatgatgcctccagctttgttatttttgcttaggattgtcttgg

SEQ ID NO: 518693 - DNA, 201 bp, Homo sapiens
ttatacaacaatgtcctgcagacacattttatacaacaatgtcctgcagacacagaaaataacacaatctttctgtgttaatgttacagaatttacatacrgtagacacttgataatttacataattatagacttaaattacatactattttcatctaaaacagaaattatattttttgtttgtttttatcaaattgaagc

SEQ ID NO: 518694 - DNA, 201 bp, Homo sapiens
agctttgttatttttgcttaggattgtcttggctatacgggctcttttttggttccatatgaaatttaaagaagttttttctgaatcatgaagaaagtcartggtagcttgatgagaatagcattgaatctttaaattactttgggcagtatggccattttcacaatattgattctttctatctgtgagcatggaatattt

SEQ ID NO: 518695 - DNA, 201 bp, Homo sapiens
ccttgagcagtggtttgtagttctctttaaagaggtccttaacactcagtaaactaggtatggacagaacatatgtcaaaataaaaaaagctatttatgamaaacccacagccaatatcatactgactggacaaaagctggaagcattccctttgaaaactggcacaagacaaggatgccctctctcaccactcctattcc

SEQ ID NO: 518696 - DNA, 201 bp, Homo sapiens
aatctgtattagttttctattgctgcacaaaagattaaaagattatcattgctcctatctaatcaagataaaacatggaacttgctaagctagagatacayatgaattacctacgtggaaacgactgaaggaagacaagctatgggtctggaactcaggggagaatatgcagcaagagatatagatttaacaatcataagt

SEQ ID NO: 518697 - DNA, 201 bp, Homo sapiens
tttccatgaagaaattagtcagtgacatgtggtattgaaatcatgtgaacaaaaagctcaacagcacttatcagtagacaaatgcaaatcaaaaccacaaygagataccatctctcaccagccagaatggccattattaaaaagtaaaaaaataacagatgctggcaaggttgtggagagaaaggaacacttgtacactgt

SEQ ID NO: 518698 - DNA, 201 bp, Homo sapiens
cccatatacaattatggtttccacaaggaacctcagctggattcctttagtagtacagggctctaggacacgtgagctgccagatgtatcctcatgtttcygtatgatattctcttaattttgtatcctaccatttcacttaatacattttacatatttttcttgctgctagataatttttacaattacataatttttaaa

SEQ ID NO: 518699 - DNA, 201 bp, Homo sapiens
ctgctcgcttacactgggcggtttcataaaggaggagatgcctgagctgggccttgaaaaatgaattaccctgtaatatgtaaatagaatgatattctacyttaacagtttgtgaaaatgcacagagatagaaaacaccatagtacattcagggagcaataaataagcatttaaaccttgaggataagatgcagtggagaa

SEQ ID NO: 518700 - DNA, 201 bp, Homo sapiens
gtttatctacatatccatcaaacatgtgctgagaactcttattgagccaataggttgcagagcacagacatcaaactatttggatttcagtctcagctccrtcacttaatagttgagtggtcttgaacagactgtttaagccatctcagcttcactttcccatatcaggactgatgtgagaattcactgagataatgtgtg

SEQ ID NO: 518701 - DNA, 201 bp, Homo sapiens
ttctgcagtgctgtaaactatggatgtgggtagtggaaaggtgagccattgctcctcccagagcttagtatgatacctgtgaataataagcactgattggrtagatgaataactaaatgaatgattgcttatctacaaatctcaggtcttttaaagagcagcccacagagacacctcttctttaactgttcctctctgaat

SEQ ID NO: 518702 - DNA, 201 bp, Homo sapiens
aatactatcttgccaggctttttcctccttaaaaaatgaatgttaattggttacttaacatttacatatctctctttttaggtggttctttggagcaatcrgaagatcagatgcagagaaacaactattatattcagaaaacaagaccggttcctttctaatcagagaaagtgaaagccaaaaaggagaattctctctttc

SEQ ID NO: 518703 - DNA, 201 bp, Homo sapiens
aatgttttaaatactctataaagttaaattaacattttattatgtgcacgtgtgtctgtgtttgcatctgtacacacacatatacatgcagatgcacaggmaaagaaccttttcctctagggcactggttcatgaagaatcttttatcttactgaaaattcataactaacatttctagaaatattctttacaaggcttgtt

SEQ ID NO: 518704 - DNA, 201 bp, Homo sapiens
taagttatatttcaaatgttttaaatactctataaagttaaattaacattttattatgtgcacgtgtgtctgtgtttgcatctgtacacacacatatacaygcagatgcacaggcaaagaaccttttcctctagggcactggttcatgaagaatcttttatcttactgaaaattcataactaacatttctagaaatattct

SEQ ID NO: 518705 - DNA, 201 bp, Homo sapiens
ttggaatcttctcatctggaagtgggaatcataatagttcctaatttctagggttttatgaggacaaatggagtcaatatacgtaaagtatatgcagcaasttcttaataaatgttagcctccatggggctgctgacagatgtgtccactgaagtgcaaatttactagtgcaggaattcagtttcagcattttcatctggc

SEQ ID NO: 518706 - DNA, 201 bp, Homo sapiens
tttacaggcttagaaaaaaattacaaggatattggctgttatgtgctgtgaatactctggagcttgcttatggatttaggaagctctgcaggccttgcttrgagaccagcatatcattatgatttcttttcaatgaagtcaaacaatttagtcttttaaacaaattatctgattgctatgtattcactgggggacaaagta

SEQ ID NO: 518707 - DNA, 201 bp, Homo sapiens
gagaattatttgctgcacacttctcaactgaaatcagaagtcttgattctaaagttcaaaactatgtaaatgaataaatggatgacagacttagccatagygtatatagctagagtctttccttttaaaaaatatttttatggcttttagcattatagaaacacaaagttcctcttctatgggtactgtcatgaaggaggg

SEQ ID NO: 518708 - DNA, 201 bp, Homo sapiens
tctgttcaaacttttgagatcttcagagtcattcgaatgtgactcagtccaatcacaaaatgttctaagtttcatcatcagtcccttgagccattcattcrttcttcattcaaaattaatgcgaacattgtggccactagtgtttgtcagtaattgtattaccattaactacagatgtaaagacaattgtatgtcccaaga

SEQ ID NO: 518709 - DNA, 201 bp, Homo sapiens
gagtctgattagtccagttctgaacttctgggttctcaaaggggagactgctcaaatgttttatgtgaaatgatgtgcaggtcacatgtaactaactcaamttcacattaataaacaagtcatagttttgccttagaatgtcaaagcttatccatgtctgggtttaaatatcagttgtaaagtcttcaacattgagaggat

SEQ ID NO: 518710 - DNA, 201 bp, Homo sapiens
tatataattttctttttcctttctctttctttctttctttctttctttttctttctttctttctttctttttctttctttctctctctccttccccccccycctttctttctttctttctttctttctttctttctttctttctttccttttttgagacagagtctcactctatttcccaggctggagtgcaatggtgtga

SEQ ID NO: 518711 - DNA, 201 bp, Homo sapiens
acccccccatgacacaagtttacctatataacaaacctggaaatgtacccctgaacttaaaataaaagataaataaattttttaaaaaagaaaaaaggcaraatagccagactctcagataattgcagccacgtttggatcatgtgatgacttgttacttgtaatactcattcaaggaagagagggccttgccttattaac

SEQ ID NO: 518712 - DNA, 201 bp, Homo sapiens
ttttgcatgtaagtgccaaactcaaacattctcagctgccttgtacaaatttctaattggtttactatttttatacatcagtagttctcaaatttaatgtrcattagattcagctgggggacttaataaaccccagattgttgggcccacccccagagtttatgatttggtaggtatgaagtgaaacccaagaatttccat

SEQ ID NO: 518713 - DNA, 201 bp, Homo sapiens
aacatctccttgaagaggagataaagactttatcctggtatttgaatgaaatatgaattatattgcaacaaaagaggaaagtttttatgtacttattcachcatccatccatccatccatccatccacctaccacccctccaagtgccaggcatagacagtagtgggcctggtgagttggggagggtaaaggagattattc

SEQ ID NO: 518714 - DNA, 201 bp, Homo sapiens
actggcaagaaaccactaattgaaacacacctcccccgctaagtgagtgtgaaactggccagtaattgttgttgagatgacttcaattacagtatgtacayccacaggtccagggtgtattttcaaaataaacaaatgatgtgtttaatactgtaccttctctttggctgtaaaataactcatgcctcactttagcaataa

SEQ ID NO: 518715 - DNA, 201 bp, Homo sapiens
gggttgggaagcaaatggagactgtcattggccctgatctcattgcttcctgaatccagtgaaaccttagactgggaatgtctttcaaaaaatgtactcattttttttttttttttttttttgagacggagtctcgctctgtcccccaggctggagtgcagtggcgcgatctcggctcactgcaagctccgcctcccgggt

SEQ ID NO: 518716 - DNA, 201 bp, Homo sapiens
gtaacctactcttgtgccaatcactgagtttggccaatcaaagggggccaactcttcaaaccttgttcaaaataaggcaaacatcaagctgtaaccagtcyggctgtttctgtctctcacttctgtttttttttgttagtcactttccttttgctgtccataaatcttccaccaagtggctgcactggactctctgagcat

SEQ ID NO: 518717 - DNA, 201 bp, Homo sapiens
gtgtagatgtttattaggtccgcttggtcaagagatgagttcaagtcctgaatacccttattaattttctgtctcattttggtctgtctaatattaacagkgggtgttaaagtctcccactattattgtgtgagagtctaagtctgtttgtaggtctctaagaacttgctttatgaatctgggtgctcttatattgggtgc

SEQ ID NO: 518718 - DNA, 201 bp, Homo sapiens
caaggtactgtggcatgcgaaatagaagtttggctcaatttcagactcaaccatcacctctccatgcggtctcaagttaataaacttccctgggcctgagwttcctcatctgtaaactaagagcatgtgagagtgctcataaaacattatttgaaaagactggagagcaagcatgagtgagtagtgtccattgaagggttt

SEQ ID NO: 518719 - DNA, 201 bp, Homo sapiens
tccttgaaagacatcttatccacatccctgacattttatcatcagttaaaaaaaaaacaaaacctaatggtgggtgggcaggtgggtgtgttacacgtgtctttccttccttccttccttccttccttccttctttcctcccttcccccctccctccctccctccttccttccttccttccttcctggttcaacttatgtt

SEQ ID NO: 518720 - DNA, 201 bp, Homo sapiens
ccttgaaagacatcttatccacatccctgacattttatcatcagttaaaaaaaaaacaaaacctaatggtgggtgggcaggtgggtgtgttacacgtgtctttccttccttccttccttccttccttccttctttcctcccttcccccctccctccctccctccttccttccttccttccttcctggttcaacttatgttt

SEQ ID NO: 518721 - DNA, 201 bp, Homo sapiens
cttgaaagacatcttatccacatccctgacattttatcatcagttaaaaaaaaaacaaaacctaatggtgggtgggcaggtgggtgtgttacacgtgtctttccttccttccttccttccttccttccttctttcctcccttcccccctccctccctccctccttccttccttccttccttcctggttcaacttatgtttt

SEQ ID NO: 518722 - DNA, 201 bp, Homo sapiens
gccactgcactccagcctgggcgacagagcgagactccgtctcaaaaaaaaaaaaaaaaaaaaaaaaaaatggccttaaaatggatgtaccactcttaagyagcccatcatgataaatattattaagatgaaagattctttttttttctttttttaaaaaattttttattttattattattatactttaagttttagggta

SEQ ID NO: 518723 - DNA, 201 bp, Homo sapiens
aaacagcatgggtcctcattaaatatgatgaaatttccaagaaatagagctatctgcttgtagaaatgagaattaataattatcaaattaccaatagtttycttgcatatgtagaaacaaggtgaaaaaatgaaatacagtaatctgctatgaaaataaattagctaatacaaaaaatactcctttgtatttccaaaggag

SEQ ID NO: 518724 - DNA, 201 bp, Homo sapiens
actggcttatgtataagaggagacacattataattttaagcattaagttcaaagagaaatgagttcatgaggtctttatggaaagaatatcaagtatcatrccagacagtgtcttcagcaaaatgtgcagacattgtctttaagttgttaattctcatactgcttttctaaaaaagctggaagcattatgtgtatgttttt

SEQ ID NO: 518725 - DNA, 201 bp, Homo sapiens
agagggcatccagttcctctttcttttcactgggcttgagaaattaagttcagtttgtatttcaggtaaataacaactaaataaatgtttgaatcttaagkctgcctgattcttaaatcaaataagatatgtaagaaatttacttttgttattccaagtgacaaaaatatgttattgaaaaaataatgtgaaatgaagtcc

SEQ ID NO: 518726 - DNA, 201 bp, Homo sapiens
aaattgttagtctattaccaccattatgcttgaataactaacaaagctactggattgtatatattatcaatttggccatgataaatccaatatggataatrtttttggatagctagaaagtgccagaactgagattgactggtctctctgcttctcagaccgagatatcatgtagacataatgatctcaaattgaaaaaaa

SEQ ID NO: 518727 - DNA, 201 bp, Homo sapiens
atttataaaaaatatttttcttttttcaatggtaaatgaactttagcttactataactttttacattatacattttttaattttaaaaaatattttgactsttttgtaataacagtgtaaaacaaacacattttacagctctacaaaaatattctcttgttgtgtctttataagcttttttctattttaaaattcttctat

SEQ ID NO: 518728 - DNA, 201 bp, Homo sapiens
cccaacttcatgctacattacaaggctataataagtacaacagaatggtaatggtacaaaagtaggcatacggatcaatagaacagaatagataacccaasaataaagccacatagccaaaaccaactgatcttcaacaaaagttgacaaattcaacaataacgaaaggacaccctatgcaatatattgtgctgggaaaat

SEQ ID NO: 518729 - DNA, 201 bp, Homo sapiens
atgactcagttttcttttcctgtagatactggatagcttctcctctgaaccctgactttgtctctgaacagttcctcccttccctttggccagcatctctractgtcctgtccactcctatatatcagcctttttttttttaaactcaaagctcatgtttcattttgcatttttcttttaatgtcttttataatgattttt

SEQ ID NO: 518730 - DNA, 201 bp, Homo sapiens
acagtgaggctggagacatggaaaacagactatgagctactgaaacactctaggcagagaaacagcaaggtggtggcagtgcagaggacaaattgatagcrtataatgcccagccagaattaagaaggcaggaagagaggaatccagctttcatgtctgggtttcagaatagcagtgccattcattgagagagaggagtca

SEQ ID NO: 518731 - DNA, 201 bp, Homo sapiens
tttgcatgctgccagaattcttcagcaatcattggctttttgatttccccatttttacctcagtctgaaagatactatataggagatataatattaggtgyttttctcttaaattaattttacatttccacattgtaccctaaaaatatggacatagggcataaaacaacaaataaatgattcccttttaatcttcatgaa

SEQ ID NO: 518732 - DNA, 201 bp, Homo sapiens
aatcttttctctctaaattttgaagtgaagcagattatagatgaatgaggttagcaaaaaaaaaaaaattgctttaactcggcctgattccttaatacatkaacaggtagataatgaagacatctatgaatctagacacgaaataaagctgccggtgaagtggactgcgcccgaagccattcgtagtaataaattcagcat

SEQ ID NO: 518733 - DNA, 201 bp, Homo sapiens
aataatccattccaaaatacaatgttatcaaccaactgcacaatcagtttatcctgacatattcaagtgataggataaagttggccatgtattatgaaaargattatttgtgcattttattgactgggcaacactgcaggacagtcaaggtgatatataatttcctcactgcctggtaaaattaagcacactaaaccaagt

SEQ ID NO: 518734 - DNA, 201 bp, Homo sapiens
ggtttattgcttccctctcctttgctagtgaattgcagtcttatagacatcacttgctgcaggatttagtttaatctgtgtaacctgagaaggggatggcrgaccttaaatctttgccaaagaaattgacttacttagtaacctagagtataaatggctataagtttaagactctgacctttaacttgttttttttgttgt

SEQ ID NO: 518735 - DNA, 201 bp, Homo sapiens
cacgccatcatgtagacaaaacatagaaggtttttgttaactttgtttgtttttagttttcatgacccattaattcataaaaagaagaatatctgattttrgttgaaaacaaatgtacaatttaaaagcatttttagtaatttatgctatatgaaaccacttccatacagtagcagttttgctttatgaacgtcaaaaaat

SEQ ID NO: 518736 - DNA, 201 bp, Homo sapiens
tagtcttgacaatggatacttggggtctggtgggttgggaagcaaatggagactgtcattggccctgatctcattgcttcctgaatccagtgaaaccttakactgggaatgtctttcaaaaaatgtactcattttttttttttttttttttttgagacggagtctcgctctgtcccccaggctggagtgcagtggcgcgat

SEQ ID NO: 518737 - DNA, 201 bp, Homo sapiens
ttgaaagacatcttatccacatccctgacattttatcatcagttaaaaaaaaaacaaaacctaatggtgggtgggcaggtgggtgtgttacacgtgtctttccttccttccttccttccttccttccttctttcctcccttcccccctccctccctccctccttccttccttccttccttcctggttcaacttatgttttt

SEQ ID NO: 518738 - DNA, 201 bp, Homo sapiens
atagaaaaacagagagccaaatcatgagcaaactcccttttgcagttgctacaaagtgaataaaatacctaggaatacaacttacaaggaaacttccttcrtttttctaaccacattatgaggtaagtattattagtcctacttcacagttgaagaaacaggtatgtagagattaggtaactcatccaaggcagaagtttg

SEQ ID NO: 518739 - DNA, 201 bp, Homo sapiens
cacatccatttaggttgcagttcactgtgtacagagaaacctttaggctgaacttaaaacgtgtaaggagacagctttctgcttgatttaacagtaacackggtgtgtgttgggaggtagggaggtgggggctctttcttctctcagtctgcctttttccacaacagttctgaggagtaagcttgtaatgtatttgtgcaa

SEQ ID NO: 518740 - DNA, 201 bp, Homo sapiens
tatataaaatgcccaaattgaagtacaatgtattaatgtttcatcaacaagtatttatttaacagctccacagggcatgtggccagtgcttcatgccacasatatgtgaagttatcagactctgtccttatgctggggaggtctgtagcttcaagtgtaaacaaagaataatctaaacaagaatttaaaatgcatcgctag

SEQ ID NO: 518741 - DNA, 201 bp, Homo sapiens
attgaggtaacacatctatttacatgttgatttccctaaattttgattaatatttaagatatttatcttatgtaaatgttgatattcatttatactgcaattttttttttaaggctcactgcctttttcataaaataaagcacgtccagttaatcacaggacagctctcctttccctttttggattagtaaaatggcctac

SEQ ID NO: 518742 - DNA, 201 bp, Homo sapiens
cccttcatttttttcaaataaaaacatacttagaagtaaattatatattttctaaatacatgcattaaaatttatgtgccccaactttcaaatgctgtattatgtttctgaacatatatgcattactgtcacctctagaaagttattgaaaccattaaattgcctggatggttgaagattagaaacattatagtgtattaa

SEQ ID NO: 518743 - DNA, 201 bp, Homo sapiens
ccttcatttttttcaaataaaaacatacttagaagtaaattatatattttctaaatacatgcattaaaatttatgtgccccaactttcaaatgctgtattatgtttctgaacatatatgcattactgtcacctctagaaagttattgaaaccattaaattgcctggatggttgaagattagaaacattatagtgtattaat

SEQ ID NO: 518744 - DNA, 201 bp, Homo sapiens
gctcatttcacattttcctcaatacctaataatgttagcattttaaattgtaatgtgaaagtataaaatagtatttcattgtggttttatatgtaatattmctaataccagcacatgtagaggccgtgttcctgtcatttttattaattatttggggtttctttttatgtgaactgcccaattatatccaggcatcatcat

SEQ ID NO: 518745 - DNA, 201 bp, Homo sapiens
tatttcatatagcaatgtttttttctcattatgaaagaaacataaaaaacttttctataagcaaacagcttaaagaagaataatctagaataagactttckaaagatgcattttaaatatcgaaatacttttcctgtcaggatttttaaaaattcttgacctataagtatatttttatgcacatatacatatacatacata

SEQ ID NO: 518746 - DNA, 201 bp, Homo sapiens
attttgactcttttgtaataacagtgtaaaacaaacacattttacagctctacaaaaatattctcttgttgtgtctttataagcttttttctattttaaarttcttctattttttactttttaaactttttttgtcaaaaacaaaggcataaacacacacacgacctttggactagtcagggtcaggatcatcaatatcac

SEQ ID NO: 518747 - DNA, 201 bp, Homo sapiens
ttgtgtctttataagcttttttctattttaaaattcttctattttttactttttaaactttttttgtcaaaaacaaaggcataaacacacacacgaccttyggactagtcagggtcaggatcatcaatatcactatctcccacatccacaccttgttctactggaaggtctttaggggcaataacacccatggagctgtca

SEQ ID NO: 518748 - DNA, 201 bp, Homo sapiens
acacagaaaacacaatttttgttttgaaaaattctgttctgaaaatgaattttcagaagagattctgcatcaaacattagcttgtaaataatgaaatacttgtgtgtgtgtgtgtatgttttgtaaacaaaattctccaaaaaggaattcgaaagaagagactttattccagtgacatttgcagacccagaagatgcagcc

SEQ ID NO: 518749 - DNA, 201 bp, Homo sapiens
ccacaccttgttctactggaaggtctttaggggcaataacacccatggagctgtcatctcctatgataaaagtgctttcttctggaatgctcctgaagaamctgcctgaggctgttttatagttaaatatgtttttataagtagaaagagtatactctctgtctgttttgcatgtatttttttttttttttgagacagagt

SEQ ID NO: 518750 - DNA, 201 bp, Homo sapiens
cacagaaaacacaatttttgttttgaaaaattctgttctgaaaatgaattttcagaagagattctgcatcaaacattagcttgtaaataatgaaatacttgtgtgtgtgtgtgtatgttttgtaaacaaaattctccaaaaaggaattcgaaagaagagactttattccagtgacatttgcagacccagaagatgcagcct

SEQ ID NO: 518751 - DNA, 201 bp, Homo sapiens
cagaaggaaatgatggaatttttctgtacttcagtatgtgtcaactgagagtcatatacattagttttaatctcttaatattgagaatcaggttgcaaaayggatgagttattatctatggaaatgtgagaaatgtctaatagcccataaagtctgagaaataggtatcaaaatagtttaggaaaatgagaggagaacagt

SEQ ID NO: 518752 - DNA, 201 bp, Homo sapiens
aatttctatgctatgccatatggaagagatagttaatttttgcctacaaaagttgttgattattgcctctaactataaagtaacctcagctgggcttcttraccagtaacaaccctgatagaccctaggacctggcacctattagatgtatcctcaaaaagctcttttggtaagctttcttgagtcaactaatatagacac

SEQ ID NO: 518753 - DNA, 201 bp, Homo sapiens
gagctatcttagcatgatttctgaggcagtggtatagggagaatcatcatggttgtctttgtaatggttttgaaaagtataaacaaatctaaaaacaaacsaaataaacaggagtttacaagtgcaggagtttttgcacacagaattaatagcaatttcttagcttaatatgcttggtagccactatgttaagttgccatt

SEQ ID NO: 518754 - DNA, 201 bp, Homo sapiens
taggggagtgagttcttgattttcattcctttgctcaatcaatgaagtcatattgttttactcagtatgggaagagattattatcagtcagtaggaataakgctatgcccagatgatgccagaagaccagctgaaaaacaaaaatctgcacaatcaaccatttgtttttctgtaaaacaccaaactaattgttataccaat

SEQ ID NO: 518755 - DNA, 201 bp, Homo sapiens
ttgtgtcttgcagacacagcctctgactttatgtttatgttatattccaaacttagtttctggaatttctgtcttttaaaaatctaattttggaatatccygaatttcataatagtttaatatgttctgaataatatgttacctgtgtggggtagaattggggcagagttctttgaaagtgctttatgataaaatctcaca

SEQ ID NO: 518756 - DNA, 201 bp, Homo sapiens
ctactagggaggctgaggcacgagaattgcttgaacctgggaggtggagattgcagtgagcagaggtcacgccattgtactccatcctgggtgacagagtragattctgtcaaaaaaaaaaaaaaaaaagaaagaaagaatgatattttcatgaggaaaacaaacttaaagtagaattacctgaattatatctttgaataa

SEQ ID NO: 518757 - DNA, 201 bp, Homo sapiens
aaggatcaagtacgtgtttacactgccccaggagaaaagaagcacaggggacctgaaaatgtactcagtagttacaggtacctaaatatatgtctttgctytgaaaaagctatatttttaggtatattgccaggttgcagaatatcttttcttgaagaccctacactaagtcatctctaaatatgaggctttctctcttct

SEQ ID NO: 518758 - DNA, 201 bp, Homo sapiens
ttcctgatacatacttacccacgtctccacaatatgtcctaattcttcgacatgttctgctagattcatcagttgacaggtgaaacatttctccctaggtmaaacaacatgtaaactcaggatctttgatcttttagctgagttcaatcataatgccagcaactttattgatggatgattccagtttattttagttaatct

SEQ ID NO: 518759 - DNA, 201 bp, Homo sapiens
cttgaacaatttatttttaaaaatttaatttattttatgagagatggaatctttctatgtcacccaggctgaagtgcagtggctattcacaggtgcgatcrtagtgcactacagccttgaactcctgggctcaagtgatcctcctgcctcagtctcctgagttcctgtgactataggtgcataccaccatgcccagtcatt

SEQ ID NO: 518760 - DNA, 201 bp, Homo sapiens
atttctgtgaaaaagtattgccagttctggaaatagagttaaaagaatgcttgagtactttattagctttcactaaacatgcatgtattcataaaaattakgtacagttttctaacgtgttttcttaaactttatacaaatgctactacaatggtatatatcattcttttcattctttaacttactctaatccttgaacaa

SEQ ID NO: 518761 - DNA, 201 bp, Homo sapiens
tcttaaggaaaaatgatacaaaatgatgtttgcagaatttgttgagaaaaggaatattggcccagtgcagtggctcacgtctgtaatcccaacactttggraagctgaggtgggtggatcacctgaggtcaggagttcaaaccagcctggccaacatggtgaaaccccatctctactaaaaatacaaaattagctggatgt

SEQ ID NO: 518762 - DNA, 201 bp, Homo sapiens
tttctcagcatttaaaacatttataattcatctttttagtttctaaagaacagaaagaacttgattttaaaagttaatggatcataaaaatattacatttmaaagcaaacatgaaaccactgaacttttattagtccttttttttacttcaatttcccaactgaggtttagaaaccaaccacagtttagaaatctgtattc

SEQ ID NO: 518763 - DNA, 201 bp, Homo sapiens
aatactctttatttctttctcttgcctgattgccttggccagaactttcaataccatgttgaataggattggtgagagagatcatccttgtcttgtgccarttttcaaagggaatgcttccagcttttgcccgttcagtatgatattggctgtgggtttgtcataaatcgctcttattattttgagatacatttcatcaat

SEQ ID NO: 518764 - DNA, 201 bp, Homo sapiens
ccttttaatcttcatgaattcatcatttttttctttttgtaaattaattagtaccccagtgagtttatatattaatttaaaacacttggatcctacttttmattattagcaagtggttacatggtaattatcaaagtcagtggcttttcaatatcatcagtaaatcaaacaatagactttgcttccttttttttttttttt

SEQ ID NO: 518765 - DNA, 201 bp, Homo sapiens
tcgttggtgaacataatatctacaaagtagcagattttggacttgccagagtttttaaggtggatttagttttgttttaattagtttttgtaataggtcaraagtctaacagttagtagaccaatagatatactgttattctttaaaacaatgtttctccaagttctgtagtccataaactacttcagtagtccaaagcct

SEQ ID NO: 518766 - DNA, 201 bp, Homo sapiens
atcagcttatctgactccccaaagacatgcctactctctgagtgccccaggaccctcgattggctttgcagtctttgatcatgccagggctgatctcccargtaaaggccccgttagttactttgtagcagttctgcgcagccacagcaatcttgggctctagcttctggggcaaagtcgatataggcagtggggagagtg

SEQ ID NO: 518767 - DNA, 201 bp, Homo sapiens
ctgcacacgaatctctactatatagcaaaactctgaaaaagttgcctatactcagggtcctatttttttcttctctctctgatcccccacaccacaatttwaaaatttttattataaaaaagttcaaacatataaaaaggatagagaacagtaccactaggtaccattactcaacttcaacaattctcaacatatggcaat

SEQ ID NO: 518768 - DNA, 201 bp, Homo sapiens
ctgttcatcccatgaatgcaggagcattcatcccatgacctggccccgcaaaggttaccccagctctgtcaacagcaaatatcctccatttgctcaggccraataccttggaatcgttctgatttccattttcttttcatacctcatttccagacacattgctttgcctcttccttcagcagtgtccacaaatgaaccatc

SEQ ID NO: 518769 - DNA, 201 bp, Homo sapiens
gactcatccaaatgcatagcgaggaggacaggcacatgtttttctaagtaccaggtttcttttcattcaaagatgagtataatgacaaaaaaaaggcggggggggggggggttgtgagattctggatacccaataacaaaatttcccaacttatcttctaggaccccaattctttgataagccaatagtgtttcactggaa

SEQ ID NO: 518770 - DNA, 201 bp, Homo sapiens
caaatgcatagcgaggaggacaggcacatgtttttctaagtaccaggtttcttttcattcaaagatgagtataatgacaaaaaaaaggcgggggggggggrggttgtgagattctggatacccaataacaaaatttcccaacttatcttctaggaccccaattctttgataagccaatagtgtttcactggaaagaggggg

SEQ ID NO: 518771 - DNA, 201 bp, Homo sapiens
ctattcaaaaaaattgaggaggagggattcctctctaactcattctacaaaatcattatcatcctgatacaaaaatctggcaaggataacaaaaaaataawactgtaggctaatatccctgatgaacatggatacaaaaatcctcaacaaaatactagcaaactgaattcaacagtataccaaaaagataattcatcatga

SEQ ID NO: 518772 - DNA, 201 bp, Homo sapiens
aaccccatcaggttgttatgaggattagacaaaatattacataaaaaagcacttagcacagtgcttgcttaggtcaggtgctcaatacaaattcaacagatttttttttttttttgagatagagtctcactctattgcccaggctggagtgcagtggtgcaatcctggctcactgcaaccttgtcctcccatgttcaagca

SEQ ID NO: 518773 - DNA, 201 bp, Homo sapiens
aggcctgtgatgttattgtactttatgataaatattgtacagttagactacatcagatttataaaaaatatttttcttttttcaatggtaaatgaactttagcttactataactttttacattatacattttttaattttaaaaaatattttgactcttttgtaataacagtgtaaaacaaacacattttacagctctaca

SEQ ID NO: 518774 - DNA, 201 bp, Homo sapiens
tcgatcaagagaatcaacagatgatagtccaatttttactcagtgactgttgtagcattttcctgtttactgattagagtggttattcattattcctcagrttgctgaatcccatcaggctgttattatgaaggaatttgattgctttgctgcacagcaggacctgtgctttgagatttttttttctcttttaaaatatcc

SEQ ID NO: 518775 - DNA, 201 bp, Homo sapiens
gcctgtgatgttattgtactttatgataaatattgtacagttagactacatcagatttataaaaaatatttttcttttttcaatggtaaatgaactttagcttactataactttttacattatacattttttaattttaaaaaatattttgactcttttgtaataacagtgtaaaacaaacacattttacagctctacaaa

SEQ ID NO: 518776 - DNA, 201 bp, Homo sapiens
ttcattattcctcagattgctgaatcccatcaggctgttattatgaaggaatttgattgctttgctgcacagcaggacctgtgctttgagatttttttttytcttttaaaatatcctgtaactacaatgatggtaaagccatgttaaatgacttgattgtacttggagtaattgcacatttttttctatgcataaaaaaat

SEQ ID NO: 518777 - DNA, 201 bp, Homo sapiens
ttcttctggaatgctcctgaagaacctgcctgaggctgttttatagttaaatatgtttttataagtagaaagagtatactctctgtctgttttgcatgtatttttttttttttttgagacagagtctcactctgttgtccacgctagagtacagtggtgtgatcatggctcactgcagccttgacctccctgggctcagat

SEQ ID NO: 518778 - DNA, 201 bp, Homo sapiens
acacataataaaagtacacaattcataaaaatttagtttggtgagtacaaagtgaattcatccaggtaaccagcaccaagttaagaaacagaataaggttracgtcccagtcactgacccctcatatcaatagttttgcttgtttttgatatttatttatttacttattttagagacagtcttgttctgttgcccaggctg

SEQ ID NO: 518779 - DNA, 201 bp, Homo sapiens
ttgaactcctgtcctcaagtgatctgcccaccttggcctcccaaagtgctgggattacaggcatgagccaccatgcccagccctttgttggcttttttttwaaatttttaaacattatactttaagttctgggatacatgtgtagcatgtgcagatttgttacataagtatacgcgtgccatggtggtttgctgcacccat

SEQ ID NO: 518780 - DNA, 201 bp, Homo sapiens
ttttgaagtaattataatacagtttacaatattttgttttaagaagttttatttaaaagtacctagactattattttcaacaaaataatattaaatctacttttttttttttaacaattgctcttattattctatgaaacagatccaggtcccagctccatttgatttgtcgtataaaaccgtggaccaatgggagataga

SEQ ID NO: 518781 - DNA, 201 bp, Homo sapiens
gttccttggttcttattgcactaattatgtcttcttcggctccaggtggctaccaggtccctctggaccacacgctttcagagaaacaacaattctctgasgaaaactgggggtgctgttaacagaagaagggtcaatggtaggtgggcggcaacagtaacaaaatagccactgcaagccagactaggtcaaagtaacacg

SEQ ID NO: 518782 - DNA, 201 bp, Homo sapiens
gtagacaggagctgttcctattcggccatcttggctcctcccctagataaatacttcttaacttgtttggatctaacccagtaatcaaaataactgttagtttttttttttattttcacttagagacatcatgaaaaaagttatggagacactaagggttccacgaactgaaaacactgggatcctctggtgtaacaagtg

SEQ ID NO: 518783 - DNA, 201 bp, Homo sapiens
ttaccagtctgcattgaggtacaatataatgaacagtcctgtggaatttcatgcattattgtaagacggtattgagcacactgtttatttccaaagccacrttataggatttcatgggagaaatttctccctggtctctgcaccaggaagagtcaaactgtttctaaaaacctttcatgattttatcttatggatactgtg

SEQ ID NO: 518784 - DNA, 201 bp, Homo sapiens
agaaaaagggccactgaagaaaacaatgatgaaaaattcatcaaagtggaagcaaatcaaagcatctttttcaaagcaaggagatagaatgtaaataaagwggttttgagttaaatgctaaagaaaggtcaaggtactgaggaagagggaaagaccattaggtttgctggataattatttggtgacactaaaagcagtttc

SEQ ID NO: 518785 - DNA, 201 bp, Homo sapiens
tacctcaggcgggtataggcaaaccatggcctatgagctcacactgacgtatgcttgtttttgtaaataagttttatttgcacagatgctcattcatataygagttttctttggattcttttgtgccataacagcagagtttagaaggtgcaacggagaccatagggcaggtggtaaactagaatatgagttctaggaagg

SEQ ID NO: 518786 - DNA, 201 bp, Homo sapiens
gagactatgtgaagagatgtcctactggcccagctgactcatcagctgactgagcaagcccagctaagatcagcagatactatcccaaagtggtaaccttyagactcatgagctaattaaatagttgtgatggaacaaagcctaactaatacagggaagaaaaagggccactgaagaaaacaatgatgaaaaattcatcaa

SEQ ID NO: 518787 - DNA, 201 bp, Homo sapiens
gtgtaagttgtagtaactgtcccatctttttgtgcttccttgcatctgcattcttggggtagtctcctcccacactcattcttggctttgccaaatcacgkgctttggccaatgggacagttgcaaatgtgacaaaagtggagacttaaaaagcacttgcacattggagttttctttcttagttctcttggagtcctgcaa

SEQ ID NO: 518788 - DNA, 201 bp, Homo sapiens
atgaggcaaagatcaagtctttagatttaaatagctgtagtttaggtgaataagtggtgtgtaagttgtagtaactgtcccatctttttgtgcttccttgyatctgcattcttggggtagtctcctcccacactcattcttggctttgccaaatcacgtgctttggccaatgggacagttgcaaatgtgacaaaagtggag

SEQ ID NO: 518789 - DNA, 201 bp, Homo sapiens
attggctaggctggtctcaaactcctaacctcaagtgatccacccgcttcagcctcccaaagtgctgcgattacaggcatgaaccaccccaccaagcctcwatagcttttattattactcataaagaatgctatgttttgcactgaaagatggagctgttggcccatctttcattggaatgtgtactttgagctgtttttc

SEQ ID NO: 518790 - DNA, 201 bp, Homo sapiens
tcacaatcactgtgtatatgcttttaaaccctaatcttgttaataaatggtggctgaactttattgtccaatctaataattcttttctaagaagaggcagstagctagccttcctaacgttgttctctaaggaagccctttgggaagtcaaaagacaacaaaaaagtcagatttctcatgttaaaaaaaaaccacgatagt

SEQ ID NO: 518791 - DNA, 201 bp, Homo sapiens
taatataaaatatagctaaacataaaaaagacaaaatcaatgaaaaagaacagagatatagatcatgctgagtctctaacagaagataattatcacagttkagaaatcagtttagccaggggttctctggcaggtaaggcaaaaagggaaacacattgtgcttctcactggcttatgtataagaggagacacattataatt

SEQ ID NO: 518792 - DNA, 201 bp, Homo sapiens
acaggaataattattattgatttacagtgtaatagccacaaacagctttagtgattggttaaatgtcttcacttcactggggccattaatcaatatgagcrgctatttattgctgagcaggctactacgcaataaagatgagcctgaaatgaactcccacagtagctttgacaggcaaaaattaatatttaatgttacatt

SEQ ID NO: 518793 - DNA, 201 bp, Homo sapiens
ggcaaaaagggaaacacattgtgcttctcactggcttatgtataagaggagacacattataattttaagcattaagttcaaagagaaatgagttcatgagktctttatggaaagaatatcaagtatcataccagacagtgtcttcagcaaaatgtgcagacattgtctttaagttgttaattctcatactgcttttctaaa

SEQ ID NO: 518794 - DNA, 201 bp, Homo sapiens
tttgaaacagactcttcatattcagatgcaaataacttcataagatgaacactggagaagaatatcaaataataaagtagcaaaacaaattcaaataatcyattccaaaatacaatgttatcaaccaactgcacaatcagtttatcctgacatattcaagtgataggataaagttggccatgtattatgaaaaagattatt

SEQ ID NO: 518795 - DNA, 201 bp, Homo sapiens
actacaatgatggtaaagccatgttaaatgacttgattgtacttggagtaattgcacatttttttctatgcataaaaaaatgatgcagctgttgagaaaaygaagtctttttcattttgcagaaggaaatgatggaatttttctgtacttcagtatgtgtcaactgagagtcatatacattagttttaatctcttaatatt

SEQ ID NO: 518796 - DNA, 201 bp, Homo sapiens
ttaatgctatccctcccctagccccctacccccctgcaggccctggtgtgtgatgttcccctcactgtgtccacatgttctcattgttcaattcccacttwtgagtgagaacatgcagtgtttggttttctgttcttgtgttagtttgctgagaaagatggtttccagcttcatccttgtccctgcaaaggatatgaactc

SEQ ID NO: 518797 - DNA, 201 bp, Homo sapiens
atactgaggctcttactctactgagaagcaggaggcaatcttgatgattcccaccaggctgctgtgaggataggaatgcctcaataacataaagtgatttytccctcttcttgtttcaggttcaatggatccaaatgacttcctgagggaggcacagataatgaagaacctaagacatccaaagcttatccagctttatgc

SEQ ID NO: 518798 - DNA, 201 bp, Homo sapiens
tttcctttctacttctctacaaccccctaatgtccaaagagttgcctaaaaagtatgaggaagtactggcaagaaaccactaattgaaacacacctccccygctaagtgagtgtgaaactggccagtaattgttgttgagatgacttcaattacagtatgtacacccacaggtccagggtgtattttcaaaataaacaaat

SEQ ID NO: 518799 - DNA, 201 bp, Homo sapiens
gccagacacttggagaaaagacgagatggctccagtcagcaactacaaggctatattccttctaactacgtggctgaggacagaagcctacaggcagagcygtgagtagtacaaacttatacttaatttctgaactctctgagggctgggtaatgagttttcctttctacttctctacaaccccctaatgtccaaagagtt

SEQ ID NO: 518800 - DNA, 201 bp, Homo sapiens
ctaccactagtactgtataaaagctcatttcacattttcctcaatacctaataatgttagcattttaaattgtaatgtgaaagtataaaatagtatttcaytgtggttttatatgtaatattactaataccagcacatgtagaggccgtgttcctgtcatttttattaattatttggggtttctttttatgtgaactgccc

SEQ ID NO: 518801 - DNA, 201 bp, Homo sapiens
ttagtagccaggaggagtaatgaacaaatgctcactgcagatagccccttccccagtcaagagggttcacattcaataaagtggccttgggccgggcgcgrtggctcacgcctgtaatcccagcactttgggaggccgaggcgggcggatcacgaggtcaggagatcgagaccatcccggctaaaacggtgaaaccccgtc

SEQ ID NO: 518802 - DNA, 201 bp, Homo sapiens
gaaataacatacatattttttctatataaccttttttgtagtttctcagcttagctggataatttttgtaatacatttctccaaaatgagaaagatctgtaaaaaaactttagtattgagggtaattaatgacagatagatcttattacaatttaaagaggataaatatctccatttttaaaaagtttagtttggcttgtt

SEQ ID NO: 518803 - DNA, 201 bp, Homo sapiens
tttacttagggctaagtatgaaccctatcagcttcagggttaggccattagggtcaagtttatcggtgccttcatttgtgaggatgatgattagtagccargaggagtaatgaacaaatgctcactgcagatagccccttccccagtcaagagggttcacattcaataaagtggccttgggccgggcgcggtggctcacgc

SEQ ID NO: 518804 - DNA, 201 bp, Homo sapiens
catgctatctcattgtggttttggtttggatttctctagtgatgatgagctttttttcatatatttgttgactgcatgaatgtcttcttttgaaaagtgtytgttcatatcctttgcccactttttgatggtttttatttcttgtaaatttgtttaagttccctgtagattcttggtattagccctttgtcagatggatag

SEQ ID NO: 518805 - DNA, 201 bp, Homo sapiens
aagtgacagaagtaattctgttccctttccatttggacaaatcaagtcaaagaggatagggaagtacaattctctaaagtacttgaaaggaggaaaaaaaycattgtttgtgaacagccctaatttctactatagtagaaatgtctattagacatctcaagatgacatgccccaaactgatctccctgtattctccccagt

SEQ ID NO: 518806 - DNA, 201 bp, Homo sapiens
ttcatagcactgatgttatcttcctaacatcaatctgtattagttttctattgctgcacaaaagattaaaagattatcattgctcctatctaatcaagatraaacatggaacttgctaagctagagatacatatgaattacctacgtggaaacgactgaaggaagacaagctatgggtctggaactcaggggagaatatgc

SEQ ID NO: 518807 - DNA, 201 bp, Homo sapiens
tatttgcattattcatagtgaatactaagatgtgaaatgacagtattcctttaattacagtaatgcctctgaaacatcatattctaaaagaaaagattttwaaattactgatgaaatgtaaactccagataatcttcctcctcttagattttatttgatgtcaactacttgacaccttgcatgatgagtcagagtggatcc

SEQ ID NO: 518808 - DNA, 201 bp, Homo sapiens
acaacgaataccataaagtagttactattatcattgtacagatgaggaaactgaggcataggaatgttaagctgcttgcccaaggtcacaaagaaatatcaggcatatccttgatttaaagtctggccctctagcttcaaaccaggtttcctggcccctgtaatgtatatagctgcctctcaagtcagggcttgtgtctaa

SEQ ID NO: 518809 - DNA, 201 bp, Homo sapiens
catatccttgatttaaagtctggccctctagcttcaaaccaggtttcctggcccctgtaatgtatatagctgcctctcaagtcagggcttgtgtctaagcktttgaccatgagtctaatggactttatgtagtattcagcttattgagacggggatatataagagtaatattagtttgagttgatgtgagattcttttaat

SEQ ID NO: 518810 - DNA, 201 bp, Homo sapiens
atttcaaagtagaaggagtcagtattattttgtgtacaaatataaaataggtaagtcaaatacaaatacaaatgagtcagtcaccacaaaataatgctgacccccctctactaacaacaatcaaactgattgtactatataaattttttatacttagttataaagaattagtagtgggagaaactttgcctattgaaggta

SEQ ID NO: 518811 - DNA, 201 bp, Homo sapiens
tggatcctacttttcattattagcaagtggttacatggtaattatcaaagtcagtggcttttcaatatcatcagtaaatcaaacaatagactttgcttcctttttttttttttttttttgctcaagaccagatgtgaagccagaatcatcatgtattaattctccaaatgtagtagaatgtttctttcagtgctattcttg

SEQ ID NO: 518812 - DNA, 201 bp, Homo sapiens
tggactagtcagggtcaggatcatcaatatcactatctcccacatccacaccttgttctactggaaggtctttaggggcaataacacccatggagctgtcmtctcctatgataaaagtgctttcttctggaatgctcctgaagaacctgcctgaggctgttttatagttaaatatgtttttataagtagaaagagtatact

SEQ ID NO: 518813 - DNA, 201 bp, Homo sapiens
ccataggttgagttgtatgcataaaatgaatcagctgtgtttgttctctttggtcttagtggatatttttccccaggaaaggagagaacaactcttctacrtgatggcactttaataatttagacagatgtactttcttctctcaaaataattcatgctggaatcctactctatttgctgtagaagagaattcagtgtaac

SEQ ID NO: 518814 - DNA, 201 bp, Homo sapiens
ccattactctgtaaggagtagaaaatattactttggaactgcctctcttttgttgacaatgctatttgacaatactgatattgtgatacagtattcacacrttgtacattagaaatatctatcatcctttgtgaacaatgacactcaaactatccctgtgggagtatatagataagatcattattctcattttctagataa

SEQ ID NO: 518815 - DNA, 201 bp, Homo sapiens
tctgcagtcatgagctttctgtgtgaacatggacacgatcatttaaaatttgccttatttcttatctttacagtagcaccaaaattaatactaaactactyaagagtaatataaaaattagccaaaaagatactgtctatggctagaagtctctataaacagtttcaaatatatatgctctagatatgaaatggagaacat

SEQ ID NO: 518816 - DNA, 201 bp, Homo sapiens
ccttttctatctctttctttcccacttgagtttccttagaagtattgtctttattccttgagcaacaatggcttggagctgtcagaaaagagcttcatgarggtgcatgatttattgatgctgagtgggctgagaagtagcagcccaaggttgggtgggtgctaattgggttgttgtgatccctgcacggctgtctgctct

SEQ ID NO: 518817 - DNA, 201 bp, Homo sapiens
aaaaaaaggcggggggggggggggttgtgagattctggatacccaataacaaaatttcccaacttatcttctaggaccccaattctttgataagccaatartgtttcactggaaagagggggttcagcagttacgtgcacttgaaagtaccccatgttacattatctctgccttgacttgacaaagcatactaaagtctct

SEQ ID NO: 518818 - DNA, 201 bp, Homo sapiens
tctgctgtgtttcagacttattttagaaagacaatttcacaccttgacaggtcagttttttccaggtaataagacttttgtagaggaaacacaatcagaargacatatcacttgttagtatgaccctctatgtctctgccaggcacagagttcgtcctaaactcactttatacagacccttcagctaccatgattctgttc

SEQ ID NO: 518819 - DNA, 201 bp, Homo sapiens
caaccaatgatttcttagaatctgggtagatactctcacaccttcagtgtgaatgtaggttgagatgttgttaagtggctggaatagattttgacctacgyatcagatcagtgctagtcaagttgaagataggaggatgctttcactcatgctgagtgtgtgcccctgttttagagaggcaagatgtgcagttagtggaaa

SEQ ID NO: 518820 - DNA, 201 bp, Homo sapiens
ctatatgaaaccacttccatacagtagcagttttgctttatgaacgtcaaaaaattgaccaaagcttaatttttcttaatggtttaggcacctagtttttrtatggtgatagttacacaaaatgtgttcatgatataaaaatgaatgaaataaacacaatccaatttaataagttattgtttctaattttaaaccatgtat

SEQ ID NO: 518821 - DNA, 201 bp, Homo sapiens
cattaaaatacgatttaattgcagacaagtcttctaaataggccttaatattgtctctcctccatttggccatgctattaaggctctgactgtggaagcasatagtacaggagaaaatattaaatatcagtttcgagttgaacatataaaacatgtgaaaaaaaccccattaacttttggggatggtcttggatgttttcc

SEQ ID NO: 518822 - DNA, 201 bp, Homo sapiens
gtacatattctctgggtacatgtgataatttgatacattaatataatctgaattggaatatccattaccttaactatttctcttttcttcatgctaggaayattcaaataaggaacagtagattaatgttaactatagtcaacctactatagagattgtgctctgctgtactttggcctcctttagccacagctggagctg

SEQ ID NO: 518823 - DNA, 201 bp, Homo sapiens
tggtttttatttcttgtaaatttgtttaagttccctgtagattcttggtattagccctttgtcagatggatagattgcaaaaattttctcccattctgaakgttccctgttcactctgatgatggtttcttttgctgtgcaggagctcttttgtttaattagatcccatttctcaatttgggcttttgttgccattgcttt

SEQ ID NO: 518824 - DNA, 201 bp, Homo sapiens
tgcttcctgaatccagtgaaaccttagactgggaatgtctttcaaaaaatgtactcattttttttttttttttttttttgagacggagtctcgctctgtcscccaggctggagtgcagtggcgcgatctcggctcactgcaagctccgcctcccgggttcacgccattctcctgcctcagccttccaagtagctgggacta

SEQ ID NO: 518825 - DNA, 201 bp, Homo sapiens
aggtgtgtcttcttagacatttagatctgctgtgtgaaatctgctggttatagagcgtcttagagtcacaaggccccaagttgaatcctggcagtgccatmtactgacttttatgagtagtaaaatggacctaataactaccttatatgactgttaaaagattacaacaaaataatgtaaaatcatgcttagcatggtgtt

SEQ ID NO: 518826 - DNA, 201 bp, Homo sapiens
tgtcttcttttgagaagtgtctgttcatatcctttacccactttttgatggggttgtttgtttttttcttgtaaatttgtttaagttccttgtagattctrgatattagccctttgtcagatggatagattgcaaacattttctcccattctctaggttgcctgtttactctgatgatagtttcttttgctgtgcagaagc

SEQ ID NO: 518827 - DNA, 201 bp, Homo sapiens
gagaagtgtctgttcatatcctttacccactttttgatggggttgtttgtttttttcttgtaaatttgtttaagttccttgtagattctggatattagccytttgtcagatggatagattgcaaacattttctcccattctctaggttgcctgtttactctgatgatagtttcttttgctgtgcagaagctctttagttta

SEQ ID NO: 518828 - DNA, 201 bp, Homo sapiens
tcttgtttttgtcaggtttgttaaagatcagatgtttgtagatgtgtggcattatttctgaggcctctgttctgttccattggtctatatatctgttttgstagcagtaccatgctgttttggttactgttgccttgtagtatagtttgaagtcaggtggcatgatgcctccagctttgttctttttgcttaggattgtct

SEQ ID NO: 518829 - DNA, 201 bp, Homo sapiens
tctcagtttccttgtgtaggaagtgattgtaagagtgcttcccttatagggttgttctgtagaatagatgaatagttaatgtaaataatttgcacggtgcytggcccttactttatgcaatagaacaatactgaattaaattgatgatttaggaagcttttattctgaagagcaaagagagaataaaaaaatgaaagtgaa

SEQ ID NO: 518830 - DNA, 201 bp, Homo sapiens
tatatatctgttttggtagcagtaccatgctgttttggttactgttgccttgtagtatagtttgaagtcaggtggcatgatgcctccagctttgttctttktgcttaggattgtcttggctatgtgggctcttttttggttccatatgaaatttaaattagtttttttctaattctgagaagaaagtcagtggtagcttga

SEQ ID NO: 518831 - DNA, 201 bp, Homo sapiens
gatgctgagtgggctgagaagtagcagcccaaggttgggtgggtgctaattgggttgttgtgatccctgcacggctgtctgctcttgtgaggtctgagtaratctgaaaagagagttagggccacgacacctctcataatggcaagacactaattagctgtgaattacagcagcgcttttgaatattacatattatatgtg

SEQ ID NO: 518832 - DNA, 201 bp, Homo sapiens
tggcatgatgcctccagctttgttctttttgcttaggattgtcttggctatgtgggctcttttttggttccatatgaaatttaaattagtttttttctaartctgagaagaaagtcagtggtagcttgatggggatagcattgaatctataaattactttgggcagtatggcattttcacgatattgattctttctatcca

SEQ ID NO: 518833 - DNA, 201 bp, Homo sapiens
ttatgttaataactccagtatctcatataaaatgtattaaattttaaacatgttggtgccatcttagaaaatgccttttaattaaagtcataatttagttktgttcagctaaattgcaaatatcattgcctataattgcaagtgactttttctgtgagttatggtatgtactgccttttctgaacattaccaatgataagt

SEQ ID NO: 518834 - DNA, 201 bp, Homo sapiens
ctccagctttgttctttttgcttaggattgtcttggctatgtgggctcttttttggttccatatgaaatttaaattagtttttttctaattctgagaagamagtcagtggtagcttgatggggatagcattgaatctataaattactttgggcagtatggcattttcacgatattgattctttctatccataagcatggaa

SEQ ID NO: 518835 - DNA, 201 bp, Homo sapiens
taactcaacttcacattaataaacaagtcatagttttgccttagaatgtcaaagcttatccatgtctgggtttaaatatcagttgtaaagtcttcaacatygagaggatgatgaatgtagtagtctctttgagcatcaatggaaaccatatttgcattattcatagtgaatactaagatgtgaaatgacagtattccttta

SEQ ID NO: 518836 - DNA, 201 bp, Homo sapiens
caaagatttcagaaagataagaatatcctctgatttcaggatgacttatgaagctggtaacattaagctacaaaacaagataagaataacaaagaacatamtaaggcctgttgaatgctgttaaaaacagaaatatactcagcttccttgcagaaaaatattgaatttaacatcatcagaatatgttacccaccatagaaa

SEQ ID NO: 518837 - DNA, 201 bp, Homo sapiens
gttttctttgtttcagagttagaacagtgtctggcacataagaaagtatgggctaattaggtattgaataaatagattaagttgggaccatcctgaacctracaagattgggacttggagtcaagcttgttttgagactcttggtattagcttgaaaagatcaacttggtacatggctaacacctttgacattgaggattt

SEQ ID NO: 518838 - DNA, 201 bp, Homo sapiens
ctttttgcttaggattgtcttggctatgtgggctcttttttggttccatatgaaatttaaattagtttttttctaattctgagaagaaagtcagtggtagyttgatggggatagcattgaatctataaattactttgggcagtatggcattttcacgatattgattctttctatccataagcatggaatgtttttccattt

SEQ ID NO: 518839 - DNA, 201 bp, Homo sapiens
gtaaaccagtggtagagatggaattgatggagctcagaaacatgtaacggaaaagagaatcggccattttctcctattctctctctttaagtccttgtccyttttcttccttagcctgtgaaatatacttacagctggtctgtttggtttttccaagactatgcatatcaatgataatataaataatgatcaacagtcatt

SEQ ID NO: 518840 - DNA, 201 bp, Homo sapiens
tttttggttccatatgaaatttaaattagtttttttctaattctgagaagaaagtcagtggtagcttgatggggatagcattgaatctataaattactttsggcagtatggcattttcacgatattgattctttctatccataagcatggaatgtttttccatttgtttgtgtcctctcttatttccttgagcagtggttt

SEQ ID NO: 518841 - DNA, 201 bp, Homo sapiens
tgggatcacaggcttgagccaccatgcccagcctaattttctgtatggttatcataattactgctatcattggaagcttcttttttgggggggtggtagtsgggggattccccactatattatatttgaccataggccaaactagttgtaacaattaagaacaaagtcccttattatgatttaggtgtctcttattctcag

SEQ ID NO: 518842 - DNA, 201 bp, Homo sapiens
attgggagcataacttttcataacaaatattgccaattagatatttactttctggattccagaattagagcttcatccagctggtcctctgcaatgtgtgkctatgtctacacctttctaaacaaagaagcaatggcagtctatgtggtatcttttgacagatcttctggggcctcactaattctaatttcgtcctttcat

SEQ ID NO: 518843 - DNA, 201 bp, Homo sapiens
ccatgtttccactgctgccttttgcctgaagcgggccagaccgagctggggaaggagagaagattcgacatctgatcacgtagcagtagagtgttttggtyatcatctgggactgggcatctaggcttgaattgagacactgtttgtgattttaagtggaagtaagactgtctaatacctaaaagtgggcagaaaaacttt

SEQ ID NO: 518844 - DNA, 201 bp, Homo sapiens
ctattctctagtagtgtttatatcctgaggttggttttttttatttttgccattttaaaataagattgcagggaagtcttgtaagtcccgaaagtattgcyataattacctatttaatattgcagcagacatctcagaaatttatatttcacttaaaatacaagagttagtgatatcattcattcatttagtagatgttta

SEQ ID NO: 518845 - DNA, 201 bp, Homo sapiens
gccaggtttctcacagtgcttactagaaaacttatttgcttaaagttaatattctacgtgtatgttactgagaatttttatacccagggtgaaaattaggkaacatttactttaataaccttccatactgaaataatacagcatgaaccataatatagcagtttggagactcgattccccatttgttcataaagagaagca

SEQ ID NO: 518846 - DNA, 201 bp, Homo sapiens
cttgaactcctgtcctcaagtgatctgcccaccttggcctcccaaagtgctgggattacaggcatgagccaccatgcccagccctttgttggctttttttwaaaatttttaaacattatactttaagttctgggatacatgtgtagcatgtgcagatttgttacataagtatacgcgtgccatggtggtttgctgcaccca

SEQ ID NO: 518847 - DNA, 201 bp, Homo sapiens
gggcaccagcttctctctcctcctagtaattgtcagggcaagggatgtgtaaatattatctcaggaccataagtgggtctcctaatgagcaaaagtgccayggcactgtagatggacagtctggaggagttttgggttttgcccaggaaagcttctgctggaggataagaggagacctataagggagaatgtggtgggaga

SEQ ID NO: 518848 - DNA, 201 bp, Homo sapiens
tacacataataaaagtacacaattcataaaaatttagtttggtgagtacaaagtgaattcatccaggtaaccagcaccaagttaagaaacagaataaggtkaacgtcccagtcactgacccctcatatcaatagttttgcttgtttttgatatttatttatttacttattttagagacagtcttgttctgttgcccaggct

SEQ ID NO: 518849 - DNA, 201 bp, Homo sapiens
taataaaactatagccaaagaatttgggaaggatttgtgggtgagagggaacttcagctgggccttgaaactgagaggatttagctaggcgaagaggtagrgagaagtcattccagacctgagtgaggatggcattaggtatgggatcagacaggtagacaacgaggtgcctgacttcccaagatctggaagatcaatttg

SEQ ID NO: 518850 - DNA, 201 bp, Homo sapiens
gaggatgctttcactcatgctgagtgtgtgcccctgttttagagaggcaagatgtgcagttagtggaaaaccaggcagcttctgctctcctaagtggaackaactcagtgatctggcccttccctaggcaccacatagctcccttcatttctatttacagatttgttgtctggtgtgggctttcttcctggtttgcagatg

SEQ ID NO: 518851 - DNA, 201 bp, Homo sapiens
ttcttatttcaatatgtcacctttcagtctgaaattttagttttaataaaatataatgagcatagctaagtcaagttccataataaaattttacttcaatmgatttttacagctgaaagagtctagaaatagtagctaacaaaagttagattctcatttgttttatcactgataagctgaaatggaaggaaaaatttatct

SEQ ID NO: 518852 - DNA, 201 bp, Homo sapiens
accttggcctcccaaagtgctgggattacaggcatgagctgccagcagttgtaaattattatagaagtggttgtgacatctattttcttgcgcgcgcgcgsgtgtgtgtgtgtgtgtgtgtgtggtgtgatccacagctcactacagcctcaacttcctgggtttaagtgatcttcccacctcagcctccagagtagctgg

SEQ ID NO: 518853 - DNA, 201 bp, Homo sapiens
cttggcctcccaaagtgctgggattacaggcatgagctgccagcagttgtaaattattatagaagtggttgtgacatctattttcttgcgcgcgcgcgggygtgtgtgtgtgtgtgtgtgtggtgtgatccacagctcactacagcctcaacttcctgggtttaagtgatcttcccacctcagcctccagagtagctggga

SEQ ID NO: 518854 - DNA, 201 bp, Homo sapiens
tggcctcccaaagtgctgggattacaggcatgagctgccagcagttgtaaattattatagaagtggttgtgacatctattttcttgcgcgcgcgcgggtgygtgtgtgtgtgtgtgtgtggtgtgatccacagctcactacagcctcaacttcctgggtttaagtgatcttcccacctcagcctccagagtagctgggacc

SEQ ID NO: 518855 - DNA, 201 bp, Homo sapiens
tggcttcccaaagtgctgggataacaggcatgaaatgccctgcccagctgacatcgctctctttctttctttctttttgttttttgttttgttttgttttkttttattttgttacatcctgagtccttgcttttttctagccaaatctagccctcttactctttcttcctgtttttctaaagggctcataggtagcactca

SEQ ID NO: 518856 - DNA, 201 bp, Homo sapiens
tgaaatgccctgcccagctgacatcgctctctttctttctttctttttgttttttgttttgttttgtttttttttattttgttacatcctgagtccttgcttttttctagccaaatctagccctcttactctttcttcctgtttttctaaagggctcataggtagcactcatccttgctgaatggaaggattgctgacttc

SEQ ID NO: 518857 - DNA, 201 bp, Homo sapiens
aaatctagccctcttactctttcttcctgtttttctaaagggctcataggtagcactcatccttgctgaatggaaggattgctgacttctcagttagtagytcagtcttctctcaaatcccagtattcttaattcttccttttgtgggagactaatgagtaggccaagatcttcaaagtttgggagttggcagaatggaaa

SEQ ID NO: 518858 - DNA, 201 bp, Homo sapiens
tagtgactttcattccttgtacatacacagtgaagtagttctgggcaataaattcttggaaaagtagagtagggattggataaatgtcatagtttatgactgtgaatacatacaaacaggtaaaaactcaagatggagaggtaataataaccacccgataaagagacttaaaaccctttcactgtacaaaaaaaaagattg

SEQ ID NO: 518859 - DNA, 201 bp, Homo sapiens
agtgactttcattccttgtacatacacagtgaagtagttctgggcaataaattcttggaaaagtagagtagggattggataaatgtcatagtttatgactgtgaatacatacaaacaggtaaaaactcaagatggagaggtaataataaccacccgataaagagacttaaaaccctttcactgtacaaaaaaaaagattgc

SEQ ID NO: 518860 - DNA, 201 bp, Homo sapiens
ctaaaaatacaaaaaattagccaggtgtcgtggcaggtgcctgtagtcccagctactcaggaggctgaggcaggaggatggcgtgaacccgggaggcggakcttgcagtgagccaggatcgcaccactgcactccagcctgggcaacagagcgagactccgtctcaaaaaaaaaaaaaaagcaaaatagtctctggtctca

SEQ ID NO: 518861 - DNA, 201 bp, Homo sapiens
atggatgtttgaaggaaggggatcatgaatgaggacctaaactaaggaaagtctaggtcttggggaagataaaaaagaggatgttccaagctgagatcacraaatgatctgaggcccaaatgcacatagcctagtgactgaagctgtaggtaacagtgaataattggatgtatgaaccagtgaacaaattagtatattctg

SEQ ID NO: 518862 - DNA, 201 bp, Homo sapiens
ctttatttattatatttcattcccttctttttcttgactatttcaaatgtatttacaaaaggtttgtagaatttttccatagagaaaaatctaattttaakatgaaattctttattttaaaatattattagtttaattttaattttgaccatacatatttgttgtcctctggtagttcattgctaaaatattgatttaaaa

SEQ ID NO: 518863 - DNA, 201 bp, Homo sapiens
taaaaggcatatggataggaaagaaagaaatgaaactgtccccatttgcagattacatgcttttctaagtagaaaatcccaagggatatataaaacacaataaaaaaaaaccttcctaggacaaataaatgagtttaacaagggtctcaggatataaagccaacatataaaaatcaatcatattgttacatattagcaatg

SEQ ID NO: 518864 - DNA, 201 bp, Homo sapiens
gagccactgcacctggacaagagtacttattattaaagtactttgttattttttgtttttttgttgttgttgtttttgagacagtctcactcatgtcgccygggctggaatgcaatgatgcgatctcagctcactgaaacctctgcctccagggttcaagcgattctcctgcctcagtctcccaagtagctgggattacag

SEQ ID NO: 518865 - DNA, 201 bp, Homo sapiens
ctgtatggatgctcctttttagtaggcctcagtctcattccagacaccagaccaacttggactgtgccccaaaaaacttgtcatccctactgtcttctgtytagtcatactcctattcaccgttctctactcataaatgccctactcttgtttacactgccggtttacacagtttctccaagccatcacagctgatgtctc

SEQ ID NO: 518866 - DNA, 201 bp, Homo sapiens
acaatggaggtttgtataagcacacctacgatgtttgcacaacaatgagatcacctcatgatgcatttctcagaatgtatgtccatagttaagtgacacawaactctatatgtatgtgtgtatgttatgtatcatttatgtattttttaatttgtatgtacattattttgctgccctcctccaacccatagcaagtttctc

SEQ ID NO: 518867 - DNA, 201 bp, Homo sapiens
tgccactcacagattctcttaaaataactacaaaataagttacttctctaagaggtaaagtgaacctcagataaaggagtggaattgcaaaaagcaatgaygaaaaagtgaattagcaaacatgttaatctaattacaagttttgctgactataaagcaaaagtcaaacaattggagggcgggtgaaaaaaaaattggagg

SEQ ID NO: 518868 - DNA, 201 bp, Homo sapiens
tctaagtattactcttagaaatattaaaactcttcatatttaacagctgaaaattatttaaaatcataagtccttccatgagaagactgaggttaatactrttgatccacatttttacagggtgagatatttgactagttctcttataataaaaatatttagaaaggcattgaatacctagtgaaaattcaaataacattc

SEQ ID NO: 518869 - DNA, 201 bp, Homo sapiens
tagagactattttggggtaacaatttaattgtgatagggttttttttgttttgttttttttgaggaagacataggtccaaagtaacaatgagaggaattaytattaatcagtttctgaaccagtggactcaatgaaattgagtttcgtttgactgtttttcattagtggtgaacagtttgggttattcattcatttgcttg

SEQ ID NO: 518870 - DNA, 201 bp, Homo sapiens
ggactcaatgaaattgagtttcgtttgactgtttttcattagtggtgaacagtttgggttattcattcatttgcttgttcattcataaacatcaaaagccrgtatatttaagacactgaaaatcttaactctactaatatgtgtcctcaaatacttgctaattatatatcaaatgtgtttaaagtacatagtgtatatggt

SEQ ID NO: 518871 - DNA, 201 bp, Homo sapiens
gtactctagaacaaacaactaaatagctcataaaacagttatctacttgaccattgataagtacaaacattatgttctactagagctataaaatcaaacamacttacatttcaacccagtgggcatatgaaggattatgacttagttacatcctatgtcttcacgtgtgcatctgtcaatttgtgaaacttgtaaaagttt

SEQ ID NO: 518872 - DNA, 201 bp, Homo sapiens
tcctatgtcttcacgtgtgcatctgtcaatttgtgaaacttgtaaaagtttagataagccatgaccttggataactacatggcattttaaatggaaggtarccatttatttattttattgttatcttaaataaataatgagtgatatacttagatctttccaaggatttactaaataaatatgcatttaaagattcaggtc

SEQ ID NO: 518873 - DNA, 201 bp, Homo sapiens
ggcagatcatgaggtcaggagatagagaccatcctggctaacacaatgaaactctgtatctattaaaaatataaaaaaatagccaggcatggtggcgggcrcctgtagtcccagctacttgggaggctgaggcagaagaatggcgtgaacttgcagtgagccgagatcgcgccaccactgcactccagcctgggtgacaga

SEQ ID NO: 518874 - DNA, 201 bp, Homo sapiens
ttaaaaatatacaaaaaacttaaacttgccttcaacttgactcaggtttaatggcttaattgttagataaaccatggacctctgagctatttgcatcctgyactgatgactaatgatttcaccatcttcttctaagaagaagcaaccttttgattgcatgtgttgccagtcctgaaatgaaggaaaaaattatttcaaaca

SEQ ID NO: 518875 - DNA, 201 bp, Homo sapiens
catgcatctataatgcctgtattatttataaattgacaaaaaaggaacttaaagctatagtaatgctaccgctgtctctgaccttaaaatggaaatgcacdtaagtggcagaaggatatagatgaaaggtgtagcaagaagcagcagctctagttcatgttactcctttttaaaaaatagtttatctaaaatcaattatta

SEQ ID NO: 518876 - DNA, 201 bp, Homo sapiens
tacaagttttgctgactataaagcaaaagtcaaacaattggagggcgggtgaaaaaaaaattggagggcaggttaaaaacaaacaattggagggcgggtgaaaaaaaaaagtcaaacaattggagggcgggtgaaaaactatcatggaaggtgaggaggcaacagataagagttacgatgttttagacaatattttaaggt

SEQ ID NO: 518877 - DNA, 201 bp, Homo sapiens
tttatattttaataataaagtacataccatggacataaaatgaaaatgcatataaattgaatagattattatttaggtacatcagttaagtagcatttagytgtttaataaataacagactaaatctgaaataattcttagtttggtaagttctaagtataattatttaagaaataagagaatatatacaataatatatcc

SEQ ID NO: 518878 - DNA, 201 bp, Homo sapiens
gagccaccgcacctggccaggatgcatttctgattgtttttttcattcattaaaataactcagttctagctaataaagccatttttatctttagtaatagsttctttattccatttgtttagatttcttttattttttaaaaccactgcataaagacttggattttttgtttttcttaagaaacagagtcatgctctgtca

SEQ ID NO: 518879 - DNA, 201 bp, Homo sapiens
acaccagaccaacttggactgtgccccaaaaaacttgtcatccctactgtcttctgtctagtcatactcctattcaccgttctctactcataaatgccctmctcttgtttacactgccggtttacacagtttctccaagccatcacagctgatgtctcctggtgctatccccaaacggccactcttaactccctcttaaag

SEQ ID NO: 518880 - DNA, 201 bp, Homo sapiens
tcttgtcgctcaggctggagtgcaatggcgtgatctcagctcactgcaacctccacctcccaggttcagattctcctgcctcagcctcccgagtagctggrattacaggcgtctgccaccatgtccggctaatttttgtatttttgtagagatggggtttcaccatgttggctaggctggtcttgaactcctgacctcagg

SEQ ID NO: 518881 - DNA, 201 bp, Homo sapiens
tttccccatgcctatatcttgaatggtattgcctaggttgtctctcagagtttttacacttttgggttttacatttcagtctttatcttaaaatttttttkttgttgttgtttttttttttgagacggagtctcgcactctcgcccaggctggagtgcagtgatgccatcttggctcactgcaagctctgtctcccgggtt

SEQ ID NO: 518882 - DNA, 201 bp, Homo sapiens
gctggagtgcagtgatgccatcttggctcactgcaagctctgtctcccgggttcacaccattctcctgcctcagcctcccgagtagctgggactacaggcrcctgccaccatgcccagctaattttttgtatttttagtaaagacggggtttcaccaggatgaagccaggatgttagccaggatgtcttgatctcctgacc

SEQ ID NO: 518883 - DNA, 201 bp, Homo sapiens
tgtctcccgggttcacaccattctcctgcctcagcctcccgagtagctgggactacaggcgcctgccaccatgcccagctaattttttgtatttttagtamagacggggtttcaccaggatgaagccaggatgttagccaggatgtcttgatctcctgaccttgtgatccacccgcctcagcctcccaaagtgctgggatt

SEQ ID NO: 518884 - DNA, 201 bp, Homo sapiens
tgagcccaggaggttgaagctgcagtgagctatgattgtgccactgcactccagccagggtgacagagtaagaccttgtctcaaattaaaaaaaaaaaaagttttatatatatatatatatatatatatatatatatataaattaagaaggcctaatttttaaatttttattacccctatggtttattacgagccctgttc

SEQ ID NO: 518885 - DNA, 201 bp, Homo sapiens
gagcccaggaggttgaagctgcagtgagctatgattgtgccactgcactccagccagggtgacagagtaagaccttgtctcaaattaaaaaaaaaaaaagttttatatatatatatatatatatatatatatatatataaattaagaaggcctaatttttaaatttttattacccctatggtttattacgagccctgttca

SEQ ID NO: 518886 - DNA, 201 bp, Homo sapiens
agcccaggaggttgaagctgcagtgagctatgattgtgccactgcactccagccagggtgacagagtaagaccttgtctcaaattaaaaaaaaaaaaagttttatatatatatatatatatatatatatatatatataaattaagaaggcctaatttttaaatttttattacccctatggtttattacgagccctgttcaa

SEQ ID NO: 518887 - DNA, 201 bp, Homo sapiens
gcccaggaggttgaagctgcagtgagctatgattgtgccactgcactccagccagggtgacagagtaagaccttgtctcaaattaaaaaaaaaaaaagttttatatatatatatatatatatatatatatatatataaattaagaaggcctaatttttaaatttttattacccctatggtttattacgagccctgttcaac

SEQ ID NO: 518888 - DNA, 201 bp, Homo sapiens
actcagcatagatatatcgtagtacacaatttcatttttcaaaaaatcctaaagttataaatagtgcaaatatattctaaaattagaggaaactgtaatawttctgggtaaattccaatctgcctggttatttagagcatacgttgttatatatttcaaagaattaaaatgcttcatatgtatttgccacttaaagccagc

SEQ ID NO: 518889 - DNA, 201 bp, Homo sapiens
cccaggaggttgaagctgcagtgagctatgattgtgccactgcactccagccagggtgacagagtaagaccttgtctcaaattaaaaaaaaaaaaagttttatatatatatatatatatatatatatatatatataaattaagaaggcctaatttttaaatttttattacccctatggtttattacgagccctgttcaact

SEQ ID NO: 518890 - DNA, 201 bp, Homo sapiens
ttttaggtacatacatggaccaaatgtttatgacagagaagtagacaaagcagaggaaggagaagcagctgcacagagagggacagagggagcgaagagayagagacagcgagctgtttgctacctaattctagctcacaaacaaggaagcgcagccaattctcttcggcgattcagcgttcctctcaccgcagctggaca

SEQ ID NO: 518891 - DNA, 201 bp, Homo sapiens
ggattgtaccctgtcacccagactgaagtgatgattagtgaagtgggattacaggcataagccaacacgcctggcctcttgtctgttactttagttgtgtmatttgattagaatgtgtaactgggtttcagtggtttcaatctctcctaagttgacaagttttagaggatcacaataggaaagcaaaatgtttattatttc

SEQ ID NO: 518892 - DNA, 201 bp, Homo sapiens
aggatttgaatcttgagtctgttaaccagctgtgtgctccttagattgttactcagtgtcctcattgataaaatagttgctcaataagtatttattaattdgataaagttgctactttggaaagatttcattctatgtagacagatacatgtctttttagtagctcttgctgtaagtaatcaaatcccattctagaccttt

SEQ ID NO: 518893 - DNA, 201 bp, Homo sapiens
caggaggttgaagctgcagtgagctatgattgtgccactgcactccagccagggtgacagagtaagaccttgtctcaaattaaaaaaaaaaaaagttttakatatatatatatatatatatatatatatatataaattaagaaggcctaatttttaaatttttattacccctatggtttattacgagccctgttcaacttc

SEQ ID NO: 518894 - DNA, 201 bp, Homo sapiens
tgcatagtttgcaacaattttctcccattctgtaggttgtctgtttactttgttgatagtttcttttgctgcacagaagctctttaattagatcccatttrtcaatttttgcttttgttgcaattgcttgtggcatcttcaccatgaaatctttccccatgcctatatcttgaatggtattgcctaggttgtctctcagag

SEQ ID NO: 518895 - DNA, 201 bp, Homo sapiens
aggaggttgaagctgcagtgagctatgattgtgccactgcactccagccagggtgacagagtaagaccttgtctcaaattaaaaaaaaaaaaagttttatatatatatatatatatatatatatatatatataaattaagaaggcctaatttttaaatttttattacccctatggtttattacgagccctgttcaacttct

SEQ ID NO: 518896 - DNA, 201 bp, Homo sapiens
gaggttgaagctgcagtgagctatgattgtgccactgcactccagccagggtgacagagtaagaccttgtctcaaattaaaaaaaaaaaaagttttatatatatatatatatatatatatatatatatataaattaagaaggcctaatttttaaatttttattacccctatggtttattacgagccctgttcaacttctat

SEQ ID NO: 518897 - DNA, 201 bp, Homo sapiens
ggttgaagctgcagtgagctatgattgtgccactgcactccagccagggtgacagagtaagaccttgtctcaaattaaaaaaaaaaaaagttttatatatatatatatatatatatatatatatatataaattaagaaggcctaatttttaaatttttattacccctatggtttattacgagccctgttcaacttctatac

SEQ ID NO: 518898 - DNA, 201 bp, Homo sapiens
ttgaagctgcagtgagctatgattgtgccactgcactccagccagggtgacagagtaagaccttgtctcaaattaaaaaaaaaaaaagttttatatatatatatatatatatatatatatatatataaattaagaaggcctaatttttaaatttttattacccctatggtttattacgagccctgttcaacttctatacct

SEQ ID NO: 518899 - DNA, 201 bp, Homo sapiens
attgtgccactgcactccagccagggtgacagagtaagaccttgtctcaaattaaaaaaaaaaaaagttttatatatatatatatatatatatatatatatatataaattaagaaggcctaatttttaaatttttattacccctatggtttattacgagccctgttcaacttctatacctatcatgttaatgataataatg

SEQ ID NO: 518900 - DNA, 201 bp, Homo sapiens
tgtgccactgcactccagccagggtgacagagtaagaccttgtctcaaattaaaaaaaaaaaaagttttatatatatatatatatatatatatatatatatataaattaagaaggcctaatttttaaatttttattacccctatggtttattacgagccctgttcaacttctatacctatcatgttaatgataataatgat

SEQ ID NO: 518901 - DNA, 201 bp, Homo sapiens
tgccactgcactccagccagggtgacagagtaagaccttgtctcaaattaaaaaaaaaaaaagttttatatatatatatatatatatatatatatatatataaattaagaaggcctaatttttaaatttttattacccctatggtttattacgagccctgttcaacttctatacctatcatgttaatgataataatgatga

SEQ ID NO: 518902 - DNA, 201 bp, Homo sapiens
agccacttgggaggctgaggcagagaatcacttgaacctgggaggcggaggttgcagtgagctgagatcgtgccactgtactacagcctgggtgacagagygagactcagtctcaaaaaaaaaaaaaaaaaaaaagttaagagtttaaagttattcataactttttcaaggggaaaaaataaatgcagattaaattcaatc

SEQ ID NO: 518903 - DNA, 201 bp, Homo sapiens
accttgaaagaatagtgtttactttgagagtgatagttgagtatatttgtaatctgaaaagcaagagcaaggaaacaagtttgaattttgctgattttttwatggtatataatttcaaagatctataactaaacatagctatttctgtccttaattattatttatttccagtcatttgatccttcaaaaatcacaaggaag

SEQ ID NO: 518904 - DNA, 201 bp, Homo sapiens
gtaaatttcacgaacagtttcttctttgttaatgtggatatagtactgaacaatggttactatggggtattagattctactggtggtctaacagcttccartattactctacccagctttgacttctaaaaatagatctccaacctaataaattgaatatttcaagttcaataataagatgacacaggtagggtccccttc

SEQ ID NO: 518905 - DNA, 201 bp, Homo sapiens
agttttactgtgttcctttattaataacaatatttggggtttgtatagcacctctgtacataagagcttaaagaactgtcatacatcttgtcttatccctrttacagcggtcaggtatttttttgtccgttttacagatgaggaaattgaggggtagcaatgtcacccagctagcagtaagtggcaaaaagccgtaaattt

SEQ ID NO: 518906 - DNA, 201 bp, Homo sapiens
taaacatataattgcaccccccgcaggcttggaaacctcccttacttaaaactccggcccgagactgagacaggggcctagagagtacattgcagcaaacrgctccataaataaccagccacacaatagcaagaaaaataaactgttaacaagcgcctaaggcttctacagggccaagtgaaaacagaaagccgtccagtc

SEQ ID NO: 518907 - DNA, 201 bp, Homo sapiens
ggtttcaccaggatgaagccaggatgttagccaggatgtcttgatctcctgaccttgtgatccacccgcctcagcctcccaaagtgctgggattacaggcrtgagccatcacacccagccctagttaatttttgtatatggtgtaaggaaggggtccagtttcaatcttctgcatatggctagccagttatcccagcaacc

SEQ ID NO: 518908 - DNA, 201 bp, Homo sapiens
tataaaaacatttaaaagcattttttcatatcaatctatttttgaaccctataaaataagtcaagcctgaggatagtaatcttaagtttttctgttttgcrgtagtagtataagtaagacaaacgtctacagcagcttttccaaagtcttgaattgcttgcatttagggaaaaaaaatgtactggcatcaaccttttttat

SEQ ID NO: 518909 - DNA, 201 bp, Homo sapiens
ttttttcaagacggagtctcacttggtcacccaggctggaatgcagtggtgcgatcttggttcactgcaacctccacctcccgggttcaagcgattctccygcttcagcctcctgagtagctgagactacaggcatgtgccaccacacccagctaatttttgtatttttagtagagacggggtttcaccacattggccagg

SEQ ID NO: 518910 - DNA, 201 bp, Homo sapiens
tcttctcccagatatgcaagcgatatatctaaatacttactagagccaaatctgtctcaaaagtttaggtcatttttttttcctttttgatagtattcaaygagaaataacactttaaataaaactttttccatgaggaaggtacagtaattatccacctcctggatactctcctgtagtcctctgagtaagctccaaact

SEQ ID NO: 518911 - DNA, 201 bp, Homo sapiens
accgactgcgccagccttggcgaagctccgcctactgccctttgctccaagtaatttttggcgatttttaaagtaatttttccggcggagtcatagtggcsctatactcttggataggttatcctgtctcttccgctagattgatgagatcaggtatcactcgaaaatggcgccgaaaagtgctgaggctcctcattcaaa

SEQ ID NO: 518912 - DNA, 201 bp, Homo sapiens
tccccttgcagtacttctctttgacatattaattttaaaaattgacaaatggaaaaagctaagattaattagcaaataaaaacttagttctggctgggcayggtggctcacacctataatcccagccctttgagaggccgaagcgggtggatcacctgaggtcaggagtttgagaccagattggccaacatggtgaaaccc

SEQ ID NO: 518913 - DNA, 201 bp, Homo sapiens
tctttattgaagttatgagaaaattgtgtcattaccatagctatgtgcaaaaatgcttttcactttattagtaggcttgcctacctgaaatgtaagtaagmatatttaaataataagttcaaggctttaataatattgataactactgaaaaggtgtatgctagctgtataataataacatcataaatgttttctaattca

SEQ ID NO: 518914 - DNA, 201 bp, Homo sapiens
tgtagacactgcacagttattaataaacttaatgtcaaatttttttcagaaaaagtcatctgttaacttaaaatactatacctttattaaatttggctccrttaactttgagtttcggttaccattagcccccatggtaactgtgaaggaaacagatgttttgaacttcctggttgctgacagtaaagaactcctggtgtc

SEQ ID NO: 518915 - DNA, 201 bp, Homo sapiens
tagccgggtgttgtggtgggcacctgtaatcccagcctcaggaggctgaggtaggagaattccttgaaaccgggaggcggaggttgcagtgagctgagatygtgccactgtactccagcctgggtaacacggcaaaactccgtttcaaaaaaaaaacaaaaacattgagttggtataccattatttagttaactatttcta

SEQ ID NO: 518916 - DNA, 201 bp, Homo sapiens
ctgaggcagagaatcacttgaacctgggaggcggaggttgcagtgagctgagatcgtgccactgtactacagcctgggtgacagagcgagactcagtctcaaaaaaaaaaaaaaaaaaaaagttaagagtttaaagttattcataactttttcaaggggaaaaaataaatgcagattaaattcaatcatgaagagaaatgg

SEQ ID NO: 518917 - DNA, 201 bp, Homo sapiens
tgaggcagagaatcacttgaacctgggaggcggaggttgcagtgagctgagatcgtgccactgtactacagcctgggtgacagagcgagactcagtctcaaaaaaaaaaaaaaaaaaaaagttaagagtttaaagttattcataactttttcaaggggaaaaaataaatgcagattaaattcaatcatgaagagaaatggt

SEQ ID NO: 518918 - DNA, 201 bp, Homo sapiens
tagagctactatgtagaaacgatgaaaaaaatatttgacatataatacaaatacattaagaaacctatctagatactgtactatagagactatcaaaaacraatctactttttaaaacttaaaattctcaatcctcattaatttttaaaaaattaacacttgggccaggcgcagtggctcacgcctgtaatcccagcactt

SEQ ID NO: 518919 - DNA, 201 bp, Homo sapiens
ctcttatatatgatattgtaatagtggtattttaaagcagacaaacatactaacttttttataagagtttttataatataggactgatgtttaaattgtayggtagtccttgtatatataactgcatatattttttaaagaaactcatttaaatatttaattatgatcccatttagagatatgcaattagaatcaaacctg

SEQ ID NO: 518920 - DNA, 201 bp, Homo sapiens
tggtggtctaacagcttccaatattactctacccagctttgacttctaaaaatagatctccaacctaataaattgaatatttcaagttcaataataagatracacaggtagggtccccttcaggactcattgcattcctactcaggaggcctaaatcacttgcaccttttcgaattatatagatcatttacacttgggaaa

SEQ ID NO: 518921 - DNA, 201 bp, Homo sapiens
cagagaagtagacaaagcagaggaaggagaagcagctgcacagagagggacagagggagcgaagagacagagacagcgagctgtttgctacctaattctarctcacaaacaaggaagcgcagccaattctcttcggcgattcagcgttcctctcaccgcagctggacagatctcggcctttctctaatcaccatggcaact

SEQ ID NO: 518922 - DNA, 201 bp, Homo sapiens
caaatagctatattttaaaagtcttatttatagcattatcatagttttactgtgttcctttattaataacaatatttggggtttgtatagcacctctgtayataagagcttaaagaactgtcatacatcttgtcttatccctattacagcggtcaggtatttttttgtccgttttacagatgaggaaattgaggggtagca

SEQ ID NO: 518923 - DNA, 201 bp, Homo sapiens
gtagaagaaatctaaaaagcagtctagtccagacttctcttttgattgacaaaaaagtctgaaaaataaagtgatatatgtgaacagctatagttctcaaytgactgcagaactagaaccaaaagctaggtctccttactttctctccagtgtgtaagttatattctaagttctgttctatttcacatttaaatatctgca

SEQ ID NO: 518924 - DNA, 201 bp, Homo sapiens
cttattttcattcataatatataacgaaatgctgaaaagtacaaaaccaaatactaaagcaaaaaattcttgttatcaaaacaaatacatcagtatagtcmcatttttcttggaacactgtagtgaatgaaaatgatttgttttaacatacaaattctgtattattaaaattttcagtgagaaagaattattaagcagtag

SEQ ID NO: 518925 - DNA, 201 bp, Homo sapiens
ttattctgtacattcacaaccaagtacttttcagaatggttataaaacctcaggaatatatgaaatttatgaaataaaaaaagaaaacttcaagtattacwgttcttttagaatttgtctagcaggttctctgtttttccagaaaaccacccaggaagaaacaagacttaaagaaaaatgtggccaggcgtggtggctcac

SEQ ID NO: 518926 - DNA, 201 bp, Homo sapiens
gagctatcaattatttccaaaagacattacattttatatgaaactcacagtattaaaaagttgacagtatgcccttttcttttaatcattaaattatcttwgtaccttttacctaattcccaattatcatccacaccattccctgctcttgacttacatacaaaactttagtctctttgttaaataatcgttatgacttac

SEQ ID NO: 518927 - DNA, 201 bp, Homo sapiens
ttttcagaaaaagtcatctgttaacttaaaatactatacctttattaaatttggctccattaactttgagtttcggttaccattagcccccatggtaactrtgaaggaaacagatgttttgaacttcctggttgctgacagtaaagaactcctggtgtcacctgcaacaagtaatgattatttggtctgacattatgaaaa

SEQ ID NO: 518928 - DNA, 201 bp, Homo sapiens
ctctagtttttctagtgtagtcttgagacattgctcgttggttgtcatatataatttacaaaactacaggaaaaaaaaagtccagtgggtaaaacattcartcatacactggggaagaggagaaagcaaatgcacattagtaggcaaggaacagactgatagatggaatatatttcctattgatggttacgcattttattt

SEQ ID NO: 518929 - DNA, 201 bp, Homo sapiens
gcacattacaaaacagttttacagatcttacctttgttagaaatttataaaggtcagtgtgtaaaatacagccatcatcatttacatctaattgcttaaawgattttagtagttctgcttttgaagtaggtttttccttccttaaaattatacaaaaatcatcaaaattcagtttggcagtttgaggagtccaatacttat

SEQ ID NO: 518930 - DNA, 201 bp, Homo sapiens
gatgtttatcatattgctacactactgctactaataataaaggaaacaatgttcaaagaatcaaggagtggttaactgaatcatggtacatatacagaacrcatttacacaactactaaattatttttatgacaatgaatattatataaaatttcctgcaaaatttcttccttattgttaagcctaaagtgccttttttct

SEQ ID NO: 518931 - DNA, 201 bp, Homo sapiens
ttatataactagttatatagttaaaagcaggacttggtaattattaaatattaggtgatttttcctccagttcagacctcagataagaggagggtagtcayttttattcatactattcacaccaagtgcttcagccctctggaacctctctttcaggaccccagaacactttgctacctttccctctgcctagattgcttt

SEQ ID NO: 518932 - DNA, 201 bp, Homo sapiens
attaggtcatttttaaagatctcttcccacatgccctgtggtaatgtatgccattagttgccaaaggctgcttccttcaagggctttctctcacagaaggrttctaaggctgaagagacatgagcctctaccaccactaggagtccccagagggacatattctgaataggaatctgtcatagtaaatactgtcttttgggc

SEQ ID NO: 518933 - DNA, 201 bp, Homo sapiens
agtagctgggattataggtacctgccaccacacttggataatttttgtatttttagtacaagtggggtttcaccatgttggccaagctggtcttgaattamtgacctcaagtgatccacccacctcagcctcccaaagtgctgggattacaggccaatttttttttttttttctttttaagagacaatttgctctgttgtc

SEQ ID NO: 518934 - DNA, 201 bp, Homo sapiens
tcggctcactgcaagcaccgcctcctgggttcacgccattctcctgcctcagcctcccgagtagctgggactataggcgcccgccaccacacctggctaatttttttttttttttgtatttttagtagagatggggtttctctactaaaaattttagccaggatggtcttgatctcctgacctcgtgatccgcccgcctca

SEQ ID NO: 518935 - DNA, 201 bp, Homo sapiens
atataaaaaataagttactagtttcttcttggatattttctttagaaatacatattccatgtttttttttttcaagacggagtctcacttggtcacccagsctggaatgcagtggtgcgatcttggttcactgcaacctccacctcccgggttcaagcgattctcctgcttcagcctcctgagtagctgagactacaggca

SEQ ID NO: 518936 - DNA, 201 bp, Homo sapiens
ataggtattcagtccaaagaggaaaaaagttttagtagtactatgagaacctgtatctctgaaaatgttagctccataagtgtaagcactcccaaagattrtaagataataaaatgtggaaacaggcaaactatggggcgatttaaagtttctaccacttcctaaagattttcttcaatagaatcattcgtgctaagtgga

SEQ ID NO: 518937 - DNA, 201 bp, Homo sapiens
tattatgtttattatgtattgtttccctcactaaaatttaagttgacgagggcagggatttttgtctttttttaactctaatgtatcctaaacacctaaaytgatgtctggtatataaggccctcgataactatttgataaataaatgaataaaggaatcttgttaataagaatacagagaattaacaactacactgaatt

SEQ ID NO: 518938 - DNA, 201 bp, Homo sapiens
ataaggtaaagaagaagtaagaaaaataaagttggctgggcacggtggctcacatctgtaatcccagcactttgggaggctgaggtgggtggatcatgagrtcaggagttcaagaccaggctggccaacatggtgaaaccctgtctctactaaaaatacaaaatttagctgggcatgatgatgagtgcatgtaattccagc

SEQ ID NO: 518939 - DNA, 201 bp, Homo sapiens
gctttcatcccattttgccaattaaaactaatcatcatgaatcctttttagtggttttcttttttcctcagagatccctgttctgaagtatgttcttttaraagatcacaaatctcatttgaaaagctttatattgcatttagcagaagatgatatctgatgagatcaacttctctgatgattgaactttttaaatgtctt

SEQ ID NO: 518940 - DNA, 201 bp, Homo sapiens
aaagcatttatttgtagaaattaatagtttatacctgacctgaaatattctttcttaagtaagtagaataccttagttgtgatgtggtttgtgatgttctrtaatggttatatatgatgccttaattttaatactcattgagccctgttctccgagcctatgcgtaatagaccagcgcagggtaaaactgaggaagacact

SEQ ID NO: 518941 - DNA, 201 bp, Homo sapiens
gagaacatattaggtggtgatcatagatacatcgtcacagttacacatttagtaaatgaacgtgcaacatttagtgtttgataatctctgtaataaacttrcagggaattcagagtactgagaatagctttgtgttaatggattttagtaaagataaccacattttggggtgttcttttgagtctttgagtaatactttca

SEQ ID NO: 518942 - DNA, 201 bp, Homo sapiens
tggaatttatcctagaaatgaaaggctggttcaaatttgaaaatcagtcaggtttcagatcagaaaataaggtaccatattaacagtctaaagaagaaaamccaaccatacaaccacatcaattgaagtagaaaaaaatatttgacaacattgagcatccacccttttttttttttttttttttttaagagacgggattct

SEQ ID NO: 518943 - DNA, 201 bp, Homo sapiens
ctaattggtcttttagttctagtaatatttattttttcatttcagtgggaatttcagttaatgtcagttacagtctttattacaggaagagtagaattatraaaataacactctagtgttttaaataaatagacatctgacacacattcttaaggctttatataacttattcaagagaaatttaaaacatacacaataaaa

SEQ ID NO: 518944 - DNA, 201 bp, Homo sapiens
taatttttagctcccacagataagaaagaatgtgtgatgtttgcctttctgtgccaggcttatttcacttaacatgatgacctccagttctatccatgttrttgcaaatgacaggatctcattcttttttatgatagctgaatggtactccactgtgtatatgtaccactttttttatttttatccattcatctattgatg

SEQ ID NO: 518945 - DNA, 201 bp, Homo sapiens
ggtatgtaactttttctcacaagtggtagcttagcatatgcttgctgctatctttagtaacaaagaaaatattgttttaaaaaatgtactggtaattagamaagaacaactttctcagaataaaattaattatgccaaaacatgtactcagtaagcagatgtccccatagctaagaaattgatacaatctatttcctacta

SEQ ID NO: 518946 - DNA, 201 bp, Homo sapiens
gatacaatctatttcctactaactttaatctctaggtttagaattagctggatctaatgattaagtttgatgatagtaaaaatatcacgtagctgtagatrtttaaattttgacaccatgatatggatcttttgccagggtttactttaaagttctgacatgcatctataatgcctgtattatttataaattgacaaaaaa

SEQ ID NO: 518947 - DNA, 201 bp, Homo sapiens
tagtagtggaaggcatgttaaacttttaaacttagcagattccttctcttagtatattttcaaaacagtaacaaaaaaaaactcggattattttagaaatwatggcaaattagaagtaattttaatttattggccaggcgtggtggctcacgcctataatgccagcactttgggaggccgaggcaggcagatcacctgagg

SEQ ID NO: 518948 - DNA, 201 bp, Homo sapiens
gaggctgaggcaggagaatcgctggaacccaggaggcagaggctgcagtgaatcaagatcgtgccactgcactccagcctggaagacagagcaagactccrtctcaaaaaaaaaaaaatttattggatgtctgcctaaacatttaatgtatatgaattaaacacaaatacttaaaattcaaaatagagcattttagtaatt

SEQ ID NO: 518949 - DNA, 201 bp, Homo sapiens
taactatatgatatgacataatagcttactgtagttccattgctcaagcttcactaagaaactgggatgattcaacaaggtaattctaatttcagtctttyggacctatttattaactttcaacaaaaaggtgaaagatttaaaaattttaaaaatttacctaagtaaagttgatctttagaaataatgttttccaagctg

SEQ ID NO: 518950 - DNA, 201 bp, Homo sapiens
cagctctacaattcatataaaatatttcctcttcagttagtggaaatttctttgttcgaggactctctgaaggtgttgatttctgactggagaaagttgcrtcgcttcgtggactgatcgccattctattggaaaataatttaaaaatgtgtttgtcaatgtgagtcactaaaacacaaatgtcaccatgtctttcaaata

SEQ ID NO: 518951 - DNA, 201 bp, Homo sapiens
aaagtgaggagatcaacaaacaaggactgacatggctggaaaagtttcacgggggatagcaaggtcaaccaaggggatttgattattaagtaggaatcttyagtctttcttgcttttcggtttagtatctcccttaatttgatgagagtggttgtctcctctgttcaagaaacctgtcattttggtaaagtggcaaaaaac

SEQ ID NO: 518952 - DNA, 201 bp, Homo sapiens
tttgagctcctgtatggatgctcctttttagtaggcctcagtctcattccagacaccagaccaacttggactgtgccccaaaaaacttgtcatccctactrtcttctgtctagtcatactcctattcaccgttctctactcataaatgccctactcttgtttacactgccggtttacacagtttctccaagccatcacagc

SEQ ID NO: 518953 - DNA, 201 bp, Homo sapiens
tttcggtttagtatctcccttaatttgatgagagtggttgtctcctctgttcaagaaacctgtcattttggtaaagtggcaaaaaacttggctttacaagrtgtgtgctcttgggaaagttagttaatgtccgtgggcatcaatttccttactgtaaaataaacatatcacctactttggaatatttttgcaagatttaat

SEQ ID NO: 518954 - DNA, 201 bp, Homo sapiens
gtgaatgtaatcaaggttatctaactccacaaaatgaaaatatagcatagattcactgagccttcaaaatacctaccttagagttgtatggtttagatagwgaatatacagctcctaccacagtgctaataagtaagtcatcaataaatgataacttgtaaagtcacgggcccaaattcagatctcatgccctttctatat

SEQ ID NO: 518955 - DNA, 201 bp, Homo sapiens
tgaatgtaatcaaggttatctaactccacaaaatgaaaatatagcatagattcactgagccttcaaaatacctaccttagagttgtatggtttagatagtsaatatacagctcctaccacagtgctaataagtaagtcatcaataaatgataacttgtaaagtcacgggcccaaattcagatctcatgccctttctatatt

SEQ ID NO: 518956 - DNA, 201 bp, Homo sapiens
aaatagttgggcgtggtggcgcacacctgtaatcccagctactccgaaggctgaggcaggagaatcgcttgaacctgggagatggaggttgcagtgagccrtgatcatgccactacactccagcctgggagacagagtgagcctctgtctcaaaaaaaaaaaaaaaagaaaaaagaaaaaaagaaaagaaaagaataaaac

SEQ ID NO: 518957 - DNA, 201 bp, Homo sapiens
atggtttctcagatatgacaacaaaagcacaagcaacaatcaaataaattggaattcatcaaaattaaaaacttttgtgcatcaaaggacactaccaacaraatgaaaaggcaattcatgaaatgggagaaattatttgcaaatcacatatccaaaaagggattaatatatagagcatataaagaactcctacaattcaac

SEQ ID NO: 518958 - DNA, 201 bp, Homo sapiens
tatgacaacaaaagcacaagcaacaatcaaataaattggaattcatcaaaattaaaaacttttgtgcatcaaaggacactaccaacagaatgaaaaggcarttcatgaaatgggagaaattatttgcaaatcacatatccaaaaagggattaatatatagagcatataaagaactcctacaattcaacaacaaaacaaacc

SEQ ID NO: 518959 - DNA, 201 bp, Homo sapiens
ttttctctatttccttttattttcattttggttatttctcaatttatacaagttttctatttttatctttatcttttctttggaaatttcttcttaaactkcattttaagattttatcattataaactgaactatactcaagctttcagtcagtcattaatcacctgcactgtcacacctttggggtatacaagatatgtg

SEQ ID NO: 518960 - DNA, 201 bp, Homo sapiens
aaacaaaaatgtggctcttgagagcaatcagttcagttttctaacagcagttatagtatgtggtcataaccattttttccccttttacagaggtctctagrtgcacatttttaatgtatcctagcagtttccagttaatgttttatatttctgtaactattattttctgttgaaagaaaactagtaaaggttgagtctaga

SEQ ID NO: 518961 - DNA, 201 bp, Homo sapiens
tctgtgccaggcttatttcacttaacatgatgacctccagttctatccatgttgttgcaaatgacaggatctcattcttttttatgatagctgaatggtastccactgtgtatatgtaccactttttttatttttatccattcatctattgatgaactcttacgttgcttccaaatttgggctattgtgaatagtgctgca

SEQ ID NO: 518962 - DNA, 201 bp, Homo sapiens
atttttttattattatactttaagttttagggtacatgtgcacaatgtgcaggttagttacatatatatacatgtgccatgctggtgagagtatttttaastgataaatgtggtattattaaaatgttagttctcaccaatgtttagatttaatgcaatccctgtcataatcctaacaaacatttctttttaagttttgct

SEQ ID NO: 518963 - DNA, 201 bp, Homo sapiens
gataaatgtggtattattaaaatgttagttctcaccaatgtttagatttaatgcaatccctgtcataatcctaacaaacatttctttttaagttttgctcyttttttatttctactgtttaaaatggatcttttttaaaaaaagttaagtggatgaaaacttgtataatagtatttggtattatctttatcttttctgttt

SEQ ID NO: 518964 - DNA, 201 bp, Homo sapiens
ggttatagattttaaagttatcagattcttagacaacaggacaaatttaaaactctttctgttctaacactataaaatagtttgatattgcctcttcattytaaccacccactgaagtattttttaaacataaaaatatgttgttctttccccaactcaggcttgaaaaagtattcatcatatcagctgaataatttcact

SEQ ID NO: 518965 - DNA, 201 bp, Homo sapiens
ttgtgattttaggtgatggttttggtactggtgatgggtccctttcaggggacccttcgatgtggtttccaaactggtgacgcatcaatttactgtcaacytctagtttttctagtgtagtcttgagacattgctcgttggttgtcatatataatttacaaaactacaggaaaaaaaaagtccagtgggtaaaacattcaa

SEQ ID NO: 518966 - DNA, 201 bp, Homo sapiens
tatgtattttggggcaaaaatatagaagaatgttgaattacatcaagagatattttgtcctattattgatgaattttaatcatttgattacagtgatgttyaccaggtttatctatattaaaagtaatcattttccctttgtaattaataaatactttgtggggaggtactttgtcatgtttcacccagtagttttaacat

SEQ ID NO: 518967 - DNA, 201 bp, Homo sapiens
ctcccaaagtgctgggattacaggagtaagccaccacgcctggccaattttttgtatttttagtagagacgggctttcaccatgtgggccaggatagtctygatatcttgaccttgtgacctgcctgcctcggcctcccaaagtgctgggattacaggcgtgagccaccgtgcccagctgcagacttcttttaatcattgt

SEQ ID NO: 518968 - DNA, 201 bp, Homo sapiens
caattctatagatcaaaaggtttggccaggttcaatcctggtaatcacggatatataacagcttataaacatcaaggagaaagtattttgaccttcattamattctttttaaggcaagcatacctgtttaaactgatttgtctatagccagttggtttaatttcattgaattcttcccagagcctcaagataagaacccac

SEQ ID NO: 518969 - DNA, 201 bp, Homo sapiens
taaaaacaaaacagctctatatctatgtatcctcatcttcctgtctggtggtgtcaagtaatggtggaataatctatattgaggaatattgaggatgtctmcagtttaggactagaatgtcctaaactagtctctaactagagactagtctctcagttaacagagctctaatagagtaagtcagttgtaaataatcttcta

SEQ ID NO: 518970 - DNA, 201 bp, Homo sapiens
gccgccctgtgaaaaggtgccttctgccatgattttaagtttcctgaggcctccccagccatgcagaactgtgagtcaattaaacctattttctttatgawttacccagtttcaggtatttcttcatagcagcatgagaacagactaatacacagatgctttaattttatggagggctatgagccacaaaacttatggctt

SEQ ID NO: 518971 - DNA, 201 bp, Homo sapiens
aatgatcaatacagttaacacaataccagttaaaatcccagcaggatttattttttgtagatataaacaagccagttctaaaatttatatgaaaagggaargaaactaaaatagctaagatgattctggaaaagaacaataccattggggaaatcatgttacctgaatataagacttacaatgaagctactgtaatcagga

SEQ ID NO: 518972 - DNA, 201 bp, Homo sapiens
gatttattttttgtagatataaacaagccagttctaaaatttatatgaaaagggaaagaaactaaaatagctaagatgattctggaaaagaacaataccaytggggaaatcatgttacctgaatataagacttacaatgaagctactgtaatcaggacaatgtagtattagtgaagggaaagacacatcgatcaatggaac

SEQ ID NO: 518973 - DNA, 201 bp, Homo sapiens
ttatatggtattgtgagtaagaaattaggaaaatgggaaatgaaaaaaaacaaaataggatactttttctttgcccacctcccttccatttgtcctttttrctttctatttaaaatttgacaaactaaattctatttaaaatttgatgatttctcctttaactttatgtccttttctttattacacatatatagaaaagag

SEQ ID NO: 518974 - DNA, 201 bp, Homo sapiens
acctggggttagacaacgacttctaacttgacaccaaatgcataatccattaaatgaaaaactgattaattggacttcatcaaaatgtaaaactttcactmtctatacgatccagttaagagaacaaaaagactatctacagaagagaagaaaatactttcaaataacatatccaataaaagacatatccagaatttataa

SEQ ID NO: 518975 - DNA, 201 bp, Homo sapiens
aaatgtaaaactttcactatctatacgatccagttaagagaacaaaaagactatctacagaagagaagaaaatactttcaaataacatatccaataaaagrcatatccagaatttataaagaatcaaatggtaagaaaatgaaactcaaaactcaacagtaagaaaacaaataacctaatttcaaatgggcaaaaggcttg

SEQ ID NO: 518976 - DNA, 201 bp, Homo sapiens
tggatgacagagcgagactgtctcaaaaaaaaaaaaaaaatgtatgttagaggtacagcctgtaatacttgttcacaatctatcttctctgacagactatrtataatgagggcaggagcaatgtctggcttgttcacctctatataagcaataattaaagcagtactttgcacacattagggactcaatttatatatgatt

SEQ ID NO: 518977 - DNA, 201 bp, Homo sapiens
ttgctcgcgcacacccggatccttcgtcgcggggaggatgtttccgcccggccgcggtgggcttgacgcaacgtccagcgcgcgcttttcatgccttggcktttcctttggcggattttctgttttcggaagttgctgggttcgttttattcagcggcagtggtgctttcccgaatctcagaatgccgtaggtatctcctc

SEQ ID NO: 518978 - DNA, 201 bp, Homo sapiens
tcgctcctttgctcgcgcacacccggatccttcgtcgcggggaggatgtttccgcccggccgcggtgggcttgacgcaacgtccagcgcgcgcttttcatkccttggcgtttcctttggcggattttctgttttcggaagttgctgggttcgttttattcagcggcagtggtgctttcccgaatctcagaatgccgtaggt

SEQ ID NO: 518979 - DNA, 201 bp, Homo sapiens
atgtctgcttacaagtaaggtattttttgtctgttaaaactagtctgtagcttgtttcatgaatgctttgtcaaattatggaagttaaagtgcaatgatawttgaagactataagtgatggtgtatcttgtttctaataagataaaactttttgcctttgttttatcttattagggaattatatgtcagtgtttgaaacat

SEQ ID NO: 518980 - DNA, 201 bp, Homo sapiens
tttgagaggccaaggcaccaaatcgcttgaccccaggaattttagagcagcctgggcaacatggcaaaaccccacctctacaaaaaaaaaatatgaaaacsagctgggtgtggtagcgtatgcctgtagtaccagctactcggaaggctgagatggaagaatcacctgagcccagaaaaacaaggctgcagtgagctgaga

SEQ ID NO: 518981 - DNA, 201 bp, Homo sapiens
tcattttaattttccactcattttatccaactatccttccaagagagaatatagtatatactttctgccccgctccactacctctcagcaagctgaactcrctgccttaactcgagacctcgctctcgcaaaaggactacgcgtcaatatttatactgactgtaaatatgccttccatatcttgcaccaccatgctgttat

SEQ ID NO: 518982 - DNA, 201 bp, Homo sapiens
caagagagaatatagtatatactttctgccccgctccactacctctcagcaagctgaactcactgccttaactcgagacctcgctctcgcaaaaggactaygcgtcaatatttatactgactgtaaatatgccttccatatcttgcaccaccatgctgttatatgggcagaaagaaatttcctcactatgcaagggtcctc

SEQ ID NO: 518983 - DNA, 201 bp, Homo sapiens
cttcataaactttactggttccctgtagacactgcacagttattaataaacttaatgtcaaatttttttcagaaaaagtcatctgttaacttaaaatactrtacctttattaaatttggctccattaactttgagtttcggttaccattagcccccatggtaactgtgaaggaaacagatgttttgaacttcctggttgct

SEQ ID NO: 518984 - DNA, 201 bp, Homo sapiens
tggtcttgaactcctgacctcaggtgatccacccacctcggcctcccaaagtgctgggattacaggcgtgagccaccgtgcccggcctagtgatattatcytaattttacatttagagagactggaacatagaaataaatgaacttcccatagtcactcaaccaaacagtgacagaactggattagaaccaaagtctcctg

SEQ ID NO: 518985 - DNA, 201 bp, Homo sapiens
tagaatgatactgatacaaatatcatacttaaaataattttccactccattttatatttacattttactcatagcattaatagcaaatttttttcaaagayataaaacaaaaggctttaattagaaaataatacattaccattgtagatttgggtcccacttctactgcaaatatgttgagtcctctgttgtttatgcagt

SEQ ID NO: 518986 - DNA, 201 bp, Homo sapiens
acttcatatatacccttcgccttgtttcgccttacactgtttcccctgcttctaaaggctgtctgtctgcatatctaaatcctagtcatccttcagtgctyaaatcccatatcacagttcccttgcccctcgtaacaaatccttccccaacttctatggtccaaattaacaacaactacaagagaaacagaataaaacccc

SEQ ID NO: 518987 - DNA, 201 bp, Homo sapiens
tagaactaagaatctttgtttatatatcttcccttaattattgggctactttaaataaagcgtgtcaaatctaaaatttctttaaattttttgtttgtagygttaaaagatcactgaagttggatggtctgttagaagaaaatgtaagtatttgcttaaaagtttgtcattgaataagattgtgttttcagtttttaacta

SEQ ID NO: 518988 - DNA, 201 bp, Homo sapiens
ctaaaggctgtctgtctgcatatctaaatcctagtcatccttcagtgctcaaatcccatatcacagttcccttgcccctcgtaacaaatccttccccaacytctatggtccaaattaacaacaactacaagagaaacagaataaaacccctattgcacacacaaacagtactacattatgtaacgtttaattattctctga

SEQ ID NO: 518989 - DNA, 201 bp, Homo sapiens
tctcgatcattagcttccattagattcaaatccataaatccttgtcttgttagttcattcctctttgtatcaaaattctctgtttaaacaaccaaaagttktttcttacataatttaaaaattcataactttaataaaatgtctatgatatattattattcatagatatttattttaaaagaggcctatgaatctatgagc

SEQ ID NO: 518990 - DNA, 201 bp, Homo sapiens
atattaaataataataatttataggatctctgcaacgttagtgtaaaacgctgggttgaaatttttcctttgcttataatatttctttaaaacatgatatmtattattaaaatagctatgtatacataaaaacttttagaaacaaactaaataaaatactttgtacccagattgtgctctatattcactaatatccaaatg

SEQ ID NO: 518991 - DNA, 201 bp, Homo sapiens
ttaaagattatttataataattatgagtatggcatttttaaaggtttatttgttcagtactggtaaattctggtaatattctgccattttttaagtcatgrctatcagttttattcaaccaaagaggatcaatatttgaatattcactgaaagcaaaacatcttaaaaggtccatgttaaaacatattctctaattttttt

SEQ ID NO: 518992 - DNA, 201 bp, Homo sapiens
taaagattatttataataattatgagtatggcatttttaaaggtttatttgttcagtactggtaaattctggtaatattctgccattttttaagtcatggytatcagttttattcaaccaaagaggatcaatatttgaatattcactgaaagcaaaacatcttaaaaggtccatgttaaaacatattctctaatttttttt

SEQ ID NO: 518993 - DNA, 201 bp, Homo sapiens
gaagcagaagaggcaggcacacttggtgtaacttggaaatacactgtaatttttttcttttttcaagacaagatcttgctccattgcccaggctggattgyggtggtgcaatcatagctcactgcagcctcgaactcctgggctcaagtgatcctctggcctcagcctcatgagtagccgggactacaggtgtgtgccacc

SEQ ID NO: 518994 - DNA, 201 bp, Homo sapiens
atcctactaacttaatataggaagcaaacaacaagcaagaaaactattaactgtaaattattcattgtaaaattattaacaatatatgtgataaggaagayggggaagactgcaataataaaacctagattatgggatgttacttaaatttagcacaatatttagctctcaactacctgttaacccatacaaaagggaaat

SEQ ID NO: 518995 - DNA, 201 bp, Homo sapiens
gtcagttaggtcccagattagccaaccaaaataagatccctgcactccagaacattaaaatagggaaatctagacatgtacacaaattaataaaatatacraagtataagctacaaaaaggtactgatttttaaagctaatattaaaaagcaagatcttaataatctaagcttctaccttaagaaactaggaaaagaacaa

SEQ ID NO: 518996 - DNA, 201 bp, Homo sapiens
tatgtgataaggaagatggggaagactgcaataataaaacctagattatgggatgttacttaaatttagcacaatatttagctctcaactacctgttaacmcatacaaaagggaaataaaaagttatgtagtgcttaaactctaaaaaagaaagtaaattttcccagttctgaatctagaaagaaattaatatcatgaaat

SEQ ID NO: 518997 - DNA, 201 bp, Homo sapiens
atgtgataaggaagatggggaagactgcaataataaaacctagattatgggatgttacttaaatttagcacaatatttagctctcaactacctgttaaccyatacaaaagggaaataaaaagttatgtagtgcttaaactctaaaaaagaaagtaaattttcccagttctgaatctagaaagaaattaatatcatgaaatt

SEQ ID NO: 518998 - DNA, 201 bp, Homo sapiens
aaatggagacagtatttcccacagacagttgttttgaaaattaagtaagatatagtttgtaaagtagtaagtatagtgccttaaactaagaaagcattaaraaaatgttaacaatatatttcattgttttcataattcaactgtcatccaaaattatcagtttaggtcaagggagatggagattcagtgacctatttacct

SEQ ID NO: 518999 - DNA, 201 bp, Homo sapiens
ttttcccagttctgaatctagaaagaaattaatatcatgaaattctattttaaaaaggaaaacagaaaaaaaaggggggcaaaactaaacatgtaagtttyacttctcaaattcagtaaaagagcaactattcaattacagtatataggggcaatgcccttataaagaagttatattgctctttaacagaggatcttcata

SEQ ID NO: 519000 - DNA, 201 bp, Homo sapiens
gagacagtatttcccacagacagttgttttgaaaattaagtaagatatagtttgtaaagtagtaagtatagtgccttaaactaagaaagcattaaaaaaawgttaacaatatatttcattgttttcataattcaactgtcatccaaaattatcagtttaggtcaagggagatggagattcagtgacctatttacctttttc

SEQ ID NO: 519001 - DNA, 201 bp, Homo sapiens
atttctgttgttttaagctaccaagtttgtggtaatttgttacagcacttatagaaaactaatacagattgatatggtttggctgtgtccccaccctaatmtcatcttgtagttcccataatccccacatgtcatgggagggacctggtgggaggtaattgaatcataggggcagttaaccccatgctgctgttcttgtga

SEQ ID NO: 519002 - DNA, 201 bp, Homo sapiens
cccttaattattgggctactttaaataaagcgtgtcaaatctaaaatttctttaaattttttgtttgtagtgttaaaagatcactgaagttggatggtctrttagaagaaaatgtaagtatttgcttaaaagtttgtcattgaataagattgtgttttcagtttttaactactgatttatctcgttaaatattaaaattat

SEQ ID NO: 519003 - DNA, 201 bp, Homo sapiens
aactccccgctcgctcctttgctcgcgcacacccggatccttcgtcgcggggaggatgtttccgcccggccgcggtgggcttgacgcaacgtccagcgcgygcttttcatgccttggcgtttcctttggcggattttctgttttcggaagttgctgggttcgttttattcagcggcagtggtgctttcccgaatctcagaa

SEQ ID NO: 519004 - DNA, 201 bp, Homo sapiens
agcataaactacaatgttcctgtattctttagttaactttctgtattcttacatagtaaaattcgtcttggttatagattttaaagttatcagattcttaracaacaggacaaatttaaaactctttctgttctaacactataaaatagtttgatattgcctcttcattctaaccacccactgaagtattttttaaacata

SEQ ID NO: 519005 - DNA, 201 bp, Homo sapiens
agaattaaaatgcttcatatgtatttgccacttaaagccagcagaaactggatgaatttgatataatactccccaaactactgagtttcagaaagaaaaaygggaatagtgtcatatttaaggagattactatatgcctgattcctctaattttagctaaattgtccccaagtcttgaaagactgacagataatggggagc

SEQ ID NO: 519006 - DNA, 201 bp, Homo sapiens
tgagaaattgtcagaagaaatcatggagataatgcaaaatttaagtagtatacaggtttgcattttttcatacttctaccctgtttgaaaaggataaaatsaaagaagtgtcccagattggagaatccaatccaggaaagagtttgcatagagtatgtttaatttacttttcatgggaattttttttttaataggagaaca

SEQ ID NO: 519007 - DNA, 201 bp, Homo sapiens
gaggcacaaacgaggttaagtaccttgtcccagaatcacctaaaacagggccaggatactaaactgagtagtctggtgccagtgcctgtgctcttgccacyacccagtagtaatctgtgaatgtcaggtttcactactggccaaggtttttatatcctgttaagtaaggataatatataaatattatccttataaatccta

SEQ ID NO: 519008 - DNA, 201 bp, Homo sapiens
gggggatagcaaggtcaaccaaggggatttgattattaagtaggaatcttcagtctttcttgcttttcggtttagtatctcccttaatttgatgagagtgrttgtctcctctgttcaagaaacctgtcattttggtaaagtggcaaaaaacttggctttacaagatgtgtgctcttgggaaagttagttaatgtccgtggg

SEQ ID NO: 519009 - DNA, 201 bp, Homo sapiens
tctcaatcctcattaatttttaaaaaattaacacttgggccaggcgcagtggctcacgcctgtaatcccagcactttgggaggctgaggcgggcagatcaygaggtcaggagatcgagaccatcctggttaacatggtgaaaccccatctctactaaaaatacaaaaaattagccgggcgtggtggcgggtacctgtagtc

SEQ ID NO: 519010 - DNA, 201 bp, Homo sapiens
ctaacatgatccccatgttccttgcctcctgataatcatgcctttatgcaatccccttgtattacagattgagtatcccttatccgaaatgtttggtaccagaaatgtttcagattttagattgttccggattttggaatgtttgcattacaatggttgtgcatcccaaatccaaaaatcccaaattcagaatgttccaat

SEQ ID NO: 519011 - DNA, 201 bp, Homo sapiens
actcctgacctcaagtgatccgcccacctcggcctcccaaagtgctgggattacaggcgtgagccactgcgcctggcccaagttcaactattaatgatgartaatgatacacagactttcatttagcttccctgtaaatctcttggatgggcatatatatggactaacaacagatgctggcattacctcagacccaattgc

SEQ ID NO: 519012 - DNA, 201 bp, Homo sapiens
caaaacttacttaaattcctttgtaaggaataattcccctgtttcatctctatatacaagttgggcttcatctgttactggttttatttttttcctcagcytacagccagttgtggaaggaattaaccagtaaattccaggtcctagttcaccagtccatccaaacaccttttctcaaaacaatgaaataaaacaatcatc

SEQ ID NO: 519013 - DNA, 201 bp, Homo sapiens
acaatgaaaaatacataagaactatgagatcatttctttactttgatatgcaatttactggagagacaagctgctctcacagtttagcatcacagcatgcrgtgttttcagtggatactcacaacacttgagtttactgcaatagcagcaggaggtagctatgaaattattacaatactgcaatatgtactacagttaatt

SEQ ID NO: 519014 - DNA, 201 bp, Homo sapiens
accccacctctactaaaaatacaaaaattagctgggcatggtggcgggcgcctataatcccagctacttgggaggctgaggcaggagaatcacttgaaccyggaggtggaggttgcagggagctgagatcgtgccattgtactctagcctgagtgatagaacgagactctgtctcaaaaacaaaaaaacaaaagaaagaaa

SEQ ID NO: 519015 - DNA, 201 bp, Homo sapiens
catctacaaaaacatccacagctaacataaaatagtggtaaaagactgaatgctttccccactaagattgtgagcaaggaaaggatatccactgtcattgktcttatttgatatcttaatgggaagtcttagccaatgcaataaggcaagaaaaaagacataaaaggcatatggataggaaagaaagaaatgaaactgtcc

SEQ ID NO: 519016 - DNA, 201 bp, Homo sapiens
aagggaaagaaactaaaatagctaagatgattctggaaaagaacaataccattggggaaatcatgttacctgaatataagacttacaatgaagctactgtmatcaggacaatgtagtattagtgaagggaaagacacatcgatcaatggaacagaatagagttcagaaatagactcatgcaaagatatggttctatatgac

SEQ ID NO: 519017 - DNA, 201 bp, Homo sapiens
ttcttgtctgtaaggaagcctacaaaaaagacttttatataacattctatcagggaaatgtttgtgtgtcattgagcctatataaagattaaatatgataytgtagtaagcccttaaatagcattatttctgttttgtgtagcagatgtattttgtagtcctcataaaataaatagccacatttatgtattggcttcacat

SEQ ID NO: 519018 - DNA, 201 bp, Homo sapiens
gttgaaatttttcctttgcttataatatttctttaaaacatgatatctattattaaaatagctatgtatacataaaaacttttagaaacaaactaaataawatactttgtacccagattgtgctctatattcactaatatccaaatgtttaattttcctaatattttaagagaaaaaattggaaacctttaaaaatcatat

SEQ ID NO: 519019 - DNA, 201 bp, Homo sapiens
aggatcttcataggctgatacagggaatgtgtaatcagtaattctacagcctaaattagagaatttaataaggaaaaataaagaaataagtaataagaatktaataagaaacaataaagaaatttagtaagaaaaaagattttaaatctgttcaactgatgaggaacagctccacttcaattaacacacttatgttaggca

SEQ ID NO: 519020 - DNA, 201 bp, Homo sapiens
ctttgtatgagccagccactgttccaagtgttttacaagtattaaccccaaaagtaccctttataaaaagaccagaaatccaagttctaatgcagacacaktctccttattctaagagagcctttaaactgttaagacaaagtgtttccctatagaaatgagactttagtaactcaaactgccttttccaattttaatttt

SEQ ID NO: 519021 - DNA, 201 bp, Homo sapiens
ggattataggcatgagccacagcacccagcctgttttttctgtaaacctaaaattgctctaaaaataaagtttattaggaggcagtgcttgcagtgagccragatcacgccactgcactccagcctgggcaacagtgtgagactccatctcaaaaaaataaataaataaataaacaaaataaagcttattaataaacaaaa

SEQ ID NO: 519022 - DNA, 201 bp, Homo sapiens
ctataaaataagacacagaatcccaaataaaccagctttatatgaaattctgtttcctatcaaatgttggatatttatcatgggtaccagaacatttgtayaggaaaacattttattctccagttctataaagaaagcaggctgggcatggcggttcacgcctgtaatcccagcactttgggaggccaaggtgggtggatc

SEQ ID NO: 519023 - DNA, 201 bp, Homo sapiens
aagactgccaaccaatcctcaattctttatttaaatttttttttagagacagggtctggttatgttgcccaggctgaagtacagtggctattcacaggtamgatcatagaataatacggctttgaactcctgggctcaagtaatcctcctgcttcagtttcccaagtagcagggacttcaggtgcatgccaccatgcccag

SEQ ID NO: 519024 - DNA, 201 bp, Homo sapiens
cctcaattctttatttaaatttttttttagagacagggtctggttatgttgcccaggctgaagtacagtggctattcacaggtacgatcatagaataatayggctttgaactcctgggctcaagtaatcctcctgcttcagtttcccaagtagcagggacttcaggtgcatgccaccatgcccagctcctcccatccttaa

SEQ ID NO: 519025 - DNA, 201 bp, Homo sapiens
cctagtcacctcaaatttgaaaatatccagatgtccatcaacagtcaaatggataaacaaattatggtatttatctaatggactacagtgaaaattatctrtagctaacaacaatggctgaatatcacaaacataatgttggatgtggaaaaaactagacacaaaaggtttcatagtgtataattccatttgtatgaagta

SEQ ID NO: 519026 - DNA, 201 bp, Homo sapiens
ccaagagaacaggtccaggctagtttactgaaggattattaaagatcatatgaggctgagtcaagttgtcccagatgggacttcatacgtaagaaagaacycagccaagattagcaaagccagccaccagctaacctgtagctaaccataactgtgtgagcaagccctatagagaaaaaacaagcctggctcagactaaga

SEQ ID NO: 519027 - DNA, 201 bp, Homo sapiens
tgtctcttcttttatttctatactaatagactcccaaactctcatgtaaatgaagtcttgtgccgagaccagctcggtcggggagaccctaacccagtggygctagaggaattaaagacacacacacagaaatatagaggtgtgaagtgggaaatcaggggtctcacagccttcagagctgagagccccgaacagagattt

SEQ ID NO: 519028 - DNA, 201 bp, Homo sapiens
tcggtcggggagaccctaacccagtggcgctagaggaattaaagacacacacacagaaatatagaggtgtgaagtgggaaatcaggggtctcacagccttyagagctgagagccccgaacagagatttacccacgtatttattaacagcaatccagtcattagcattgtttctatagatattaaattaactaaaagtatcc

SEQ ID NO: 519029 - DNA, 201 bp, Homo sapiens
tctttatcagcagcatgaaaacagactaatatacctcttctaatgaaggaagcagagatatggaccataccctgtgttcttcctataatatacgggatgtrtactgccagtaccacaatttgctaaacctcacaaattgttgggtgttgtaaggaggtgaagaaagttccaatttataatcatctactgtatttggcctgc

SEQ ID NO: 519030 - DNA, 201 bp, Homo sapiens
cttgtggaactgtaagtgcaattaaacctctttttcctcccagtctcaggtatgtctttatcagcagcatgaaaacagactaatatacctcttctaatgarggaagcagagatatggaccataccctgtgttcttcctataatatacgggatgtgtactgccagtaccacaatttgctaaacctcacaaattgttgggtgt

SEQ ID NO: 519031 - DNA, 201 bp, Homo sapiens
tcctggatcaatgccatggctccatggaaggcgatggatagtagatacatattaaaatatctatctgtaacactaatttgttaccattatgaatcctttcrgctgcatttgaggaaaaagtagttggctatttagaagtgtgtacatcattgttagtcattcttacagataaaaacatcttgggtcagcccactctgtcca

SEQ ID NO: 519032 - DNA, 201 bp, Homo sapiens
cctaagagcagcaataaatttgcacatttgcttaatcctacatcatacacaaaatacttgcagaattcccatgctcacagcactgctaaaaacaaacctgyaaagcattcaagatttgtttgcagttttttgtctctaaagatatatagtcaaattactgttttcaaaaattatttggattagttcttcatttgaagaagt

SEQ ID NO: 519033 - DNA, 201 bp, Homo sapiens
tttttgtctctaaagatatatagtcaaattactgttttcaaaaattatttggattagttcttcatttgaagaagtattcatttgaaataggttttcttgtycgtgaattttacttttttctcatcctttttgactttttaaaatgagataagccatcattatggttctaaaagtcaaaactgttgccaaaaaaggatactc

SEQ ID NO: 519034 - DNA, 201 bp, Homo sapiens
aacataaaatagtggtaaaagactgaatgctttccccactaagattgtgagcaaggaaaggatatccactgtcattgttcttatttgatatcttaatgggmagtcttagccaatgcaataaggcaagaaaaaagacataaaaggcatatggataggaaagaaagaaatgaaactgtccccatttgcagattacatgctttt

SEQ ID NO: 519035 - DNA, 201 bp, Homo sapiens
cagcaggatttattttttgtagatataaacaagccagttctaaaatttatatgaaaagggaaagaaactaaaatagctaagatgattctggaaaagaacartaccattggggaaatcatgttacctgaatataagacttacaatgaagctactgtaatcaggacaatgtagtattagtgaagggaaagacacatcgatcaa

SEQ ID NO: 519036 - DNA, 201 bp, Homo sapiens
gctggttcgaactcctgattttgtgatccgcctgcctcggcctctcaaaatgctgggattacaggcatgagacacagcacccggccaagagcacttattattatttatttatttatttgagacagagtctctctctgtcacccaggctggagtgcagtggggtgatctcagctcactgcaaactctgcctcccgggttcaa

SEQ ID NO: 519037 - DNA, 201 bp, Homo sapiens
tggtatataaggccctcgataactatttgataaataaatgaataaaggaatcttgttaataagaatacagagaattaacaactacactgaatttgcagggytatcttgattcctctctctgaaaaataactattgttattgtcatttaaaagtatcatctgccaaacattatatgtatcccacaagagatgcagtgaaaac

SEQ ID NO: 519038 - DNA, 201 bp, Homo sapiens
attaacaactacactgaatttgcagggttatcttgattcctctctctgaaaaataactattgttattgtcatttaaaagtatcatctgccaaacattataygtatcccacaagagatgcagtgaaaactttcaaaatctctactttaggagggaaaaagaatggggaggtgggaatcctttagtaagaaaatgcttgtatg

SEQ ID NO: 519039 - DNA, 201 bp, Homo sapiens
gaccttatgtagaaacctattttttacattttaataaacactgctttatgttctgcttttaaaaattaattttatatccaaaatattttgctgttgaaaaygaataaagctagaggactcagactttctgatttcaaaacttactacaaagatacagtaatcaaaagggtgtggtactagcatgaaaacagacatacagaa

SEQ ID NO: 519040 - DNA, 201 bp, Homo sapiens
aaactggaagcctttatatgatatcattgattaaaatatttgatgaaagtatcctttatctaataaagtttactaatgcattttaacctaattatagaatyatatttgatttctctttaatataccaaccttcagtggaaattttattcaaaagattattttttcttatatggtattgtgagtaagaaattaggaaaatgg

SEQ ID NO: 519041 - DNA, 201 bp, Homo sapiens
tctgtaatctcagcattttgggaagccaaggtaggaggatcgcttgagcccagaagttcaaggccagcctgagcaacatagcgagactccatctctacattcaatcaatcaatcaatcaatcaatcagcaagcaagcaagctggatgtggtggtgtgcctgtagtcccactactcgagaggctgaggtgggaggatcacta

SEQ ID NO: 519042 - DNA, 201 bp, Homo sapiens
aaaattgaggtagccagagattatatgggttcagagttttataaggagtttgtagcaatattaggtctagagtccaagacatttggcctctacatttagamcaagtttctaaaagaaaatgtactcagggtacgaattcaaattttttattatctgtgatacaatgaggttcaaagttgggcttgtggcagaagttgaagt

SEQ ID NO: 519043 - DNA, 201 bp, Homo sapiens
cctatagaaacttaaaaaagccattaaaggttgggggagtggggtggatatcaaacacctgtaatttctccttggccgtccttgtcctcaggttgatttargtaccccctctagtgtaacctgttccttagtttatttcaggattaagtaaaatgcaaagtaacacagctggggaaatttttgtatcaaataggaattgac

SEQ ID NO: 519044 - DNA, 201 bp, Homo sapiens
ctgtaatctcagcattttgggaagccaaggtaggaggatcgcttgagcccagaagttcaaggccagcctgagcaacatagcgagactccatctctacattcaatcaatcaatcaatcaatcaatcagcaagcaagcaagctggatgtggtggtgtgcctgtagtcccactactcgagaggctgaggtgggaggatcactag

SEQ ID NO: 519045 - DNA, 201 bp, Homo sapiens
ggggcttactctaattctagacatgactggtcttagcaaggaaggtgaagctattcctctctgaaaggaaaattcctgacattccttgaccatcacagaayctaagtaaatggatagaattcgggattttaaaaagaataataatgcagtaactaagtatggccaatggaaagtaatatgcgtatagtacctgtaaggatc

SEQ ID NO: 519046 - DNA, 201 bp, Homo sapiens
tgtaatctcagcattttgggaagccaaggtaggaggatcgcttgagcccagaagttcaaggccagcctgagcaacatagcgagactccatctctacattcaatcaatcaatcaatcaatcaatcagcaagcaagcaagctggatgtggtggtgtgcctgtagtcccactactcgagaggctgaggtgggaggatcactagg

SEQ ID NO: 519047 - DNA, 201 bp, Homo sapiens
gtaatctcagcattttgggaagccaaggtaggaggatcgcttgagcccagaagttcaaggccagcctgagcaacatagcgagactccatctctacattcaatcaatcaatcaatcaatcaatcagcaagcaagcaagctggatgtggtggtgtgcctgtagtcccactactcgagaggctgaggtgggaggatcactaggg

SEQ ID NO: 519048 - DNA, 201 bp, Homo sapiens
atcatacactggggaagaggagaaagcaaatgcacattagtaggcaaggaacagactgatagatggaatatatttcctattgatggttacgcattttattkttttgaatcagattgaccagcctcaagtgacctagtgaaatgtagccgtgattcaatgaggagttcatactctgtgtgaaaataaaatgttacacaagga

SEQ ID NO: 519049 - DNA, 201 bp, Homo sapiens
aatacagttccatgttctaggtttaaaaatgtttttttcttcacaaaacaagtagttaatggcatgtcaataaagcccatttgtaaaaaaacagctacacrttaatattttatgtgaacttccatatcctttatgttttgcaaggaatatatataatttactgcgattggcttttcttcctcttggcaatttgctgctgct

SEQ ID NO: 519050 - DNA, 201 bp, Homo sapiens
agttgatctttagaaataatgttttccaagctgcttttgaagacagttaagtaggcagctctacaattcatataaaatatttcctcttcagttagtggaawtttctttgttcgaggactctctgaaggtgttgatttctgactggagaaagttgcatcgcttcgtggactgatcgccattctattggaaaataatttaaaa

SEQ ID NO: 519051 - DNA, 201 bp, Homo sapiens
aattttaatatggaggaagtggagattgggttaggctgtcatgttgagcagaaatttgtgaaagaagattcattaaattaggtacatggagagttaagcarcattgggtgctcagcaaaatcatacttctaatattgactgtcaattctactgtgagacttttttttttttccatagtactgacagcttagactaggagca

SEQ ID NO: 519052 - DNA, 201 bp, Homo sapiens
ttatgttttcttaatttatcttgaaatggcaggcaaccacatctgcaaacctcaatccacaatgcatatcaagcaattcaactttttcttgtaatgtcatkactttgctatgcttcttaggagcacttccggcatcactaatgtcactagtggcattttgaatgggtcccatagtgttagacaaggtttacaatattccat

SEQ ID NO: 519053 - DNA, 201 bp, Homo sapiens
ctggaccaggtcttttttattctgttcattgatccatcaaatagttactgggtccctcccataactgcaggcactttattagttaacacaggttgtaacartaaataaggtagataccgcccttgccttcacggaacttacaatatggtaagggagacctatgtcaaacaattggaagttacaaaaaaggagggaaatcaa

SEQ ID NO: 519054 - DNA, 201 bp, Homo sapiens
cataatttttagctttttcataatgctatcaaaagtctcttgtttcttgttcgcatacttagataaaattttacttagttgaaacttactgtacatatacrttgtatatcaaaattttaacatatttgtcttatttttaataacaaaaatgtcaatgactaacactgatgtaatcttgaaaaagcatttaaatagaatttc

SEQ ID NO: 519055 - DNA, 201 bp, Homo sapiens
tcaataatttttatattcattatatgttgaaatattttgaatatattgatttaaatacttaaacatgaaaattattaaagaaaatttacctttttattccytttagtgtggctactaaaaattttaaattacatatatggtttacattatttttctatcagactgtgttgatatagattatcacaaacagctgtggggtct

SEQ ID NO: 519056 - DNA, 201 bp, Homo sapiens
acacattcacaccttcacacctcaataagcaaagtaatcatgaactgtaaaataccaaaacctttagactaatacaggagtgattaatagtacctacatgwatgccatttagcaatttctgcaagtggaattaggccttaaaatgggtggccgtgttttcagcctaccacttttaaataccgatgactgccatttattgag

SEQ ID NO: 519057 - DNA, 201 bp, Homo sapiens
gagccaccgtgtcaggcctacccctcagactttcaataatgattcctagagttcctggctcacacattacctcaccacatgaatctcatctatatcctctraatcaggtccactatttgctttatttttcctcaaatcattacagttcttttttcccccagaaattaagctaggctgagcatcaaagataggctttataag

SEQ ID NO: 519058 - DNA, 201 bp, Homo sapiens
tgtgaagcatatacaatattgcttgacacgtagtaagtgctaaataaactgcagataatgagaaactccagaataatgagaatcgggatatgagtggtagytgacacccatcttccacagcaggatcaacaagatcatttcattaacatctcaataatgcagccccacatttcaaatagctatattttaaaagtcttattt

SEQ ID NO: 519059 - DNA, 201 bp, Homo sapiens
ctgttaacaagcgcctaaggcttctacagggccaagtgaaaacagaaagccgtccagtcaccgtccctacacagtgaaataccgtcacaggtaatctcggrcaccatctctctatttttgtattcctctggaaataaaaccgcatttacatgtacattttaggtacatacatggaccaaatgtttatgacagagaagtaga

SEQ ID NO: 519060 - DNA, 201 bp, Homo sapiens
gctgggattgccagccagtcagatctaaaggccagctgggtcatggcagggctgcagccatggcaagactcctccaaagctcatgtgggaagggagctgartaggcttcctgagcttttcagttgaacaactaacatctactgtgatgccaagaatttaagaacatgaaaggtggctttttcttggatgtggcttgggatc

SEQ ID NO: 519061 - DNA, 201 bp, Homo sapiens
ctgggtcatggcagggctgcagccatggcaagactcctccaaagctcatgtgggaagggagctgaataggcttcctgagcttttcagttgaacaactaacrtctactgtgatgccaagaatttaagaacatgaaaggtggctttttcttggatgtggcttgggatctttttaaaaaaaaaaaagaaagaaagaaaagaaaa

SEQ ID NO: 519062 - DNA, 201 bp, Homo sapiens
cattgttagtaaattaagtgtttttttttttttttaatgtggttactggtgaggtcataaatgagtggtgcaaatagttatcttggcaagttacatatgcrggtggattcatttttaagtgatgttgaaatggtgactatttggtatgtatttggaagactaaatgtgtaatataacttatgggagggtgtgatctatctt

SEQ ID NO: 519063 - DNA, 201 bp, Homo sapiens
ggttatatatgtatatgataagattattgttaaaaggcagagaaatgataaatacagagaaatgataaatacagtttaatagatgccttttgggggaagcmaatagatgcatgtatacccagtcatattggtaatgatctagttcttaaattatgtggtgagtttatgcgtgcttattttctaatgttttataacttgcac

SEQ ID NO: 519064 - DNA, 201 bp, Homo sapiens
taatagaggaaggtataatagagcctttttggctgagcgtggtggctctcacctgtctatttaacttagaattttttgacttcataatagtgtgaaagcartatgcattcagtagaaactactttaagtacccatacaaccattcttttctttactttcagcacaatattcaataaattacatgagatgttcaacacttta

SEQ ID NO: 519065 - DNA, 201 bp, Homo sapiens
atagtgctacaataaatgtacaagtacatttgtctttttgatataatgatttattttcctttgatagatacccagtagtgcggtggttgctgggtagttcyttttttttttttttttttttttttaagttggagtcttgctctgttgtccaaactggagtgcagtggtgcaatcttggctcactgcaacctccgcctcccg

SEQ ID NO: 519066 - DNA, 201 bp, Homo sapiens
accttaatttgtgagtaaaactctagctttttggctttttgctgccctctcctggtcacagtttgtggttcttgaccacttcaggcccagtggtatcaagygcaaggacaagttttttgtcttctaaaccccgaagagtagagaatcaaaactaaaattatgattaagtaattcacactttcttttaacttgagtattata

SEQ ID NO: 519067 - DNA, 201 bp, Homo sapiens
ttcttggaccaaagaaaatacctccttccagtctcacaagcccattctattctgtcatcatttcataacctcttccatgtaggttacaagccattaagccygcctcatagaacctctcatttcctttccatcatgggactctaccctcaaggaaatcacttctcagtgttccagctgcaattctactacctctcagggatt

SEQ ID NO: 519068 - DNA, 201 bp, Homo sapiens
aactaaataaaatactttgtacccagattgtgctctatattcactaatatccaaatgtttaattttcctaatattttaagagaaaaaattggaaacctttaaaaatcatataaaaattaccactcccagtttgagttagaaacctgaggagaaaaaataattatgcattataaacattattaatgtgatgggatacttaat

SEQ ID NO: 519069 - DNA, 201 bp, Homo sapiens
accaactatggatctagatagaaacactaatactgagatacttatgacctcagtaatcttaaatgcaggtaaattggtgagaaagtaaattaaaacaaatmgctagtcaataagtaggctcctccaaattcacatatgaatgccatttcaataaatgggttttatatggaatttttctttggaagacacactggtatttaa

SEQ ID NO: 519070 - DNA, 201 bp, Homo sapiens
taatctcagcattttgggaagccaaggtaggaggatcgcttgagcccagaagttcaaggccagcctgagcaacatagcgagactccatctctacattcaahcaatcaatcaatcaatcaatcagcaagcaagcaagctggatgtggtggtgtgcctgtagtcccactactcgagaggctgaggtgggaggatcactagggc

SEQ ID NO: 519071 - DNA, 201 bp, Homo sapiens
aaataaccaaaactaatcaatactgctaaaagttagtagttattcttagtttctgggatgttgtcagtgttctctttcgtgatctgggtactaactgcaaytgaatgagctgtacacttatgtgtacccttgtctcttcttttatttctatactaatagactcccaaactctcatgtaaatgaagtcttgtgccgagacca

SEQ ID NO: 519072 - DNA, 201 bp, Homo sapiens
tccaaaacatattttatctgttttgagaataattgtgtaggttgcagtatgcatattttaaatgaaatggaaccatctgaactttacattgttcagtgttycagctgtttgtaatagaaaatatttcagaatttccaactttggtctgttttaaaaagcataaactacaatgttcctgtattctttagttaactttctgta

SEQ ID NO: 519073 - DNA, 201 bp, Homo sapiens
acgacttttaggagaaacaacagaaattccccctatgctttaacattctgggtttatctggagataaaaaatgaagccattaattttgatagcacaaatayacattaatgtacaactatagtcctcagctctttataatgattcagctatcatgtatgccatatgtgaatcataacctttcctattaataatgttaatgct

SEQ ID NO: 519074 - DNA, 201 bp, Homo sapiens
ctgcacccaggtgaaataaacagccttattgctgagaaaaaaaaaaagaaaaagatttcctactaaataagaacaccacacaatgaaagcattatttataktttaataataaagtacataccatggacataaaatgaaaatgcatataaattgaatagattattatttaggtacatcagttaagtagcatttagttgttta

SEQ ID NO: 519075 - DNA, 201 bp, Homo sapiens
gattttctgaggtgtcattcctggttttttattaggaatcaaatgatagggtttttttttcctagaataatttctttaatactgtaactgatgttagtcartaacattgtgtaataaaactcatctgctttttctgttctgatgaaccagagaatcctattcaggatactaccatatgttaagctaaatagaaaagaggtc

SEQ ID NO: 519076 - DNA, 201 bp, Homo sapiens
ccaacttccctacctgcacaactgctccagccctctgtcacacttcagtgattattcctcttgacctgtaattgttcagtggggaggactgtcccatacarattcactcccagagcctttaaaaagtgaagcctttgtgaaacaatgctagaataagagagaaagtaagggtgacagcaacccagaggccacagccagagt

SEQ ID NO: 519077 - DNA, 201 bp, Homo sapiens
aacattgtgtaataaaactcatctgctttttctgttctgatgaaccagagaatcctattcaggatactaccatatgttaagctaaatagaaaagaggtcartcttagagaataatataattatacaaacatagttactctctctataaaattgcatgtcacatgctttctatctttttaaaattctcaacagcagtatttc

SEQ ID NO: 519078 - DNA, 201 bp, Homo sapiens
ctgcatccttgacctcctgggctcaagcagtccctctgccttggcctaggagtacaggcatgagccaccacccccagccttattaggtcatttttaaagawctcttcccacatgccctgtggtaatgtatgccattagttgccaaaggctgcttccttcaagggctttctctcacagaagggttctaaggctgaagagaca

SEQ ID NO: 519079 - DNA, 201 bp, Homo sapiens
aggatactaccatatgttaagctaaatagaaaagaggtcagtcttagagaataatataattatacaaacatagttactctctctataaaattgcatgtcamatgctttctatctttttaaaattctcaacagcagtatttctggtagcaaccagaattttgatcccagtgaatctaaacctagtatacctagaaatataat

SEQ ID NO: 519080 - DNA, 201 bp, Homo sapiens
tgaataagattttgttttatatatatatcacattttgtttatcggttcatctgtcagtggatatttgggttgcttttctaccttttggctattgtgagcartgctgctgtgaacattggtgtacaaatatctgtttgtgtcccagctttcaattatttttggaagtggaatcatggaatcatatggtaattctatttttaa

SEQ ID NO: 519081 - DNA, 201 bp, Homo sapiens
gtgttgtaaaagagtggttgggcccagttctaatataatattaagaatagatggtcataaactctgtagtgggtttgctcttctcttcccttctttaattyccttcccctcaattccataaagatttattatgcacagggcctgagatctgagtttctctccctcaagatgtgtgacaataggcaagttgcacaaactgtt

SEQ ID NO: 519082 - DNA, 201 bp, Homo sapiens
tctgtttctttggtcagaatggttttttggtagatgagtagtccagcttgaaatgaaatactgttctttcctaccccaaagctgttctttgggagatggtmacattgtttaaatggaaaagaatgaccgtttcagaacccgttctcttcatgaagtaaattgtcatcatggcaggccttctttgtattttttcttcagatg

SEQ ID NO: 519083 - DNA, 201 bp, Homo sapiens
agccagactgtgtctcaaaaaaaaaaaaaaaattgtagtggcccagaatgaagtaggagtaagcttaggagttgcaaatctgcagctgtttcctcaactgccccttttgcccataatcatacccgttgcttggaatagttcccggctccctatctcaagaatgggttatgagtagacacatggaaaagccctgccctaatc

SEQ ID NO: 519084 - DNA, 201 bp, Homo sapiens
gttttggttactgtagccctgtagtatagtttgaaattaggtagcatgatgcctccagctttgttctttttgcgtaggattgccttggctattcgggctctttttttggttccatatgaattttaaaattttttttctagttctgtaaagaatgccaatggtagtttagtgggaatatcattgaatctataaattgctttg

SEQ ID NO: 519085 - DNA, 201 bp, Homo sapiens
acgaaaaatacaaaaattagctgggcatggtggcacacgcctgtagtcccagctacttgagaggctgaggcaggagaatcacttgaacccgggaggcggasgttgcagtgagcaagatcgcaccactgcactccagcctggcgacagagcaagactccgtctcaaaacaaacaaacaaacaaacaaaaatgaaatgtttac

SEQ ID NO: 519086 - DNA, 201 bp, Homo sapiens
taaaagcagaatttacaaacattttgttccttgcagtacacctttcaaaagacatcttcatcaaataggtaagaaaggtaagaattgctgaggtaagtagwggtctcttttattatggtcttcattctatcattattaaaccttaatctcatgtcctgttccaaagcattatgtgagtattcaatcaaagaagtgaggctg

SEQ ID NO: 519087 - DNA, 201 bp, Homo sapiens
aaacaagacttcaggttgttttaatttcattttgcttcaacatttattctgcatcatatactgtggcaagttgctttgaattgttttctgaaaaaaaaaamctttcttctttcatatagcatcacgtcatcttgacagctatgaattccttaaagccattttaaactgaggtactgtttcacctttctaatttagtttaac

SEQ ID NO: 519088 - DNA, 201 bp, Homo sapiens
gccgagaccatgccactccactccagcctgggggagagtgagactccgtctcaaaagaaaaaagcaaatgagaggttgccagcagcatctaactaaactakgtaccaaactagattgttattaggtgttaaaatcacttcttaagtcatgtatgacgtgcatgttaactaattcttgataatataattatcttttatatct

SEQ ID NO: 519089 - DNA, 201 bp, Homo sapiens
tcaatttactgtcaacctctagtttttctagtgtagtcttgagacattgctcgttggttgtcatatataatttacaaaactacaggaaaaaaaaagtccartgggtaaaacattcaatcatacactggggaagaggagaaagcaaatgcacattagtaggcaaggaacagactgatagatggaatatatttcctattgatg

SEQ ID NO: 519090 - DNA, 201 bp, Homo sapiens
atacctattagcagttagtctcaatttcctcctctccccctccccctggaaaccactaatctactttctgtctgtgtagatcttcttctgaacatttcatrtaaatggagtctcataattttgtgtctggcttctttcatttagcataacattttcaagattcaatttacctgtttctttctttgattgtccttttgatgt

SEQ ID NO: 519091 - DNA, 201 bp, Homo sapiens
gctgaacccatttattagcattaataatttggagattttcttttttttttgttttgagacagagtcttgctcttttgcccaggctggagtgcaatggcgcratcccagctcactgcaacctccgcctcctgggttcaagcagttctcctgcctcggcctcccaagtacctgggactacaggtgcacacaaccacgcccagc

SEQ ID NO: 519092 - DNA, 201 bp, Homo sapiens
taagttctaagtataattatttaagaaataagagaatatatacaataatatatccattcttgtcgttcattcaaaggcattacatgttgacaaacctgcamataaaaatagaaagcttttactctctttttatatattgttacttttggctaatttttaaacaggacaacatttctaggccttgtataagaatatccctgt

SEQ ID NO: 519093 - DNA, 201 bp, Homo sapiens
agtagagacagggtttcaccacattggccaggctggcctcgaactcctgacctcaggtgatccgcccgtctgggcctcccaaagtgctgggattacaggcrtgagtcacagcccccccgccctacttagggtattctatatataagatcaggtcatctgcaagtagggatagttttacttcttcttttgcaatctacgcct

SEQ ID NO: 519094 - DNA, 201 bp, Homo sapiens
gagagaaggtgctctgttacaccagcaggaaataggtgctgtcctgggcctagaactccccgctcgctcctttgctcgcgcacacccggatccttcgtcgyggggaggatgtttccgcccggccgcggtgggcttgacgcaacgtccagcgcgcgcttttcatgccttggcgtttcctttggcggattttctgttttcgga

SEQ ID NO: 519095 - DNA, 201 bp, Homo sapiens
cccgccctacttagggtattctatatataagatcaggtcatctgcaagtagggatagttttacttcttcttttgcaatctacgccttttatttctttttcrtgcccattgctttggccagaacctcctgaaaaatattaagtagaagtggcaagagcagacattcttttcttgtacctgatcttagagggaaagaatccag

SEQ ID NO: 519096 - DNA, 201 bp, Homo sapiens
aaccttgctttccttgcataaattctgcttggctatgacatataattcttttatgctgctgatttcaatttgccaggatttttacatctgtatttataagkgatttgggtctgtaatgttctggtatcaggataatactggcttcaaagaattaggaagtgtttcctcatatttttggagagtttgagaatacttggtgtc

SEQ ID NO: 519097 - DNA, 201 bp, Homo sapiens
tacaaaattagccaggcatggtggcacatgcctgtaatcccagctgaggcaggagaattgcttgaacccgggatacggaggttgtggtgagccgagatcgygccattgccctccagcctgggcaacaagagtgaaactacatctcaagaaaaaaaaaaaaaaaaaacgctagtggaattcacttgtgaagctacctggtcc

SEQ ID NO: 519098 - DNA, 201 bp, Homo sapiens
ttctatagatgtctgttaaatctagttggtatatagttttattcaaattttctgtttccttgctgattttctatctaggttttctattcattattgaatgyggggaattgaagtttccaactattatagttgaattttcaatctctcccttccaattctgccagtttttgttttatgtattttgggcctctcctgttagat

SEQ ID NO: 519099 - DNA, 201 bp, Homo sapiens
tttgaacaaagggatgtaagtttatagtgcttttacggcaggtaaatgaaactccctttctctttagctactatgactctacaatcactactgcaacaatrcaggacagtggctccagatactattaacaaaagcccttggtaatgggtctaggtctctaagtccagaatgttcaaaagttaaggattttttgttttattt

SEQ ID NO: 519100 - DNA, 201 bp, Homo sapiens
ttgaacaaagggatgtaagtttatagtgcttttacggcaggtaaatgaaactccctttctctttagctactatgactctacaatcactactgcaacaatgyaggacagtggctccagatactattaacaaaagcccttggtaatgggtctaggtctctaagtccagaatgttcaaaagttaaggattttttgttttatttt

SEQ ID NO: 519101 - DNA, 201 bp, Homo sapiens
aggtctctaagtccagaatgttcaaaagttaaggattttttgttttattttatttttttagaatagggatctcattctgtcatccaaactggtgtgcagtsgtataatcatgtttcactgcagcctcgaactcctcgactcaagtgatcctcccaactcaacctcccgagtagctaggactgcaggcacatgccaccacac

SEQ ID NO: 519102 - DNA, 201 bp, Homo sapiens
gaggcaagagaatcacttgaacccgggaggcggaggttgcagtgagcagagatcgcaccactgctttccgggctgggctggcaaagtgagactctgtctcaaaaaaaaaaaaaaaaaaaaattaacattgttattttttgtgagttgatcctccaaagaggttatttaccctccactctattaatattaatttggtttatt

SEQ ID NO: 519103 - DNA, 201 bp, Homo sapiens
aaaattgtgatttaattatgtatggatcttgctacagctgatttttctcttctctcaaataatttaataccttaatataggtattactttggacataaatrtaaacttttggcacttattttaaaatgcaactgcaggctttgttcccttactatcccatccattaaatagaaattatggcctgacttgccttcagctact

SEQ ID NO: 519104 - DNA, 201 bp, Homo sapiens
ggtggcgcatgtctgtagtcccagctacttaggaggctgagttgggaggatcacttgagcccacgtggtagaggctgtagtcagccatgatcactgcactcagcctgggtgacagagcgagaccctgtctccaaaaaaaaaaaaaagaattcttagcttaccaggtgttttgcctgctatctcttaggggaaaaaaaatca

SEQ ID NO: 519105 - DNA, 201 bp, Homo sapiens
aaaaaaaaagaattcttagcttaccaggtgttttgcctgctatctcttaggggaaaaaaaatcaaagcacaattaaagaattatattctacctccaagatrcttttctttggaaatggtatctcaagtgattaatattagcttcctgacaagctagtcttaatatttgcaaagcatcttatatagaaaattgtgtccgttt

SEQ ID NO: 519106 - DNA, 201 bp, Homo sapiens
attaatattagcttcctgacaagctagtcttaatatttgcaaagcatcttatatagaaaattgtgtccgttttttatgaaaacgtttattctgttgtatgyagtaacaatagcttatattctgttgtttgcagtgagtaatagcttataataatagctaatatttattgagtactttctgttgttttgtttgtttgttttt

SEQ ID NO: 519107 - DNA, 201 bp, Homo sapiens
tttattctgttgtatgtagtaacaatagcttatattctgttgtttgcagtgagtaatagcttataataatagctaatatttattgagtactttctgttgttttgtttgtttgttttttgaaatggagtcttgctctgtcactcaggctggagtgcagtggcacgatctcggctcactgaaacctccacctcctgtattcaa

SEQ ID NO: 519108 - DNA, 201 bp, Homo sapiens
ttattctgttgtatgtagtaacaatagcttatattctgttgtttgcagtgagtaatagcttataataatagctaatatttattgagtactttctgttgttttgtttgtttgttttttgaaatggagtcttgctctgtcactcaggctggagtgcagtggcacgatctcggctcactgaaacctccacctcctgtattcaag

SEQ ID NO: 519109 - DNA, 201 bp, Homo sapiens
tattctgttgtatgtagtaacaatagcttatattctgttgtttgcagtgagtaatagcttataataatagctaatatttattgagtactttctgttgttttgtttgtttgttttttgaaatggagtcttgctctgtcactcaggctggagtgcagtggcacgatctcggctcactgaaacctccacctcctgtattcaagt

SEQ ID NO: 519110 - DNA, 201 bp, Homo sapiens
attctgttgtatgtagtaacaatagcttatattctgttgtttgcagtgagtaatagcttataataatagctaatatttattgagtactttctgttgttttgtttgtttgttttttgaaatggagtcttgctctgtcactcaggctggagtgcagtggcacgatctcggctcactgaaacctccacctcctgtattcaagtg

SEQ ID NO: 519111 - DNA, 201 bp, Homo sapiens
aagataatcaaaaagcaaataaggccgggcacagtggctcatgcctgtaatcgcagcactctgggaggccgaggtgggcagatcacgaggtcaggagttcragaccagcctggccaacatagtgaaaccccgtctctactaaaaatacaaaaattagctgggtgtggtggcacacacctgtagtcccagctactcaggaga

SEQ ID NO: 519112 - DNA, 201 bp, Homo sapiens
ccaaagcattatgtgagtattcaatcaaagaagtgaggctgttctccagaattggttctctgctacaggtcaaaaccgactgcgccagccttggcgaagckccgcctactgccctttgctccaagtaatttttggcgatttttaaagtaatttttccggcggagtcatagtggcgctatactcttggataggttatcctgt

SEQ ID NO: 519113 - DNA, 201 bp, Homo sapiens
gctctttgctagttgagtgagggaatatattagttaagtgaggaaactgaaattcagatgagtggtgtgtccatgatagcatagctggggagcagcaaaascattatgtgagcccaggctttccaatgttaagtctgcggttccttccatataccacagctatctttcctttagtgtaattgtttaaagacttcatgattc

SEQ ID NO: 519114 - DNA, 201 bp, Homo sapiens
agaattgcttgaggctagcaatttgggacaagcttgggcaatgtagtaagaccctgtctctaaaaaaattttgtttgttaaataagctggcatggtagtgygtgcctatagtctcagctactcaggtgggtaaagtgggaggatcacttgagcccaggagttcaaggctgcagtgagctgtgatagtgccactgcacttca

SEQ ID NO: 519115 - DNA, 201 bp, Homo sapiens
aggctagcaatttgggacaagcttgggcaatgtagtaagaccctgtctctaaaaaaattttgtttgttaaataagctggcatggtagtgcgtgcctatagyctcagctactcaggtgggtaaagtgggaggatcacttgagcccaggagttcaaggctgcagtgagctgtgatagtgccactgcacttcagtctaggcgac

SEQ ID NO: 519116 - DNA, 201 bp, Homo sapiens
gttggagaccaacctggtgaacatagtgaaaccttgtctctactaaaaatacacaaattagccggacgtggtggtgggtgcctgtaatcccagctacttcrcttgaacccgggaggcagaggttgcagtgagccaagaccgtgccactgcactccagtccggaagacccagcaagactctgtgtcaaaaaaaaaaagaagg

SEQ ID NO: 519117 - DNA, 201 bp, Homo sapiens
aattgacattttaaaaatatacaaaaaacttaaacttgccttcaacttgactcaggtttaatggcttaattgttagataaaccatggacctctgagctatwtgcatcctgtactgatgactaatgatttcaccatcttcttctaagaagaagcaaccttttgattgcatgtgttgccagtcctgaaatgaaggaaaaaatt

SEQ ID NO: 519118 - DNA, 201 bp, Homo sapiens
ttaaaagttctataagagaagctcaaatcataaaattttgtgattttctgaggtgtcattcctggttttttattaggaatcaaatgatagggttttttttycctagaataatttctttaatactgtaactgatgttagtcagtaacattgtgtaataaaactcatctgctttttctgttctgatgaaccagagaatcctat

SEQ ID NO: 519119 - DNA, 201 bp, Homo sapiens
cagtaatcttaaatgcaggtaaattggtgagaaagtaaattaaaacaaatagctagtcaataagtaggctcctccaaattcacatatgaatgccatttcartaaatgggttttatatggaatttttctttggaagacacactggtatttaacaaaacagaaatttaccatttagaaaacttgctacatgctttttaaaaat

SEQ ID NO: 519120 - DNA, 201 bp, Homo sapiens
actataaacacctctacgcaaataaactagaaaatctagaagaaatggataaattcctcgacacatacaccctcccaagactaaaccaggaagaatttgamcctccgaatagaccaataacaggctgtgaaattgaggcaataattattagcttaccaaccaaaaaaagtccaggaccagatggattcacagccgaattct

SEQ ID NO: 519121 - DNA, 201 bp, Homo sapiens
gggcaaaggatatgaacagacacttctcaaaagaagacatttatgcagccaaaagacacatgaaaaaatgctcatcatcactggccatcagagaaatgcaratcaaaaccacaatgagatatcatctcacaccagttagaatggcaatcattaaaaagtcaggaaacaacaggtgctggagaggatgtggagaaataggaa

SEQ ID NO: 519122 - DNA, 201 bp, Homo sapiens
atggaatactatgcagccataaaaaatgatgagttcatgtcctttgtagggacatggatgaagctggaaaccatcattctcagcaaatatcgcaaggacaraaaaccaaacaccgcgtgttctcactcgtaggtgggaattgaacaacgagaacacatggacacagtaaggggaacatcacacaccagggcctgttgtggg

SEQ ID NO: 519123 - DNA, 201 bp, Homo sapiens
cacgttgtgcacatgtaccctaaaacttaaagtattaaaaaaaaaaaaaaaagaagtgccttttgcctcccgccatgattctgaggccttcccagccttgkggaactgtaagtgcaattaaacctctttttcctcccagtctcaggtatgtctttatcagcagcatgaaaacagactaatatacctcttctaatgaaggaa

SEQ ID NO: 519124 - DNA, 201 bp, Homo sapiens
ttgggtggggctgattgcagcatcttagaatgtggcatttcttttgtttagaaatggtgttaaataactctaaggagtcaggaattattacaagcaggttkgtttgtttgtttgtttgtttgtttgtttgtttgttttttgagacagaatctccctgtgtcgcccaggctagagtgcggtggcgtgatcttggctcactgc

SEQ ID NO: 519125 - DNA, 201 bp, Homo sapiens
aattattacaagcaggtttgtttgtttgtttgtttgtttgtttgtttgtttgttttttgagacagaatctccctgtgtcgcccaggctagagtgcggtggygtgatcttggctcactgcaacctctgcctcctgggtccaagtgattctcgtgcctcagcctcctgagtagctaggacaacaggcgcgccaccatgcctgg

SEQ ID NO: 519126 - DNA, 201 bp, Homo sapiens
gtgatttacccaccttggcctcccaaagtgctgggattacaggcatgagctgccagcagttgtaaattattatagaagtggttgtgacatctattttcttscgcgcgcgcgggtgtgtgtgtgtgtgtgtgtgtggtgtgatccacagctcactacagcctcaacttcctgggtttaagtgatcttcccacctcagcctcc

SEQ ID NO: 519127 - DNA, 201 bp, Homo sapiens
caccttggcctcccaaagtgctgggattacaggcatgagctgccagcagttgtaaattattatagaagtggttgtgacatctattttcttgcgcgcgcgcgggtgtgtgtgtgtgtgtgtgtgtggtgtgatccacagctcactacagcctcaacttcctgggtttaagtgatcttcccacctcagcctccagagtagctg

SEQ ID NO: 519128 - DNA, 201 bp, Homo sapiens
agtgagtttaagtaagagctgagacattttacaacatataaaaataataggccgggtgcccattattatctactaaaaatacaaaaattagctgggcatgktggcaggcgcctgtggtcccagctacacaggaggctgaggcaggagaatcacttgaacctgggatggggaggttgcagtgagttgatatcgtgccactgt

SEQ ID NO: 519129 - DNA, 201 bp, Homo sapiens
aattgtgatttaattatgtatggatcttgctacagctgatttttctcttctctcaaataatttaataccttaatataggtattactttggacataaatgtraacttttggcacttattttaaaatgcaactgcaggctttgttcccttactatcccatccattaaatagaaattatggcctgacttgccttcagctactat

SEQ ID NO: 519130 - DNA, 201 bp, Homo sapiens
gtttcagaggtgctggcaatgttctgttttttgacctacatagtggttacactgattcactctagttattcatcagactgcacatacatgtttcatatgtrctgtaatatatatatctcacatatagaagtctcgaaacagaattttgtccagaattctgtatgagattatgtcatttgtaatcattacattgcttatcct

SEQ ID NO: 519131 - DNA, 201 bp, Homo sapiens
gtttcatatgtgctgtaatatatatatctcacatatagaagtctcgaaacagaattttgtccagaattctgtatgagattatgtcatttgtaatcattacrttgcttatcctaatatgtcatcttgtacatgttttaaaaataaaaaagcttgatttttatgaagtaacttaagttcaaaataaatgagaaaatatgacgt

SEQ ID NO: 519132 - DNA, 201 bp, Homo sapiens
taaaatattatacaaaacataatataaaatttaaattacattttcaaggacatttttggtgttactcacttcccatcacacttatgataagatccaaaacmcttatcatgacatggaaggccatatatccatctaacacccaaacacctcatctgcctcattttctaccccttttttacactactttagccactcttacct

SEQ ID NO: 519133 - DNA, 201 bp, Homo sapiens
cttatgataagatccaaaacccttatcatgacatggaaggccatatatccatctaacacccaaacacctcatctgcctcattttctaccccttttttacaytactttagccactcttaccttcttgctatttgtcagtcatgctgagccccttcttgccacaaggtcttgcagttctctccacctggaataatcttcctcc

SEQ ID NO: 519134 - DNA, 201 bp, Homo sapiens
gtaatgatacacagactttcatttagcttccctgtaaatctcttggatgggcatatatatggactaacaacagatgctggcattacctcagacccaattgcccttaacataatcaacatgaccttggatggtgatgactgctaaagaatagaaatgaaagaaatgttatacagcatttagacaagttacactttgagacag

SEQ ID NO: 519135 - DNA, 201 bp, Homo sapiens
gtcatttgcctgtggtttacagagcactctgactgttatctcagtgagtgcttatgcctgtgaggtaggtacaccattgttaccatctccattcactgctsaggatcttgaggcataagaggtcaagtaacatgcctgtaatgaaggggcgaagctggcgtcacctcagggcctctgtctcatatcctgtgcccttgcctc

SEQ ID NO: 519136 - DNA, 201 bp, Homo sapiens
gttagcttctactaagaaagtaaacggatttaaatatggttattttaatgtgtatttatttgaatcagtttgttcttaatattcttgcataaaagtcagarccaaaaaaattgtcagtgatatgtgaatgaaatgacatttctattttttctgatgaagtgatagataatacaatctaaagtgactttagcaatgtgcttg

SEQ ID NO: 519137 - DNA, 201 bp, Homo sapiens
aaacggatttaaatatggttattttaatgtgtatttatttgaatcagtttgttcttaatattcttgcataaaagtcagaaccaaaaaaattgtcagtgatrtgtgaatgaaatgacatttctattttttctgatgaagtgatagataatacaatctaaagtgactttagcaatgtgcttgacttttacttctctctctcag

SEQ ID NO: 519138 - DNA, 201 bp, Homo sapiens
gggggaaagagtttaagcttcattttgttttaagtcatggcatgtgtggccttgattctaaactctgtgtttgaataaagttgtttttggctggtggtttygaagttttagaaaatgggagtgtatgagtagatgtgaagtggttacagtggtttagtcacagcaccctgggcctgagaatcttagccagagggactctaa

SEQ ID NO: 519139 - DNA, 201 bp, Homo sapiens
ggaaggattcagggttgttttcctttgtattcctttaaattatgggtaccttcaagctttgtcagatgacttatcagcaggagattctatgtctttacatkgtgacattttggaaatacatgttaataaaaaatgagctatgttaggtgcagtacaaaatggtttcaaacttttataagttagggtttgttttatttgttt

SEQ ID NO: 519140 - DNA, 201 bp, Homo sapiens
cacccaggtattaagcctagcacccattagttatttttcctgatcctctccctcctcccacccttcaccctccaattggccccagtgtgtgatgttccccrctgtgtgtccaaacatatcttatttgtatgtcttattgaacctgggctcagggaggtgaaaggatttattatggcagagcctttaacgggtccagcactt

SEQ ID NO: 519141 - DNA, 201 bp, Homo sapiens
actcttaagacaggacctgagtctcactcaccactctatgggctcgtggggaggacagtgcccagcacggagtcagcgtgaataatgcctgtcaagtgaaccaggtagcaggagctgctggatggtgggtgcctactgtggcccagtcagtttatgtacctacctcatttatttcatctacacagtagctttttgtagata

SEQ ID NO: 519142 - DNA, 201 bp, Homo sapiens
ttgataagaattacttgtgattagtgcattaaagttctaacctgagcagtactgacttgacttctctttatattaccaatactatttagagataaatgggyattcctaaagtgtctgaaatgttctgtctgttaaggaggtcagtagtctactttgtcacttttttttctttaccagtttcatttttggacagatggtaca

SEQ ID NO: 519143 - DNA, 201 bp, Homo sapiens
agctgtgccaagagaatgaggaggatttccagtgagaggcacgaatatgtgccaaagacctatggtgggaccaacaccctgcagctggtgcagagagaacraaggtggaggctggtgaggcaggaaggaacctggtcaagcagggccttatgtgctttattacttttgggccttataatgcattaggggaagttgaagttt

SEQ ID NO: 519144 - DNA, 201 bp, Homo sapiens
tgaaggacacaactgtggcccccatttttctagtgaggaaacaccttcatggaggcactgtggcttcccccattcacattgttaaccctggtgccatgttscctgaagtgcccatgcaaagaatagtccataaatggcttcggttccatccgcctctcatttcccaagtggctctgctgcctggcctcttgcctgtggaca

SEQ ID NO: 519145 - DNA, 201 bp, Homo sapiens
gatttgagtcctaggtaataaatacatgtgatctttcacaagtcacttagtgtttctaagctttagtttgcttatgagtagaataagaggaatgatacttsaaattattgtgaggattgagatcaagtattgaaagtgctttgtaaattgtaaaaagtatataattattgattttttattgatttttatattagtcaatgg

SEQ ID NO: 519146 - DNA, 201 bp, Homo sapiens
catacacacagtatattctaaaaattgtgggcatatgcttccattttaacaagcttgaaatacagcaatttgaatatctgattaagattattcaaatactrttttactagtaaaaggaataaaaacctgaagactaggcaagatagaagacttaaccatctgcttctgctctggggtttttgggaccttctcccaaaagca

SEQ ID NO: 519147 - DNA, 201 bp, Homo sapiens
aaaaataagttaaaaatttaaatgtcattatagggcattataattataagtaagagaatacttttaaaactgtgtctaagttttggttcacagtttgtcartgattcttctgtaacagaaaccaacatctggttggttttttgagttttttcacctgctggctgaccttacttgacatactgtattagactttctttatct

SEQ ID NO: 519148 - DNA, 201 bp, Homo sapiens
cttatctgtgtctgttatattgccagtagtgttttcttgggtctgggctttttgatgatagagctttctgagacctgggacctggcctgggaatttagtaytcgcttgctttctgggctggagaaagactgcctctaattatacagtttctcctatgcatagaggttatattcataaatacagtgtacactgaatctttat

SEQ ID NO: 519149 - DNA, 201 bp, Homo sapiens
ctggacttggaaccaggacgagccgatgtgaggctgtcctctgccacttactagctctgtgactttgggctcataattgagccttatttttttctcaattktaaatggactgtgtagtacctgtcacagaggaagttttgtgaagcttaaatgaggtagaacctacaaaatagcttcagacagtgcctgggatccagcagc

SEQ ID NO: 519150 - DNA, 201 bp, Homo sapiens
ggacgttgaggtgggaggattcagcattgagcctgggaggccaagattgcagtgagccaagattgtgccactgcactccagcttgggtgacagagtgagamctgtctcaaaaaaacttatatataatttttatatgtatatggccaccctaccaattaaacagatctaagtggaagctcattttaccttatccagtggaac

SEQ ID NO: 519151 - DNA, 201 bp, Homo sapiens
ttctcaaagtgtttagagtcagaagcattccattgtttaacttaaaccttttatttgaagcatctatggtcattctcttatattaaaattgttccctcttsatttaacctcactttccataaggcagcgagtagatcgtgtttatttttgaatccctagtgcctggccccttgtctgaggtaggggattcatagtgtttgg

SEQ ID NO: 519152 - DNA, 201 bp, Homo sapiens
atttttgtaattttagtagagacagggtttcgccatgttggccaggctggtctcaatctcctgaactcgtgatccccccacctcggccccccaaagttctgggattacaggcgtgagcaaccacacctggcccagatttcttatttataaagtgccatgatgtctacctcacagtgttggtatgagcgttaaatgagatgt

SEQ ID NO: 519153 - DNA, 201 bp, Homo sapiens
cagaaccctgatgatacaggaaggatgatgacagtgactaagatgtaatgccagtcataatcacggcggcaaccagtcagggagcgttttactccataccrggcactgaaggcagccgttcccttgcgtcatcccattcttccacacggtaacctatgaaggacacaactgtggcccccatttttctagtgaggaaacacc

SEQ ID NO: 519154 - DNA, 201 bp, Homo sapiens
ctgaatcaaaccactaggttttatcaatgcttcatagagtttacactgttttaataggccctttctggctatattaatgtgtctcattcctctggcctgaytcaaggttagagaaggtttagaacatttggaattgattgatatttatcttcaagaaacacacctttcagcctgtttcattgaaagcagcctatataaatg

SEQ ID NO: 519155 - DNA, 201 bp, Homo sapiens
agaacatttggaattgattgatatttatcttcaagaaacacacctttcagcctgtttcattgaaagcagcctatataaatgactgagcttcatatgacacygtcttccaaggaatgaaagaaatctaaccaccagctcaacattcctagctttccaggagagggcattcatctgatgcagttcttaaaactgtgagcaggt

SEQ ID NO: 519156 - DNA, 201 bp, Homo sapiens
acttggcagcaagaaatgtccttgttgagagtgaacaccaagtgaaaattggagacttcggtttaaccaaagcaattgaaaccgataaggagtattacacygtcaaggatgaccgggacagccctgtgttttggtaactgaatcaaaccactaggttttatcaatgcttcatagagtttacactgttttaataggcccttt

SEQ ID NO: 519157 - DNA, 201 bp, Homo sapiens
atggatcacttcatgacagatgcagctttaatgaatagccaaagaccttgccaggatacagcagacagggtggatgcatcgccattcggctctgacagatracaaatggtggcatttgtgcaaattaatatacctgattaacaatggtgtatgttcctatgggggataagactgattccctaggtatcagtgacagtccct

SEQ ID NO: 519158 - DNA, 201 bp, Homo sapiens
ggtatggatccctcaaatgaatattcaaattagctcttacccatagcagtatttgaactgtttgctcagttaaattttattgtcctttctcaatgtacagkgcctatatatccatcaaagagtagcagattcattaagaatctttaaaaagaaggacattatttttacacagttgaatttcaggtgtcctatgcccatgcc

SEQ ID NO: 519159 - DNA, 201 bp, Homo sapiens
aaggcctctaggcaccacctcaagactccatctgcaccccttatgaacctacactctgctttccctcacactcctgcttttgagatggcaaaatcacttayggttctttttggctgcagtaatgtttcctgctattttggcagggcaaatgtatagcgtttcagatactttatgtgttaaattggccttttgtgtgttggc

SEQ ID NO: 519160 - DNA, 201 bp, Homo sapiens
ttatgtcctgataagataatagcatgctgttagaagatttattgtctgagatgtgaatattcatacaaataaatttttcttgttcattttcacatttaaarccattattttaagtggatggggaattggcttattaatggaatctcgctgaagaaggaacattggatgttctgtgattattgtggctcagtggtatatgga

SEQ ID NO: 519161 - DNA, 201 bp, Homo sapiens
gaaaacggggcaaagaccttacagtggtctccagggtagaagctgccacacagtacttttgcttttatcctgttggccaaacttactcacatggtcatatmttgccgcaaaggaagctggcaattgtagtcactattgtgagcattcttgtgcacagctaaaaattactgttgaagaagaggaaggacaatggcatacaat

SEQ ID NO: 519162 - DNA, 201 bp, Homo sapiens
acactgcagatacaacaaaactgtcacagccctgccttcttgatgcttatgttaagacaatgatagtgactgagaatggcgtagtagcagtgtaggtggcragaaatcgtgggatatgggacatattttgaagctaaagctgatagaattggtgatggtttagatgtgggatgtgagagaaagatgtgtcaagactgactg

SEQ ID NO: 519163 - DNA, 201 bp, Homo sapiens
cttgctttttagtgggagatggacatgaaattaaaatgctgattcttgccataagtctgttcaaagcttatgtgattccagtagaaacagcagcagaattygtaactaataatcagtcctttaacattgttggttccagaatgggctacatttttcaattacaacttgggtgcaaatggagaaaataaattcaggccatgt

SEQ ID NO: 519164 - DNA, 201 bp, Homo sapiens
tgagggactgagcaggtcatttgcttaagttaatagtggaggtggaactaaaaccaattgcttttcattcatttgtgtaatgttttcttgtcaacgctggccaagaaccctacactgtgctagacctgggaggctgaggtgagtgaaatgaggtcaaggccacaagagtcaggcccaaggagctctgggcaggtgagcgag

SEQ ID NO: 519165 - DNA, 201 bp, Homo sapiens
ttgtgtgcagtgtctcaggtggggatgtgaagagagataagatacggttcatgccctcaccatgcttgctttttagtgggagatggacatgaaattaaaaygctgattcttgccataagtctgttcaaagcttatgtgattccagtagaaacagcagcagaatttgtaactaataatcagtcctttaacattgttggttcc

SEQ ID NO: 519166 - DNA, 201 bp, Homo sapiens
tctcctagatgttcaccactattaagaatttattgtacgttcttctagattttaatatgcatgtgcataatcatattatacatgttgtgcatatgcatgakcatactatccatattatgcttttttcattttgcagaatgtcctgtgcatctttctgtgttgattcatatgcagctttatgttatcctttttgacagccac

SEQ ID NO: 519167 - DNA, 201 bp, Homo sapiens
aagatattgaaatgcttagtagatattgttttttttttccttgactggaactgtatatttcatcaagctgtaatcagtttaacaaattatggtcaaaataygagtgcttactgcatgctaaactctgttgggcattttacatgcattgactgacttaactcttaatagcccagtgagataaatgctatttttatctcccca

SEQ ID NO: 519168 - DNA, 201 bp, Homo sapiens
catcagctttacagtatcttgtgatgctttcatcagaactgttattccacgtctcagcatagcagtggggtcccagtagcaatagatacaagtcattttcsgtggctctatgggtgtgaagccactggcagtttccctggcttgttgtgtaggttaggctgttaggaggcttcctgttcacatgttgctaggactttcctc

SEQ ID NO: 519169 - DNA, 201 bp, Homo sapiens
gacttcctgacaggaaaaatagcagattttgtatttatatgatgtcgtccttttggctggaatccatcagctttacagtatcttgtgatgctttcatcagractgttattccacgtctcagcatagcagtggggtcccagtagcaatagatacaagtcattttcggtggctctatgggtgtgaagccactggcagtttccc

SEQ ID NO: 519170 - DNA, 201 bp, Homo sapiens
gtaagatttttggcatgctcagatgtatttgtgttacttctttggattcccctgaagtcccacaccttgcccaaggcagagtggtaaatggaaaggggagwgaggctacagctgagaaatgtgtttgagacctatctcacctctcactggccagttgactgtgggaacgccttagccgagtcttcccatctgaaggggctg

SEQ ID NO: 519171 - DNA, 201 bp, Homo sapiens
gaggggatcctgctgttgagtctgggaaaatgggcaggagtcacatatactggagcaggtaggaggagcatttcctctgcaccatcaggtgagcaaagatytagtgtgtactcagagttggaaagtggggtctggagacaatagcactggccgtaggagagaggcaggaactggagtgaagataggttagagccagcactc

SEQ ID NO: 519172 - DNA, 201 bp, Homo sapiens
acttgtgagcatgtctcaagttccatattcgaaaaatatgatttaaaagtgtttaggctagtgagaataacagagttaagagtcataattgtatttcaatyaatgaatacagttttggtgtgagctgggtctactttgctttttagtagtccatattacttgatagtaaagagacatgtgcgtttcagtagtatgtgtttt

SEQ ID NO: 519173 - DNA, 201 bp, Homo sapiens
agatggggtgcacgtgccagcttccctgtcagcagctcttgtgagcagcaactgctgctaacaagcttcccgaaaactaggaaaagagatacaccattaartaccaagcagtaatttggagacaaaagaaaacatcacatctgattggaatgccttacgttgcatccagatagtttggtaggaaggagaaataaaaatgtg

SEQ ID NO: 519174 - DNA, 201 bp, Homo sapiens
ttccttgctgtctgcctttttcctgcaagattcttcctgtctgcatactctttcctgcacaattgtgcttgtgattttccttcttcctggcctttattttyattttttttaaagaacagctgtacctttcctctctctttttcagtcttctccatttctgaaaactgagagcagattcctctctccttaatcccctctcag

SEQ ID NO: 519175 - DNA, 201 bp, Homo sapiens
gtattaaatataagaaaatgtagaatagaaggtagagggaatggcacatagtaaggatcaatatctttttgtgaaacttgtatgtcatatacacacatgtrtactacaaaatatattttttacggtggatcatggtcaaaaaagactgcaaagctgttttaagcatggctgtcagcataggttcctaggatatcagacaat

SEQ ID NO: 519176 - DNA, 201 bp, Homo sapiens
tttaaaaatgtattaaatataagaaaatgtagaatagaaggtagagggaatggcacatagtaaggatcaatatctttttgtgaaacttgtatgtcatatayacacatgtgtactacaaaatatattttttacggtggatcatggtcaaaaaagactgcaaagctgttttaagcatggctgtcagcataggttcctaggata

SEQ ID NO: 519177 - DNA, 201 bp, Homo sapiens
catgcagtacaagctcgatagatgttatagtattatttatctgagattttaagtgcctgttattcagcaaaattaccacacaaatacgtatggagttcctrttgtgtatcaggcatcaagcttgggaaaagctggaggttcactataaaataagatacaggccttgccttcccttgagggccttagggtatggtagggagt

SEQ ID NO: 519178 - DNA, 201 bp, Homo sapiens
atgacttttctcccctcattagtgtagtaacacatatttgatgcagaacacttagaaaatctctaaaagtgtgcaaaatgaagtaactactatcacaaacmccttggaatactcacaggtaattattcttgtaatgtcctccccatccattttgtcaccgtttctttaggattacatgtgtgcgtctatgcatcatagcta

SEQ ID NO: 519179 - DNA, 201 bp, Homo sapiens
attcagggaactcctggacagagcagagcaaaacctacgggagacctggctgtctcatgaatcaccagaggttcccaggttagaaggccacacactggctrcaaccatgtctcagccaggaacactgtccaggggagaggctgcttacatctctaccgcaccctgccacgtaaccacataacgacataaccaatcagcact

SEQ ID NO: 519180 - DNA, 201 bp, Homo sapiens
agaacgtatgcatacatctccatgtcttagaaacacctccacttccaaccccatgtactgttattttcatttcagaactggaattaggctgtggaagcatytgaattgttcccctccctatcatcttttctctttttacaaatacagttttaccaaaacaaacccagttataaaggcattactggaaagtttactgtactt

SEQ ID NO: 519181 - DNA, 201 bp, Homo sapiens
cagccttttcattttctaatagctattcctccctaaaggatgccaggaggaatatgtaagtatatttagatagaacgtatgcatacatctccatgtcttaraaacacctccacttccaaccccatgtactgttattttcatttcagaactggaattaggctgtggaagcatctgaattgttcccctccctatcatcttttc

SEQ ID NO: 519182 - DNA, 201 bp, Homo sapiens
tgttttcttttctctgaataattcttgtgacactgtctctccctccatctctttctgtttctttgtcatttttcccagctatccttttttccttgtcttgkcctcttctcccctccatcctaaaacctttgatcacaagctagtttcctttccacatcatctgctcccctctactaaacgctatttcgcccccacctgctt

SEQ ID NO: 519183 - DNA, 201 bp, Homo sapiens
acaagcgggagccactgtgcctggcctagaagatctgttttcttttctctgaataattcttgtgacactgtctctccctccatctctttctgtttctttgkcatttttcccagctatccttttttccttgtcttgtcctcttctcccctccatcctaaaacctttgatcacaagctagtttcctttccacatcatctgctc

SEQ ID NO: 519184 - DNA, 201 bp, Homo sapiens
accgtactataggtcagatgtgcaccatagcagcgtatacatggtatgtgtaaaatatataatacacagtcagatgctgtattaaattataagaaaaaccraagaggtgatttttcagttatcctgtaatgtcggatggagtgtgcctcccaggaaatgaagttttgtgttctgcttcctttcaaggtatgctccagaatg

SEQ ID NO: 519185 - DNA, 201 bp, Homo sapiens
gtacacagcagaggaactgtgcatcagggctgcacaggcatgccgtgagtactggcagctgcccagggctgggggtttcaccaacacactagttcagaagwtctgggggtctctgccccttgtagcgctgctgggcagaaagagttgtggactctggagtcaggttcctccctgcctctgccactgccacttgcacgtgac

SEQ ID NO: 519186 - DNA, 201 bp, Homo sapiens
taaatgatctaaatttggtttgccaggagctacagtgcatatttctggggagtcatagttcttgatgattatgatcaaaacagcctgaccgaacctggtcrgaagtctgtttgccctaagaggatatgagtgacccagattctttgtggatgagagagttccttatctttgcatatattgggtttagaaacagatggccaa

SEQ ID NO: 519187 - DNA, 201 bp, Homo sapiens
ttggtttgccaggagctacagtgcatatttctggggagtcatagttcttgatgattatgatcaaaacagcctgaccgaacctggtcggaagtctgtttgcyctaagaggatatgagtgacccagattctttgtggatgagagagttccttatctttgcatatattgggtttagaaacagatggccaaatgtatccgccttg

SEQ ID NO: 519188 - DNA, 201 bp, Homo sapiens
tcactggagtatctgtttgctcaggtaggaagtttgggcccaggagaagctggagtttgtgggatgggagaggcattgtagagctcagaccccctgctgcrgctgaacttggtggtgctagagtgctttaaggcctgttctgggtaagttcttgccacacctggacttgccccaagtgaggagaaaaaaggcagcatttca

SEQ ID NO: 519189 - DNA, 201 bp, Homo sapiens
ttttcctgccttccaggttctatttcaccaattggcatggaaccaacgacaatgagcagtcagtgtggcgtcattctccaaagaagcagaaaaatggctaygagaaaaaaaagattccagatgcaacccctctccttgatgccagctcactggagtatctgtttgctcaggtaggaagtttgggcccaggagaagctggag

SEQ ID NO: 519190 - DNA, 201 bp, Homo sapiens
acgggtgggctctcatggtttctcccccttgctcctagggacagtatgatttggtgaaatgcctggctcctattcgagaccccaagaccgagcaggatggrcatgatattgagaacgagtgtctagggatggctgtcctggccatctcacactatgccatgatgaagaagatgcagttgccagaactgcccaaggacatca

SEQ ID NO: 519191 - DNA, 201 bp, Homo sapiens
ctcacatgagttctgtttagtgggaaatgttagcacgtcagagggccgacttgcatactgcagcatatggatggcaaggctgaaagcagtgcagtacgtgttgagtgaatgagtgaactgccagcatctagtagctgacgtgtggagtgctcaccatgggtcagctgttcaggcgtttcacagattctaatcagtatcatg

SEQ ID NO: 519192 - DNA, 201 bp, Homo sapiens
tgaagattaaataatgcatatagagtgacaggcatgcagtacaagctcgatagatgttatagtattatttatctgagattttaagtgcctgttattcagcaaaattaccacacaaatacgtatggagttcctattgtgtatcaggcatcaagcttgggaaaagctggaggttcactataaaataagatacaggccttgcct

SEQ ID NO: 519193 - DNA, 201 bp, Homo sapiens
agttgtctaaatcaaagtggcaagtaatatttactaataattgtatcttatttgcaagccagcatctactcatggtagtgaaattgacagctgatgataatttttttttttttttttttttttttgagacggagtctcgctctgtggcccaggcgggagtgcagtggcgcaatctcggctcactgcaagctccgcctcccg

SEQ ID NO: 519194 - DNA, 201 bp, Homo sapiens
gaagggaacaagattggagccagggagtctggagccagggagtctggagccagggagtctgatttggctgcttcaacagctcaggccagagctagtgacagcatgaattaggacagggactgggagagtgacagtagggtttgagagaagtgagtaggttcaaggagtatataaggagattgggtgcggtggaatgccttc

SEQ ID NO: 519195 - DNA, 201 bp, Homo sapiens
caaggattccctccaaaagccagcccctctttatccacttgcttgccccagagggacaggttttggtgtagccttagtgtgacaaatacatataattgcattttttgtgtgtaagtttatcccacttattagcatttataattcagttttctaagtgaattgagcctttaatactaaactcttgagactgtgtaagacaca

SEQ ID NO: 519196 - DNA, 201 bp, Homo sapiens
aaactgctggtctctgccttctgtcagctgctctcaaaatgacctgacattggtctttctcaaaatcaacaatcactggcctcctctaacctgcattgtaragtcttggctactcagcatggtctagagggttgaccacgcctgcctctgtccactgctgtagccccatgtctggccactcaccccccaacgcaccctcca

SEQ ID NO: 519197 - DNA, 201 bp, Homo sapiens
acctttttactctgcaggaggataaagacctggtccatggaaatgtgtgtactaaaaacctcctcctggcccgtgagggcatcgacagtgagtgtggcccrttcatcaagctcagtgaccccggcatccccattacggtgctgtctaggcaaggtgtgtctcccctctcttccctctggccccaccccgagtcaggggcaa

SEQ ID NO: 519198 - DNA, 201 bp, Homo sapiens
gatgaagatggaaaaaaaaggaagacagacgcagttctttccctcatctctagtgaggatgtggacacaaaacaaatacatggatcaacacataacaattytaggctgtcataagtgccctgaggaaaagaaacaaggatgtgctaaaatgaataggacctggggagtggggggaggggacacgggagaccgtgccagaga

SEQ ID NO: 519199 - DNA, 201 bp, Homo sapiens
cccagaaaacgccttttattatctgccatttatcaactatccagaagactactaggaaacaagaaaggcttcgagccaagcaagatgtcatgaagttcatycatgcttttcttacagtggaataaaacctactttgatttgcttttaatttataaagacttttttttgacagtttatctaactggtttttaagccattagg

SEQ ID NO: 519200 - DNA, 201 bp, Homo sapiens
ggcctgaatttttaaaaagataattccagtttccttcagaatcagtgacatatttacaagatactaatataagcttagaattggcaagagcagctttattytgaggtctacaggaagataatgtgaacacatttgtcatcatcagtgtgctaaaatttccaataaaatttgaatctgtgggagtttattataatctctaaa

SEQ ID NO: 519201 - DNA, 201 bp, Homo sapiens
ccatgggagctttgtgaaatggggaggggcaagggtgtgtccctggaccgtctgtttgtggggcagctgtcctaggtgttgagacacacaccggtctgttytaagatgttcctactggatcctgtcagttcgccctccagcattcctggatttattgtgcaccatttatggctccacagtccactagatgaaattgtaaag

SEQ ID NO: 519202 - DNA, 201 bp, Homo sapiens
acaaggatacttctttcaaggtgcccaccaattcctaccttgcattggagggtgcactgtgtcaaatttgtatttttatcttaaataccaaatactcttaragtccatccatgggcctgtggagttgagggtaaatgtagaggcttatttggcctaataatgaaagtatggatagttattgccatggaggaggagggtgaa

SEQ ID NO: 519203 - DNA, 201 bp, Homo sapiens
cctagggacagtatgatttggtgaaatgcctggctcctattcgagaccccaagaccgagcaggatggacatgatattgagaacgagtgtctagggatggcygtcctggccatctcacactatgccatgatgaagaagatgcagttgccagaactgcccaaggacatcaggtaaagcttcccactggctgaagaattgattg

SEQ ID NO: 519204 - DNA, 201 bp, Homo sapiens
tgatgggtgagtgacataaggtacctctctttgtcttcatgggagaaataactggatttccccaagaatgaattaattcttccacaatacaagagtcttaraggtttaacaaggatacttctttcaaggtgcccaccaattcctaccttgcattggagggtgcactgtgtcaaatttgtatttttatcttaaataccaaat

SEQ ID NO: 519205 - DNA, 201 bp, Homo sapiens
acactgtctcaaaaaattaaataaatgaataaaatatgagactcattttctcctcctgttttattctcatgctaaaacaataatgcttgatacttactgarggttttctgtataataggtattatactatgttagttagcacttgtctaatctcagagaaccctgtgaagatgtaagctatttcatgaataaggaaaatga

SEQ ID NO: 519206 - DNA, 201 bp, Homo sapiens
ttaagatttcattttcaaagcatttcaaacaatttgcttacatagaaaaataacagtatagttttggggggaggaaggggtgggttacggtccttactacwaacaaacaaacaaacaccacttgatttgcacttcttcactgttgtgcccagtgattgataacggggcacaggccagtatggatggcatgtccactgtgct

SEQ ID NO: 519207 - DNA, 201 bp, Homo sapiens
ggccagtgccctgagctacttggtgagaatgtcctgatgtccataatggtcccaccagaaaccagagtgtcctgggaggggtggcaggaaggaggtgctarccaagcagctagaggggcctgtccttgggttccatggggccagggctctgtggttgaacaaaggtgtgcctggtgcttactgaagatggtcgtttggggc

SEQ ID NO: 519208 - DNA, 201 bp, Homo sapiens
gaccccattttaaacatgtaatttctggtcatttcccgaatagcaggtgcagggtgcccagaagcagttcaagaactttcagatcgaggtgcagaagggcygctacagtctgcacggttcggaccgcagcttccccagcttgggagacctcatgagccacctcaagaagcagatcctgcgcacggataacatcagcttcat

SEQ ID NO: 519209 - DNA, 201 bp, Homo sapiens
aaatttgaatctgtgggagtttattataatctctaaaatcattaatatattaccttaaaaataaaattgaatactttttttgcagagttttttttttttgktttttttttttttttttttttttgcagagttttatagcactcagaaccttttggttgctcagaacatagcttgaaaatcctgatctttcacatattgcag

SEQ ID NO: 519210 - DNA, 201 bp, Homo sapiens
tctgcaattctaagagaggggtgggggactatttcttccatgtagagtgtctcagcagcagcactactgaccttttggcccagatgattctttgctgtgakggcctgccctatgcattgtagggtatttaccagcatccctgcctccacccagtagatgccagtagcactctctccttagcagtgatgaccaaaaatgtct

SEQ ID NO: 519211 - DNA, 201 bp, Homo sapiens
acgttcaccgggacttggcagcaagaaatgtccttgttgagagtgaacaccaagtgaaaattggagacttcggtttaaccaaagcaattgaaaccgataargagtattacaccgtcaaggatgaccgggacagccctgtgttttggtaactgaatcaaaccactaggttttatcaatgcttcatagagtttacactgtttt

SEQ ID NO: 519212 - DNA, 201 bp, Homo sapiens
tgtttcattgaaagcagcctatataaatgactgagcttcatatgacaccgtcttccaaggaatgaaagaaatctaaccaccagctcaacattcctagcttyccaggagagggcattcatctgatgcagttcttaaaactgtgagcaggtggagagaatctagttcctttcttaaacacattcctgcagagggaggctgtag

SEQ ID NO: 519213 - DNA, 201 bp, Homo sapiens
attcataacacccatctattgtttactattaatctttcgaagtaggaaggttttctggcctcattcctgtggccccaaatccctcaccaaataagtatttyttagatgctttctggtagttttcttcaattttatgtgaatttcatctctccaactacattggtcagtagataataattgttttttttttttcactcctga

SEQ ID NO: 519214 - DNA, 201 bp, Homo sapiens
ttcattttcaaaatgtaggccgtttgtgggagtttgaatgtaacatcacagctctgaggttccctttccatccccagtttctctgatagagcagaggactytgaaaggaggccagtttttttattctaaccatgggaaatttgaaataattgttgacttcttttgcttattttttttggtccctaaaatatttgattggtc

SEQ ID NO: 519215 - DNA, 201 bp, Homo sapiens
catttagcaaatacttgttgagctcttgcagtgaatctcagagagtgaatagacagacaacaaaacaggtacaaatctgtcctcgtgtggaatttacagtmtagtggaagaccctgagggcatgttcagttttacagttgcagactatatgcatgtaaaagagtaaatctttgtgattgtagaatgtttcctagaaccctt

SEQ ID NO: 519216 - DNA, 201 bp, Homo sapiens
aggatatgtacatagaacagttactatcattgcacagaagtacaagattccagaaaacataatttgggaatgctaatttaattcttaccttcaaattgaaygcgatacttcatttctgttggtttgtgttcccatatgtagtatgagcaggttgaatgaattaatcaattactgtgtcactcctgactgtgacattttctg

SEQ ID NO: 519217 - DNA, 201 bp, Homo sapiens
cagaagacggtatgttatgcaaggctggggtccggtttaaagatttggtgactgtctagggtcataaaggccagtgcaaaacaggcactccgtggccttayctgggcgtctgacatgctagctggtggttcccacacactctcaaggcttccaagtcatatgtcaaatccctcagcagctgcagggctcctgaggaggcca

SEQ ID NO: 519218 - DNA, 201 bp, Homo sapiens
ggcctcaagcaaggaggcctcccaaagtgctgggattataggcataagccaccatacccagccctgtaaggctctttagagcagggataggtttattgcayagaatcccaaaatagagtgtcagcgtttctttggaccttaaatgggagtttccaaacagttaattgtgactagagaagctactgagatttgtgtctttat

SEQ ID NO: 519219 - DNA, 201 bp, Homo sapiens
gggactgggctatagtgcccagtctccttgaatttggactattcagtattaggactgtgatttccccttgcaagaataaggcagcagtaacaaacacttaygaaatctacctgtaagtggagatgttgagaatcgaatgaggaattggcaattccacctgacctggggctgagaagtttgtaggtggttcctttggtttct

SEQ ID NO: 519220 - DNA, 201 bp, Homo sapiens
tgtcgttaccctctgagctcctggagggtaggagccatatgcctattgaataagcacttgtcgaatgactgaagcagcaagcgcccgcacaccggtcccayggccccggctcagcagacgttggctgtctgagagctcggatcttgggtgctgtgctcagactcccccaatctcttccacagaaatctccaacctgctggt

SEQ ID NO: 519221 - DNA, 201 bp, Homo sapiens
acagagcagagcaaaacctacgggagacctggctgtctcatgaatcaccagaggttcccaggttagaaggccacacactggctacaaccatgtctcagccrggaacactgtccaggggagaggctgcttacatctctaccgcaccctgccacgtaaccacataacgacataaccaatcagcactcccctaggtgcatccta

SEQ ID NO: 519222 - DNA, 201 bp, Homo sapiens
gggtggaactgaaaagcctgggtctctgagaagatccctgggaggtcaggcaagggcccctgctctcaaaaggagactgctccccagtagccagacccctrcatcctccccctgtagggcccttcttccttcatgggacccatggtgggggtccaccatggctctggaagacagaacatgaccagaaaaccaattcacacc

SEQ ID NO: 519223 - DNA, 201 bp, Homo sapiens
tccatcccatacatgttggccactgcactctaccttattttccttcagtggcagttgttacctcctgagatactatgtttatttacataacataacatttrttcctggtctgactaccctcacctcccagaatatgagcttcccaaaggctggggctgcattgctcactgctttcttagcacacacagggtctgacacatt

SEQ ID NO: 519224 - DNA, 201 bp, Homo sapiens
ggccttgagaggctcacagactcatagggaaacagacacacaaagaatggcagagcaaggggttgagcatttgaaaagcgtcttctgccaatgtcccagcyatggttgtgcttcagggcccaggcactcgctcttcccttggcccagaatgcccttcctccagaatctgcacagcctccacttccttcaggtgctagtcag

SEQ ID NO: 519225 - DNA, 201 bp, Homo sapiens
agggttgtctgcctgcttctcagggcacttcagcctccggcactgaccactgttggtgagccaggacgccctgcccacatctgggtcccctttgccacaaytggcattcattttcctgccttccaggttctatttcaccaattggcatggaaccaacgacaatgagcagtcagtgtggcgtcattctccaaagaagcagaa

SEQ ID NO: 519226 - DNA, 201 bp, Homo sapiens
aaaaacttttgtgcagtgattttaatcttgttaaaattggccataccaaaatagccaaatcaaagtcatcacaatcaaattcatacttgtctcccctgccrggctttccatcattacttttacttaagtcttacccactgcagaaagccttcccaagccagcccttgccagtgtcagtcaccagagctaacaacatcctga

SEQ ID NO: 519227 - DNA, 201 bp, Homo sapiens
ctttcccatcatttcctatgtgtgagaacccccaccccacgtagcacaccttcacatactggggactttccacttgaggaattcacatgaatctggggatytgcattctccttgggtagtatcccctcagaagaaaatccagactccttagggggcatttgtagcctgggcccagttttcctccttacctcatcttttttg

SEQ ID NO: 519228 - DNA, 201 bp, Homo sapiens
cgaagggacttcgtatgtctgtactgttccccagtgcctggcatagtgctcagtcaatgttttgttaaatgaatgagcgggggagaacatctcctgagccycttcacacccaactctgtttaaaagagctctgatgctagagaaactgccaatctgattcgtctcgttgctgtgctgcgtttctaggcggcccctccctgt

SEQ ID NO: 519229 - DNA, 201 bp, Homo sapiens
ttacatccttgattcttgtataggtggtacagttttgtaaaggatcatcaagtattttggaagactcattggctctgccagtggcttagataaataaattygggcaagttattgatctctctcctcagagaaaaaaattgatgtgttttcttttatataaagagaaaaagaaaaagaaaaaatgtgatctgtaactcatta

SEQ ID NO: 519230 - DNA, 201 bp, Homo sapiens
tgttatgaggactaaataaaggagccaagcactgtgtggcagcactgaggcagggtttaatcagtgggagccggcactggaattatcgttttcactctgtrcaaagctgggctgggcactgctggttagccttgttttagtttttgtgtttaaagttcccgttagttcttagaatgctgtgcacctccatcagtggggggg

SEQ ID NO: 519231 - DNA, 201 bp, Homo sapiens
ctccattccatctatgccttagaactgccatagagacaacagagaaaggggacagtgcacagccccaggcagatactgtgtggaaaaaaagaaaatgaacyggccatttttagatggtctttttggattcagcttcccagttttgtgtatccatagctgagatttattctttacctttcccgggagcagaggtgtaaagga

SEQ ID NO: 519232 - DNA, 201 bp, Homo sapiens
aaactgttgcaaatctccaaaaaaattttcaatatacttattgaaaaaaaaatctgtgtatgaatggacttctgtggttcaaacccatgctgttcaagggkcaactgtagtagttaagagaacaggcttttgtagttttaggtcacctagcctcttggaatctcagttttcctcatctgtaaaatgaatgaaaccttcctt

SEQ ID NO: 519233 - DNA, 201 bp, Homo sapiens
gtcatttaagtttacctcatcttagtttgaggcctggctgcttatgaaaatatcagtaatagctgattattggcagtcattctccccccaacctgcctatktttcaggttcataaaattttaatcatgggcgtagaagtgagtgacttcataatctccctggtctttcccatcattctcttattgacggaggcaactggtg

SEQ ID NO: 519234 - DNA, 201 bp, Homo sapiens
tgggaaaaatccagtaatattgtcaagttattttgactaggccgcaatgtgtacaaataaccatctttagacagcagctttaagtgtgtttgtaattatcrgaacacctagatgtaaatcagtggttctaaagttttttttaaggctttgtttttttgttttctccctttccccttgagatttggtttatattgtttattc

SEQ ID NO: 519235 - DNA, 201 bp, Homo sapiens
taatatgtaaattatatctcaaagctgttttaaaaaggttctatcaactcgttttatgatgatgaagtagccatttatgatgccgtacagcctgatccctrctttacttatcccacctttaaccctcagaacaactctgaggggataggttggttattttaagaattgcttatcttgttagtagtacagcttgtttagaaa

SEQ ID NO: 519236 - DNA, 201 bp, Homo sapiens
caactgagtaaatacactagaatctgttgaattgtacacttaaaaattggtgaattttataatatgtaaattatatctcaaagctgttttaaaaaggttckatcaactcgttttatgatgatgaagtagccatttatgatgccgtacagcctgatccctactttacttatcccacctttaaccctcagaacaactctgagg

SEQ ID NO: 519237 - DNA, 201 bp, Homo sapiens
ctgctcagcaagtagcgtatctcaatatcttaataattattcgaaacttctcctaaaaagtttgacccctccttctgctgccgtgactgccctcccatgcrtggtgctgagttgaagtgagaagctgagtgttgctttgtggcttagtcaagttcccaagttgtgaaaaggacgaggctctcaacaacacaagcttttttt

SEQ ID NO: 519238 - DNA, 201 bp, Homo sapiens
tgtagagtaagtgaggtgggttgaacagctcctcacactcagcctgtgccctcccttccacccccaacccccacctttcctaaggacaggtccaggtggcygtgctgtggagccctaggactctggccaaatggttcaaagttcctgatacagtccatggctctcaccacacagtctggaaaacgaaagcccagaggagta

SEQ ID NO: 519239 - DNA, 201 bp, Homo sapiens
gccagtgccctgagctacttggtgagaatgtcctgatgtccataatggtcccaccagaaaccagagtgtcctgggaggggtggcaggaaggaggtgctagscaagcagctagaggggcctgtccttgggttccatggggccagggctctgtggttgaacaaaggtgtgcctggtgcttactgaagatggtcgtttggggcc

SEQ ID NO: 519240 - DNA, 201 bp, Homo sapiens
tgtcagcgtcacttctatggcgaagggacttcgtatgtctgtactgttccccagtgcctggcatagtgctcagtcaatgttttgttaaatgaatgagcggsggagaacatctcctgagccccttcacacccaactctgtttaaaagagctctgatgctagagaaactgccaatctgattcgtctcgttgctgtgctgcgtt

SEQ ID NO: 519241 - DNA, 201 bp, Homo sapiens
ctccaaatctacctgtggaaaaagtggagactctaactccaaaggggtaaagtagtaaaaatcacaatgaaagaccattgtcccttcatctcagtgactgyaattggaatgtgctcctgttgtttagagggggcaggcatcagtttcggctgtgagagcctggtttcagtgctgtgtcgggagcctgggtagtttggtgtg

SEQ ID NO: 519242 - DNA, 201 bp, Homo sapiens
agatttacagaaatgttacagagatggtgcaaaattactcttcatgcagcttcccctaatgttaatatcttacatacccatgcctgaccccattttaaacrtgtaatttctggtcatttcccgaatagcaggtgcagggtgcccagaagcagttcaagaactttcagatcgaggtgcagaagggccgctacagtctgcacg

SEQ ID NO: 519243 - DNA, 201 bp, Homo sapiens
ggggcaggcatcagtttcggctgtgagagcctggtttcagtgctgtgtcgggagcctgggtagtttggtgtgcctggccttgagtgtctggagtggggaarggaataacagtgatcaggtgggaaaggccatttgggttcagatttttaaagtccctgattccaggctgcagaacctacattttactgggggtggcatggg

SEQ ID NO: 519244 - DNA, 201 bp, Homo sapiens
agtgaattgagcctttaatactaaactcttgagactgtgtaagacacactgaacagtatgagtcagagagtgaggcagccagtctggaaagttcaagtctkaactgagattctgcttcaccctctaactggtttacaggaatgacctggattttattgcagccagtcaacccttgagcttctcaaatgttaaaatattatt

SEQ ID NO: 519245 - DNA, 201 bp, Homo sapiens
tcagtacttttatataaagagatatgtctttgatctttctgtttatgggtagtaatactgttagaatcagacctgtgttagaattacagacagttccatgrttaaaataagttacacttcagatatgtaagtgttggtgcacattcaaatgtggatatgcataaagaaaggctgggtttccagcccagtccacaaaagcca

SEQ ID NO: 519246 - DNA, 201 bp, Homo sapiens
ccaggtgagaggcttctgcctgcaaggccagacagcgagaacccctggccctcaggggaacggctgtgaggagcaagacttctgtgtgttccgtggcctaygatggggcttccctgataacagcacatgcatctttccctccagggccactttgggaaggttgagctctgcaggtatgaccccgaaggggacaatacaggg

SEQ ID NO: 519247 - DNA, 201 bp, Homo sapiens
gtataaggcacactgtagtgcttaatatgtgtaaggacttcctctttaaatttggtaccagtaacttagtgacacataatgacaaccaaaatatttgaaascacttaagcactcctccttgtggaaagaatataccaccatttcatctggctagttcaccatcacaactgcattaccaaaaggggatttttgaaaacgagg

SEQ ID NO: 519248 - DNA, 201 bp, Homo sapiens
ccaaaattattttcttactcttgatatttctgttattttttaaagttcccagatctaacatttttactgttgttacttctttctttttacaggtttatcarcttatgaggaaatgctgggaattccaaccatccaatcggacaagctttcagaaccttattgaaggatttgaagcacttttaaaataagaagcatgaataa

SEQ ID NO: 519249 - DNA, 201 bp, Homo sapiens
gcccggagttctataggatgaccttgactctcaaggatcttatctgtgtagagatgaagggcagttttatgggaaaatgagcaagttaagtggggtagcaytgggtagggaccagccttgtctgtgcctccttcattcctaaatcagatcattttcttgggaacagactccttgaccagcacaagcacaaggagtggttgg

SEQ ID NO: 519250 - DNA, 201 bp, Homo sapiens
aacttttgtttttaaatggaatccaatgaatgtattataatggaaaatgtcactttcccattaacttggtttgctacttgacagttatttgtgaatctctmaagtcttgctttcacaacgagcccggagttctataggatgaccttgactctcaaggatcttatctgtgtagagatgaagggcagttttatgggaaaatga

SEQ ID NO: 519251 - DNA, 201 bp, Homo sapiens
tcttttcctcatttaggttgtttgtagggatcatgtgagataggtacacataaacacacatcaaaaacaacttagtgcttaattgcatgactaaatatagragtaagggaggttacatggataaatcactttttcacttgatttttcttctgaaagtctattttatgggattgggtgaggtgcgtgcaaatttgttatatg

SEQ ID NO: 519252 - DNA, 201 bp, Homo sapiens
ttttctcttcatttgaatccagtacccatttaaaatgtgtccatccctctgcttggttaacttttgtttttaaatggaatccaatgaatgtattataatgkaaaatgtcactttcccattaacttggtttgctacttgacagttatttgtgaatctctaaagtcttgctttcacaacgagcccggagttctataggatgac

SEQ ID NO: 519253 - DNA, 201 bp, Homo sapiens
agtctggagccagggagtctggagccagggagtctgatttggctgcttcaacagctcaggccagagctagtgacagcatgaattaggacagggactgggakagtgacagtagggtttgagagaagtgagtaggttcaaggagtatataaggagattgggtgcggtggaatgccttcatttttggcttgggcaagtgggtgt

SEQ ID NO: 519254 - DNA, 201 bp, Homo sapiens
caagtaggccgagtttagagtttaacaggctaggcagccaacggcatggagcaggaaacatacagaagggttcgggcttggttttctggaagtcgtgagtrttcagaagaaacctgaaagattcatgcgggtttagacagacggttgctagacagcatgcgtgactaggaagaatgagacaagagcagtcgatttcccagg

SEQ ID NO: 519255 - DNA, 201 bp, Homo sapiens
aagcgtgagccaccgcgcccggcccgataatttttgaaaacagtcatttgcctgtggtttacagagcactctgactgttatctcagtgagtgcttatgcckgtgaggtaggtacaccattgttaccatctccattcactgctgaggatcttgaggcataagaggtcaagtaacatgcctgtaatgaaggggcgaagctggc

SEQ ID NO: 519256 - DNA, 201 bp, Homo sapiens
gtgttcaataatactggaggtcagtttgaagattaggtataatgtgattgcaatgtagtattgcttgcagaagagacagaatgattggaaaaccaaactcyccttgattactggtttttgtagaattctagttctaaaagaatcttagtgattttagtcagatccttgaatcttacatgaggctaagagaagttccatgac

SEQ ID NO: 519257 - DNA, 201 bp, Homo sapiens
tgtgaggaaacctggggtagacaggctccagacatgcagttagcaagcactgcctatggactggctagtgctgttgggtgcccaagtgtaaaaaggagtaytgtgaggttttcctgttcaagcaacgggagagacaagcctagctcctttctgctataggacctttttccccacacatgctgatccttttgctgagactgc

SEQ ID NO: 519258 - DNA, 201 bp, Homo sapiens
ttatattgcctctgacgtctggtcttttggagtcactctgcatgagctgctgacttactgtgattcagattctagtcccatggctgtaagtcctacttttmtcttcatttgaatccagtacccatttaaaatgtgtccatccctctgcttggttaacttttgtttttaaatggaatccaatgaatgtattataatggaaaa

SEQ ID NO: 519259 - DNA, 201 bp, Homo sapiens
ttggatttttatttaaagttactaaggagaaaagcctttttattgctacttaaatttccagttgattgtagaaatttcaccttaatctgtttggcatttaygtaaatacttgcaaagttaaacgttttgtttgattttattttatatagttgttcctgaaaatgataggcccaacccatggccagatgacagtcacaagac

SEQ ID NO: 519260 - DNA, 201 bp, Homo sapiens
gggtaatcaaaaatgtttagtcattgattcaatgtgaacgattacggtctttatgaccaagagtctgaaaatctttttgttatgctgtttagtattcgttkgatattgttacttttcacctgttgagcccaaattcaggattggttcagtggcagcaatgaagttgccatttaaatttgttcatagcctacatcaccaagg

SEQ ID NO: 519261 - DNA, 201 bp, Homo sapiens
ccagatacttcccagttatccttacaaccacttaataaaagaggtcagccttggatagttctgtctcagaaaggttcttttctcctcagctgtttatttcrttgttttgggactttacaacctctaaactttgtgttagctttttctttagcagttctcaaagtgtttagagtcagaagcattccattgtttaacttaaac

SEQ ID NO: 519262 - DNA, 201 bp, Homo sapiens
  misc_feature (1)...(201): n = A,T,C or G
taaagaggatccgtgacttgggagaggtaagttacacccgtgctgcttgctgctgatggcagagccctccgccatccacagcgccactctctgcacgtacngctgctctccattctttttcattctggggccaggtccatgagcgaaagcaccttactgcatttgggggccactttcatcacaagggattgtgtctttctc

SEQ ID NO: 519263 - DNA, 201 bp, Homo sapiens
ggactggctgccagcatttctggagctgcagggaagagggtgaaggctgtagcatcctggcccccagcactcagcatgtgtgcagatgccgtctttctgcrtgcccagaggttcccatgcttcacctgacatctctagttacaggaccctttgtcttatcctttccagaaactaaacctctagatatgtgtttccttataa

SEQ ID NO: 519264 - DNA, 201 bp, Homo sapiens
ttatagtcatgagccactgcgcctggccttttcctaaacattatcttccaacctttttagcttttgaaaattaagatattatttacctacagcaaagcttrtcaatgctaagtgttcctttggctgttttgacaatcatataggcttgtgcagttaccaccctaaacaaaatatagaacatttctatcaacctagaagttc

SEQ ID NO: 519265 - DNA, 201 bp, Homo sapiens
gtttcactatgttggtcagggtgatcttgaactccagacctcaagagatccccctgcctcagcctcccaaaatgctgggattatagtcatgagccactgcrcctggccttttcctaaacattatcttccaacctttttagcttttgaaaattaagatattatttacctacagcaaagcttatcaatgctaagtgttccttt

SEQ ID NO: 519266 - DNA, 201 bp, Homo sapiens
atgaattcaatttaatttagtgaatttaagaaaaagaaacaggagacgatactatcagcatatatacataacctaagtatattttttaaacttttgagtakatatatatatatatatatatatatatatatatatatatacacactatatatataaaggtcatgatataaaatatttttcttactaaaagttgcaactaaa

SEQ ID NO: 519267 - DNA, 201 bp, Homo sapiens
atttttttttttttttttttttttttgagacggagtctcgctctgtggcccaggcgggagtgcagtggcgcaatctcggctcactgcaagctccgcctccygggttcacgccattctcctgcctcagcctcccgagtagctgggactacaggcgcccgccatcacgcccggctaatttttttgtatttttagtagagacgg

SEQ ID NO: 519268 - DNA, 201 bp, Homo sapiens
tttttttttttttgagaaagggtctcactctgtcacccaggctggatggagttcagcggcagaatctcggctcactgcaacctctgcctcccggttcaagygattctcccacctcagcctcctcagtagctgggactacagatgcatgccaccacacctggctaatttttgtatttttagcagagacagggtttcactatg

SEQ ID NO: 519269 - DNA, 201 bp, Homo sapiens
agctgatgataatttttttttttttttttttttttttgagacggagtctcgctctgtggcccaggcgggagtgcagtggcgcaatctcggctcactgcaarctccgcctcccgggttcacgccattctcctgcctcagcctcccgagtagctgggactacaggcgcccgccatcacgcccggctaatttttttgtattttt

SEQ ID NO: 519270 - DNA, 201 bp, Homo sapiens
agctgttaaaaagcctgagaatattctcaatttttgatcttttgaatgtagcctgttttattctcttttggaagctttatagacccttgtttccaatgttmtgaaatttcccaggaatgccccaaacaggtctttttctccattgttttgatgggcctttccaacctggcaactggtagcctttggttctgggaaatcttt

SEQ ID NO: 519271 - DNA, 201 bp, Homo sapiens
ctccacgtcacttgcacttatgccttatgaaactgattcctactctacctccacccacttcctgttctgatccaatactagccagggtatttcattttctrgttgtctaaatcaaagtggcaagtaatatttactaataattgtatcttatttgcaagccagcatctactcatggtagtgaaattgacagctgatgataat

SEQ ID NO: 519272 - DNA, 201 bp, Homo sapiens
tgtgatctgaaccaaagtggttttggagtgttaaaaaatgtgtgtttaataagctaaaattatctgttaactgttccaagggtgatttttgtattttcaarcatgcacaattctaattaaatggcattgtgtaatcacttgtggtctcagtgtagtttataatgagttagaataatgaaggggtagtgagactggaagtta

SEQ ID NO: 519273 - DNA, 201 bp, Homo sapiens
aggccagtttctgtatgcagcgagtgcatcaggagccagctccgatttggggacttggccaccactgtcgctgtcaggtggcttggctggaacctgatctyacgtcttctaaagactcctcatgcatttgctcttttcagccatgctgtggggcctgtcctgtaacgtgagcccagggcttttagagaacggcagttgtcc

SEQ ID NO: 519274 - DNA, 201 bp, Homo sapiens
gccttgattctaaactctgtgtttgaataaagttgtttttggctggtggttttgaagttttagaaaatgggagtgtatgagtagatgtgaagtggttacastggtttagtcacagcaccctgggcctgagaatcttagccagagggactctaatttgtgacatagtcaccacagcaaccaatggaaatgtccccatgtgat

SEQ ID NO: 519275 - DNA, 201 bp, Homo sapiens
tcccaaagtgctgggattataggcataagccaccatacccagccctgtaaggctctttagagcagggataggtttattgcacagaatcccaaaatagagtrtcagcgtttctttggaccttaaatgggagtttccaaacagttaattgtgactagagaagctactgagatttgtgtctttatacagattttctgtagtctg

SEQ ID NO: 519276 - DNA, 201 bp, Homo sapiens
ctaggaatgccactactttgtaaattgatacgatatactatataagatactacactattttgtttgtaactttgccaaaagctgtttaccatttttataamtcacttgccaatgttggtgtgcatgtatttgtgtcatcaagaataatatgcaagtatctgactgcatttatagttattgcattcagagttgttctgttgt

SEQ ID NO: 519277 - DNA, 201 bp, Homo sapiens
cacttcatcttccaaaagtagcataagttcttgtttctaaaatttaaagtaataaacagttgaagaaaatttttaaaatgaaactattaaaaaaagaaaayagcaatcactgcattcttgtcatccctgaccactgttaacactttggcattttgtcttccagcctgtttgtatctctcttttttaaacaaaattggggcc

SEQ ID NO: 519278 - DNA, 201 bp, Homo sapiens
gacatgtacccatcattgtatcacacagagtattttcactgccctaaaaatcctctgtgctttgcctgttcagcccctgctgaccatgtgtatttgctgtsctggttttagatcatcattatggggttggaaaaatagcatcctataaaggtgtttgtggctttaagtgaatgtcagcagttctacagtcctgtccagtag

SEQ ID NO: 519279 - DNA, 201 bp, Homo sapiens
agctatgaagtagaaactggaatgcagtggtttcacttcatcttccaaaagtagcataagttcttgtttctaaaatttaaagtaataaacagttgaagaamatttttaaaatgaaactattaaaaaaagaaaacagcaatcactgcattcttgtcatccctgaccactgttaacactttggcattttgtcttccagcctgt

SEQ ID NO: 519280 - DNA, 201 bp, Homo sapiens
agctcgatagatgttatagtattatttatctgagattttaagtgcctgttattcagcaaaattaccacacaaatacgtatggagttcctattgtgtatcargcatcaagcttgggaaaagctggaggttcactataaaataagatacaggccttgccttcccttgagggccttagggtatggtagggagttaggctaaaat

SEQ ID NO: 519281 - DNA, 201 bp, Homo sapiens
atagagtgacaggcatgcagtacaagctcgatagatgttatagtattatttatctgagattttaagtgcctgttattcagcaaaattaccacacaaatacrtatggagttcctattgtgtatcaggcatcaagcttgggaaaagctggaggttcactataaaataagatacaggccttgccttcccttgagggccttaggg

SEQ ID NO: 519282 - DNA, 201 bp, Homo sapiens
acctgttgagcccaaattcaggattggttcagtggcagcaatgaagttgccatttaaatttgttcatagcctacatcaccaaggtctctgtgtcaaacctrtggccactctatatgcactttgtttactctttatacaaataaatatactaaagactttacatgcatatgccttttaatattaagatttcattttcaaagc

SEQ ID NO: 519283 - DNA, 201 bp, Homo sapiens
tcacgccattctcctgcctcagcctcccaagtggctgggattacaggctcccgccaccgcgcccggctaattttttgtatttttagtagagacggggtttyaccatgttagccaggatggtctcgatctcctgacctcgtgatccgcctgcctcggcctcccaaagtgctgggattacaggctcccgccaccacgcccggc

SEQ ID NO: 519284 - DNA, 201 bp, Homo sapiens
gctttcaatgtttcccatgcttttctgtgttcttgttcatttaatgcacttttcccgtgcttcatgctttccatctgtcagaattccatagctttcaaggmcccttcaaatgtccctggtctcttcctctgcccctccctaccccaacaagcggtgtgtatacacatagtcccctggtggtgtgtgatcctctgttccagt

SEQ ID NO: 519285 - DNA, 201 bp, Homo sapiens
cccatgcttttctgtgttcttgttcatttaatgcacttttcccgtgcttcatgctttccatctgtcagaattccatagctttcaaggccccttcaaatgtycctggtctcttcctctgcccctccctaccccaacaagcggtgtgtatacacatagtcccctggtggtgtgtgatcctctgttccagtacgtcgtgttctg

SEQ ID NO: 519286 - DNA, 201 bp, Homo sapiens
aggcagatcacttgaggtcaggagttcaagaccagcctggccaacacagtgaaaccccatctcttctaaaaatacgaaaaaaagaaaaaaagaaattagcygggcgtggcagcacgcacctgtaatcccagctactcaggaggctgaggcgggagaattgcatgaacctgggaggcagaggttgcagtgagctgagatgat

SEQ ID NO: 519287 - DNA, 201 bp, Homo sapiens
gatctgatgtagagggaacagaatgggggaaggccctgagggccagtagagctgcaaggagagaccatgtggctgcagaccagaggagggtgatggggaaygaggctggagaggcaggtgggggcagattgcatacacagagccttgtaggagctggcaaggggttatgctttaaccctgagtgtggtgggaagccatttg

SEQ ID NO: 519288 - DNA, 201 bp, Homo sapiens
ggagaatcagttgctctgtgcattaaagcagtattggctgctgcctcccttccttggaagtttttgttctgtttttttaatttcataactttttacaaaagttattcctatttattgaagacttagaatccagagaaaagacaaaaatcacttggactctcacaacctttgttaatattttcacgaatatcctctcaatcg

SEQ ID NO: 519289 - DNA, 201 bp, Homo sapiens
gctgggtcaaatggtatttctagttctagatccttgaggaattgccacactgtcttccacaatggttgaactaatttatactcccaccaacagcataaagygttcctatttctcacatcctttccagcatctgttgtttcctgactttttaatgatcgccattctgactggcatgagatggtatctcatcgtggttttgat

SEQ ID NO: 519290 - DNA, 201 bp, Homo sapiens
atgatcgccattctgactggcatgagatggtatctcatcgtggttttgatttgcgtttctctaatgaacagtgatgatgagcttttttcccctatgtttgytggccacataaatgtcttcttttgagaaatgtctgttcatttcctttgcccgctgtttgatggggttgttttttccttataaatttgtttaagttttttg

SEQ ID NO: 519291 - DNA, 201 bp, Homo sapiens
tcaggtgatccgcccgcctcagcctcccaaagtgctgggattacaggcatgagccactgcgcccagcctagagcaaaattaagaggaaggtacagatctcrcacttgcataacctccctcataaccaacatttcccaccagaatggtacatttgttgcacttgatgaacctacactgacatcattatcacccaaagtccat

SEQ ID NO: 519292 - DNA, 201 bp, Homo sapiens
gtttcactgtgttagtcaggctggtcttgaactcttgacctcaggtgatccgcccgcctcagcctcccaaagtgctgggattacaggcatgagccactgcrcccagcctagagcaaaattaagaggaaggtacagatctcacacttgcataacctccctcataaccaacatttcccaccagaatggtacatttgttgcact

SEQ ID NO: 519293 - DNA, 201 bp, Homo sapiens
tttagttcctgctatgtccagacactgtgctgagtgccttcacatacattaactcttctaatgctgaccaaaatactacggagcatgtgttacgatcattrttttacagatgaagaaattgaggcacagatgggataaataacttacccaggatttcccagctggcacgtggtagagctgggattcaaacacacgtgttct

SEQ ID NO: 519294 - DNA, 201 bp, Homo sapiens
cagaccaggttccagacatggctatttttatgcctacagatatcatggtggaagagtttgtggaagggggtcctctggatctcttcatgcaccggaaaagygatgtccttaccacaccatggaaattcaaagttgccaaacagctggccagtgccctgagctacttggtgagaatgtcctgatgtccataatggtcccacc

SEQ ID NO: 519295 - DNA, 201 bp, Homo sapiens
aaaacaaatacatggatcaacacataacaattctaggctgtcataagtgccctgaggaaaagaaacaaggatgtgctaaaatgaataggacctggggagtsgggggaggggacacgggagaccgtgccagagagacagagctctttcttaatagggtcgtcagggtacgcccatcagaggtgagcacataagcagacccaa

SEQ ID NO: 519296 - DNA, 201 bp, Homo sapiens
cattatgagtggttttaattttcttattctcccctccttttttttaaacaaaaaacttacattaattttattagaaaaatatagtaaaaacaaagtgaagrgggagaagtagaagagctcagatggatgttaatggaaagatgcgaaatggagggagaaaagaagaaatgctgttgatggagcacatcctggatatcaggc

SEQ ID NO: 519297 - DNA, 201 bp, Homo sapiens
cttcttccctgtggaatccaacaatgtgagctgttccgtgtactcacacaggagtcctgttgagagggaagttttgccgtgtgagcggcctgacctctgcrtcacagtgtgttgtagaacagcagcagtggtggcggttgttcccagagcccttgttctctgtgtcaggccctccgccaaggctttccaggccttgtgaca

SEQ ID NO: 519298 - DNA, 201 bp, Homo sapiens
ccttactgtataattaaaggtaaagatacagaatgcatctctctacctccaactattgtgtagttagttgtagctaccaatgaaattatcaggtcaatgcaaaaaaacccttgtttttatttatacagggtacagggatggtctgattagttgttctcaagtaactaactggggggtggggggcatttagtagtgttgttg

SEQ ID NO: 519299 - DNA, 201 bp, Homo sapiens
gagtctcgctctgtcgccaggctgtagtacagtggcgcgatctcggctcactgcaacatccgactccctggttcaagcgattctcctgcctcagcctcccragtagctgggattacaggcatgtgccaccacacccagctaatttttgtaattttagtagagacagggtttcgccatgttggccaggctggtctcaatctc

SEQ ID NO: 519300 - DNA, 201 bp, Homo sapiens
attcttagccagcttctcccaccagccctgctctgcatcctgttaggttttctaaataaacctcacatccctgccaggttggcccagagaacaaggcttgrcagtgcctctggacagccaaggccagaggattgatgttcagggcctggggtggcgacagtggtgagctttcctgggtccactggctttcccctcaacaga

SEQ ID NO: 519301 - DNA, 201 bp, Homo sapiens
gcttagaagttcaaaacgggggtaggagccttgtgttcttttttcttccctggaaagggaagtgtttttgagctgtggaacttcgagtaaaacctaacttmtttgtaccttgttttgctcatctgtaaatggggataacagtggtacccaccttatgggatgttcaggattcaatgaatataaaacatttggcatgatgcc

SEQ ID NO: 519302 - DNA, 201 bp, Homo sapiens
caaagttcctgatacagtccatggctctcaccacacagtctggaaaacgaaagcccagaggagtaaaaggactcacccaggattctacagactattagagygacacagtcaaatcttgagcagagatcggctgccttcatttcccctttgttccagcatagtgctaaatatgggtatttcccagagctgaaaggaagagag

SEQ ID NO: 519303 - DNA, 201 bp, Homo sapiens
atctttgtcatgtagtcagagacatgcagatcctttgaagtgaattctggcaccacaattttgtagagacagtcagtgtagtacagcatgagaagggcatmcgatgtgtcatttgaataacttctgttgaagagcaggcgtcagcccatggcagagattgctgaggggatggtgcagacgagaggcaggtagtattggggc

SEQ ID NO: 519304 - DNA, 201 bp, Homo sapiens
tactcagaatttttttctccacatatgatcttagtggaccctgcatgtagagtaagtgaggtgggttgaacagctcctcacactcagcctgtgccctcccytccacccccaacccccacctttcctaaggacaggtccaggtggccgtgctgtggagccctaggactctggccaaatggttcaaagttcctgatacagtcc

SEQ ID NO: 519305 - DNA, 201 bp, Homo sapiens
gggtccacaacccgagcttctcgcccctctcatttcgtaatggctgccaagctcttccttcactgttgtttttctttactgctctgtggattcatcctgakgagtcacgacaacctctgcttgcagtgatgccacgtctcccagttaggaaacgaccctgctcttcactgcctggttccttggtgtggctgcctccagcct

SEQ ID NO: 519306 - DNA, 201 bp, Homo sapiens
ttcttgattcacaaataaaaggtattcttttatctttctgaagacattaatttttaaagttttctctctgtgtaatgttttctctgagttgcttttttctrtctccatgtctgcattagaggctttcctcagacatatgtttaccttggctgtttgtttatgattaaacttggaggaaggctgagcatgtgcctcgggctt

SEQ ID NO: 519307 - DNA, 201 bp, Homo sapiens
tctctggaggcctggggaccacgagctggggcagggagccctcttgcctttgccccatcccattgatagtccatgttcccattgaggacccattcccagayggtccatcacttcagggcacagagaggtcacccagccttctgcttcttccctcagggcgagcaccttgggagaggcacgagaacacacatctattctggg

SEQ ID NO: 519308 - DNA, 201 bp, Homo sapiens
gctgcagggaagagggtgaaggctgtagcatcctggcccccagcactcagcatgtgtgcagatgccgtctttctgcgtgcccagaggttcccatgcttcayctgacatctctagttacaggaccctttgtcttatcctttccagaaactaaacctctagatatgtgtttccttataataaaatagtcactagccacatggt

SEQ ID NO: 519309 - DNA, 201 bp, Homo sapiens
tgcaagcctcttcacagggtagcacagcctgtgagtagaggagctgcctgggggctcctctcttgagtcttctctggaggcctggggtgggacccatgtgkctggctgttgatggccctgtttgcagtgtcctgacatgttaggactgtgttttggccaaaggctgttcctaggggtagaaagcaaggagccgtttaggga

SEQ ID NO: 519310 - DNA, 201 bp, Homo sapiens
aaatggatgggaaacagatggttccagtgtgagaaactgtgcctacctgtgccagagggcttcagataacacatggatccaccagatgggtttctacgcayccccccgtgtgcctgagtctgtaccaggagcctccatccctgtttcctggtttgattcttaccacagccctatgaggtcagtaccattattacctccatt

SEQ ID NO: 519311 - DNA, 201 bp, Homo sapiens
tatatgcctattcctattttcccagcatagttatgaatagttcctgatgttttaatatctcctagttggtacagtaaattatatggacaccccagcctggrcaataaggcgagaccctgtctctacaaaaaaatagaaaaattagccaggcgtgatggtgtgcacgcctgtagtctcggctattctggacgttgaggtggg

SEQ ID NO: 519312 - DNA, 201 bp, Homo sapiens
catcaccccaggctccaccttcatcttcacattgccatctcctctgtgaggttgccagggcaaatgcaggtgtactttgcaccactaattttaaatcctarcgtgcatgcacacacatgagcacacacactggataaatggatgggaaacagatggttccagtgtgagaaactgtgcctacctgtgccagagggcttcaga

SEQ ID NO: 519313 - DNA, 201 bp, Homo sapiens
aaacattaagctcatttccgtgatacctccacttctgagggtttatgatccatgattctttgtagttggcagtgggcacacattcttccttggtgctctgyggataaactgcccagtcccgaggcaagacctgctttagaagcaaaaggataatttcttttaagtctactctggccagaagatagagctggcgtttgttgg

SEQ ID NO: 519314 - DNA, 201 bp, Homo sapiens
aaaatttccaataaaatttgaatctgtgggagtttattataatctctaaaatcattaatatattaccttaaaaataaaattgaatactttttttgcagagttttttttttttgttttttttttttttttttttttttgcagagttttatagcactcagaaccttttggttgctcagaacatagcttgaaaatcctgatctt

SEQ ID NO: 519315 - DNA, 201 bp, Homo sapiens
gaatctgtgggagtttattataatctctaaaatcattaatatattaccttaaaaataaaattgaatactttttttgcagagttttttttttttgttttttktttttttttttttttttgcagagttttatagcactcagaaccttttggttgctcagaacatagcttgaaaatcctgatctttcacatattgcagcctcag

SEQ ID NO: 519316 - DNA, 201 bp, Homo sapiens
cccttgtttttatttatacagggtacagggatggtctgattagttgttctcaagtaactaactggggggtggggggcatttagtagtgttgttgttgtggttttttttttccataagaacaatcaaatgaggaaactaatagcactgtgggctgcttagggaatttttgtcactgaaagaactgctgcaagccctgtgtct

SEQ ID NO: 519317 - DNA, 201 bp, Homo sapiens
ttcctaggcttaagcaattctcgtgtagttctcagcctcccaagtagctgggactacaggtatgtgccaccacacccagctaatttttatgttttatgtaragatgaggtctcgccatgttgcccaggctggtcttgaattcctgggctcaagtgatccacctgccttggcctcccaaagtgctaggatgacacatgtgcc

SEQ ID NO: 519318 - DNA, 201 bp, Homo sapiens
ttaggaattcagacatgtgactgtctggattgccccctttaattttcttatctcttttctcctattttcaaactgttcttttctaacctatttcctaaacttttttttttttttttgagaaagggtctcactctgtcacccaggctggatggagttcagcggcagaatctcggctcactgcaacctctgcctcccggttca

SEQ ID NO: 519319 - DNA, 201 bp, Homo sapiens
cctatttcctaaacttttttttttttttttgagaaagggtctcactctgtcacccaggctggatggagttcagcggcagaatctcggctcactgcaacctytgcctcccggttcaagcgattctcccacctcagcctcctcagtagctgggactacagatgcatgccaccacacctggctaatttttgtatttttagcaga

SEQ ID NO: 519320 - DNA, 201 bp, Homo sapiens
gagatcctcttgcctcatccttccaaagtgctgggattacaagcgggagccactgtgcctggcctagaagatctgttttcttttctctgaataattcttgkgacactgtctctccctccatctctttctgtttctttgtcatttttcccagctatccttttttccttgtcttgtcctcttctcccctccatcctaaaacct

SEQ ID NO: 519321 - DNA, 201 bp, Homo sapiens
tttctgggctggagaaagactgcctctaattatacagtttctcctatgcatagaggttatattcataaatacagtgtacactgaatctttattttaacaaggggtgtgtgtgtgtgtgtatgtttgccatgaacatacacacagtatattctaaaaattgtgggcatatgcttccattttaacaagcttgaaatacagcaa

SEQ ID NO: 519322 - DNA, 201 bp, Homo sapiens
tcatgcattttaccagtaagccatgctttccgcttactgcaaactagtgactccaaacttctgcaaactgtgaaactattgtgaacttgtgtgaatgtatkgaagttggcactgattagacgtttgaacttctttccttgtcctgtgttatgcatggtaatctgccatttgctgttcctagctgtatggtcacccttagag

SEQ ID NO: 519323 - DNA, 201 bp, Homo sapiens
attactgttgaagaagaggaaggacaatggcatacaatcagctgtctcttccaccactgcgtattggggtctggtgcccattcactcccctcttctgactyttggctagtagctaatccttttccctgtccttacctttatcctttaactcccttcttcctattatttaaatgttctcaagtctcttccatcttaacatgc

SEQ ID NO: 519324 - DNA, 201 bp, Homo sapiens
gcctcttcctgccggatcccatattgacactggagtaaggctagaggctgggagacaaggccccatgggagctttgtgaaatggggaggggcaagggtgtktccctggaccgtctgtttgtggggcagctgtcctaggtgttgagacacacaccggtctgttctaagatgttcctactggatcctgtcagttcgccctcca

SEQ ID NO: 519325 - DNA, 201 bp, Homo sapiens
cattttaccagtaagccatgctttccgcttactgcaaactagtgactccaaacttctgcaaactgtgaaactattgtgaacttgtgtgaatgtattgaagktggcactgattagacgtttgaacttctttccttgtcctgtgttatgcatggtaatctgccatttgctgttcctagctgtatggtcacccttagaggtatg

SEQ ID NO: 519326 - DNA, 201 bp, Homo sapiens
gcatgcacatgtacacacacggtgtatttgttccatagtaactagctttggacttcctgttgtgccttctattgtttttctgtcaacttaccggttttctstccttgaagctatcagtatgcctgtgtgtagtgcctgctctcataggatttataggtttgttgacatctagttacttgtattttatacacagctctaagt

SEQ ID NO: 519327 - DNA, 201 bp, Homo sapiens
attttaacaccttttttctgccctagttatctaaaacagttcatgctgctgaaaacctccttcctggcagatgtccctcaaccctactggtgcctggcttytgagacacagtaaggacttcctttctctgtatgtctctgttctctttttgagtatcgtctctttctctcacttctcctcctcccccaatgaggatgtttc

SEQ ID NO: 519328 - DNA, 201 bp, Homo sapiens
cagttaaaaaattttttttaagttgtggaaaataaacaacataaaatttaccatgtgagccatttttaagcttacagttcagtagtgttaagtacattcamgttgttttacatctaatctccagaactcttttcatcttgcaaaactgaaactctgtacccagtagataataactacccattgctttttcctgctagctcc

SEQ ID NO: 519329 - DNA, 201 bp, Homo sapiens
ctgagacacagtaaggacttcctttctctgtatgtctctgttctctttttgagtatcgtctctttctctcacttctcctcctcccccaatgaggatgtttytaaaggttctgtgaatggtagatttatatgttgcgaaaactgtgcagatgacccacttttgcctgagctccagttgtccctttttatttattttccttcc

SEQ ID NO: 519330 - DNA, 201 bp, Homo sapiens
ttagtattcgtttgatattgttacttttcacctgttgagcccaaattcaggattggttcagtggcagcaatgaagttgccatttaaatttgttcatagccyacatcaccaaggtctctgtgtcaaacctgtggccactctatatgcactttgtttactctttatacaaataaatatactaaagactttacatgcatatgcc

SEQ ID NO: 519331 - DNA, 201 bp, Homo sapiens
tctgacagataacaaatggtggcatttgtgcaaattaatatacctgattaacaatggtgtatgttcctatgggggataagactgattccctaggtatcagygacagtcccttttctgcatttccagggggtcctcaaataatagaataatggatcttcagtttacaagttttgtggtgctaatgtcaacaacttgacattg

SEQ ID NO: 519332 - DNA, 201 bp, Homo sapiens
tggatgggggtcaggtgggacactgtgatctgtagtgttaacagaatcacctggtatgagaagtttctagagagataaaaacagatgtcagctgtaatatmttgaactggcagttaaaaaattttttttaagttgtggaaaataaacaacataaaatttaccatgtgagccatttttaagcttacagttcagtagtgttaa

SEQ ID NO: 519333 - DNA, 201 bp, Homo sapiens
agaacagttggctgctccaagatgatgtctgtttatcaaatctccctgaaagacttgtgtttgtgtcacccttggtctggaaggtggacagtgcaggcatsgatgggggtcaggtgggacactgtgatctgtagtgttaacagaatcacctggtatgagaagtttctagagagataaaaacagatgtcagctgtaatatct

SEQ ID NO: 519334 - DNA, 201 bp, Homo sapiens
  misc_feature (1)...(201): n = A,T,C or G
tgccttccacatccacttagccaacagagatcaagcattacacgtgcgaggcacgattgctgcttcagcaggctcctgtctattttgagggggtaatcacnttagcaagagtcaagttccaaagtagggaagtacagcaggatgtggacctaatcttgagaggacggagatagcttcctgggggaagcggtatcaaagcag

SEQ ID NO: 519335 - DNA, 201 bp, Homo sapiens
attaatacctagcatgatagctttttagatacactctttgcttgcattaagtcagacaaaatctgcagagcctagcactatgctcagtatatgagctgctytgtctgtgtatcttggttcatacgagagtcagtatacctaggcagtcagtaaacagtcattgattagatttggatttaataaatttaagcctggccaata

SEQ ID NO: 519336 - DNA, 201 bp, Homo sapiens
taaccctgatctctccctttgcttttgccccaccccacctcctccctaggccctttcagggctccctccctggtattcgtattcagcacctttgccactcrctgtccccactgctgcagccttcctttggctttctttacctgggtgatctatcattgcgcactctatgtccatgtgcagacattatttagctcccacttt

SEQ ID NO: 519337 - DNA, 201 bp, Homo sapiens
atctacaggctgagcggggagcccaggatctccccaggggctgccctggagctgttgctggtggtgtgaggcccagggaaagcccactttctgttctgccrccgctccccagccctgttgcatagggccacgcgttggggtatcagggagatggtgcggcagccttggagagaagcaagcacggggccactcaccacctcg

SEQ ID NO: 519338 - DNA, 201 bp, Homo sapiens
tattctattttaatagagtctttgtaataatcatttttgaatgtagtatttagttgtgttaatttattttatttttcttaagtaatctatgatagaataasctatttctgtttttacagaatattgtagggaacctttaaaaacacacaattagcatttttctgctgctaattgctttattaggatgaatgcatagattta

SEQ ID NO: 519339 - DNA, 201 bp, Homo sapiens
aggctttgtggggttacctagaacagcagggaccttctgtggtgagctgaaggggtggcagggcaggaggtggctctccacaggggagcatggccatcacmcctcgctgcctgcagcaggctgtgtgatggagcacctccagagttcagtcctgcactttctgatgatgcttccagaaggagcagagctcaggaggagaga

SEQ ID NO: 519340 - DNA, 201 bp, Homo sapiens
gtgtatccccaacataaatggtggttatatactgcataatgtttcataacctttttttccatttgctagtgtatcatgactattgtaacatctttcagtartgatatccccctgcccccaacacatgcacatgttttgtgtagatttctattgggtggcttcaccgtgattctgtgttcctggatgaacatttatgtttgt

SEQ ID NO: 519341 - DNA, 201 bp, Homo sapiens
gtggcatgatctcggctcactgcaacctctgcctccgggttgaagtgattctgctgcctcagcctccagagtagctgggactacaggcgcccgccaccacrccaggctaatttttgtatctttagtagagacggggtttcaccatgttggccaggatggtctcgatctcctgaccttgtgatccgcccgccttggcccgcc

SEQ ID NO: 519342 - DNA, 201 bp, Homo sapiens
cttcttccttccatagctctcatcctttagaaagacgccagtcattcattcactcatttaacaaataataattgagtgcctactatgtaccgggctgtggrggtggagaagaaaataagatagacagtctctgacttctttcagtttccagtcttacattttaaattttaatttcattagggaaactgtttctgacctttc

SEQ ID NO: 519343 - DNA, 201 bp, Homo sapiens
cccaacataaatggtggttatatactgcataatgtttcataacctttttttccatttgctagtgtatcatgactattgtaacatctttcagtaatgatatmcccctgcccccaacacatgcacatgttttgtgtagatttctattgggtggcttcaccgtgattctgtgttcctggatgaacatttatgtttgtcttgtta

SEQ ID NO: 519344 - DNA, 201 bp, Homo sapiens
tcctttcttgccttatgataacctcgttccttgcagtagctccatagcgggaaaggtgatttctatggattgtagatttcctggcctcgaggattttgtartgtgttgggtttgctgtttgaatcagtagaatctgggggatagtctacttaaacctgcatattgagggggcatttggtaagcgcctctccatgtcaggca

SEQ ID NO: 519345 - DNA, 201 bp, Homo sapiens
cctgctctgctccctctgtccccatgccatgagggctgctttctttacagctgatgtgctagctagggtgagttttggagcaggtaataaaaagtttacakactttgggccagatgcggtggcttacacctgtagtcccagcactttgggaggccgaggccggtggatcacctgaggtcaggagttcgagaccagcatggc

SEQ ID NO: 519346 - DNA, 201 bp, Homo sapiens
cccactccagaaccctgatgatacaggaaggatgatgacagtgactaagatgtaatgccagtcataatcacggcggcaaccagtcagggagcgttttactmcataccgggcactgaaggcagccgttcccttgcgtcatcccattcttccacacggtaacctatgaaggacacaactgtggcccccatttttctagtgagg

SEQ ID NO: 519347 - DNA, 201 bp, Homo sapiens
aaactggcctaaggtctcagacagtgggtgttagagctgggatctggacccaggttagggtgactccaagagcaggcttttaactgcttctataaggaactttggagggcatccaatactttttcattatgcagggtttgagctcagagaggttaagaggcttgctcaacaccaggcaggtcctagtggatctgggctgga

SEQ ID NO: 519348 - DNA, 201 bp, Homo sapiens
gtgggcgtgacggctcagcaggtcccacatctctagtcctgtgtcctgtgtccagctccactacccatctcccactccagaaccctgatgatacaggaagratgatgacagtgactaagatgtaatgccagtcataatcacggcggcaaccagtcagggagcgttttactccataccgggcactgaaggcagccgttccct

SEQ ID NO: 519349 - DNA, 201 bp, Homo sapiens
cttcagacagggcactgttatgggtctcctgccctgatcttctggctcaaaaccagcgtttgttcacctcctcctctggttcccatcatgccctgggcccrggtactgcttcttccttccatagctctcatcctttagaaagacgccagtcattcattcactcatttaacaaataataattgagtgcctactatgtaccgg

SEQ ID NO: 519350 - DNA, 201 bp, Homo sapiens
tcaccccaggctccaccttcatcttcacattgccatctcctctgtgaggttgccagggcaaatgcaggtgtactttgcaccactaattttaaatcctagcrtgcatgcacacacatgagcacacacactggataaatggatgggaaacagatggttccagtgtgagaaactgtgcctacctgtgccagagggcttcagata

SEQ ID NO: 519351 - DNA, 201 bp, Homo sapiens
atcctttaactcccttcttcctattatttaaatgttctcaagtctcttccatcttaacatgccataacacacacacacacacacacacacacacacacacwcactctctctctctctctctctctctctctctctcacaaattcatgagtaaaggcaccatgtccccagtgctcatgttatatactcagatccttgtgcag

SEQ ID NO: 519352 - DNA, 201 bp, Homo sapiens
cctttaactcccttcttcctattatttaaatgttctcaagtctcttccatcttaacatgccataacacacacacacacacacacacacacacacacacacwctctctctctctctctctctctctctctctctcacaaattcatgagtaaaggcaccatgtccccagtgctcatgttatatactcagatccttgtgcaggg

SEQ ID NO: 519353 - DNA, 201 bp, Homo sapiens
ctttaactcccttcttcctattatttaaatgttctcaagtctcttccatcttaacatgccataacacacacacacacacacacacacacacacacacacactctctctctctctctctctctctctctctctcacaaattcatgagtaaaggcaccatgtccccagtgctcatgttatatactcagatccttgtgcagggc

SEQ ID NO: 519354 - DNA, 201 bp, Homo sapiens
aaaaattaactgaatgtggtagtgtgcacctgttatcccaccttcttgggaggctgaggcaggaggttcacttgaacccaggaggtcaaggctgcagtgarccatgattgtgccactatattccagcgtgggtgacagagcgagattccatccccctccatcccccccaaaaaagcacatactatgaagacaagccattct

SEQ ID NO: 519355 - DNA, 201 bp, Homo sapiens
ttgggaggctgaggcaggaggttcacttgaacccaggaggtcaaggctgcagtgagccatgattgtgccactatattccagcgtgggtgacagagcgagaytccatccccctccatcccccccaaaaaagcacatactatgaagacaagccattctccccaccccgccatgttttgagtgtccatttgtgccaccaagtct

SEQ ID NO: 519356 - DNA, 201 bp, Homo sapiens
atcaccaaggttggtagcttattatttgcaaaaataattggattctactgttaaagaatttgtgagaagcaacaaggaaagctgttaaaataatacaaagstctgtgtgtgtgtgtgtgtgtgtgtgtgtgtgtgtgtgtgtgtagacaaggttggggcggggtaattctagaaggaatgagaaattaaagtgcgcgtttt

SEQ ID NO: 519357 - DNA, 201 bp, Homo sapiens
caccaaggttggtagcttattatttgcaaaaataattggattctactgttaaagaatttgtgagaagcaacaaggaaagctgttaaaataatacaaagctstgtgtgtgtgtgtgtgtgtgtgtgtgtgtgtgtgtgtgtgtagacaaggttggggcggggtaattctagaaggaatgagaaattaaagtgcgcgtttttg

SEQ ID NO: 519358 - DNA, 201 bp, Homo sapiens
gacattgtcagttggatttttttcttatttcttttttttttttgagtcggactcttgctctgtcaccaggctggagtgcagtggtgtgatctcggctcgckgcaacctccgctttcccaggttcaagcaattctcctgtctcagcctcccgagtaggtgggattacaggcgcatgccaccacgcccagctaatttttctat

SEQ ID NO: 519359 - DNA, 201 bp, Homo sapiens
aagacagtaaacattttcagctttgagcacagtacagtctgtcacaagtactgaatctgctattgtagcaccaatgtagatatagacagtatgtaaaccartgagtgtggctgtgctccaatacaactttatgtatggacactgacatttctattttcacttgtaacaaaatatttttcttttttttccaaccatttaaaa

SEQ ID NO: 519360 - DNA, 201 bp, Homo sapiens
tctgtcggacagggagcccctccggctgggcagtggagagtacacagcagaggaactgtgcatcagggctgcacaggcatgccgtgagtactggcagctgcccagggctgggggtttcaccaacacactagttcagaagatctgggggtctctgccccttgtagcgctgctgggcagaaagagttgtggactctggagtca

SEQ ID NO: 519361 - DNA, 201 bp, Homo sapiens
cccaggctggtgtcgaactcttgacctcaagtgatcctcctgctttagcctcctgaagttttgggattacaggtgtgagccaccaaactcagccaaaaaawtatttatttatttatttatttgtttgtttgtttgtttgagacagagtctttctctgtcacctaggagtgcagtggcatgatcttggctcactactacctc

SEQ ID NO: 519362 - DNA, 201 bp, Homo sapiens
tggggaggacagtgcccagcacggagtcagcgtgaataatgcctgtcaagtgaaccaggtagcaggagctgctggatggtgggtgcctactgtggcccagkcagtttatgtacctacctcatttatttcatctacacagtagctttttgtagatattacaaaggtgatgaaattgagacttgagatggtaagtgacttgct

SEQ ID NO: 519363 - DNA, 201 bp, Homo sapiens
ggccccatgagtgtcagaggaagaccctctgaggagtctttatctgggacacatcttgttcttccaagcgaacgtgtccataaaccctcacaccaccaggrgtgggcagaggaagcagcaccaggatagaaagggacctgggttcttgatgtttgaatcagtttttggtctcagcaaggggcttgtcactgaacttggtga

SEQ ID NO: 519364 - DNA, 201 bp, Homo sapiens
actttcagatcgaggtgcagaagggccgctacagtctgcacggttcggaccgcagcttccccagcttgggagacctcatgagccacctcaagaagcagatyctgcgcacggataacatcagcttcatgctaaaacgctgctgccagcccaagccccgaggttcgtctccctgtgccagagccaggctgtatcccatcagta

SEQ ID NO: 519365 - DNA, 201 bp, Homo sapiens
agatggtgcaaaattactcttcatgcagcttcccctaatgttaatatcttacatacccatgcctgaccccattttaaacatgtaatttctggtcatttccygaatagcaggtgcagggtgcccagaagcagttcaagaactttcagatcgaggtgcagaagggccgctacagtctgcacggttcggaccgcagcttcccca

SEQ ID NO: 519366 - DNA, 201 bp, Homo sapiens
cgtgaggcaagtgagggctttcaggtgctcgtgggcttcccaggagttgtcggaagcctggcactgtgggaagagatgggcatgggtttgaatctcttcaygggcctactgggtgtgtgacctcacaaatgtaactgaacttccgtgagcctcagtttcatcatctataaaatggggataatcagtaactacttgtagggt

SEQ ID NO: 519367 - DNA, 201 bp, Homo sapiens
gaataattttagatttacagaaatgttacagagatggtgcaaaattactcttcatgcagcttcccctaatgttaatatcttacatacccatgcctgacccyattttaaacatgtaatttctggtcatttcccgaatagcaggtgcagggtgcccagaagcagttcaagaactttcagatcgaggtgcagaagggccgctac

SEQ ID NO: 519368 - DNA, 201 bp, Homo sapiens
atcagtcattggaggaagtttaatgtgtttacgatggaggggtgcatgagacagcccagcctcctcctgaagtggaattggcctgtgcagtaccaagagtktccgtgactccctaacaatgtcacatcacccggggaaaacagcagtcatagaaatgattacttccaccgcacactgtggcccaccagaccctgtgccaag

SEQ ID NO: 519369 - DNA, 201 bp, Homo sapiens
gggcaggaacacagggaaggctggggccatgcagtgattttttaaatgacagtcctttcagtctacagaaggaagagtgttggagtaagatcagtctcctsggtggttgttagactatgaaaagtactaaaaaaccagagaagacagtggtgttgctgatggggacagtttagagcagttcttccccactgtggaacgagc

SEQ ID NO: 519370 - DNA, 201 bp, Homo sapiens
aggttttccctttggggttcccattgggttataaaaatcttctcactgtgcacctccctacagagtcagccacttaagctgatagagacatgatgtaaccrtgggaatttcttctctctcaacaggaactgaagctctcttcccacgaggaggccttgtcctttgtgtccctggtagatggctacttccggctcacagcag

SEQ ID NO: 519371 - DNA, 201 bp, Homo sapiens
gccattctgtcagaacccctctttgaacctctgtagctggttcactccttccttcctgcttgtcccagggagaggatcgtggctaagttctcctgggcacrtgttctgttctacccttgaagagcagtgccaggcctgggtacagcatgagtggcagcctccctgccagctgatagccctagctttccactgtcaccagcg

SEQ ID NO: 519372 - DNA, 201 bp, Homo sapiens
tatttgaattatttgtcctaataatactgaatccaaaagccatttgcctatgttcccaaggaaaacttccctttacagtttaactccatattctcggtttrtaagaaagactataacttctgaagggtaactgttcatattgcttgagaagcatggattgaggtgttcaggagagcactagatagctgccaaggtatctgt

SEQ ID NO: 519373 - DNA, 201 bp, Homo sapiens
tggaagagtttgtggaagggggtcctctggatctcttcatgcaccggaaaagcgatgtccttaccacaccatggaaattcaaagttgccaaacagctggcsagtgccctgagctacttggtgagaatgtcctgatgtccataatggtcccaccagaaaccagagtgtcctgggaggggtggcaggaaggaggtgctagcca

SEQ ID NO: 519374 - DNA, 201 bp, Homo sapiens
gcattgctcgaatgatgccacaggcatctgcttctctctgccgcttccgtttctatcttccatggggcttccctcccaggagagcgtgcctcatatgtgcytggctttcgttctttgctctgcctgctttgcatggtccaggctctgtagcctggcatttaattattctgttccagcttcccttccttggtgctttttccc

SEQ ID NO: 519375 - DNA, 201 bp, Homo sapiens
tcttgacctcaagtgatcctcctgctttagcctcctgaagttttgggattacaggtgtgagccaccaaactcagccaaaaaattatttatttatttatttrtttgtttgtttgtttgtttgagacagagtctttctctgtcacctaggagtgcagtggcatgatcttggctcactactacctccacctcccaggttcaagc

SEQ ID NO: 519376 - DNA, 201 bp, Homo sapiens
ctgaagttttgggattacaggtgtgagccaccaaactcagccaaaaaattatttatttatttatttatttgtttgtttgtttgtttgagacagagtctttytctgtcacctaggagtgcagtggcatgatcttggctcactactacctccacctcccaggttcaagcgattctcctgccttagcctcccgaatagctggga

SEQ ID NO: 519377 - DNA, 201 bp, Homo sapiens
ttatgaattcaatttaatttagtgaatttaagaaaaagaaacaggagacgatactatcagcatatatacataacctaagtatattttttaaacttttgagwatatatatatatatatatatatatatatatatatatatatacacactatatatataaaggtcatgatataaaatatttttcttactaaaagttgcaacta

SEQ ID NO: 519378 - DNA, 201 bp, Homo sapiens
aaaaagaaacaggagacgatactatcagcatatatacataacctaagtatattttttaaacttttgagtatatatatatatatatatatatatatatatakatatatatacacactatatatataaaggtcatgatataaaatatttttcttactaaaagttgcaactaaaaagctcgagaaacattgcctgaagtgttaa

SEQ ID NO: 519379 - DNA, 201 bp, Homo sapiens
acaggagacgatactatcagcatatatacataacctaagtatattttttaaacttttgagtatatatatatatatatatatatatatatatatatatatayacacactatatatataaaggtcatgatataaaatatttttcttactaaaagttgcaactaaaaagctcgagaaacattgcctgaagtgttaactagaaat

SEQ ID NO: 519380 - DNA, 201 bp, Homo sapiens
aggccccctgtcatatgctgcatcctggatattaggccccgtgtcatatgctgcatcctggatattaggccccgtgttatatgctgcatcctgggtattargccccgtgttatatgctgcatcgtgggtattaggccctgtgttatatgctgcatcctgggtattaggccccctgttatatgctgcatcctggatattagg

SEQ ID NO: 519381 - DNA, 201 bp, Homo sapiens
aaaatgtgttgaacagtgaaagtcctatataaatgcaagggggatcgggcacagtggctcacggctgtaatcccagcactttgggaggccaaggtgggagwtcactcgaggtcaggagttcaagaccagcctggccaacatggtgaaaccccgtatctactaaaaatacaaaaattagccaggtgtgatggcaggtgcctg

SEQ ID NO: 519382 - DNA, 201 bp, Homo sapiens
gtaaggaattataagagtttaaagggactctcaaatatgtattcagtttctatggaatgcccttttacagtttctgtttccataaacatattttgctttcytaaagcaagatttacccaaaatgtaaaagtgtgcaaagagttggcccttcctcctaatcatagatgtgtgttttaaaatattttaaatgtatttccttct

SEQ ID NO: 519383 - DNA, 201 bp, Homo sapiens
gccaaggtgggagatcactcgaggtcaggagttcaagaccagcctggccaacatggtgaaaccccgtatctactaaaaatacaaaaattagccaggtgtgrtggcaggtgcctgtaatcccagctacttgggaggctgaggcagaagaatcgcttggacccaggaggcggaggttgcagtgagccgagatctcaccactgc

SEQ ID NO: 519384 - DNA, 201 bp, Homo sapiens
ctcagctaggtgtgccactgttgcttcctgtctcagaaaccctctggttacatgggatttcaaacagctgtcatgttgaaatgactgggtttcagggaccrgaaactaattcctgtgagtattctttcctctgaggtgcaccagccttcttggcagtttaaggcgacaggaaagcataaaacattaagctcatttccgtga

SEQ ID NO: 519385 - DNA, 201 bp, Homo sapiens
tgaggcagaagaatcgcttggacccaggaggcggaggttgcagtgagccgagatctcaccactgcactccagcctgggcgacagagtgaaactccatctcwaataaataaataaataaataaataaataaataaataaataaataaataaatgcatgcaaggggtatatttagtattgatgaaaaggttttccctttgggg

SEQ ID NO: 519386 - DNA, 201 bp, Homo sapiens
gtccagaagagctggctttctcttccttggacctaggccctgcataggtttcccagcagcactgaccttttaccaatagaaaatgaagaaagcaacttaaycctgtcccttttatgtatcttatcaggttgtttctgttgaaaaggaaaaaaataaactgaagcggaaaaaactggaaaataaacacaagaaggatgagga

SEQ ID NO: 519387 - DNA, 201 bp, Homo sapiens
tgggttttagacccacgtcgacggggttcagatcctagcttcatgacttatatggccttaggagagttatttcacctttatcagcagctaaaaattactcmtctgttaaatggaggtacctactgtctaactcataaggttgtgaagaaactaaacggcatttagcacaaagcctggcaatacaataaatgttgaataaat

SEQ ID NO: 519388 - DNA, 201 bp, Homo sapiens
gtagtaattaaagtgtcaaaattctgaaaataacttaaatatacaataataggagaataggaaaataaatcacaatttgcctgagaagcagaatattagamaatcaggttgctgaattttttaatgacctggaaaaaaggtcaggggaaaaagcaggatataaaactttacctatagaatgggaccagttttgttcaaaat

SEQ ID NO: 519389 - DNA, 201 bp, Homo sapiens
tggacttgttctttgtttcaggggtactcaacgttcttcttaacattgactcccgttctagcagtatatcagcttgtttagattctgtttgttgtagatastcgcccactagcacctggataggtaactaatctttcagcttacctgttgatcttttaaataatatatctgattcatattcacatggcaaacactaagtct

SEQ ID NO: 519390 - DNA, 201 bp, Homo sapiens
ttattagaaaaatatagtaaaaacaaagtgaagggggagaagtagaagagctcagatggatgttaatggaaagatgcgaaatggagggagaaaagaagaartgctgttgatggagcacatcctggatatcaggccccgtgttatatgctgcatcctggatattaggccccgtgtcatatgctgcatcctggatattaggcc

SEQ ID NO: 519391 - DNA, 201 bp, Homo sapiens
tttccccaactcccagagtgtttccgattagcaaagtgcacatcaggcaggatctgtgaacctctcagataggggtttttttgaagctggatttgataagrctctgtgacggatacctgtaatgagaaatatcatcagagttttatttttaaatgatctaaatttggtttgccaggagctacagtgcatatttctggggag

SEQ ID NO: 519392 - DNA, 201 bp, Homo sapiens
tgatggagcacatcctggatatcaggccccgtgttatatgctgcatcctggatattaggccccgtgtcatatgctgcatcctggatattaggccccgtgtyatatgctgcatcctggatattaggccccgtgtcatatgctgcatcctggattttaggccccgtgtcatatgctgcatcctggatattaggccccctgtca

SEQ ID NO: 519393 - DNA, 201 bp, Homo sapiens
agccatttgcctatgttcccaaggaaaacttccctttacagtttaactccatattctcggtttataagaaagactataacttctgaagggtaactgttcayattgcttgagaagcatggattgaggtgttcaggagagcactagatagctgccaaggtatctgtagcttcttaactcagtgtctgcgttggagagagtccc

SEQ ID NO: 519394 - DNA, 201 bp, Homo sapiens
ccgtgtcatatgctgcatcctggatattaggccccgtgttatatgctgcatcctgggtattaggccccgtgttatatgctgcatcgtgggtattaggcccygtgttatatgctgcatcctgggtattaggccccctgttatatgctgcatcctggatattaggccccgtgtcacatgctgcatcctggatattaggccccg

SEQ ID NO: 519395 - DNA, 201 bp, Homo sapiens
ggaacctcatgtttttacttgtgtagaacgaccattcacttgggttggttggaagtaggaggaagtcagaggaggtcatattggcccaaacataaattgtragcccacttgatgtgatttaggaagcaggccacctaccatctacaagctggctgaaatacaaatgctcttaggttttcatgtttgttcctttattcagca

SEQ ID NO: 519396 - DNA, 201 bp, Homo sapiens
ctttttgggaaaatcatttgatgtatggtggtaactccaaggaacctcatgtttttacttgtgtagaacgaccattcacttgggttggttggaagtaggargaagtcagaggaggtcatattggcccaaacataaattgtaagcccacttgatgtgatttaggaagcaggccacctaccatctacaagctggctgaaatac

SEQ ID NO: 519397 - DNA, 201 bp, Homo sapiens
tgtggtgacaacaagataataaaacagatacttatcctatataaaacaggcaaaaaggctttgggacaatatgggaatcatgatgtgggtttggtggaaarcgagcaaagcaccttgtaaggatcttgtagtctgaagattaaggtgtgcttggggtaggtcatgtcctcccagctctgtgggatttgtagcacatcatcc

SEQ ID NO: 519398 - DNA, 201 bp, Homo sapiens
tcttgtagtctgaagattaaggtgtgcttggggtaggtcatgtcctcccagctctgtgggatttgtagcacatcatcccacgtggggaggagagtgggcaygggcatgagactatttattagcttttactgtgtcagttgttgggttatgtattttgcatttgatatttaatttaatctttgtaatagccagagacttgga

SEQ ID NO: 519399 - DNA, 201 bp, Homo sapiens
atctcaccactgcactccagcctgggcgacagagtgaaactccatctcaaataaataaataaataaataaataaataaataaataaataaataaataaatrcatgcaaggggtatatttagtattgatgaaaaggttttccctttggggttcccattgggttataaaaatcttctcactgtgcacctccctacagagtcag

SEQ ID NO: 519400 - DNA, 201 bp, Homo sapiens
tctcaccactgcactccagcctgggcgacagagtgaaactccatctcaaataaataaataaataaataaataaataaataaataaataaataaataaatgmatgcaaggggtatatttagtattgatgaaaaggttttccctttggggttcccattgggttataaaaatcttctcactgtgcacctccctacagagtcagc

SEQ ID NO: 519401 - DNA, 201 bp, Homo sapiens
gaagattaaataatgcatatagagtgacaggcatgcagtacaagctcgatagatgttatagtattatttatctgagattttaagtgcctgttattcagcaaaattaccacacaaatacgtatggagttcctattgtgtatcaggcatcaagcttgggaaaagctggaggttcactataaaataagatacaggccttgcctt

SEQ ID NO: 519402 - DNA, 201 bp, Homo sapiens
aagattaaataatgcatatagagtgacaggcatgcagtacaagctcgatagatgttatagtattatttatctgagattttaagtgcctgttattcagcaaaattaccacacaaatacgtatggagttcctattgtgtatcaggcatcaagcttgggaaaagctggaggttcactataaaataagatacaggccttgccttc

SEQ ID NO: 519403 - DNA, 201 bp, Homo sapiens
ctgaagtggaccccacacattttgaaaagcgcttcctaaagaggatccgtgacttgggagaggtaagttacacccgtgctgcttgctgctgatggcagagccctccgccatccacagcgccactctctgcacgtacagctgctctccattctttttcattctggggccaggtccatgagcgaaagcaccttactgcatttg

SEQ ID NO: 519404 - DNA, 201 bp, Homo sapiens
ttcaccgtgttagccaggatggtctcgatctcctgacctcgtgatccgcccgcctcggcctcccaaagtgctgggattacaagcgtgagccaccgcgcccrgcccgataatttttgaaaacagtcatttgcctgtggtttacagagcactctgactgttatctcagtgagtgcttatgcctgtgaggtaggtacaccattg

SEQ ID NO: 519405 - DNA, 201 bp, Homo sapiens
cggtatgttatgcaaggctggggtccggtttaaagatttggtgactgtctagggtcataaaggccagtgcaaaacaggcactccgtggccttacctgggcrtctgacatgctagctggtggttcccacacactctcaaggcttccaagtcatatgtcaaatccctcagcagctgcagggctcctgaggaggccacccaggc

SEQ ID NO: 519406 - DNA, 201 bp, Homo sapiens
cttggtgctttttcccctcctgccacctcccctggcaatggagggcgacctgtctcctcggcacctcgccagagactgtcatatgtccaaggacaacttaycctttaagcacagtgcctagagcacacacttgttaggggcccataaaatgtctaatttcacttaaaatcagaaaacatagttgagaaatataacttgtaa

SEQ ID NO: 519407 - DNA, 201 bp, Homo sapiens
tgccatgccaaccttggagcaccacacacctgttctttagaggagctgaacaaattgtagctttccatttaattgtttatttgggagttttggctctgtcrttaccctctgagctcctggagggtaggagccatatgcctattgaataagcacttgtcgaatgactgaagcagcaagcgcccgcacaccggtcccacggcc

SEQ ID NO: 519408 - DNA, 201 bp, Homo sapiens
tcctatgtcctgctcgcccacaggccttcttcgaggcagccagcatgatgagacaggtctcccacaaacacatcgtgtacctctatggcgtctgtgtccgygacgtggagagtaagtgtgttctctttcaaaggggtgggtggcctggctggggagcttgggtgctgtggagatggtggaggctcttcccaccctcacgtt

SEQ ID NO: 519409 - DNA, 201 bp, Homo sapiens
catcgacagtgagtgtggcccattcatcaagctcagtgaccccggcatccccattacggtgctgtctaggcaaggtgtgtctcccctctcttccctctggycccaccccgagtcaggggcaagtcagcagagagaagggctgggctggggttggtctccttttagagagtcattttttttttgtattttagtagagacggg

SEQ ID NO: 519410 - DNA, 201 bp, Homo sapiens
gtagagagaacaagagaacactaaggtataactgcatagcaaagaccatgatctgtgttttctaattctcagattcctctggtgtttttttcccctcaaasacacatcccattttgtatgtccttatgtcctgataagataatagcatgctgttagaagatttattgtctgagatgtgaatattcatacaaataaattttt

SEQ ID NO: 519411 - DNA, 201 bp, Homo sapiens
tggtgaagattaatggagaccaccagggttccagacatttctggtacaatatgctttgtaatgtggagaaaatgtctcccctgtatagatccagatcacayttaaagatgtgaagacatcatactggaatgactttggacattataaataggaataatcataacctcttcttaattctgtatatcatattaactaagtgct

SEQ ID NO: 519412 - DNA, 201 bp, Homo sapiens
tcctgaagttttgggattacaggtgtgagccaccaaactcagccaaaaaattatttatttatttatttatttgtttgtttgtttgtttgagacagagtctytctctgtcacctaggagtgcagtggcatgatcttggctcactactacctccacctcccaggttcaagcgattctcctgccttagcctcccgaatagctgg

SEQ ID NO: 519413 - DNA, 201 bp, Homo sapiens
cgtgtcatatgctgcatcctggatattaggccccgtgttatatgctgcatcctgggtattaggccccgtgttatatgctgcatcgtgggtattaggccctstgttatatgctgcatcctgggtattaggccccctgttatatgctgcatcctggatattaggccccgtgtcacatgctgcatcctggatattaggccccgt

SEQ ID NO: 519414 - DNA, 201 bp, Homo sapiens
ccaagccacagtgctgtggagggagcaggaggagggcaggaagaaagaaatacttgattcctccattagtttgtttttctttaccacgctagcccttactrtgtgtcaggtacttcctattctgagcacttcacaaataccacctattttaattttcatgtcaaccctatgggtgagtatgataaggggaaactgaggcac

SEQ ID NO: 519415 - DNA, 201 bp, Homo sapiens
caccccctcagtagctgtgtcttggtttgattctcagctctgcattttactagatgagtaaccttgaatcatactaaatctcaggagaccacagattcttygtctgcaagatggtcaaaatagtatttacctcattagatattaggaggattaaagggtaatacttttttttaaatttaaaattttaatattttttagaga

SEQ ID NO: 519416 - DNA, 201 bp, Homo sapiens
cctagatgtaaatcagtggttctaaagttttttttaaggctttgtttttttgttttctccctttccccttgagatttggtttatattgtttattctcttcrccaagcttcttgccatcagcacagcaggtataaacctcactcagtttgtaagcaaaggtcattgttgcagagtcattgggctgctgttaatgagggacca

SEQ ID NO: 519417 - DNA, 201 bp, Homo sapiens
tgctctccctttggagggtgcttatgtgaattacttacttacgcacttttcaccagggttttctaactgttccaaagtaaggcctcctcctgccctcctgstgctgcgtcaaagtcctgccgctcctcctggggtggtaggaaccaggctccattcattaattgttatggcccttccatgtgacttatgaacatgaattgg

SEQ ID NO: 519418 - DNA, 201 bp, Homo sapiens
ggaagcccttggaggatctggtatgtgttatggagaaattactttaggggtttaagtgaaggttggcttggcagacaggaagaaagtagtaggagtgtggrgtcagcgaattagtttgtagcccattggtattgggcaagaagaagaaagaatgtgtagggctttccctcatttctttcctcctttctggccttgcccaag

SEQ ID NO: 519419 - DNA, 201 bp, Homo sapiens
gaaggctggccggccagatgatggagcagggctctgtttcagagtctcagaattgctctgtagattaatgggaagcccttggaggatctggtatgtgttayggagaaattactttaggggtttaagtgaaggttggcttggcagacaggaagaaagtagtaggagtgtggggtcagcgaattagtttgtagcccattggta

SEQ ID NO: 519420 - DNA, 201 bp, Homo sapiens
acaatgtgacatcctgtaaatatataattacatgcatttgcctgtttatttccttagagttagagggtgcaacactgtctttggattcttcccctgtcacrtctataaagactctcaaggacaaaggtttatcttacattatgaagcaggcttttagctactctgttttccatcacagtttttcaatgtgggatggggtta

SEQ ID NO: 519421 - DNA, 201 bp, Homo sapiens
caccacacccagccgattttttcatatttcaaacaatgtgacatcctgtaaatatataattacatgcatttgcctgtttatttccttagagttagagggtrcaacactgtctttggattcttcccctgtcacgtctataaagactctcaaggacaaaggtttatcttacattatgaagcaggcttttagctactctgtttt

SEQ ID NO: 519422 - DNA, 201 bp, Homo sapiens
ttgagctcagagaggttaagaggcttgctcaacaccaggcaggtcctagtggatctgggctggaacatgggcctctttctgactggtgggaagaagctctygcacaagctctgttcctcttgcaccctcccctcctttccttgctgtctgcctttttcctgcaagattcttcctgtctgcatactctttcctgcacaattg

SEQ ID NO: 519423 - DNA, 201 bp, Homo sapiens
gccaggccttaaagcacggaaagggtacctagatgagaggtcagcacatgcaaaggcatggcgcagttagaaagtacacaatgtccctgtctctctaaaacacacgaaccatggcggccctctctcaccagcacttagcaagcagcactcacctcatgcagggatgtattcagtcagtattcactgctctctacatgccag

SEQ ID NO: 519424 - DNA, 201 bp, Homo sapiens
cagctaatttttgtaattttagtagagacagggtttcgccatgttggccaggctggtctcaatctcctgaactcgtgatccccccacctcggccccccaamgttctgggattacaggcgtgagcaaccacacctggcccagatttcttatttataaagtgccatgatgtctacctcacagtgttggtatgagcgttaaatg

SEQ ID NO: 519425 - DNA, 201 bp, Homo sapiens; identical to SEQ ID NO: 226835

SEQ ID NO: 519426 - DNA, 201 bp, Homo sapiens; identical to SEQ ID NO: 227666

SEQ ID NO: 519427 - DNA, 201 bp, Homo sapiens; identical to SEQ ID NO: 226836

SEQ ID NO: 519428 - DNA, 201 bp, Homo sapiens; identical to SEQ ID NO: 226839

SEQ ID NO: 519429 - DNA, 201 bp, Homo sapiens
tgaggccaggagtttgagaccagcctgggcaacacaacatctctagaaaagaattttaaaaattagccagtgtgattctgagccaagtccggtgccaagcrcagctagctcagcaggcggcagcggtggcctgagcttcaggacagccagctccctcccggtctcaccttccctcgcggtcagcatgaaagccttcagtcc

SEQ ID NO: 519430 - DNA, 201 bp, Homo sapiens
tggacctgcagatcaccctggacttgcatcccactattgtcagcctgcatcaccagagacccgggcagaaccaggcatccaggatgccgctgaccaccctyaacacggacatcagcatcctgtccttgcaggcttctgaattcccttcggagttaatgtcaaatgacaggaaagcactgtgtggctgaataatcatgactt

SEQ ID NO: 519431 - DNA, 201 bp, Homo sapiens
tttaagtgaaaccttgttaactctttaattagagttttcttgtatagtggcagagatgtctatttctgcattaaaaagtgtaatgatgtacttattcatgmtaaactttttataaaagtttaaacttttagttgtaaacgtaacccttttatacaaaataaatcaagtgtgtttattgaatggtgattgcctgctttattt

SEQ ID NO: 519432 - DNA, 201 bp, Homo sapiens
tgttaactctttaattagagttttcttgtatagtggcagagatgtctatttctgcattaaaaagtgtaatgatgtacttattcatgctaaactttttatamaagtttaaacttttagttgtaaacgtaacccttttatacaaaataaatcaagtgtgtttattgaatggtgattgcctgctttatttcagaggaccagtgc

SEQ ID NO: 519433 - DNA, 201 bp, Homo sapiens
gtgggcggatccccatcagcctggagacccaggcccacatccaggagtgtaagcaccccagtgtcttccagcacggtgagcccctgagccccagaccagcrctgaccaggggccctggcctgtcctgggattccccaagccccagatcagcgctgcctgggggccgtgacctccccaggaatccgctgagcctcagatcag

SEQ ID NO: 519434 - DNA, 201 bp, Homo sapiens
ggctgcacagatagttctccctcccccatgccagaccctgtgctgggctctgggaaccccaagatgaatcagacccagccactgccctaagtgcttacttcatgttttgggctgactttagcatgtcaccatgcctctaattttccctctgaaaagggacccaattgtccaggcatggtggctcatgcctgtaatgccagc

SEQ ID NO: 519435 - DNA, 201 bp, Homo sapiens
tggctgcacagatagttctccctcccccatgccagaccctgtgctgggctctgggaaccccaagatgaatcagacccagccactgccctaagtgcttacttcatgttttgggctgactttagcatgtcaccatgcctctaattttccctctgaaaagggacccaattgtccaggcatggtggctcatgcctgtaatgccag

SEQ ID NO: 519436 - DNA, 201 bp, Homo sapiens
gttgcctgacgtgtcactgggccggtatgcgtatgtccgtggtgggggtgacccttggaccaatggctcagggcttgctctctgccagcggtactaccacygaggccacgtggacccggccaacgacacatttgacattgatccgatggtggttactggtgagtgggcaggacgaggcttcactgttgggagcctgagctg

SEQ ID NO: 519437 - DNA, 201 bp, Homo sapiens
atggctgcacagatagttctccctcccccatgccagaccctgtgctgggctctgggaaccccaagatgaatcagacccagccactgccctaagtgcttacttcatgttttgggctgactttagcatgtcaccatgcctctaattttccctctgaaaagggacccaattgtccaggcatggtggctcatgcctgtaatgcca

SEQ ID NO: 519438 - DNA, 201 bp, Homo sapiens
caggcccagcaagtgcaaaggcccggaggtgggaagcgatgcagatatggctggaggggagggcggacttcaagggccttggaggttgggagccactttcrggctgagcctcccggcttctctccccagcatcccggcggcgcaggcgcagaggagagcgagctgcaggcctacatcgcacagtgccaggacagccccacc

SEQ ID NO: 519439 - DNA, 201 bp, Homo sapiens
caatggctgcacagatagttctccctcccccatgccagaccctgtgctgggctctgggaaccccaagatgaatcagacccagccactgccctaagtgcttacttcatgttttgggctgactttagcatgtcaccatgcctctaattttccctctgaaaagggacccaattgtccaggcatggtggctcatgcctgtaatgc

SEQ ID NO: 519440 - DNA, 201 bp, Homo sapiens
ctgctcactcgaggggggcccagggtgggggaggcagcacactaggcactctcaccccagcaactacttccctaaggtggggacagggcccccccgcccgygctggtgcctgctgggtgagcacttcccctgccagctgcagagtcagcacgtggcaggggacgctggcacttggggccggaagggacccgaagacgcccc

SEQ ID NO: 519441 - DNA, 201 bp, Homo sapiens
tgccctcggaccccctcagacgtggccacgccccctctaggcacccactggctcccatgaccacaccggctgtgccctcggcaaggccccgcccctcccamccccatctgggtgcccacagctgacctgagttgtggccacaccctcaacgaggctccctctgccccaacccagatcctcatcgccacactgcgggtggcc

SEQ ID NO: 519442 - DNA, 201 bp, Homo sapiens
cgtcctggtgaggccccccgggaacccacagggctcctgagttccagggcagggacctggtcagggagtgtcttgggagcactggccaagggcaagcgtgygggtgatgagggagggagcccggggtctgtcaggccacctgtcatgtggaccttggggcttggggctgccaaggtttactctgcccccaactggccccca

SEQ ID NO: 519443 - DNA, 201 bp, Homo sapiens
accgcagcccgggacccggccattcatgtggggccccagccaccagctcctagccatttgcatgggaccccagcctgaccccagcccccggttcctggccrtgccttggctccctctgaccccgccgcccctctggcagttccgctcactctccatggtgtctgagtgcctgttctcgctcatcaatggggacgacatgtt

SEQ ID NO: 519444 - DNA, 201 bp, Homo sapiens
attcacatggtgaccgcagcccgggacccggccattcatgtggggccccagccaccagctcctagccatttgcatgggaccccagcctgaccccagccccyggttcctggccatgccttggctccctctgaccccgccgcccctctggcagttccgctcactctccatggtgtctgagtgcctgttctcgctcatcaatgg

SEQ ID NO: 519445 - DNA, 201 bp, Homo sapiens
gtgctcaccatctcgggcaccatcatgaagatcggcatcgaggccaaggtgcgtcctgccaacaccctgggccccaggtcccatccctgctgtcagtgccyatccggggccatatcctcccccaggccccccaaaggaagggctgggccagataggttgacgcagctcccacccgcagaacttggcgagctacgacgtctg

SEQ ID NO: 519446 - DNA, 201 bp, Homo sapiens
ttgagaccagcctggccaacattgcaaaaccccgtctctactaaaaatacaaaaattagctgggtttggtggcaggtacctgtaactcagctactcaggargctgagacaggagaattgcttgaacccagggggtggaggttgtagtgagctgagatcataccatggcactccaacttgggcaacagagtgagactctgtc

SEQ ID NO: 519447 - DNA, 201 bp, Homo sapiens
tggtgaggccccccgggaacccacagggctcctgagttccagggcagggacctggtcagggagtgtcttgggagcactggccaagggcaagcgtgcgggtratgagggagggagcccggggtctgtcaggccacctgtcatgtggaccttggggcttggggctgccaaggtttactctgcccccaactggcccccacagat

SEQ ID NO: 519448 - DNA, 201 bp, Homo sapiens; identical to SEQ ID NO: 288296

SEQ ID NO: 519449 - DNA, 201 bp, Homo sapiens
cgagcggccccctccgccccccagcgacgatctcaccctcttggaaagcagctccagttacaagaacctcacgctcaaattccacaagtactgcctgctcwctcgaggggggcccagggtgggggaggcagcacactaggcactctcaccccagcaactacttccctaaggtggggacagggcccccccgcccgcgctggt

SEQ ID NO: 519450 - DNA, 201 bp, Homo sapiens
gagtcagcacgtggcaggggacgctggcacttggggccggaagggacccgaagacgcccctgaccctcacccgagcctcctgcctaggctggtcaatgtcmccatccacttccggctgaagaccattaacctccagagcctcatcaataatgagatcccggactgctataccttcagcgtcctggtgaggccccccgggaa

SEQ ID NO: 519451 - DNA, 201 bp, Homo sapiens
cgctcatcaccggcgcctacgacaccatcaaggtcagccgcatgcacccagccctgagctcgggctctgggtgccctggagtctgccatgagggggtcttrgggacaccgcagggtgaacagagaagacccaggagagaatatgggagactctatgaaaccaaaaagagggtggttcagaactggggggcgcagggggatg

SEQ ID NO: 519452 - DNA, 201 bp, Homo sapiens; identical to SEQ ID NO: 288332

SEQ ID NO: 519453 - DNA, 201 bp, Homo sapiens
ccgaactcaggcgggcgggctgtgtctcccacctggggcggcggagctcctagtctctttttttctaagctccagcgctgacttttcacggtggagaaaarggcagacggctcctagaacttgggcggcgggtgggcaccagcctctccaattcttcctcctgaacccaggctctgctgggttcccaaactcaggcaggga

SEQ ID NO: 519454 - DNA, 201 bp, Homo sapiens
ggagcgaggtcgcagtgacagcggcgggcgatcggacccaggctgccccgccgtacccgcctgcgtcccgcgctcccgccccagcatgacagccccggcgkgtccgcgcggctcaggtgagggcgcgggcggcaccgtggggccccgaactcaggcgggcgggctgtgtctcccacctggggcggcggagctcctagtctc

SEQ ID NO: 519455 - DNA, 201 bp, Homo sapiens
ctagccatgccaacctctactaccctctccccagctcatcctgtttgggctcagtaatcagctggctgtgacattccgggaagagaacaccatcgccttcygacacctcttcctgctgggctactcggacggagcggatgacaccttcgcagcctacacgcgggagcagctgtaccaggccatcttccatgctgtggacca

SEQ ID NO: 519456 - DNA, 201 bp, Homo sapiens; identical to SEQ ID NO: 288333

SEQ ID NO: 519457 - DNA, 201 bp, Homo sapiens
acccagaggtcatcttttgggtatttgtccagacaaacctagaatacaggctgagttctatgctcatgtctggaagctggagttgggataagcccagcagscttgaacgcccagtgaaaagccagtgggagcagttcattctctccccactgatcaataacgggaacattgatgaaatgttctgacattcaccatggacca

SEQ ID NO: 519458 - DNA, 201 bp, Homo sapiens
cctccggcaagttccgccgcgggagcggctcggcctgcagccttctctgctgctgcggaaggttcgagtcccgggtctggcacattcagattggaggttasggaatggggaaaggggagcgagccagagaaaactgacgcccctcttccctgcttccttcctccagggacccctcggaggagcattcgctgctggtgaatt

SEQ ID NO: 519459 - DNA, 201 bp, Homo sapiens
cgctacctgaccttcttccacaactacaatgtgagttttgcacatgcagctgggccttccacatggttactccacaccctccaaataaatccctacacacrcagccctcaccagccccggccaatggccccttgcaagcctcctcctcctacctgcccacaccagatatatctgtcactgcacctgcgcggggccccggga

SEQ ID NO: 519460 - DNA, 201 bp, Homo sapiens
gcacgtgccaccacacctggctaatttttgtatttttactagagatggggtttcaccacgttggccaggctggtctcgaactcctgacctcaggtgatccmcctgccttggcctcccaaggtgctgggatttcaggcatgagccactgaacccagctaagtcatacagtttcaatgaccttgtcattgaccctgggacgtt

SEQ ID NO: 519461 - DNA, 201 bp, Homo sapiens; identical to SEQ ID NO: 288349

SEQ ID NO: 519462 - DNA, 201 bp, Homo sapiens
gcggatccccatcagcctggagacccaggcccacatccaggagtgtaagcaccccagtgtcttccagcacggtgagcccctgagccccagaccagcactgmccaggggccctggcctgtcctgggattccccaagccccagatcagcgctgcctgggggccgtgacctccccaggaatccgctgagcctcagatcagcaca

SEQ ID NO: 519463 - DNA, 201 bp, Homo sapiens
gtggttactggtgagtgggcaggacgaggcttcactgttgggagcctgagctgctgggattaaaatcaacagctgtggctgggcacggtggctcacgcctrtaataccagcactttgggaggctgaggaggaaggattgcttgaggccagaagtttgagaccagcctgggccacgtaggaagaccttgtctctacgcacaa

SEQ ID NO: 519464 - DNA, 201 bp, Homo sapiens; identical to SEQ ID NO: 288351

SEQ ID NO: 519465 - DNA, 201 bp, Homo sapiens
cggagtctcgctgtgtcacccaggctggagtgcagtggtgcaatctcggctcactgcaacctctgcctcccgggttcaagcgattctcctgcctcagcctmctgagtagctgggattataggcacacgccaccatgcctggctaatttttgtatttttagtagagatggggtttcaccatgttgaccaggctggtctcaaa

SEQ ID NO: 519466 - DNA, 201 bp, Homo sapiens
agcctgggacccggccattcacaggggccctagcctggaacccgaccattcacatggtgaccgcagcccgggacccggccattcatgtggggccccagccrccagctcctagccatttgcatgggaccccagcctgaccccagcccccggttcctggccatgccttggctccctctgaccccgccgcccctctggcagttc

SEQ ID NO: 519467 - DNA, 201 bp, Homo sapiens
ttagaagattagaagtatgatttgatcagttggagacccaagaatctggttttatatggcaggttcaatatttgttttaccagattcttttctgcatcctwgatttttgggatcagttagtggtgcaggaaactaaagcttttggaactctttagggagagacccagaaaggggcaatgtatgttttcctgtcactgtaga

SEQ ID NO: 519468 - DNA, 201 bp, Homo sapiens
tctccggaagggcaaggtaaggacagagaatttttgtgaggttctttgggaagctgggcagcttgttcacacagggaagatttcttgacctctcttcagtyctcatttgttcaatgaatttcagggggaaaataaatccactaaggttgaaagtcagtggcaaaatttctgattctccattactgttgctttgatggggta

SEQ ID NO: 519469 - DNA, 201 bp, Homo sapiens
caaatattaagtaagttacttatcccatttagtagtatttcaagacttttccctgcattcgtttctatagatctaagaagttatttcaaacctgattcatytccactctctcaaatcccttgatttttctgaaaaattcatttctcattatttctgtatccctcagcacccccactcacccaccacattattctggtctga

SEQ ID NO: 519470 - DNA, 201 bp, Homo sapiens
aaacagtatgtgctgacagccctggctgctcgtgccaagcttcgagcctggaatgatgtagatgccctattcaccacaaaggtgtgtgccctgcccctgtrctgctgaggccttgggagacagaagggttctatcatgttataagttctagttaccggtttacatttttcctccaactttttattttccaaaatttcaaac

SEQ ID NO: 519471 - DNA, 201 bp, Homo sapiens
ggagaaaagcagtagggtggcaagtagctatggatactttttttttttttttctctgagatggagtcttgctctgtcgcccaggctggagtgcagtggtgmgatcttggctcactgtaacctccgcctcctgggttcaagcaattctcctgcctcagcctcctgagtagctgggatcacaggtgtgcgccaccactccccg

SEQ ID NO: 519472 - DNA, 201 bp, Homo sapiens
tgttctttgtttctctcctagggtgggaaacacaactgctgtagtattaaaagatttttctcctgcctctactccatggacattgtttttttttttttttttcacttggctcactccaccacaggcaaatgatcgccatctagaatcagcaggacagactgagatcttccgaaagcacccccgcaaagcctccatcctcaa

SEQ ID NO: 519473 - DNA, 201 bp, Homo sapiens
ctgttctttgtttctctcctagggtgggaaacacaactgctgtagtattaaaagatttttctcctgcctctactccatggacattgtttttttttttttttttcacttggctcactccaccacaggcaaatgatcgccatctagaatcagcaggacagactgagatcttccgaaagcacccccgcaaagcctccatcctca

SEQ ID NO: 519474 - DNA, 201 bp, Homo sapiens
gttccagatagccattggctttccttgcatcacatacagagctgttggctataccttcagagattgctaatgagttgctggccccgtgtctgtagtgctcrgggcatgactctgtgttggaaagtttgcacagtctttgttcttttttcctgtaggttctgattttcctgaagaggacactgagcaaaggtgagaatggct

SEQ ID NO: 519475 - DNA, 201 bp, Homo sapiens
gccactgcactccagcctgggtgacacagagaaactccatctcaaaacaagcagacaaacaaaaaacataatgcagtgttgaagatgggacccttgacatytgtgatatttgctgatctataaacataccaccatggcatgtaatttaatttaccttttgtactctgccataaaaaaatggctaacaaatctaggtgtccc

SEQ ID NO: 519476 - DNA, 201 bp, Homo sapiens
caggtggatcacgaggttaggagatcaagaccgtcctggcgaacatggtgaaaccctgtctctactaaaaatacaaaaataagctgggcgtggcagcataygcctgtagtcccagctactctggaggctgaggcaggagaattgcttgaactcaggaggtggaggttgtagtgagccaagatcatgccactgcactccagc

SEQ ID NO: 519477 - DNA, 201 bp, Homo sapiens
gagcacaaatcacatctctgagggcgtcctttagggtgatgactacattaaccacagagccccctcagatggctgtgttggtttgaagaagtcagagtccrtgctaagtgcctgctgtttgggttggtgtgaaatgaaaagctgatttaatggctatgagctgagtgtgttgatggtgaattaagacataggggtaaacca

SEQ ID NO: 519478 - DNA, 201 bp, Homo sapiens
ttataaagttttttgttttgattttcattagtgagaataaatgtgttttgggtaactcatttttatctaaaactttattttctttatactcattatgttcraattgaagatgatttatcatgcatgttgttgtatatagattttgagtttttcaaccttgtaaactttggaagtggcaaagctgatagtacacttttagtg

SEQ ID NO: 519479 - DNA, 201 bp, Homo sapiens
ttaccagctgttaacctggaagtatttcttcttcatcccgaatctcccatgtcctccccacttctatttgtttccatccaatgtggattcatgatcatttkatggattttaaactactctggggatatcctaggcaatttctttctttttctgttctttgtttctctcctagggtgggaaacacaactgctgtagtattaa

SEQ ID NO: 519480 - DNA, 201 bp, Homo sapiens
aagaagtcagagtccatgctaagtgcctgctgtttgggttggtgtgaaatgaaaagctgatttaatggctatgagctgagtgtgttgatggtgaattaagwcataggggtaaaccattcttagcttttgttagggtttgatgagataatatttggaatgtgtgagtagggagaccaatttcacacttgactaattggcttt

SEQ ID NO: 519481 - DNA, 201 bp, Homo sapiens
aagaagatagttcaaatccagtacttttatgtactctattaataatgggtatgtatagttctcagaaatccacctggaagctttcctggccctcaccaggkgtaagagggcctcatctggccaggagggaaaagaggtttgtaaggtttgtagcttcaagtgagctggcatgctagcatagcaagttctgtccctggtgct

SEQ ID NO: 519482 - DNA, 201 bp, Homo sapiens
gatttcttgacctctcttcagtcctcatttgttcaatgaatttcagggggaaaataaatccactaaggttgaaagtcagtggcaaaatttctgattctccrttactgttgctttgatggggtagtggggaaagagtgatggatgagagggaaaagtacatttaagagtgagaggccagggccaggggtggtggctcacgcc

SEQ ID NO: 519483 - DNA, 201 bp, Homo sapiens
tctctcaaatcccttgatttttctgaaaaattcatttctcattatttctgtatccctcagcacccccactcacccaccacattattctggtctgatcgtawaacatagactaacctagaatgtgttgagtgtgcctggcctacctgccgctaccccatcttcctctttcagaactggctgggctataccaagaagagagca

SEQ ID NO: 519484 - DNA, 201 bp, Homo sapiens
tgagaaattttttgatttttaaggggcagagtcaatatcaggaaatatttaatgtctgtcttttctaaaattcttaagcacccccattgatgtatttctasttccccttaatttttctcggtctctgctttccagatcccagataaacagtatgtgctgacagccctggctgctcgtgccaagcttcgagcctggaatgat

SEQ ID NO: 519485 - DNA, 201 bp, Homo sapiens
ttatgtatattttaccataattaaaaaaaattttctccctgctccattttttaatggcacttcagatttctacagatgaataaaaccttttttaagccttragttcctatattgcgttattgagttggttacacattgtgtctttaaccaagcctggatggctctgattgaaactgttgaccttttccctcttgtgttctt

SEQ ID NO: 519486 - DNA, 201 bp, Homo sapiens
gatgatgacctggagcgagtcagctggagtggggaacctgtgggaagtaagtagaagagtccctaggcagggatagatgttgaggattcttatcactgatraaggctctacttgtttgtttcttcaatgctagttaggagagggactaggataagactattttcagataagcatacatctggaaacttaactccaggagaa

SEQ ID NO: 519487 - DNA, 201 bp, Homo sapiens
gttgtctactgccattgcatggttaaaaagattccagaaatcctctggtagattattgtgtttgttagacacattctatgtctatctgtagataattactrtagtgaaggaatgatctctagttttctggaaagtgaaaaataggtagaaggaccatgcaagacactagaaatggtctaggagccagaaagcctggattgt

SEQ ID NO: 519488 - DNA, 201 bp, Homo sapiens
gcggtctcgttattcgtgttttctctccgccctacgattattcccttccgcccccttctctaagctgcacagcctgaatagaagggctggtccagcggcgkcggaggctggcgctgtcctgagagggagggctctgtgcggaagaggtgagggtgtcccaagccccttgggtcgcgtatctggctggatccagcctctccg

SEQ ID NO: 519489 - DNA, 201 bp, Homo sapiens
atacctttacccagaaggaatgaagaaaattaaaaagggtggaatggataggcaggaaggggagggctaacaatgaatcataccagcatcattcagggtcrcctcatgcagtggtgttcacacactagtccccagcagagtttccactgcttgatggtaaactgaggaaaaaaaaagacaaatgtagagagattttttttc

SEQ ID NO: 519490 - DNA, 201 bp, Homo sapiens
aaattagcaaagcatggtggcgcatgcctgtagtcccagctacctgggaagctgaggtaggagaatcgcttaagtctgggaggtcatgtctgggtgaaagmatgagaccttgtctcaaagaatttctcagcactgtcgatggcaggattgcttttttagttattgtacaacacatttgtgatatccatacagacattcagt

SEQ ID NO: 519491 - DNA, 201 bp, Homo sapiens
ttgggaggctgaggtgggaggaacactagagtccaggagttagagaacagcctgggcaacatagtgagatcccatctctaaaaaaaaatttaaaaaattarcaaagcatggtggcgcatgcctgtagtcccagctacctgggaagctgaggtaggagaatcgcttaagtctgggaggtcatgtctgggtgaaagaatgaga

SEQ ID NO: 519492 - DNA, 201 bp, Homo sapiens
ttttgtgaggttctttgggaagctgggcagcttgttcacacagggaagatttcttgacctctcttcagtcctcatttgttcaatgaatttcagggggaaawtaaatccactaaggttgaaagtcagtggcaaaatttctgattctccattactgttgctttgatggggtagtggggaaagagtgatggatgagagggaaaa

SEQ ID NO: 519493 - DNA, 201 bp, Homo sapiens
ggaatgaactcctggaatacaagaataaatctgaaattttaccaaaaactcagttgtattattaaaacttcagcaattcatgttaaaaaaaaaaaaaaaaacttggcaggaataagaatttccagccaagcacggtagcttatgcctgtaatgccagcacttgggaggctgaggtgggaggaacactagagtccaggagtt

SEQ ID NO: 519494 - DNA, 201 bp, Homo sapiens
tcttgaattggcaaaacctttaatatgaaattcacgccattcatgcgatgtctttctttaagggacgctctaaaggtgaactgagatcagacttgtgaggyaccgtgagcctcttatacttatgctggcgatttggtttagttgggtttgtttccttgtttgaatagagaaaggtactaaccttctggcactctaccagtt

SEQ ID NO: 519495 - DNA, 201 bp, Homo sapiens
gaggcacctggaaaacctgaaaacttaatccaaatgatgtattctttctttttatatgctcttttggttgggcttatgaataaattttaaaaaataaacatgtgaaaattggcctggtcaatttgtaatttgtttttcggttgttttcaggtcctggttgttaggagttttggggttttggcttctcacaaagaaaatgtt

SEQ ID NO: 519496 - DNA, 201 bp, Homo sapiens
agaggcacctggaaaacctgaaaacttaatccaaatgatgtattctttctttttatatgctcttttggttgggcttatgaataaattttaaaaaataaacatgtgaaaattggcctggtcaatttgtaatttgtttttcggttgttttcaggtcctggttgttaggagttttggggttttggcttctcacaaagaaaatgt

SEQ ID NO: 519497 - DNA, 201 bp, Homo sapiens
agactgattgaactatttcctttgatattgattatatacagaagagagaggcacctggaaaacctgaaaacttaatccaaatgatgtattctttctttttrtatgctcttttggttgggcttatgaataaattttaaaaaataaacatgtgaaaattggcctggtcaatttgtaatttgtttttcggttgttttcaggtcc

SEQ ID NO: 519498 - DNA, 201 bp, Homo sapiens
gttgaatgctattataggtctcccacatcattcattgagtgaccttggccaagttatcaaccctcttcatgagtttttcacatcgatcaaatggagatgaygacacctacccacagggttattatgaagatgaagggctagtatgtgagccagcacttagcataatacctagtttgtagtattagtatttattaagtgttt

SEQ ID NO: 519499 - DNA, 201 bp, Homo sapiens
gtaatctccctgccttagcctcccaaagtgttggaattatgggcatgagtcaccatgcccagcctatgtgaaaccgttgattgtaaccaagacacacaagrttggctactatgtgttatataaaacaatctgagggagaagagatgtgagcgtatcctctttcagagggaggtgtctctcagcagcatgggcacgggtgtg

SEQ ID NO: 519500 - DNA, 201 bp, Homo sapiens
aagaacaagtgattggctgggcgcggtggctcatgcctgtaatcccagcactttgggaggctgaggtgggcggatgacgaggtcaggagatcgagaccatmctggctaacacagtgaaaccccgtctctactaaaaattaaattactaaaaaaaaattagccgggcatggtggcgggcacctctagtcccagctacttagg

SEQ ID NO: 519501 - DNA, 201 bp, Homo sapiens
ctgaactatatacttaaatagggtatgttttactgtatgcaaattatgaataagggttcttaaaaaagaacaagtgattggctgggcgcggtggctcatgsctgtaatcccagcactttgggaggctgaggtgggcggatgacgaggtcaggagatcgagaccatcctggctaacacagtgaaaccccgtctctactaaaa

SEQ ID NO: 519502 - DNA, 201 bp, Homo sapiens
tttggcgttataaatacaaattgatggcagttgtctactgccattgcatggttaaaaagattccagaaatcctctggtagattattgtgtttgttagacasattctatgtctatctgtagataattactatagtgaaggaatgatctctagttttctggaaagtgaaaaataggtagaaggaccatgcaagacactagaaa

SEQ ID NO: 519503 - DNA, 201 bp, Homo sapiens
atgttggatgtcaaggctttattgtggatgagaattgctgatgtagttcttactatctcacaggtatctcatggtccatcagagagactgctggtaatagyggctcaacccacgaggggcgtgaacagctaaagagccgaaacagcttctcctcctatgcacaactacccaagcctacttctacctactccctgagcagct

SEQ ID NO: 519504 - DNA, 201 bp, Homo sapiens
gctggcatgtgtatctggctcgaggatcaggagaagtgtgctctttcctgcttactgaggcagcatggaagtactgtgtagcgttacctcattcccattgyagaactagtcctgtggttgatgatggaaactggaaacattagctattgaactcttttgccttcttcaggactttcttttctaccttgtagagctctgtgc

SEQ ID NO: 519505 - DNA, 201 bp, Homo sapiens
acaccagtagttccagctactcaggagcctaaggagagaggattgcttgagcccaggagtttgagaccatcctgggcaaaaagaaccctgtacagaggctsattggaggtttgtattgtttgttttgatgcacagacctaccgggacctgaaggatcgtcaacagttgctagcatacaggagtaaggtagataaaggatca

SEQ ID NO: 519506 - DNA, 201 bp, Homo sapiens
tcattattagaggaattttctgatactgactaaggaggtagaaatcattctagctacaggggcaaaggtgacttctagggatgctgtctttggggaagaayggagatctgcttttggccataaagttaacattgggagcccacaagtcaaaaaaatgtgagaacgaagaagtagagggaaggaatgacaagcaggattcat

SEQ ID NO: 519507 - DNA, 201 bp, Homo sapiens
gggctggtccagcggcggcggaggctggcgctgtcctgagagggagggctctgtgcggaagaggtgagggtgtcccaagccccttgggtcgcgtatctggstggatccagcctctccgcatcttgatcttttcccctcttctaggaggcatccctacaccctatgactacaggcctgattctcttctttcagtcagggcga

SEQ ID NO: 519508 - DNA, 201 bp, Homo sapiens
agcatacatctggaaacttaactccaggagaagatacttgggaaatccagcaggagttcccacatggctatataggtctgctcttcaggggttgactcttrgctggctatttcattctcatttggggtgcttgttaaaatgacatactcctaggctttatcccagagattctgttcattaggtcttctgcggagtagaggg

SEQ ID NO: 519509 - DNA, 201 bp, Homo sapiens
ctagcaattttacttctgggtatatctcaaaaagaatggaaagcaggtacttgaacatatatttgtacctccatgttgatagtagcattattcacaatagycaaaagatggaaacaacccaaatgtccattgatggatgaatggataaacaaaatgtgccatatacatgcagcggaatgttactcagcattaaagaagaac

SEQ ID NO: 519510 - DNA, 201 bp, Homo sapiens
aaaggtgacttctagggatgctgtctttggggaagaacggagatctgcttttggccataaagttaacattgggagcccacaagtcaaaaaaatgtgagaasgaagaagtagagggaaggaatgacaagcaggattcatggtgcccttctgaaccagctgcttattctttttcagctctgtcagacacacctgccaaaagct

SEQ ID NO: 519511 - DNA, 201 bp, Homo sapiens
aaaaatacaaaaaaattagccgggtgtggtggcaggtgcccatagtcccagctactcgggaggctgaggcaggagaatggtgtgaacccgggaagcggggyttgcagtgagccaagattgcgccactgcactccaacctgggcgacagagcgagactccgtctcaaaaaaaaaaaaaatcactgaactatatacttaaata

SEQ ID NO: 519512 - DNA, 201 bp, Homo sapiens
cctttatacttccatatcgattttagtagcaccttggcagtgtctacaaaagagttgttgagatttttattgggattgccttgaatgtacagatcaatttkggtagaattggcaatgatcataataattaatggatcaaaatggatcataatgccaggtgtggtggcttgtgcctataatcctagctactcaggaggctga

SEQ ID NO: 519513 - DNA, 201 bp, Homo sapiens
aggctgaggcaagagaatcgtttgaacctggtggccgagattgtgcaattgcactccagcctgggcaacaagagcgaaactccatcttaaaaaaaaaaaaagccaggtgtggctaatttataatataaatgtatattataatttataattataaatatataaatgtaacttataatcttatagcaggatatgtttttagtc

SEQ ID NO: 519514 - DNA, 201 bp, Homo sapiens
tttgggaggctgaggcaggtggatcacctgaggtcaagagttctagaccagcctaccaatatggtgaaaccccgtctctactaaaaatacaaaaattagcygggcatggtgggggcttctgtaatcccagctgctcaggaggctgagggaggcagattgctagaacctgggaggcaaaggttgtagtgaaccgagattgca

SEQ ID NO: 519515 - DNA, 201 bp, Homo sapiens
aatggatagggaagtccttctctttttccagaaaaatcttaggccataattttcatttactttgtaagaaaaagattattgaagggtaaagcattctcatyggaggtggcagctgggtgttaggagcgagataaatgagagaaattcagaggagttggactggttttctatagcatgatgaatgaaattgacattaaccct

SEQ ID NO: 519516 - DNA, 201 bp, Homo sapiens
gggctctgtgcggaagaggtgagggtgtcccaagccccttgggtcgcgtatctggctggatccagcctctccgcatcttgatcttttcccctcttctaggrggcatccctacaccctatgactacaggcctgattctcttctttcagtcagggcgacccttgggcgctggagtacgcttgggactggggctgcgagtgagc

SEQ ID NO: 519517 - DNA, 201 bp, Homo sapiens
gatggagtcttactctgttgcctagtctggagtgcaatggcgcgatcctgactcactgcaacctccgcctcccaggttcaagcgattctcatgcttcagcytccctagtagctgggattaaaggtgccaaccaccatgcctggctaatttttgtatttttagtagagatggagttttaccatgttggccaggctggtcttg

SEQ ID NO: 519518 - DNA, 201 bp, Homo sapiens
tatgtctatctgtagataattactatagtgaaggaatgatctctagttttctggaaagtgaaaaataggtagaaggaccatgcaagacactagaaatggtmtaggagccagaaagcctggattgtaatttgaaataggagcatttaacaaagtggctttgatactgaactcttttgtgcctcactttccccatgagtaaca

SEQ ID NO: 519519 - DNA, 201 bp, Homo sapiens
gcggaggctggcgctgtcctgagagggagggctctgtgcggaagaggtgagggtgtcccaagccccttgggtcgcgtatctggctggatccagcctctccrcatcttgatcttttcccctcttctaggaggcatccctacaccctatgactacaggcctgattctcttctttcagtcagggcgacccttgggcgctggagt

SEQ ID NO: 519520 - DNA, 201 bp, Homo sapiens
cagggatagatgttgaggattcttatcactgatgaaggctctacttgtttgtttcttcaatgctagttaggagagggactaggataagactattttcagakaagcatacatctggaaacttaactccaggagaagatacttgggaaatccagcaggagttcccacatggctatataggtctgctcttcaggggttgactct

SEQ ID NO: 519521 - DNA, 201 bp, Homo sapiens
gggtgatgaggaggagtattggaacagctccaagttcaaggcttttacctttgacgatgaagacgatgagctttcacaggtaggtcaactgctgaagtttrtactcttctccacagtgccactataaaattccttcctcttgcattctgggtaactaggcttttgaccatgtatgtcttcattaggctcagaaaagagcca

SEQ ID NO: 519522 - DNA, 201 bp, Homo sapiens
acaaaaccgtcccatttcttcatttttttcacatccattccctcccacaaattatttcccccttagacactaagactgagtttgagttgaggagcgggtaygctgataaatttgattccttaacttcctgggattcacgtattgctaatattccaggattacagcaatgactggagccccagtgatacagtgcgacgtctc

SEQ ID NO: 519523 - DNA, 201 bp, Homo sapiens
aactgctgaagtttgtactcttctccacagtgccactataaaattccttcctcttgcattctgggtaactaggcttttgaccatgtatgtcttcattaggytcagaaaagagccagaaggattgtaaaatccagctcactgcctttcttactttacctttttaagatgatttattcctacaggtttttttttcttttgaag

SEQ ID NO: 519524 - DNA, 201 bp, Homo sapiens
ccacagtataaagtaccttgacatatgttacctggcttgattttcccaactatttgagtagatatttttttaaccctgttttatagattagaaaactgggyttctaaacatgagggcttacctggggtctcagagctgggaaagggtgcaacttagacttataatctctatattctgactcagctctgccatactttgctt

SEQ ID NO: 519525 - DNA, 201 bp, Homo sapiens
cacaaggttggctactatgtgttatataaaacaatctgagggagaagagatgtgagcgtatcctctttcagagggaggtgtctctcagcagcatgggcacrggtgtgtggactctcaagacacagctcagttccagatagccattggctttccttgcatcacatacagagctgttggctataccttcagagattgctaatg

SEQ ID NO: 519526 - DNA, 201 bp, Homo sapiens
tcatttatcagcaaaattatgagtgactataagtattttgtggactctcaggatccctcttgaattggcaaaacctttaatatgaaattcacgccattcaygcgatgtctttctttaagggacgctctaaaggtgaactgagatcagacttgtgaggcaccgtgagcctcttatacttatgctggcgatttggtttagttg

SEQ ID NO: 519527 - DNA, 201 bp, Homo sapiens
tgctttttgtagctatctcattatcgagagcatttgaacattcaggaccctgacaaacgaaaagaatttcttaaaacctgtgttgggtaagtatgggggaraaatgattttaagtataaatacctttacccagaaggaatgaagaaaattaaaaagggtggaatggataggcaggaaggggagggctaacaatgaatcata

SEQ ID NO: 519528 - DNA, 201 bp, Homo sapiens
tgtccaaaaccctaaggttcttctctcacttgaacacagacgaccttgcttgggtgatgagacatcccctttatctcttcctctactgctggccaagaccygtcactttataagaagctcagatgcagcagtgctggagagctctctctttatgcaaaaatctcatttcaccaggagctttcagaagtttcacctgggcta

SEQ ID NO: 519529 - DNA, 201 bp, Homo sapiens
aaagacatcagggagaaatgagcagagcactggatcacagctagagcactcattgctggcatgtgtatctggctcgaggatcaggagaagtgtgctctttmctgcttactgaggcagcatggaagtactgtgtagcgttacctcattcccattgcagaactagtcctgtggttgatgatggaaactggaaacattagctat

SEQ ID NO: 519530 - DNA, 201 bp, Homo sapiens
catttcatgaatagttaacatctcatgaatagtgttacaatgaatgtggaaatgcaagtatctttatgaggtgatgatttcatttattttgggcatatacycaaaagaaagattgattactgggtcatatgatagttctatttttatttttatttttacttttttgagagagggtctcactctgtcacccaggctgaagtg

SEQ ID NO: 519531 - DNA, 201 bp, Homo sapiens
tctcctcctatctatattgcccctgctctagttccttcagaaactcaaaacaaaaccgtcccatttcttcatttttttcacatccattccctcccacaaaktatttcccccttagacactaagactgagtttgagttgaggagcgggtatgctgataaatttgattccttaacttcctgggattcacgtattgctaatatt

SEQ ID NO: 519532 - DNA, 201 bp, Homo sapiens
gcaagagtttgtttggagaccagcactcctgtattattttcccagccctctgactgctttctctgtgtttttataaacttgtcgtacttggagaattcatrgaactaaatcaagctatacaagctgtgtagtcttctctccaacatggagttctgtgggcactggaccccactgttatcccactatagcctcttagcctct

SEQ ID NO: 519533 - DNA, 201 bp, Homo sapiens
gtcagtgttatgaaactagtgatcagggtaactacatggagtggatgttgctttgtaaccctgtacagtgtgtcctttgatattcaaggttaaaggtggamaggaatgagtttgggaaagtgagagaagactgaatggcctatagcagtgctggggcttgggaattaagaagttcttgaactgagaaattttttgattttt

SEQ ID NO: 519534 - DNA, 201 bp, Homo sapiens
agggtaaaaataaagagactctccttggggacattttgtttcattattgcttattctttagtatccagcaacaaaggaataaagaaaactgtcttcttgtrtactaattctagtgttattctgccaggtttgctcactagagagattccgctccttacaggacaaactacaactcctagaagaggcagtaagcatgcatga

SEQ ID NO: 519535 - DNA, 201 bp, Homo sapiens
aataggagcatttaacaaagtggctttgatactgaactcttttgtgcctcactttccccatgagtaacatggaaatggaatctcccaggcctaccttacargattgttctgaggatcaaacgaatgacagagtgatttatgaactgacatgtgtgccagagacatttatatgttctatacacatcttcagcatttgtggct

SEQ ID NO: 519536 - DNA, 201 bp, Homo sapiens
gtctgggccctgccttcacaccagccacacgggctgcctggagccaactctacggggccgtagtgcaggccatgagtcgaggctgggatggcgagtaagakgcgaccccgcccggcagcccccatccatctgtgtctgtctgttggcctgtatctgttgtagcccaggctccccaagcttccctgcatcttggtccttgtc

SEQ ID NO: 519537 - DNA, 201 bp, Homo sapiens
aagcctcacatttagagggaaaggtagacacaatgtgatacccaaggatttgggtaggaccctgctcaggaagcatggactcaatgcaggagaggaaaaaaggcccaggagccctaatcagtcctaggcctcagttttctcacctgtggaatggagcagtgcctttctgcctttggaagtgacaaggtgccccttgcctct

SEQ ID NO: 519538 - DNA, 201 bp, Homo sapiens
attttattatgagtaataatggcaaatgagagccattatctttatttatttatttacttacttatttattctggggacagaatcttgctctgtcgcctagsctggagtacagtgatgtgatcacagctcactgcagcctcaacctcccaggctcaagtgatcctcccacctcagcctccctcatagctgggactacaggca

SEQ ID NO: 519539 - DNA, 201 bp, Homo sapiens
tagtctagctgagcttctttatagaatagcagctgagttccaagggggagtttttagaggacaagccccagtgtgaaagtgcctataaagcctctgcttgyatcacttttgctaatgtcccattggccaaagccactcacatggataagcccagtgtcaatgtgggaggaccctactcaagggcatgaatccttgaggtgt

SEQ ID NO: 519540 - DNA, 201 bp, Homo sapiens
ggaagcaccgggcagtgggtgtgaagctcagctccttctcggtgggtaaaggagctctgactctctccagagctcctggcctggggccacttctctctccmagacctccccttgccacctgttctctctcccattcccatatccttagataaccagggctgcgggcctgcatctgttacctgctgtgtggccctgacatgg

SEQ ID NO: 519541 - DNA, 201 bp, Homo sapiens
catctgttacctgctgtgtggccctgacatgggcttgacctctctgagcttccaagttctcttttctgatatggcttcttttaaaaccataaaaattaacragcttttgggatcagctggtctgctcaattttctattgctatgtatcaaacaaccctagaactatgacaatgctttccgatttctcatggctgggctcag

SEQ ID NO: 519542 - DNA, 201 bp, Homo sapiens
gcttctgcctccggactccccccagctcacttttttctcaggcacccgctgtggctgcactacatccaagctgtgtgaccttaggcgagttctagcctccycgggcttctgttttctcctctataaaactgggataacagttgtacccactgcttaggacagtgaggaatacagttaaaagttaaccacacggaaagtact

SEQ ID NO: 519543 - DNA, 201 bp, Homo sapiens
agggctacacgagcgcccggggatgcgggtggaggctgcctcggcgggaaaggggtcacgcggcaggaccggccccgaaggagggaaaactggccgctgcyggggcgctggggcgcctgccagatgtgcgccagaggagcggggcgcggcgacgggtggcacagcccctctgcctctctctcgaccgtgggcgcctgttgc

SEQ ID NO: 519544 - DNA, 201 bp, Homo sapiens
aggccgcttcgcaacacgtcttccgtttctaccgggaatcgctgcagaggcgttactccaagagctgaggcaagctggggcaaggggccgctcccattgcstccacccactcaccccctacagcctgaagcaaaccagcagcccagccttgcctctctgacccatgggctccttgagcctgcagctctgtaaccacagggc

SEQ ID NO: 519545 - DNA, 201 bp, Homo sapiens
ggcaggggagtgatgggaggttaagggagtcaggtggggtcagcagaacctcctgggtcagccaagtcgtgtgtgcatgaagggctcggcccccagcaccraccagtctctcccccgcagctccagcagtgcctggctgcggcccaggccgcttcgcaacacgtcttccgtttctaccgggaatcgctgcagaggcgttac

SEQ ID NO: 519546 - DNA, 201 bp, Homo sapiens
tgctgcaggttgtcagcgatgccggctctgtatcctttctgccaggcctcctcctccaggaagtctcctgattgcttccctcctggtggatacatataccytcactgctagccagaaagccttcaaacacttgacaggtaccagctcactgaagaaggagagcaaacagcctgggtgcttacttatgtgccaggcactgtt

SEQ ID NO: 519547 - DNA, 201 bp, Homo sapiens
ctccatcaccgtggtgctgcaggttgtcagcgatgccggctctgtatcctttctgccaggcctcctcctccaggaagtctcctgattgcttccctcctggyggatacatataccttcactgctagccagaaagccttcaaacacttgacaggtaccagctcactgaagaaggagagcaaacagcctgggtgcttacttatg

SEQ ID NO: 519548 - DNA, 201 bp, Homo sapiens
ggcgcgtgcgcactggttacgcagcctgtttgcggcgcgcgctgccaggcggaagtgacaactgcagccgcacgtgggctcggcgcgatggaggaggagaygcatactgacgccaaaatccgtgctgaaaatggaacagggtccagccctcggggtcctggctgcagcctccggcactttgcctgcgaacagaacctgctg

SEQ ID NO: 519549 - DNA, 201 bp, Homo sapiens
ggactgggcggagccagattgttggtaaacgctaagccacgtgcggacgcccaggaggatggcccagcccggcgcgtgcgcactggttacgcagcctgttygcggcgcgcgctgccaggcggaagtgacaactgcagccgcacgtgggctcggcgcgatggaggaggagatgcatactgacgccaaaatccgtgctgaaaa

SEQ ID NO: 519550 - DNA, 201 bp, Homo sapiens
gccgctcccattgcctccacccactcaccccctacagcctgaagcaaaccagcagcccagccttgcctctctgacccatgggctccttgagcctgcagctytgtaaccacagggctcctgtggggaggccttggcctgtgacagcccccaggcctgggggcacagatccccccagcaaggataacattcaaaggagctcac

SEQ ID NO: 519551 - DNA, 201 bp, Homo sapiens
gtgtgaggatgcctgataggtctgagtcctgttgctgtcagaatctgatcctgaagtccttctccctctttttatttctcctgatctctaagaaacagttsatgaaatgggaaataatcccttaccacttgcctcacttgggggcaggggagtgatgggaggttaagggagtcaggtggggtcagcagaacctcctgggtc

SEQ ID NO: 519552 - DNA, 201 bp, Homo sapiens
ttgcctcacttgggggcaggggagtgatgggaggttaagggagtcaggtggggtcagcagaacctcctgggtcagccaagtcgtgtgtgcatgaagggctyggcccccagcaccgaccagtctctcccccgcagctccagcagtgcctggctgcggcccaggccgcttcgcaacacgtcttccgtttctaccgggaatcgc

SEQ ID NO: 519553 - DNA, 201 bp, Homo sapiens
cgatggaggaggagatgcatactgacgccaaaatccgtgctgaaaatggaacagggtccagccctcggggtcctggctgcagcctccggcactttgcctgsgaacagaacctgctgtcgcggccagatggctctgcttccttcctgcaaggtaagaacttcacccaggtctttcttttggagagggactaccgtgtactgt

SEQ ID NO: 519554 - DNA, 201 bp, Homo sapiens
gatgggaggttaagggagtcaggtggggtcagcagaacctcctgggtcagccaagtcgtgtgtgcatgaagggctcggcccccagcaccgaccagtctctyccccgcagctccagcagtgcctggctgcggcccaggccgcttcgcaacacgtcttccgtttctaccgggaatcgctgcagaggcgttactccaagagctg

SEQ ID NO: 519555 - DNA, 201 bp, Homo sapiens
gcgcgatggaggaggagatgcatactgacgccaaaatccgtgctgaaaatggaacagggtccagccctcggggtcctggctgcagcctccggcactttgcytgcgaacagaacctgctgtcgcggccagatggctctgcttccttcctgcaaggtaagaacttcacccaggtctttcttttggagagggactaccgtgtac

SEQ ID NO: 519556 - DNA, 201 bp, Homo sapiens
cagaacctcctgggtcagccaagtcgtgtgtgcatgaagggctcggcccccagcaccgaccagtctctcccccgcagctccagcagtgcctggctgcggcycaggccgcttcgcaacacgtcttccgtttctaccgggaatcgctgcagaggcgttactccaagagctgaggcaagctggggcaaggggccgctcccattg

SEQ ID NO: 519557 - DNA, 201 bp, Homo sapiens
tgaagggctcggcccccagcaccgaccagtctctcccccgcagctccagcagtgcctggctgcggcccaggccgcttcgcaacacgtcttccgtttctacygggaatcgctgcagaggcgttactccaagagctgaggcaagctggggcaaggggccgctcccattgcctccacccactcaccccctacagcctgaagcaa

SEQ ID NO: 519558 - DNA, 201 bp, Homo sapiens
actggccttctcctcgctggcctcctgctcatcttcctcttcctccttgggagcctgcactaccctgctggtctggttctgaggggctggggtctctggcractgaggactgggggccaagccgggtaccagccacacctgtgccaggaggacggagagcaggagacttggcaccaccttcatgtgatcggctgcggaggc

SEQ ID NO: 519559 - DNA, 201 bp, Homo sapiens
cagggcctcactctgcagtctgaacggcactaccctctcccctgtagaagcagtgaaatacttccactgtgtttcccaaaggacactgttgaggaagctctttttgactctaaatggcaagcctgcattcaacaggtcacccaagtattgtaaacgttgggtaaatagctctttcagtgtaaacgcagcccagtttcacgc

SEQ ID NO: 519560 - DNA, 201 bp, Homo sapiens
atgacaacgaaaattcttgtcaaaggtggaggcaaacttgcctgcaccgtacatcatgggcaccttaatggtcttgtacttgtccaggtggaaagtgtcgrcttcggtgaagacagggtcaaatggggtcaaccatttccctgaacaagtaagagaagaactcattgcagaaattccctctttgaaaagcattgttcttgc

SEQ ID NO: 519561 - DNA, 201 bp, Homo sapiens; identical to SEQ ID NO: 264564

SEQ ID NO: 519562 - DNA, 201 bp, Homo sapiens
ccttgcccaatgtctccacactgtctatgctcctcgcccatgagtcacttagtagccttctctataatcagtttgactgttatggtattgcagtgcttgcrttcaagtaactcattttacttaatgttgttattattgttaatctcttactgtgcctaatttataaattaaactttatcataggtatgtatgtgtaggaaa

SEQ ID NO: 519563 - DNA, 201 bp, Homo sapiens
acagcgtctggcactgttcaatatgtgtatcaatctgtttttgaaacgtgaaaacacattcatagaaaatcacgtagcgttaatcatatgctggcctaacraaaggaaagggagagacaatcgtagggccctgtggccttgggagagcagaacattatcaaagtacctttgaacaagatgtaatccacaagaattaatttg

SEQ ID NO: 519564 - DNA, 201 bp, Homo sapiens
ggtagcccagtaattcctgggtgctcctggacatatatcgcctaaggtctttgtaaagtctttgctcatctacccaaccctttggagtctaggccaggagytcagggggtgctcctggactaggacaccatccagcatggtgaggacgcaccttcctagacagaacctgggcagtaaggaatcaccagctcacctgccact

SEQ ID NO: 519565 - DNA, 201 bp, Homo sapiens
aattcctgggtgctcctggacatatatcgcctaaggtctttgtaaagtctttgctcatctacccaaccctttggagtctaggccaggagctcagggggtgmtcctggactaggacaccatccagcatggtgaggacgcaccttcctagacagaacctgggcagtaaggaatcaccagctcacctgccacttctcagccctg

SEQ ID NO: 519566 - DNA, 201 bp, Homo sapiens
tccaggtggaaagtgtcgacttcggtgaagacagggtcaaatggggtcaaccatttccctgaacaagtaagagaagaactcattgcagaaattccctcttygaaaagcattgttcttgctcaaataatagagagggagccttctatctcacttctctcacttctcgtcttctcgttccaactaggaaaggcgttccctaat

SEQ ID NO: 519567 - DNA, 201 bp, Homo sapiens
ccatgaggaccaccagcatggtggcatttccttggtagggcagtttgaggacatgacaacgaaaattcttgtcaaaggtggaggcaaacttgcctgcaccrtacatcatgggcaccttaatggtcttgtacttgtccaggtggaaagtgtcgacttcggtgaagacagggtcaaatggggtcaaccatttccctgaacaag

SEQ ID NO: 519568 - DNA, 201 bp, Homo sapiens
tgcctcatggagatctttcgcagcaggctgaatccgaagtttgaagtctccttggcaagctgctgcctgctggccatcagccaggctttctcttcctcacyggccttctcctcgctggcctcctgctcatcttcctcttcctccttgggagcctgcactaccctgctggtctggttctgaggggctggggtctctggcgac

SEQ ID NO: 519569 - DNA, 201 bp, Homo sapiens
gtggaggcagggaatggctagtcttctgtagcagcttcccagcacctggtactactctgaggcatttttctgggccaagcccaggggtccctggagccttmctgaattctggctgcctatactgtggctgcttgctatgtttgggaggcccttttttacagaaacaagatgtgatatgagtgatgtacctatataattact

SEQ ID NO: 519570 - DNA, 201 bp, Homo sapiens
tccatgaggaccaccagcatggtggcatttccttggtagggcagtttgaggacatgacaacgaaaattcttgtcaaaggtggaggcaaacttgcctgcacygtacatcatgggcaccttaatggtcttgtacttgtccaggtggaaagtgtcgacttcggtgaagacagggtcaaatggggtcaaccatttccctgaacaa

SEQ ID NO: 519571 - DNA, 201 bp, Homo sapiens
agtctccttggcaagctgctgcctgctggccatcagccaggctttctcttcctcactggccttctcctcgctggcctcctgctcatcttcctcttcctccytgggagcctgcactaccctgctggtctggttctgaggggctggggtctctggcgactgaggactgggggccaagccgggtaccagccacacctgtgccag

SEQ ID NO: 519572 - DNA, 201 bp, Homo sapiens
gaacttcggaaagaaaacttccatgtttctgtggtacaagaacagatgatggtgaaatgtagacaaagccctagtctgtggacaccaaaaaggtcacaatktttgttctttaagattatttccattaatgagtctttcagttgactatgtagttcatgccattcttttacagtggtctactcagggaaaatatttctagct

SEQ ID NO: 519573 - DNA, 201 bp, Homo sapiens
ggggttgcaccagggactgccacaggagtcttaaacaataccaggagacctcaggaacccaatgtgaagtattgtggaatatgtgaaacacattccgggcrtggactcaggatgcactcatgcatcaaatctttattgagcatgtaatttatgctactaattcttgagctgagctggtgctcctaaaaggttttcaagctg

SEQ ID NO: 519574 - DNA, 201 bp, Homo sapiens
ctgctggtctggttctgaggggctggggtctctggcgactgaggactgggggccaagccgggtaccagccacacctgtgccaggaggacggagagcaggakacttggcaccaccttcatgtgatcggctgcggaggccaaggagtgcctcccttcagctgcaagacttcctgtggagaggagaggatagagatggttttaa

SEQ ID NO: 519575 - DNA, 201 bp, Homo sapiens
tcctgctcatcttcctcttcctccttgggagcctgcactaccctgctggtctggttctgaggggctggggtctctggcgactgaggactgggggccaagcygggtaccagccacacctgtgccaggaggacggagagcaggagacttggcaccaccttcatgtgatcggctgcggaggccaaggagtgcctcccttcagct

SEQ ID NO: 519576 - DNA, 201 bp, Homo sapiens
tcagtcggccctgtggcccccagcatcaagcctgtcatggccaaggacatgccaaatggagagaagaccatgttgccatcgtgcctcatggagatctttcrcagcaggctgaatccgaagtttgaagtctccttggcaagctgctgcctgctggccatcagccaggctttctcttcctcactggccttctcctcgctggcc

SEQ ID NO: 519577 - DNA, 201 bp, Homo sapiens
cacgcactctgtatcaaaatacctcttggataaattgaagaaagtctctttgacatcaaaatccttgtggatgaaggcaaaactcccctgtgtgaggcccwgttccaggttgcgggagagggtctctctgagtcccttaaagagggaaggcaggagcccgggcttggtgggcttcagggcctgcaagtggagccctctctt

SEQ ID NO: 519578 - DNA, 201 bp, Homo sapiens
tcttagaagttttagagatagaactaggaccaaaaagtatgaatcagaagttacaggactctctctctctctctctccatatatatatgtatgtctctctscatatatatatatatgtgtgtgtatatatatatacacacacacatatacacacatatacatttatacacacatacatatatacatatatatacacacata

SEQ ID NO: 519579 - DNA, 201 bp, Homo sapiens
tttgttagaggagcctgagctaaaacgattacgtggcatcatttagtgctactttctacattaagaccacacagaatactcctgaattcaaggttacttcyccctgtacaatggtcaggaaattagcccagcacgccaactagatgtcaccacctccaaatgctgagtcttaccttcctgttcttggagcttgtcctgcag

SEQ ID NO: 519580 - DNA, 201 bp, Homo sapiens
gatagaactaggaccaaaaagtatgaatcagaagttacaggactctctctctctctctctccatatatatatgtatgtctctctccatatatatatatatrtgtgtgtatatatatatacacacacacatatacacacatatacatttatacacacatacatatatacatatatatacacacatatatatatatacatata

SEQ ID NO: 519581 - DNA, 201 bp, Homo sapiens
ctggcgactgaggactgggggccaagccgggtaccagccacacctgtgccaggaggacggagagcaggagacttggcaccaccttcatgtgatcggctgcsgaggccaaggagtgcctcccttcagctgcaagacttcctgtggagaggagaggatagagatggttttaatgcctcctaaaatgtctttgtggatagtaaa

SEQ ID NO: 519582 - DNA, 201 bp, Homo sapiens
tgtctctctccatatatatatatatgtgtgtgtatatatatatacacacacacatatacacacatatacatttatacacacatacatatatacatatatayacacacatatatatatatacatataacaattttagctatttgtggattgggcagctcttcaaagaaatggtgagtttgatgtcactggaagcatgaagag

SEQ ID NO: 519583 - DNA, 201 bp, Homo sapiens
ttcataggcacgcactctgtatcaaaatacctcttggataaattgaagaaagtctctttgacatcaaaatccttgtggatgaaggcaaaactcccctgtgwgaggcccagttccaggttgcgggagagggtctctctgagtcccttaaagagggaaggcaggagcccgggcttggtgggcttcagggcctgcaagtggagc

SEQ ID NO: 519584 - DNA, 201 bp, Homo sapiens
ctccatatatatatatatgtgtgtgtatatatatatacacacacacatatacacacatatacatttatacacacatacatatatacatatatatacacacwtatatatatatacatataacaattttagctatttgtggattgggcagctcttcaaagaaatggtgagtttgatgtcactggaagcatgaagaggaagaga

SEQ ID NO: 519585 - DNA, 201 bp, Homo sapiens
caaaattttccccgtcctctagcccagctagcaaaatgcagctccactcgcaggccctattgggaatcgcacacgaaagcagggaaatgtttcctaacaayccctggctcctctcattgtcctggacctgaacggaattcacagtcgttccctcatagttggctccagcttagagaaaagcctttgcctggcacctctgac

SEQ ID NO: 519586 - DNA, 201 bp, Homo sapiens
gtgaaatatcaagcctttcaagcctctttcccttggcctccttcctgcagaggagccccttgtgtctataattcgcctcttaccccactccagctcccaakctgtatgtacagtccctgtggagtgtaggatggaggtctttgcactgctcagccacacagccctcacgttggagcccgcccagggatgataccatccttc

SEQ ID NO: 519587 - DNA, 201 bp, Homo sapiens
agggctatggaggggatttccacaaggagggagaagttgggctagatgatgtctaggggtttgtttcattgtaaaggtggtgtaatttcatgaactattcmagttgtattcaacataaatgatgatgcctctgtaaaccagttctatttcagggtcaaatttctccctgagcactttaagcagagggggagaggtctgctt

SEQ ID NO: 519588 - DNA, 201 bp, Homo sapiens
aagaacaaaaggaacactctcccctgccatccattgctggtatcctgtgtgtgtttgatacctcagattcagcatctactacagcacgaagtgcttatgcrtgtcctgaattataggagagtcggattcaccaccctgcccagaaacagaagcattccagaggtttcttcatagatcatgaaatgaaatggccggtccact

SEQ ID NO: 519589 - DNA, 201 bp, Homo sapiens
aggataccagggaagggcctcaaatgacagcgtctggcactgttcaatatgtgtatcaatctgtttttgaaacgtgaaaacacattcatagaaaatcacgyagcgttaatcatatgctggcctaacgaaaggaaagggagagacaatcgtagggccctgtggccttgggagagcagaacattatcaaagtacctttgaaca

SEQ ID NO: 519590 - DNA, 201 bp, Homo sapiens
cctatgcttctaagtgtcagaggggagctatgtagagtgctctgaaaataataaggactacaagcacataggataccagggaagggcctcaaatgacagcrtctggcactgttcaatatgtgtatcaatctgtttttgaaacgtgaaaacacattcatagaaaatcacgtagcgttaatcatatgctggcctaacgaaagg

SEQ ID NO: 519591 - DNA, 201 bp, Homo sapiens
caaccatggtccaaaaacattaaatgaaaaattccagaaataaacaatctaaaagtcttaagcagcatgccattctgagtagtgggatggaatcttgcatygtcctgctctgtcccacccaggatgtgaattctccccttgcccaatgtctccacactgtctatgctcctcgcccatgagtcacttagtagccttctctat

SEQ ID NO: 519592 - DNA, 201 bp, Homo sapiens
gcttactccggcagtgagtggtggtgggtgaaatatcaagcctttcaagcctctttcccttggcctccttcctgcagaggagccccttgtgtctataattygcctcttaccccactccagctcccaatctgtatgtacagtccctgtggagtgtaggatggaggtctttgcactgctcagccacacagccctcacgttgga

SEQ ID NO: 519593 - DNA, 201 bp, Homo sapiens
tgtcaaaggtggaggcaaacttgcctgcaccgtacatcatgggcaccttaatggtcttgtacttgtccaggtggaaagtgtcgacttcggtgaagacaggrtcaaatggggtcaaccatttccctgaacaagtaagagaagaactcattgcagaaattccctctttgaaaagcattgttcttgctcaaataatagagaggg

SEQ ID NO: 519594 - DNA, 201 bp, Homo sapiens
tttggtttcaggattaatctcatcaaacagtttgggaattttcccccgagtctctttgttaatgtaatgattcatgagccttttggcctgtgaggcattgygaaaattcataggcacgcactctgtatcaaaatacctcttggataaattgaagaaagtctctttgacatcaaaatccttgtggatgaaggcaaaactccc

SEQ ID NO: 519595 - DNA, 201 bp, Homo sapiens
cttaccccactccagctcccaatctgtatgtacagtccctgtggagtgtaggatggaggtctttgcactgctcagccacacagccctcacgttggagcccrcccagggatgataccatccttcccggtccctccctgattagactcattgaaggtctcctgtaacccactgcctcttaccagtgtgtggccttgggtcctg

SEQ ID NO: 519596 - DNA, 201 bp, Homo sapiens
agcaggagacttggcaccaccttcatgtgatcggctgcggaggccaaggagtgcctcccttcagctgcaagacttcctgtggagaggagaggatagagatrgttttaatgcctcctaaaatgtctttgtggatagtaaaagcttcttcagggaccctgcctccttcctgtggctcaagtaggttagccctgccccagggag

SEQ ID NO: 519597 - DNA, 201 bp, Homo sapiens
ataggataccagggaagggcctcaaatgacagcgtctggcactgttcaatatgtgtatcaatctgtttttgaaacgtgaaaacacattcatagaaaatcaygtagcgttaatcatatgctggcctaacgaaaggaaagggagagacaatcgtagggccctgtggccttgggagagcagaacattatcaaagtacctttgaa

SEQ ID NO: 519598 - DNA, 201 bp, Homo sapiens; identical to SEQ ID NO: 264602

SEQ ID NO: 519599 - DNA, 201 bp, Homo sapiens
cacctggccagtcccagtgcccaaaccacacagagccgttgttggtgcaaatgcccacatttctttctgtccccctcaggaactcagcaaaaggttcaccrccatccgcaagaccaaaggggatgggaactgcttctacagggccttgggctattcctacctggagtccctgctggggaagagcagggagatcttcaagtg

SEQ ID NO: 519600 - DNA, 201 bp, Homo sapiens
gtaaaagaatgaatgaacgaatgaatgaatgcatgaatgagagaagagggatggaaggagacaaagggccttatcctccagcatgaaggttcgttaagttygaggtacacattctgtgaaatgaatcaggcttccagtaaaaagatgagtttccttataaccagggctatctcttcacgatggccccgaccctgactatcc

SEQ ID NO: 519601 - DNA, 201 bp, Homo sapiens
tcagactgattttctaactcaacctgagaatctacaaatgaaaatgcacgtgagggcttcacgcgaagggagggagcggagggagaatgcagagggagggytggggcttgcttggcctccctagctgagggccgggcgggcgcagttttacagtgtggtggaactggtagagaaggatggctcagtgtccagcctgctgaa

SEQ ID NO: 519602 - DNA, 201 bp, Homo sapiens
tcaggggcaacctctccagcgtcatggtgggagttttataccctggctctttaatctcagctggcgttccagggatgtaggaggaaggaccagcagacagmtgtagtgctggctcccaccaaagactcaaagccagtctgaacacaaagcccacgtccttgcgctttctgctagttcccagggttactggggaaaagcagt

SEQ ID NO: 519603 - DNA, 201 bp, Homo sapiens
gctggcgttccagggatgtaggaggaaggaccagcagacagctgtagtgctggctcccaccaaagactcaaagccagtctgaacacaaagcccacgtcctygcgctttctgctagttcccagggttactggggaaaagcagtgattgaagaacatccttttctcactttgaaatatattcctccacgcaagctgctaaatc

SEQ ID NO: 519604 - DNA, 201 bp, Homo sapiens
aatagtattatgcaaacttaaaatgcatgcatacttacaagtctgtattttttaaaaagacaaatgcatttcatttataagaggtacctagagtagtcaawttcattagagacagaaaagtagaaaggtggtcgccagagactgggggcaaggggatggggagttagtgtttaatgagtagagattcatcataagtacacg

SEQ ID NO: 519605 - DNA, 201 bp, Homo sapiens
agactgggggcaaggggatggggagttagtgtttaatgagtagagattcatcataagtacacggaagaaaaaaaatgggtatgggagtttcagtttgggaygattaaaagctttgggatgggtgggggcgagggttgcactgttgtgtgaatgtacttaaggccactgaactgtgtacttaaaagtggttaaaataataaa

SEQ ID NO: 519606 - DNA, 201 bp, Homo sapiens
ggcaggaggtggggacctggcctgttgataagaaggccctaggctgccctgtgtggaatgttcctttgtgtttagcagccttggtccctcaagacctctgygctctgcctgcctagcagtttggcatggtagaatttccatgggcttcagagtcagatagatctgcctaaaattacttcttagcacagggcacctgacctt

SEQ ID NO: 519607 - DNA, 201 bp, Homo sapiens
tagtatttgcacaataatggcacctgttatcacttcagacctcttgggcctagggtagcagattgccagatcatcttccatgtgttgactttcagcctcaygctcgcaggatggctgctgtggacattgcatctgcattgacggtgggaaggagtagaacgttccatctctgttccttttatccaaaaccaaaagcttccc

SEQ ID NO: 519608 - DNA, 201 bp, Homo sapiens
ctgttccttttatccaaaaccaaaagcttccccagaagtccccagcagacttttcatgggtccagctggccaaccccagctacctggctgcccatagctgmaagggaggctaggaaaatgggaaagaggtaggattgttgtgacctacccagtcatttttcatcatgttgtgggattccattagtgaggaggaaatgggtc

SEQ ID NO: 519609 - DNA, 201 bp, Homo sapiens
ggttaaaacagaatgagattccttgtgtgaaaatagctattatacctgacacactcatcgtatgggctctgcaaagggatattccccaacctgtccttccygacaggaagcatagggcactgcagatggggaagcatgtcaccttggcagtgactcggtggcttcccaagcaggagtgtcaggggaaccatgagagagagt

SEQ ID NO: 519610 - DNA, 201 bp, Homo sapiens
aggaaatgggtcacagctgatgagacagaagcccttggcacctgcccccaagtgttgtctgattcctcctgatggctttcctgttgctttgccagcccacrctatgatgtcagggcagaaggaaggaaggagcctggggctggattaatttcgcaaagaagggtcggtacagagtggaagcttctggaagcaaaatccaga

SEQ ID NO: 519611 - DNA, 201 bp, Homo sapiens
attaatttcgcaaagaagggtcggtacagagtggaagcttctggaagcaaaatccagaatcccttcttcccaccccccaagtgtttgcatgccctgtttcytctttcctcttttggaaacattcttcatccagttcttttttttttcttttctttttttttttttttttttgagacagagtctcgctctgtcacccaggct

SEQ ID NO: 519612 - DNA, 201 bp, Homo sapiens
ggtgctggcagatgcttaacagccggctgtgggcgtgcgggaggcctgatgtgtgttgtcagccgattgctgtggtgtcagtattcaatattatcatgactgagtcaagctgccctcatgaggtcactgagtagggagttggaaaagatgcaaaatcacacacgcccttgtcgtatcgtctttccaccatgcacacacaca

SEQ ID NO: 519613 - DNA, 201 bp, Homo sapiens
ttggcagtgactcggtggcttcccaagcaggagtgtcaggggaaccatgagagagagtctaggagcaaacacatcaccaccctgagcagatacaggagtgrggagggggctgtaactcagtgagtggcttccaggggccccaggccctgctggatgtgggccaagccctacagcttccctaggcagtaagtaaaaacattc

SEQ ID NO: 519614 - DNA, 201 bp, Homo sapiens
ctggccaggaggggaaacctaggcagcaggtaccactgcagtggaggcctcgtcctcccaggcagctctccgttcgccctcagcacccctgcagtcaaggygtcatcaccatccacacttgcgccaaagtggagcttatggccaaaagccacagggggacttgacagggctggaggggactgcggctagaagccagcacag

SEQ ID NO: 519615 - DNA, 201 bp, Homo sapiens
tagccagcactgaccatcagatccttgccctggccaggaggggaaacctaggcagcaggtaccactgcagtggaggcctcgtcctcccaggcagctctccrttcgccctcagcacccctgcagtcaaggcgtcatcaccatccacacttgcgccaaagtggagcttatggccaaaagccacagggggacttgacagggctg

SEQ ID NO: 519616 - DNA, 201 bp, Homo sapiens
tggggggcgaggtgggcaggagagcagtcagggacacgctaattcagtaatgttctcagacttctgagcaggagtggctgtggagtcagagctctagggasaggtcaggcccggagaggaagatctgagggcctgttgggaggatgctgtatgagtctaggcataagataagagggaaggcccgggcccaggtcagggtct

SEQ ID NO: 519617 - DNA, 201 bp, Homo sapiens
gcgttccagggatgtaggaggaaggaccagcagacagctgtagtgctggctcccaccaaagactcaaagccagtctgaacacaaagcccacgtccttgcgytttctgctagttcccagggttactggggaaaagcagtgattgaagaacatccttttctcactttgaaatatattcctccacgcaagctgctaaatctgtt

SEQ ID NO: 519618 - DNA, 201 bp, Homo sapiens
gcaacaaaagtcatttaggcctcattatctaatctcatggcccagctttctgcttctgtgggctgagctttggaaaaagctaatcatcaaaaatccggatrtatttcttcaggtggagaaaggggtttgtagcatcagagggctcctctctgagcaggatggtattgggttgagatcattatctagtcagtgatgaggctg

SEQ ID NO: 519619 - DNA, 201 bp, Homo sapiens
aaaaagatgagtttccttataaccagggctatctcttcacgatggccccgaccctgactatccctgttctggaaatgcggtgatcccaacgggcgtctagratgctggtaacatactcccagcatgagaaggtgggaaggtctcattcattgttgtctgtaaccggcagttcagaggccaccagctcggggagtcccgtcc

SEQ ID NO: 519620 - DNA, 201 bp, Homo sapiens
tcatttaggcctcattatctaatctcatggcccagctttctgcttctgtgggctgagctttggaaaaagctaatcatcaaaaatccggatgtatttcttcrggtggagaaaggggtttgtagcatcagagggctcctctctgagcaggatggtattgggttgagatcattatctagtcagtgatgaggctgagaggctacc

SEQ ID NO: 519621 - DNA, 201 bp, Homo sapiens
tgtaatggtgatgcctctttgaaggccgatagtttgggccaggttcctgggcaaatgaaaggattcctaggatattttgatgttggacatttgccttagcrataaatcctttcattccaaaaaaaaaaaaaggatttttttttgttgaaaagtttagcactatcctaatgttttatttactcaccaatacttcattacaac

SEQ ID NO: 519622 - DNA, 201 bp, Homo sapiens
actatcctaatgttttatttactcaccaatacttcattacaactctgtgaggtaagtacttttattacccccattttacagctgaggaaactgaggcacasaaattaagtggtggccatttagttcatgagtggccaagctaggatttaaacccaggcagctgagtctcaagccacattcataactgctgtgctgggagac

SEQ ID NO: 519623 - DNA, 201 bp, Homo sapiens
agcagcctgaagggagggagcagacatttcctgggagagatggggggcacctggccagtcccagtgcccaaaccacacagagccgttgttggtgcaaatgsccacatttctttctgtccccctcaggaactcagcaaaaggttcaccgccatccgcaagaccaaaggggatgggaactgcttctacagggccttgggctat

SEQ ID NO: 519624 - DNA, 201 bp, Homo sapiens
tactaggttaaggccatcgtctcctgttcaaaatatagatgatctcaaagagggtagaagttgagccatctgttccttggctgaaccattcagattgtttygccagtgacagactggcagagccccttttgatggagagtcagctatctcaagccattcccctccccaactttctcacagccctgtggggaccaacacagc

SEQ ID NO: 519625 - DNA, 201 bp, Homo sapiens
cctgcatttctctctgcaccagcccacgtgctctgtttaccttcactccgtcctgtctccccactccagtcagcacacacgggtgccatgctcagaccctkctctaggctgtggggatactgcagtgaacaagagagacaaaatccctgccttgtggggcttgcgtcctaatggtagaagatgcacagtacatgagtatca

SEQ ID NO: 519626 - DNA, 201 bp, Homo sapiens
agaggaagatctgagggcctgttgggaggatgctgtatgagtctaggcataagataagagggaaggcccgggcccaggtcagggtctctgcaaagccagcyaataactgacccgggggggaagcctcagtgcagggtcttgtcacttttcttagtggagcagcagagaagggacatgtagcaggctgaacaatggccccaa

SEQ ID NO: 519627 - DNA, 201 bp, Homo sapiens
cagcgtcatgcatcctccacaagccactgtctccctgtgtgcagtgagcccagagccacccaggcagacacttgttctctgctcagtgctgctgcagggctggagcaagcgtgttgcagcagtatgcttgttccagccctgtatcttgcatacttgctctagaagtatgcgaagtacttgtgtgtgccagaggcttggaga

SEQ ID NO: 519628 - DNA, 201 bp, Homo sapiens
atacctgtaatcccagcattttgggaggccaaggtgggaggattgcttgagcccaggagtttgagaccagcctgggcaacacagtgagatcccatctcagaaaaaaaaaaaaaagaaaaagaaaacaatgttgagcactgcatgcatacatatgtcacatatcatacccctgagtacacatctgaagggatatttccttcc

SEQ ID NO: 519629 - DNA, 201 bp, Homo sapiens
agcccaggagtttgagaccagcctgggcaacacagtgagatcccatctcagaaaaaaaaaaaaaagaaaaagaaaacaatgttgagcactgcatgcatacrtatgtcacatatcatacccctgagtacacatctgaagggatatttccttccagcccctggagcagtccatagtgctgggcccatggctgcgggctgcttg

SEQ ID NO: 519630 - DNA, 201 bp, Homo sapiens
cccctgggaacgaggcctacccactatggactatggtaacttggtaggatttttagtatttattttaatggagggacaaatgctttctaactgggcccccractccgcaccccagttcgcagtgaggccctgggtgggtcacctgccctctctggacttgtttcttcaactggaggaggtccctgcctatgctgacattcc

SEQ ID NO: 519631 - DNA, 201 bp, Homo sapiens
agaagacagtggggactcgtactttccctaaatttggaggtggggctcggtacatggattagggatggggtatcaggggcaacctctccagcgtcatggtkggagttttataccctggctctttaatctcagctggcgttccagggatgtaggaggaaggaccagcagacagctgtagtgctggctcccaccaaagactca

SEQ ID NO: 519632 - DNA, 201 bp, Homo sapiens
cagtctgaacacaaagcccacgtccttgcgctttctgctagttcccagggttactggggaaaagcagtgattgaagaacatccttttctcactttgaaatrtattcctccacgcaagctgctaaatctgtttccaagccacagtgctatctgacttaattaattagcatctatttgcaaaccagcaattaaagggctaaag

SEQ ID NO: 519633 - DNA, 201 bp, Homo sapiens
gaatcccttcttcccaccccccaagtgtttgcatgccctgtttcttctttcctcttttggaaacattcttcatccagttcttttttttttcttttcttttyttttttttttttttgagacagagtctcgctctgtcacccaggctggagtgcagtggtgcaatcttggctcactacaacctctgcctccccggtttaagaa

SEQ ID NO: 519634 - DNA, 201 bp, Homo sapiens
ttgaaggccgatagtttgggccaggttcctgggcaaatgaaaggattcctaggatattttgatgttggacatttgccttagcgataaatcctttcattccaaaaaaaaaaaaaggatttttttttgttgaaaagtttagcactatcctaatgttttatttactcaccaatacttcattacaactctgtgaggtaagtactt

SEQ ID NO: 519635 - DNA, 201 bp, Homo sapiens
tgggccaggttcctgggcaaatgaaaggattcctaggatattttgatgttggacatttgccttagcgataaatcctttcattccaaaaaaaaaaaaaggatttttttttgttgaaaagtttagcactatcctaatgttttatttactcaccaatacttcattacaactctgtgaggtaagtacttttattacccccatttt

SEQ ID NO: 519636 - DNA, 201 bp, Homo sapiens
tacacattctgtgaaatgaatcaggcttccagtaaaaagatgagtttccttataaccagggctatctcttcacgatggccccgaccctgactatccctgtyctggaaatgcggtgatcccaacgggcgtctaggatgctggtaacatactcccagcatgagaaggtgggaaggtctcattcattgttgtctgtaaccggca

SEQ ID NO: 519637 - DNA, 201 bp, Homo sapiens
tcaagtctcacttccacctgttggaaagcgaagaggctttggttggtccgctctccccctcagcaccgttttgcacatctgtgtcatgggaaccatgtgakatgattagctggagcttttcctgtgacaacagagtcctggaaatgggtgtgcacagatgcctggttcttcaagcttagcctcctctctcctatgactggg

SEQ ID NO: 519638 - DNA, 201 bp, Homo sapiens
gatggtgataagtattgtgggaaaaatcaggcaggaaggaggccgaggagtgcaaggtctggggttggcagtttcaagcagggttggagaggtaagggcgkcagggcacatagggccttgggcctttctaaggaccttggctttcagcctgaaggacacgggagccaccgagggattgcgcagcacgggggacctgccctg

SEQ ID NO: 519639 - DNA, 201 bp, Homo sapiens
ggggagatggctgtggcatgagcaggtggatgcagtgggcatggcaagaagtgggcaggtctagacacctgtgaaggtggcgaaaggattcgtgcccgacycacatgttggacatggcagagtcaagaatggctcccagaggtttggcctgagagttagcaggatggagaagccgtttgctgcaaaggagggctgaggaat

SEQ ID NO: 519640 - DNA, 201 bp, Homo sapiens
atttcatgtttgacgaatgaatgagtcagacataagcaggaaaaccgcagggtcctattgtgctttgttctgttatttgtcaaacaggcccccagtgggcrcctttgtcaggcctgtgctgggcactgtgacactgatgagaaagacaaggtgcctgcccgctgtaggagctcactgcctgctggccaagacagctggaca

SEQ ID NO: 519641 - DNA, 201 bp, Homo sapiens
ctcccaagcttgaaatatgcccctgacctctaggagcagtggaaacccctgacaccaacgccctccacaccaggcccctgcctctcctgccccgttgcctrcccaccctgagttctaggcacagggactcacttatcctacacacaccagagcttgcaggcatgacatgccgcctgacgctgcctgggcctaggtagccct

SEQ ID NO: 519642 - DNA, 201 bp, Homo sapiens
ctgcctctcctgccccgttgcctacccaccctgagttctaggcacagggactcacttatcctacacacaccagagcttgcaggcatgacatgccgcctgaygctgcctgggcctaggtagccctgcttctgacccggctgtgggttccttgggccccaggcaggctgcttcactcactcctctgtagctcctttccccagt

SEQ ID NO: 519643 - DNA, 201 bp, Homo sapiens
acttaaaagtggttaaaataataaatttcaggttatgtatgttttaccataattataataaaaaacaaatatatctagaaagacatgccatagagactacycataggggcatgggggcatggaggaatggaaatagggatcagggacaaaggagaacaaaacctgaaaaaattccttcctgaggctgatgcccacagtgtg

SEQ ID NO: 519644 - DNA, 201 bp, Homo sapiens
gacccggctgtgggttccttgggccccaggcaggctgcttcactcactcctctgtagctcctttccccagttgaacagtggccatagccctgtcacggacrttaagtgattgactcgtgagcacttggaacactgacctggggtgttccgtgctagctcttagcgtcagcgtcatgcatcctccacaagccactgtctccc

SEQ ID NO: 519645 - DNA, 201 bp, Homo sapiens
agcgtgttgcagcagtatgcttgttccagccctgtatcttgcatacttgctctagaagtatgcgaagtacttgtgtgtgccagaggcttggagaacacgckccgcctctgagggcagccactgttactaccacatctgatgagcaaacagagcctcatagaggtcaaatgacttgccagaggtcccacacaggcttgtgtg

SEQ ID NO: 519646 - DNA, 201 bp, Homo sapiens
ctgtatcttgcatacttgctctagaagtatgcgaagtacttgtgtgtgccagaggcttggagaacacgcgccgcctctgagggcagccactgttactaccmcatctgatgagcaaacagagcctcatagaggtcaaatgacttgccagaggtcccacacaggcttgtgtgcagccccagcggtctgaacttgcaccccctc

SEQ ID NO: 519647 - DNA, 201 bp, Homo sapiens
atctgatgagcaaacagagcctcatagaggtcaaatgacttgccagaggtcccacacaggcttgtgtgcagccccagcggtctgaacttgcaccccctccragccccagtgctatccttctccctatccctggcttgcctctcgggggtgcatgtcctggcctgggggcttgcccccttctgacagagcctacgactgcat

SEQ ID NO: 519648 - DNA, 201 bp, Homo sapiens
gaaggtctgtgtccagagctgcccctgtcatctcggctagttcagggcttctcatatctgaagtttgtacaaggcgcctggttctctagtccatagcaagaaaaaaaaaaagcaaagacaaacaaacccctgagacctggcttggacccgaattcctgtccagtgggagcagggcagagcagggactgcttttgtcactgg

SEQ ID NO: 519649 - DNA, 201 bp, Homo sapiens
gcttcactcactcctctgtagctcctttccccagttgaacagtggccatagccctgtcacggacattaagtgattgactcgtgagcacttggaacactgacctggggtgttccgtgctagctcttagcgtcagcgtcatgcatcctccacaagccactgtctccctgtgtgcagtgagcccagagccacccaggcagacac

SEQ ID NO: 519650 - DNA, 201 bp, Homo sapiens
ccacatctgatgagcaaacagagcctcatagaggtcaaatgacttgccagaggtcccacacaggcttgtgtgcagccccagcggtctgaacttgcaccccytccaagccccagtgctatccttctccctatccctggcttgcctctcgggggtgcatgtcctggcctgggggcttgcccccttctgacagagcctacgact

SEQ ID NO: 519651 - DNA, 201 bp, Homo sapiens
ctctgacagatggcctattgaggtcaacttgaatgtgagggctgcggtgtggtttcaaacattcatgatggatgtattttcctacccctaacttaaggagaaaaaaaaaaagacttcctttttttgccaaagtccagaaaggggcctttagcctttagtaggagctcaaattgttggggcccctctacctctctcagggct

SEQ ID NO: 519652 - DNA, 201 bp, Homo sapiens
aagcatagggcactgcagatggggaagcatgtcaccttggcagtgactcggtggcttcccaagcaggagtgtcaggggaaccatgagagagagtctaggascaaacacatcaccaccctgagcagatacaggagtggggagggggctgtaactcagtgagtggcttccaggggccccaggccctgctggatgtgggccaag

SEQ ID NO: 519653 - DNA, 201 bp, Homo sapiens
agcatagggcactgcagatggggaagcatgtcaccttggcagtgactcggtggcttcccaagcaggagtgtcaggggaaccatgagagagagtctaggagmaaacacatcaccaccctgagcagatacaggagtggggagggggctgtaactcagtgagtggcttccaggggccccaggccctgctggatgtgggccaagc

SEQ ID NO: 519654 - DNA, 201 bp, Homo sapiens
atggtcttaccctctgcttttcccctttttgcaaaaaaccactggccaaatccgaaccattgcccttgtttcccccacgttctctctcagatctttgtctygaagggaaaacatagtggatgaaaaggtgtggcaggctttggcaccttgttaaaatttctagtcatctgtggatgttaccttgcttgtccacagcagcca

SEQ ID NO: 519655 - DNA, 201 bp, Homo sapiens
acagagcctcatagaggtcaaatgacttgccagaggtcccacacaggcttgtgtgcagccccagcggtctgaacttgcaccccctccaagccccagtgctrtccttctccctatccctggcttgcctctcgggggtgcatgtcctggcctgggggcttgcccccttctgacagagcctacgactgcatgctgcttatctcc

SEQ ID NO: 519656 - DNA, 201 bp, Homo sapiens
cacacgcccttgtcgtatcgtctttccaccatgcacacacacacaatgcagctcagccaccagggcccggcagggccagggtggagatgtgcacggtgcaygtggctgtgtgttgggggcaggggcgggaggttctgcggctggactagagatgaggttggtgggcgcagtgggttgagagggggacgcacagttgccaat

SEQ ID NO: 519657 - DNA, 201 bp, Homo sapiens
ggagggagaatgcagagggagggctggggcttgcttggcctccctagctgagggccgggcgggcgcagttttacagtgtggtggaactggtagagaaggayggctcagtgtccagcctgctgaaggtgttcaacgaccagagtgcctcggaccacatcgtgcagttcctgcgcctgctcacgtcggccttcatcaggaacc

SEQ ID NO: 519658 - DNA, 201 bp, Homo sapiens
tctatgacgtcccgcgtcccggcttctgattgcccgcctgagacgtcaatcgcagggcgtgtgtcttgctgggacacagtggaggtctaacctttggtttscggagcggtcgggtgtattctccgccgcccccacgccctcgaggtccccgccaccgaaccagcggcggagcccgcccgcgcctcccgcggcattcccgca

SEQ ID NO: 519659 - DNA, 201 bp, Homo sapiens
ttctgaatggaacattccggctcttcaattttttaagcaatttagactgtagcaagaaaatgtgcagccttttgggcaaagcccctgggaacgaggcctayccactatggactatggtaacttggtaggatttttagtatttattttaatggagggacaaatgctttctaactgggcccccgactccgcaccccagttcgc

SEQ ID NO: 519660 - DNA, 201 bp, Homo sapiens
cccaagtgacttaccaggcctacaaaagagtccagtccagtcacttgttggactgggctctgacagatggcctattgaggtcaacttgaatgtgagggctrcggtgtggtttcaaacattcatgatggatgtattttcctacccctaacttaaggagaaaaaaaaaaagacttcctttttttgccaaagtccagaaagggg

SEQ ID NO: 519661 - DNA, 201 bp, Homo sapiens
cgagcccttcagggttctgctttcagccccacctggacagaggcttacaagactagggtctggaccagaatctgtgtatttctgtctgggaccaggaagcygcagctgtcccatcatccccagcaaatcctagaagtggagtctggatacttcaaggatagaagtgttggcacgcacagccatggacccagctgagcagag

SEQ ID NO: 519662 - DNA, 201 bp, Homo sapiens
ctgtcccatcatccccagcaaatcctagaagtggagtctggatacttcaaggatagaagtgttggcacgcacagccatggacccagctgagcagagcagaygctttgcaggctgcccctggcttcttcctccctttcccgcttctgctctctttatggactggtcagagggtaggtgggaaagaacagacaagccatggga

SEQ ID NO: 519663 - DNA, 201 bp, Homo sapiens
cattcacttactagctgtatgatcttggccaagtcacttcacctccctgagccccaattcccaagtttgtgaaatggcaacaatacctatgtgtcactggwttattggttaaaacagaatgagattccttgtgtgaaaatagctattatacctgacacactcatcgtatgggctctgcaaagggatattccccaacctgtc

SEQ ID NO: 519664 - DNA, 201 bp, Homo sapiens
cctctgccaggcctccctcctaagctggcttgttttcattttggcccctgcaggaagtagagcccatggccacggagtgtgaccacatccagatcacggcrttgtcgcaggccctgagcattgccctgcaagtggagtacgtggacgagatggataccgccctgaaccaccacgtgttccctgaggccgccaccccttccg

SEQ ID NO: 519665 - DNA, 201 bp, Homo sapiens
aagattctaaatgctgcattcagcccaggcaacttgtttattttatataacaagattaggagctcctagatcatagtaggtactcaacaaattgttatagbctgcccttcgctacttactgtgaaaatgaacgattctcagactagtcagtcgttgtgccattatccagtattcactaagcgtgctcagtgacctcagtgt

SEQ ID NO: 519666 - DNA, 201 bp, Homo sapiens
atcacttgagcctgggaggctgaggctacagtgaattgtgattatgccactacactccagcccaggcaacagagcaagaccctgtctttaaaaaaaaaaaraagaagaagaagaagaaaagaaagttgggctgggcgagatcttcaccccgtagtcccagcagtttgggaggccgaggtgggaggagttctgggcttgagc

SEQ ID NO: 519667 - DNA, 201 bp, Homo sapiens
tgagagattctgactaaaaaataaatatagtataatcagcttttatttactcattaacaattcttatgcattattggcattactggttaattctgatactkccaggtactgtgctttgcactagagttatttgctcagaaagagtatgctgatattaacatgaggatatcacaaagtaggatttcttcagtagaccaaaaa

SEQ ID NO: 519668 - DNA, 201 bp, Homo sapiens
gagacaggctgtcactctgtcacccaggctggagtgcagtggtgtaatctcagctcactacagcctctgcctcccgggttcaagcaattctcatgcctcakcctcccagtagccgggattgcaggtgtgttccaccacacccacctaattttttttttttttttttgagacagagcctcactctgttacccgggttggagt

SEQ ID NO: 519669 - DNA, 201 bp, Homo sapiens
taagtgccattgtttaacacaccagcagttcataaaagagagactgtatcaccaaaaaatatttaaaatatattttcagaataaagatatttatataaagrtatgacctttatataaagatataaaggtatttcattccttttaagtaagtacatttaactttatgaaaactttaccacattttccttatttttctaattt

SEQ ID NO: 519670 - DNA, 201 bp, Homo sapiens
ttaataggtattgcaaatttgccctcaaatagttgtaccaatgtatatacctacaaacttagtatgagaatacttgtttcctcaatattgggtattttctttttttttttttttttttgagatggagtttcactcttgtcactcaggctagagtgcaatggcacaatcttggctcattgcaacctccatctgctgggttga

SEQ ID NO: 519671 - DNA, 201 bp, Homo sapiens
agaaatggtaaatgttgtttactgatttattaaaatgagcaagatgagaagatggggttaaggaatgtgtgaaggggtaagaaagcagattctttagatgcccaaaaattaattaagaatggctgcagccgggcgcagtggctcatacctgtaatcccagcactcgcggtggctcacgcctgtaatgccagcactttggga

SEQ ID NO: 519672 - DNA, 201 bp, Homo sapiens
actccgttcaaatgttggctttaccatttgctatctatttagttaacttctttgtgtctcaggttcctcacctataaaatagggatgatgatttttttttwaactattatatggctttctgtttgatagttgtcaaacagaagtttttaaaatttttatgtgatcagatttacattatctggctaatttcatggtttcttg

SEQ ID NO: 519673 - DNA, 201 bp, Homo sapiens
gtgtcctgggtctttttaaaactctgagcagggatataattcagagataatttcgttacaagttctgttcttaatgtgaatttttttccctggcaggtatmccatgtataaccgattgtgtaatggctgaaattgagaaattggggcagaagtatcgagtggctctaaggtaggaaggaggtaaactagatctgttctaga

SEQ ID NO: 519674 - DNA, 201 bp, Homo sapiens
aatggtaaatgttgtttactgatttattaaaatgagcaagatgagaagatggggttaaggaatgtgtgaaggggtaagaaagcagattctttagatgcccwaaaattaattaagaatggctgcagccgggcgcagtggctcatacctgtaatcccagcactcgcggtggctcacgcctgtaatgccagcactttgggaggc

SEQ ID NO: 519675 - DNA, 201 bp, Homo sapiens
atcattttttatggctgcatagtattccatggtgtatatgtgccacattttcttaatccagtctatcattgttggacatttgggttggttccaagtctttrctattgtgaataatgccacaataaacatacatgtgcatgtgcctttatagcagcatgatttatagtcctttgggtatatatccagtaatgggatggctgg

SEQ ID NO: 519676 - DNA, 201 bp, Homo sapiens
gttcagaataattatatttatacaaatacatgaaaggagggagatggggttcttgttaactgaattgctggccatttaatttacagtggtcaccatagcartgaccatgtttaatgaattgaagtataatgcaaacttgactggaaaaaattaaactttcacaattcagaaaacacttagaatgcttcgagtatcattatg

SEQ ID NO: 519677 - DNA, 201 bp, Homo sapiens
aaaggttaatatattttttcagacctttttctgtgcaaatgcaaatctaaataaagagtattggaaagaaggatttgtattttattaattaaatcatattwtatatatatatatgcatatgccctgctttgtttattcaacagtttagtgtaggtccttccacattggtacgtacagctctacctcactttttattaatag

SEQ ID NO: 519678 - DNA, 201 bp, Homo sapiens
tcctgggtctttttaaaactctgagcagggatataattcagagataatttcgttacaagttctgttcttaatgtgaatttttttccctggcaggtatcccrtgtataaccgattgtgtaatggctgaaattgagaaattggggcagaagtatcgagtggctctaaggtaggaaggaggtaaactagatctgttctagattg

SEQ ID NO: 519679 - DNA, 201 bp, Homo sapiens
gataatttcgttacaagttctgttcttaatgtgaatttttttccctggcaggtatcccatgtataaccgattgtgtaatggctgaaattgagaaattgggkcagaagtatcgagtggctctaaggtaggaaggaggtaaactagatctgttctagattggtatactgaagattcatctgtttgttgtttaaagatttcttg

SEQ ID NO: 519680 - DNA, 201 bp, Homo sapiens
aatcagcttttatttactcattaacaattcttatgcattattggcattactggttaattctgatacttccaggtactgtgctttgcactagagttatttgstcagaaagagtatgctgatattaacatgaggatatcacaaagtaggatttcttcagtagaccaaaaaaaaaaaaaaatggaactttagatttttgagatt

SEQ ID NO: 519681 - DNA, 201 bp, Homo sapiens
aggcttaagcaggagaatcgcttgaacccaggaggcggaggttgcagtgagcctacatcacgccattgcactccagcctgggcaacaagagcaaaactctktctcaaaaaaaaaaaaaaagagaaaatacagagaatatcttaatgaaattgaatatttgtgtatagcaaaagatatcattaacaaagtaaacagacatac

SEQ ID NO: 519682 - DNA, 201 bp, Homo sapiens
caggttcaagcagttcttctgcctcagccaccccagtagctaggacatgccaccacgcctatctaatttttgtatttttcgtagaggcgggtttcaccatattggtcaggctggtctcaaactcctgacctcaggtgatccacccacctcggcctcccgaagtgctgggattgcaggcgtgagccaccgtgcctggccttg

SEQ ID NO: 519683 - DNA, 201 bp, Homo sapiens
cggcctgggaaccggctcgggggattgccctttccccaaggagtttccgcttccgggctatcctttgccggaagcagtatgtgaatgacgtagaagtattrcgccgttggtgattacggaagaaccaggagtttggcgtgaccatggtgagagaagacggtccaagaagggacgttatcaggccactttttgggtggagaa

SEQ ID NO: 519684 - DNA, 201 bp, Homo sapiens
taggtgagaaatttcccttggagaagggaatagaaatatataattgatatcaattgaaaatgaggataagtgataaggttataaaggatttgaaagaaatyattgtatcaaatgtttacatagttatatttgaagaaatgagacaaagcaagagcaagagcaaaagagagagataggatttaaggaatgaggcaaacattt

SEQ ID NO: 519685 - DNA, 201 bp, Homo sapiens
tgcaagagcgaaactccgtctcaaaaaaataaaaaaagaaaatggatcctgtattattttttgctttataaaacagatttactgaaatataattgactccytttacaactatacaattcatccctttaaagtgtacagttcagtgacttctagtggattcacagagttgtgcatcatccatcaccatagtcaattttagaa

SEQ ID NO: 519686 - DNA, 201 bp, Homo sapiens
tgttaacaaggatatgttctcccttttgccccagtgttgaaacactaaataagacattctgccatttatgatcacagccctagaagttagatagatgatgrtcaattcctaagtttattcagtttggtatttattcgtagtacagaggatctgaggtagtttatttacacctaggtatgcaatttaccattaatagatttc

SEQ ID NO: 519687 - DNA, 201 bp, Homo sapiens
tttatgtgatcagatttacattatctggctaatttcatggtttcttgtggttcacatttaaattttatttcatctgagccaggcacagtggctcacacctrtaatcccagcactttgggagcccaagacaggaggaatgattgatcccaggagttcaagacagcctgggcaacatggcaaagccccatctctacaaaaaaa

SEQ ID NO: 519688 - DNA, 201 bp, Homo sapiens
aacttctccaagcggtgactgttatgctttacagagtggggaagagggtctgggttatttgaggcaagaagggaaggcaatagacaagagaaaagaagagwctttaaaagatgccgtgtgtttccaacttttttaattctaaaatttctgtttcaaggggaagcaaaagaaaacaaggaagtatgcgaccatgaagcgaat

SEQ ID NO: 519689 - DNA, 201 bp, Homo sapiens
tcgtgctatgggttctggtaaaaaaaaaaaagaaagaaaaagattgctatagagaagttcagctactattggagtcaagtattggcatcttcttatgtacrtaatagcaaaaaattgcagacagccagaagaaatggcttttcttaagccataaaggatggccaggcatggtggctcatgcctgtaatcccagaactttgg

SEQ ID NO: 519690 - DNA, 201 bp, Homo sapiens
gagcatggtggagcatgtctatggtcccagctgcttgggaggctgaggtgggaggatcacttaagcctgggaggtcgaggctgcactgagctatgtccatrtcactgccctccagcctgggtgacggaacaagaacctgtctcaaaagggggaaaaaaaggaagttgcttataatgcatttcctcaaaggagcaattataa

SEQ ID NO: 519691 - DNA, 201 bp, Homo sapiens
atataacaagattaggagctcctagatcatagtaggtactcaacaaattgttatagcctgcccttcgctacttactgtgaaaatgaacgattctcagactrgtcagtcgttgtgccattatccagtattcactaagcgtgctcagtgacctcagtgtgaacatcactccatgtctcttacagcataagtgttacattgtgg

SEQ ID NO: 519692 - DNA, 201 bp, Homo sapiens
tgtttcttgcctttcgtggataacataaaggcactgcttagccatcaggcactgtgtctggctgtagcaactatcattattgtcatcctcctcatgggctrtgacatggggaaaaaaaatcctggctgccactggagtgtagacggtcctggggttgcctcctcagaggcccttccctgtgtcctcccaggcactgtccca

SEQ ID NO: 519693 - DNA, 201 bp, Homo sapiens
ggtgcttggtcttcaaggcacgttccctgagactcacacgttcccaggttacttccctatccccaccttgggagcatctgcatcttttgagatggagtctygctttgtcacccaggctggagtgcagtggcgtgatcttggctcactgcaacctccgcctcccaggttcaagcgattctcctgcctcagcctcccaagtag

SEQ ID NO: 519694 - DNA, 201 bp, Homo sapiens
gaaccctggaatagtcacccaagaagttctttaccaagctggctaaatggagagcttcctaaaaatacagatgcccaagaatctgttatttaacatactcrctgggtgattttggtagatctgggggcccacagagaaaaggagacagtcctgtacttcccacaggcaagaggatgacatgctgcctgagggaaggccccg

SEQ ID NO: 519695 - DNA, 201 bp, Homo sapiens
tcctacccagaacctgcatttgaagcctgcactccctcccacaaaagctggttgttctgcctgaacatgccccactttccagatggacacacatgcatgcrcacacacacatacacatacacatacacacaaacacacatgcacacacactgccccctctttggctagagggtggaggacccagattctacaggggcagtg

SEQ ID NO: 519696 - DNA, 201 bp, Homo sapiens
agcggctgctgagcagtggagccagccccagcgcggtgaggagaccccccccacccaaaggcctgagcgggaggagggctctgaggggagactgcggaggycccgacacccacaggcccgccctgggctgcagggcagaggccggcagtggaagtcattatttgggctggagtgtgccagggcggcccatcttcttttcct

SEQ ID NO: 519697 - DNA, 201 bp, Homo sapiens
ttcccagtgggacctgggagagcaaaggcggggtagctttgtgggcctctctctgagccccttcccttcccgcagccacggctgtcatccctttggccgcmtgggtcacacattgctcaggaagaagctgctgtcaggtccttggaggccacatgaccttctcaaaagtaaagccaggaggacagagcgaccctccctggg

SEQ ID NO: 519698 - DNA, 201 bp, Homo sapiens
tgtccagcaaattcctttatcccccgatcctggtccccaccctagccttctttacactgggcatcagagatggaagaagcaatgctctctggaatcttctrtcccctcctctgaaaaaatggatggggaaatccccaccctgtcccttcccagggtgtgacagccgccagcaaggcggtgggtgctaatggtgaagtgctg

SEQ ID NO: 519699 - DNA, 201 bp, Homo sapiens
cagggctcttggaaactcctacccagaacctgcatttgaagcctgcactccctcccacaaaagctggttgttctgcctgaacatgccccactttccagatrgacacacatgcatgcgcacacacacatacacatacacatacacacaaacacacatgcacacacactgccccctctttggctagagggtggaggacccaga

SEQ ID NO: 519700 - DNA, 201 bp, Homo sapiens
ggctcagcagagaggtcggcctgaccaccctggaccagtatgggtgcctatcggtaaaggccagcttttccacccagcctgccactgtggggtggggcctrcctatacccctgccctcccagctgttctccttgcatccagaagcccctgcctgatgcctggtgagaaggccatggccaaggagggctcggccctgaggct

SEQ ID NO: 519701 - DNA, 201 bp, Homo sapiens
tgggcctcagagtgctgtgcctctgtggagggtgctgtgcccctgccgagtttctgcccagcaaggccattggctcctaccgcatgactgttgggggaagycctgcaaccccctcccctgtatcagctgtcctcaatctgtcccctcctttttcctcccacacactggaggtcacatccggctcacatattttggccagtg

SEQ ID NO: 519702 - DNA, 201 bp, Homo sapiens
ttgcagtgagccaagatcacgccactgcactctagcctgggcagcagagcaagactccgcctcaaaaaaaaaaaaaaaaaaagctgagccctggggagggkcggagcttgcaccagatgtacagcacagaccaggggacccggcctttctggaggccagtcaggctgttgtgggcccctgtgtggtaccaagggggcaggg

SEQ ID NO: 519703 - DNA, 201 bp, Homo sapiens
ggctgagcacagccgttcccagggactggccgggaggtgactgacaccgtgcctcccggtacgatcccgctgaaccataggtgttgtggtgagaggggttktgagctgagtatgataggaaaacagcgagttgaagttatatggctttgtttcttaatgatcggagttcttagagtgtttaggtgcagatgtacactgtga

SEQ ID NO: 519704 - DNA, 201 bp, Homo sapiens
tcaaaaaaaaaaaaaaaaaaagaaaagaaaacagaatcctgagctggttatgattctatcattaccaccacttaggaaggacctggatccatgaaaagacsttacccactttagctctgaccccttcagtctttggaggtgaatatgagtctccctgacattcagtggaggaaactggggtgcggataggggtgttgctac

SEQ ID NO: 519705 - DNA, 201 bp, Homo sapiens
ggtgggtggtgtctgggtaggctgaggagaatggaagaggccctcttaggtgaggctgggacacctgtgttcttgttcccacagaggtgggtgggatttcygagctgacggaagcctgtgactggtggagctttgggtctctactgtatgaactgctgacgggaatggtgagtggctgggctgggtgtagtgccctggtgg

SEQ ID NO: 519706 - DNA, 201 bp, Homo sapiens
gatagtgctggacatctctcggtggtgtgccagtttgtaaggctgggcccactttagttgggtcaagaggagggcagagggcattctaagctgaggggtgrgagggagcagaggtgaggggctgaactaggccaggacacccagaggcggaaagtctgcgcccaagacagaagggaggcaggagtgggagccggccctggc

SEQ ID NO: 519707 - DNA, 201 bp, Homo sapiens
gcacacacactgccccctctttggctagagggtggaggacccagattctacaggggcagtgggggtaaggacaggtcaggaactgagggaggcagttgctycaccctcattcgggtgcccctgaagccagggctaggaggtcccctaacagcagcagtctctggcctgtccccggctgatctgcctgccctgctgctccca

SEQ ID NO: 519708 - DNA, 201 bp, Homo sapiens
gccatgttgtgccccactcaggacatctctggagactcatctcaggacactgatccactggctcagtggacccaaaccagactgtcctggctagtcctctyagtcacacagcgagtaggcctcttccaccagaagctgttcgtgcagctggggaggcccagaagcagggatgccatctgttgtgcagggagggatgaggta

SEQ ID NO: 519709 - DNA, 201 bp, Homo sapiens
cctaacgtgtccggctgttaggataactaagggctgaagagatggtggcagggagcagtgaggtgggtgggtcgggacttggcaagcagccagaatacccragggcctggcctcagagcctgggggccagggagacatcaccgggtatttgctgagcctcgtgcaggagccaggctctgagacagggtggaggaagaaaaa

SEQ ID NO: 519710 - DNA, 201 bp, Homo sapiens
gcttgctcgggatgatgcttgagtgacccctaacgtgtccggctgttaggataactaagggctgaagagatggtggcagggagcagtgaggtgggtgggtygggacttggcaagcagccagaatacccaagggcctggcctcagagcctgggggccagggagacatcaccgggtatttgctgagcctcgtgcaggagccag

SEQ ID NO: 519711 - DNA, 201 bp, Homo sapiens
ggcaagtgggcagtgccagccagcagcaaccctcaggcccagggaggaagcaaagggcttgctcgggatgatgcttgagtgacccctaacgtgtccggctrttaggataactaagggctgaagagatggtggcagggagcagtgaggtgggtgggtcgggacttggcaagcagccagaatacccaagggcctggcctcaga

SEQ ID NO: 519712 - DNA, 201 bp, Homo sapiens
ttttatcctgtcttgggtactcaacttaaggacttcacctccctcctgagatcctacttcctttccctgtgtcatgcccaagccaggagcatcactttccycaaattaggaaaggtgttactgcccctgggcctgggtccctgcagccagacttggatatactgtcacccttgttccattccacagctgtgcccagacaga

SEQ ID NO: 519713 - DNA, 201 bp, Homo sapiens
cagtcgcccagcggcctctctgctgactgaggtgaggtgtagcccggccagaggaagcagctgcctagcctgaggaaggtgctgggaggggcacagaactrtgtctgaaccacgtgtgcttcgtgctcagtgtctgatgtgggtgcagagggcagtaggggcaacacatttctatatgttggtggccaaccaccaccaatg

SEQ ID NO: 519714 - DNA, 201 bp, Homo sapiens
cagtggccacgacccaaccttggctgagcacagccgttcccagggactggccgggaggtgactgacaccgtgcctcccggtacgatcccgctgaaccatakgtgttgtggtgagaggggttctgagctgagtatgataggaaaacagcgagttgaagttatatggctttgtttcttaatgatcggagttcttagagtgttt

SEQ ID NO: 519715 - DNA, 201 bp, Homo sapiens
tgacccccacccccacccccccacccccgattcctgaccatgccccctatcttgtgatttcagacttgggagagcaaaagggaggggaagaaaataagagkaatggggggaggaaggaatgcatgggtctgccccttagagcaagtctgaaaccagaatcaagagtcctcctccccagtgggcctgtgtgggggaagaggg

SEQ ID NO: 519716 - DNA, 201 bp, Homo sapiens
cccccgattcctgaccatgccccctatcttgtgatttcagacttgggagagcaaaagggaggggaagaaaataagagtaatggggggaggaaggaatgcaygggtctgccccttagagcaagtctgaaaccagaatcaagagtcctcctccccagtgggcctgtgtgggggaagaggggcagcctgccccaggggtgcaag

SEQ ID NO: 519717 - DNA, 201 bp, Homo sapiens
tgaacccgggaggtggaggttgcagtgagccaagatcacgccactgcactctagcctgggcagcagagcaagactccgcctcaaaaaaaaaaaaaaaaaaagctgagccctggggaggggcggagcttgcaccagatgtacagcacagaccaggggacccggcctttctggaggccagtcaggctgttgtgggcccctgtg

SEQ ID NO: 519718 - DNA, 201 bp, Homo sapiens
tggatctttctcagggctcttggaaactcctacccagaacctgcatttgaagcctgcactccctcccacaaaagctggttgttctgcctgaacatgccccactttccagatggacacacatgcatgcgcacacacacatacacatacacatacacacaaacacacatgcacacacactgccccctctttggctagagggtg

SEQ ID NO: 519719 - DNA, 201 bp, Homo sapiens
agatgctggtagcgctggaggcgctgcacgagcagggggtgctgtgccgggacctccaccccgggaacctgctcctggaccaggcaggtaggtgccctcckcacccctcagtggggtggcccccaaagcgtccaggcagaggacgagagatccccaaagtcgaggggacctccaaggttgtctgctcctccctggccccag

SEQ ID NO: 519720 - DNA, 201 bp, Homo sapiens
ggatctttctcagggctcttggaaactcctacccagaacctgcatttgaagcctgcactccctcccacaaaagctggttgttctgcctgaacatgccccactttccagatggacacacatgcatgcgcacacacacatacacatacacatacacacaaacacacatgcacacacactgccccctctttggctagagggtgg

SEQ ID NO: 519721 - DNA, 201 bp, Homo sapiens
tcagaggaagtgactggctctgaggtcccttccagccatgacacctcagaccctgcaggatgttggggctctagctaaggccttgggtgaggggttgatckctggaggtccagttggaacagggcttctcagttgatctctggggtccaggtggaacagggcttctcagctgatctctggggtccaggtggaacagggctt

SEQ ID NO: 519722 - DNA, 201 bp, Homo sapiens
acagttgaccccaacaaggagcgacgtgaggctgtgaagctgaaaattaccaaatacctgcggcgggcagaggagatcttcaactgccacctgcagcggcygctgagcagtggagccagccccagcgcggtgaggagaccccccccacccaaaggcctgagcgggaggagggctctgaggggagactgcggaggccccgac

SEQ ID NO: 519723 - DNA, 201 bp, Homo sapiens
gcttgaacctgggaagtggaggttgcagtgagccgagatcgcaccactgcaatccagcctgggtgacatagcgagactctgactcaaaaaaaaaaaaaaaraaagaaaagaaaacagaatcctgagctggttatgattctatcattaccaccacttaggaaggacctggatccatgaaaagaccttacccactttagctct

SEQ ID NO: 519724 - DNA, 201 bp, Homo sapiens
atgcatttgcccattccaggtcccagctgcagggcagccatgagcctggtggcctgtgagtgcctgcccagccccggcctggagcctgagccttgctcacragcacggtcccaagctcacgtgtacctggagcagattcgcaacagggtggctctgggagtgcctgacatgacaaaacgtgactatctggtggatgcggcc

SEQ ID NO: 519725 - DNA, 201 bp, Homo sapiens
tcttttcctgtctcctcccacctctccagcccagagctcttggccttcctcctgggggttcctggaagctcatacttccctccagacagaccctctgctcmtcaaagctgtgcctttctggggtgtggagaggtcctattttcttttattgccacgccgctgccttggccccgatggtagcatgccatggcctgctgccaa

SEQ ID NO: 519726 - DNA, 201 bp, Homo sapiens
cagcacaactgcccccgaagccagggacacacttagcactcccaacacattagttggctatagctaaggagactgtcaacttctatgaatacgagtagagwgggatggtcagggaaggtttctgccagagagcctgggcccaggtggtgtcagatttggaggaagcgcggaatgtgacacagcccttcttccctggaaggc

SEQ ID NO: 519727 - DNA, 201 bp, Homo sapiens
ggccctgtgaaggtggctgtggatcacagatatcctcagctctctccagagctcaacacagtaccagatgctccagaaatgtttgctgaactgaatttgaytggaaaggaaaacagagccccaggcctgcgcggtggctcacgtctataatcccagcactgtgggaggccgaggcagacggatcacttgaggtcaggagtt

SEQ ID NO: 519728 - DNA, 201 bp, Homo sapiens
ggtacgtgagggggaggcctggcccgcggacccggctcccagctcgggcaggtacggtgttttgtccggtcccttctccaccctcccaggcgaggggcccyctcggccgtccctccaccctgggaccgtgcaccttgcggctggggccccgtgggttgcacgcgccgctttctgtgtccaggcggggccggcggctctgcc

SEQ ID NO: 519729 - DNA, 201 bp, Homo sapiens
agcagctgcctagcctgaggaaggtgctgggaggggcacagaactgtgtctgaaccacgtgtgcttcgtgctcagtgtctgatgtgggtgcagagggcagyaggggcaacacatttctatatgttggtggccaaccaccaccaatgttcccagggtaaaatgggggttctgtgggccaggctgccagggagcaggccccct

SEQ ID NO: 519730 - DNA, 201 bp, Homo sapiens
ctctgtgctctgctctctgctggctccaggaggggtcctcactcgctgaccacactgacctcaggaccaagggaacaaaacacagcaggggcaatccatcyggtccacggagaagtgctaaaccccaaagggtaaatgagattcccacaggaggagcagggaggagacaacaggcagggtggagggaacagcatgaggaac

SEQ ID NO: 519731 - DNA, 201 bp, Homo sapiens
cagctgcttcctatttctccctctccccagccctgtactttgattttattttgagatggagtatcactctgtcacacaggctggagcgcagtggcgtgatmtcagctcactgcaacctccacctcccaggttcaagcaattctcctgcctcagcctcccaagtagctgggattacaggcacgtgccaccacgcctggctaa

SEQ ID NO: 519732 - DNA, 201 bp, Homo sapiens
tcaaggtgcccagatttcatattgttcgaacacacatgctttgggaacaatttgtgcagttaacgcaatcatcacagggtcctgaggtgacatacatcctyagcttataaggatgatgggattaagagattaaagtaaagacaggcataggaaattataagagtattgattggggaagtgataaatgtccatgaaatgttc

SEQ ID NO: 519733 - DNA, 201 bp, Homo sapiens
cgctaaatcattatgttgaactattagcccagtaggggagtgcaatgaggcgaaaaccagaagctgaaaaggctgaaacggctgtactctagataactggrtggtctgaattctttacgaattccagttctagtgaagcctcaggggtcaaagtcctgggactgcggagattggaatctccccgcagcatagaaaacaagt

SEQ ID NO: 519734 - DNA, 201 bp, Homo sapiens
gatgggtctgtgttgccatcagggaggattgaatgagacccattgtgatttggtgggccagcttctaaggagttggcacagatctcaccacatctgagggyggtttttgacgcggacgtcttttccctgtggttttcctttgatgatctcctggtgacacacaagcatattctctttcccacgttaactagaatcagagac

SEQ ID NO: 519735 - DNA, 201 bp, Homo sapiens
gagtggtcgaataagtggaggaaaaggcacataagcccaataagaataattttgtgtagccggtaaatcagtgtgaaaggaaactggtgagacagaaagtrtaaggaggggaatcattaaataaaacctagtgtaagcgagattcagtgccgaaagaggaagagaagaacagagggatgttattttcaggctaatataaat

SEQ ID NO: 519736 - DNA, 201 bp, Homo sapiens
cagggtgcttgtgttgccctgctgcaagccccatgcagctcagcagaaagagacttcatttgtttgggagaaagtaagggaagagaacaagaatctctgcytggtaatccagagaattcttccagattttattcaagactaccaaggtggtacctctacaagtctgcaagaaccacagcattactgggcttggggtgcccc

SEQ ID NO: 519737 - DNA, 201 bp, Homo sapiens
gataggtcctgctggtctttgagcatatcttgctttctgacacaagagtgctcagggtagacttattctttctgtattccatgtctggagttacatattcyttcaaagagtcctggttcttttagttggaagtggtatttagaaacagaagtctgggcaccacgtgtgttcattgcttggtggggttctggctggtggttg

SEQ ID NO: 519738 - DNA, 201 bp, Homo sapiens
tgtcaatgctgggcaaatgttattttatgtcactattgccacttgaatactagtaattccacaaaacttccatagattattatatatatttttcccacagraaatgttatttcacaaaatcatttcataatttcattgtatataattttaggttaggtatttcccaaagaaatattgggtcattgcatgcaagaacaataa

SEQ ID NO: 519739 - DNA, 201 bp, Homo sapiens
acggagtcgcgctctgtcacccaggctggagttcaatggcatgatcttggctcattgcaacctctgcctcccaggtccaagcgattcttgtgcctcaaccktctgagtagctgggattacaggtgcatgccaccatgcccggctaatttttcgtattttttgtagagatggggtttcaccacgttggctaggctgatcttg

SEQ ID NO: 519740 - DNA, 201 bp, Homo sapiens
gattacttttgcatatgcttatattttctggaaagttaaaattgatttctggataagataattttttgtgtcagaattaaagtcaattcctatatagcccrtgaaacggcaaattttgcagaatttcttcatcacactctttttttttgtttcttttctttttttttttttgagacggggtcttgctctgttgcccaggct

SEQ ID NO: 519741 - DNA, 201 bp, Homo sapiens
gcacacacacacagccacgcacacatgcacacaagtcctgggcaaacctagcaagatcctgtctagacacacacacacacacacacacacacacacacacacacacacaccacacacacacacgtttccactttccccaatcccctggcaaccaccattctactttctgtctctatgagtttgactcatagagcactcatg

SEQ ID NO: 519742 - DNA, 201 bp, Homo sapiens
tagtattgaggttctttattaaattaattatatagcctgtattagataattgaactttaaaattactgtaaggatacataaaaatgaagctactcaagttrtttaaaataatatctaaggtcaaatagaacattgcatttaagttgtgccgaaatgagggaaagttttattattttgatgcccaaatatcagtaggtacag

SEQ ID NO: 519743 - DNA, 201 bp, Homo sapiens
tgcacacacacacagccacgcacacatgcacacaagtcctgggcaaacctagcaagatcctgtctagacacacacacacacacacacacacacacacacacacacacacaccacacacacacacgtttccactttccccaatcccctggcaaccaccattctactttctgtctctatgagtttgactcatagagcactcat

SEQ ID NO: 519744 - DNA, 201 bp, Homo sapiens
tcctgtctgcacacacacacagccacgcacacatgcacacaagtcctgggcaaacctagcaagatcctgtctagacacacacacacacacacacacacacacacacacacacacacaccacacacacacacgtttccactttccccaatcccctggcaaccaccattctactttctgtctctatgagtttgactcatagag

SEQ ID NO: 519745 - DNA, 201 bp, Homo sapiens
gaatcacttgaacccgggaggtggaggttgcagtgagccaagatggtgctactgtactccagcctggtgacggagcaagactccgtcttaaaaaaaaaaaaggcaagatgtagatgtacttatatagtgtgatctcagctatgtcaaaaagaattttttttaacccttttatcttcctagaacaaggagaaactttggggt

SEQ ID NO: 519746 - DNA, 201 bp, Homo sapiens
ttatatatgtatatacaaatacataatatccaggcttcacttagctggtaacttctcagtgttaatcactgacaacaactagtaaaaaatcccagaaaccytgataactgcctaagtaaagaaacttttgtagatgttagcagttgacttcccactgtgagagtctaggtcattatttcagtcttctagactatgcattac

SEQ ID NO: 519747 - DNA, 201 bp, Homo sapiens
ctaaggcgagaggatcacttgagtccaggagtttgaggctgttagtgagccatgattgtgacatagcaagaccctgtctcaaaaaaaaaaaaaaaaaaaaaccgaaaaagtgatcattatcatatggtaattacccgtcattcaaatttactgagtacctattatgaacatgttttttatatatgtatatacaaatacata

SEQ ID NO: 519748 - DNA, 201 bp, Homo sapiens
gaaagcatagggtaggacttagaatctgaaaacttgggttaagttctagttctgtcacttactagctgttgtaactttgggcaaatcacttactccccctmagcttaggttttttagatttgaaaatagggatgatgataaaagtttccttaataggattttttgaagagttatgtagataaagatatggggaagagattt

SEQ ID NO: 519749 - DNA, 201 bp, Homo sapiens
aagttatactgagtgtgcctgcctcttctgcctccacttccacctcctctgccacccttaagatagcaagaccaacctctcctctccctcctcctcctcarcctactcaatgtgaagataacctttatgatgatctgattccagttaatcaatagtcaatgtattttcttttccataggattttcttagtaccatattttc

SEQ ID NO: 519750 - DNA, 201 bp, Homo sapiens
tttttattatttttacctgtcacagttgatcccacttacgggaatttttccaaaaaggagtactgctaaggagggtaaaaaggtttttccaactaaggagraaaaatgtagtgaaatagcaatagaatactttcagaggaggattttaaaagtatatgtcaaagcaaaggttttggtttttaaaaatactttctctaaata

SEQ ID NO: 519751 - DNA, 201 bp, Homo sapiens
taaagttatactgagtgtgcctgcctcttctgcctccacttccacctcctctgccacccttaagatagcaagaccaacctctcctctccctcctcctcctcagcctactcaatgtgaagataacctttatgatgatctgattccagttaatcaatagtcaatgtattttcttttccataggattttcttagtaccatattt

SEQ ID NO: 519752 - DNA, 201 bp, Homo sapiens
agaaagatattaatatccaagtacaagaaggttataggacactaagcaaatttcacccagagaggactaactcgagacatttaataataaaattcccaaagacaaggataaagcaaggatactaaaaggagcaagagaaaagaaacaacatacaatggagctccaatatggctggcagtagacttttcagtagaaacctta

SEQ ID NO: 519753 - DNA, 201 bp, Homo sapiens
tagcgcagatcacagttgaaaagtgtaagcttaagtactatgccagaattggatatgtggagggacagtaaatatatgtctcagggaatggtggagacatyatgcaattcagaggacatgaacataattctcattattttttcctaccagtatgaagtgaaggctcctgttccttctgcctgtttcaggaatatttgtaag

SEQ ID NO: 519754 - DNA, 201 bp, Homo sapiens
gtaaagttatactgagtgtgcctgcctcttctgcctccacttccacctcctctgccacccttaagatagcaagaccaacctctcctctccctcctcctcctcagcctactcaatgtgaagataacctttatgatgatctgattccagttaatcaatagtcaatgtattttcttttccataggattttcttagtaccatatt

SEQ ID NO: 519755 - DNA, 201 bp, Homo sapiens
cccagacaaacaaaagccaagggatttcatcagctccagacctgtcctacaagaaatgctaaagagctggccaggtgcagtggctcacaccggtaatcctrgcactttgggaggctgaggtgggtggatcagctgaggtcaggagttgaagactagcctggctaacatgatgaaaccttgtctctactgaaaaacaaaaat

SEQ ID NO: 519756 - DNA, 201 bp, Homo sapiens
aacaaaaaattacctgggcggggtggcaagtacctgtagtcccagctactcgggaggctgaggcaggagaatcacttgaacctgggaggcagaggttgcartgagctgagattgcaccactgcactccagcttgtcatcagagtgagactctgtctcaaaaaatcaaaaaaaacaaacaaaaaaaaccagatttgagatga

SEQ ID NO: 519757 - DNA, 201 bp, Homo sapiens
ggtaaagttatactgagtgtgcctgcctcttctgcctccacttccacctcctctgccacccttaagatagcaagaccaacctctcctctccctcctcctcctcagcctactcaatgtgaagataacctttatgatgatctgattccagttaatcaatagtcaatgtattttcttttccataggattttcttagtaccatat

SEQ ID NO: 519758 - DNA, 201 bp, Homo sapiens
tgaaattgcgttgaatgtatagatcagttggggtgaaattgacattattgggtctcctgatccacaaacaaggtatatccagttttgtaccagagccagaytgcacctgctagccagaaactatgttgtgtatctcttcccaatactacattcagtaacagcacactggtaactttgccagtggtgtgaatatttacacca

SEQ ID NO: 519759 - DNA, 201 bp, Homo sapiens
ggttttcaggctgctagaaaatactttgtgcaggatagagatctgaggatcaaacagaactcttgatgctgaatatttctacctctaagtaaaattacttyatatttaaaatgtcaagttacatacttttattttaacaggaaagactaatatctcttgtatttggacttttaaaacaaagaaagcttaattttttagaaa

SEQ ID NO: 519760 - DNA, 201 bp, Homo sapiens
cccaggctggagtgcaatggcgcgatctcagctcaccgcaacctccgcctcccgggttcatgctattcttctgcctcagcctcttgagtaactgggattaygggcatgcaccaccacgcccagctaattttatatttttaatagagacgaggtttctccatgttggtcaggctggtctcaaactcccgacctcaggtgatc

SEQ ID NO: 519761 - DNA, 201 bp, Homo sapiens
aagcatcttttcatgtgcttgtttgccattcatatctttggtaaagtgtctgctcagatttcttgctcatttaaaaatattaggttgtttgtcttataagwgttccttatatatcttagatacaaattctgtatcagtatgtggtttctaagtattttctcccagtttgtggcttgtcttctcctttcatgaacagtgtct

SEQ ID NO: 519762 - DNA, 201 bp, Homo sapiens
tgtggttttaagttacataattacagatatgttaagcatcttttcatgtgcttgtttgccattcatatctttggtaaagtgtctgctcagatttcttgctyatttaaaaatattaggttgtttgtcttataagtgttccttatatatcttagatacaaattctgtatcagtatgtggtttctaagtattttctcccagttt

SEQ ID NO: 519763 - DNA, 201 bp, Homo sapiens
tgctactgggagtggatctatatgatcttctccctttgatcctcctgtttcttctgagtacctcctggaggccgtgaagtaaaacttgtgcatgagtgcaractctccttatggctagggttttcagttatcctaaatatatcctagcccacgtttggcctttaagaatttgttaaaattttacttattttcatcttactt

SEQ ID NO: 519764 - DNA, 201 bp, Homo sapiens
tgcaccactacactccagcctaggcaacagagggagactctgtctaaaaaaaaaaaaaaaaaaaaaaaattaaaaatttcatggggttgtgtgtgtgtgarattagaaaaggcttctagaggggaaataatgaaaaaaaaactgctctatagctgtatgtataggtatttatcaattcttttaaaagtgagtaatatctat

SEQ ID NO: 519765 - DNA, 201 bp, Homo sapiens
  misc_feature (1)...(201): n = A,T,C or G
ctcttctgcctccacttccacctcctctgccacccttaagatagcaagaccaacctctcctctccctcctcctcctcagcctactcaatgtgaagataacntttatgatgatctgattccagttaatcaatagtcaatgtattttcttttccataggattttcttagtaccatattttctctagctttattgtaagaatat

SEQ ID NO: 519766 - DNA, 201 bp, Homo sapiens
atgatagatcttttaaacaataaaaacaatattcctactttagaatttaattcattttttaaaattacatagcatgccatattcagtcttaccaaaacttraaaagatagcacagcagtcctcaatctttttggcaccagggactggtttcatggaaaacaatttttccatagaccaaggggtttgcggggagatagtttt

SEQ ID NO: 519767 - DNA, 201 bp, Homo sapiens
agttgggattggcaggatgaaagtaaagtaggttcatttgaagataagtgtgtatctcagccttaagatgtctgagaagaaaattaatgtagtataaaaaagcaacctttgatcataagaaattctggatgggatgatagatcttttaaacaataaaaacaatattcctactttagaatttaattcattttttaaaattac

SEQ ID NO: 519768 - DNA, 201 bp, Homo sapiens
tatatctatatatatctatatatatctatatatatctatatatatctatatatatctatatatatattagaatgtgtgtgtgtgtgtgtgtgtgtatatakatttttttttaatgggaaagaactgagcatgtttatatacaaagataagagagctagtacaagggaagaggctgaagatactgagatggagtaaactgat

SEQ ID NO: 519769 - DNA, 201 bp, Homo sapiens
atatatctatatatatctatatatatctatatatatctatatatatctatatatatctatatatatattagaatgtgtgtgtgtgtgtgtgtgtgtatatrtatttttttttaatgggaaagaactgagcatgtttatatacaaagataagagagctagtacaagggaagaggctgaagatactgagatggagtaaactga

SEQ ID NO: 519770 - DNA, 201 bp, Homo sapiens
gatagataagatgagggcaaatgaagttgaggagaacagatctctgagataacagcataagcaaacatgttggtagaaattttaaggcaattcattgtcakggttttggagtcaggtagacctaaattcaaatcccatgtctgtcacatactagctattgaaggaccttgggcaaattattaatctccttaagcctcagtt

SEQ ID NO: 519771 - DNA, 201 bp, Homo sapiens
ctatatatatctatatatatctatatatatctatatatatctatatatatctatatatatctatatatatattagaatgtgtgtgtgtgtgtgtgtgtgtrtatatatttttttttaatgggaaagaactgagcatgtttatatacaaagataagagagctagtacaagggaagaggctgaagatactgagatggagtaaa

SEQ ID NO: 519772 - DNA, 201 bp, Homo sapiens
taagaattgtcacagtgactagactttttcctatgacaacttactttttttttctgtaaagaaaaaagagaattgtttaattaacttcccatgtatgcatsacctatattcgttattaacaatttgccttttttgctaaaatattttataataaatttgaggcattatggtattttatccctaaatacctaagtatgcatt

SEQ ID NO: 519773 - DNA, 201 bp, Homo sapiens
ctggcctgggttttatctatatctatatatatctatatatatctatatatatctatatatatctatatatatctatatatatctatatatatattagaatrtgtgtgtgtgtgtgtgtgtgtatatatatttttttttaatgggaaagaactgagcatgtttatatacaaagataagagagctagtacaagggaagaggct

SEQ ID NO: 519774 - DNA, 201 bp, Homo sapiens
aatgcatttggtgaggctgtcatgaagctaatactaaaatcagacaaaagcattataaggaaagaaaactttagacctcttgtgtgtttttttgttttttkttttttttttttttgagacaaggtcacgctctgttgcccaggctggagtgcggtggcaggatcacagctcactgcagcctcaacctcccggctcgagcaa

SEQ ID NO: 519775 - DNA, 201 bp, Homo sapiens
ttatgtacaaacatacctatactatgttatgcctatttaaattagtttctagttgtgaagggagaaaaattactgtttagagatgctttattttcttcackggtgccaagtacaagctacattcaaaagcaattctattctaccagtttcctttttgatatacagcattcttctgtgtaccaaaagtcggtaacatattgt

SEQ ID NO: 519776 - DNA, 201 bp, Homo sapiens
ctgtgaactcaggaggtggagcatgcagtgagctgagatcgggccactgcactccagcctgggtgacagacagactccatctcaaaaaaaaaaaaaaaaaatcatttggggcccggcgtggtggctcacgcctgtaatcccagcactttgggaggccaaggcaggcagatcacttgaggtcaggagggagttcaacatcag

SEQ ID NO: 519777 - DNA, 201 bp, Homo sapiens
atggtgaaaccctgtctctactaaaactacaaaaaattagccgggtgtggtggcaggcgcctgtagtctcagctactctggaggctgaggcaggagaatgstgtgaactcaggaggtggagcatgcagtgagctgagatcgggccactgcactccagcctgggtgacagacagactccatctcaaaaaaaaaaaaaaaaaa

SEQ ID NO: 519778 - DNA, 201 bp, Homo sapiens
gccatagggctcttcgtttatgaaataaactggatctttataagtgatgttttttatttgatttgatttgtaattaaaatcaactaatacctttttttttwttatttctccattatatatctactccctggatcttcagctctttcttcacgatgtttgcagttaattgtgcactacattcctgtgatccgggctcatttt

SEQ ID NO: 519779 - DNA, 201 bp, Homo sapiens
cactgcaagttgttggactaaaaacgataactacaaaaaatttgggtatggattcttgcgtttaattcacttgctgaagtgttaacagtgatgtcactgtwctcatcatgtttttttatacctcatgttttcatggctctaaccaaagtggcattactctaaaaataaatgctacttactcttttatgtatactcatcact

SEQ ID NO: 519780 - DNA, 201 bp, Homo sapiens
ttgcttttgctattcatactcaagatccacgttaattttgtttaatgatcatgatgttagaagagataatgggtataaagaaaatacttatctaattgagkgaaatgcatttttttaatagatttttatgaaaccagattttgccttggatgattccttaacttttaattcagttttaccatggtctcattttaatactgc

SEQ ID NO: 519781 - DNA, 201 bp, Homo sapiens
agtcttctagttctcccttgaagtgaattggaaattttggattaacagttttaacagtgttaaatttggattaactgttttaaatcctgcaaagaacttaraggaaactttatggatttctttatcttctctcttctgtagcatacattattaaggactgcactggcttaacacaaaaagcttgatttttctcatataaca

SEQ ID NO: 519782 - DNA, 201 bp, Homo sapiens
tttagggccatttctcttttctacgatgctatgccacttctctgtaatatagagaagtgatgaagacacagtccttaacctcaaaaaatatacttctgacwtacatagtaaattgtgattgcaatatatatagctctcaaatagtcaaatatatttacaaatcctaaagggatttgaagcttagggaagcataatgagctg

SEQ ID NO: 519783 - DNA, 201 bp, Homo sapiens
cagaatcaaatttggacctcttaagcatttcatgctcaatttctgggtctgaagtattgggaaatattattaaaataaaaaatatatagattataataatygttaaactaacttggtttcataactcaatttggtgttacactaactctcatgatttttgtattaaaatttaggatggttttcttgagaagctaaattcca

SEQ ID NO: 519784 - DNA, 201 bp, Homo sapiens
ttaataactaatttgaaattaatgttgttttacatatatagtaagtctatatatgtatacctaaatatatgtagttaaacaagtttataataaaactccarcattgtgaaaattttatagtatgacctaaattcatttgaactactatattagttataaagggatcagaatcaaatttggacctcttaagcatttcatgct

SEQ ID NO: 519785 - DNA, 201 bp, Homo sapiens
gaaagcagcatgttcattacattattcagtatcaaattattagacaaaatgaaatatgttgccttctgccatagggctcttcgtttatgaaataaactggwtctttataagtgatgttttttatttgatttgatttgtaattaaaatcaactaataccttttttttttttatttctccattatatatctactccctggatc

SEQ ID NO: 519786 - DNA, 201 bp, Homo sapiens
ctataggaatatttccacgtgtagactgattttcttatgttgtcattatgtgtatatgattttatacatatatttcagttacaatcataagcagtttctcmtattattataaaagctttcagaaacatcatttttaatgattgtgtaaagtcccattaacattatgttaaatctacttaacttttcctctgtgttgaatat

SEQ ID NO: 519787 - DNA, 201 bp, Homo sapiens
tctgttacatgggggaaattttaagtaatgtttcaggaattaaaaatttacttcagtagtaaagttgactttgaaatttaagcaagaattttgcaggtatyctgttttgaaatactactagactgtttatatagaaatgtcggagcagaggaagcttactcgattagaagtagactaagtctaggttctagttctactctc

SEQ ID NO: 519788 - DNA, 201 bp, Homo sapiens
attgctggattatgtttgaattcgtttgttttttccctattgacgtgaaagttagagatctaactgaagttaaaaaataatttttttttcttttttttttycctcactcctttgcccaggctggagtgcagtggtgcgatctcggctcactgcaagctctgcctaccgggttcacaccattctcctgcctcagcctcccaa

SEQ ID NO: 519789 - DNA, 201 bp, Homo sapiens
cttattacttccactcacatcctagtggccagaataattacatgactatgtctagctataagggaagcttgagaaataagtctttagcttgtggactattkgcccagctagagctgtcattgtggcaaaagagagaacagatactgaaagatagttagctttctgccacaccatttgagatccttttaaactggatgcagt

SEQ ID NO: 519790 - DNA, 201 bp, Homo sapiens
tagttacgatagcttttgttttcttaaacaattagtttgtagagatggggtcttactatgttgcccaggctggtcactcctggcctcaagtgatcctcctrtctcaacctcccagagtgctaggcgtgaaccaccatgcccagcaactgtagctttttaatccatattaatatctgggagattaatttctcccaatttttc

SEQ ID NO: 519791 - DNA, 201 bp, Homo sapiens
tactccttcccataggaaaccattaaaacaattggtttttccagtttttaaactttatgttaatggaataatatatttgctcttttgtctctgatttcttycgttcagcattacagttgtgatatctatccaggttgttacatgtagcagtgattttattttttgtgtacaaataatccattttatgatacaccacaatgt

SEQ ID NO: 519792 - DNA, 201 bp, Homo sapiens
ccttcccttgcaagcttcacagaggggcacccacctgtatgaggtgtctgtcggccccctactgggaggtgtctcccagtcaggctgcacgggggtcaggkatccacttgaggaggcagtctgtccgttatcagagctcgaacactgtgctgggagaaccacagctctcttcagagctctcaggcagggatgtttaagtct

SEQ ID NO: 519793 - DNA, 201 bp, Homo sapiens
ggggtagggcctgaagaattataggtaaattgtagtttggtcctggagccattaggtgactccggaggtttgaagagagaagaattagcgtatatggtccygggctgtctgagtcgtggccgcgggagcttataagtactggctcttcgtgaaaagaaacaaggtcagcagggggtaacgttaagccaaagtcaccagagt

SEQ ID NO: 519794 - DNA, 201 bp, Homo sapiens
agggaaggcctctgaggaagtgaccactggagccagaacctcagtgatgagaaggaaatatgtgcaaagatcaaggtgaaaagcattccggatagaggaarcagcagaggcactgaggtgggaacaatcctggaatgagggaagagtagaaagagaactagaatgtctggagagtagtgaataagtgagagaagatacgag

SEQ ID NO: 519795 - DNA, 201 bp, Homo sapiens
cctattaaaccatttaaattgtttttatatagttagatttaaatctgtcatcttgctagctgtcttctgtttgttccttctgttctttgactgattttccycttttttcagattaaatgttttttatagttttattttgtttaatctttaaagttggtgtactagctatatttctgtttgtttctagtggctgctctaggg

SEQ ID NO: 519796 - DNA, 201 bp, Homo sapiens
agttataattttataacttaaaaagaaatatgctcttactttacattaaatattatacagtaatatttcctctcgtgattttttgttctcctaggttatcyagaggtacaatattgttaaacaccccaaaatcaccccaaactatcaatttttctataaagtcaatgttgatataatggtgttttaaaatatattgtttat

SEQ ID NO: 519797 - DNA, 201 bp, Homo sapiens
caaaggtagagatgaggtcttaccgtttttatttttcttggcaccataataagcactcaaaaagtatgtatagaattaatcctttttctgtatctgtattyaaatacctgaagtccacacattctaaactaaagcctccattcttttctcttctgaagtccttccctgtttctggtagggaaagctttcttcagtcttcct

SEQ ID NO: 519798 - DNA, 201 bp, Homo sapiens
ctcagaacgtgtcaataactaatttctatctttctttcctttttttctttttttttgtgatagagtctcactctgccacccaggctggagtgcaatggcaygatctcggttcactgcagcctctgcctcctgggtttaagtgattcttgtgcctcagcctccccaatagctgggatttcaggtgtgcgccactactcctgg

SEQ ID NO: 519799 - DNA, 201 bp, Homo sapiens
aaggataaatagaattttgatgtatttgtacagtggaatactatacattaatgagaatgaatagattacacagaataacaaatgaatatcatagacataaygtggagccaaagaaaccagacacagaaaagtatacattgtatgattccacttatgtaaaactcaaatgcaggcaaaattattctatggtttaaaaatcaa

SEQ ID NO: 519800 - DNA, 201 bp, Homo sapiens
tccctgatctttgttttgactttttttagtcagataaatcttatccactgaacttcagttttttaatatatgaaaaagataatatgattttaaaggtattyattaggcttaattgattattatcattaggttgaatgtacatatatgagtttttaaagtttaagtttaaaagttaaataagcaaaaaaattataatcatcc

SEQ ID NO: 519801 - DNA, 201 bp, Homo sapiens
ttgggaggccatggtgggcagatcacctgaggtcaagagttcgagaccagcctggccaacatggtgaaactccgtctctactaaaaatacaaaaattagcygggtgtggtggtgcgcgcctgtagtcccagctactcaggaggctgaggcagaaggatcccatgaacctgggaggtggaggtttcagtgagctgagatcat

SEQ ID NO: 519802 - DNA, 201 bp, Homo sapiens
gcccaggaatttgagaccagcctgggcaacacagtgagtctacaaaacaaatttaaaaattagccaggtgtggtggtgcatgcctctagtcccagctactygggaggctgaggtgggaggatcacttgagcctgggagatcaaggctgcagtgagctgtaatcacctcactacactccagccttggcaacagagtggaacg

SEQ ID NO: 519803 - DNA, 201 bp, Homo sapiens
agttctttttaactttggtatatcatatctggctttcagcaaaacattacagtgcataccagacagaaaacactgtttaaacagacagatcaagtatcagmatcagactcagatgcggttgtgatgttggaatgatcaaactgggaactcaaagtaactatgtttaatatactaagggctgtagtggaaaacatggacaac

SEQ ID NO: 519804 - DNA, 201 bp, Homo sapiens
gaggatcacttgagtccaggagtttgaggctgttagtgagccatgattgtgacatagcaagaccctgtctcaaaaaaaaaaaaaaaaaaaaaccgaaaaastgatcattatcatatggtaattacccgtcattcaaatttactgagtacctattatgaacatgttttttatatatgtatatacaaatacataatatccagg

SEQ ID NO: 519805 - DNA, 201 bp, Homo sapiens
tctgccatggcttcagccagtccctcggttcggggtccctgacttcccgcaacacatatctgtgactattgatgcaaaaaatcttcaataaaaatactagyaaaccaaattcaacaacaattaaaaatattattcatcatgaccaagtgggatttatttcaggaatgtagatagttcaacatgtgcaaaggtgatacatca

SEQ ID NO: 519806 - DNA, 201 bp, Homo sapiens
tttctgcagagacatccgctgttagtctgatgggcttccctttgtgggtaacctgacctttctctctggctgcccttaacattttttccttcatttcaccsttggtgaatccgacaattatgtgtcttggggttgttcttctcaagaagtatctttgtggtgttctctgtatttcctgaatgtgaatgttggcctgccttg

SEQ ID NO: 519807 - DNA, 201 bp, Homo sapiens
gtgtagtggtgcatgcacacctgtagtcccagctacttgggtggctaaggcgagaggatcacttgagtccaggagtttgaggctgttagtgagccatgatygtgacatagcaagaccctgtctcaaaaaaaaaaaaaaaaaaaaaccgaaaaagtgatcattatcatatggtaattacccgtcattcaaatttactgagta

SEQ ID NO: 519808 - DNA, 201 bp, Homo sapiens
cacagggagactccatctctacgaaaaataaaaaaattagctgggtgtagtggtgcatgcacacctgtagtcccagctacttgggtggctaaggcgagagsatcacttgagtccaggagtttgaggctgttagtgagccatgattgtgacatagcaagaccctgtctcaaaaaaaaaaaaaaaaaaaaaccgaaaaagtga

SEQ ID NO: 519809 - DNA, 201 bp, Homo sapiens
  misc_feature (1)...(201): n = A,T,C or G
tgtattttgtgtattttgtttgcttgtttgttttttcgaactgattttttttctgagtagacaaactatcattgcttatcctgaaaccttcttaaggtttntcatcatttttgttctttagcctttcaatgaaagattatttctttgctgaaattttgtgattcagatgccatgtacatttgttgtatttgtctgtacatc

SEQ ID NO: 519810 - DNA, 201 bp, Homo sapiens
ggagaaagaatatctacctgaaaggttttaatgcagacaaaagtgccctactctgggggaaaaaaaaagccacaaagaacatttattagcaaggaagagawagtgagcaccaggatttaagacaggaagggataggctatctcttactgttttgtgcaaatgaagtcaggtttctgatcaggactgcccttatctataaag

SEQ ID NO: 519811 - DNA, 201 bp, Homo sapiens
catttcctaccccagacctgtaatctgccatttgtctagggagccctactttcttttagtaggaaatagtatttagaaatccatatgggtagtaggcatgwtcttgctactggattggccattatttctaggcttttgtagtggacagaactgggaaataattttcttttttaagtgactttgatacatcttaaggaaaag

SEQ ID NO: 519812 - DNA, 201 bp, Homo sapiens
tttggtgttagtattgaggttctttattaaattaattatatagcctgtattagataattgaactttaaaattactgtaaggatacataaaaatgaagctaytcaagttatttaaaataatatctaaggtcaaatagaacattgcatttaagttgtgccgaaatgagggaaagttttattattttgatgcccaaatatcagt

SEQ ID NO: 519813 - DNA, 201 bp, Homo sapiens
atatatatctatatatatctatatatatctatatatatctatatatatctatatatatctatatatatattagaatgtgtgtgtgtgtgtgtgtgtgtatrtatatttttttttaatgggaaagaactgagcatgtttatatacaaagataagagagctagtacaagggaagaggctgaagatactgagatggagtaaact

SEQ ID NO: 519814 - DNA, 201 bp, Homo sapiens
agaacttgaagggtaattttgactcattgcataactcataattattattattcttttgtacatttgtagaatttttaaatttaaaaaattttgaatgattrtactacctgaattgttgcaaaattgggcaattttaattattaggacataaattttttttttttttttttttgagatggagtcttgctctgttgcccaggc

SEQ ID NO: 519815 - DNA, 201 bp, Homo sapiens
tacagtctcctaccatgttttgtcatggtttgtgtttttattttaaatctttctattgggctttgaatttaaatgtcttggacaagagctatgttgtacayatcttaatatgtatttgtgaaatctgtgaattattcagtatattaccaaatgtatcttgacactttattccactctttttttttcctgtctataatcatt

SEQ ID NO: 519816 - DNA, 201 bp, Homo sapiens
attacactctcccattaggaaataagaaatattctacttgaatttcacacgtttttgtcttttttatatcagagtccatattttagtcatttcgtgggccrtatactaagccatagggtcttacttgaaataagaaatctttcagtaggacaagcaaaggactcttttaaatttatttgttaatagtctttccattttatg

SEQ ID NO: 519817 - DNA, 201 bp, Homo sapiens
taatttttgtatttttagtagagacaggttttcaccatattggccaggctggtctcgaactcctgacctccggtgatctgcccatgtcggcctcccagagkgctgggattacaagtgtgagctaccgtgcctggcctgatttttatttttagtagaaacggagtcttgccgtgttacccaggctggtctcgaactcctgag

SEQ ID NO: 519818 - DNA, 201 bp, Homo sapiens
gccactgtgcccagctaatttttgtatttttagtagagacaggttttcaccatattggccaggctggtctcgaactcctgacctccggtgatctgcccatstcggcctcccagagtgctgggattacaagtgtgagctaccgtgcctggcctgatttttatttttagtagaaacggagtcttgccgtgttacccaggctgg

SEQ ID NO: 519819 - DNA, 201 bp, Homo sapiens
acgaggcggaggttgcagtgagccaagatcacgccactgcactccagcctaggtgacagagtgagactccatctcaaaaaaaaaaaaaaaaaaaaaaaaaaggcagctaataagtaagggtaccattgcctgggtaggatgaaacaatatctaattgtactaacagctagactaatgttccaaccaccattcatttattca

SEQ ID NO: 519820 - DNA, 201 bp, Homo sapiens
acacctatagcagttgacactacctctcaaagaaatgcatctccaaatagtgagccctgcagcagtgattctgtatccgagccagaatgtactactgattsttcatccagcaaagagcacacatcatcatctgctattccaggaggtgtggatattatgtgagtatagtggctactgccaaattgacaagattttgagtca

SEQ ID NO: 519821 - DNA, 201 bp, Homo sapiens
agaaatcttttatcattgtcataaagtatttggataatcaaggaaggtatgctcatagtacttcatattttttttccttctcttttaagctgagccattayctggatattgtggaagtaaacattgctcaccagatctctctacgttcagaagcattttttcatgcaatgacctctcaacacgagttgcaggactacctca

SEQ ID NO: 519822 - DNA, 201 bp, Homo sapiens
tgaaataattaaaaataattaaacagatattctggagttgaaaaatgcaattgacatactgaagaatgcatcataatggcttaaaagcagttgatcggccrggtgtggtggcttatgtctgtaatcccatcagtttgggaggctgaggagggtggatcatgaggtcaggagttcgagaccagcccggccaacatggtgaaa

SEQ ID NO: 519823 - DNA, 201 bp, Homo sapiens
gccaaatagtttcccaggaagtagatgtttattttcagaaatgagagtttttggccttaaacaggaattatcttcttcagctttttctctattttgtttcktctggtactcttgtctctcgtttatttgcttaactctgtagccacagaagaaaggaaaccagctgaagttcttattgtcgagggacaacagtatgcagtt

SEQ ID NO: 519824 - DNA, 201 bp, Homo sapiens
ctcatttctttttcattaaataaatagatactaattgcttctactagataattcatttggccattgaatgagaggaaaggggaatgtatttttataatagyacattgccaggatataaagaacagtttttagtaaattttggggtttttttctccttcttttgttagtacttcaattcaagaagttgccagttagttcttg

SEQ ID NO: 519825 - DNA, 201 bp, Homo sapiens
tttgtatataggtaaaataaatcagtaaataaaatatagcatataaataaatacataaattgattaaaccatgttttaggccctatgctaggtgttagagrtacaaaaataagctataaatttaaccctgcaagaacatatggtctccagagggagatatgcatactaaataaataatttctataaagtatgaggtaaata

SEQ ID NO: 519826 - DNA, 201 bp, Homo sapiens
tgcgctcttagctcactgtaacctctgcccccacccccagtcccctgctaccctgttaactccccacccaccaccagctcaagccattctctcacctcagyctcctgagtagatgggattaaaaacacacaccaccatgcccagctaatttttatttatttattttttatttttttgagatggagtctagctctgttgccc

SEQ ID NO: 519827 - DNA, 201 bp, Homo sapiens
aagggcataaactcaagatttaaactgtggaaaaatttcttgtttgtaacctatttagatattgtaagattattgaaggagcattattgaagatatgaatratactctgtgtttccttagggaaacagatttgatgaccaaatagtctcttctaatcttatgagacctaaatgttgaaagttcattaaccctttgaaacta

SEQ ID NO: 519828 - DNA, 201 bp, Homo sapiens
acagttatacttgacattgtagaggagtatctctaacagtagtataggggatagattagggaaggatatcagtaaatagctattgaagagctgaactactraatgctgtggagatacaggaaagcagagattcaaggtatatttacaaaatataacgggtaggccttattgcttagctggtcgtgatatgtaagggaagag

SEQ ID NO: 519829 - DNA, 201 bp, Homo sapiens
atgcatactaaataaataatttctataaagtatgaggtaaataattaagtatgcatgatatatttgtgttcagagatgggagtcattatgtcatgcacaasgacacatttgcccttttgattgggtcatgttcttcaggaagatgtacaagaaaaggcgttctaggccagaagtatgtatgtaaagatatgcatactttat

SEQ ID NO: 519830 - DNA, 201 bp, Homo sapiens
tcatggaaaacaatttttccatagaccaaggggtttgcggggagatagttttgggatgaacctttattatgcactttatttctactgttattacattgtaraatataatgaaataattatacaattcatcataatggagagtcagtgggagccctgagcttattttccgggaactagatggtcccatctgggggagatggg

SEQ ID NO: 519831 - DNA, 201 bp, Homo sapiens
ggaggctgaagtgggagaatagcttgaaactgggtggttgaggttgcagtgagccgagatcgcaccattgcactctagcctgggtgacagagcgagactcygtctccaaaaaaaaaaaaaaacaaacagaaaaaagaaagaataaacatcaaagtcaaaattagagaaacaacagagaaaattagtgaaacaaaaagctga

SEQ ID NO: 519832 - DNA, 201 bp, Homo sapiens
tcgaagaattaaattgtttggactgtttttgtttttaattggctgtatttctgatttgtcaaatcaagggcggtcttaatactaaacgcctttaagtaatrccgtgataaattacttgtagtataccgagaaatattactgcgataacctaaactgcagattttgatgtacattcacttttataaatccgaaggggagttc

SEQ ID NO: 519833 - DNA, 201 bp, Homo sapiens
cactacactccagcctaggcaacagagggagactctgtctaaaaaaaaaaaaaaaaaaaaaaaattaaaaatttcatggggttgtgtgtgtgtgagattaraaaaggcttctagaggggaaataatgaaaaaaaaactgctctatagctgtatgtataggtatttatcaattcttttaaaagtgagtaatatctatttaaa

SEQ ID NO: 519834 - DNA, 201 bp, Homo sapiens
gaagatgtggagaatagggaaccctcatacggttagtggtaatgtaaattagtacaatcaccgtggagagcagtttggaggtccctcgaaaaactgaaaayggagctgtatgatccagcattcccactcctaagaatatacaataaatgaaatcagtatattgaagagatatccatatttattgcagcagtattcacaata

SEQ ID NO: 519835 - DNA, 201 bp, Homo sapiens
ataccaattaaattcttcagagaaatagaaaaaacaatcttgaaatttatatagaaccacaaaagacttggaataaacaaagctatcctatgcaaaaaaaagaaaattggaagaaccgcatgatgtgatttcaaattatacaacgtattggcatataaccagacacatagaacagtggaaccaagtagagaacccagaaat

SEQ ID NO: 519836 - DNA, 201 bp, Homo sapiens
aaaatacctgggagttaaccaaaaaagtgaaaagtctctacagtgaaagctataaaatgttggttcaagaaattgaaggcaaacacacacacaaaggaaagatattctgtgttcatggattggaagaatcaatattgttaaaatgtccatactaaccaaagcaatctacagattcagtgtattccctatcaaaataccaat

SEQ ID NO: 519837 - DNA, 201 bp, Homo sapiens
taaaatacctgggagttaaccaaaaaagtgaaaagtctctacagtgaaagctataaaatgttggttcaagaaattgaaggcaaacacacacacaaaggaaagatattctgtgttcatggattggaagaatcaatattgttaaaatgtccatactaaccaaagcaatctacagattcagtgtattccctatcaaaataccaa

SEQ ID NO: 519838 - DNA, 201 bp, Homo sapiens
ataaaatacctgggagttaaccaaaaaagtgaaaagtctctacagtgaaagctataaaatgttggttcaagaaattgaaggcaaacacacacacaaaggaaagatattctgtgttcatggattggaagaatcaatattgttaaaatgtccatactaaccaaagcaatctacagattcagtgtattccctatcaaaatacca

SEQ ID NO: 519839 - DNA, 201 bp, Homo sapiens
tttggtttttaaaaatactttctctaaataatattgataactcagatatcttctatttcagtagaactttaagaaacttagttttatttctttttcagatkttatttttaagaattaatgcaagttataaactccacttgaaaaagcagttatctcacttaaatgtgataaatgatggaggacctcaaaatgggtatgttt

SEQ ID NO: 519840 - DNA, 201 bp, Homo sapiens
tattctaccagtttcctttttgatatacagcattcttctgtgtaccaaaagtcggtaacatattgtgtctgctctcaagaagcttaccatctaacaaggttagaagactgtaaacagctaacagtggagaatagaatatatgttaaatagtggaactaggctgggaatagtggaactatgcttgagtccaggagttccagc

SEQ ID NO: 519841 - DNA, 201 bp, Homo sapiens
tttttaaatttaaaaaattttgaatgattgtactacctgaattgttgcaaaattgggcaattttaattattaggacataaattttttttttttttttttttgagatggagtcttgctctgttgcccaggctggagtgcagtggtgcagtcttggctcactgcaagctccgcctcccggattcacgccattcttctgcctca

SEQ ID NO: 519842 - DNA, 201 bp, Homo sapiens
ttcccagtagtgtgtctttttaacgtgtgatttgtccttctatggaggtgataactttatcatcttcggaaaactttttttttttttttttttttttttttgagacggagctttgctcttgttgcccaggctggagtgccatggcatgatctcagctcaccacaacctccggctcccaggttcaaacgattctcctgcctc

SEQ ID NO: 519843 - DNA, 201 bp, Homo sapiens
tggaattatgtctttgcttcctgtgttccccataatgcatattatatttttaacatttaataaagtcagtgttaccactgatgtggtctactagggagatrttgagatatgaagtaatctaaaataaataggagttattaaagcattattttcagataaatgattaaatgacattttgaaatatatgttaataactaattt

SEQ ID NO: 519844 - DNA, 201 bp, Homo sapiens
ctttgattttcagcagtttcactatgatgtgtctaagttctgtgtgtttttgatcatgcttgagtttcttctgcacttcttggacctgttgtgtgtttccytttttatagtttcaatttctctcttgagatttcggtttcattagatcctttaacatgttaatcagttattttatttttgttatgttatgttgtgttatgt

SEQ ID NO: 519845 - DNA, 201 bp, Homo sapiens
acccatagctgttatcacactgaatgaggaaaaactgaaagcccttcttctaagatctgaaacacagcaaggatgcccactttcactacagttattcaacrtagtattggaagtcctagccggagcagtcagacaggagaaagaaagaaagcatccaaattggaaaggaaggagtcaaattatccttgtttgtagattata

SEQ ID NO: 519846 - DNA, 201 bp, Homo sapiens
ctctttaaattttgcattctagacacctctcttgtcttgtgttagtcaagaacctgctgtactagtaggtaaaatgcatactttaacatagttaccaaggkcattatattctcagagatcctttgtgccattaagtaatttgatttttatatgccaaatccttttgatttttcttgttttgatttcctattgggccatttt

SEQ ID NO: 519847 - DNA, 201 bp, Homo sapiens
tttgtatgagtagcgcagatcacagttgaaaagtgtaagcttaagtactatgccagaattggatatgtggagggacagtaaatatatgtctcagggaatgktggagacattatgcaattcagaggacatgaacataattctcattattttttcctaccagtatgaagtgaaggctcctgttccttctgcctgtttcaggaa

SEQ ID NO: 519848 - DNA, 201 bp, Homo sapiens
gggtgatgctcagttagcacttagggagaaatttgtagcactgaatgcatatattattgaaagaagaatgatttcaaatcagtgacctcagcttccacctkaagaagctggaaaaatggctgggtgcagtggctcatgcctgtaatcccagcactttgggaggccaaggtgggtggatcacctgaggtcaggagttcaaga

SEQ ID NO: 519849 - DNA, 201 bp, Homo sapiens
gatgcccactttcactacagttattcaacgtagtattggaagtcctagccggagcagtcagacaggagaaagaaagaaagcatccaaattggaaaggaagragtcaaattatccttgtttgtagattatatgatcttatgtttggataaacctaaagaattcatcaaaaaatgattagaagtgatagattcagtaaagttg

SEQ ID NO: 519850 - DNA, 201 bp, Homo sapiens
gatataatagaaaagaggcctacctctaaaaaacagtggggtattaaaggatagaaaatacataatagaaagcagcatagttctgatgttgaaaaaaaaaratagagtaattgtacattaaggaaaggagttcatgaaagactttctttactattcactccaccctgcaatcgtagttctcaaattttgcatatcttttat

SEQ ID NO: 519851 - DNA, 201 bp, Homo sapiens
caggtgattcacatagtttatatgttgccccatctctagttacagatcaacatagatggactgtatatcattccaaagtaaatctcccagcagcattaaaygatcctagattagcaaaaagagaatctgacttcttcacaaaaacatggggattggactttgtggacactgaagtcataccttcattctacctcccacaga

SEQ ID NO: 519852 - DNA, 201 bp, Homo sapiens
attatttctatcattcaatagaagatgaacataagtaacagttatgagagtaaataattattgattcagtcattgatctgataaggagacaaagacagaaraggaaagcaccaggagcctgaaatgggtgggaaggagtagtgacataatttaaaatttttttattggtgcagagacagaggcatgaaacttagaatcaga

SEQ ID NO: 519853 - DNA, 201 bp, Homo sapiens
taacagaaactcattctttataagtcaattcatgtctttgaaatatccctgaagattaacctctaccctgtagccaaggacataaactacctgcttaaaartttttgtttctgaaattgctctaaaaatgtagcttttgactttttttgaggtgaaattcacataacataaaattaactattttaaagtgaacaattcagt

SEQ ID NO: 519854 - DNA, 201 bp, Homo sapiens
agattcagtgtattccctatcaaaataccaattaaattcttcagagaaatagaaaaaacaatcttgaaatttatatagaaccacaaaagacttggaataamcaaagctatcctatgcaaaaaaaagaaaattggaagaaccgcatgatgtgatttcaaattatacaacgtattggcatataaccagacacatagaacagtg

SEQ ID NO: 519855 - DNA, 201 bp, Homo sapiens
catacatcctcattttacgaagatgatgggattaagagattaaaataaagacaggcataggaaatcataagattgttgattggggaagtgataaatgtccrtgaaatcttcacgatttatgttcagagattgcagtaaagacaggcgtaagaaattataaaagtattaatttggagaactaacaaatgtccatgaaatttt

SEQ ID NO: 519856 - DNA, 201 bp, Homo sapiens
taggatataacaattgtaaatatatatgcacctaactattggagcactcatatataaagcaaatattagagccaaagaaacaggttggaaataaagaagamaattcaaataatatcaagcatcttctctgaccacaatggaataaaaccagaaatcaatattaggaattctggaaaccatacaaacacatggaaattacat

SEQ ID NO: 519857 - DNA, 201 bp, Homo sapiens
atttgtaagcaaatgacaaaaatgcacgaagctatatttgatctccttccagaagaacaaacacaggtgagaagtaattcctaaaactattcatgtatatrtaacatacaatatctgtacagaattggggtgtttttacatgcttttggcagttaagctgttcatgttccaatatgattatcatttttttacattgttata

SEQ ID NO: 519858 - DNA, 201 bp, Homo sapiens
gctgaagtggatggggtagggcctgaagaattataggtaaattgtagtttggtcctggagccattaggtgactccggaggtttgaagagagaagaattagygtatatggtcccgggctgtctgagtcgtggccgcgggagcttataagtactggctcttcgtgaaaagaaacaaggtcagcagggggtaacgttaagccaa

SEQ ID NO: 519859 - DNA, 201 bp, Homo sapiens
ctaatccacttgtttctttgttttggcataataagtgttgcattgaagtttcaagagtaggtatctgagacagagttggcatagaagtgataggaaaagcrtgtgtagataagggaaactgaggttgagggggtcggaccaggatgagagtgtgagaaaggggcattgagggagcagaaggagcagaggtatcctggtgat

SEQ ID NO: 519860 - DNA, 201 bp, Homo sapiens
taacatacaatatctgtacagaattggggtgtttttacatgcttttggcagttaagctgttcatgttccaatatgattatcatttttttacattgttataytgactggtagaacatggataaaaatttctaatttctaagtgctccttgcagtgacagaccagagctagagctttactatattataaacaattctaaaaag

SEQ ID NO: 519861 - DNA, 201 bp, Homo sapiens
ccatggtgatgaaggcttgttctctcgattttgacgcaggattctttgactggtccagcacactaaagacaagccgattaaacagggaaacataattccgraatttactacagtggagcccccaatagacttaatccaagttgtggggtttagtccagaaagattttctgccacctgatctaacgcctcagctccaggcac

SEQ ID NO: 519862 - DNA, 201 bp, Homo sapiens
cctaacaccaggctcaccaaaccttgaggtaaagggccagtgacccctgtggggacaattaaaggcaaagagttaggtagtaaatttagaggaatagtgcyacagagatcgaccgccccaacccctaacgtggaggtggacaagcattgtactgagaagaagaggctgggacccatctgggttgactgtaggtaaatttgt

SEQ ID NO: 519863 - DNA, 201 bp, Homo sapiens
aataaaatacctgggagttaaccaaaaaagtgaaaagtctctacagtgaaagctataaaatgttggttcaagaaattgaaggcaaacacacacacaaaggaaagatattctgtgttcatggattggaagaatcaatattgttaaaatgtccatactaaccaaagcaatctacagattcagtgtattccctatcaaaatacc

SEQ ID NO: 519864 - DNA, 201 bp, Homo sapiens
cttttcgctgctggagccccttccagggccacgtgtcttatctcctttgtttaaaacaatattaagtagtaaaagcaattgagcaattgagtcaccggccsgaatggaaacaggaagcttggcagacacgattagtttaatctcgtcaactgaatcagaattaatgagaccagtatgaatggtgattcctttagcagaggt

SEQ ID NO: 519865 - DNA, 201 bp, Homo sapiens
aagcctccagtttttctttagagagcagccactgctgaatccaaatgggtgtgtcagatttccattgtaaaggaataggatcaggaggcgtggcagtggcygccattaaaaaggataacctaaaccagccctgtcttcttttatagtaattgggaggggtttagtaatcccttcatgttttggacggagacggagtccagg

SEQ ID NO: 519866 - DNA, 201 bp, Homo sapiens
aaataaaatacctgggagttaaccaaaaaagtgaaaagtctctacagtgaaagctataaaatgttggttcaagaaattgaaggcaaacacacacacaaaggaaagatattctgtgttcatggattggaagaatcaatattgttaaaatgtccatactaaccaaagcaatctacagattcagtgtattccctatcaaaatac

SEQ ID NO: 519867 - DNA, 201 bp, Homo sapiens
taaagacaggcataggaaatcataagattgttgattggggaagtgataaatgtccgtgaaatcttcacgatttatgttcagagattgcagtaaagacaggygtaagaaattataaaagtattaatttggagaactaacaaatgtccatgaaattttcacaatttatgttcttctgccatggcttcagccagtccctcggtt

SEQ ID NO: 519868 - DNA, 201 bp, Homo sapiens
ctactaggcatttttactgatttatctatgttgatatatgtttagtagtctgtttttgactgctgtacagtattccatcaaacaaccttttttttttttttggagacagggtctcatggtcacacaggctggagggcagtggtgtgatcatggctcactgcagcctcaacctccgtggctcaagcaatcctcccactgcag

SEQ ID NO: 519869 - DNA, 201 bp, Homo sapiens
ttgtagtattctctgatggtagtttgtatttctgtggggttggtggtgatatcccctttatcattttttattgtgtctatttgatttttctttctcttcttattagtcttgctagatcaattttgttgatcttttcaaaaaaccagctcctggattcattgatttttttttttttgaagggttttttatgtctctgtgtcc

SEQ ID NO: 519870 - DNA, 201 bp, Homo sapiens
tcgattttgacgcaggattctttgactggtccagcacactaaagacaagccgattaaacagggaaacataattccgaaatttactacagtggagcccccartagacttaatccaagttgtggggtttagtccagaaagattttctgccacctgatctaacgcctcagctccaggcacaatggataaatgagcttgagagac

SEQ ID NO: 519871 - DNA, 201 bp, Homo sapiens
gtgttgtacagtgtttcttaccctttagataagtatgtgtattatcctttagataaagatacatgtttatctctcttaaatatgtgtaaacttttatacasaaacaaccatacacttaatgtgtgtggatataaatgacagaggcctttcaaagactcttaattttcccaaaatagcattttcatcacagaacttttgcca

SEQ ID NO: 519872 - DNA, 201 bp, Homo sapiens
aaataccttggaataagattggcaattgtggattatggaaatataaaattttatggtaactttataagaaactgcaaaatttttctaaaattttctaaaaygcatcattttgcctttttacttgccatgtagaagagttccaggtgctcttcaccatcactttattttttaatgttcgtcctcttgtaggtgtgtatggag

SEQ ID NO: 519873 - DNA, 201 bp, Homo sapiens
ccacatggtgatagaaaagacccaatttctcctgttattattttgaaaataccttaggttttaaatattttatatgaaatcattccaaagtgtttattttrtagactaattgcaagccatcaaaatttcgttccattaagcaggcttgcagtatccttgtagaagttcatatctgctgggaaaaccatccaaaccacgtac

SEQ ID NO: 519874 - DNA, 201 bp, Homo sapiens
tttgtagtattctctgatggtagtttgtatttctgtggggttggtggtgatatcccctttatcattttttattgtgtctatttgatttttctttctcttcttattagtcttgctagatcaattttgttgatcttttcaaaaaaccagctcctggattcattgatttttttttttttgaagggttttttatgtctctgtgtc

SEQ ID NO: 519875 - DNA, 201 bp, Homo sapiens
tacgggatttagaaagtagccttgaaggggcaaatctaagagttattgtctgtaaagaggaggtagagaaagagataggggtaaaaagtttattcgaaggrataataacagagaacttctcaaacctagagaaagatattaatatccaagtacaagaaggttataggacactaagcaaatttcacccagagaggactaact

SEQ ID NO: 519876 - DNA, 201 bp, Homo sapiens
gtttgtagtattctctgatggtagtttgtatttctgtggggttggtggtgatatcccctttatcattttttattgtgtctatttgatttttctttctcttcttattagtcttgctagatcaattttgttgatcttttcaaaaaaccagctcctggattcattgatttttttttttttgaagggttttttatgtctctgtgt

SEQ ID NO: 519877 - DNA, 201 bp, Homo sapiens
ccagatactcaggaggctgaggcaggagaatggcttgaaactgggaggcggaggttgcagtgaagccgcgattgcaccactgcactctagcctgctgacartgagactgtctcaaaaaaaaaaagtttataataatagttgttgcaattatttattgaatgtctactatgtaccaagtattatgctatgaactcacataag

SEQ ID NO: 519878 - DNA, 201 bp, Homo sapiens
tttccccattgcttgtatgtgtcaggtttgtcaaagatcagatggttgtagatgtgtggtattatttctgaggcctctgttctgttccattggtctatatwtctgttttggtaccggtatcatgttgttttgattattgtagccttgtagtatagtttgacgtcaggtagcatgatgcctccagctttgttcttcttgccc

SEQ ID NO: 519879 - DNA, 201 bp, Homo sapiens
aatcagttgaatccagaagcaggaagttgcagtgagccgagatcacgccactgcactccagcctgagtgacagagcgagactgtctcaaaaaaaaaaaaaagggtcaattatatggaattcagaagttgttgttgttgaaatggcctctctccactgccttggtcagagtgcagtgatgccatcacagctcactgcagcct

SEQ ID NO: 519880 - DNA, 201 bp, Homo sapiens
tatttggcttagctgtcctggtgtttttgaaacatgaacttgtctatagactgtgtaatagttcagaaagtaaaccatgtatctactgttgaaagtattatgtattttaaaatcttattttttggataccagtcttctggcattcttaagaatggctttggatttggaaaaaataatcagcaaatctttaaaagtgtagat

SEQ ID NO: 519881 - DNA, 201 bp, Homo sapiens
tatctcagaaagttaagagttgtgtatagatgagaattaggtacatttggatatgaacggaaaaaactacatctggggactttttttttttttttttttttaaacagttactttttgagccttgcgttgttggaagtaggctaggggacttgaggagagtgatgaaaatgttccacatattgtggggaatggagaagagaa

SEQ ID NO: 519882 - DNA, 201 bp, Homo sapiens
atatttggcttagctgtcctggtgtttttgaaacatgaacttgtctatagactgtgtaatagttcagaaagtaaaccatgtatctactgttgaaagtattatgtattttaaaatcttattttttggataccagtcttctggcattcttaagaatggctttggatttggaaaaaataatcagcaaatctttaaaagtgtaga

SEQ ID NO: 519883 - DNA, 201 bp, Homo sapiens
tatatttggcttagctgtcctggtgtttttgaaacatgaacttgtctatagactgtgtaatagttcagaaagtaaaccatgtatctactgttgaaagtattatgtattttaaaatcttattttttggataccagtcttctggcattcttaagaatggctttggatttggaaaaaataatcagcaaatctttaaaagtgtag

SEQ ID NO: 519884 - DNA, 201 bp, Homo sapiens
acaaagaagcaaaaaccaaaaaaaacccacagggcccatggagtatttattggtcatcagggtgtgagaaggatattttttacttgttgaaactagaacaraaaatacccttgtattgttttgcccgaaaaccagcttcattggttcactgtggtggggtaggatttatctgttttacagcactgactccaaaaatctcat

SEQ ID NO: 519885 - DNA, 201 bp, Homo sapiens
cacagccacgcacacatgcacacaagtcctgggcaaacctagcaagatcctgtctagacacacacacacacacacacacacacacacacacacacacacaccacacacacacacgtttccactttccccaatcccctggcaaccaccattctactttctgtctctatgagtttgactcatagagcactcatgctgtgcacc

SEQ ID NO: 519886 - DNA, 201 bp, Homo sapiens
cagtggagtgatagtcaaattgcagttcagtgcttagtaactggaaaagtgaggaagggtagacaagtatagcctactttttcaacagatttggcatgcasgaaaagtgagtgatgaaatagtagctaaagaagttagagagagagggtgatttacagggcaaggtgcatggaatcgaatctagagtttaagagaaaggct

SEQ ID NO: 519887 - DNA, 201 bp, Homo sapiens
acacagccacgcacacatgcacacaagtcctgggcaaacctagcaagatcctgtctagacacacacacacacacacacacacacacacacacacacacacmccacacacacacacgtttccactttccccaatcccctggcaaccaccattctactttctgtctctatgagtttgactcatagagcactcatgctgtgcac

SEQ ID NO: 519888 - DNA, 201 bp, Homo sapiens
acacacacacagccacgcacacatgcacacaagtcctgggcaaacctagcaagatcctgtctagacacacacacacacacacacacacacacacacacacacacacaccacacacacacacgtttccactttccccaatcccctggcaaccaccattctactttctgtctctatgagtttgactcatagagcactcatgct

SEQ ID NO: 519889 - DNA, 201 bp, Homo sapiens
ttcaagcaattctcctgcctcagcctcccaagtagctgggattacaggcacgtgccaccacgcctggctaatttttgtatttttagtagagacggttttaycatgttggccaggctggtcttaaactcctgacctcaggtgatctgcctgcctcggcctcccaaagtgctgggattataggtatgagccactgcacccggc

SEQ ID NO: 519890 - DNA, 201 bp, Homo sapiens
cctatttctccctctccccagccctgtactttgattttattttgagatggagtatcactctgtcacacaggctggagcgcagtggcgtgatctcagctcaytgcaacctccacctcccaggttcaagcaattctcctgcctcagcctcccaagtagctgggattacaggcacgtgccaccacgcctggctaatttttgtat

SEQ ID NO: 519891 - DNA, 201 bp, Homo sapiens
tttttgaaaacattgcattattgcacaggtactgtcaactgaaaaagttttacctactagttcccttgattgtggagcgaatttgtagtttttagtgaatrtaaatataacatttttctcttcctttttaggcatttgggatcacagctttgtgaattagaaaaactgatagataaaatgatgattgcagaattttctact

SEQ ID NO: 519892 - DNA, 201 bp, Homo sapiens
ttcttagctactataccgtattgtttacatacatgaattgagtaagcgctagttagcttctactttgtgtcctatattgagacagaattgagacagagatmacagctgtatttctgctttaaagaggctaagtctaatgaacaaaaccaaaaaatacataagcaatcacaagtaatgtagttacatgatagcgaaaatcca

SEQ ID NO: 519893 - DNA, 201 bp, Homo sapiens
tcacacctgtaatcccggcactttgggaggccgagacaggcagatcaccagaggttaggagttcgagaccaccctggccaaatggtgaaaccccctctctaaaaaaaaaatacaaaaattagctgggcatggtggcacgcgcctgtaatgcaattactcaggaggctcaagtgggagaatcgcttgaacctgggaggctga

SEQ ID NO: 519894 - DNA, 201 bp, Homo sapiens
aattacctaattcaagaaattacaggcttatccggtatatctatccatgtttatttcctctgatggtttcaggttgatttcaaaatacttaactaaaaacrtatttcaatttactgtttttaaaagacagttaccagtttaaaagacagttctgtaagtcaactatcaatgctcaggtaaatgtatatcttaattaagttt

SEQ ID NO: 519895 - DNA, 201 bp, Homo sapiens
ttgtatgacttgagagctccttcctggctttaggactatgaggtcttgaggaccctccttttgaatgacactgtccctccagagagtaaaccaagagctgraaatacatgatcattggtactcagatggggatgaaagtgaaagtgttatagaccagctgtcctttttaggaggtctcagtcctttgagcatctgataaaa

SEQ ID NO: 519896 - DNA, 201 bp, Homo sapiens
ggaaaacatctaattacaagcattcacgttttaatttaatataaagattggggttcataccttcaagtgatatttactggacatctactgaataccattamccataataagtgcttttatttggatcaacaaaactatagccctgagagtaaagtacctttctatcttacagtgcttagtggtaaaatcttctgactctaa

SEQ ID NO: 519897 - DNA, 201 bp, Homo sapiens
gacgatgaggccaccctgtgctgtgtgcagtgcgacaacccttaccaagagccttgagactagcagattgagatcagagagatgagatctttttgaagggrggagaaaacctactgagaccctaatgatccagctcaatgagagccaagaagaggatttgagtttcctcaaagcattcattgaagtagtaatgaatgcttt

SEQ ID NO: 519898 - DNA, 201 bp, Homo sapiens
aggtctcagtcctttgagcatctgataaaagctttagactccttccacagaagaatacactcatgttgcatatatttcaggggatacatggactctaggtyaagaaaccctgctctagatacagaatggtatacaaggccaggagttcaagacctgcctggccaacatggcgaatccctgccttggggatcaggagacaag

SEQ ID NO: 519899 - DNA, 201 bp, Homo sapiens
ctgacgatgaggccaccctgtgctgtgtgcagtgcgacaacccttaccaagagccttgagactagcagattgagatcagagagatgagatctttttgaagrggggagaaaacctactgagaccctaatgatccagctcaatgagagccaagaagaggatttgagtttcctcaaagcattcattgaagtagtaatgaatgct

SEQ ID NO: 519900 - DNA, 201 bp, Homo sapiens
ccagacactagtcttacgtattgggaatacagcagtgaataaaacaagtccttctgcttacattctagtgtttgagagtacagtgttacggaaacttttaaaaaaaaaaaactcaaaaaagagattagtcaacagtaaaacgcttagaggtgtaagatgaagttaggccgagtgaggtggctcatgcctgtaatccccgca

SEQ ID NO: 519901 - DNA, 201 bp, Homo sapiens
tagttttgttttgagcttcctgaacaaagtgtgtgtgagagaactgataggagaaagtagatctccacttttcaaaggcgtattagcgtctgccttatgcrtggcactaaaggaataaatgaagtacgcataagatcacctttgctcttaaggaactgaaaatcttattaagtttttagaagtcaaaagtctgaaagttgt

SEQ ID NO: 519902 - DNA, 201 bp, Homo sapiens
tattctagttcctaagaagatataagaggaagaaagagagttgctttgtttagttttgttttgagcttcctgaacaaagtgtgtgtgagagaactgatagragaaagtagatctccacttttcaaaggcgtattagcgtctgccttatgcgtggcactaaaggaataaatgaagtacgcataagatcacctttgctcttaa

SEQ ID NO: 519903 - DNA, 201 bp, Homo sapiens
tagagatgggggtctcactatgttgtccaggctggtctcaaactcctgggctcaagtgatcctcccactttgcctcccaaagtgctgggattatagggacsagccactgcacccagcctctgttgctttttcaaagatctgcccattttcagaaacatcaaattatacctcttattcttggctttttattattacgtatca

SEQ ID NO: 519904 - DNA, 201 bp, Homo sapiens
ctatccctattctagttcctaagaagatataagaggaagaaagagagttgctttgtttagttttgttttgagcttcctgaacaaagtgtgtgtgagagaaytgataggagaaagtagatctccacttttcaaaggcgtattagcgtctgccttatgcgtggcactaaaggaataaatgaagtacgcataagatcacctttg

SEQ ID NO: 519905 - DNA, 201 bp, Homo sapiens
atgatttcatatttatttaatgtctttctactgcctgaatataagcttgaaggaagggatgatgcttatctttttcactattgtatttctagtgcctgtcrcagaaagaacatagtctatgtgttgaataggttaatagaagtttagggtacaggagcttaggtctaaattatagattgagaaacagctgtttttctgttc

SEQ ID NO: 519906 - DNA, 201 bp, Homo sapiens
ataccttgtggttttgtactataatgccaacagggtaagtatagcaaagttctcattgtgtagtgatctcatttgagaattagtgtagaactggccgggcrcggtggctcatgcctgtaatcccagcattttgggaggccgaggtgggcggatcacgaggtcaggagatcgagaccatcctggctaacacggtgaaacccc

SEQ ID NO: 519907 - DNA, 201 bp, Homo sapiens
actcaggaggctgaggcaggagagccgcttgaacccgggaggtggaggttgcagtgagccaagatcatgccactgtactccagcctgggcgacagagtgcractccgtctcaaaaagaaaaaaaaaagatttataatgatttcatatttatttaatgtctttctactgcctgaatataagcttgaaggaagggatgatgct

SEQ ID NO: 519908 - DNA, 201 bp, Homo sapiens
gtcagcccacagtcttaaacctcattccacagttgcactgggtggttggaacacagatggaggcaagggggccatcttgtcacccagagcctgaactgagwgggacctctacccattgtctccactaacagtcacatggccacctgctgcctgcaatttagcgttgcgttgctcctcaaacttctctacctctcccagagg

SEQ ID NO: 519909 - DNA, 201 bp, Homo sapiens
tctgtcaccctgggcaggttgtgagttcctccagggctcgtaccatatattatttttgtttttgtgttgatagcacttgtgcgatacatggtaagcacccsatgtatactaaatgaataatatagaaaatagtagaataggccagatgtggtggctcacacctgtaatcccggcactttgggaggccgagacaggcagatc

SEQ ID NO: 519910 - DNA, 201 bp, Homo sapiens
cctaaagaacattctaaaacccctcgtcaggcccacacaacctgacaaagtgagcgcattcattgacagtggcaccctccaatcacccccagtaccctatwccttttcaattttacaggaagcacaagcttgaacagggcccagactatagtcctatcctagatcaagtctaggcaggtacctcctcttcccatggctcca

SEQ ID NO: 519911 - DNA, 201 bp, Homo sapiens
caaagttctcattgtgtagtgatctcatttgagaattagtgtagaactggccgggcgcggtggctcatgcctgtaatcccagcattttgggaggccgaggygggcggatcacgaggtcaggagatcgagaccatcctggctaacacggtgaaaccccgtctgtactaaaaatacaaaaaattagccgggcgtggtggcggg

SEQ ID NO: 519912 - DNA, 201 bp, Homo sapiens
gggatacatggactctaggttaagaaaccctgctctagatacagaatggtatacaaggccaggagttcaagacctgcctggccaacatggcgaatccctgmcttggggatcaggagacaagattctacttcaggccttgttactagccatgtgtgtgactagttgcctagcttttttggttttctcttcatgtatgagata

SEQ ID NO: 519913 - DNA, 201 bp, Homo sapiens
gccagacactagtcttacgtattgggaatacagcagtgaataaaacaagtccttctgcttacattctagtgtttgagagtacagtgttacggaaacttttaaaaaaaaaaaactcaaaaaagagattagtcaacagtaaaacgcttagaggtgtaagatgaagttaggccgagtgaggtggctcatgcctgtaatccccgc

SEQ ID NO: 519914 - DNA, 201 bp, Homo sapiens
cgtattagcgtctgccttatgcgtggcactaaaggaataaatgaagtacgcataagatcacctttgctcttaaggaactgaaaatcttattaagtttttaraagtcaaaagtctgaaagttgttaagacttgccagagcctaaagaacattctaaaacccctcgtcaggcccacacaacctgacaaagtgagcgcattcat

SEQ ID NO: 519915 - DNA, 201 bp, Homo sapiens
ggcttcccaaagtgctgggattacaagcatgagccaccgtgccaagccgaaacatttcttaagatttataattatttcagggctgggcgcagtggctcacrcctgtaatgccagcactttggaaggctgaagtgggcagatcacaaggtcaggagtttgagaacagcctgaccaacatggtgaaacctcgtctctactaaa

SEQ ID NO: 519916 - DNA, 201 bp, Homo sapiens
cgaactcatatgaaagggctagtgacttaagagtccatctgaaaggatttctaaagtttttattttaaaaaaattattattttaccacagtaatgactacrtataaagtttttatttctagtcggaattccgtcttgtatgacttgagagctccttcctggctttaggactatgaggtcttgaggaccctccttttgaatg

SEQ ID NO: 519917 - DNA, 201 bp, Homo sapiens
tcattgaagtagtaatgaatgctttgaggaaactggttgagaagggaaagaactaacatttattgcatacctgttatttgtaaagctagcttgttacactrtgttttttgtatgcagcagctctataattttctcaacaatcatcactgtctctttaaataaccccagaatttctgaataaactaagtaaaagagtataaa

SEQ ID NO: 519918 - DNA, 201 bp, Homo sapiens
gttctcattgtgtagtgatctcatttgagaattagtgtagaactggccgggcgcggtggctcatgcctgtaatcccagcattttgggaggccgaggtgggyggatcacgaggtcaggagatcgagaccatcctggctaacacggtgaaaccccgtctgtactaaaaatacaaaaaattagccgggcgtggtggcgggcgcc

SEQ ID NO: 519919 - DNA, 201 bp, Homo sapiens
catttggctgtagattggtaatttaattttggtgcttaccacatttccaggcatttcagaagatggacacaaagaagaaggaggaacagttgaagcttctyaaggagaaatatggcatcaacacagatccaccaaaataaatgttttctacattttcatttggactaaatcccacgaatgacaactaccacctttttttcc

SEQ ID NO: 519920 - DNA, 201 bp, Homo sapiens
ctgaataaactaagtaaaagagtataaaagtaacagaaaaaaatgatattttcaactacagctctttcaattgaagatgtaaaagtatagaggaaaacatstaattacaagcattcacgttttaatttaatataaagattggggttcataccttcaagtgatatttactggacatctactgaataccattaaccataataa

SEQ ID NO: 519921 - DNA, 201 bp, Homo sapiens; identical to SEQ ID NO: 149871

SEQ ID NO: 519922 - DNA, 201 bp, Homo sapiens
aggcaggcccaaggctgggctggacacaggagaccaggtccacagcagcttgcgtgaacagagttcttattgatagtcccatcacctccaaagcagtgggcccaccctccctcctaccagcccctccccagcacccagcccctcagtgcagcgccacctcgcaggggtggaggtgggcagcacgggcagcctcgtaggcac

SEQ ID NO: 519923 - DNA, 201 bp, Homo sapiens
tctgaggtctgaagagcagcagcccagctagggtgataggaagtgggggcagaggaagggtggtctggggtccctggcccagggccagggggcagaatagygagagcccatccctttcagggtcaggcgccaagctccaggagagccaagcaagagctgggcctggtgccctgcagggaggcgagcggcgtctccatggtg

SEQ ID NO: 519924 - DNA, 201 bp, Homo sapiens
cccagagagctacacagcagatgtgcacgccctcggcgacacctgtactcaggaaacacacttgcaggcgcgtacctccaaggcaggaatgcacacagacrtgggcctgggggccatgcctagcgatcagctgtcctgggccgccctcctgcactcccatctgacatatgcaccccagcatctgggacccctctagtttcc

SEQ ID NO: 519925 - DNA, 201 bp, Homo sapiens
aacccttgtagctcactttttccttctgcagtggggccgacaaggcacattcccgccaagcccaggcagggtaagacttcgggactcccaccctgtcccamccagaccgccactcaccgtctacgccgagaccgtgggcctgcgggggcagctcggggcgcccgtcctcgcgcagctcaaagcggaaggcggccacgcggc

SEQ ID NO: 519926 - DNA, 201 bp, Homo sapiens
gaggcaggcccaaggctgggctggacacaggagaccaggtccacagcagcttgcgtgaacagagttcttattgatagtcccatcacctccaaagcagtggscccaccctccctcctaccagcccctccccagcacccagcccctcagtgcagcgccacctcgcaggggtggaggtgggcagcacgggcagcctcgtaggca

SEQ ID NO: 519927 - DNA, 201 bp, Homo sapiens
aggcccaaggctgggctggacacaggagaccaggtccacagcagcttgcgtgaacagagttcttattgatagtcccatcacctccaaagcagtgggcccamcctccctcctaccagcccctccccagcacccagcccctcagtgcagcgccacctcgcaggggtggaggtgggcagcacgggcagcctcgtaggcacggcg

SEQ ID NO: 519928 - DNA, 201 bp, Homo sapiens
caggcccaaggctgggctggacacaggagaccaggtccacagcagcttgcgtgaacagagttcttattgatagtcccatcacctccaaagcagtgggcccmccctccctcctaccagcccctccccagcacccagcccctcagtgcagcgccacctcgcaggggtggaggtgggcagcacgggcagcctcgtaggcacggc

SEQ ID NO: 519929 - DNA, 201 bp, Homo sapiens
cctagcgatcagctgtcctgggccgccctcctgcactcccatctgacatatgcaccccagcatctgggacccctctagtttcccggatctgaggtctgaaragcagcagcccagctagggtgataggaagtgggggcagaggaagggtggtctggggtccctggcccagggccagggggcagaatagcgagagcccatccc

SEQ ID NO: 519930 - DNA, 201 bp, Homo sapiens
aacaggaatgagcactctttaatgtcatcatgatctcctgtatgagcgggcccgcccccagaatgtcgtgctgctgcctgtgggtgcgggggccgccgtgygcccccgccagccccgtgtgccccctgtcacctcaggctggatctgctatgccgagaagactcacggcagcttcatcctcccccacatcagcaccgcccg

SEQ ID NO: 519931 - DNA, 201 bp, Homo sapiens
ggctttggcacggcaagcaggtgcgacacacgtgccctggcagcaccatggtggtccacacgccggcgtgtgctcgtgtgggcgtcccgcatggggttaaycaggcacccaccttcaccttccaggggtgcacttcgtcttcgacaccgccttctcaaggcacttcagcctcctggagagccagcgagagtttgtgcggcg

SEQ ID NO: 519932 - DNA, 201 bp, Homo sapiens
gtggacatttggggccttctggggccaaagtgcagactgctggggatgcaggtggcttggatgttctctgactttgttgctgggatctccgctaaagagtrtctgcgctgtggcttctttgcaggagaagttttcaggttgctggaggaagagggcgtctccctccccgacctggaaccagcccctctggacagcctgtac

SEQ ID NO: 519933 - DNA, 201 bp, Homo sapiens; identical to SEQ ID NO: 149865

SEQ ID NO: 519934 - DNA, 201 bp, Homo sapiens; identical to SEQ ID NO: 149867

SEQ ID NO: 519935 - DNA, 201 bp, Homo sapiens; identical to SEQ ID NO: 149868

SEQ ID NO: 519936 - DNA, 201 bp, Homo sapiens
ccagggaacctccgcccactcacaggggctgatttggggtctcttcctgctctaggagtgcatcaagcctgtcaaagtggaaaaaagggcgggaagtggcrtggccaagattcgcattgaagatgacgggagctacttccaaattaaccaagtaaggcacaggaggctgctccaccatctctcctgcccggctgatccgaa

SEQ ID NO: 519937 - DNA, 201 bp, Homo sapiens
cttctgcagcagagggcttcgttctgatccagaggtgctcactgctcacccagaggcagccaggcctgaggctgagggagcaggaggccctgggcagtccrggcctggagcccacccctccggccaccaggtccacgaggatgcccagcacgacccccacctgaggcccagcgggatagaagcctgaagacactcagccag

SEQ ID NO: 519938 - DNA, 201 bp, Homo sapiens
aggaggtccccacggtggggccggggctttggcacggcaagcaggtgcgacacacgtgccctggcagcaccatggtggtccacacgccggcgtgtgctcgygtgggcgtcccgcatggggttaaccaggcacccaccttcaccttccaggggtgcacttcgtcttcgacaccgccttctcaaggcacttcagcctcctgga

SEQ ID NO: 519939 - DNA, 201 bp, Homo sapiens
ggtggctgcctctggggtgggaaaccaaggcctgggttcacaggggatgccgaggcaacgtggctttaggaggtccccacagtggggctggggctttggcrcaacgtggctttaggaggtccccacggtggggccggggctttggcacggcaagcaggtgcgacacacgtgccctggcagcaccatggtggtccacacgcc

SEQ ID NO: 519940 - DNA, 201 bp, Homo sapiens
ggagctggctggcgtgttccaggagtcctgctgtgtgtgaggggtggccactatggtaggtctgcacagtcagggtccgaggggccagtccagcaggctgmgtccagctgtgccctagggagggtcaccgggagcagcgcacgtggcaattccctggaccagccacgctgaagagctgggagggtggaggactgagctgct

SEQ ID NO: 519941 - DNA, 201 bp, Homo sapiens
ttggagctggctggcgtgttccaggagtcctgctgtgtgtgaggggtggccactatggtaggtctgcacagtcagggtccgaggggccagtccagcaggcygcgtccagctgtgccctagggagggtcaccgggagcagcgcacgtggcaattccctggaccagccacgctgaagagctgggagggtggaggactgagctg

SEQ ID NO: 519942 - DNA, 201 bp, Homo sapiens
gcacgatcaggcaggtttactgagcagttctaatggctgggcttggagctggctggcgtgttccaggagtcctgctgtgtgtgaggggtggccactatggyaggtctgcacagtcagggtccgaggggccagtccagcaggctgcgtccagctgtgccctagggagggtcaccgggagcagcgcacgtggcaattccctgg

SEQ ID NO: 519943 - DNA, 201 bp, Homo sapiens
gagggggcccctgtgcaccgggttcttctcccttgtaggacggcgggacccggaggctggagaaggccaaggtctcgctaaacgactgcctggcgtgcagyggctgcatcacctccgcagagaccgtgcttatcacccagcagagccacgaggagctgaagaaggttctagatgctaacaaggtaagcagtggtcggcctg

SEQ ID NO: 519944 - DNA, 201 bp, Homo sapiens
gcctttcacaggtaaccaccatgtccagtcccttcattcccagtgaggcaggcctgtgcgccttgtaaccagcagactgcctgtcatccagctgtgtcccrggtccctcacactggaaacctggtgacactggcaggtgccccatggctcctgtctgacccatatccagttggtgcctgagcagtgctctggcactgggag

SEQ ID NO: 519945 - DNA, 201 bp, Homo sapiens
ctaacaaggtaagcagtggtcggcctggtgactctgctttaacctgaaatccatcccagcagccgacaacgcgttttgccaagggcagctcgtgtggtgcygacgtccgtcgtgcgggtggcgcctgcctttttgaggcttggaatcttggtgatttgtcagtgggctccagtggtgaacgtgtcaggccccaaacttcag

SEQ ID NO: 519946 - DNA, 201 bp, Homo sapiens
acttcgtcttcgacaccgccttctcaaggcacttcagcctcctggagagccagcgagagtttgtgcggcgattccgaggacaggccgactgcagacaggcrctgcccctgctggcctctgcctgcccaggtgtgctcatggtgcgggtggtgggagagtcaagttcaagtgcagttgaaacgtgaggtgatatggacacaa

SEQ ID NO: 519947 - DNA, 201 bp, Homo sapiens
gggaggaagtggggcacagagggggcccggtcacctccctgctccctggtggtcaggaagcttggctggggcgcaggctgtgacccctgtcccgtctgctytcccataggctgcctgaacggcgggggccagctccaggccccagacaggcccagcagagagctcctccagcacgtggagagactgtacggcatggtccgg

SEQ ID NO: 519948 - DNA, 201 bp, Homo sapiens; identical to SEQ ID NO: 149877

SEQ ID NO: 519949 - DNA, 201 bp, Homo sapiens; identical to SEQ ID NO: 149878

SEQ ID NO: 519950 - DNA, 201 bp, Homo sapiens
gtctgattcctgagccctgggcacaggtggcgactgcccaggatcctgcctgtgggggccctggctggagtgtgggggctcgcatgcgtgcacgtaccttsgtctctccccttggagccaggtgggcccatttgcagctggcctgtcttggggacctgcagccaggtggcgctcagtaatacctccttgttggctctgaaa

SEQ ID NO: 519951 - DNA, 201 bp, Homo sapiens
agttgggggagctcgagctgggtgcgttttgcatgtaagaaaagttgctgaggcatgtcccggaggcccccgactggaacaccttgttcctgcatctgttkggcgagtctgacggttgtttctgccccgcccaccggaggccaggctcccaggcttcctccctctgctctcctcttcctgtgccttcgtcctttcctcctt

SEQ ID NO: 519952 - DNA, 201 bp, Homo sapiens
agtggaaaaaagggcgggaagtggcgtggccaagattcgcattgaagatgacgggagctacttccaaattaaccaagtaaggcacaggaggctgctccacyatctctcctgcccggctgatccgaaacacttttctctgcttcctcccgtcacagagcggtgaccccgagacactccaggtctcaccagtcttttcccact

SEQ ID NO: 519953 - DNA, 201 bp, Homo sapiens
tgagtgcatggctcctggcagagccttcaggctgtgcggctgggcagccatccttgaggcctggcctcccagggaacctccgcccactcacaggggctgayttggggtctcttcctgctctaggagtgcatcaagcctgtcaaagtggaaaaaagggcgggaagtggcgtggccaagattcgcattgaagatgacgggagc

SEQ ID NO: 519954 - DNA, 201 bp, Homo sapiens; identical to SEQ ID NO: 149884

SEQ ID NO: 519955 - DNA, 201 bp, Homo sapiens
cccgcttcttaccaacaaggaaactgaggccagggagggcggcgccccccaacccgctcctgtgccccatggtgtccgggcgggctgcgtgggagggtccmgtggtcgcgggctcgcgccggcctgcccaacccagaggaggcagcagaggcggctcccacacatccctaaccctaacccgacccctgggtcgcagctgga

SEQ ID NO: 519956 - DNA, 201 bp, Homo sapiens
caaaaaaaaaaacaagaagtggctgggcccctgtgatggctggtgacacaggagctgttcctctgtgtctgtgacttgtctcccacctggaaatgcaaacsctcatgtgtgagggacagaggccctgctcgggaggttggcaggcagcagccccagctgtgctgaggcccctccctccttgccaggtgcagcggtgcctct

SEQ ID NO: 519957 - DNA, 201 bp, Homo sapiens
tgctctgggcttgcctccccgcagcccatcttggcgtccacagaagtggctggatagccaggcgcagtagctcacgcctgtcaccccagcactttgggagrccaaggtgggcagatcacctgaggtcaggagttcgagaccagctcggccaacatggtgaaacctcatctctactaaaaatacaaaatttagccagacatg

SEQ ID NO: 519958 - DNA, 201 bp, Homo sapiens
gaaatgttggcacaaatggccttttctggagaagaggctgccctcccgtgggagccacgcgcagtcacctcaggtccctaggcggtgtcgcctgcacgccragctccgcgtggtggtggggagaacaggaatgagcactctttaatgtcatcatgatctcctgtatgagcgggcccgcccccagaatgtcgtgctgctgcc

SEQ ID NO: 519959 - DNA, 201 bp, Homo sapiens
ctgtgatggctggtgacacaggagctgttcctctgtgtctgtgacttgtctcccacctggaaatgcaaacgctcatgtgtgagggacagaggccctgctcrggaggttggcaggcagcagccccagctgtgctgaggcccctccctccttgccaggtgcagcggtgcctctgcagaggagcccaccagccatcggggaggg

SEQ ID NO: 519960 - DNA, 201 bp, Homo sapiens
ctggcctgggcatccggtggtaggggctgcaggaccaggactcccaggaggccgtgtccatgtgtgacagcagaaccacatgccccaagaccccagggctycccccaaaattctgagtgagctgcagggtgtgctgggacccgagtaggagctaggactagccaggacccgcagccgcctcgtcacctccagttgggtgcc

SEQ ID NO: 519961 - DNA, 201 bp, Homo sapiens
accccttctgggagcagagctgtgggccaccatccaccaggctgggagtgggaggaagtggggcacagagggggcccggtcacctccctgctccctggtgrtcaggaagcttggctggggcgcaggctgtgacccctgtcccgtctgctctcccataggctgcctgaacggcgggggccagctccaggccccagacaggcc

SEQ ID NO: 519962 - DNA, 201 bp, Homo sapiens
ctgcatctgtttggcgagtctgacggttgtttctgccccgcccaccggaggccaggctcccaggcttcctccctctgctctcctcttcctgtgccttcgtsctttcctcctttgtcctcagctttcccgcctcctcctttcagagcccaccttcggcattttcctgccctacagccctgtgagtgtgcaccggggccagca

SEQ ID NO: 519963 - DNA, 201 bp, Homo sapiens
tgaggcaggagagtcacttgatcccggggggcagaggtcgtagtgagccgagatcgtaccattgcactccagcctgggcggcagagtgagactccgtctcaaaaaaaaaagaaaagcagactgcctaagaggatggacagatggacactgggtgagcagagtggcctggccgctggcacacctccctgggcaggaccaggc

SEQ ID NO: 519964 - DNA, 201 bp, Homo sapiens; identical to SEQ ID NO: 149897

SEQ ID NO: 519965 - DNA, 201 bp, Homo sapiens; identical to SEQ ID NO: 149898

SEQ ID NO: 519966 - DNA, 201 bp, Homo sapiens
agctcgtagcccacggccgggcggaggccgcacctgtgggccgccagcacctgtgggcaccgagagtgtgggaaccaggatgtgggcaggggcgcccgccrgcaggtgggcggtgtggggcggcgaagacccagacgcaggcacttacgatcctgccgtcgccagagcccagatccaccgtttttccggggcgtcctcgca

SEQ ID NO: 519967 - DNA, 201 bp, Homo sapiens
cagcggggctggcaaccccgcacctaccacgctaggggccaggaacacagacacgttgcggcagtccctcaggctcacctgccggaagagaagtcgccccrgccggggagaggcctggtgggcaccgggtcatcgcagcttccgagtcccggcccccagccctcgcaggtgtcagccgcaccttgggctgtcagcgggtgg

SEQ ID NO: 519968 - DNA, 201 bp, Homo sapiens; identical to SEQ ID NO: 149879

SEQ ID NO: 519969 - DNA, 201 bp, Homo sapiens; identical to SEQ ID NO: 149895

SEQ ID NO: 519970 - DNA, 201 bp, Homo sapiens
tttcagcctgactgctttagtcactggacgagcatcagctactgcggtgtcagatcacttctcgagtagaggtctgcctagtgagtgagcaggagaacatmatcttaatagcctttggctcacccagagtcagggagagatgaaaataataggtcagaatgcaagtgacttaatcacagtcttcctagaattatctgtttg

SEQ ID NO: 519971 - DNA, 201 bp, Homo sapiens
ctggttttaaattgaaagcaaaattggaatgagacatcttgtttgtgaaacatatcataaactaatgctacaagtatataaaaattctgaataaaataagraagtataattaattagataactgactttggtaaaaagaaaacaagaaaagaagaaagaaagcgagcgagggaaattctccaaccaggtggcaatgatgtg

SEQ ID NO: 519972 - DNA, 201 bp, Homo sapiens
acctcatccgcagctccaggacgccgcactccacgcgctgccgcaaggaggacgcgcagcctggtcaccatggaaacggtgccgcctccgtcacggctcawgcgagaggtcaaaggtcagtcctgcaagttccgcttccggttccgagatcctgtttgttttctgaaagctttgtggtttcggtgagctctcagagccgat

SEQ ID NO: 519973 - DNA, 201 bp, Homo sapiens
ccaggtggcaatgatgtgagccgatctgacacaggttttggggatagaatggacctcactccaaacagagaattaaaaattaaaccatgcatctacctggractttggatgggcccctcggtaagtgagggggctagaaaaattaaactcaccagcccaagaaagtgacaagctttctctacacaaagctctaggtagaaa

SEQ ID NO: 519974 - DNA, 201 bp, Homo sapiens
ctgacacaggttttggggatagaatggacctcactccaaacagagaattaaaaattaaaccatgcatctacctgggactttggatgggcccctcggtaagygagggggctagaaaaattaaactcaccagcccaagaaagtgacaagctttctctacacaaagctctaggtagaaaataaagcaaaaatactgctgagaag

SEQ ID NO: 519975 - DNA, 201 bp, Homo sapiens
gcaaaaatcaagtggcattttcagaaatcatttgtattaaccttctgggtttgatctgagactatgaaacatctttgtttctttctgccatcaggcaaaamggctttctacaaagaagggcttagaagtttggtggctatcttgttggtgattcttaaactgaagtttcatggccgttcatactttagatcataaatcagg

SEQ ID NO: 519976 - DNA, 201 bp, Homo sapiens
ctaaaagggcggcagctcgccccgtcgcatgctgggaatggtagtttcctcgctctcccttcttcccccgccctcgagcatccagattggagctccgttcytactcccttgcagggcgccacggctcgacagagccactcgtcctcgcctggtcatcccagctccggaggctgacctggggatgcgccctggacgccctgc

SEQ ID NO: 519977 - DNA, 201 bp, Homo sapiens
ggttccgagatcctgtttgttttctgaaagctttgtggtttcggtgagctctcagagccgatttctagcgtccgtgccggggacaggtgtccagaggtcgrctgctgcagacatggcggcctccaccgcggccgggaagcagcggattcccaaagtggccaaggtaggcgatcgcgaggggccttgtaggaggtggcctag

SEQ ID NO: 519978 - DNA, 201 bp, Homo sapiens
ctgtatttattttatttacatgatgatagtttaatttgatatcctactttttcttcagacataaatgctgttatgtcccatagtctattaagtcataatcrtaatgttctatagctatgtaatcaaaactaaaattttgattgcaatcttttattcataagcttcttgttgaactaggcaacttttaagaaaaaaaaatct

SEQ ID NO: 519979 - DNA, 201 bp, Homo sapiens
ttttctcatttaaagctggcagtaatccagtgaggctggcattatttttccctgtttacaaatgaaacagctgagacttagacgtctaagttcagtgactwatccaagatcacatggttggtaacctgggttgagatttttctttgcttccaactcgagtttatacccaccactaaaatcttaactaagcactggaggaaa

SEQ ID NO: 519980 - DNA, 201 bp, Homo sapiens
ttctgcccatatacaagcatgcctacaaaacaaagtctgttctgagcagaggctaccgtgccatacagtacagtacagtatctggatcatggttctcaggrgaggttaccatgccatgcagtacaatatagtatctggatcatggtatgtgggtttctaacttttgtgaaatgaatgtggtctttgcttgtaaataagcag

SEQ ID NO: 519981 - DNA, 201 bp, Homo sapiens
tcatgattatataacttaattttcattttcctcattcacaaaatgggccaatagtttgacagctcattttgaagattacattataaaaggaatatacctgrtgggtgcatagtaagtgctcagtaaattgtttgttctaagccacttttaaaaatggtttcattccttgtagaattgaatgcgagtggattaataatttac

SEQ ID NO: 519982 - DNA, 201 bp, Homo sapiens
ttcacatattacagaggaagacactacacataaaatacatggttggcctatgatatagttatatggcctttctttaggaattatgttcttttccctctccaaaaaaaaaaaaaacctcaagttttttttttttttttttggctttttagaagggcaggatttaagcaaagcattgtgaagaggagaaaagatctaggacta

SEQ ID NO: 519983 - DNA, 201 bp, Homo sapiens
ttctcttaaatatgaacaaaatgaataaccattttagtacaagacttaaaatagaccaagggtgctgtcatttttagtcatttgtcttttgacttgacccyttttgccttcttccagacttttgaagataatataagaaaaaacaggactgtgattagtaactggataaaatacgcacaatgggaagaaagcctaaaggag

SEQ ID NO: 519984 - DNA, 201 bp, Homo sapiens
aaaaacaggactgtgattagtaactggataaaatacgcacaatgggaagaaagcctaaaggagattcaaaggtaaaattactgagagtgtagttttgtatrtaatgattcatagattaacagataccaaaaagaaaagaagaaaaagttaaagcacaggtaaaagattgtgcctcgggtagaaattttcaactttggttcc

SEQ ID NO: 519985 - DNA, 201 bp, Homo sapiens
tattgactgtcgtgagagtgatggctatagatgaaggagtccttgctgtgggacacctggccagtaatctatcctctgtattcctgtttcttttctatttrtgcagtctcagggatggtgtttttaaaatgaaagaacatgtaacatttagaagaaaaggtgctaaaatatagaaagtcagcctgatgccttttttcagct

SEQ ID NO: 519986 - DNA, 201 bp, Homo sapiens
tgatgcaggctgggaagaatactttgattacatctttccagaagatgctgccaaccaacctaacctcaaactcctggccatggccaaactgtggaagaaayagcagcaggaaaaggaggatgctgagcaccatccagatgaggacgtcgatgagagtgaatcctgatctttttttcatagacaaatgttttgttattttta

SEQ ID NO: 519987 - DNA, 201 bp, Homo sapiens
taaatgtgcacatcttattcacccaagggaataaaagctacttcgtaatgttgttactaaattttatcttgaaaataaataacagtgtttgaggacagaaraaactaggactgttgttgagataaaatctgttttcagcctgactgctttagtcactggacgagcatcagctactgcggtgtcagatcacttctcgagtag

SEQ ID NO: 519988 - DNA, 201 bp, Homo sapiens
ccagctccggaggctgacctggggatgcgccctggacgccctgcaccgcagtccttgcgtcgctgctagtcagcacggcgtaacccacctcatccgcagcwccaggacgccgcactccacgcgctgccgcaaggaggacgcgcagcctggtcaccatggaaacggtgccgcctccgtcacggctcatgcgagaggtcaaag

SEQ ID NO: 519989 - DNA, 201 bp, Homo sapiens
tcatgtgccatgtaatttttaaaaaatgtttaaaatgtaaactacatataaagtttaatgtaaaatgtgtgtgtgtatatgtgtatgtatgtgtgtgtgtrtatatatatatatatatccctagctcattcacagtccatacaaaatagtcaatgggctgaatttagtctacggcccatagttttctaactactagaatag

SEQ ID NO: 519990 - DNA, 201 bp, Homo sapiens
atgcaaatattcccaaactggggaaacatcccaaatccaaaacacttctgataccaaatgcttcagacaagagatactcaacctatataaggtcttgcacrgaccatgctagggagttcagattctgttcgggccagtgggaagcattgaaaggttttaagcgggacagtgattggatatgatttatattttaaggagagc

SEQ ID NO: 519991 - DNA, 201 bp, Homo sapiens
ctgattatagattgtattataactgtcttaattttattgtgctttgtttgaaaattaagccttttagtctgaatgcccgtaaactgagaactagtcttttrgcatcctaagtaaaggacttaaccgataataaatatgggaaacaaaaagcttaaagccctagaacagaaaacatttagaatggaaacagagattgcccta

SEQ ID NO: 519992 - DNA, 201 bp, Homo sapiens
agaaaaggtgctaaaatatagaaagtcagcctgatgccttttttcagcttgcttaacctggcaagtgcagctcttggttttgttttttatttattaaactsgttgtctttctaggcgaatccacacaattatgatgcatggtttgattacttgcgcttggtagaaagtgacgcagaagctgaagccgtgagagaagtctat

SEQ ID NO: 519993 - DNA, 201 bp, Homo sapiens
gccaaaatgtggatactgtatgcacagtttgaaatacgacagaagaatctgtcattagccagaagagcattggtaagtaaagaaaggatcaagatgtctcrtcaagttctatgagaaagaaattaaaatcttggtgcttggaagttgtacagttcctactttaaagagtgacagaagtattatacctttatagcctgggac

SEQ ID NO: 519994 - DNA, 201 bp, Homo sapiens
tttgatttttacttgaggcacaacaagatatcacttggagcttgaaagagaacagtgaaccagcccttaatttagtgaaatatagtttcctggatttgctyattaataggagtaattctggctagattatgcatttttgcttttagcaaaaatcaagtggcattttcagaaatcatttgtattaaccttctgggtttgatc

SEQ ID NO: 519995 - DNA, 201 bp, Homo sapiens
gcaaaaagtaagaaggataatacatttttcctaaaaaaaaaaaaaaaaaaaaccaaacaaaaaaaacacacacagagatgaactgaattgccagacaacaraaatgtaagagagaaggatggtgatcagaagcaaagtattctagcatgtttgtacttttgagcaaaggcaacagatgattaaaccaatgattcatttggt

SEQ ID NO: 519996 - DNA, 201 bp, Homo sapiens
aaaggatcaagatgtctcatcaagttctatgagaaagaaattaaaatcttggtgcttggaagttgtacagttcctactttaaagagtgacagaagtattayacctttatagcctgggacatgttagaaaacatgcgtcctctgtaaaaacactgactaataatgcgtaaattattcttattacctggggcaaattaacatt

SEQ ID NO: 519997 - DNA, 201 bp, Homo sapiens
atgtttgtacttttgagcaaaggcaacagatgattaaaccaatgattcatttggtaaatcaattgtttacagtaacacatttaaggaaaatcacttcaaaraaacatctttttaatatttatttattttgttaggtggctttatgaaagtgatataaaatcttctctatttaaattttgaaaagtgagataaaatatctaa

SEQ ID NO: 519998 - DNA, 201 bp, Homo sapiens
cgtcctctgtaaaaacactgactaataatgcgtaaattattcttattacctggggcaaattaacattctgtttcaatattggaaacttctatagctaccasttactaaatctttccacagactggaattagtaatctgatcctgtgcaaactttttggtgtgttaaatgcacttttaattgttccactttttttttctttt

SEQ ID NO: 519999 - DNA, 201 bp, Homo sapiens
aaatcacttcaaagaaacatctttttaatatttatttattttgttaggtggctttatgaaagtgatataaaatcttctctatttaaattttgaaaagtgarataaaatatctaaataatatggttaataaagagttatggcaaatacattgatgttggttataactgactgcagttctagaaatctgcataaatcttttgt

SEQ ID NO: 520000 - DNA, 201 bp, Homo sapiens
ttcacataaatttgggaaattctggactaagacttaagtctcgttaatcaaatctctttatagttaggcttctgtacattatgtatctccagtagcaatgytgccatattatttatttcccaaacttagtggacaatggagtcatttctacctagagtaccagtaaacatctcccagtgtgctatagtagaaaatgtctac

SEQ ID NO: 520001 - DNA, 201 bp, Homo sapiens
tgacagagcacgggcaatctatgaattagccatcagtcagccacgtttagacatgccagaggtgagcatctcaagtcaaatataattttgtttgagatacrtgtttagtcttactttagatgaccatctaaatgtgggtgtattttagagtataacgatgatctaactaacttagtctcttctactcagattaggcttgta

SEQ ID NO: 520002 - DNA, 201 bp, Homo sapiens
gggaaataagaaggtaaacatgaaggtatatctacaaaagcattgatggcaaaaagtaagaaggataatacatttttcctaaaaaaaaaaaaaaaaaaaamcaaacaaaaaaaacacacacagagatgaactgaattgccagacaacagaaatgtaagagagaaggatggtgatcagaagcaaagtattctagcatgtttg

SEQ ID NO: 520003 - DNA, 201 bp, Homo sapiens
gtttttgagggcaggttaagtattataacagctaacatctactgagcatttgtctttaatcctagtgaaacagatgttattagccttgttttatagttgargacattgaggctaagaaaatttaactagagtaattaaggcacacacagaatttaaacatgtttcttatcacaagactgagttgttttccagttactctat

SEQ ID NO: 520004 - DNA, 201 bp, Homo sapiens
attcttcctcagcagagaacagcctctagggcagtgcaataactgcacagattaaatccactacagtatcacagtggtctggttattttattttccagggracttccataggcaaatgtccaaagaacaaattatttaaagtttacatagaattggagctacagcttcgagaatttgacagatgccggaagctttatgaaa

SEQ ID NO: 520005 - DNA, 201 bp, Homo sapiens
aataagaaggtaaacatgaaggtatatctacaaaagcattgatggcaaaaagtaagaaggataatacatttttcctaaaaaaaaaaaaaaaaaaaaccaamcaaaaaaaacacacacagagatgaactgaattgccagacaacagaaatgtaagagagaaggatggtgatcagaagcaaagtattctagcatgtttgtact

SEQ ID NO: 520006 - DNA, 201 bp, Homo sapiens
atctttcagtccactaattgttaagactgtatcggtcagtttgaaaagctcctcattggttggattctgtagggcaagatgaggttaagtgtttccagacrcatgaataatgtacttctggttaccagataacagcatttttctgaactatataaaatatgccatgagttgtctggttaaagtgtaaagaaattgaatctg

SEQ ID NO: 520007 - DNA, 201 bp, Homo sapiens
ataacagcatttttctgaactatataaaatatgccatgagttgtctggttaaagtgtaaagaaattgaatctgcataatttttgatgctgaatcaaagtgrgcggaagtttagcagatggaacaactgacaacaagaaggagggtatgcttagtaaggctgcactgtgtacttctgtctataccaccttctgtgttaagaa

SEQ ID NO: 520008 - DNA, 201 bp, Homo sapiens
agtcctggggagggtggcagaagaggctttagagatagatcttgtcagttgtagctaaagaagcacaatttcatttgctttgtatatattgagatttttamaaatttcagctaaacaatggccaaaaaaaataaaaccaatggccaaaaaaaataaaaattgcaatctggcccttcctgtggtctagctttctgcattctc

SEQ ID NO: 520009 - DNA, 201 bp, Homo sapiens
ctggggagggtggcagaagaggctttagagatagatcttgtcagttgtagctaaagaagcacaatttcatttgctttgtatatattgagatttttacaaawttcagctaaacaatggccaaaaaaaataaaaccaatggccaaaaaaaataaaaattgcaatctggcccttcctgtggtctagctttctgcattctccccg

SEQ ID NO: 520010 - DNA, 201 bp, Homo sapiens
tggggagggtggcagaagaggctttagagatagatcttgtcagttgtagctaaagaagcacaatttcatttgctttgtatatattgagatttttacaaatktcagctaaacaatggccaaaaaaaataaaaccaatggccaaaaaaaataaaaattgcaatctggcccttcctgtggtctagctttctgcattctccccgc

SEQ ID NO: 520011 - DNA, 201 bp, Homo sapiens
gtgtccagttatattgttttttagaacaacacttggaaaataatttgcagtgattatatttctgaacaaggttcagaaaacattgtttactaagaatttartctaataatttcagttaggcgctcatcagttctccagagtggttgagtttgtaataccttgtttaaagaataatggcttgttcacgtgtgtgctatgaaa

SEQ ID NO: 520012 - DNA, 201 bp, Homo sapiens
cttcccccgccctcgagcatccagattggagctccgttcttactcccttgcagggcgccacggctcgacagagccactcgtcctcgcctggtcatcccagytccggaggctgacctggggatgcgccctggacgccctgcaccgcagtccttgcgtcgctgctagtcagcacggcgtaacccacctcatccgcagctccag

SEQ ID NO: 520013 - DNA, 201 bp, Homo sapiens
tgctgccaaccaacctaacctcaaactcctggccatggccaaactgtggaagaaacagcagcaggaaaaggaggatgctgagcaccatccagatgaggacrtcgatgagagtgaatcctgatctttttttcatagacaaatgttttgttatttttataaattaattgtttggaactcttgtgactcctggaagttcttata

SEQ ID NO: 520014 - DNA, 201 bp, Homo sapiens
aattgcaatctggcccttcctgtggtctagctttctgcattctccccgcatacctccttcccccactgtgcctgtgtatgtgccactccctgaatatatcrtgtctccttatcgtgaggcttgactgttctccttgcctggaatgagcaccccctcctcaccaaacttagtttcctggtaaatcggaacgttcctcaagtt

SEQ ID NO: 520015 - DNA, 201 bp, Homo sapiens
tcgtcctcgcctggtcatcccagctccggaggctgacctggggatgcgccctggacgccctgcaccgcagtccttgcgtcgctgctagtcagcacggcgtwacccacctcatccgcagctccaggacgccgcactccacgcgctgccgcaaggaggacgcgcagcctggtcaccatggaaacggtgccgcctccgtcacgg

SEQ ID NO: 520016 - DNA, 201 bp, Homo sapiens
acaacaagaaggagggtatgcttagtaaggctgcactgtgtacttctgtctataccaccttctgtgttaagaattgagatctggctgggcacagtggctcrcgcctgtaatcccaacactttgggaggccgaggcgggcagatcacctgaggtcaggagtttgagaccagcctagccaacatggtgaaaccccatctctac

SEQ ID NO: 520017 - DNA, 201 bp, Homo sapiens
cactccctgaatatatcatgtctccttatcgtgaggcttgactgttctccttgcctggaatgagcaccccctcctcaccaaacttagtttcctggtaaatyggaacgttcctcaagttctcatttctacaattacctactacttagccttttccaccaaacattttcatttcttcctctctgtttcccgtgcagatcttga

SEQ ID NO: 520018 - DNA, 201 bp, Homo sapiens
gtctccttatcgtgaggcttgactgttctccttgcctggaatgagcaccccctcctcaccaaacttagtttcctggtaaatcggaacgttcctcaagttckcatttctacaattacctactacttagccttttccaccaaacattttcatttcttcctctctgtttcccgtgcagatcttgactataacataaatcacatt

SEQ ID NO: 520019 - DNA, 201 bp, Homo sapiens
attgaaaaaaagttaaactattttttttttttttgagacggagtcttgctgtgtctctaggctggagtgcagtggcgttatctcggctcactgcaacctcygcctcccaggttcaagcaattctcctgcctcagcctccagagtagctgggactagagacgcgcaccataatgcccaggctaatttttctatttttaatag

SEQ ID NO: 520020 - DNA, 201 bp, Homo sapiens
aacatcatcttaatagcctttggctcacccagagtcagggagagatgaaaataataggtcagaatgcaagtgacttaatcacagtcttcctagaattatctgtttgtttatgttgcatgaatgcataagaaaaaaattctgtcatgttcccaaggtagaattgtaataagcatgtgccagtgtgaaagctggaaggaaaaa

SEQ ID NO: 520021 - DNA, 201 bp, Homo sapiens
acatcatcttaatagcctttggctcacccagagtcagggagagatgaaaataataggtcagaatgcaagtgacttaatcacagtcttcctagaattatctgtttgtttatgttgcatgaatgcataagaaaaaaattctgtcatgttcccaaggtagaattgtaataagcatgtgccagtgtgaaagctggaaggaaaaaa

SEQ ID NO: 520022 - DNA, 201 bp, Homo sapiens
catcatcttaatagcctttggctcacccagagtcagggagagatgaaaataataggtcagaatgcaagtgacttaatcacagtcttcctagaattatctgtttgtttatgttgcatgaatgcataagaaaaaaattctgtcatgttcccaaggtagaattgtaataagcatgtgccagtgtgaaagctggaaggaaaaaag

SEQ ID NO: 520023 - DNA, 201 bp, Homo sapiens
atcatcttaatagcctttggctcacccagagtcagggagagatgaaaataataggtcagaatgcaagtgacttaatcacagtcttcctagaattatctgtttgtttatgttgcatgaatgcataagaaaaaaattctgtcatgttcccaaggtagaattgtaataagcatgtgccagtgtgaaagctggaaggaaaaaagc

SEQ ID NO: 520024 - DNA, 201 bp, Homo sapiens
tatttaaattttgaaaagtgagataaaatatctaaataatatggttaataaagagttatggcaaatacattgatgttggttataactgactgcagttctaraaatctgcataaatcttttgttgaaagtaatatctgcattggtagacgtgatattactacatacataaatatatattttccccaaacaccaaaagagctt

SEQ ID NO: 520025 - DNA, 201 bp, Homo sapiens
tcaatttctctctcattgtctcaatttctgtaagtctctcttctctctttccctcccttctttccttcatagggaaagccattttattatatactagccastgagctcaaaacagggaaaacaatgaaggagaaattaataatgtctagactcctatcgaagctaaccataaatattgtcattccttgttctggttttaaa

SEQ ID NO: 520026 - DNA, 201 bp, Homo sapiens
gattacaggcgtgaatcactgcgcccggccttaaagctactttttattgaacaaatactacacgccaggtgctttgctaagaagcttaaggagaggataartaacctgtctatggccatagagctattagtaagtggcattttactttgtttttgtttgtttgtttgtttggtttggttttttgttttttttttttaagag

SEQ ID NO: 520027 - DNA, 201 bp, Homo sapiens
aaaccttggactatagttcatgtaagaccaagcatgaggccagcgtgcgtcaggtgtccttggggtttttatttgatccgtttctcttttgttgaagttcycccctggccgagtgtggtggctcacgtctgtaatcccagcactttgggagaccagggtggaaggactgcttaagcctaggagtttgagaccagtctgggc

SEQ ID NO: 520028 - DNA, 201 bp, Homo sapiens
tcttatatcttgtcagaaactctaataaactactgggtagaaaataagaatgtcatttgcctaaagatgaaaatcccacagatttttaatgaagtgagagyctcaaccctctgtgactgcacagatctgacggtgggtggaacctgcccagcggaagggcaaggcccggcagtgggctggctgcgttctgtgccgtgaggg

SEQ ID NO: 520029 - DNA, 201 bp, Homo sapiens
cacttcggcaaagagtgtcctgccacgacccgcggagggccgaggtttgcaggccgacctccccttgcagttaggatcctctgcttggaaggctgtgcagygtttgcattctaagggctgcggagacagctggagatctgctcagcccaccagccgcctcatccttgctccccgctacagtgttgccacttgaagagcttc

SEQ ID NO: 520030 - DNA, 201 bp, Homo sapiens
cgatgatggtccacacaggcccctgctgctgctgctgcccctgctgtccacggctgctgctcaccaggtgaggcggggccaaggtgccttccccaggagcyggggagcctctcctggacccctggtccccttcaaggctctgggaattaggcgtgaataggccaaagccagtgacggaagggtgggcatcccacggccagg

SEQ ID NO: 520031 - DNA, 201 bp, Homo sapiens
cccttcccccagcccccatggttctgagcacaggctggtgtctcgccaggtacacagcagatcttctggaggtgctgaagaccaattacggcatcccctcygcctgcttctctcagcctcccacagcagcccaactcctgagaggtgagtggggaccctcctcagagggaactgagaggagggaaaccaggatagctgagt

SEQ ID NO: 520032 - DNA, 201 bp, Homo sapiens
ttttggaaatttacaatgtaaattagcagattaaaaatgtcagtatgctctgcaggaatcatcacatttaaccttaatgcatttccaaaaattcttcagcygtggaatacttttgtcccatagtgtctatttagatgcccttttggggaaattgagtttaaccagcaaagaagaggccatctcctaagaagatagtttgat

SEQ ID NO: 520033 - DNA, 201 bp, Homo sapiens
gccacacagagaaaactggacttggggccattcgcttgccccttctgcccactttggtgaatgaggttgaggtcacactcccagacctcgctccaaagacrgaattcttgtctggaggtgagtgggagaccaagagggttcccagcactctcaacattctgcttttttcctctgtccccatccacttaacctggttggtgt

SEQ ID NO: 520034 - DNA, 201 bp, Homo sapiens
gcttgcagtaagccgagatcgcgccactgcaccccagcctggcgacagagtaaggctccatctcaaaaaaaaaaaaaaagttaagttttgtaaaaggtgcrttctagaccctccttttggaaatttacaatgtaaattagcagattaaaaatgtcagtatgctctgcaggaatcatcacatttaaccttaatgcatttcca

SEQ ID NO: 520035 - DNA, 201 bp, Homo sapiens
ctgctgctgctgcccctgctgtccacggctgctgctcaccaggtgaggcggggccaaggtgccttccccaggagccggggagcctctcctggacccctggyccccttcaaggctctgggaattaggcgtgaataggccaaagccagtgacggaagggtgggcatcccacggccaggacccacgggcgccaccctcagggga

SEQ ID NO: 520036 - DNA, 201 bp, Homo sapiens
tctcaacattctgcttttttcctctgtccccatccacttaacctggttggtgtttatgacagcagccgagcctcagcccaggagccctgtgaggagccggsgcgtcttcctggggcagggggtttgtgggcccatgttcctaaccctcttccccactcaggaagaagcttcagctgctgatgttgggccctttccaatacg

SEQ ID NO: 520037 - DNA, 201 bp, Homo sapiens
gccccatcgggtctcctggagggctgcacggcatccgccctggacccatgtcactctagagggtggttacggtgagtgacgtgcttcacacaggtgaaccrgttgtatttgttttacgatccagcctttctgaaaaacctttgtcctcactggagcattctgttgtcgggtttttgtgtgtgtgtttgtgggtatttgcct

SEQ ID NO: 520038 - DNA, 201 bp, Homo sapiens
gcccaggggagcgaggtctggcaggattcaaggatcctggtggaagagcaggggacaattgagagggccgggcaggagaggtgaggcccgctgcgcgccgkgctggcggaggagctgtgctttatcccgcagcgagaaggagctcgtgaaggctctgaggctgggagtggctggatgaaagtcgtgcttctcggccattcg

SEQ ID NO: 520039 - DNA, 201 bp, Homo sapiens
tcggcacccacggtgaggcccccggggctgccctgtggggggaactgaaaagaaggcagagaccaaggtgagaattcctctaaactcagcacgtcacttcygcaaagagtgtcctgccacgacccgcggagggccgaggtttgcaggccgacctccccttgcagttaggatcctctgcttggaaggctgtgcagtgtttgc

SEQ ID NO: 520040 - DNA, 201 bp, Homo sapiens
attgccctctccctgcagtctctgggatggcagagcttccaaagggcattttaatggttaattgtccattattctaggagcagggacctcaggcacttgakctagatggaatgactcttctctaatcacccatctctttatccattgagtgctcattggtagccatggctgagaaagggaattaaaaatgaaccctttaat

SEQ ID NO: 520041 - DNA, 201 bp, Homo sapiens
ttggggataaactggagaaagtgttgctcaactcccgtgcccgggctgctagtaaaataccacctctgtaactcagcataacctacgctgtatttcacccyacactgcagtgatgaattgccacctcctcatactggagacttttctaatgactgtgctgacacgaatgtactaccgaaggaaagaccacaaggttgggta

SEQ ID NO: 520042 - DNA, 201 bp, Homo sapiens
accctcttccccactcaggaagaagcttcagctgctgatgttgggccctttccaatacgccttcttgaagataacgctgaccctggtgggcctgtttctcrtccccgacggcatctatgacccagcagacgtaagccgggagtaagggacagcacagtccaagactcatttagtacctttgtgttctaaaaggaatcacca

SEQ ID NO: 520043 - DNA, 201 bp, Homo sapiens
aggagccggggagcctctcctggacccctggtccccttcaaggctctgggaattaggcgtgaataggccaaagccagtgacggaagggtgggcatcccacrgccaggacccacgggcgccaccctcaggggacaggggagcagaggaaggagagctcctcaattgtcatcactgaacttcactgcaccctgcaagccttag

SEQ ID NO: 520044 - DNA, 201 bp, Homo sapiens
ccagaatgtcccataaattatattcggcttcaattatgttaattgatctacattcgctagtgcagcacctggcactggagatagaaaagtgaagtggggtygggcacgggggctgaggcctataatcccagcactttgcagggccaaggcgagtggatcacttgaggtgaggagttcgagaccatcctggccaacatggag

SEQ ID NO: 520045 - DNA, 201 bp, Homo sapiens
agagagagagagagagagagagcttgcctgcctcactgactactttctgttgccaccagatttctgaggggagcacagctctatggatcaacactttcctyggcgtgtccacactgctggctctctggaccctgggcatcatttcccgtcaagccaggctacacctgggtgagcagaacatgggagccaaatttgctctgt

SEQ ID NO: 520046 - DNA, 201 bp, Homo sapiens
actggaaggtgctactggcatctcgtggtcagaggccaggaaagctgctaaacttcctacagggcacgggaagagcccccacagaaaagattattcaggccaaagtgtcaatagtgctcaggttgagaaaccttgcctcacgcaatgaaaacggttctcacattgctttgcttcagaatgtgcaaacggaaaccccaaggc

SEQ ID NO: 520047 - DNA, 201 bp, Homo sapiens
actgggaaggactgggttggtggcgtgtgaaagggcagtttttacgctctccaagggctgatgagcacacggggctgggggtaagagaggctctagcaatkgcccccgcttcccaaccacagaacattggttttggaaaaccacctgcattaatgttggctttttcctatctggactttgcctattgtctgagttttttta

SEQ ID NO: 520048 - DNA, 201 bp, Homo sapiens
ggttctgggtcccagaagtacttgagaccaggccgaaagataaaagccgtgtgatggccgagcctgcccatggttaatgtgggggagcctgggtgagccaygccagccttgaagaagctgaggtttccacacaatgtactcagggagggcaatactaagataaatggtgcttccagggcttctggacagtgatcttcttct

SEQ ID NO: 520049 - DNA, 201 bp, Homo sapiens
gtggagtgtgcaccacaaggtggagagccgagaataagcgagtaaacagctgtgtaaatacaaatagccctgatgtgggcggaaggaggacataacgttayccggaatggagattttcacggagcagggagcagttagggaaatgaagactgggaaggactgggttggtggcgtgtgaaagggcagtttttacgctctcca

SEQ ID NO: 520050 - DNA, 201 bp, Homo sapiens
agttaagttttgtgaccaggcacggtggctcacacctgtaatcccagcactttgggaggccgaggcgggtggatcacttgaggtcaggagtttgagaccagcctgcccaacatggtgaaaccctatctctacttaaaatacaaaaattagctgggcatggtggtgggtacctgtaatcccagctacctgggaggcggaggc

SEQ ID NO: 520051 - DNA, 201 bp, Homo sapiens
cggaggcagaagaattgcttggatccacgaggcggagcttgcagtaagccgagatcgcgccactgcaccccagcctggcgacagagtaaggctccatctcaaaaaaaaaaaaaaagttaagttttgtaaaaggtgcgttctagaccctccttttggaaatttacaatgtaaattagcagattaaaaatgtcagtatgctct

SEQ ID NO: 520052 - DNA, 201 bp, Homo sapiens
ctgctgcccctgctgtccacggctgctgctcaccaggtgaggcggggccaaggtgccttccccaggagccggggagcctctcctggacccctggtcccctycaaggctctgggaattaggcgtgaataggccaaagccagtgacggaagggtgggcatcccacggccaggacccacgggcgccaccctcaggggacagggg

SEQ ID NO: 520053 - DNA, 201 bp, Homo sapiens
ccacctgcattaatgttggctttttcctatctggactttgcctattgtctgagtttttttaattaaacatttctattataaaaatcattcaggtttagttaaaaaaaaaaaagaaagaaagaaaatacagaacagtaaaaagagaaaaaaatcatctacagtcccacccagagacaggcacggcaaatatcttagtgtaat

SEQ ID NO: 520054 - DNA, 201 bp, Homo sapiens
cacctgcattaatgttggctttttcctatctggactttgcctattgtctgagtttttttaattaaacatttctattataaaaatcattcaggtttagttaaaaaaaaaaaagaaagaaagaaaatacagaacagtaaaaagagaaaaaaatcatctacagtcccacccagagacaggcacggcaaatatcttagtgtaatt

SEQ ID NO: 520055 - DNA, 201 bp, Homo sapiens
gtccggagatgcctggtggccactctgtggttagtggcagtaggtggctgctacatctagttccagtgaacctcctgttgagagagtgcagctggtggtayaagccttcccttacacagcagctgtccccccagggaatatttggcagtgtcgggagacttccggttgccacactggaaggtgctactggcatctcgtggt

SEQ ID NO: 520056 - DNA, 201 bp, Homo sapiens
cctggggcgctttttcagaccccagagccatctggggacccaagatggtgcccaagtggtccaagccccatcgggtctcctggagggctgcacggcatccrccctggacccatgtcactctagagggtggttacggtgagtgacgtgcttcacacaggtgaaccagttgtatttgttttacgatccagcctttctgaaaaa

SEQ ID NO: 520057 - DNA, 201 bp, Homo sapiens
atgttggctttttcctatctggactttgcctattgtctgagtttttttaattaaacatttctattataaaaatcattcaggtttagttaaaaaaaaaaaagaaagaaagaaaatacagaacagtaaaaagagaaaaaaatcatctacagtcccacccagagacaggcacggcaaatatcttagtgtaatttcctttttttt

SEQ ID NO: 520058 - DNA, 201 bp, Homo sapiens
gcaggtggtgtctgtgctgtgctgctttggtctctggatccctcgttccctggtgctggtggaaatgaccatcacctcgtgagtgccctgcctcgccccayctccaagggcccctctgctcccgctcaccaggactcgagtccgtgtccttgatcccagctgaccatgtatctggcccttcccagcttgtgctagttccgg

SEQ ID NO: 520059 - DNA, 201 bp, Homo sapiens
ttaagaaaaaacaagtaattgttgcagaggtctctgttttgcagcttcccttttgcaagaagcactttttccaaataaaacagtaattaaaaaaaaaaaaacataggtgaacctgcaaaagtcctcgcagtgttggccaacaagattctattactgaattacttttgaaagtgaaaggcattggctgggagcggtggctca

SEQ ID NO: 520060 - DNA, 201 bp, Homo sapiens
agaaaaaggaaggaaggaaggaaggaaagagaaggggaaggaagagagaaagagaaagagagagcagaaggaaggaaggaaggagaaggggaaggggaagrgagagagaaagagaaagagagagtgaaaggaaggaaggaaggaaagaaagaaagagagagaaagaggccctgaggggaaatggacaaagtcctgcactca

SEQ ID NO: 520061 - DNA, 201 bp, Homo sapiens
gactcttctctaatcacccatctctttatccattgagtgctcattggtagccatggctgagaaagggaattaaaaatgaaccctttaatcagttcttatawcttgtcagaaactctaataaactactgggtagaaaataagaatgtcatttgcctaaagatgaaaatcccacagatttttaatgaagtgagagcctcaacc

SEQ ID NO: 520062 - DNA, 201 bp, Homo sapiens
tttgtcaaagtgtctgctatcctccgaccactatcaggtgagcttgttaaaaatgcagatgactgggcccatctcagatctatggacgcacatgtctgaasgtagggcctgggcagctagctgctttttaacaactcccaaaatgactgcaatatccacgaaagtttgaaaaccttggactatagttcatgtaagaccaag

SEQ ID NO: 520063 - DNA, 201 bp, Homo sapiens
tttactgtccctcaaccttgaccaaatgggaagcattcccccttgtcaacacaagctggcagatacatttgactctacagatgaaggtgaacaatgttagrataaaattgctttggatcttgcctggaaggtgttttaagttttgtaataaacaagatgatgtctgaaaatgtgtaactgggcaccttgcctctgtccatg

SEQ ID NO: 520064 - DNA, 201 bp, Homo sapiens
cgcccctcttgggtcacacacccagaacgcccagccctagctctgctcctcagtaagccccacctctccctgctgtctttctctctggcagcagacctcgyaggccctcttctctccccaccccaggttttatgccgtgtgcttttacctgctgatgctggtcatggtggaaggctttggggggaaggaggcagtgctgag

SEQ ID NO: 520065 - DNA, 201 bp, Homo sapiens
ctgacctcaggtgatccgcccgcctctgcctcccaaagtgctgggattataggcgtgagccaccacgcctggcccatctctattattaaaaaaaaaaaaaagttagctgggaatggtggtgtgcacctgtagtcccagctactcagaagcctgaggcgaggggatcactggagccaggagtgtgatgctgcagtgagctat

SEQ ID NO: 520066 - DNA, 201 bp, Homo sapiens
ggcccatgttcctaaccctcttccccactcaggaagaagcttcagctgctgatgttgggccctttccaatacgccttcttgaagataacgctgaccctggkgggcctgtttctcgtccccgacggcatctatgacccagcagacgtaagccgggagtaagggacagcacagtccaagactcatttagtacctttgtgttct

SEQ ID NO: 520067 - DNA, 201 bp, Homo sapiens
agcactttgggaggctgaggtgggaggatcacttgaagccaggagtttgcgaccagcttgggcaacatagtgagataccatctctttttttttttttttttgagacggagtttctcttttgtcgcccaggctggagtgcagtagcgcatctcggctcactgcaacctccgcctcccgggtttaagtgattctcctacctca

SEQ ID NO: 520068 - DNA, 201 bp, Homo sapiens
accacagctgctcctgtaattccaaccaccatgatgttcaaaaactgaaagaatactgggaaaacgttgctccagaacctacacagatcttttctaaactyttccatccactgacacattacctgaaaaaggaatttcgattagatatgcaagttgcatcaatctctaagaataaactttaaattttttaatgttttagct

SEQ ID NO: 520069 - DNA, 201 bp, Homo sapiens; identical to SEQ ID NO: 430698

SEQ ID NO: 520070 - DNA, 201 bp, Homo sapiens; identical to SEQ ID NO: 430699

SEQ ID NO: 520071 - DNA, 201 bp, Homo sapiens; identical to SEQ ID NO: 430700

SEQ ID NO: 520072 - DNA, 201 bp, Homo sapiens
aattgtatctattgtacaatcacttataacagcattaagagagtttaaaagatcatcttttccattttatagccatttttccacccttatttacaattccaattatttatttatttatttatttattttttgagagtctcactttgtcgccaggctggagtgcagtaccgcaatctgggctcactgcaatctccatctcct

SEQ ID NO: 520073 - DNA, 201 bp, Homo sapiens
acccaagtggcaattcttcagcctgcaaatttggtacctgatatagtttggatgttccccgcaaatctcatgttgagatgtaattcccaatgttggaggcrgggcctggtgggagatgtttgggccatgggggcagatccctcatggcttggggttacggcaccccactgccactcttgctctctcttgctcctgctctgc

SEQ ID NO: 520074 - DNA, 201 bp, Homo sapiens
ttgtatctattgtacaatcacttataacagcattaagagagtttaaaagatcatcttttccattttatagccatttttccacccttatttacaattccaattatttatttatttatttatttattttttgagagtctcactttgtcgccaggctggagtgcagtaccgcaatctgggctcactgcaatctccatctcctgg

SEQ ID NO: 520075 - DNA, 201 bp, Homo sapiens
tttttttttttgagatggagtttcgctcttgttgttgcccaggctggagtgcaatggtgcgatctcagcttgccgcaacctccgccttctgggttcaagcrattctcctgcctcagcctcccgagtagctaggattacaggcatgcgccaccatgcccagctaactttgtatttttagtagagacaaggagtttctccatg

SEQ ID NO: 520076 - DNA, 201 bp, Homo sapiens
catctgtgtagaggcatcagaagctaaagacagccagcacttgaagggccaagaaaagagctccctgaggtgagtacaatatcctatgtgatttcttcccscaaaggcatttgccaactcccagacagaacaggtggagaggttgaaaagctgagtagaaagcaacgactaggaggcaaaaaagctcgacaaagtgtctgg

SEQ ID NO: 520077 - DNA, 201 bp, Homo sapiens
aatactaaaaatatcacattaagaccaagatgagtccattatcaccaatgctctacagttccattcttcaggatttccactccattttaaatgctagggtygattttcttcatcttaaccatgaatgcttatgataacaccaaatacttgatttaccttatatgaagatggcggctctgctctgagaggagtttcaggtaa

SEQ ID NO: 520078 - DNA, 201 bp, Homo sapiens; identical to SEQ ID NO: 430697

SEQ ID NO: 520079 - DNA, 201 bp, Homo sapiens
aacatcatacatttagggtgactttggttcacttcccaactaggagcctaggaagctttctaactagaaattcctcagaactagccagctttttcctggcycaccttgatctagacggttagaaccaatagtgcatctaaaacaaatccacattcaatgagctatgagattgatagctacattgttttgtgtccaaattca

SEQ ID NO: 520080 - DNA, 201 bp, Homo sapiens; identical to SEQ ID NO: 430704

SEQ ID NO: 520081 - DNA, 201 bp, Homo sapiens
tgaggtcaggagttcgagaccggccttgaccaatatggtgaaaccccatctctactaaaaatacaaaaattagccgggcatggtggcgggcacctgtaatmcaagctactcgggaggctgaggcaggagaatcacttgaacccaggaggaggaggttgcagggagccgagatcgcgccactgcattccagcctggacaaca

SEQ ID NO: 520082 - DNA, 201 bp, Homo sapiens
tttaatgttttgaagattcttgctgtaactggataagatgagcatttatttcagttatcatagaaacaaactcagtgcaatgactgggatgactaaaagayggccataagagaggagacaggctgtattccacgtccaattcccagtgaatacaacaacaaaagaattattatttcagtagtactagcacttcctttctta

SEQ ID NO: 520083 - DNA, 201 bp, Homo sapiens
ttcaaaaataagaaatacttacttgtattcagaaactgggaaaaacacctttaagatggttattaccacagctgctcctgtaattccaaccaccatgatgktcaaaaactgaaagaatactgggaaaacgttgctccagaacctacacagatcttttctaaacttttccatccactgacacattacctgaaaaaggaattt

SEQ ID NO: 520084 - DNA, 201 bp, Homo sapiens
actgccacaattagattattaatggctatgacttctgtcttgctagtactctttttcttactggcagtctctcttgtcctctcgatgaagctagttgccaygttgtgagatgctctatggggagcttcgtgtgacaaggaactgaggaagaccttcaaccaacatctggtgaggaactgaggcctcagttcaagagctcag

SEQ ID NO: 520085 - DNA, 201 bp, Homo sapiens
aaaaataaaaatacaaaaactagccaggtgtggtggcacgcgccagtagtaccagctactcaggaggctgagataggagaatcacttgaacctgggaggcrgaggctgcagtgagccgagatcatgccactgcactccagcctgtgtgagacagagcgagatattccgtctcaaaaaaaaaaagacttttatttttcaatc

SEQ ID NO: 520086 - DNA, 201 bp, Homo sapiens
gtactgaaagaaataccaaagggaattctttaggccgaaggaaaatgacaaccagggcacaatgcatgtgtgtgagggcaaggcaggagttgcagaatgtrcagagaaatagggatagaagaaagaattttggaacttgaaattccaaccaaatgatatagagtggagcacagataggaaggaataaagagcaatgaaaaa

SEQ ID NO: 520087 - DNA, 201 bp, Homo sapiens
atgttgttctaggaaaccattttatagcttctgccttttagcagtgaacactatattgttagcaagttactgaactttatatatatatatatatatatatatatatatatatatatatatatatatatatatataaaacctacctagtaaaattacagagtttgaaaaagacaattaacagacacaagcacactatatttt

SEQ ID NO: 520088 - DNA, 201 bp, Homo sapiens
atatatatatatatatatatatatatatatatatatatatatatatataaaacctacctagtaaaattacagagtttgaaaaagacaattaacagacacamgcacactatattttccagagaaccaagtacaacaaaattattttctggtctttctgaatgatttcactgcaaaagggaatcacactccttactgccccct

SEQ ID NO: 520089 - DNA, 201 bp, Homo sapiens
ttgtcctctctgcaggccacaacttctttgggctcacccactctgcaggccacacattctttcctgacaatgtcccctaggcaaacccaagcttctttgayctcaccttctcggccggcctctactccccctgattcaccccctctgcaggcccctctttcccttcctgcctcaccccctctgcagacttctctctctcct

SEQ ID NO: 520090 - DNA, 201 bp, Homo sapiens
tttccagaagcaggcgtctcttccctggccacagccgcttttgtggcttcagtctctccatcagtttcatcccctctgcagagtatgccccccacccaagmtaatccagcgttgccctctcttccgactctcctctctcccttggccacacctcctctgtcagccatgtctcctctacaaggccctgtttctccggcaaca

SEQ ID NO: 520091 - DNA, 201 bp, Homo sapiens
ctctagcccctccttctccctctgctccaccttctctgcagaccctcccctctccaccagccacgcccccctcgcaagttccacccacacagctgattatrtcctttccagaagcaggcgtctcttccctggccacagccgcttttgtggcttcagtctctccatcagtttcatcccctctgcagagtatgccccccaccc

SEQ ID NO: 520092 - DNA, 201 bp, Homo sapiens
ctcggggaggccaggggaggccgatgggggctggcggggagacccgggcgtgcgctccgggtctggagggatgcgacatcctgagcccgtggcagtccccygctctcgaggctggcggtctgagtccctgaaggggcaaggggcaggggcgtggagatcggtcctgaattggagccgaggcgggggaggcggtgggctggg

SEQ ID NO: 520093 - DNA, 201 bp, Homo sapiens
ctcgggggcacctggtcagagttccctctggttgacggggagaggttgggtaactggaactcgcagttatgagaccagaagttcgtggttccatccttcckttcccattccttggagagcacgggttgctttactattgaagacagttccagtttttagtcatgaaaatatgattgggaaatttatataaactctagtata

SEQ ID NO: 520094 - DNA, 201 bp, Homo sapiens
gttgggtgagtttgtgattagattagatcagtagttctaattggttgggggcagttttgctcctccacctccgcaccctgtcccggccccacacttgacartgtctggaacatttttggatttttgattgctataatcggaagatggcggaccaggaagttgctgagtgtctcatggtacacaggatggccgcccccatca

SEQ ID NO: 520095 - DNA, 201 bp, Homo sapiens
ctcggcactgggaagagcacacacggcctggccatcctcggacccgagaacccgaaaattgccaaggacccatcctggatcatccgatgagcagccgtggygctcgactgcacaggagcccgagacaatacacctccgagctgaatatgaaaagtcagaaatgctactgctttttccaagaatattatgtcattgagtgtc

SEQ ID NO: 520096 - DNA, 201 bp, Homo sapiens
agcgggggagacagcgtctgggactggaagccctcgtgctgactctaacagcgctcacgcagaagccagtccttgctgaccacgcctgccttcctctcagrtacctcggcactgggaagagcacacacggcctggccatcctcggacccgagaacccgaaaattgccaaggacccatcctggatcatccgatgagcagccg

SEQ ID NO: 520097 - DNA, 201 bp, Homo sapiens
aaacctgtgcccagcagctctggtggagatgcccacgttccccatggctcccaggtcattaggaagctggtcatggtaagaaccacagcccatccgggttsccagcgggtgggtgcttccctgcatggctgtgtctgccactgatgttcgaatgttcctccgtccgcctgtctgtggggctggcgtgtccctagagttgcg

SEQ ID NO: 520098 - DNA, 201 bp, Homo sapiens
ccaggcaaagacacttgggtttatggtacaggttactgttaataagggcctcacccacagcggtagattctcctcctttatttctcaaattttatagaaaygtatttacttttgagactgggactcaccctgtcgcccaggctggagtgtggtggtatgatcttggctcactgcagcctcgaactcctgggctcaagcgat

SEQ ID NO: 520099 - DNA, 201 bp, Homo sapiens
cagaagaactagagtttagagtcacaggctccgcgtatggacggcttcattagctgccacattgaactgtgcggaaatctcttgataacctgaagcactgmagagcagggaggcggccgtggcatttccacatttggctgctgtttaacactctgaacagtattttctataaaaacaacattattgagttatacaaaatgt

SEQ ID NO: 520100 - DNA, 201 bp, Homo sapiens
ggctagcccactctagcatttcccctccttgcaggcccgttctgcgcactacaggagatgatatgcacagaaacagacacacagccaacgttggaaggggygctgtgttactgaggcgcagcacacaaaagcaggagacactcagcagacattggaaggggcgctgtgttactgaggcacagcacacaaaagcaggagaca

SEQ ID NO: 520101 - DNA, 201 bp, Homo sapiens
atgtgacatgattagaaaatgcctagccaaaaaaagaataaaaaatttaaaaaataaaaaaatctaaaatacctagccagtagtaagcgcgtgcgctctcrcgctcgctcgctcgctctctctcttttctatacacacacacacatattctcatctgccttttttaggtctgtctttccttgtttgtaggataagggacct

SEQ ID NO: 520102 - DNA, 201 bp, Homo sapiens
atcctgagacgggatgggaaagccggcacttggggttatgagctgggacagctgctgaggccagggaccagagcatggggccactgccccatcccaagaakagctacagcttactgtcctaggacaaagggggaatgagtcttgagagtcaataattttagtagaaatctgttatattttacaatttcacttttcatttgt

SEQ ID NO: 520103 - DNA, 201 bp, Homo sapiens
cgaataatctgttcaggtgtgtggtgcattgtaagaacatggtcttgaatgtttttatttaaatcaggaatgtccattcttttggcttccctgtgccacartggaagaagaacaactgtcttaggccacgcataaaatacactaacactaaggacagctgatgagctaaaaataataaataaaggacccctcaatgtttta

SEQ ID NO: 520104 - DNA, 201 bp, Homo sapiens
tgtatgaaagtctctggagaaacttgagagagtttagatattcgctgaagaaagccctggtgcccgtcgagtgcagatcctgagacgggatgggaaagccrgcacttggggttatgagctgggacagctgctgaggccagggaccagagcatggggccactgccccatcccaagaatagctacagcttactgtcctaggac

SEQ ID NO: 520105 - DNA, 201 bp, Homo sapiens
gtccgggctctttagggtggaaggaggacgtgggcacggcccgggcatggccacgttactctctggagccgcttttgctcacagcatcatcagcctcacgyggcgctgactgcatccctgctgcagaagcaggcgtgggtaggggtcagcgtggcacgtgggagctggaggtcggggtgtgatctctgggttgttagacac

SEQ ID NO: 520106 - DNA, 201 bp, Homo sapiens
ccattttcagttttaatagaataaaacatactttcttaaaactgcctatttcttattccatattcagattttctagttggccccaaagtgtttgttgcacrgggtcccacaggtcacacctggtcggcccgggtttctcctgggcaccctctaggggacggcagaggagtgtgcaggcccagtttctttctggcgcactca

SEQ ID NO: 520107 - DNA, 201 bp, Homo sapiens
agtgcatcctgtcatttgttttactgacctgagacccagtggggccaacccatggcagtgtccgggctctttagggtggaaggaggacgtgggcacggccygggcatggccacgttactctctggagccgcttttgctcacagcatcatcagcctcacgcggcgctgactgcatccctgctgcagaagcaggcgtgggtag

SEQ ID NO: 520108 - DNA, 201 bp, Homo sapiens
gatgacgttgctgttttccaagttcccggcatgcatgggcaggagcaccagcttctggtgcctccatccttgcttgtgatacgatttccacgtctgacacyctaaacacgcttcctgacatccgggcgagaagagtgcatcctgtcatttgttttactgacctgagacccagtggggccaacccatggcagtgtccgggct

SEQ ID NO: 520109 - DNA, 201 bp, Homo sapiens
gtcaagtgttctaacaaactaagaaaatattttaagcctattaaaagttgtaggagatggggaagaaagcaggctaattttgtgctagaagtgcaaatagrttgagggcaagtagttatattgcttccaaaagcacatggtccgtaactgaggtatctgtaaaggtgagcttgctgaagaccagagtaaaagtgcagtttc

SEQ ID NO: 520110 - DNA, 201 bp, Homo sapiens
ggcaaaacctcgtctctacaaaaaaaaaataaaaataaacagaaatcagccaggtatggtggtctgcacccctagtcccagccacgtaggaggctaaggcrgaaggatcacttgagcccaggaggcagaggctgcagtgagctgagatggtgccactgtactccagcctgggtgacagagccagaccctgtctcaaaacaa

SEQ ID NO: 520111 - DNA, 201 bp, Homo sapiens
attttagacaaaagttgttctgtgtgcttcttttcactccttgggcacttagccacacccagcaatgtcctttctggcgcgaggattagggccagcagcckaaacaggaagcattctgccttcagtaaaccctggcttcagccagcatattttggcagaacacggtagtgcctccatccgtgggtttgccttccatggttt

SEQ ID NO: 520112 - DNA, 201 bp, Homo sapiens
cacaggaaaagtctgtgctgactctgagtgttggacctggggctgtgtgagtctacgagtgctcctctttaaccagcagtctttgtgaacagagacccagytttagagccagtcatttttgtaaacaatttctattattgaggagtcctatgaacaatacagatacctatgaccttaaacacagactgctttcaacatgcc

SEQ ID NO: 520113 - DNA, 201 bp, Homo sapiens
gaacgccttcacaggtaagaccagcatcctgaacagaaactgcttttgggtttgccaggcacacccactggaattcagttagtttctgagaaggaatgagsggagtgggcaattcatgttctagaaaaatttttacctctctctagttgaaggacattagaaatttaatccttcaggaaagccacatggtagcgagattgt

SEQ ID NO: 520114 - DNA, 201 bp, Homo sapiens
tcatgtaatagatatcctttcccttgctgaagtttttggaagtaaattatagacgtcatgatcatttgcccgtaaatgtttgaatttgtgaccttaaaacrtgaggattttttcttacatgagctaatgccattttcagttttaatagaataaaacatactttcttaaaactgcctatttcttattccatattcagatttt

SEQ ID NO: 520115 - DNA, 201 bp, Homo sapiens
cctgtgctggaggattgtggtgtcagaatgatgatttctagtagcctgaggtgatgatgcatctgggaactgtgtccgcagcactaagctgaaccttttgygttctggtcattcgccttccctagcgtgccattcctctctcttccctagcgtgcagttccgtaccactcccatggacagtactggtgttcctcacattct

SEQ ID NO: 520116 - DNA, 201 bp, Homo sapiens
atcaggtgggaagcttggaaggaacctctattactccggtttagccacatattccagagttactaatttctttgggaatacattaatttatgtcccagaartgctaactttctaactgactaaatatggggaagaattggttggttggttttgactcatcttcctctttgtaccaccctgcatcccagttccagccctgcc

SEQ ID NO: 520117 - DNA, 201 bp, Homo sapiens
tgaaattagtgaaaatgaaacaatagaaaacaagtatagggccaggtgcagtgactcatgcctggaatcccagcactttgggaggccaaggtgggaggatyacttgaggtcaagagtttgagacagcctgggcaacatggcaaaacctcgtctctacaaaaaaaaaataaaaataaacagaaatcagccaggtatggtggt

SEQ ID NO: 520118 - DNA, 201 bp, Homo sapiens
ttgaaatagttatgaatctacggtataatataaggagatacttatagatctccatctcagcctatgaagctttggaaaggattgatggtttaatccgaaartgtaagtaattggatgtgcagtgtggcctggggctgccttaggaacaggtgtgcctgctgcgtgcgtggctcctcctccaagccgaccctgcagttgctg

SEQ ID NO: 520119 - DNA, 201 bp, Homo sapiens
ggaaatggaacatgggggaggtcagcccagcagacaccaggagtgctgtctgcggggactgagttaaagtgggaactgggcacagccctccccgggagtcrtggaatcatgcatttgtatacttgcttggctcggtgtagcactgtgaagccgcttcactgatggccatcagggcggggagcacgcctgggtcttctggat

SEQ ID NO: 520120 - DNA, 201 bp, Homo sapiens
aaaaatttttacctctctctagttgaaggacattagaaatttaatccttcaggaaagccacatggtagcgagattgtaaaaactagcgttttaagaaaacrtatgtgaacttttcccagaaaagttcaaaacaattttctcttggagatatcgctacaatgccagagttagtactaatgttgatgtttgacttttagtaag

SEQ ID NO: 520121 - DNA, 201 bp, Homo sapiens
tgattcattctattaagtatagtttttaggtatttcttacttgtagaaacttcaagatagagtgcttggtaaaggttatagaatttattgtaaatgtcaartgttctaacaaactaagaaaatattttaagcctattaaaagttgtaggagatggggaagaaagcaggctaattttgtgctagaagtgcaaatagattgag

SEQ ID NO: 520122 - DNA, 201 bp, Homo sapiens
agaaaagactgcctcagaccagcaggtgctcacattttgaggtcacaggtccctttgagtgtgagaatggtactatgaacatgcacctcggcaaaatataycacatacaaaactttgtaattccggtggtttcacgagactaggtcggaaccatgcccgggggtgttcaggaagggaaggcttgggctctgggccctcccg

SEQ ID NO: 520123 - DNA, 201 bp, Homo sapiens
gcaaagccgcagttattgaattaatggaagcaacttgtaactcaagatgcacgattttaaaaatgattcagtaaagactgacttgtaatcggggcgatgcwtctctgctgtgtcaggctgggctgcggccttcttgactaccgggagcaggctcagcagatagaattgaagaccggagggatgagtgcttctccccacgtg

SEQ ID NO: 520124 - DNA, 201 bp, Homo sapiens
tcccccgcccaggctaccagacattcgagcaaaacaaaggaagtatgtatcacggtgatctgggtgaagagagtagggagtagtcataaaacatttattgragagcttacaactggaaatgcctattttagaatggtgttttaagtgcagacactggctgcccaagtgtcttgtgcctctggacgctaacttcctaggcgg

SEQ ID NO: 520125 - DNA, 201 bp, Homo sapiens
acactgtgcctactcacaacgtcacatcattttacagagggaattccagataacatgtggcccggattcatttgctacagatccctctaaacaaacaaccrtcagcgttagcttcctcttaccggagtaagtatatgctgtcaaagctcatacaagacaaaaacatgaggaaaatgttcctattagaaggttcggaagtga

SEQ ID NO: 520126 - DNA, 201 bp, Homo sapiens
cctcaggaacccaccttcaagccctggcagatgaagactcacttcctgatgcccttcccggtgaattacgtgggtgaatgcatccgaactgtcccctacayggacccagatcatgccaggtaggagggtgtaggtcgggacctctcaggcctgagccttacggaagagcttgtcaaggctgttcgagttcacagggcgtgt

SEQ ID NO: 520127 - DNA, 201 bp, Homo sapiens
aagctgaaagaatggtaatttgtttgaaaggaaagttaacttagtggaaagcctgtttcgctccatttcgtgtatccagataacctagagtagttgacaaccgtcagacactgtgcctactcacaacgtcacatcattttacagagggaattccagataacatgtggcccggattcatttgctacagatccctctaaacaa

SEQ ID NO: 520128 - DNA, 201 bp, Homo sapiens
catttgtacccagctagtgattatactgtgtatccattttccacacaaaatcccaaggactttcagaatctcctctcggtgtatttggatgccaccttttycccatgtttacgcgagctggatttctggtatgtcatgaatgattaactagttgatacagactttagtatttgagtcactatcagcttataatgatttgtc

SEQ ID NO: 520129 - DNA, 201 bp, Homo sapiens
cagaacgattgatgaagtagttgagtgagtgtagcttgtttgtaacaatctgctttcgttcctcattcctgtgtgctttttgggagaagctgagcctgatscattgtttcggccttccttctctgtcatataacatgcttttgttcatatttagttgtttaaatattatctctgctaccttctgttactaaaactcttcaa

SEQ ID NO: 520130 - DNA, 201 bp, Homo sapiens
tgtttaaatattatctctgctaccttctgttactaaaactcttcaacatcttaggtttttgttttgttttgagacagggtctcgctttgtcacccagcctsctgtgcagtggcgtgatctcagctcactgcattttcctcccctaccaggctcaggtgatccttccacctcagcctcccaagtagctggaactagggtgca

SEQ ID NO: 520131 - DNA, 201 bp, Homo sapiens
ggcatggcttctctcacatttagcaatgcttaagaaatatctaagtctaggtaagattcttggcctaagtttgcctatcttacttggacattgattttggrcatttacaatgatagccctcaggaggctcagcatgttggttacaaacacagcgtttagagtcccccagaggagggtcctggccccgcagcctgttgcctc

SEQ ID NO: 520132 - DNA, 201 bp, Homo sapiens
tttaataatttgacctgcagtttctctcagctgttgtaagttattttccatgaactttctggtgtcttctagttatctcacctgtttgtagtattttataygggagcattttgtgcatgtgtagttttttaattgttgaaacaaggaaaggacatgaaatcacctaatgttcatttttatattaacgtcaacatgtatttt

SEQ ID NO: 520133 - DNA, 201 bp, Homo sapiens
gaggcaggagaatcttttaaacctgggaggcggaggttgcagtgagctgagattgtgccattgcactccagcctggggggacggggcgagactccatctcaaaaaaaaaaaacccccaccaaaaccaagtgtggtggtgtagtcctggtagtcccggctactgaggaggctgaggctggaggattgcttgaggctgcagtg

SEQ ID NO: 520134 - DNA, 201 bp, Homo sapiens
catgtaaaagaaaaattaatgtcagtttgtaacctgctcttactcttgctatctgaattcttgtttagagacaactggtttttttttgttgtttttttggttttttttttgagacggagtctcgccttgtcacccaggctggagtgcagtggcacgatctcggctcactgcaagctccccctcccggattcacgtcatttt

SEQ ID NO: 520135 - DNA, 201 bp, Homo sapiens
taggcacagcgagaggttaacaacaataactaataataaaatagaacaattataacaatatactgtaataagttacatgaattttggtctctcgaagtacygtgatatttttggaccttggttgagtaagggtgactgaaaccgaaaggcgagaccttgggtaaggggcactcctgtgctgtgtttcagtgaaacagacag

SEQ ID NO: 520136 - DNA, 201 bp, Homo sapiens
gctggagtgcagtggcacgatctcggctcactgcaagctccccctcccggattcacgtcattttctcgcctcagcctcccaagtagctgagactacagatrcccaccaccacgcccagctgattttttgtatttttagtggagactagagacaactgttttaagctctattttttaaccttactctttttccccccttatt

SEQ ID NO: 520137 - DNA, 201 bp, Homo sapiens
catgtgtagttttttaattgttgaaacaaggaaaggacatgaaatcacctaatgttcatttttatattaacgtcaacatgtattttgttctaataacttaygaagtattgaatgggaaatgtagttctagccttttagagcttaatagtagaatgaacgctagacaaaaaatagaattctatattatcttcaattagacta

SEQ ID NO: 520138 - DNA, 201 bp, Homo sapiens
gtggcacgatctcggctcactgcaagctccccctcccggattcacgtcattttctcgcctcagcctcccaagtagctgagactacagatgcccaccaccaygcccagctgattttttgtatttttagtggagactagagacaactgttttaagctctattttttaaccttactctttttccccccttattaagctctgttt

SEQ ID NO: 520139 - DNA, 201 bp, Homo sapiens
caggcgtctgcacaaagcttgaaacaacccagatttccatcaacatatacatccttacaaagaaatgccactagctgtgaaggagcgcaacaatgatgcaygcttggtattggtgcatctcgaagcttcccacaaagggaaagaagccgggtgccagatgacatcctgaggccattcatgggaagcctagatgtggcaaag

SEQ ID NO: 520140 - DNA, 201 bp, Homo sapiens
tcacttggcttttgttgttgctgtgattgctgcagaataaccagcataagctgactttatcgatgaggccagatgacaagtatcacgagaagcaggcacasgtggaagccacgaagctcaagcagaaggtcgaggctctgtcccccggagacaggcagcagatctacgagaaaggtcagaggcttccttccgagctggcga

SEQ ID NO: 520141 - DNA, 201 bp, Homo sapiens
gtgggctcctgttcccatccagaataatagggcgacagggaaccctgcagccagcttcagggaccactgcccaacctgacatgcagctggggtcttccctytgtggagatgaagttgtctgcgtgctgcagaaagctatgtggctgtgacaccttctgcaccctggctgagggtccgctcagatggaaaaatgtcttcagg

SEQ ID NO: 520142 - DNA, 201 bp, Homo sapiens
agtgctgagaggaaactgcttttcttaaaaacttaaaaaacctttagtcttcggactcccccgcccaggctaccagacattcgagcaaaacaaaggaagtmtgtatcacggtgatctgggtgaagagagtagggagtagtcataaaacatttattgaagagcttacaactggaaatgcctattttagaatggtgttttaag

SEQ ID NO: 520143 - DNA, 201 bp, Homo sapiens
atttcaaccaacaggtgtccgctgggcgccaacagagctcacgttcgatgcattgagttcagatattctcagaaaatcgcccgtgtagctcagtaggaaaygcaggagtcattgaaaagaagtagcttgaaaagatgtatttattttacagattttgtaaatacttttatcaggtgccgtaatatgccagtaccattgttc

SEQ ID NO: 520144 - DNA, 201 bp, Homo sapiens
aataatagggcgacagggaaccctgcagccagcttcagggaccactgcccaacctgacatgcagctggggtcttccctctgtggagatgaagttgtctgcrtgctgcagaaagctatgtggctgtgacaccttctgcaccctggctgagggtccgctcagatggaaaaatgtcttcagggttttgaaggttccctgccttt

SEQ ID NO: 520145 - DNA, 201 bp, Homo sapiens
gcagtggcaagtgcctgtggtcctagctacaggaggctaaggcgggaggatcccttgagcctggggaggttgaaactgcagtgagcagattgcgccactgyacaccagcctgggcgacagtgagaccctgtcccgtggatgcatagctagattaggtaggtaggcaggcatgtaggtagatacgtaggtagccattgccac

SEQ ID NO: 520146 - DNA, 201 bp, Homo sapiens
agattaatgacaagaaagtgcagaaagaaaggttaaaatattttctttgtaccatataacaaggctaccttttccttgactgtctgaaaatttattttaawattttcttaatttcttttactcactttatttctttttttagtttttgttattttgagacagggtctgtctctggcactcgggctggagtgcagtggtgcc

SEQ ID NO: 520147 - DNA, 201 bp, Homo sapiens
gcaggtattatttcaaccaacaggtgtccgctgggcgccaacagagctcacgttcgatgcattgagttcagatattctcagaaaatcgcccgtgtagctcwgtaggaaacgcaggagtcattgaaaagaagtagcttgaaaagatgtatttattttacagattttgtaaatacttttatcaggtgccgtaatatgccagta

SEQ ID NO: 520148 - DNA, 201 bp, Homo sapiens
cagccgaaacaggaagcattctgccttcagtaaaccctggcttcagccagcatattttggcagaacacggtagtgcctccatccgtgggtttgccttccayggtttattacccacagtccccctcggtctgaaaatattaaatggaaaattccagacataaacacttcctaagttttaaattgtacaccattcttctaagc

SEQ ID NO: 520149 - DNA, 201 bp, Homo sapiens
ctggccgtgagcgataggtgagtggggagcgggggagacagcgtctgggactggaagccctcgtgctgactctaacagcgctcacgcagaagccagtcctygctgaccacgcctgccttcctctcagatacctcggcactgggaagagcacacacggcctggccatcctcggacccgagaacccgaaaattgccaaggacc

SEQ ID NO: 520150 - DNA, 201 bp, Homo sapiens
ggaactgtgtccgcagcactaagctgaaccttttgcgttctggtcattcgccttccctagcgtgccattcctctctcttccctagcgtgcagttccgtacyactcccatggacagtactggtgttcctcacattcttgagcataccgtcctttgtgggtctcagaaatatccgtgcagagaccctttcttcaaaatgttga

SEQ ID NO: 520151 - DNA, 201 bp, Homo sapiens
cactggtggtgctggcgcccggtgagcgcctggcgggtgccagagcagctctcatgttttacacgcattaactcaattctcagagcagtccagcatgtggsggttcatatcccccgtacgcagatgaagaaactgaggttcaggaggattaagtatcttgtgcagtgttgggccagttaagtgagttcagaccctgcggtg

SEQ ID NO: 520152 - DNA, 201 bp, Homo sapiens
ctgcgcccagcccaccaatggcatggtgtatttccgggccttctccagcctgaacacactccccgaggagctgaggccctatgtgcccctcttctgcagcrtcctcaccaagtacgagtcgcaacatacccttgtgtgtcttattaatgtctgctttgtgtgcatatctgtattctaatgcatcagtaggaattaccttca

SEQ ID NO: 520153 - DNA, 201 bp, Homo sapiens
tccttagaagcatcggtcggagtaaaaaggaacggaggcctgtgcgcccacacacggtcgaggtatgcactggtggtgctggcgcccggtgagcgcctggygggtgccagagcagctctcatgttttacacgcattaactcaattctcagagcagtccagcatgtgggggttcatatcccccgtacgcagatgaagaaact

SEQ ID NO: 520154 - DNA, 201 bp, Homo sapiens
agccacaatgggattttcaccctttactcttacaggtgagttttgctctagttcacacattgggatgcacacgtcgttttagtcttctactcatgattatyagtgtcattttcttctactgcagtgaattttagacaaaagttgttctgtgtgcttcttttcactccttgggcacttagccacacccagcaatgtcctttc

SEQ ID NO: 520155 - DNA, 201 bp, Homo sapiens
tgaagagcttacaactggaaatgcctattttagaatggtgttttaagtgcagacactggctgcccaagtgtcttgtgcctctggacgctaacttcctaggygggagaaactggggtctccctggggaagggggcacatgaactctcgagggcgaaggccagagtgcacctgcttatgaccttcgaagtgtagagaggttgg

SEQ ID NO: 520156 - DNA, 201 bp, Homo sapiens
ccctccactgactttcctctcctgatgaggtcacagagaagtgtatttaaataatctagggaggactttgtgcagacagaccttgtctaagagggagaacrtgttgaaaggcttatgtgatcagatttaaatttccattgagagtaattgagcgatttgtcagtgggctgtttggactaaatcagatataaaatagagctg

SEQ ID NO: 520157 - DNA, 201 bp, Homo sapiens
cagtgggctgtttggactaaatcagatataaaatagagctgttaacccatagaagatgttgaactgttaagtcgacagaggtttgtcataaacttgtccaytggtaaaatgcttgcccgtttatttctctgggtttcctagggacccaaatacaatagagacgctccagtcttttgggaaggctgtcgactgggctaagtc

SEQ ID NO: 520158 - DNA, 201 bp, Homo sapiens
tttctcctctctctgcctggatcgaaacctgccagacatgatgcagctatggagtgaaatatttaacaagtaactttatttgcaagagttgtccattcttrgggtgtactagagatctttgtttgaagtactttaaaggagacagttttactcgtgtgtgttgttgttttccaagtctgacttttacttgtagttcatatg

SEQ ID NO: 520159 - DNA, 201 bp, Homo sapiens
cgcccggtgagcgcctggcgggtgccagagcagctctcatgttttacacgcattaactcaattctcagagcagtccagcatgtgggggttcatatcccccrtacgcagatgaagaaactgaggttcaggaggattaagtatcttgtgcagtgttgggccagttaagtgagttcagaccctgcggtgtggccttagatcccg

SEQ ID NO: 520160 - DNA, 201 bp, Homo sapiens
tgtcacggcaagccccgccccgcgccctgcgtcgggttaagagggggttcctcgccagccaggtgctcgtcatgcgcaatgtggcgctgcggcgggcggcrgggcctgtgtgtgctgaggcggctgagcggcgggtgagacgctgcgacgggaggcgctcggcgcgctggtacccgggaggggagggtccagggcaggccg

SEQ ID NO: 520161 - DNA, 201 bp, Homo sapiens
gaggcacacagggatggtggagcggtgggcatggagggaggacagcgtgtgtgggggagacaggtgtgccctgtggctctggggagggcctgtatggaagrtggggagcacacgggtgcttcatgtattaaggcaggagaactgtcgggtcagtgagcagtgtagctgcagcctcattcaggatagttttgcagaaaaata

SEQ ID NO: 520162 - DNA, 201 bp, Homo sapiens
aaaggagacagttttactcgtgtgtgttgttgttttccaagtctgacttttacttgtagttcatatggacttataaaatttctttggttgttaaagtactstgaaaacttaatcaactttccatgatactgaagggacgtgaggaatgggtctccaggaattttttcttctcctttttccatagcccgtgctttgaagaag

SEQ ID NO: 520163 - DNA, 201 bp, Homo sapiens
tgacggaactgcagtgccttgctctcgcgccccagcacctggctgcagagtgtcacggagatgggacccctgagatggctccagtcccagtgccgtgggcrgtgcgtgggagcacagccgcctctgacccctgagtgggtccagtcccagtgccgtgggcggtgcatggcagcacagccgcctctgaccataccgtgtccc

SEQ ID NO: 520164 - DNA, 201 bp, Homo sapiens
cagagtgtcacggagatgggacccctgagatggctccagtcccagtgccgtgggcggtgcgtgggagcacagccgcctctgacccctgagtgggtccagtmccagtgccgtgggcggtgcatggcagcacagccgcctctgaccataccgtgtccctcaggaacccaccttcaagccctggcagatgaagactcacttcct

SEQ ID NO: 520165 - DNA, 201 bp, Homo sapiens
gaactgcagtgccttgctctcgcgccccagcacctggctgcagagtgtcacggagatgggacccctgagatggctccagtcccagtgccgtgggcggtgcrtgggagcacagccgcctctgacccctgagtgggtccagtcccagtgccgtgggcggtgcatggcagcacagccgcctctgaccataccgtgtccctcagg

SEQ ID NO: 520166 - DNA, 201 bp, Homo sapiens
caaaactcagccacaatgggattttcaccctttactcttacaggtgagttttgctctagttcacacattgggatgcacacgtcgttttagtcttctactcwtgattatcagtgtcattttcttctactgcagtgaattttagacaaaagttgttctgtgtgcttcttttcactccttgggcacttagccacacccagcaat

SEQ ID NO: 520167 - DNA, 201 bp, Homo sapiens
tggcagtttttgtccgtgaatctcattaagtgtttgctaagagtgagaataaatcagtcatccttccgcaccttggtccctccgctggtctagggtgctctgctaggtagggacatatgaagctgaatgtccagccctccccttgaggtcaggatgggtgggtgggggacaccaggagccttgtttggggccctggggcag

SEQ ID NO: 520168 - DNA, 201 bp, Homo sapiens
gctagaagtgcaaatagattgagggcaagtagttatattgcttccaaaagcacatggtccgtaactgaggtatctgtaaaggtgagcttgctgaagaccasagtaaaagtgcagtttcttataaaattatgtgatgctttgaggaaacatctggcagctcagtcctataccttcagttggccttatgccctcagatgtgtg

SEQ ID NO: 520169 - DNA, 201 bp, Homo sapiens
acactctgaacagtattttctataaaaacaacattattgagttatacaaaatgtgatgaattactaaaactgttttttctaacagtggttttatgtatacrtaatttttcaaacaggtgttcagtgaatgcgactcctcagcagatgcctcagacagaaaaagcggtcgaagacttccttagaagcatcggtcggagtaaa

SEQ ID NO: 520170 - DNA, 201 bp, Homo sapiens
aagttaacttagtggaaagcctgtttcgctccatttcgtgtatccagataacctagagtagttgacaaccgtcagacactgtgcctactcacaacgtcacrtcattttacagagggaattccagataacatgtggcccggattcatttgctacagatccctctaaacaaacaaccgtcagcgttagcttcctcttaccgga

SEQ ID NO: 520171 - DNA, 201 bp, Homo sapiens
tctgccttcagtaaaccctggcttcagccagcatattttggcagaacacggtagtgcctccatccgtgggtttgccttccatggtttattacccacagtcmccctcggtctgaaaatattaaatggaaaattccagacataaacacttcctaagttttaaattgtacaccattcttctaagcagtgggatgaaagctgacg

SEQ ID NO: 520172 - DNA, 201 bp, Homo sapiens
ctgttagctttcataaacataacaccgttactgtaaagcaatattcttgattttctatggctttgctgcctaagagaacatgtattccaacagtttttaasaaggagccagccggccgcagtggcaagtgcctgtggtcctagctacaggaggctaaggcgggaggatcccttgagcctggggaggttgaaactgcagtga

SEQ ID NO: 520173 - DNA, 201 bp, Homo sapiens
taaacataacaccgttactgtaaagcaatattcttgattttctatggctttgctgcctaagagaacatgtattccaacagtttttaagaaggagccagccrgccgcagtggcaagtgcctgtggtcctagctacaggaggctaaggcgggaggatcccttgagcctggggaggttgaaactgcagtgagcagattgcgcca

SEQ ID NO: 520174 - DNA, 201 bp, Homo sapiens
agattgtaaaaactagcgttttaagaaaacgtatgtgaacttttcccagaaaagttcaaaacaattttctcttggagatatcgctacaatgccagagttastactaatgttgatgtttgacttttagtaagactgacgatagtggatagggtgacgatgaacagtgcattctgtgggggagtgacattgaagagcgggtta

SEQ ID NO: 520175 - DNA, 201 bp, Homo sapiens
ctgtcttcactcttgacttctgggcccaattctcccttttacaaagccttgattgaatctggccttggcacagacttttctcctgatgttgggtgagtttrtgattagattagatcagtagttctaattggttgggggcagttttgctcctccacctccgcaccctgtcccggccccacacttgacaatgtctggaacatt

SEQ ID NO: 520176 - DNA, 201 bp, Homo sapiens
aagagtgaccaggaagaggttcattgaaataatcatgcatgaagcgccaaagatgcaccatgtagaattttcactttgtactggcaggctcgttttacctsattctagaatatttaagaatctaaaaataaagggcaactctgacttaacctctgcttgagtcattattttaagcagcatttagggcctttatttaaaaac

SEQ ID NO: 520177 - DNA, 201 bp, Homo sapiens
atgttcctccgtccgcctgtctgtggggctggcgtgtccctagagttgcgagttcagtgcatcctttgtcactgccaccctgagccttttctctctcagayagtactgagtgaaggccctggtgggggtgtgtcctcctgtgccgaggagggccctggtatggggtgcgtcttccctgtgcccaggaagagggctactgct

SEQ ID NO: 520178 - DNA, 201 bp, Homo sapiens
tggcgagtcaaaaactcagatctatcttaagagtgaccaggaagaggttcattgaaataatcatgcatgaagcgccaaagatgcaccatgtagaattttcmctttgtactggcaggctcgttttacctcattctagaatatttaagaatctaaaaataaagggcaactctgacttaacctctgcttgagtcattattttaa

SEQ ID NO: 520179 - DNA, 201 bp, Homo sapiens
cgccaaagcccttgactggcgagtcaaaaactcagatctatcttaagagtgaccaggaagaggttcattgaaataatcatgcatgaagcgccaaagatgcmccatgtagaattttcactttgtactggcaggctcgttttacctcattctagaatatttaagaatctaaaaataaagggcaactctgacttaacctctgct

SEQ ID NO: 520180 - DNA, 201 bp, Homo sapiens
tgaatatgaaaagtcagaaatgctactgctttttccaagaatattatgtcattgagtgtcgccaaagcccttgactggcgagtcaaaaactcagatctatyttaagagtgaccaggaagaggttcattgaaataatcatgcatgaagcgccaaagatgcaccatgtagaattttcactttgtactggcaggctcgttttac

SEQ ID NO: 520181 - DNA, 201 bp, Homo sapiens
cttcctctcagatacctcggcactgggaagagcacacacggcctggccatcctcggacccgagaacccgaaaattgccaaggacccatcctggatcatccratgagcagccgtggcgctcgactgcacaggagcccgagacaatacacctccgagctgaatatgaaaagtcagaaatgctactgctttttccaagaatatt

SEQ ID NO: 520182 - DNA, 201 bp, Homo sapiens
tgggactggaagccctcgtgctgactctaacagcgctcacgcagaagccagtccttgctgaccacgcctgccttcctctcagatacctcggcactgggaaragcacacacggcctggccatcctcggacccgagaacccgaaaattgccaaggacccatcctggatcatccgatgagcagccgtggcgctcgactgcacag

SEQ ID NO: 520183 - DNA, 201 bp, Homo sapiens
aacgcgagctcccgggcagcggctccatcgtgcctgtggattgtcttctaggaatggaccacttcttgtacggcctctcggatgagatgaagcaggcccayagagagcagctctttgctgtcagccacgacaagctcctggccgtgagcgataggtgagtggggagcgggggagacagcgtctgggactggaagccctcgt

SEQ ID NO: 520184 - DNA, 201 bp, Homo sapiens
tcccagcgggtgggtgcttccctgcatggctgtgtctgccactgatgttcgaatgttcctccgtccgcctgtctgtggggctggcgtgtccctagagttgygagttcagtgcatcctttgtcactgccaccctgagccttttctctctcagacagtactgagtgaaggccctggtgggggtgtgtcctcctgtgccgagga

SEQ ID NO: 520185 - DNA, 201 bp, Homo sapiens
agagacgctccagtcttttgggaaggctgtcgactgggctaagtctggaaaattcacacagcaagacatcgacgaagccaaactttctgtcttctcaaccrtagatgctcctgtcgctccttcagacaaaggtattttgagtataacagtgagaatctcaacccacagcctcacagatgacgttgctgttttccaagttcc

SEQ ID NO: 520186 - DNA, 201 bp, Homo sapiens
agcgggtgggtgcttccctgcatggctgtgtctgccactgatgttcgaatgttcctccgtccgcctgtctgtggggctggcgtgtccctagagttgcgagytcagtgcatcctttgtcactgccaccctgagccttttctctctcagacagtactgagtgaaggccctggtgggggtgtgtcctcctgtgccgaggagggc

SEQ ID NO: 520187 - DNA, 201 bp, Homo sapiens
cgatttgtcagtgggctgtttggactaaatcagatataaaatagagctgttaacccatagaagatgttgaactgttaagtcgacagaggtttgtcataaayttgtccattggtaaaatgcttgcccgtttatttctctgggtttcctagggacccaaatacaatagagacgctccagtcttttgggaaggctgtcgactgg

SEQ ID NO: 520188 - DNA, 201 bp, Homo sapiens
tacatttaagtaatttctgttaatgggtgacttaatttctaattaaaaatttaaatgcttacattaacttaattattttccagattgtaatgcaagttgarttttttagataaatgtatatgtgcatttttagtgtgtgaatatatgtatgtttgtgtgtatgaacaaaacatctgcatatattgttcttttattagtaga

SEQ ID NO: 520189 - DNA, 201 bp, Homo sapiens
ccaattctcccttttacaaagccttgattgaatctggccttggcacagacttttctcctgatgttgggtgagtttgtgattagattagatcagtagttctmattggttgggggcagttttgctcctccacctccgcaccctgtcccggccccacacttgacaatgtctggaacatttttggatttttgattgctataatcg

SEQ ID NO: 520190 - DNA, 201 bp, Homo sapiens
tctctgggtttcctagggacccaaatacaatagagacgctccagtcttttgggaaggctgtcgactgggctaagtctggaaaattcacacagcaagacatsgacgaagccaaactttctgtcttctcaaccgtagatgctcctgtcgctccttcagacaaaggtattttgagtataacagtgagaatctcaacccacagcc

SEQ ID NO: 520191 - DNA, 201 bp, Homo sapiens
agccctcgtgctgactctaacagcgctcacgcagaagccagtccttgctgaccacgcctgccttcctctcagatacctcggcactgggaagagcacacacrgcctggccatcctcggacccgagaacccgaaaattgccaaggacccatcctggatcatccgatgagcagccgtggcgctcgactgcacaggagcccgaga

SEQ ID NO: 520192 - DNA, 201 bp, Homo sapiens
gggaaggctgtcgactgggctaagtctggaaaattcacacagcaagacatcgacgaagccaaactttctgtcttctcaaccgtagatgctcctgtcgctcyttcagacaaaggtattttgagtataacagtgagaatctcaacccacagcctcacagatgacgttgctgttttccaagttcccggcatgcatgggcaggag

SEQ ID NO: 520193 - DNA, 201 bp, Homo sapiens
agacaaaggtattttgagtataacagtgagaatctcaacccacagcctcacagatgacgttgctgttttccaagttcccggcatgcatgggcaggagcacyagcttctggtgcctccatccttgcttgtgatacgatttccacgtctgacaccctaaacacgcttcctgacatccgggcgagaagagtgcatcctgtcatt

SEQ ID NO: 520194 - DNA, 201 bp, Homo sapiens
tttactcttttcttacctccccgttcctttttttttcaatgcagcatcaccgacacatttgaagccttcacattaagtcttctgtcttcactcttgacttstgggcccaattctcccttttacaaagccttgattgaatctggccttggcacagacttttctcctgatgttgggtgagtttgtgattagattagatcagta

SEQ ID NO: 520195 - DNA, 201 bp, Homo sapiens
gtgaattacgtgggtgaatgcatccgaactgtcccctacacggacccagatcatgccaggtaggagggtgtaggtcgggacctctcaggcctgagccttayggaagagcttgtcaaggctgttcgagttcacagggcgtgttttagcacaggaaaagtctgtgctgactctgagtgttggacctggggctgtgtgagtcta

SEQ ID NO: 520196 - DNA, 201 bp, Homo sapiens
aaaaagcggtcgaagacttccttagaagcatcggtcggagtaaaaaggaacggaggcctgtgcgcccacacacggtcgaggtatgcactggtggtgctggygcccggtgagcgcctggcgggtgccagagcagctctcatgttttacacgcattaactcaattctcagagcagtccagcatgtgggggttcatatcccccg

SEQ ID NO: 520197 - DNA, 201 bp, Homo sapiens
acacttatcatgtaatagatatcctttcccttgctgaagtttttggaagtaaattatagacgtcatgatcatttgcccgtaaatgtttgaatttgtgaccytaaaacatgaggattttttcttacatgagctaatgccattttcagttttaatagaataaaacatactttcttaaaactgcctatttcttattccatattc

SEQ ID NO: 520198 - DNA, 201 bp, Homo sapiens
ttgtctgccagcgttgaaagtttccgatattgaacccaccatacctgtcacagagttggacgtggtcctgacaggtcactgtgaacgctacgcttttcccrggtctcgggttccttgggggaattaaatgtcactcctcacagaagcagtagagtcatgtcttggaggttttccctgaaacacttgagcagccctgtgcgt

SEQ ID NO: 520199 - DNA, 201 bp, Homo sapiens
tgaacgtgcccggattccagtgcatcatttctggttttgtcttctagatataatggctacacgagggaggcctactttagtgtcggcctccaagggattgyggagaaagacattgagaccgtcagaagcctcatagacagaacgattgatgaagtagttgagtgagtgtagcttgtttgtaacaatctgctttcgttcctc

SEQ ID NO: 520200 - DNA, 201 bp, Homo sapiens
tagttggaggcaggtattatttcaaccaacaggtgtccgctgggcgccaacagagctcacgttcgatgcattgagttcagatattctcagaaaatcgcccrtgtagctcagtaggaaacgcaggagtcattgaaaagaagtagcttgaaaagatgtatttattttacagattttgtaaatacttttatcaggtgccgtaat

SEQ ID NO: 520201 - DNA, 201 bp, Homo sapiens
aaaggaaagttaacttagtggaaagcctgtttcgctccatttcgtgtatccagataacctagagtagttgacaaccgtcagacactgtgcctactcacaamgtcacatcattttacagagggaattccagataacatgtggcccggattcatttgctacagatccctctaaacaaacaaccgtcagcgttagcttcctctt

SEQ ID NO: 520202 - DNA, 201 bp, Homo sapiens
ctttggttcagggtgtgcttttctcctctctctgcctggatcgaaacctgccagacatgatgcagctatggagtgaaatatttaacaagtaactttatttkcaagagttgtccattcttggggtgtactagagatctttgtttgaagtactttaaaggagacagttttactcgtgtgtgttgttgttttccaagtctgact

SEQ ID NO: 520203 - DNA, 201 bp, Homo sapiens
tctagttcacacattgggatgcacacgtcgttttagtcttctactcatgattatcagtgtcattttcttctactgcagtgaattttagacaaaagttgttytgtgtgcttcttttcactccttgggcacttagccacacccagcaatgtcctttctggcgcgaggattagggccagcagccgaaacaggaagcattctgcc

SEQ ID NO: 520204 - DNA, 201 bp, Homo sapiens
ctagtgattatactgtgtatccattttccacacaaaatcccaaggactttcagaatctcctctcggtgtatttggatgccacctttttcccatgtttacgygagctggatttctggtatgtcatgaatgattaactagttgatacagactttagtatttgagtcactatcagcttataatgatttgtcctcaggcaggaag

SEQ ID NO: 520205 - DNA, 201 bp, Homo sapiens
caggtagcctggtaccgtcagacgactgctgcggtgggaagcttttctccagtgtctgtcactgttcaattcggccctaattcctttcttctgtgttttcyttggttcagggtgtgcttttctcctctctctgcctggatcgaaacctgccagacatgatgcagctatggagtgaaatatttaacaagtaactttatttgc

SEQ ID NO: 520206 - DNA, 201 bp, Homo sapiens
gcctctgcctctctctgagcgagtttcctctggcttaggtgcggctgatgaagaggattgcagaaatgacagatatcaaacccatcctgaggaagctcccrcgtatcaagaaacacttgttaaatggtgataatatgaggtgcatgtgtgatttgtttctaaatattttatgattcattctattaagtatagtttttaggt

SEQ ID NO: 520207 - DNA, 201 bp, Homo sapiens
ctccccgacgactcacacatggacacctacgagcaggtagcctggtaccgtcagacgactgctgcggtgggaagcttttctccagtgtctgtcactgttcrattcggccctaattcctttcttctgtgttttctttggttcagggtgtgcttttctcctctctctgcctggatcgaaacctgccagacatgatgcagctat

SEQ ID NO: 520208 - DNA, 201 bp, Homo sapiens
agggggtggtgagtggtgtggtgatcacagggacgtggtgtgtgattgagggagagggccggctggcatgactggaagagaagacagtttctttcataccraggagtatggtcacttaccaggaggcttacctaaagtaggagatgaccttccacgccgccccaggagtggggagtctttcgtctgtcttgtgggcatttc

SEQ ID NO: 520209 - DNA, 201 bp, Homo sapiens
ggacaaagggggaatgagtcttgagagtcaataattttagtagaaatctgttatattttacaatttcacttttcatttgtacccagctagtgattatactstgtatccattttccacacaaaatcccaaggactttcagaatctcctctcggtgtatttggatgccacctttttcccatgtttacgcgagctggatttctg

SEQ ID NO: 520210 - DNA, 201 bp, Homo sapiens
tcggacccgagaacccgaaaattgccaaggacccatcctggatcatccgatgagcagccgtggcgctcgactgcacaggagcccgagacaatacacctccragctgaatatgaaaagtcagaaatgctactgctttttccaagaatattatgtcattgagtgtcgccaaagcccttgactggcgagtcaaaaactcagatc

SEQ ID NO: 520211 - DNA, 201 bp, Homo sapiens
ctcagcatgttggttacaaacacagcgtttagagtcccccagaggagggtcctggccccgcagcctgttgcctcacatctagcttggttgcgtggaaagtrggggtgcatggatggtgcccaccttgacacggggtgtgaagcttgaagccctctccttggcacggagaagtgctcttccaatagtggatgcagttactga

SEQ ID NO: 520212 - DNA, 201 bp, Homo sapiens
gcttttgctcacagcatcatcagcctcacgcggcgctgactgcatccctgctgcagaagcaggcgtgggtaggggtcagcgtggcacgtgggagctggagktcggggtgtgatctctgggttgttagacacatccctgtggttgaaacatgcacgtgaaatgacagtgagatgcctgtgtcccctccgggacatgagtgca

SEQ ID NO: 520213 - DNA, 201 bp, Homo sapiens
tgtatacgtaatttttcaaacaggtgttcagtgaatgcgactcctcagcagatgcctcagacagaaaaagcggtcgaagacttccttagaagcatcggtcrgagtaaaaaggaacggaggcctgtgcgcccacacacggtcgaggtatgcactggtggtgctggcgcccggtgagcgcctggcgggtgccagagcagctct

SEQ ID NO: 520214 - DNA, 201 bp, Homo sapiens
ggttatgagctgggacagctgctgaggccagggaccagagcatggggccactgccccatcccaagaatagctacagcttactgtcctaggacaaagggggmatgagtcttgagagtcaataattttagtagaaatctgttatattttacaatttcacttttcatttgtacccagctagtgattatactgtgtatccatttt

SEQ ID NO: 520215 - DNA, 201 bp, Homo sapiens
attcgccttccctagcgtgccattcctctctcttccctagcgtgcagttccgtaccactcccatggacagtactggtgttcctcacattcttgagcatacygtcctttgtgggtctcagaaatatccgtgcagagaccctttcttcaaaatgttgaaccggtccctctccacgttcatgaacgccttcacaggtaagacca

SEQ ID NO: 520216 - DNA, 201 bp, Homo sapiens
gaatgtcctggagctggctaccacaggcttctgagaaccaactgtggtttcccactctgccaatggtgacatcttgttggtgttttgaaattggacatggyggggatatttataccatggaaatagcaaacactacaaattggggttttttccctagagcgccagtttatcttccagtacatcaccgcacttgctgttttc

SEQ ID NO: 520217 - DNA, 201 bp, Homo sapiens
agataaatttttcttgtatccaactaccaaattcataaattttacaaatgagtgttaatttgaacccgcattcactaattaaactgagaccaatgattacrcagatattttgcatatgcacctcaattttgcctttcttccaaggataatttgaaggaaaaatagaaactttggtaagtatcagagagcaataaataacat

SEQ ID NO: 520218 - DNA, 201 bp, Homo sapiens
ccctatgctaggtgtcgaaggccaacaagacaggtctcctgctctggacaacaacaccaccacttccatgttatgtaaagacaattccaatcaaagtgtawagtcttaatccatactggctgccactctatttttcatcttgtcacaagatcaagactcaatatcttaactagagtgttttctaaaatgacaaaacctggt

SEQ ID NO: 520219 - DNA, 201 bp, Homo sapiens
taggaacttggtaataatccaaattacaaatttgtagacgcttttcaccatcagattcaggggtaaatacacacacacacacacacacacacacacacacrcacgcacaaacacacacaccttgattcaaggattagtcattattgctgttccaaaattcctttgtgtatataataataaacttgaaatcatatataattt

SEQ ID NO: 520220 - DNA, 201 bp, Homo sapiens
tcttgctccgtgctacctttattcctttttttttctatataatgagttttcctggctctctttcagggtatcactaaaaataatttaaagtataaaaatamattttaatagaataaaattctataacaggaagggtgggtagtggactgggatatgatttcaaggagagaaagaaatgaagtaccatttccaaccgctgtg

SEQ ID NO: 520221 - DNA, 201 bp, Homo sapiens
ctgagctggtgtaagccagttccagcacaccattgcatgaattcacaaacaaatggctgtaaaactaaacatacatgttgggcatgattctacccttattsccccaagagacctagctaaggtctataaacatgaagggaaaattagcttttagttttaaaactctttatcccatcttgattggggcagttgacttttttt

SEQ ID NO: 520222 - DNA, 201 bp, Homo sapiens
cccaccaccacgcccagctaattgtttgtatttttagtagagatggggtttctccgtgttagccaggatggtctcaatctcccgacctcgtgatccacccrccttggcctcccaaaatgctgggattacaggcgtgagccactgtacctggctgcttatagtattttgaagtgttgcttaatgaatcaattttatgaatga

SEQ ID NO: 520223 - DNA, 201 bp, Homo sapiens
taaccataattatatggatatatacaaaaaattatgtttaacattataaaatagggctaatttgctcatttgaactaagttccttttctctatagagttcyttattttctattcacattgtcactgttatattcctatgaatggatgtaaaactttttcataattggaacataagatgataaccttatttataagcgaaga

SEQ ID NO: 520224 - DNA, 201 bp, Homo sapiens
ttacattttgagggtcaacatctctgttgactttaaagaaattattggcaatagatctgattattgttgggtatagtagaaaattgatgctccataagcamaaggtcattaaaagcctttcaaatgtcattatgacttaattaagataaataattcacaaaatgcaattctgacatttttcaagttcttaaaattcaaaca

SEQ ID NO: 520225 - DNA, 201 bp, Homo sapiens
aaaattggttgcacatttacaataatttatgaagcttacatatctcctgagagtgattgtgtctctctacctattgtaaaaaattatttcttaggcgtcamaacatcatagaaagcattgaagtttgtgtttttcacataattcctcattttttaattcacttgattgcctttataggcatcagctgaatttaaccagtat

SEQ ID NO: 520226 - DNA, 201 bp, Homo sapiens
tggggtttggaaaaccttcagacatgacttttgaagcactttgcccctcaatatttggagttcatgtgcatattaaaggtaatttaatcctgactcatgcrtaaatcattaaaaaattattttgtaaaacatacgtgatttttacatagaataatatttatttacattgttactagcatatttaaatatatatacttttat

SEQ ID NO: 520227 - DNA, 201 bp, Homo sapiens
actttactttgagaaaaatactgattgtcaacatacatccatagtattcagataaaatatgtatataaaatgtgtcaaagttgtaattttactgtttttcwacatattctcttatcacactactgactggattttaaatcataagcagcacactggtttggattaaataactctctgtcttagatgaactattactcaaaa

SEQ ID NO: 520228 - DNA, 201 bp, Homo sapiens
catttgtttgagattcagtgttaactttattgttttcttttaaaacagaattctaattattcatttaccagaaatgtcactattaaggttttctttcttcygagttcaaatatgtatgtcattcagtaaaacaataactttactttgagaaaaatactgattgtcaacatacatccatagtattcagataaaatatgtata

SEQ ID NO: 520229 - DNA, 201 bp, Homo sapiens
caccaatttaaagaaagagacgcacattttctaaaggagaattaagaattacctgtgggtttctttcaactagcataaaatgttcttattccagatatccrtatacctaagtccctcaccaccctgccatcttgctccaatgtgaactcttctaaagagcttacatcgatgattatttaaaatcaacctacgtctatacta

SEQ ID NO: 520230 - DNA, 201 bp, Homo sapiens
ataaaattgatattgataattactatctccatagaacttgagcactttaaaatacctgcatattaacaatttaaaaaggtatattaaacaaaaattattgygtttctttacatgtgaaactcagtgaaacccaaagttgcacaatcctcgttgacaaaactctggttttatcctacatatattatgaatctacatcctaaa

SEQ ID NO: 520231 - DNA, 201 bp, Homo sapiens
ggatgagtggaataacagctgacatgttgatttgtcacatttcattctcacacctgttgaaatggcttattctgcttttgcctttatcgtatttctgtgtytgcaaacattgcttttcatagatgtgtttccattaggattttagtgagctgtatatttttgaagcatatgttctattaaattttctaaaaatagtggtag

SEQ ID NO: 520232 - DNA, 201 bp, Homo sapiens
tcaataaattttcatgttcaccttaagtctgttgtgaatgagactgaggacataatttgtttctatgcaaaattttattccaaacaatcaacacccatacrgataaacagaatgcaatctatctgtaagacaggaagagtgaacaagtgtgatttataattacagttgttacagtgaccatccttttgccattatacaata

SEQ ID NO: 520233 - DNA, 201 bp, Homo sapiens
agaggattacagtgatactttggagaggtgttgtaaagattattgttactagaagaaacaggaaagtttttggtttgaaagatgaaaatggttattatggyataatatacatttagaaagtatgtcatatggacatgataaagaggggatgctttaaaaattagcatttttctataaacaattattttctttgatatgaaa

SEQ ID NO: 520234 - DNA, 201 bp, Homo sapiens
tttgtttctgtcttttctacaaatataccaatgtactttataaattaagaaaaaatatgcatttattttagaaatttaggtatatggtatttatagaagtrcactgtgatgcgctttggatttagatcatccacataagaacccaaaatttaccacttattagttcccctttctcatccataaagtggaagtgataatcat

SEQ ID NO: 520235 - DNA, 201 bp, Homo sapiens
gaggattacagtgatactttggagaggtgttgtaaagattattgttactagaagaaacaggaaagtttttggtttgaaagatgaaaatggttattatggcrtaatatacatttagaaagtatgtcatatggacatgataaagaggggatgctttaaaaattagcatttttctataaacaattattttctttgatatgaaaa

SEQ ID NO: 520236 - DNA, 201 bp, Homo sapiens
ttatattgacttatagatccagtaaaaacaggttaaattttacatgattctcaattctttttagaacgctctatttttataaaattatatgcccaattgawtatttttaagcttcagctgcatctctaaatataggtgtgaagaataacttttgaaattgatgcagagaatgatatacacaattttttttcttttaatgac

SEQ ID NO: 520237 - DNA, 201 bp, Homo sapiens
ctcctgcctcagcctcccgagtagctgggactacaggcgcccgccaccgcgcccggctaattttttgtatttttagtagagacggggtttcaccttgttarccaggatggtctcgatctcctgacctcatgatccacccgcctcggcctcccaaagtgctgggattacaggcgtgagccaccgcgcccggccaactcaatt

SEQ ID NO: 520238 - DNA, 201 bp, Homo sapiens
gtttgaaagatgaaaatggttattatggcataatatacatttagaaagtatgtcatatggacatgataaagaggggatgctttaaaaattagcatttttcyataaacaattattttctttgatatgaaaatgttcaaaatctttagtttttagaccacagatttttttaattgcacgtgaaaatgagctgagaaaaactga

SEQ ID NO: 520239 - DNA, 201 bp, Homo sapiens
gcgacctgaaggaaagattgcagaggaggtatatgactacatcatgcacatccttatgcacttccaggtatggcattcttgataagaaggcagcttgagargtttggaattaaatatacatatagctttggtttactcctgactacttgtacagctatttgattacaaatacatgtatctttccatttggattcagatcat

SEQ ID NO: 520240 - DNA, 201 bp, Homo sapiens
tataaattagagctttcacaactctgaagttcttttcctactaaacaaaccttggaacatatggaaaaattctctggctggcttaatcacttaacttgacytcttttcattatttgcttggtctgtcctcaaaattaaaaggaaactattatatttcatgatgtaacatgcagttcaattatcagtaaataatttaacaag

SEQ ID NO: 520241 - DNA, 201 bp, Homo sapiens
tttgctatctgtctatctatccatgtatttaaatgagataaaattataaattccccaggaacaaccatgttaaattctgtttccatcagggaaagaaccayagaatctcttaccataggtttaactctccttctcaaatgctcaggtcatattggagttcaaagccagggaaaagtcaacctcacttaaaaatatttcaaa

SEQ ID NO: 520242 - DNA, 201 bp, Homo sapiens
aaaaatagtgattcacttacaaggtttaaaatataacagctgataattatcacatataattatatatgatatcaaagaaaacaatgaatgtttcagtcttsttgaaatcctcagatgtaagtgctatgcccatgtgatgttcactctttttttccctgtcttttgtcttcgctcatgttacctcttctatctagaattctc

SEQ ID NO: 520243 - DNA, 201 bp, Homo sapiens
attcaatggtttgtatatattctcaaggtagtacaactatcattttcgaacacattcattactctgaataaaatccctgtacccattagcaatcactctcyattgccacactccttgagtcctaggtaacccccaatagctccttcacctttatagatttgcctattttggatatttcgtataaatgggaatcatataata

SEQ ID NO: 520244 - DNA, 201 bp, Homo sapiens
ccataattggacacggattgtctattgcatcactgcttatctcgcttggcatattcttttatttcaagtaagtaaatttaaaatattttaagaaaattacyagatgtcttgggtgaatgccccatcatgtgcatatttacatcatgtctgacaaaatataccaatatagatgatttataatgtttaaaataagttgaaata

SEQ ID NO: 520245 - DNA, 201 bp, Homo sapiens
ttatagggaatatatcatattttgtttatccattcacaaattgatgaatatttgagctgtttccattttttaattattataaatgatgctaagaatattcrtgtgcaagcgtttgtttggatatctgtctttatttctcgagtttataactaaaagtggaatttctgggtcatatagtaactctatgtttaacatttagaa

SEQ ID NO: 520246 - DNA, 201 bp, Homo sapiens
aatgttgataaaatcatccctcgctagaacctcatgaatgagttccatggagagtgtttgaaatcaatgaagtaagcctcaaaagcagtagaatactgttsttcaacttgataaatacttttattgagggcagaaatcttaacatatctcaccaccttcaccctaccaaactaggtaaaagtagatgctcaataaataggg

SEQ ID NO: 520247 - DNA, 201 bp, Homo sapiens
ccccaattattatttccccactaaggcgtttactgcaacagaacctgggatggatggctctgctggaacgatgttgcagcaggaactgaatcaatgcagcyctgccctgattactttcaggactttgatccatcaggtaaaagcagaaatgtatctacatatctccttgacatctatttaataaatcctaggttaattaaa

SEQ ID NO: 520248 - DNA, 201 bp, Homo sapiens
ttcaggtttcggcatgtcccagtgaggatgaagtatttatattgtgcttccccaagtataacaggccaagaatttacttgggtgcttactaaacatgcagrttcctaaattcttctccaaaaggttctgttccagagcgtcctttgtggggcctggccattttaacattttcaccaagttttgggggtgattctgatgcag

SEQ ID NO: 520249 - DNA, 201 bp, Homo sapiens
tataattatttttcccaaattagccctgtcataaaatcattactagtttcctaacaaaattaaatctaagcttacaggtcagtggcaaatatctgttgatyggaaattttttctctcctttaaaaatattgtttgcgtgttcagtgtattagtccgttttcatgctgctgataaacacatacccaagactgggcaatttac

SEQ ID NO: 520250 - DNA, 201 bp, Homo sapiens
agcactttgcccctcaatatttggagttcatgtgcatattaaaggtaatttaatcctgactcatgcgtaaatcattaaaaaattattttgtaaaacatacrtgatttttacatagaataatatttatttacattgttactagcatatttaaatatatatacttttattcagaaaaatatgaactactaatatcttaaatat

SEQ ID NO: 520251 - DNA, 201 bp, Homo sapiens
aaaaaagtcacgtggaaactaaagtagaattgaagcttaaaatagtgctactatattggaagaaaataagtatataacttgtccaaaaacattattgatgygcatacaagaaaaatttctatttaccaacatcataaatgatgttgccattattttgattatcaaaatatcatgacaatggcaatacattgtaagtatttc

SEQ ID NO: 520252 - DNA, 201 bp, Homo sapiens
gatgtatgcgcaggaaaggcaaaggaactaattagtaagggatggtgagccattagggaccaacaatggaatgctgttatcacagctagacctgaagagasaaatgttagtgcagtgaaatgagcattgggaggagtcacccagtaagagatctgatcttgagtagagaaaaacaaccactgccaaaaccacagcctggca

SEQ ID NO: 520253 - DNA, 201 bp, Homo sapiens
aaaaatagataaatcatttgtttgatagtaaaattcaaatagattttattatatacctctataaatttaatgttatatacactgaattagacaaccctaawtgctacttgtataggatgtaataattaaatatagatgagagtgatatggacaacatgctaaagaacatgcatgaaataggaaaggtagacctctgtatct

SEQ ID NO: 520254 - DNA, 201 bp, Homo sapiens
acaagcgctatcattgcaagggtgttaatgaaagacgctcttatgagagtcaagtgtgtaacgtatcttagttttgacttaatcagaatattggagaataygcttaagatagacaaatggtacacagctatttaaaacatttatctgtatctggttttcaaatccatgggtaaactataaacattcataatttctcaggta

SEQ ID NO: 520255 - DNA, 201 bp, Homo sapiens
atctttatagaaaaaatataataatctttaaaggatcaaaaacttattcactaaacaaaatttatttcatactctatatatgacttttaatacagctttawcaaataattctggttttggagatataatgattacagtatcgacttttcacaatacaaatatgttcaagaaatagtatttaaaatcttttgctttattgcg

SEQ ID NO: 520256 - DNA, 201 bp, Homo sapiens
ccgagtgctaattccaggtaatgaatcccacaccttcagtttcactggttttgctcttcctctaggaattgatgaaacaaatacaaatcaagagtaataaygcaaatacacaagtcattttagagtctgtgtttgtgacaagacataaatgtcttcacctccttaacaatactgtcctcgggatgatgagaaaagatgaga

SEQ ID NO: 520257 - DNA, 201 bp, Homo sapiens
aaatgaaaaactcaaagcaatgaactctgcgtaattcgaaaaatagtacacgcacatggaaaatttaaataaattatattttttgtatcaggctgactttmaaaagtcaataaaaccaggaaaagaatgaattgtacatatcctacataagattaaacttcatagcataatgttttaaaaactacagtgttcagtctcaat

SEQ ID NO: 520258 - DNA, 201 bp, Homo sapiens
actggtatgcaacttaaaattatatcagaattatatattttctgattttattgttggtgggaaaaacaaaacaagacatgttttcacatagcatttgactsctgactttgtggaaggaaaataagtataaggctctcattccaaagagctggaaagatgtgttttgtttcagtgctctttgagcaattaattctttccata

SEQ ID NO: 520259 - DNA, 201 bp, Homo sapiens
cggattgtctattgcatcactgcttatctcgcttggcatattcttttatttcaagtaagtaaatttaaaatattttaagaaaattactagatgtcttgggygaatgccccatcatgtgcatatttacatcatgtctgacaaaatataccaatatagatgatttataatgtttaaaataagttgaaataagttgatcttagc

SEQ ID NO: 520260 - DNA, 201 bp, Homo sapiens
tagtaatctctctcatagtggaagttcttgtgattctcaacttttttccacatctgataatgtaccaaatgttggccaattccatctcacagaaagtacasgaatgctgaatttcttctaatccttgtggcttaggaaacacatcttaagagttaagctctgaagtccactgattcaaaatgacttatgaattatagtaga

SEQ ID NO: 520261 - DNA, 201 bp, Homo sapiens
ctaccacaggcttctgagaaccaactgtggtttcccactctgccaatggtgacatcttgttggtgttttgaaattggacatggtggggatatttataccayggaaatagcaaacactacaaattggggttttttccctagagcgccagtttatcttccagtacatcaccgcacttgctgttttctactgtgacagactgcc

SEQ ID NO: 520262 - DNA, 201 bp, Homo sapiens
ataattaaatatagatgagagtgatatggacaacatgctaaagaacatgcatgaaataggaaaggtagacctctgtatctacagaaacagattttaattcyatgaactaatttttaaatattcaaaacacactcactagtaaaatattttgtaataggaggcagtgtagaataaacacagcaatgcatttaatcaccaaag

SEQ ID NO: 520263 - DNA, 201 bp, Homo sapiens
aataggaaaggtagacctctgtatctacagaaacagattttaattccatgaactaatttttaaatattcaaaacacactcactagtaaaatattttgtaayaggaggcagtgtagaataaacacagcaatgcatttaatcaccaaagatgctacttttcatcttggctgtgatattttggcaaatgctggcaaatttcagg

SEQ ID NO: 520264 - DNA, 201 bp, Homo sapiens
aaaagggacacagaaccttgatcttctgccatgtcctaaaattgagaaaattttgacattggaaaattacaataatacacaatgtttgagctaggttgttsccaaatctttcagttcctcacaacatttctaatatctgttccttttcttcatctctggagatacaatccctgtttcagtatgattcatttctcttcttaa

SEQ ID NO: 520265 - DNA, 201 bp, Homo sapiens
cataaatattgatgaattatatttcttttattttctgttgcagtttatgttatacagcatatttcattttggcttaatgatggagaaaaagtgtaccctgwattttctggttctcttgcctttttttatggtaagcataaaaatatatatgattatgtctgttattgcttccagtatacctataattgataaagaatatta

SEQ ID NO: 520266 - DNA, 201 bp, Homo sapiens
tctttcctttcactattacagtgttccattgtatgaatgtaacacaatgtatttatcctttttcctgctgaggaacatctggattgcttccacagttttgmtattacaaacaatgaggctatgaacattttgttaacatatctcctggtacacatatgtccatgattttttgaggatatatttttcagtgagatttcagga

SEQ ID NO: 520267 - DNA, 201 bp, Homo sapiens
ttatatatttagatatttttaaatttaatttagaatttaattgagaaattattataatattacttggtgggaagccaaataatttctatatatagattttyatataatgtctgcattttcagtagatagcctttactccacatcagtgtgaaaccacttttaaaactatgtcttcatgtataagtagaaggatttaattat

SEQ ID NO: 520268 - DNA, 201 bp, Homo sapiens
gtaaactcatcattgtaaggctatcagatcacatatttctaaaaatatagtttattcaactgaatttgaacttctgcatgtgtgggattacagatacttayagtattgatatgaaccaaatttttttgtttatacaaattacagactgcactaaatttgttttacctgaccataattggacacggattgtctattgcatca

SEQ ID NO: 520269 - DNA, 201 bp, Homo sapiens
aggcgtgagaactataggttttcttaaatgttttattgggtctatctccaaattaatgaattttaatcagttagtgtacataaaaatccatccctctccarctgaatgttgtgagaggtgaaaacattcttatgccataaagtgagatggtgccaaaatgtttccaatatgtccattttagttatataataaaataattgc

SEQ ID NO: 520270 - DNA, 201 bp, Homo sapiens
taggggatactaggattaaacaatatggtccatagaagtacctcataagaggtacttatgaggtgcctggccctatgctaggtgtcgaaggccaacaagayaggtctcctgctctggacaacaacaccaccacttccatgttatgtaaagacaattccaatcaaagtgtaaagtcttaatccatactggctgccactctat

SEQ ID NO: 520271 - DNA, 201 bp, Homo sapiens
attagataatttggacttaagatataaaaaatataaagctataaatccacattaaatatcacatatctttattcctacagatatatttgataaatatgcamattctgaatcatgaatttaatcttttctgtttgagctaattaaatgtgctatttaatttaagcatacctaagttttcctggcaatagaatgacaataaat

SEQ ID NO: 520272 - DNA, 201 bp, Homo sapiens
aaaaagagaaatatggtatatccttttatcccataataagagaataagatgtcgtgtgtgtgtgtgtgtgtgtgtgtgtgtgtgtgtgtgtgtgtgtgtgkggttatactcacaataatgacatttttggaagataatatataccagcagctcatttttaagtacttacctttcaagacaaattgaggtgggagcagggta

SEQ ID NO: 520273 - DNA, 201 bp, Homo sapiens
gcctcatagatttaatatttgacttctaattttttaaaaaattattaaaaaaataaaaaggcatacaacttataaattttgataatttcactggatagatrtttttcattccagacacgttcaagtatttattggtttgtaaactcatcattgtaaggctatcagatcacatatttctaaaaatatagtttattcaactga

SEQ ID NO: 520274 - DNA, 201 bp, Homo sapiens
gggatgatgtgtgtgccaatgtttgtctggtgggtagacactggttgtttcttagtccagtttcacattaataagaatgcctctacagtcctaggaaaatytgtcttcaatgtcagtatttccataagtttttcttcaacttctgtgtatcactgtatatttggcataaagatagaagatggcatatcatgaataggatgc

SEQ ID NO: 520275 - DNA, 201 bp, Homo sapiens
tttatgacatcatgttatatcgctttttaaaaacaataaaaatatgtgacagtgatctttttagtatgattctttttatggtacaaagatatttaaatcarataagtattaatattaacacaaaaacacaaatcttaatgacagttgactttttcagtttatgtaattgtgtatttcttttttttttaacaacctgcttga

SEQ ID NO: 520276 - DNA, 201 bp, Homo sapiens
ccatggcctatttaaatagctttaataatgtagtttacattatttttaaatcaatattttaccacaaatattacttatgttactactgaatctttaatcawctttcaggttctgtagttgttcattacaggtcaaaggcatgttaaaattgttttaaaaattattaagagttatgcttaaattggaaaataaataagcata

SEQ ID NO: 520277 - DNA, 201 bp, Homo sapiens
ccaagtgttaggcacataccagtggctcaataagcatttgttgaatgtgtgaataaagttaaacttttccaaggtacagcatgacatttaataatttcackgcaggttatgctttggacagttgctgtcttcaatggtgtatgcagtcatggcactaaacttacatttctataaactcaaatattttgtaccaaatttctt

SEQ ID NO: 520278 - DNA, 201 bp, Homo sapiens
gattcctgcttgtatacatgccattgctagaagcttatattacaatgacaagtaagaaaatctctttttattatttctactggaataatgtaaaataaaamttttcaacataatgttattatgttttctctagttgctggatcagttctgatacccatctcctctacattatccatggcccaatttgtgctgctttactgg

SEQ ID NO: 520279 - DNA, 201 bp, Homo sapiens
tctgttccttttcttcatctctggagatacaatccctgtttcagtatgattcatttctcttcttaagaaatactgtgatccctccctttttgtctcaatgyctcttactttttcccactctcataacatgaagaaacaactgccaaattcattttgttccaactatgtcatgtacttcttaaaatcatttgctcaggctta

SEQ ID NO: 520280 - DNA, 201 bp, Homo sapiens
accttaatcaaagtagatattttaagagcaaacagtcatatatttcaatagccattttccttccaaattgaatttaagctttcctttttaagactataagyactagactcacagctaagatattacttcctctcagctttttctcatactttatatagaattttttatacaaagctatatgccacttcccctcaaccagaa

SEQ ID NO: 520281 - DNA, 201 bp, Homo sapiens
tatgaattataaaagctttgaagacaaaacatgccatgaaaaatattaatggaatgtaaagtacaatgtaattgtaatacatttcctaatgtgaagatggkacacttaattttttaaattaagaaaatgaagctatattattcactgattaacataactttttttaaaaaagctcttctccaagacctatttaattgtgct

SEQ ID NO: 520282 - DNA, 201 bp, Homo sapiens
agtttatttttctcgatcatacccacagacatatatgagaaagtcaaagcacactctcaaaactgtagcatatttttagtatttaggaaaaagaaaaaacmgaatgactagatattatgctgctaatatttgctgatgaaacattaagatgtcaaaaaccaagaaggtcttacatgaaagagatgggaataatttaaaaac

SEQ ID NO: 520283 - DNA, 201 bp, Homo sapiens
ctcttggtttcctgctcactagaagaccaggaaaagcagtcttaccaaagcagttcacaaatggtagaaaatcagttgtccatacaaaatggacatggctrttccttatgcagtctgatactactatatttcattaaataagcagcccaagggcatgggaagagggagcataatggaggaagagcaataatttatcctcta

SEQ ID NO: 520284 - DNA, 201 bp, Homo sapiens
tatcctctaggaccttcattgagcaccttggttgaaatactcaccctctttctaatctggcctaatctaatttggatcaccagcagcctccaaaagagagstattgaaagaggttatatctacttctcatatgtaaacatgtgattccatcaacttgagagttccattgaatagacaaaagatagtcacactactgattct

SEQ ID NO: 520285 - DNA, 201 bp, Homo sapiens
agtacaattgttatgatctactcatttgctgacacatcagttatatcttgtggcatatccattgtggaaactggatgaacaggatgtataatatgcaatcytacttctatatcattaggaaaacatcttagttgatgctacaaaacaccttgtcaacctcttcctgtcttaccaaacagtgggagggaattcctagctgta

SEQ ID NO: 520286 - DNA, 201 bp, Homo sapiens
acaaccagatgccagcatcagaagtctgtttgagaactaagagaacagaaacatctatcataagatatatttattttaaaaacacaaggtcactattttaytgaatatatttgttttgataactcataccttaataataggtgtgtttgacatatttcttttttcattttgacaatgaactcacattctaatccagaaatt

SEQ ID NO: 520287 - DNA, 201 bp, Homo sapiens
cgtctctactatatgccgccatcacgcccggctaattttttgtatttttaatagagactgggtttcactgtattagccaggatggtcttgatttcctgatcctcgtgatcagcctgcctcggcctcccaaagtgctgcgattacaggcgtgagccacagtgcccggcctatatgtatctgagttttaaatatgtttttaaa

SEQ ID NO: 520288 - DNA, 201 bp, Homo sapiens
tctgtgtacaaattttgttgcaaaacattttagagcagggtaaagattttcacgagaaaagattagaagagatttacatcacagcaatgcacacgtctgcaaaaaaaaaaaataataaatgacagacaccataacttcacagattttaaagtgttacgtgctcatctaatgatctatttccctgtcactttatcttctttc

SEQ ID NO: 520289 - DNA, 201 bp, Homo sapiens
ataattaacaatatattactgctatttctactagttaatgaaaacaaatgaaataatatttgcatttattgatttttgttaaagtgaacacatttctatgwaaagtatttgagaaatgcctaggaagggtgtggcttataagaaaagcacagtcatttactgtgattttatgggaagttcctgctgtggctaaatgtactc

SEQ ID NO: 520290 - DNA, 201 bp, Homo sapiens
ttataaccagataattaaaatattcctcaataatatcctattaaggtcaattttgtgtttcctttatgaggaaaatatgattttgaatgcttttataacayctcagattctacatatttgataccatatttggtgggaaattgtagacatatgtacagttggtaaaaaaaaaaaaaccatacatacatgtaactttgaagc

SEQ ID NO: 520291 - DNA, 201 bp, Homo sapiens
taatcccagcactttggaagtccgaggcgggtggatcatgaggtcaggagattgagaccatcctggccaacatggtgaaacccgtctctactaaaataccaaaaaaaaaaaaaaaaaaaaaaattagccagacgtggtggtgcgtgcctgtaatcccacctacttgggaggctgaggcaggggaaatagctcgaacctggg

SEQ ID NO: 520292 - DNA, 201 bp, Homo sapiens
ttgctttacagattaatgtggacaaagtatttgataaacacataaacactaactgaatttcagttaatagcatcattatatatttctaactagatcatatytggaaacattgtaaaaatattttgctaccaattttatctacatggcaaaagtttgatagtaacttaattttaaaagattgttctagatctttatagaaaa

SEQ ID NO: 520293 - DNA, 201 bp, Homo sapiens
gggagggttgtagctggggtgagggataagaaattatttaatgggtacaatgtatactattcaggtgatggttacactaaaagcccagacttcacaactaygcactatattcatgcaatacaagtgcacttataacccttaaatttatacaaataaaaaacaaaaaaataaagtaaaatttgggaggttttatgtcttatt

SEQ ID NO: 520294 - DNA, 201 bp, Homo sapiens
tggtccactttttcccgtgagctattaggtagtaggagacatacacaaagtcttcctgagccacaggaaaaacaacaacaacaacaacaacaacaacaacaaacagtgtcaggagagatttggttttaaggctattttggctttaggttactaggagtaaaaactgtttctgtataacaatcatttttttcttttcatata

SEQ ID NO: 520295 - DNA, 201 bp, Homo sapiens
ttgataaaatcatccctcgctagaacctcatgaatgagttccatggagagtgtttgaaatcaatgaagtaagcctcaaaagcagtagaatactgttcttcwacttgataaatacttttattgagggcagaaatcttaacatatctcaccaccttcaccctaccaaactaggtaaaagtagatgctcaataaatagggtaag

SEQ ID NO: 520296 - DNA, 201 bp, Homo sapiens
ctttatccagtctatcattgatgggcatttggtttggtttcaagtctttgctattgtgaatagtgctgtaagaaaacatacgtgtacatgtgtctttatartagaatgatttataatcctttgggtatatacccagtaatgggattgctgggtcaaatggtatttctggttctagatccttgaggagtcaccatactgtct

SEQ ID NO: 520297 - DNA, 201 bp, Homo sapiens
tgttattttccgctgaaatctctaaagaacaagaatgacttcaattagtaaaagtcaattttgggaaaagtcatgggtatctgttttttaagtgtgtcaakttgattaaaatggatgaaacaaattactcatcataagttgtttcttaagctgtcaatatgtcaatagatggtgagttcagaacttatttcaaattgctaa

SEQ ID NO: 520298 - DNA, 201 bp, Homo sapiens
gttattttccgctgaaatctctaaagaacaagaatgacttcaattagtaaaagtcaattttgggaaaagtcatgggtatctgttttttaagtgtgtcaagytgattaaaatggatgaaacaaattactcatcataagttgtttcttaagctgtcaatatgtcaatagatggtgagttcagaacttatttcaaattgctaag

SEQ ID NO: 520299 - DNA, 201 bp, Homo sapiens
ctatttttgaaagtcttctttcatgtttgctttcctttattccaacttacttcttacaaatatatcttacttgctgtttaagcaaaccttctcaatctttwcgtcatagttttaaaactatgaaattttgttgtttatagatatggacttagccaatggacttagatatatgtgtgctcagcagaaaatgacaaaatcgcc

SEQ ID NO: 520300 - DNA, 201 bp, Homo sapiens
ttctatatatagattttcatataatgtctgcattttcagtagatagcctttactccacatcagtgtgaaaccacttttaaaactatgtcttcatgtataartagaaggatttaattatccccaattattatttccccactaaggcgtttactgcaacagaacctgggatggatggctctgctggaacgatgttgcagcagg

SEQ ID NO: 520301 - DNA, 201 bp, Homo sapiens
atgaacagaaagtaattatgtcactgctgtggcattttatcaaaaatacgattgtctttctcttagtgttgaatttctctaagtaatagcaggaatcatgmcactcctttgttcaaaagtttcaaagattctttttttctatagaatataatcaataacctgtagataagccctgattactttctgcgtcactactcctat

SEQ ID NO: 520302 - DNA, 201 bp, Homo sapiens
atgaactaatttttaaatattcaaaacacactcactagtaaaatattttgtaataggaggcagtgtagaataaacacagcaatgcatttaatcaccaaagwtgctacttttcatcttggctgtgatattttggcaaatgctggcaaatttcaggagcctgtgtctatctttcttaaagggaaattaaagcaagttctctac

SEQ ID NO: 520303 - DNA, 201 bp, Homo sapiens
agtaatagcaggaatcatgccactcctttgttcaaaagtttcaaagattctttttttctatagaatataatcaataacctgtagataagccctgattactktctgcgtcactactcctatacactacaaagtcaagccaaagtaaaccactctttaatatgaaaatactagctggttccagttgtttctattttgatggat

SEQ ID NO: 520304 - DNA, 201 bp, Homo sapiens
ggaggtatatgactacatcatgcacatccttatgcacttccaggtatggcattcttgataagaaggcagcttgagaggtttggaattaaatatacatatarctttggtttactcctgactacttgtacagctatttgattacaaatacatgtatctttccatttggattcagatcattctatttttcttttacagggtctt

SEQ ID NO: 520305 - DNA, 201 bp, Homo sapiens
tatacactacaaagtcaagccaaagtaaaccactctttaatatgaaaatactagctggttccagttgtttctattttgatggattccagctggatttcacwtatttgttggcatatgaatgtcttacacacactcagcaatcattccaagagccatcttgcccatgaatcccttcatagaagtcttgtagaaggaatatat

SEQ ID NO: 520306 - DNA, 201 bp, Homo sapiens
tcactgcagcccccaactcctgggtttaagggatcctcccacctcaggctcttgagaagctaagactatacgtatacactactatgcttggataatttttwaaaatttttttttatagagacaggatctcactatgttgcccaggctggtcttgaactcttgggctgcagtgatccttctgccgtggcctccacaactgct

SEQ ID NO: 520307 - DNA, 201 bp, Homo sapiens
acagcaaatacaaagtgttcaaattaattagctgcaggagttttgatcaattatctaacttaactgaatcccaatgtttgcaaaatgaattaaactattarttatgttcagaaattaatagagaaagtcatgtagaggacttgtacaggcaaattttctatccctatgtatatctacctcttctggagcaactcatttgtc

SEQ ID NO: 520308 - DNA, 201 bp, Homo sapiens
tgatcttgagtagagaaaaacaaccactgccaaaaccacagcctggcagaatagaagcagcagaaacaaagactcaaatttatctttattcccatactctwatcttttggtttttccaattagccagatgcagcaaatgtctcagggcaaggaagtctgggtgaagctgttcacagacatcatcctcctgtggcacagaga

SEQ ID NO: 520309 - DNA, 201 bp, Homo sapiens
tggaagaaaggtaatttcagaggcaatatactctaaactgaatttttaaatatagaaaaccgtggcatcccaccctaattccaatatcctgggcacacagkctatttaagataaagagatttagtgataaaattaggtaaagatctccttaaagtttccaaaatagaagcctttggcttgaattatatatggtggattata

SEQ ID NO: 520310 - DNA, 201 bp, Homo sapiens
aattaagtacacatatatgtatattttcaagtctgacatatatatatattttcaagtctttatatcttggggaatattgagaaatatttacctttctacaytggaatatagctacatatactctacagagtattccctcagagtattctcagtattccccaagatacagagtgaacataaaaaagtgtaataatttctttg

SEQ ID NO: 520311 - DNA, 201 bp, Homo sapiens
actctaaagtcattggattagaaaacacactggggtataattagcaacataaaaatctggctaatgtcctgccattttagagtgaatttctgtaagacaargagattcagagttttgtcttgaagctgcagagcatgagattctaaatctcatatttgtacgcaaagatgtgtttaataaacacattataaattgtcatat

SEQ ID NO: 520312 - DNA, 201 bp, Homo sapiens
cattaatgtataggattttgtgtgtaggggagaatgttccatgtttcctgagctaaactagagtattgctttacatgtgaattcataaacaagtaaatatkggggttttttttttcctcacaggttagttgcaaagtgtcccagttcattcatctttacctgatgggctgtaattacttttggatgctctgtgaaggcatt

SEQ ID NO: 520313 - DNA, 201 bp, Homo sapiens
acctatttaattgtgcttcaaaaacagtgtcttcatttcaattaatgggttgttcttgttctttctgttttccttttgattgataggttcaagcaattctragaagaaactggaatcaatacaaaatccaatttggaaacagcttttccaactcagaagctcttcgtagtgcgtcttacacagtgtcaacaatcagtgatg

SEQ ID NO: 520314 - DNA, 201 bp, Homo sapiens
atgactgtcctagtgaacacttaaatggaaaaagcatccatgatattgaaaatgttctcttaaaaccagaaaatttatataattgaaaatagaaggatggytgtctcactgttttgtgcttctcctaactcaaggacttggacccatgactctgtagccagaagacttcaatattaaatgactttttgaatgtcataaaga

SEQ ID NO: 520315 - DNA, 201 bp, Homo sapiens
ctcattcaggttgttggcagaattcaattccttgtggttgtaggactgaagtccccatttccttgctggcttgaggccactttctagtccttgcatgtggrctccacagcagagtcagcaacaaggaatcaactctttctcaggctttcatcttttctgcttccccttgtgctgcatctctttgacccttcaccctttctt

SEQ ID NO: 520316 - DNA, 201 bp, Homo sapiens
attctattatttcaaaactttgcccataatgatattgtttgggtcttaaaaagagaaatatggtatatccttttatcccataataagagaataagatgtcktgtgtgtgtgtgtgtgtgtgtgtgtgtgtgtgtgtgtgtgtgtgtgtggttatactcacaataatgacatttttggaagataatatataccagcagctca

SEQ ID NO: 520317 - DNA, 201 bp, Homo sapiens
ttctattatttcaaaactttgcccataatgatattgtttgggtcttaaaaagagaaatatggtatatccttttatcccataataagagaataagatgtcgtgtgtgtgtgtgtgtgtgtgtgtgtgtgtgtgtgtgtgtgtgtgtgtggttatactcacaataatgacatttttggaagataatatataccagcagctcat

SEQ ID NO: 520318 - DNA, 201 bp, Homo sapiens
gctcttctatcacgttatttattttatttcactttttaattgacatgaaataactgtgcatatttatggggtacatagtgatgtttagaaatctacaatayatagtgattagatcagcataattagcatatccatcttcccaaatatttataatttctttgtgttgggaaaattcaatattcttcttctagctatctttaa

SEQ ID NO: 520319 - DNA, 201 bp, Homo sapiens
ttcaccttgttagccaggatggtctcgatctcctgacctcatgatccacccgcctcggcctcccaaagtgctgggattacaggcgtgagccaccgcgcccrgcctattcctcttatctagctgtaattttgtatcctttaacaaatctctccccatctccactctccccttaccctttccagcctctagttctactttttt

SEQ ID NO: 520320 - DNA, 201 bp, Homo sapiens
aactagcaatctagcatgctttgtctcagagagtattagagatcatagtgcaattacagtccttaggagtggtattttagttacagctgctattcattttkttgttgttgttgttatactttaagttctgggatacatgtgcagaacgtgcaggtttgttacatacatatgcatgtgccatggtggtttgctgcacccgtc

SEQ ID NO: 520321 - DNA, 201 bp, Homo sapiens
tagtattccatggtgtatatatgccacattttctttatccagtctatcattgatgggcatttggtttggtttcaagtctttgctattgtgaatagtgctgyaagaaaacatacgtgtacatgtgtctttataatagaatgatttataatcctttgggtatatacccagtaatgggattgctgggtcaaatggtatttctgg

SEQ ID NO: 520322 - DNA, 201 bp, Homo sapiens
ttaagaaaaatgctttactttttttcccttgatggtagctgagttacttatattgtattactaaaaacatgtatatttgcatgaataagcagttcctctckctaaacaatacttggcactcaatagacatggggtaagctcaaagcaggcattttaaaataagaccatatgaacaaatgttatatgtctataactttcata

SEQ ID NO: 520323 - DNA, 201 bp, Homo sapiens
tctgagaggaacagaaatatagaccatcatagaggacattgaactttatacaaagaggattaacctttaactgtatacaagaggattaaattttttatcarctaactacagttagcattttattttactcccttccaatcttttcacatgtgaatattattaatataaacagttaaaatataaatgtatttattatgttcc

SEQ ID NO: 520324 - DNA, 201 bp, Homo sapiens
ctactgattcttttaatatacttgttgttttctgcctatggtttgtggcagtgttcagattgacagggctttccttttggatatgttgctagtgttttttkggggaaaagatctgagaatttggaaattaaattagataagctagaataagaaagcaatactttgtagactgtgctattcttatattgcttgtactttctc

SEQ ID NO: 520325 - DNA, 201 bp, Homo sapiens
aaagtcttcagattaaatggtctctttttattttgcatgtcataagttgaaatatccgagcacattaaatttttgaagaagataaagttgcaaagtataayaattacatttgcctgtcaaaaccagtggctacagggaaggacaatggtttctagaattctaagtcatacagtcccaaacaagttagaatttagtaaagat

SEQ ID NO: 520326 - DNA, 201 bp, Homo sapiens
gaccaatattttactgtataggacccacctacccctgatctctagcttcaaacagaggggaaggaagtcattaaactgcaaatttattcagcagaagaggwttcaaatatataaaaatggagtggttacattcctaaatttatttttcacaatattcaccagatttataattatttgttcaacacttttctttcctctatg

SEQ ID NO: 520327 - DNA, 201 bp, Homo sapiens
attgttgatgatacaaataatgtttattcaacaaatatatagtggctagtttttttgctcctagagtatctttgaatttttgtatttaattacatattttygaaataccatctgtagaaaaaatgcctatttattttcttttttttttgttattacaggatttccactgattcctgcttgtatacatgccattgctagaag

SEQ ID NO: 520328 - DNA, 201 bp, Homo sapiens
actaattagtaagggatggtgagccattagggaccaacaatggaatgctgttatcacagctagacctgaagagagaaatgttagtgcagtgaaatgagcaytgggaggagtcacccagtaagagatctgatcttgagtagagaaaaacaaccactgccaaaaccacagcctggcagaatagaagcagcagaaacaaagact

SEQ ID NO: 520329 - DNA, 201 bp, Homo sapiens
aacaaatatatagtggctagtttttttgctcctagagtatctttgaatttttgtatttaattacatattttcgaaataccatctgtagaaaaaatgcctayttattttcttttttttttgttattacaggatttccactgattcctgcttgtatacatgccattgctagaagcttatattacaatgacaagtaagaaaatc

SEQ ID NO: 520330 - DNA, 201 bp, Homo sapiens
ttattacaggatttccactgattcctgcttgtatacatgccattgctagaagcttatattacaatgacaagtaagaaaatctctttttattatttctactrgaataatgtaaaataaaaattttcaacataatgttattatgttttctctagttgctggatcagttctgatacccatctcctctacattatccatggccca

SEQ ID NO: 520331 - DNA, 201 bp, Homo sapiens
tttcgaaataccatctgtagaaaaaatgcctatttattttcttttttttttgttattacaggatttccactgattcctgcttgtatacatgccattgctakaagcttatattacaatgacaagtaagaaaatctctttttattatttctactggaataatgtaaaataaaaattttcaacataatgttattatgttttctc

SEQ ID NO: 520332 - DNA, 201 bp, Homo sapiens
gtgagcacacaggtttggttttattaaccaaaatgaagataaatttttcttgtatccaactaccaaattcataaattttacaaatgagtgttaatttgaayccgcattcactaattaaactgagaccaatgattacgcagatattttgcatatgcacctcaattttgcctttcttccaaggataatttgaaggaaaaatag

SEQ ID NO: 520333 - DNA, 201 bp, Homo sapiens
aaacaagcaatcagttaaatagagagtatctgaagagattttattagattccaaaacattgttctttgagacaaattcaggtctaccattaataatctgayccctcagtccaaatttcaggaatagtccattagacccccaaactaattctaatagtcaatgcagtgttgatttcccttatgtagacattataaaaaactt

SEQ ID NO: 520334 - DNA, 201 bp, Homo sapiens
ctttgggtatatacccagtaatgggattgctgggtcaaatggtatttctggttctagatccttgaggagtcaccatactgtcttccacaatggttgaactratttacactcccaccaacattgtaaaagtgttcttatttctccacatcctctccagcatctgttgtttcctgacattttaatgatcaccattctaactgg

SEQ ID NO: 520335 - DNA, 201 bp, Homo sapiens
tgtaaaagtgttcttatttctccacatcctctccagcatctgttgtttcctgacattttaatgatcaccattctaactggtgtgagatggtatctcattgyggttttgatttgcatttctctaatgaccagtcatgattagctttttttcatatgtttgttggctgcataaatgtcttcttttgagaagtgcctgttcata

SEQ ID NO: 520336 - DNA, 201 bp, Homo sapiens
cctgttcatatcatttgcccactttttgatggcgttgattgtttatttcttgtaaatttgtttaagttctttgtagattctggatattagccctttgtcasatgggtagattgcaaaaaatttctcccattctgtaggtagcctgttcactctggtgattgttttgctgtgcagaagctctttagtttaattagatcccgt

SEQ ID NO: 520337 - DNA, 201 bp, Homo sapiens
gggttttttccctagagcgccagtttatcttccagtacatcaccgcacttgctgttttctactgtgacagactgcctttgacaaacacattttcataatcyttttcatgaagttgatgttgttgtttttttaatcccttagattcttgttacagcagaattagaagagagtcctgaggactcaattcagttgggagttact

SEQ ID NO: 520338 - DNA, 201 bp, Homo sapiens
ctgtaggtagcctgttcactctggtgattgttttgctgtgcagaagctctttagtttaattagatcccgtttgtcaattttggcttttgttgccattgctyttagtgttttagtcatgaagtctttgcccatgcctatgtcctgaatggtattgcctcgcttttcttctagggtttttatggttttaggtcttacttttaa

SEQ ID NO: 520339 - DNA, 201 bp, Homo sapiens
ctttagtttaattagatcccgtttgtcaattttggcttttgttgccattgcttttagtgttttagtcatgaagtctttgcccatgcctatgtcctgaatgrtattgcctcgcttttcttctagggtttttatggttttaggtcttacttttaagtctttcatgcatcttgagttattttttgtataaggtataaagaaagg

SEQ ID NO: 520340 - DNA, 201 bp, Homo sapiens
tgtcatatggacatgataaagaggggatgctttaaaaattagcatttttctataaacaattattttctttgatatgaaaatgttcaaaatctttagttttyagaccacagatttttttaattgcacgtgaaaatgagctgagaaaaactgaaatattcttcaactgaatatgttccacagtaattataccataatttaatt

SEQ ID NO: 520341 - DNA, 201 bp, Homo sapiens
atgagctgagaaaaactgaaatattcttcaactgaatatgttccacagtaattataccataatttaattttacttttttaaaacttgtttattaaaattgrtgtacttgttaaattgataaatcacaattccagaaatataaattaatgccttaggcaataataccctttaaaaatattcttgtacattaaaaatatttta

SEQ ID NO: 520342 - DNA, 201 bp, Homo sapiens
caacacttttctttcctctatgtagtaagctccatgaagacaaatatcatgctcccttttttagaatgtagcacaatttctggcatatgggagtcactcaraaacaaaggttgctgctactgccctgctgctgctgctgctgatttgtattcttcgtatcctaacttcttttcttttgtgtatctttcgcttatcctgtca

SEQ ID NO: 520343 - DNA, 201 bp, Homo sapiens
taagctccatgaagacaaatatcatgctcccttttttagaatgtagcacaatttctggcatatgggagtcactcaaaaacaaaggttgctgctactgccckgctgctgctgctgctgatttgtattcttcgtatcctaacttcttttcttttgtgtatctttcgcttatcctgtcacgaattgtcttctcattctattaat

SEQ ID NO: 520344 - DNA, 201 bp, Homo sapiens
cttttcttttgtgtatctttcgcttatcctgtcacgaattgtcttctcattctattaataaagacattaatataaaactcaatgttgcacatgaaatcttrtaaatgggggtccagattacctatttgtttggcaacaataaatacatatgaattataaaagctttgaagacaaaacatgccatgaaaaatattaatggaa

SEQ ID NO: 520345 - DNA, 201 bp, Homo sapiens
aatggcttaaatgtaataattttctttttttaaattactttgttgagtttagacattgttgaatcattttttaatgtgtcttataatttctgttactctgyatatttaaaagtcttggcttagtgattttctcttaaatgcaaagaagataaaaactcaatgtagccaaaattcagaaaatgttaatttctagtcctataa

SEQ ID NO: 520346 - DNA, 201 bp, Homo sapiens
ctcaagatgcatgtgaccaccgccttgaaatacagtcagttttccacatacagtgttattgaaattacggcaaataaatgaaaatatgtataataagcttrcttatatttacaaaaattttaatgtggtataataagtcatatttagtgcattctaagaagtttgtattatctaattttattttacaatagctttctggtg

SEQ ID NO: 520347 - DNA, 201 bp, Homo sapiens
agtggtgttggttggaccacacatgtccatgaccaagctaaatttaatcagaggattgtgctagtctgaccagatttcaatcagttcctacttcagtgatsaagagggaggtcttacttgaaccagagagaatggattctctatagggaaaaaggttcattttattaagggcaataaagaagatgtgctaatcagacagta

SEQ ID NO: 520348 - DNA, 201 bp, Homo sapiens
cttcaagatgtgagaactgcactcaggtatttccccaccacccattttattctatggtattctctatagtagtgattggaacccactcagatacccatgaktgaatttcaggaatccatttactttacttgcacttgccaagctctcacatccttatacacgaaaccttttaaaataactcttttaaatatttttctgcat

SEQ ID NO: 520349 - DNA, 201 bp, Homo sapiens
tttagtttcttcagggtattttatattttgataaaaatgcaccatcttaagattcggtgagggagggacagtcacattaggaaaatgtttcgctgttgttsttaaggtctattaaactctgtcaagcatgacggggcatttttttttaacacatcctggtccagttaagggtgcaaatcagaaaaagtgcttggcacaaca

SEQ ID NO: 520350 - DNA, 201 bp, Homo sapiens
aagttattacaacttttgatagagtttatattaatttttttaagattacctcaactgtcttttttctccatgtgctttcagtacatttctttcagtatttytagggagatctgaattcaagaagtaaaaagggtaccatttaaaagagaaaatttgtttagcaaggtttccaactattaaagctttcatgagtaattgaag

SEQ ID NO: 520351 - DNA, 201 bp, Homo sapiens
ggtttagttaaaattagaacctggatttattcatattcaatgtagtgctatttgaattttttaaatgcaatatgttacctaaatatgtacttgttgctaargaaagatttagtgtcaatgctttgtatatttatctttcactgcacagcagtccttaccttatgcccaaagacttttcattcttgtattattaaaattgaa

SEQ ID NO: 520352 - DNA, 201 bp, Homo sapiens
aaacctcaccctagctgaaaacaaaatccaaaaatgtttcataaatatataaataaacatgaaaatagcactgtgttgcaaactgtaatattttgtttcaygtatatctgaagtaaattaaccagaaaaggttttctatttttttaactttggctttcaatacttaatgtatttatattaatatatatgtcttggatgtaa

SEQ ID NO: 520353 - DNA, 201 bp, Homo sapiens
cattttttaattattataaatgatgctaagaatattcatgtgcaagcgtttgtttggatatctgtctttatttctcgagtttataactaaaagtggaattkctgggtcatatagtaactctatgtttaacatttagaaaaactactaaggtgtttatcaatgattacactattttacattcctataagcaatatatggtgg

SEQ ID NO: 520354 - DNA, 201 bp, Homo sapiens
actggatatcagaatttccaaagcagcagtctttggtttgagttgtatagggtggactatctagtttgaccacattatttcaataattgtataaaacactytaaattaatgtctttgtaatgaaattatttaatgcatcttcttaagaacttgttttgtcttggtattaaacattcagtaaatttcaagggaatttcattc

SEQ ID NO: 520355 - DNA, 201 bp, Homo sapiens
aaggtaaagcttacaggttaggtttctgcctgcattccagttaggaaatactgcagttccacagctggtatccaaaccctagtatccaaactcagagtcgytccgtgtgaaacctgtgctctctgccctgtgtctcgcttcctactgctctatcttttttttcctctggtacaagtccctactgctattatttttcattgt

SEQ ID NO: 520356 - DNA, 201 bp, Homo sapiens
cttattgccccaagagacctagctaaggtctataaacatgaagggaaaattagcttttagttttaaaactctttatcccatcttgattggggcagttgacttttttttttgcccagagtgccgtagtcctttttgtaactaccctctcaaatggacaataccagaagtgaattatccctgctggctttcttttctctatga

SEQ ID NO: 520357 - DNA, 201 bp, Homo sapiens
aggaaaaagaaaaaacagaatgactagatattatgctgctaatatttgctgatgaaacattaagatgtcaaaaaccaagaaggtcttacatgaaagagatrggaataatttaaaaacagaataaagtaaacaatttttcattaattgttaaaaaagctatataacacaaaagagtatgaacttcagaatcaaaaagccatt

SEQ ID NO: 520358 - DNA, 201 bp, Homo sapiens
tcaaatggatcccccattaatattttaaaatgttcatgtcactctcattcaaaaacaaaactcttctttctaccctacagattctcccacatccaccactmtaccccattttctgactttacaaaaccaaaatctcaaaggaactccttattcttgttttcaccctcacttcttaacccatttctctctgatttttgttgc

SEQ ID NO: 520359 - DNA, 201 bp, Homo sapiens
tagatatgggaatgtacacagaaaaataaatattttatattgacttatagatccagtaaaaacaggttaaattttacatgattctcaattctttttagaaygctctatttttataaaattatatgcccaattgaatatttttaagcttcagctgcatctctaaatataggtgtgaagaataacttttgaaattgatgcaga

SEQ ID NO: 520360 - DNA, 201 bp, Homo sapiens
aggttagacaactgaaatttattttgtaacagttctggaaactggaagtccaagatcaaggtgttggcaggtgtggattctcctcaggcctctcttctctrtttgcagagggtcaccttcttattgcatcctcacaggggtgtttgcatatccctgacatctcttcctcttcttgggaagacatcagtcatattagattag

SEQ ID NO: 520361 - DNA, 201 bp, Homo sapiens
caaatgcaaaatgtaacgtcatctacactatccttggaaacatctgttcatgtaaactttaaggaagaagagtaaggatgaaatacaggaatatagcccaycaagctggtcagtaagaaaagaagcgaaaatccacattatttgcctaaaactttcccatcttgttggcctaaaacaagattaggaacctatttttctgtc

SEQ ID NO: 520362 - DNA, 201 bp, Homo sapiens
atcaggagatagtgtcagcataaaatagtacatagtagcaagagtaaaggcattccagttgactataaaggcagaagtcatggacaaattaaatcggactsttagagaaagaatggcctatggtggtcctatgaaagagactggcttgcaaaccatccctttagagagtttaagaaacaccttgaactttccaggatgctg

SEQ ID NO: 520363 - DNA, 201 bp, Homo sapiens
tggatttggcctccactatctgtgtgtatcagtcatgtcttcatgtgaacactgagaggaatacactatattttttccaagtgtgtttttcaacttataamatgtttgagagtttgaagaagataaattggaagtagctgataatgaaaggtccaagtttaaaggtgcattctcttcattagcctggtctcacagaacttg

SEQ ID NO: 520364 - DNA, 201 bp, Homo sapiens
atttttgagatcctgttgaggggaagttgagagatgatacatttaatttgggttcagtgacagatatttaggtgacttcagtgcatagttaagtgattgtytgggaatgacttccagaaactgtcctacagccactgtatagatttaccccagttcctgtcatgacccaagcgtggtactgtgatatcaaaatagcctgat

SEQ ID NO: 520365 - DNA, 201 bp, Homo sapiens
taatctagtgtcacaatcagaattataccatttctcttcaatacatttgtactgactattccataaatgtccacaaacaacctaatcttgtctcttagaarttatcagcaacacaatgttgctgataatttctaaaagacaagattaggtaatgtcttctggacattaatgtgttcttctggacattttcttatgtgttga

SEQ ID NO: 520366 - DNA, 201 bp, Homo sapiens
acaaaatatttcttcttcccaaattatgtagactccagtatgaatatgatgaagtaaaatttttaatcaggccataccacaattcatttatacctatcacsgtttcaaatctgccatttctccttaattttcagccagctctttgtaaactgcacatcttcatacttttccaaggttatccaatttttttgtctatattac

SEQ ID NO: 520367 - DNA, 201 bp, Homo sapiens
taggtacttccacgtgggaggtcttgctgctgatctatgtaaccataaggattaatctattcctggcacatacagttccagctaagaaaggcaacacgtamattattgtaaatcagccatgatataataagccagtattcacagataccctttagtgtgttcaaaggaaattctcaaatggctttgaaacctttaactcaa

SEQ ID NO: 520368 - DNA, 201 bp, Homo sapiens
gtataataattatatttgtgacatgactattagcaaatagcttgcttttgtttttgtttttgataatgaataacactatacattaacaaaaacataagttrtcaacatttatgttgtcataaaatgtgagaaaaatctataatctttttccaaaatgaattgacctttgaaacaagcaatcagttaaatagagagtatctg

SEQ ID NO: 520369 - DNA, 201 bp, Homo sapiens
aaaatgtaggcgatattgatgaagaagtaaacacttgacactttgtaaatgtgaaaaatcctatactgtgggttactttttattgtataaactgttacatyaacaagtaactgttgaaacattatcctctttcctgtggtggttttatagttcatacctttaaattaacttttatcacaaaatctaaatttaaatacaatt

SEQ ID NO: 520370 - DNA, 201 bp, Homo sapiens
caagtgttgtatcacccattctgaatcttactagagagcatttttggaaggtgtaacaatctcttaggccacaaacaaggggacagggatggtggatacaytgatgtttgccaagcctcctttcaaaaggacatgtgagcttcccctttcttcatctcattaaataatatagggtaaataaaattttacttttgtttaaga

SEQ ID NO: 520371 - DNA, 201 bp, Homo sapiens
ttcgcttaaatatttaacttcatagatgaggaaagaaaagagtcagagagataagcgaatttgcaaaggttgcccaagtcagatgccataatgagactggwgcccatgctcttgagcccccttttcagtactcagttccaagtctaccctgtggatcatttctcttgtctttgggccacttcaagagaaaaataatgaaca

SEQ ID NO: 520372 - DNA, 201 bp, Homo sapiens
agaaactgtcctacagccactgtatagatttaccccagttcctgtcatgacccaagcgtggtactgtgatatcaaaatagcctgatgggcctactagctaygtaaactttatgagtatgtcagttaaaggtttcttcttttctactgaactagttttgctcaagggtgggtgaaattcagacatagttcttctaaaattta

SEQ ID NO: 520373 - DNA, 201 bp, Homo sapiens
tttgacttcattgtgtctttaccccattctttctttttgtcactcattttccagcttctgttgcatgagtaaaagtaatgcattttctaatttgattcatrgagaggagaattcttcccctgatatttgagcacctgataacatttatgaccaagagtctgctctactctaagtggatttttaatttcttttatcagaaag

SEQ ID NO: 520374 - DNA, 201 bp, Homo sapiens
ttaagcatacctaagttttcctggcaatagaatgacaataaattttgaaaattatatcattatttgaatagattaaaacttcgttatttgaaatagaaaayagaaataaataacattttttctcccaaaagtcataatatattttacaatcaggttttccattattatagacagtttatttttctcgatcatacccacaga

SEQ ID NO: 520375 - DNA, 201 bp, Homo sapiens
ttgcttatagtaaatggaaatatttacagaaaataaagtaagatgaagggattataattctcaaaactatgttgtgtggaaaaatagcatccaattcattytaagacaattatttataaaatagctaatagaataattaactctattgtcaactctagtttctagtttcacattttaaatcagacttcccatgtggagaag

SEQ ID NO: 520376 - DNA, 201 bp, Homo sapiens
atgacaaaatcgcccagttaagaaaaatgctttactttttttcccttgatggtagctgagttacttatattgtattactaaaaacatgtatatttgcatgrataagcagttcctctctctaaacaatacttggcactcaatagacatggggtaagctcaaagcaggcattttaaaataagaccatatgaacaaatgttata

SEQ ID NO: 520377 - DNA, 201 bp, Homo sapiens
ttttatagtttatgatttaatgtattaagattataaaatatttgatattaagcagataaaagagcattattatctttttttaaagagcaatggatgcttawgaagggaatatattaggatgagtggaataacagctgacatgttgatttgtcacatttcattctcacacctgttgaaatggcttattctgcttttgccttt

SEQ ID NO: 520378 - DNA, 201 bp, Homo sapiens
ctcccctccttcctccttccccctctttgagtctatgcctctctctctctctacaggctggcttttctttgttcccctttctgccccatggctgccacaaycaggattttattgctccccattccaaacttccggccagattagttagacctgcatcctccttgccacttcccagggacaagatgctgactggtctgtcag

SEQ ID NO: 520379 - DNA, 201 bp, Homo sapiens
ccaacatgtctaccacgaaccaatttgcagagctggatggtctggaggaagcagtatggcttcctggggaagggggatttgagctgagtttggaaagagtyctggagcaccctggagtccagtttcctacctcctagtcacgtggtgtgggtgaaggccataccttggtgagctttcccagggtatgggggtgcctagggt

SEQ ID NO: 520380 - DNA, 201 bp, Homo sapiens
cgcgttgatatgattggccggcgaatcgtggttctcttttcctccttggctgtctgaagatagatcgccatcatggtgagtctccctgggcccgtgcagtyatctgccgcgtatccgagccatccgtggtccctgggtcccagtacttgagctataggcacgcgaagcccggttgctcttctctggccgtttctgtcagag

SEQ ID NO: 520381 - DNA, 201 bp, Homo sapiens
gacgacagttttatagtatggtcgattataatgccagtgctatttaggctggtgcaaaagtaattgcagtggcaaaaaccacaattacttttgcaccaacytaatatgttttaagatagtatattatgagcaaaggagaaaacgtttaaaatcatgtttattttgtaaactccaaaatgcatgttacatgtgaagtgactc

SEQ ID NO: 520382 - DNA, 201 bp, Homo sapiens
agtgctgtttcttgcttttttaaggtaacaaaacactgcatgctgtctggggtaccttttccctgctgttcagttcattgccctgtgtcgtctcacagagygtgtcactggtacagaaatgttccctgggaagctagagttgaaacatcgcccactggtgctcctgagctggctttgtcatgggtttagagggtatgttag

SEQ ID NO: 520383 - DNA, 201 bp, Homo sapiens
gagaactgaagggtaggaaatagtttctgatgtgaagaaaaagggcatagctgcagagagcctgaatgattgaaggttggcatcaaagtcacgaagtgggsaggcttttctgttcagctgtgctcagggcagaagttgtagtctttcagccagtagccttgggaagggaggtgggatgaaactcaggcttggcctattttt

SEQ ID NO: 520384 - DNA, 201 bp, Homo sapiens
tggtctccacagcctttgctcctacggccagctaacaccctcctctacctgccctctggtcttctgtccctgctgcctgcttctcttccatctagtccatycaagtgttttttggggaagtcacctggtaccttgttagggttaatttgtcttttaaattgggctcccaagggtatctgctagctaccctggctcacaagg

SEQ ID NO: 520385 - DNA, 201 bp, Homo sapiens
gcaatatttagcccattatttttgttttattcttaacttgaatgtttgtaaattttatttcttgatgctttcattgtgttatgataacatcaaaataactkgatattctaggttactaataattgttgtgcatgagtgttactacttttggaattgaagactttaaagaattttaaaggcagttgttgactaaacttcttt

SEQ ID NO: 520386 - DNA, 201 bp, Homo sapiens
ttccccgccactgattcagtgagctggagattggatcacaggtataattcaagcttttcatgtagtcatgtagatcactagactccttggtgtactgacgyagcaatttaaaagcagatcatgtgtagtacatctagaagtagatttacaaatattctgaagagttgtaaccttttaaaatactaacagtgacatggtttt

SEQ ID NO: 520387 - DNA, 201 bp, Homo sapiens
atggcacgacctcagctcactgcaacctccgcctcctgggttcaagcaattctctgcctcagcttcccgagtagctgggattacaggcatgtgccaccatrcctggctaattttgtattttgtagtagagacggagtttttccatgttggtcaggctggtcttgaactcctgacctcaggtgatctgcccaccccgcctcc

SEQ ID NO: 520388 - DNA, 201 bp, Homo sapiens
taataattgttgtgcatgagtgttactacttttggaattgaagactttaaagaattttaaaggcagttgttgactaaacttctttctcttgattcacagcygaaggagtaaaggtgctgcaatgatgttagctgtggccactgtggatttttcgcaagaacattaataaactaaaaacttcatgtgtctggttgtttgaaa

SEQ ID NO: 520389 - DNA, 201 bp, Homo sapiens
gcatgcacttaaatgcagattattttggagtttgaaaagggactattaatgaaatctttcttttccctcctttctctttttcccttccccgccactgattmagtgagctggagattggatcacaggtataattcaagcttttcatgtagtcatgtagatcactagactccttggtgtactgacgtagcaatttaaaagcag

SEQ ID NO: 520390 - DNA, 201 bp, Homo sapiens
gggtatctgctagctaccctggctcacaaggctattttgaggctgaggatgtaacaactgtgaaaacagtttggaaactagtgctaagcaattgtttgtcrggaagcagggacttgtgggaactcaaactgtggacagattcagcacattgtaggccctcacagtaaccaggctaccctgtgctgtcagcaggctttggaa

SEQ ID NO: 520391 - DNA, 201 bp, Homo sapiens
caatctccttggctcactgcaacctccgcctgccaggttcacgcaactcttctgcctgagcttcctgagtagctgggattacaggtgcgcaccatcatgcstgggtaatttttgtatttttagtagagactgggtttcaccatgttggtcagcctggtcttgaactcctgacctcgtaatccgcccacctcggcctcccaa

SEQ ID NO: 520392 - DNA, 201 bp, Homo sapiens
tggtaccttgttagggttaatttgtcttttaaattgggctcccaagggtatctgctagctaccctggctcacaaggctattttgaggctgaggatgtaacmactgtgaaaacagtttggaaactagtgctaagcaattgtttgtcaggaagcagggacttgtgggaactcaaactgtggacagattcagcacattgtaggc

SEQ ID NO: 520393 - DNA, 201 bp, Homo sapiens
atgaggcacagagggtagatgacttgccccaagtccttcagctcattcatgctggggaaaggagtaagcttcaggcgtcttcccctggagttcacgccacytctgacagcaagtgagccgtttgctactcaagtgctgtttcttgcttttttaaggtaacaaaacactgcatgctgtctggggtaccttttccctgctgtt

SEQ ID NO: 520394 - DNA, 201 bp, Homo sapiens
cttctttctcttgattcacagccgaaggagtaaaggtgctgcaatgatgttagctgtggccactgtggatttttcgcaagaacattaataaactaaaaacytcatgtgtctggttgtttgaaatgtatttgcagtttcctgggactgctaggaggttagtctgctgatttcagttgctgtccaagttcacatgctccatga

SEQ ID NO: 520395 - DNA, 201 bp, Homo sapiens
acttcggaggtgccttgttttggtagtgcaaaagaagaaaaaatagtgatctgtgagctcaagtctggacaagaacagccagtctcccaaactccctgttsagagaatgttgagtggaccatttgtttcctgtgaggctattccatacctaaaatcccttgatgatcctttctgttccagcaaaaacatgcattaaatgta

SEQ ID NO: 520396 - DNA, 201 bp, Homo sapiens
atgacttgccccaagtccttcagctcattcatgctggggaaaggagtaagcttcaggcgtcttcccctggagttcacgccacctctgacagcaagtgagcygtttgctactcaagtgctgtttcttgcttttttaaggtaacaaaacactgcatgctgtctggggtaccttttccctgctgttcagttcattgccctgtgt

SEQ ID NO: 520397 - DNA, 201 bp, Homo sapiens
gtttcctgtgaggctattccatacctaaaatcccttgatgatcctttctgttccagcaaaaacatgcattaaatgtacttgaaaagttttggtttagaaarctgtgtttcttaagctcagactgggtcagtttccctaccagagtggtgggtaatgattttaatgtttacaagtcacctggatgtactcttttctcattca

SEQ ID NO: 520398 - DNA, 201 bp, Homo sapiens
ttggagcggggaaggagagctcttcagttcctttggcaccttcacgcagcatgcaagacgggctgctttttcttctgtttatggatgaggcacagagggtrgatgacttgccccaagtccttcagctcattcatgctggggaaaggagtaagcttcaggcgtcttcccctggagttcacgccacctctgacagcaagtgag

SEQ ID NO: 520399 - DNA, 201 bp, Homo sapiens
atgtccttcaccccgggaaggcgacagtgcctaagacagaaattcgggaaaaactagccaaaatgtacaagaccacaccggatgtcatctttgtatttggrttcagaactcattttggtggtggcaagacaactggctttggcatgatttatgattccctggattatgcaaagaaaaatgaacccaaacatagacttgcaa

SEQ ID NO: 520400 - DNA, 201 bp, Homo sapiens
agaaaagatggtcacagcccctgcatggagcacctacagacaggagggcagggctgagaagagttaagtcatggggctgggcctgctggccagggggtggttggagttctgttttcatatctacagaggctgtgtacttcggtttgtggggcctctggccctgtaggttctcttgctaaggaatctgctactactttgcta

SEQ ID NO: 520401 - DNA, 201 bp, Homo sapiens
tggtcagtctagagttccaggggtgtggccaaaagtctgtgaggcggggccgtaggcagcctaaatcaggcatcggcgcggtcagcctcgtggcgcgcccrcgcccccacgccggctcttcccggggtccttccgtgcgcgttgatatgattggccggcgaatcgtggttctcttttcctccttggctgtctgaagataga

SEQ ID NO: 520402 - DNA, 201 bp, Homo sapiens
ttccagcaaaaacatgcattaaatgtacttgaaaagttttggtttagaaagctgtgtttcttaagctcagactgggtcagtttccctaccagagtggtggrtaatgattttaatgtttacaagtcacctggatgtactcttttctcattcagcatggcctgtatgagaagaaaaagacctcaagaaagcaacgaaaggaac

SEQ ID NO: 520403 - DNA, 201 bp, Homo sapiens
cctaaatcaggcatcggcgcggtcagcctcgtggcgcgcccacgcccccacgccggctcttcccggggtccttccgtgcgcgttgatatgattggccggcraatcgtggttctcttttcctccttggctgtctgaagatagatcgccatcatggtgagtctccctgggcccgtgcagttatctgccgcgtatccgagccat

SEQ ID NO: 520404 - DNA, 201 bp, Homo sapiens
cttaaagacagcatcttacatggtgctctcatggagccgaaacaggtgctgtcctaaactctgaacaacgatctccattaatctgcgcgcgcacacacatmcacatattttttttgagatggagtctcactgtcacccaggctggagtgcagtggcagaatcttggctcactgcaagctctgcctcacgggttcacgccat

SEQ ID NO: 520405 - DNA, 201 bp, Homo sapiens
gctggcagcctccctggatttgggtctggaaaatcatttcagaacaaatcagctcttccttctcccctccttcctccttccccctctttgagtctatgccyctctctctctctacaggctggcttttctttgttcccctttctgccccatggctgccacaaccaggattttattgctccccattccaaacttccggccaga

SEQ ID NO: 520406 - DNA, 201 bp, Homo sapiens
cttcccctggagttcacgccacctctgacagcaagtgagccgtttgctactcaagtgctgtttcttgcttttttaaggtaacaaaacactgcatgctgtckggggtaccttttccctgctgttcagttcattgccctgtgtcgtctcacagagcgtgtcactggtacagaaatgttccctgggaagctagagttgaaacat

SEQ ID NO: 520407 - DNA, 201 bp, Homo sapiens
agtcaaggacacgtggcctgtggtcccccgatgtcctcctgaagggaagatccccccactccctgtgggatgtgcccccacctctgccgtggcatttcacsacctccatcagcttctggaagcttccagatgccagaggcctcttctccatctcttgttccctgagccgggcatggatgggcccaggtgcctgtggagatg

SEQ ID NO: 520408 - DNA, 201 bp, Homo sapiens
gcaagcgggcccccacagggagggacgccctctaaatcctggccacaaaacccattctgtcctgccctctctcccctctcccactcacatccccaaactcrgccttccaccatcttgttgtgaagggggcgattattcacatctgtgttctcttcccttaagcattttctagggagatttggtgtctgtgtggctcactcc

SEQ ID NO: 520409 - DNA, 201 bp, Homo sapiens
cacacatgaatgttccaggcttcccttgtctggacgatgtgatcagggagacaccatcccagattctggctggtaacagagcaggcctcctcaaccctggyaccattgacacttgggctggacaattctctgtcatggggcagcatccgtggcctctgcctactgccagtagcacctcctgcccagttgggacaaccaaaa

SEQ ID NO: 520410 - DNA, 201 bp, Homo sapiens
gccctcctgcctctgctctcaggagaaggacactcctggaattccacatggatcccaccttctccctggagccctgccatactcctgggcaccgctgatgygctctcctgctggctgacttggccttgaacacgggtggctcaggcctttcccagggacccttgcttcatgccccagctggaggaagccacactcacagca

SEQ ID NO: 520411 - DNA, 201 bp, Homo sapiens
aactcaaagctccaggcttggctcattgtgggagagaaatgcaggcccttcccgtccctggaaaagggaccttcccacacagcagtcgctgtccaggcacytggactgtcccctgtctatccatcttggggtctcactcgtgcacctagtctcacttagagatgtagttcagtgccgcgcagacaaggggcggaggcatca

SEQ ID NO: 520412 - DNA, 201 bp, Homo sapiens
ctctactaaaaatacaaaaattaaccagtcgtggtggcgggcacctgtagtcccagctattcgggaggctgaggcaggagaatcacttgaacctgggaggyggaggttgcagtgagccaagatggaacaaaagtacactccacaggatgggagtgggcaagcggctcaagaacctggatacagaattttctggggtttaaa

SEQ ID NO: 520413 - DNA, 201 bp, Homo sapiens
ttaggaaccagacctgagctgcctggttgggagggggctgaggagctggggaccgccactgggggttgtcttttcctccctttcatttgtctgccctgtgytgaactgtgtccaaggggagatgacataagtaatagctcttggggaagtgggctattagcatttatggaaattaatacatccacatccgaggagcaagaa

SEQ ID NO: 520414 - DNA, 201 bp, Homo sapiens
gctgagctgagggatgagggtgcaggcagagatctgggagctgagctaaggggtgagggtggagtagggggacgcgggggctgagctgaggggtgagggtrgagtgggggacatggaagctgagctgaggggtgagggtagagtggggggatgtgggagctgagctgaggggtgagggtgcagtggggggacgtgggagct

SEQ ID NO: 520415 - DNA, 201 bp, Homo sapiens
ggcagagaagcagcgagcttgcacggagacaagttccaacagcgaccactggccgaggcagcaaagcaggacaatgcaatgaagaaagaccagggaggccragggggaaccctctgagagagggatcatctgaagatgtggagaacattccagcccaagaggagaggggtctggaatggatgcctctctcagctggaggag

SEQ ID NO: 520416 - DNA, 201 bp, Homo sapiens
cgttccccctttgcctgtgggtttgacctgatctggaactcacagagctcctcaggctcattgaaggttaatgcctgcttgggggtgtgcagtactgataygacgtggatcagtgacatctttctgatatgtttttctgttggtgaattaacaaaccgggcacctggcgagagactgtgccccagcaggatgtgacatcaa

SEQ ID NO: 520417 - DNA, 201 bp, Homo sapiens
tgggccctgcaccccgtccgccagacggacacgctggaactgcagcggctgcgggaggtgcgggcggctgcccaggccaggaacatggagagcttcctccrcatgcacggcctttccctggacggctgcaccgcccagcgcacaggcatgaagtatcggtaagggccgggcaggggggcggtggggtgggaagtctgattt

SEQ ID NO: 520418 - DNA, 201 bp, Homo sapiens
ctgagctgagggatgagggtgcaggcagagatctgggagctgagctaaggggtgagggtggagtagggggacgcgggggctgagctgaggggtgagggtakagtgggggacatggaagctgagctgaggggtgagggtagagtggggggatgtgggagctgagctgaggggtgagggtgcagtggggggacgtgggagctg

SEQ ID NO: 520419 - DNA, 201 bp, Homo sapiens
gcagagtatgtattgagcgtctgctgtaacctaagttttactgggagtgttggaatctctctgtccctttgacccccgcgtttccttccttgggccatctktgtcataaccatcaagacgcagtggcttcttcacatttctggtgatgttgcttctccatgtgccaatcccccagcggataccccactctccggagggaga

SEQ ID NO: 520420 - DNA, 201 bp, Homo sapiens
ccctgcaccttgtccacaggatcttcgcggcgtctcagcctctccggagctcactgttcccatctgtaagagggtgtgtgtgggaccgttccggcagggcyatcctgagggtcagtggccccaagtctgtaaatcacccacccagctcagggcgggacgtgtcacactcctctgggaagtggtcccctccagcacagaccg

SEQ ID NO: 520421 - DNA, 201 bp, Homo sapiens
gatctgggagctgagctaaggggtgagggtggagtagggggacgcgggggctgagctgaggggtgagggtagagtgggggacatggaagctgagctgaggrgtgagggtagagtggggggatgtgggagctgagctgaggggtgagggtgcagtggggggacgtgggagctgagctgaggggtgagggtagagtgggggga

SEQ ID NO: 520422 - DNA, 201 bp, Homo sapiens
gggagctgagctgaggggtgagggtgcagtggggggacgtgggagctgagctgaggggtgagggtagagtggggggatgtgggagctgagctgaggggtgrgggtggagtagggggacgtgtgagctgagctgaggggtgggggtggagttgggggatgtgggatctgagctgaggggtgagggtagagtgggggacatgg

SEQ ID NO: 520423 - DNA, 201 bp, Homo sapiens
gggtccctgcttgcaaagtgtcaggccaaaaagagcttggcgtgagaacgggcctgggtacagcaaaggcgtgctgctacagaagatgtgggtgcaaagcrcttccacttctttggctggagcacttagggtcaggggagccagggggccagagaagggagtggctcagagagcttgggggcctggggttggatcccaccc

SEQ ID NO: 520424 - DNA, 201 bp, Homo sapiens
ctccacatgtgatagataaagtcatctccctgttgtaatacacagtggcctcagaggagggtatattgtctgagggaggaggggcttccccttcatttagwcaaggacacgtggcctgtggtcccccgatgtcctcctgaagggaagatccccccactccctgtgggatgtgcccccacctctgccgtggcatttcacgac

SEQ ID NO: 520425 - DNA, 201 bp, Homo sapiens
gtggaaggacctccacgacatatagggtgggagtgtggagtgatggagtgtggaaacccttctcacagttgtcacctgctctccagcccctcctgagcccrtggacctgcctgcctgccgtgtgtctgtctgtcgtctgtctgtctgtctctctgctgaggggctccccgatgccctgaacccagacagcctcctcagcct

SEQ ID NO: 520426 - DNA, 201 bp, Homo sapiens
gaagtgtggggtgggctacatgccctgttaaaggcacaggcatcccagcccccatccccttctgcaaggctgtgtgaggacatcctgcctcccgtgggccrtgtttgcttatgcagcatccatgggagggctccctggggacgggctgtggtgatgactctgctctcagcagaaccctccactctgaagccctggtttcct

SEQ ID NO: 520427 - DNA, 201 bp, Homo sapiens
gggagctgagctgaggggtgagggtagagtggggggatgtgggagctgagctgaggggtgagggtggagtagggggacgtgtgagctgagctgaggggtgrgggtggagttgggggatgtgggatctgagctgaggggtgagggtagagtgggggacatggaagctgagctgaggggtgagggtagagtggggggatgtgg

SEQ ID NO: 520428 - DNA, 201 bp, Homo sapiens
gggtagagtggggggatgtgggagctgagctgaggagtgagggtgaactgggggatgtgggagctgagctgaggggtgggggtggagttgtgggttgtgtragctgagctgaggggtgagggtggaggcggggacgtggcagcccagctgagggccttggagcacacctggtaggaagccagcctgtggacctggagccga

SEQ ID NO: 520429 - DNA, 201 bp, Homo sapiens
agacagcagcctgtgtaagatgagcactgggttctggggaaggacggtaaacagttcgccttattctgtgctgggcactgtgcttaagcccagcagcgggccctggctggactcagtgtccagagtgtctctgctcagggctggccgagagtcagcgctttctgtccctgtggcggacagtccgacctctccgaggctgcc

SEQ ID NO: 520430 - DNA, 201 bp, Homo sapiens
ctccgaggctgccatagagactcatatcagccaggcgagctgggagcgccaccactccccagatagttactgcccgggcctccctgcccagtcactgcatgggggggggctcagctcctgggtgtgagtttgtgccaggctccagagaggtggggaccccagccacacccagggacagggccaagtggccaagagaccact

SEQ ID NO: 520431 - DNA, 201 bp, Homo sapiens
ctctgtctctctatgtctttagcaggtgtttcccacactttagtcattggcctttcatctcatgatttgggtcatctgtgctatttcttttctttttttctttttttttttttttccgacagggtctcactctgccgcccaggctggaatgcagtggcgcaatcttatctcactgcaacctccaactcccaggctcaggcg

SEQ ID NO: 520432 - DNA, 201 bp, Homo sapiens
gtggcacgatcttagctcactgcaacctgaggctcaggccatcctcccatctcggcctcccaggttgctgggaccacaggtgcacatcaccatacctggctgtgtgtgtgtgtgtgtgtgtgtgtgtgtgtatttttagtagagatgggttttcagtatgttgctgggctggtctagaattccagggctcaagagatttac

SEQ ID NO: 520433 - DNA, 201 bp, Homo sapiens
tggcacgatcttagctcactgcaacctgaggctcaggccatcctcccatctcggcctcccaggttgctgggaccacaggtgcacatcaccatacctggctgtgtgtgtgtgtgtgtgtgtgtgtgtgtgtatttttagtagagatgggttttcagtatgttgctgggctggtctagaattccagggctcaagagatttacc

SEQ ID NO: 520434 - DNA, 201 bp, Homo sapiens
ccctctcccactgtggatccccttggaggagactgctgcagctgcagggcaccctctgtcgccctaagaggagcagcagaacatgacctcccatcgctccrcttcccactgctctgcttggcttcagcctcatgctggcatctgtgttatctataagcagaaagctgcttgttcagagcgggctgagacaccttcgtgcgt

SEQ ID NO: 520435 - DNA, 201 bp, Homo sapiens
agaacacttggacactgatcacttgctgaactccccgtggagccaccagggggaccacagtccctctggtgccaaagatgctgtgctgggtgagaggcgcratggagctgctgtcctgggctctcctgatgtgcctgacattttgacatttcatgtctcacttgtgcaactagggctgcagggcctcagagctggggaggg

SEQ ID NO: 520436 - DNA, 201 bp, Homo sapiens
gacagggtcctgcagtggccaatggtgccagagggcaggtggcccaccctcgccgtcagggagggtggctggccccatccccactgccacccagccccacycactgttggaagagggaccagcgcgaggtggtgcccagggtgggcactgctgcttaatgcgaggcacacctggggcagctgagccccccgaaggctgcgg

SEQ ID NO: 520437 - DNA, 201 bp, Homo sapiens
gaaacacttgcactcccactcactcccacactgcctttggcggtcgaacttgcaagcactgtatccgacccgtgagaagcctagcgccatagtccctcgcyctgcaaagctcagaggcttctgaaatttgaaatttcgacgccaagttctgtttttaaaatcacaatatccccatgaggctgagagggagctataaccagc

SEQ ID NO: 520438 - DNA, 201 bp, Homo sapiens
atggaaaatgcagccagcatagacagcagtctgtggagtagagctgcagttttctagggaaagggcagaaaaacctggaagagaaagtacagcaaaatcakagccgtcaaaacataaataaataaaatagtgagaaagcagagccccacagtgccgtgagtcgctccctctctttcctgcctctggtcctgccaatcccag

SEQ ID NO: 520439 - DNA, 201 bp, Homo sapiens
ttggttaggaggcctacgctgccaggctctgccgctgctgttgggcctggctgtggctgtaacaaaggaagggctggccttgcttgagaactggcagcccyaccatggagctccccgcaccccgagggacagatgcacaggccatgtggtccagtgaagtgggacgatctcctgccccagtcgctggagacaggaagaaga

SEQ ID NO: 520440 - DNA, 201 bp, Homo sapiens
ccaggggtcttcaaagcatggtccctgggcctgcagcatcagcgttacctggaacttgtgggaaatgcagattcttggacccccaccctatgttcatggarccagtgactcagtccctgcactgttttccaacccaagttgagtttgtgattccggaattctggaagttagctcagcacctagacccaagagagagtgaag

SEQ ID NO: 520441 - DNA, 201 bp, Homo sapiens
agagaaataataacttattgggtgcagctggcagtgcgtcctgaagaaggaggaatgggcttgggatgcccttgagtgggtgtggggctggggacagccaygtgaccatggacactgtggggccggttcactgggtagccacaggagggaaggcaggtggctttgagcacagatcgtgtcgctgtgtgtggaaggtggctt

SEQ ID NO: 520442 - DNA, 201 bp, Homo sapiens
ggcacgatcttagctcactgcaacctgaggctcaggccatcctcccatctcggcctcccaggttgctgggaccacaggtgcacatcaccatacctggctgtgtgtgtgtgtgtgtgtgtgtgtgtgtgtatttttagtagagatgggttttcagtatgttgctgggctggtctagaattccagggctcaagagatttaccc

SEQ ID NO: 520443 - DNA, 201 bp, Homo sapiens
gcacgatcttagctcactgcaacctgaggctcaggccatcctcccatctcggcctcccaggttgctgggaccacaggtgcacatcaccatacctggctgtgtgtgtgtgtgtgtgtgtgtgtgtgtgtatttttagtagagatgggttttcagtatgttgctgggctggtctagaattccagggctcaagagatttaccca

SEQ ID NO: 520444 - DNA, 201 bp, Homo sapiens
aagtggaattgctagatcatatagtaattcgacttttagttttcaaagaaccaccatactgttttccatagtggctgtaccattttacattcccaccaacdgtgcacagggtccccatttctccacatcttgccaacccttattattctgggcttttttatagcggccatcctaatggctgcgaggtagtatctcactgtg

SEQ ID NO: 520445 - DNA, 201 bp, Homo sapiens
ttggcaccggctgcgcttcctcagagactgccctgagcaggcgactggtgggggcccgggggcatgggacattggtggttctttctgacctgcacctgctkgggttgatgccaactgtggactctctctcttctctccctttctcctttttctcttttctccattgctgtccgaagtactcggtatgggagtcccaaaaga

SEQ ID NO: 520446 - DNA, 201 bp, Homo sapiens
ataactcactgtagcctcaaactcctgggttcaagggatcctcccacctcagcctcctaaatagctgggaccactggcatgcaccaccatgaatgactaatttttttttttttttcgagatggaaagtttcactcttgtctcccaggctggagtgcaatggcacaatctaggctcactgcgacctccgcctcctgggttca

SEQ ID NO: 520447 - DNA, 201 bp, Homo sapiens
cctcaaactcctgggttcaagggatcctcccacctcagcctcctaaatagctgggaccactggcatgcaccaccatgaatgactaattttttttttttttycgagatggaaagtttcactcttgtctcccaggctggagtgcaatggcacaatctaggctcactgcgacctccgcctcctgggttcaagcaattctcctgc

SEQ ID NO: 520448 - DNA, 201 bp, Homo sapiens
tgaccctgggggacagcagtgcagtcaggagctcagaaagtacacagatgccccctgggcggtctcttctgcaccatgtgggcagcagaaactacacctayggtttcagaacaacagttggggtggtgtggaaggacctccacgacatatagggtgggagtgtggagtgatggagtgtggaaacccttctcacagttgtca

SEQ ID NO: 520449 - DNA, 201 bp, Homo sapiens
catgaatgactaatttttttttttttttcgagatggaaagtttcactcttgtctcccaggctggagtgcaatggcacaatctaggctcactgcgacctccrcctcctgggttcaagcaattctcctgcctcagccttccgagtagctgggattacaggcgcccaccaccatgtccagctaatttttgtatttttagtagag

SEQ ID NO: 520450 - DNA, 201 bp, Homo sapiens
ggcaagtctcctgtgactgagacatctgatcaccttccggtggccaaagcaagtcacatggttgcacaggagcgcaaggctaggaattcacccctccaacktgtgtgtgtgtgtgtgtgtatgtgcatatgtacgtgtgtctgtgcattgtgtatatgtgttatgtatgtatgtgtgtatgtgtgtgtacatatgtgtgta

SEQ ID NO: 520451 - DNA, 201 bp, Homo sapiens
ctaggaattcacccctccaacgtgtgtgtgtgtgtgtgtgtatgtgcatatgtacgtgtgtctgtgcattgtgtatatgtgttatgtatgtatgtgtgtakgtgtgtgtacatatgtgtgtatgtgtgtatgtctatgtgtgtatgtgtgtaggtatgtttgtatgtgtatgtatctgtatgtgtgtaggtatgtgtgtat

SEQ ID NO: 520452 - DNA, 201 bp, Homo sapiens
ggctgaggcaggagaatcacttgaacccaggaggcagaggttgcagtgagccaagatcatgccactgcagtccagcctggcaacagactgagactctgttaaaaaaaaaaaagagagagagagagaaagcaagcaagaaagaaagagaaagaaagaaaaggaaggaaagaaggaaggaaaaagaaaagaaaagaaagagct

SEQ ID NO: 520453 - DNA, 201 bp, Homo sapiens
tccagcttcagcgtaggacttggtgtccgcaagaatgaggcccacatccaggagcaggccagtttcacgtgaagcccagggctgaagccagaggccacgcrgcaccacgtcggacagtgtttatctgtgctaatcatgaagtaacacaagtgaggtttaaaaatactacgcttatttcatttcagtgcaggagggagaaag

SEQ ID NO: 520454 - DNA, 201 bp, Homo sapiens
ggagaatcacttgaacccaggaggcagaggttgcagtgagccaagatcatgccactgcagtccagcctggcaacagactgagactctgttaaaaaaaaaaragagagagagagagaaagcaagcaagaaagaaagagaaagaaagaaaaggaaggaaagaaggaaggaaaaagaaaagaaaagaaagagctatgccctggc

SEQ ID NO: 520455 - DNA, 201 bp, Homo sapiens
ctgagggggcagtgcctaggagtgggaggaaagagcatgggaccagattcactttggaaatagaagcccccaaccagcagccagccaggtggaggaaggcrtgcagagctgagagggttcaggaggcggtggggggagccactgggaggggacccaggggttcaggtgaaagacagcagtggctcagcccaagggtggcag

SEQ ID NO: 520456 - DNA, 201 bp, Homo sapiens
ttttgggcaataaaccctacagcaaaaaggactacagatcctaagccgcccccgcccgcctgctcggacagtttccgttccctcctagtctctgttcgctygcttaagctgttttgaagccaagtgaagagtgtggtttgcatccaagagaaaacaccacactgtgatgtcatcgggaaatgatctcccaagtcgctgcca

SEQ ID NO: 520457 - DNA, 201 bp, Homo sapiens
actcagccagagctggcaggaggcggggatgcacctcctgcagctgaggttgagacaaagccaggtgcctgccacggcagctgtggcctgagctggcatcrgtggctgatggccacagactccctgatgcctgtcatctgtactgagggctctgtcccagcccctgaaccgtacgtgatgcccacaccaccgatgaggaca

SEQ ID NO: 520458 - DNA, 201 bp, Homo sapiens
atttcagtgcaggagggagaaagaacacacagtctgtatgagcaactcaaatcaaaaataaatgaggcaaaagagtcaccaaaaatagtgtggcattagaracagcagcctgcgtggctcggccagctgtcctcggctctctgccggcaagcagcaccacagagagggctgcgaggatgccttgatggtgtttactccaga

SEQ ID NO: 520459 - DNA, 201 bp, Homo sapiens
ctgcatgctctctgtgctcccgttttcatttggacacttggggtgcagctgtcctgcctggaatgcagctttgcctgtgcttgtctcacagatgcaggggrcagaaaagggcagcttagccagagttcctggcaagcactgctttgcggactgagaatctcatgccaagaggtgtttacatccaggggccgggtcccactc

SEQ ID NO: 520460 - DNA, 201 bp, Homo sapiens
tgggccagaggttgttgttacacccaggtcagggtgaaggtggggcggggagggtggtggcctcactctatctggtgaatttcattttgctgcaccagggytgacggggtgggtgggatgctccgtgactcagaccaccagttattaaagatcccagataaatttattctgtgcttacctcttctccgtcagcgactgggc

SEQ ID NO: 520461 - DNA, 201 bp, Homo sapiens
aggctggcaggtttgcagtctgtggaccagagttcaaatcccagccctggcactctctgactgagggcgggtttgcagtctgcagaccagagttcaaatcmcagccctagcactctctgactgagggacccccatctctccagtggagttgcaaacaccgccttatacctggccaggcctgggagctttccttgctgctgt

SEQ ID NO: 520462 - DNA, 201 bp, Homo sapiens
gaataaagagaggctggctgtagaggtggatgttggtggggggcctcgaatgcctagcgatggggcacagatgcactcagagggcactggggagccatctrtggtgtttgagcagggcaggggtcagagatctgctctaggaaggaagcctggtagcagggagtaagacagggaagagagaggctaatgcaaggagaccag

SEQ ID NO: 520463 - DNA, 201 bp, Homo sapiens
actgcctcggtggctgcctcctggctccatgaggagcccacgcaccccggctgggcacgtggtacacatcatatgatggagaagtgcccatttcatgcccyaggctcctgggtgggagggctttcaggacctctgtgtgagagatgaggacgtcggggatgaaggaggaccccccaggggccgggcttatcacaccccttc

SEQ ID NO: 520464 - DNA, 201 bp, Homo sapiens
cagcaggatgtgacatcaagatgccaggcttagggccctgcagggtgctcttggggagacccgttcctctctctgggctgcctctccctcacctgtaaggyaggggatgcatgttcttggtgcagcctccaaccctaggaagtaaaatgtcagggctgcctggagcccatgggcagcagcctccccatgccttgggactgt

SEQ ID NO: 520465 - DNA, 201 bp, Homo sapiens
atgcctctgccacagtatctgtgcaatagggacagtaagagcgcacccggcgagggtggctgggatgcccgcagcgcccaggagaaggtgccacacagccyggggctcagcactcgcaggcaccggagcaaggcaccggggtgtctggctcttgctgtatctttattgtcttcatgcctttcctgtccgtgttcattttct

SEQ ID NO: 520466 - DNA, 201 bp, Homo sapiens
gggcagaggctgattggagttggtttataagccggaagaagaagaggaatcgcagataagtgaaggaaaactttttgaggaattttctcaaatggaaggcragaaacagtggagaagaaagtgggtctaagaaactgcttttttaggccgagtgaggtggctcacatctgtaatcccagcatttagggaggccgaggcggg

SEQ ID NO: 520467 - DNA, 201 bp, Homo sapiens
acggtgtacagttcccgtctgtggctgcaggctggagagctgactgctggcacagatacagcctgacctcgggtcaacacttctcggagtccagaggggtkgggagtgggacaggtggcctcccagggacgcctccctgagtggccagtggtgccgcttgtccctgcacctgtagctgccctgagcacccccactggacac

SEQ ID NO: 520468 - DNA, 201 bp, Homo sapiens
ctgggccctgcaccccgtcagctgctaggctcccctcttgggtctggtgtgttggtttctgaagcctgttctcccaagtcccggaggtgtcagggatcccrgggccacccagcttagctgtgcctgcctccctctgcgctaaaggagccactgtgccagcctggaactcacggcatcccctttaggatgttggctccacag

SEQ ID NO: 520469 - DNA, 201 bp, Homo sapiens
ctcaggcagaccacggtggtcagaagttgaattcaggccggaggaggaggagtgcatgaagccctgaggtgggagtgagtctgtctgctgggttcacagaccccccagggagccagtgtggcaggggccagtgtgtgaggggctcagcgggggatgtggctagaaaggttgtggacccactgttgagattggactttggct

SEQ ID NO: 520470 - DNA, 201 bp, Homo sapiens
ggcggatcacttgaggccgggagttggagaccagcctggccaacatggtgaaactccgtctctactaaaaatacaaaacttagccaggcatggtggtgcaygtctgtaatcccagctatttgggaggctggggcatgagaatcgcttgaacccaggaggcggaggttgcagtgagctgagattgtgccactgtactccagc

SEQ ID NO: 520471 - DNA, 201 bp, Homo sapiens
gtgtttctggcacgcggggatggtggaggcagcaagggtaggcctgagggacgggcaggacctccccctcaccttgggctgcaccccaaccccacgcaccgggagtcagccttgccaggttgcagcacggaactgcacttcccgagcttttaggggaagaggcactcgtgaataattcagcctctttcactgagatgaaaa

SEQ ID NO: 520472 - DNA, 201 bp, Homo sapiens
tcacttgaacccaggatttcaacgctgcagtgagccctatttgtgccactgcactccagcctgggcggcagagtgagaccctgtcttaaaaaaaaaaaaaraagaagaagaagaagaatgtgacattatttggaaatagggtcattgcagatatcattaagatggggcaatggggccatacaagactagaatggaccctaa

SEQ ID NO: 520473 - DNA, 201 bp, Homo sapiens
ctgaggcaggagaattgcttgaacccaggaggtggaggttgcagtgagccaaggtcgcaccactgcactccagcctggcaacagagcaagactccgtctcaaaaaaaaaaaaaaaaaaaaagccatatctaaaaccttctccagaccttgagccctccacaggcctcgttctgtgcatgagagggcatccgcccccttcca

SEQ ID NO: 520474 - DNA, 201 bp, Homo sapiens
gtgtcttttcacacgggaaaaagtggttcagaatgcctgggcagagccggagctacagggattcctgccgctcgcgttcccaagagtgctcacaaatgcaycttgcaccctgctttcatttttaaactctgaatggctttaggaggtgctattttcatggggctggaattgcagaacacttggacactgatcacttgctga

SEQ ID NO: 520475 - DNA, 201 bp, Homo sapiens
tgaggcaggagaattgcttgaacccaggaggtggaggttgcagtgagccaaggtcgcaccactgcactccagcctggcaacagagcaagactccgtctcaaaaaaaaaaaaaaaaaaaaagccatatctaaaaccttctccagaccttgagccctccacaggcctcgttctgtgcatgagagggcatccgcccccttccac

SEQ ID NO: 520476 - DNA, 201 bp, Homo sapiens
accgtggatatttcatatgaatggaatcatacgtgttctttcatgaccgtctttaacttagcatcatgttttcaaggttcatctgtgcctgtgccagtaattttttttttttttttttgagacagagtcttgccctgtcacccaggctggagtgcagtggcatgatctcagctcactgcaacctccacctcccgagttcaa

SEQ ID NO: 520477 - DNA, 201 bp, Homo sapiens
cccatagccgccacccggtgcgcccctttcctgaaagaaaactcagcttttcttatgttctcctttagggaaaatcccagctctgcctacaggagcaataktgctggcagctggagtggttttaataggaaattgaaaaataaacctaggcaattttaaagtaccttcagtttggtgacacgttcaactgttttcaagctg

SEQ ID NO: 520478 - DNA, 201 bp, Homo sapiens
gccagtgctcacaggagcccatgaagggatcaaactatgctaggaaccctaaaatgacgtaatgcctgtcggagccaccacggtggtttcaggtctccagccctcccattgttaggtgccctttctgtggcctcacactccccattagaagcatgtgttcaagacaagctggacaataaaaatttaatagatgtaatggtt

SEQ ID NO: 520479 - DNA, 201 bp, Homo sapiens
ccacagccaagattcccaaagtcaaggcccaaagatttccaaggttcccaaagtcaaggccaggccaaggcctggttgggtccttggggcgggcagggccrgcctctcctctgctgagaatccccacttggtgtagggggagaggggaaaggggtctggcccatcgaggggccccttctgccagggccttggttgctgggg

SEQ ID NO: 520480 - DNA, 201 bp, Homo sapiens
tgagcccctgtgtctccttccaggaacatgggtgaccttcggaggccagatcaccgatgaggtaagatggggctctcccagcaccccagaacccagcacgrgctcgccagagcacatggttaagtctgccgcgtggaccagtgagcacgtgctcccgggagccagcgcagcagcctccctccctctttctgttttgtgagg

SEQ ID NO: 520481 - DNA, 201 bp, Homo sapiens
caggacgtcacacctagcccagaacagcccccctctctccatcccttctgcgatgttcactaggcattaccacatgctggtggccgctctgggtgcggggktacatccgtgaaggaaagagatgaagctccctgcccagaggagctgacctcccagcagtcttacaggatatggttacagaggtgaatctgggggagagtc

SEQ ID NO: 520482 - DNA, 201 bp, Homo sapiens
cttgaccccagtgcactcagagtcagcacctgccttcgttgcagcattgaccctctgccatcagatcccacccagggaaggaatgggctcctgtgtgggckcctggcttctgggtgagaggggaagtgtgtgttgtgtaagtgcccttctgtgtcatgcggttttgagcagttatacctcttcctgtctccgctggaagca

SEQ ID NO: 520483 - DNA, 201 bp, Homo sapiens
agctgggcttggtggcatgcacctgtagtccagctactcaggagactgaagcaggagaatctcctgaagccaggaggcaaaggttgcagcgagccaagatygtgccactgcactcccgcctgggcaacagaatgagactccatctcccaaaaaaaaaaaaataaccccagtcttggatattctggacatgtgatacccctt

SEQ ID NO: 520484 - DNA, 201 bp, Homo sapiens
aagcaggagaatctcctgaagccaggaggcaaaggttgcagcgagccaagattgtgccactgcactcccgcctgggcaacagaatgagactccatctcccaaaaaaaaaaaaataaccccagtcttggatattctggacatgtgataccccttggatgaaccttgaaccttgaggacattacactcactgaaacaagccac

SEQ ID NO: 520485 - DNA, 201 bp, Homo sapiens
gtattgtgagtgaaaaaatcaaagtgcagaaacatatgggtagtgtgccacccctcctggaagaaagatgggggataagaaaatacatgtgtctgaaatayaaaaacagaaaacggagccctgggtcccctcctctgagaagccctgccaggagcgtgagtgccctaaccacagacttagccccttcggggcccagcgcac

SEQ ID NO: 520486 - DNA, 201 bp, Homo sapiens
ctcctgggctcaagtgatcctcctgccttagcctcccaaagtgctgggattacaggcgtgagccactgtgcccagcctgatgtgttcttaatttaaaaaataataataataataataataataagtccaaatcaaacagacgggttaggttgaaaatcaaagccccccaccccctgctgctgcccccctcccctctgagcc

SEQ ID NO: 520487 - DNA, 201 bp, Homo sapiens
gagtgggtcttcagcaggggcaccctgccccatgcctctgccacagtatctgtgcaatagggacagtaagagcgcacccggcgagggtggctgggatgccygcagcgcccaggagaaggtgccacacagcccggggctcagcactcgcaggcaccggagcaaggcaccggggtgtctggctcttgctgtatctttattgtc

SEQ ID NO: 520488 - DNA, 201 bp, Homo sapiens
taggtggtctgcggcggcgccaccggttaggcctgggcggggtctgaagggtctgaacctggggttgtagaggccgccagcatgggccctgctgggcaccygggtgagccgtgagaggaggccgggtccagggtggggggcgagggggcaggcctcccctcagtagggggtgaactcagcctctggctgcagacccctcgc

SEQ ID NO: 520489 - DNA, 201 bp, Homo sapiens
attgaccccaggagagcaggactttctctgaaggccagctgtccacacacactaaggacaccctggccacagagcagcacagagggacacctgtggctgcyccctgtgccctacagcctgaggtctgagcaccgacgggataatctggcttcctgccaggttcctaacttgagcccctgtgtctccttccaggaacatggg

SEQ ID NO: 520490 - DNA, 201 bp, Homo sapiens
aatgcataaagaggggaaagagcaccctatgagaacaccttgcaagtgaaggaaaagcaaagtggtgttggagcccctcgcccccagccccccatcccctygttcctccttcctcccgtgcatggcccccacccctgggcttgcactgctgagctccgcggcggccgggggtcctcttgatctgaggatgctgtgatcccc

SEQ ID NO: 520491 - DNA, 201 bp, Homo sapiens
attacaggcataagccaccacacccagccaggcgtggcctaaaaggctgtgttcctggaggagatgttgtcctggaacagggttcagcaaaaaaaaatttytttttagacaagatctcactcagttgcctaggcgggaatgcaatagtgtgatcataggcgactgcagccttgacctgccaggctcaagcagtcttcccac

SEQ ID NO: 520492 - DNA, 201 bp, Homo sapiens
gccctgcccccatgcagctcccaggcaaggaattggcataggacactgtgccaatcagctgtccaccaagtgctgcataacaaacaactccaaaactcagygccacgcagcaatcagcatctcttccttgctcccgtgtctgcgggttgaccaggcagctcgtctaagctggcttggctgggtttgtctccaagctgcaag

SEQ ID NO: 520493 - DNA, 201 bp, Homo sapiens
gtggggctccagcccccagaggagcaggacagcatgtgctgtacacagcaagaggatttgcacttttgccttaattttattacagacggggtcaccttccyttttttttttttttttttttttttttgttttttgagatggagtctcactctgtcacccaggctggagtgcagtggcgggatctcagctcaccacaacttc

SEQ ID NO: 520494 - DNA, 201 bp, Homo sapiens
tgccaaaaccgctggtgacatcacacgcggtcggcctgttttccagggcggagacggagcggggcctgtccaggaagcacataatcgaaggtgaggacgcrctcgggcacctcagggcccccatacctgtgggatcatcctcggaggccaaagtgatggcagcacagggcccgacccccccagttaacccactgagggccc

SEQ ID NO: 520495 - DNA, 201 bp, Homo sapiens
acagagggaaccaagtggccagtggccacagtgggtctgggtttgatttttctgtttggctgtgatgagagctcggtgtcttgttttgcagggctgaagtrgtactgggaaacatcattaagaagaaaggatggaggtaacggccctgctctctgcggcctgtccctggggtgggtgcgggcgaactatcccggggtcagc

SEQ ID NO: 520496 - DNA, 201 bp, Homo sapiens
cacggcatttgctgaccctgtttttgcgtctaacattgcatcgtaaacgttttttgggaggggccagggtgccaaaaccgctggtgacatcacacgcggtyggcctgttttccagggcggagacggagcggggcctgtccaggaagcacataatcgaaggtgaggacgcgctcgggcacctcagggcccccatacctgtgg

SEQ ID NO: 520497 - DNA, 201 bp, Homo sapiens
agccaggaagtacactgcttgcaagacatcttcgcagcccctgtccctcctcccagcgtcctgcctgtatttgcagaatgtcccgaggctggccctgagcyctggctgccccccacctgcggtttccctttctctcacgacagagaccgtccgcgccatgacccacgtcatcaaccaggggatggccatgtactggggcac

SEQ ID NO: 520498 - DNA, 201 bp, Homo sapiens
agctgtgtacctatgccaggagagggggtgccagcctccctcctggaatcacacacacgggggtggcctgggaccagggactcaacacggtgcaggtggcyggcaccatgggagatggaatgttccacccgagtcctccctttgcctggtaccccaaagagcttgggctgtgcccagagtgagtcaccagagagcctggcc

SEQ ID NO: 520499 - DNA, 201 bp, Homo sapiens
gccgggaacacacagcagcacccctggtgtaggcttcagagctgtgtacctatgccaggagagggggtgccagcctccctcctggaatcacacacacgggkgtggcctgggaccagggactcaacacggtgcaggtggccggcaccatgggagatggaatgttccacccgagtcctccctttgcctggtaccccaaagagc

SEQ ID NO: 520500 - DNA, 201 bp, Homo sapiens
tgggcacaaaagaaacaaccacccaatccagggctggggaggagccctgtcagaggacagcaccagcctccccacgtggatgcccgaccagcatctgaggycagacacagccgccactggctccagggctcccccacaccactgcacccacaactcccctgtttcagaaactgaccactcacctctggaaacccaggagcc

SEQ ID NO: 520501 - DNA, 201 bp, Homo sapiens
gaaagcggatttgtgtgtcacatccccaggagaggaggttatggtctcacaagaggaaaacccagcagaatcccagagttggctggaaagtcaacaaaccrcctaaaactcacccacaaaataccgtgaccaggagtatgcatggagacagtgccgagctccgtacaggccgtctgacttcagtgagaccccctccccacc

SEQ ID NO: 520502 - DNA, 201 bp, Homo sapiens
gcggtgtgactcgggcggggcaggcagtagacggcagcggtgacactgcagtgacgctatggagcatggacactaatacgtcccactggacttctgcgtgrgccccagacaggagcttgaccagcgtcaactggacctgctgcatctgatcctctcccagagtgaggttttgaacagagatgggcagaacaccactaatca

SEQ ID NO: 520503 - DNA, 201 bp, Homo sapiens
tgtcgcagtcatggcccagtgcagcctccacctccccgggctcaagtgatcctcccactcagcctcccaagtagctgggaccacaggcatgcgccaccacrcctggctaatttttgtatttttttgtagagacggggttttaccatgttgcccagactggtctggaactcctgggctcaatctgcccacctcggcctccca

SEQ ID NO: 520504 - DNA, 201 bp, Homo sapiens
ggtcaggggagccagggggccagagaagggagtggctcagagagcttgggggcctggggttggatcccaccctgcaccttgtccacaggatcttcgcggcrtctcagcctctccggagctcactgttcccatctgtaagagggtgtgtgtgggaccgttccggcagggctatcctgagggtcagtggccccaagtctgtaa

SEQ ID NO: 520505 - DNA, 201 bp, Homo sapiens
agggtggcccaaaccttggcactccccagggagtagctgcacccagagcccaggattcaggggggctcggttgccatggcaacaaagaggcaggtgggagsggggctgggatagagggagagagacacagtctcagcagaggaggtgaggcggatactaggggcccctccacacatggtccccaccccacaccacaaaatc

SEQ ID NO: 520506 - DNA, 201 bp, Homo sapiens
ggccctgctgggcagagggcccatcccagcccgagccccgtccagtgcatcctcccaggctcgtcctgcgtgccaggctctgttctaggcactcaggatgygcccgtgaaccatcagagttgtgctcctggagagcttgctttccagcaggaacagacatgaacactaactgcacgaaacaaggaggttagaatgtgtgtc

SEQ ID NO: 520507 - DNA, 201 bp, Homo sapiens
ctggggaaggtgcagggagagaggatggaagcagagagctaggaggctattgtgagaaaccacccaagagccgctggaggctcagagcagggtgggcaccrtggaggtggggagacgggtcagattctggactaatttgcaggggaagccgcggcaggggctgaacttcaggctccagtgatgggaggattagtcaaggag

SEQ ID NO: 520508 - DNA, 201 bp, Homo sapiens
gggccgggggcagttggcactttacccccggggtgggtgagcagaggcacctctctgaaggtccccggtgcctttcggagcctccaaacacacattgactsttgggggagtgggtggggggctggccctggcgggaactgagcctggctggcagggtcctgcctgggtgctgagaactcacgtggcgtttgtttttcagga

SEQ ID NO: 520509 - DNA, 201 bp, Homo sapiens
ggaaacatcattaagaagaaaggatggaggtaacggccctgctctctgcggcctgtccctggggtgggtgcgggcgaactatcccggggtcagcctcgtcrgcctgtcgtgcagtgtcgtaaggcccgcaagtccccacatctttcttgctgggaagtggagaggaaaattcagttctccaagaggaggaggtgactctgc

SEQ ID NO: 520510 - DNA, 201 bp, Homo sapiens
gtgaaagacagcagtggctcagcccaagggtggcagccagagatgtgggtggacggctggatattggcagccatactcattatcaatgctgctgtaacagytcatcacaaaccctgcagcttccaactgcccagagtgagatctcctggttcttgtgggtcaggcattggggcagagcagggctgggtctgctgttttggg

SEQ ID NO: 520511 - DNA, 201 bp, Homo sapiens
cgtgcccagcactgcagggcttcctagaccccctcagacccccagaccaagatgctgggtctctcggcccagtcagaggcaaggcagacccatcaggggcycctgtggtgggtgtttctccctcaccttgggtctcgccgccacagcctggtgcctgaggaatgagggagtcagctccgtgctcctgggggcctccaatgc

SEQ ID NO: 520512 - DNA, 201 bp, Homo sapiens
actatgtggatggactgtcacttaggtaaccagtttccctactgatggacatttacattgcttttagtttccaagaatgtgcattcatcatttcagctatwtttcagtggttcttcacatagaaactttgaaactcccctgtcccaactaagcctatttccccaggccactctcctccgcaacctgcttaaatgcattctg

SEQ ID NO: 520513 - DNA, 201 bp, Homo sapiens
cctgtggtcacaagttccttcccgccctgcctgctggcccctggtggtggatttttctttccacagcatttatcataattggtgtcttatcccacgccccmcaacagactgtcttctggctgcgtcaccaactcccacccagttgtccaaagcctcatctcatgcagcccacagcagcctggtacaacaggcctctgccca

SEQ ID NO: 520514 - DNA, 201 bp, Homo sapiens
ccacacccaacttcagagccaggaagtacactgcttgcaagacatcttcgcagcccctgtccctcctcccagcgtcctgcctgtatttgcagaatgtcccraggctggccctgagccctggctgccccccacctgcggtttccctttctctcacgacagagaccgtccgcgccatgacccacgtcatcaaccaggggatgg

SEQ ID NO: 520515 - DNA, 201 bp, Homo sapiens
tctccgaagagatgaaatttgagcaggaaccccaaggaacagcatcccaggtagagggatctgagtctgcaaaggccctgggcacaaaagaaacaaccacscaatccagggctggggaggagccctgtcagaggacagcaccagcctccccacgtggatgcccgaccagcatctgaggccagacacagccgccactggctc

SEQ ID NO: 520516 - DNA, 201 bp, Homo sapiens
aggtaacggccctgctctctgcggcctgtccctggggtgggtgcgggcgaactatcccggggtcagcctcgtcggcctgtcgtgcagtgtcgtaaggcccrcaagtccccacatctttcttgctgggaagtggagaggaaaattcagttctccaagaggaggaggtgactctgcttgagaaagaagttgaagggaggccga

SEQ ID NO: 520517 - DNA, 201 bp, Homo sapiens
taggcgcttggcagaagacacacttgtgacgctcagagctctctggagcagcctctccgaagagatgaaatttgagcaggaaccccaaggaacagcatccsaggtagagggatctgagtctgcaaaggccctgggcacaaaagaaacaaccacccaatccagggctggggaggagccctgtcagaggacagcaccagcctc

SEQ ID NO: 520518 - DNA, 201 bp, Homo sapiens
gggaaacatcattaagaagaaaggatggaggtaacggccctgctctctgcggcctgtccctggggtgggtgcgggcgaactatcccggggtcagcctcgtyggcctgtcgtgcagtgtcgtaaggcccgcaagtccccacatctttcttgctgggaagtggagaggaaaattcagttctccaagaggaggaggtgactctg

SEQ ID NO: 520519 - DNA, 201 bp, Homo sapiens
tcaggtgaacagtcacacaggctggggtaggcgcttggcagaagacacacttgtgacgctcagagctctctggagcagcctctccgaagagatgaaatttkagcaggaaccccaaggaacagcatcccaggtagagggatctgagtctgcaaaggccctgggcacaaaagaaacaaccacccaatccagggctggggagga

SEQ ID NO: 520520 - DNA, 201 bp, Homo sapiens
ggggtgggccgccccatcttccccttagctgatgggcaggctggatgggcagggagggtctttcctgggaaggtagtggcccgggagctgggctggccctygagtgttgaagatttaacttgaaagccatgagggcgctcttccccagaaatcatcgtggaagcggcgaatgagtggcaggaggtgcatggagagtcctgg

SEQ ID NO: 520521 - DNA, 201 bp, Homo sapiens
catgggctgagaaatgctcctggtatcaacagaactgcagcagatgatgaaaacaaggctgtgatcagggaagtggctgagggagtgaggcccccgaaccrccaccccagagctctgtcccaggcccctggggtctcatgctgtgacctcctgcgccacatggggagaggtcacctgggggacttgtttccgtgggaacct

SEQ ID NO: 520522 - DNA, 201 bp, Homo sapiens
tccctcgttcgtttgaaggactcctttctttgggctgttgggctgagggctcagcttctcgccagctgtcggcccgaggctgccctcagttcctgccccargggcctctccaacaccacagcttgcttcatcagagccaggagggacagtctctagcaagacagaagtgacagtcttgccattacctttgccgtgttctgc

SEQ ID NO: 520523 - DNA, 201 bp, Homo sapiens
tctttccacgacctggttcctggatgtcctgcttgctccacacccatctacagggaggatgtgagggggctctgcctcctagggccaggtcccccctctcrggagggggtattgggtaggaccatccaagaaagggcagaagaccaagggcagtcggggtctagaaaggagggcgctggccctgctgggcgcttcggagcc

SEQ ID NO: 520524 - DNA, 201 bp, Homo sapiens
agagcagctcatgaccttggcctatgataatggcatcaacctcttcgatacagcagaagtctacgcagccggcaagtacgtgtcttttcacacgggaaaamgtggttcagaatgcctgggcagagccggagctacagggattcctgccgctcgcgttcccaagagtgctcacaaatgcaccttgcaccctgctttcatttt

SEQ ID NO: 520525 - DNA, 201 bp, Homo sapiens
gcagaaaccatcccagcacgtccccatcaggtgttcccaggtggcaggcagagaaggccaaggtcccttgagtggatttccaggggagctgaagggctacrgccctgccaggactgggaggtactgggaggggctggacagctgagagcggctgcccccctgcaggaagaggaggcaggcgcttcacccgactctggacga

SEQ ID NO: 520526 - DNA, 201 bp, Homo sapiens
attttttttttccctgcgccagtcagcaaatgctttgtaggtgctagtcaacacctgggggctgagccaggcactggagttggggggtgtcgtgaaaaagygtgaaacccttttcgtgtgtttcttggttgagaaccgtcttgggtctggatttggagcctggatgggaagcagtgtgcacagaagccattgcacccggga

SEQ ID NO: 520527 - DNA, 201 bp, Homo sapiens
gctgaagtggtactgggaaacatcattaagaagaaaggatggaggtaacggccctgctctctgcggcctgtccctggggtgggtgcgggcgaactatcccrgggtcagcctcgtcggcctgtcgtgcagtgtcgtaaggcccgcaagtccccacatctttcttgctgggaagtggagaggaaaattcagttctccaagagg

SEQ ID NO: 520528 - DNA, 201 bp, Homo sapiens
ctccatgtatccagaatcaacgacgggctccccggctcggctctcgctgcggcagacgggctcccccgggatgatctacaggtgaccccctgccccctcayccaggccccctcccagggtcagtcctgcttcgaggacgggttcccaaggccactgtcctcccctctggaggtggaagggcccaagcagggcccacaggct

SEQ ID NO: 520529 - DNA, 201 bp, Homo sapiens
ttgaccaggcagctcgtctaagctggcttggctgggtttgtctccaagctgcaagttggatccccatgtcctccatcttcccatgcttaactggggcctaycccaggcatgtccttcccatggcaaaagtaccagaggaaaagcagaaacatgcagggtctcttacggcctatggttggggtcagagcgctgtcacctctg

SEQ ID NO: 520530 - DNA, 201 bp, Homo sapiens
caactccaaaactcagtgccacgcagcaatcagcatctcttccttgctcccgtgtctgcgggttgaccaggcagctcgtctaagctggcttggctgggttygtctccaagctgcaagttggatccccatgtcctccatcttcccatgcttaactggggcctaccccaggcatgtccttcccatggcaaaagtaccagagga

SEQ ID NO: 520531 - DNA, 201 bp, Homo sapiens
cctggatgtccctggacccccgccatccaatgtccagcttcagcgtaggacttggtgtccgcaagaatgaggcccacatccaggagcaggccagtttcacrtgaagcccagggctgaagccagaggccacgcagcaccacgtcggacagtgtttatctgtgctaatcatgaagtaacacaagtgaggtttaaaaatactac

SEQ ID NO: 520532 - DNA, 201 bp, Homo sapiens
gggtctctgccccgtggccaccgggtggcgctgctgcagagcacttggcaccggctgcgcttcctcagagactgccctgagcaggcgactggtgggggccygggggcatgggacattggtggttctttctgacctgcacctgctggggttgatgccaactgtggactctctctcttctctccctttctcctttttctcttt

SEQ ID NO: 520533 - DNA, 201 bp, Homo sapiens
gaccagggcgacatgtggggatctgacagagtgggcttgggcctttggggacaaaccatttcaattgccaaggccttcgcagctagtcacccgcagccagrcacctccagactctacgtgctctcccagcctcccacttcatttaccttccacactgcgactggggcactgatttcctgtcccccaccttcccccatggca

SEQ ID NO: 520534 - DNA, 201 bp, Homo sapiens
cccctgggcggtctcttctgcaccatgtgggcagcagaaactacacctacggtttcagaacaacagttggggtggtgtggaaggacctccacgacatatarggtgggagtgtggagtgatggagtgtggaaacccttctcacagttgtcacctgctctccagcccctcctgagcccgtggacctgcctgcctgccgtgtgt

SEQ ID NO: 520535 - DNA, 201 bp, Homo sapiens
gaggagccgcaagcgcaagcatccgcagacagtgtgagctcagcgtgctgggaaggcgggggcctgggtcaagggccaggcggcagagcataggggcctgrgggggcagtgcctaggagtgggaggaaagagcatgggaccagattcactttggaaatagaagcccccaaccagcagccagccaggtggaggaaggcgtgc

SEQ ID NO: 520536 - DNA, 201 bp, Homo sapiens
gaggcgtccagggaagacctccatgagaaggtgaccttggcataaagaggcaaacgtgggagcatgctcaggcagaccacggtggtcagaagttgaattcrggccggaggaggaggagtgcatgaagccctgaggtgggagtgagtctgtctgctgggttcacagaccccccagggagccagtgtggcaggggccagtgtg

SEQ ID NO: 520537 - DNA, 201 bp, Homo sapiens
gagacgagtaggtggaggagaaggcgtgtgagcaggtgacaggcgctggggagaaacagcccaggggagggaccagggagtgtgggggagacggggactgygatgaaagggaggcgtccagggaagacctccatgagaaggtgaccttggcataaagaggcaaacgtgggagcatgctcaggcagaccacggtggtcagaa

SEQ ID NO: 520538 - DNA, 201 bp, Homo sapiens
tccggagaaagctgcccttgttccacgtgcgagccctgtccccagcgccatgggctgtgctacctgcagtaacgcagactgcgagccccggctgcctctcyagtgctctctctcctctggccttcagcaggctgggtcacagaggtatccatccactcattcattcactcaacaaatatctgttccatgtctactaggtgc

SEQ ID NO: 520539 - DNA, 201 bp, Homo sapiens
ccaggctttgcagaccacgcggggcagggctccactgaagccacccccacccctcgccagctagctccatagggaagcctgtgtctcctgcccccagggcrcaccctcagtgcaggcacctctgttcccgctttgcccctggaggagccactattccagaaggctccaccctgccgtcctgcgggagcctgctgtccagtc

SEQ ID NO: 520540 - DNA, 201 bp, Homo sapiens
cctctccatcagggagcagcgggctcccccatgcctcctccagccacctcttagacaaagcccgtgcccagcactgcagggcttcctagaccccctcagayccccagaccaagatgctgggtctctcggcccagtcagaggcaaggcagacccatcaggggcccctgtggtgggtgtttctccctcaccttgggtctcgcc

SEQ ID NO: 520541 - DNA, 201 bp, Homo sapiens
tctgctcatcctccaagaccacccagctttctcccagccacagccaagattcccaaagtcaaggcccaaagatttccaaggttcccaaagtcaaggccagrccaaggcctggttgggtccttggggcgggcagggccggcctctcctctgctgagaatccccacttggtgtagggggagaggggaaaggggtctggcccat

SEQ ID NO: 520542 - DNA, 201 bp, Homo sapiens
tggaagagcctggccccacctcctccccaggccaggcccgtcttgttggtgggattctgatttgttgttgttcttgcacgcaggtccttccgaaactgtcrtcttccattatccacgagattgatagtattttgggcaataaaccctacagcaaaaaggactacagatcctaagccgcccccgcccgcctgctcggacagt

SEQ ID NO: 520543 - DNA, 201 bp, Homo sapiens
aaacagagcgtgacttgatgaataatttacctttgaaaaaagatacttgtcccggcgcggtggctcacgcctggaatcccagcactttgggaggccacagygggcggatcactcgagatgaggagttcgagaccagcctggccaacatagtgaaaccccgtctctactaaaaatacaaaaattagccgggcgtggtggcag

SEQ ID NO: 520544 - DNA, 201 bp, Homo sapiens
caaaacagagcgtgacttgatgaataatttacctttgaaaaaagatacttgtcccggcgcggtggctcacgcctggaatcccagcactttgggaggccacrgtgggcggatcactcgagatgaggagttcgagaccagcctggccaacatagtgaaaccccgtctctactaaaaatacaaaaattagccgggcgtggtggc

SEQ ID NO: 520545 - DNA, 201 bp, Homo sapiens
gtggcagctgggcaggagaggagacagggagaggcacggggcccctggcccagggatggattggatgtgggaggcgggacgtgggaggaagggaggagtcrgggtgactcccgggagtgggactgacacctgggagggtggggagctcgttactcatctggggccaccctgggaagaactgggctgggggtgagggcagtc

SEQ ID NO: 520546 - DNA, 201 bp, Homo sapiens
gctttccagacagatgagcccagcggaggggtctgaggtcaaaaagcccagtgcagatgccaagccgagaggcacctcccgtcccgagccccccacctctycgctgcctgctttggcctgggttatgctgccctgaagaatgtgtgggaggcagctccgtgcagcctccgtggatgaggccgggcacaccccatgtcacag

SEQ ID NO: 520547 - DNA, 201 bp, Homo sapiens
gccggacagtgagtgcacggccaaccccggcatcctgttcctcccactttatacatcgcagcccctgtggccctgccagtttctcctgagcgaggatgacraccttgcaggcctttggggaaccacgtctgccggtttcccaacactggagggagtgggggcggccaaatgctcctggggcatcctgaccccctccttgtg

SEQ ID NO: 520548 - DNA, 201 bp, Homo sapiens
gtctctgagtccagagccttgattgcgtccagaaccatcctccaggcataaaggaagtctccacaacacgtggtctacagaagctggaaaagctaaattargtctctggttcccaggtttcctgggaaagttttcccaaaacaggaaccgaactggggacaactctgcttttcagtgacctgaaactggagtgcaggccac

SEQ ID NO: 520549 - DNA, 201 bp, Homo sapiens
ttaaacctaccgtggttcctcagctaactgcattccctacccaggcagagactgtcctatgcctcgagcttccaaacgagactcagaccgcgacacagccmccgtatttatggaatgacaaaataaataaagcccaaacccatcggtctctgtgactttttgctcctctcatttcctcagggtcagggctgggccagggtg

SEQ ID NO: 520550 - DNA, 201 bp, Homo sapiens
gtggagctgatgggagggacctagcctgtgggctccctgcttggaccctgggccctgcaccccgtcagctgctaggctcccctcttgggtctggtgtgttkgtttctgaagcctgttctcccaagtcccggaggtgtcagggatcccggggccacccagcttagctgtgcctgcctccctctgcgctaaaggagccactgt

SEQ ID NO: 520551 - DNA, 201 bp, Homo sapiens
aattggtgtatgattgcgatcaagagtatatgggtatttattgctattctaattatttccacttttatgaggtttgaaagttttcaaagtagtgagttggyaggaagaaagaaaatgcccaaagagggagcctaccgaccttcctgggtcccctgtccttgtcagccaaccacgtaaagggaaagagctaggatttaatga

SEQ ID NO: 520552 - DNA, 201 bp, Homo sapiens
gaattagctgggcatggtggcacgcgcctgtagtcccagctacttgggaggctgaggcaggagaatcacttgaacccaggaggcagaggttgcagtgagcyaagatcatgccactgcagtccagcctggcaacagactgagactctgttaaaaaaaaaaaagagagagagagagaaagcaagcaagaaagaaagagaaaga

SEQ ID NO: 520553 - DNA, 201 bp, Homo sapiens
aaatagccaggctgggtggcacacatctctgatcccagctaattgggaggctgaggtggaaggatcccttgagccccataggtcagggctgcagtgagccrtgatcatgccactgcactccagcctggggaacaaagcaagaccctgtctcaaaaaaagaaagaaagagagaggggcatggggcagcgtggagaggaaact

SEQ ID NO: 520554 - DNA, 201 bp, Homo sapiens
tgcctgaggaatgagggagtcagctccgtgctcctgggggcctccaatgcggaccagctcatggagaacattggggcaatacaggtaagagtgagaggccytgctgggcagagggcccatcccagcccgagccccgtccagtgcatcctcccaggctcgtcctgcgtgccaggctctgttctaggcactcaggatgcgccc

SEQ ID NO: 520555 - DNA, 201 bp, Homo sapiens
cagggcttcctagaccccctcagacccccagaccaagatgctgggtctctcggcccagtcagaggcaaggcagacccatcaggggcccctgtggtgggtgyttctccctcaccttgggtctcgccgccacagcctggtgcctgaggaatgagggagtcagctccgtgctcctgggggcctccaatgcggaccagctcatgg

SEQ ID NO: 520556 - DNA, 201 bp, Homo sapiens
ccgtgcccagcactgcagggcttcctagaccccctcagacccccagaccaagatgctgggtctctcggcccagtcagaggcaaggcagacccatcaggggyccctgtggtgggtgtttctccctcaccttgggtctcgccgccacagcctggtgcctgaggaatgagggagtcagctccgtgctcctgggggcctccaatg

SEQ ID NO: 520557 - DNA, 201 bp, Homo sapiens
aggtcatagaccagcacatggcagagccagtgccaactccaaagcccagatccgaaccactgagtgggcctaacctccttcccaggaacccagactgatcrcctcaggtcacccaaaggggatggaatagtgtcatcaaccagctcccaaagaagatcagagcatgtgcagtcagcactggcaagatttcagcttagagag

SEQ ID NO: 520558 - DNA, 201 bp, Homo sapiens
ctgatcagaacctccagccctttgcttcattattggactcctactaagcatttataatttcttaccacagttactttctagccagcatgggggaaattacstaaacttctaaactgaccaggcttatgtggaatgtattagtggtacagttgggctgttctccccagcagccacagacacgagttattctgggttggaaca

SEQ ID NO: 520559 - DNA, 201 bp, Homo sapiens
caggccatcgccgagcgcctgggctgcaccctgccccagctggccataggtaacggtggggtcgccatggggccagtgcccctggggagaacctgccccarctggccgtaggtaacagggtggggttgccatggggccagtgtctccggggagagagggaagggatccctggacatcatcccccagccagcctcgggtaat

SEQ ID NO: 520560 - DNA, 201 bp, Homo sapiens
gaaagtggaaaagacagagaagcctcctgacagccaaggagaccagcagccagtagagcaggtgttgtaacaaggccgaggaccctcagacaccaattttkctggtaagaccgctgcccaggatgcaccgtacaagagcagcttcacctgccttcatgcagatggcacagatgtccaggaagcagctgtggtcagtgactc

SEQ ID NO: 520561 - DNA, 201 bp, Homo sapiens
gaagctatgagtgtgagcagtggggagcccgggctgcagctgctgggccagcctgctccggggacaccttggtgccctctccatggctgccccggcagccycccgcctgctcacaggcaagggccctcggggtccctttctgccttcacaggaggcctactccgtggcccggcagttcaacctgaccccgcccatctgcga

SEQ ID NO: 520562 - DNA, 201 bp, Homo sapiens
gaagagcagtcacagcggccctgcgcagccccccaggccatcacctccggctccacaagtgacaccagagagagccctcccttctccagtccaaggaaggygggtgtgctcatcacccgtcactcatcatcaggagtaactcacagcccagccctgcccaacacttttggagactgttgggctgaggacttgggcagccag

SEQ ID NO: 520563 - DNA, 201 bp, Homo sapiens
tctgaaatttgaaatttcgacgccaagttctgtttttaaaatcacaatatccccatgaggctgagagggagctataaccagcagattgctgtgtctcaaarccatgtttgaatattgggaagaatccactgtgtcgctggggcgagggtccctcctctcttctttaaaaggccagcgtgaagtctccgcgatttcatcctc

SEQ ID NO: 520564 - DNA, 201 bp, Homo sapiens
acgtgaattcccctgggcccctgatctacaggaatagatttgcaccaggcaggcccagcccaggaaagaacttgtgggttccacgtaattagcaatggctrttgaggaggggctcgtttttcttggtaccagggtggtgagggagtgtcagggctcagagaccctcactctggaaagcggccgggatttgggatattttga

SEQ ID NO: 520565 - DNA, 201 bp, Homo sapiens
atccggaattagaccctccgtgtttttgcaaagcagaagaccttaaaaaagagccagcctgaggtaaacttggaatgaccgtgatggatggggtggtgggsggcaggtttcagccgggcagcacctctcgcttgagtctgctcacagcccagacctgcccaaggctgactgttttcccatctgccggagacacgggcgtct

SEQ ID NO: 520566 - DNA, 201 bp, Homo sapiens
aaatcaaagccccccaccccctgctgctgcccccctcccctctgagccctgtgaccaggcctctccctgggcctctgggagttcagccctgtagcctcggstccctacccccaaagtggaatccgactccacacggcatttgctgaccctgtttttgcgtctaacattgcatcgtaaacgttttttgggaggggccagggt

SEQ ID NO: 520567 - DNA, 201 bp, Homo sapiens
gctcccgggaggatccggggacaggatgcctggggactgcctggcctgctgcaaccctgcaggctcctaggcaacctgtgccaggacatacgggcatgccrgtcctcagcagagggctgccaccctccttcacctcctaaggacagtcatgatggcccaaggcctgttcctgtggaccctgggatgcaccacagtgggcag

SEQ ID NO: 520568 - DNA, 201 bp, Homo sapiens
gcacaggccatgtggtccagtgaagtgggacgatctcctgccccagtcgctggagacaggaagaagagacacaaaatcacaaatgcagccttagagaggarggaagaaggggcttctctgcaaggggcgccgcatggatggtgccatgggggtgagaccagtccagtttcgccataaaacagacagcgtccctgtgcattt

SEQ ID NO: 520569 - DNA, 201 bp, Homo sapiens
cgcgagggcacctcctgccgcgtgggctcctcctgccgcgtagggctcctcctgccgcgtagggctcccgggaggatccggggacaggatgcctggggacygcctggcctgctgcaaccctgcaggctcctaggcaacctgtgccaggacatacgggcatgccggtcctcagcagagggctgccaccctccttcacctcct

SEQ ID NO: 520570 - DNA, 201 bp, Homo sapiens
tggtgtcggccggggagcagcagggacccctgagccccacagtcggggctcatggcgctgagaagcactgcagcaagggcgcagccagtaggagaggagcygcaagcgcaagcatccgcagacagtgtgagctcagcgtgctgggaaggcgggggcctgggtcaagggccaggcggcagagcataggggcctgagggggca

SEQ ID NO: 520571 - DNA, 201 bp, Homo sapiens
agggacttctgagtgagacgggagccgtggcaaaattgtgggcagaggagggcgagctgcagctcagcctggaaagggaggctgctctccggctgctccaycggggaggctttgggaagcaaaagtcgaagcagagagccctggtgggaagtggcagctgcgggtccgagacgggagtggtggttggatcctggatgtttg

SEQ ID NO: 520572 - DNA, 201 bp, Homo sapiens
ggcgccctgtcccttcgcatcccttctcccgaggcctggcagcggatggcagaaccaataccatcattttcacagggaaacaagttgagcagggtaattgyggcatcacgtggtgccctagttttgttaaattagtcctgtgggtggtgggtggaagagcggctgaacccagagcccactcggggaagtgggcccatttcc

SEQ ID NO: 520573 - DNA, 201 bp, Homo sapiens
agccatgcttacaaagcgttcagcctggaggcgccctgtcccttcgcatcccttctcccgaggcctggcagcggatggcagaaccaataccatcattttcrcagggaaacaagttgagcagggtaattgcggcatcacgtggtgccctagttttgttaaattagtcctgtgggtggtgggtggaagagcggctgaacccag

SEQ ID NO: 520574 - DNA, 201 bp, Homo sapiens
tccccagaaatcatcgtggaagcggcgaatgagtggcaggaggtgcatggagagtcctggctctgcaggcgagcagcctgccccagctctttcctccttaraattgtgtgactttagccacatcatttagaagacacagatgatagaggtggtagaaatggaaagtgcaactctctacctgctgttgcccaccaccaggac

SEQ ID NO: 520575 - DNA, 201 bp, Homo sapiens
ctggccctcgagtgttgaagatttaacttgaaagccatgagggcgctcttccccagaaatcatcgtggaagcggcgaatgagtggcaggaggtgcatggasagtcctggctctgcaggcgagcagcctgccccagctctttcctccttagaattgtgtgactttagccacatcatttagaagacacagatgatagaggtgg

SEQ ID NO: 520576 - DNA, 201 bp, Homo sapiens
cctgcgccacatggggagaggtcacctgggggacttgtttccgtgggaacctcaggccttgggcctgagtgaggagatgtctgaagcctctggcctgggcsgagagtgagaccccagagcagccctgcccattcctctgggagcagcctcagtgaaagctgtaaagcagggaaattggacacgtccaggccagaaagagca

SEQ ID NO: 520577 - DNA, 201 bp, Homo sapiens
cggctccatccgtggggagccgcgccacctctgcgcctcctccgcgcctcctctgcgccccgcgccgtgctgagtcaggctctgaaacgcagtcatcatcsggaagtggttcttgctgtggccccatccccctgtgtgattttcctaccttggctcacttaaaatttcaatctggctctgagaggagactcagcatttcct

SEQ ID NO: 520578 - DNA, 201 bp, Homo sapiens
caggagattggaggagagactgaggtttctctgtgacaaacacagggaatcctgactgggatctccaatctctagtaaggtttgcacagttcttctcctcrcatttctttggctgcatctgagccaaagtctggatggagctgtcggggaactgggttatgttgacctcccaacccctgcccaccctctggggtgtccttc

SEQ ID NO: 520579 - DNA, 201 bp, Homo sapiens
tacattcccaccaacagtgcacagggtccccatttctccacatcttgccaacccttattattctgggcttttttatagcggccatcctaatggctgcgagrtagtatctcactgtggttttgatttgcatttccctaatggttactgacgttgagcaccttttaatgtgtttattagccatttgtgtcttgtctttggaga

SEQ ID NO: 520580 - DNA, 201 bp, Homo sapiens
attttacattcccaccaacagtgcacagggtccccatttctccacatcttgccaacccttattattctgggcttttttatagcggccatcctaatggctgygaggtagtatctcactgtggttttgatttgcatttccctaatggttactgacgttgagcaccttttaatgtgtttattagccatttgtgtcttgtctttg

SEQ ID NO: 520581 - DNA, 201 bp, Homo sapiens
gagtgtatagttcagtggtattgagtgtacagttcagtggtactgagtgtatggctcagtggtattgagtgtacagttcattggtattgagtgtacagttyggtggtattaaggatacagctagttggtattgagggtacagctcagtggtattgagtgtataattcagtggtatcgagtgtgtaattcagtggcattgag

SEQ ID NO: 520582 - DNA, 201 bp, Homo sapiens
agctatgcctggtgcctgtccctgttaagggacgtcaaatccagaaaagaagctgtggccgagtttgccttttacaaaaacctcgcttaactttccttttwactcacatggattattttttcctggtcactatggtaacatcataaaaattatagagaaaacagaaaatttgtgaactgcccaaacccccaaagcactcca

SEQ ID NO: 520583 - DNA, 201 bp, Homo sapiens
agttcagtggtattgagtgtatagttcagtggtattgagtgtacagttcagtggtactgagtgtatggctcagtggtattgagtgtacagttcattggtaytgagtgtacagttcggtggtattaaggatacagctagttggtattgagggtacagctcagtggtattgagtgtataattcagtggtatcgagtgtgtaat

SEQ ID NO: 520584 - DNA, 201 bp, Homo sapiens
atctcctccggactccggtcacactaggccccccactgtccaactcccactgcctgactcacagttactgcctcggtggctgcctcctggctccatgaggmgcccacgcaccccggctgggcacgtggtacacatcatatgatggagaagtgcccatttcatgccccaggctcctgggtgggagggctttcaggacctctg

SEQ ID NO: 520585 - DNA, 201 bp, Homo sapiens
aggtaacggtggggtcgccatggggccagtgcccctggggagaacctgccccagctggccgtaggtaacagggtggggttgccatggggccagtgtctccrgggagagagggaagggatccctggacatcatcccccagccagcctcgggtaatcgggctctaaggggcatggttgggaccccatgcctctagggggatgt

SEQ ID NO: 520586 - DNA, 201 bp, Homo sapiens
gctgaagtacagtggcacaatcacagctcactgcagcctcgaccttccaggctcaagccatcctcctgcctcagcctcccaagtagcctggactgcaggtrcacatcaccatgcccagctaatttttttattttattttttgtagagacagggtttctccatgttgcccaggctggtcttaagttcctgggctcaagcgat

SEQ ID NO: 520587 - DNA, 201 bp, Homo sapiens
agtccctgagccaggcccccctcccacatcctgggcggaaggcatctcctccggactccggtcacactaggccccccactgtccaactcccactgcctgaytcacagttactgcctcggtggctgcctcctggctccatgaggagcccacgcaccccggctgggcacgtggtacacatcatatgatggagaagtgcccatt

SEQ ID NO: 520588 - DNA, 201 bp, Homo sapiens
gcaatagtgcgatctcggctcgctgcaacctctgcctcctggattcaagtgattctcttgcttcagcctcctgagtagctgggattacaagtgcccaccaycatgcctggctaatttttgtgtagagatggggtttcaccatgttggccaggctggtctcgaactcctgacctcaggtgatctgcccgcctcggcctccca

SEQ ID NO: 520589 - DNA, 201 bp, Homo sapiens
tggctcttgccacttcctctacctggatcaaatccatgcacccctcatagtccctgagccaggcccccctcccacatcctgggcggaaggcatctcctccrgactccggtcacactaggccccccactgtccaactcccactgcctgactcacagttactgcctcggtggctgcctcctggctccatgaggagcccacgca

SEQ ID NO: 520590 - DNA, 201 bp, Homo sapiens
aatttctatttttattatttatttatttttgagacggagtctcgctctgtcacccaggctggagtgcaatagtgcgatctcggctcgctgcaacctctgcytcctggattcaagtgattctcttgcttcagcctcctgagtagctgggattacaagtgcccaccaccatgcctggctaatttttgtgtagagatggggttt

SEQ ID NO: 520591 - DNA, 201 bp, Homo sapiens
cgttgcagagagcttccctgcctgcctcccacctacatctttccatcctcaactcctgccagatccccccagagcccgcccctgccccctggcccacaccsggcctcctccagccttggctcttgccacttcctctacctggatcaaatccatgcacccctcatagtccctgagccaggcccccctcccacatcctgggcg

SEQ ID NO: 520592 - DNA, 201 bp, Homo sapiens
cagtgagctgtgatcatgccactgtactccagcctgggcaacagagtaagttcccttctcctaaaaaaaattaaatgaaataaataaaactgtaaaaactrttcttagctcgagggctgcacaaacacaggtgacaggctggcgcagcagttttccaacccctgtcctacagcaaggagggaagccgtcacactgcactct

SEQ ID NO: 520593 - DNA, 201 bp, Homo sapiens
tgccaggcattttccctggtgaattttcagctgactaggaaatgggatgctcgacagcagctccttccttctgtgtgagagctggggccgccactgcttaracacgtgtctgcaggggaacatgccacagccatcctagtggggggcaataacacagctgctcccactccctcgggccaaccctgtctgtggaatgagcta

SEQ ID NO: 520594 - DNA, 201 bp, Homo sapiens
ggaggccacagtgggcggatcactcgagatgaggagttcgagaccagcctggccaacatagtgaaaccccgtctctactaaaaatacaaaaattagccggrcgtggtggcaggtgcctgtagtcccagctacttgggaggctgaggcaggagaactgcttgaacccaggaggcagaggttgcagagagccgagatctcgcc

SEQ ID NO: 520595 - DNA, 201 bp, Homo sapiens
gtcccggcgcggtggctcacgcctggaatcccagcactttgggaggccacagtgggcggatcactcgagatgaggagttcgagaccagcctggccaacatrgtgaaaccccgtctctactaaaaatacaaaaattagccgggcgtggtggcaggtgcctgtagtcccagctacttgggaggctgaggcaggagaactgctt

SEQ ID NO: 520596 - DNA, 201 bp, Homo sapiens
aaccgcctccagcccccatctgcagcccttttggccctccggatggcacagccccctcccactccctccatactggcagcagcttcccatcaaagtgaacygctttccagacagatgagcccagcggaggggtctgaggtcaaaaagcccagtgcagatgccaagccgagaggcacctcccgtcccgagccccccacctct

SEQ ID NO: 520597 - DNA, 201 bp, Homo sapiens
atgttaggctgcagctaccacccagtagtgaggcgcaggccccccgaccagggcgacatgtggggatctgacagagtgggcttgggcctttggggacaaaycatttcaattgccaaggccttcgcagctagtcacccgcagccaggcacctccagactctacgtgctctcccagcctcccacttcatttaccttccacact

SEQ ID NO: 520598 - DNA, 201 bp, Homo sapiens
ggcctatggttggggtcagagcgctgtcacctctgctcacgtgcttttggccaaagtaagtctcaggaaccagcccacagtcaaggggctggaaatatatygcccccaccagtgggaggagctataaagtcacatggcaaagggcatgggtacagagaggggtgaaggattgggagcaatacttccatgtaccccaggtct

SEQ ID NO: 520599 - DNA, 201 bp, Homo sapiens
gtggacctagatgctcagagtgatctgtgccacgccttcagtgcctcctcggaggtcctgctccttacagggagctctgaagacatggccaactcttagawcctactgaaattttggtagataagattttgcttaagatagttaaatctgaactccggcttgcaaatgctttccctggatgaaatgtttgtattgtgatgt

SEQ ID NO: 520600 - DNA, 201 bp, Homo sapiens
agaccagtccagtttcgccataaaacagacagcgtccctgtgcatttccatctgtccttgagaccactctgcagacccccactgggcaccagcagggcccrtgccagcagcatggtgtgggccgggggcagttggcactttacccccggggtgggtgagcagaggcacctctctgaaggtccccggtgcctttcggagcct

SEQ ID NO: 520601 - DNA, 201 bp, Homo sapiens
accattatttagttgactgcagagaagaaagtagaaaaaggagggcaggggggcgggggtcctgacgacagggtggtcaggaagcagaagcgagcaaggamgccacgtggtggtccagagaaagagccttcgggggccaaggggacaaccaaggcacagccctaaggccgagtgttggggagaaggggatgcaggggatag

SEQ ID NO: 520602 - DNA, 201 bp, Homo sapiens
agggtagagtgggggacatggaagctgagctgaggggtgagggtagagtggggggatgtgggagctgagctgaggggtgagggtgcagtggggggacgtgkgagctgagctgaggggtgagggtagagtggggggatgtgggagctgagctgaggggtgagggtggagtagggggacgtgtgagctgagctgaggggtggg

SEQ ID NO: 520603 - DNA, 201 bp, Homo sapiens
ttgtagggtgtggcacctgcccagccctcaggggtcctggtgcagcttagcaagctccttggccaccagtccctggtgactcagatcaggggttccaagarcatgctttgagaaacactccctagccctagccgtttcagtctgtcagtgaacctgcccacctctacttcttaaggaagcacacgaggaagctgtttgtga

SEQ ID NO: 520604 - DNA, 201 bp, Homo sapiens
ggaaggcggcgcaccgcgccgcacactcagtccaagaacccgcctcgcgtcactgtcgccgtcagggccgcggagccaatcagagcccaagtcgagggctrcgctttgcgagcgccagccaatcggtgcggcggcgggcccatcctgatttgcatgtccgacgacccctcaaccaatggtaatgtgactggcgtgaacaat

SEQ ID NO: 520605 - DNA, 201 bp, Homo sapiens
cactggtcacctctgtctccccgcccttgcccaggtggccccagctcacacctgcattgcctcggagactcctgacgacacccaccccctgctgctgcccrggcccccccagcagtcggttctcagtgatcttgagaagcaccactcagctcaccctacgaggaggcctttggctgttcccgtatttgtctctggacttct

SEQ ID NO: 520606 - DNA, 201 bp, Homo sapiens
gtctcagcctcttggattgccagccactggtcacctctgtctccccgcccttgcccaggtggccccagctcacacctgcattgcctcggagactcctgacracacccaccccctgctgctgcccgggcccccccagcagtcggttctcagtgatcttgagaagcaccactcagctcaccctacgaggaggcctttggctgt

SEQ ID NO: 520607 - DNA, 201 bp, Homo sapiens
ttgagcaggaaccccaaggaacagcatcccaggtagagggatctgagtctgcaaaggccctgggcacaaaagaaacaaccacccaatccagggctggggargagccctgtcagaggacagcaccagcctccccacgtggatgcccgaccagcatctgaggccagacacagccgccactggctccagggctcccccacacca

SEQ ID NO: 520608 - DNA, 201 bp, Homo sapiens
aactgcagcggggcccagagcacccggcggcagggaacccaactgggccctgctcaagttcccacccagagcctggggagcgcacagccctgggggctgcygctgggaccctcaaaccgcctccagcccccatctgcagcccttttggccctccggatggcacagccccctcccactccctccatactggcagcagcttcc

SEQ ID NO: 520609 - DNA, 201 bp, Homo sapiens
ccacgaagggcttttgagaaaagcatggcatgaaaagatctgctgttgagaaatagaaacggggctctggtggcaggttgacaaccatggtccaggcaggrgcttccaaggcaagtggtggaggtgggcgagagggagagttccagggatatccgcgtggatggagccaacacctggagcccagggcaggggggtgggctg

SEQ ID NO: 520610 - DNA, 201 bp, Homo sapiens
ggctgtaatcaaatcatccactctcctgcatcgggtttccagaagtcagcttttgtttgtgaaatcatttgttggccctctcttcatcctccttctgcccycctcctgcctggggccagccaagttcccgtcagccgggcaggctgcaggcctgggctgctgtgcaccatagctgcttggcccgcagctgcttcgtgggcc

SEQ ID NO: 520611 - DNA, 201 bp, Homo sapiens
tcctgggctctcctgatgtgcctgacattttgacatttcatgtctcacttgtgcaactagggctgcagggcctcagagctggggagggcaggctccggccragtgctgtggggagcacttcccatcttggcggtgaactttcctgctcaattatgtaaaagctcagccttcttcagccaggctgttggcttcaattttaaa

SEQ ID NO: 520612 - DNA, 201 bp, Homo sapiens
gagttgggggatgaggcagtggggccctgtgaggccctgcggtttctatcggagtgctctctgacccccggtgttccctctctgtctctctatgtctttascaggtgtttcccacactttagtcattggcctttcatctcatgatttgggtcatctgtgctatttcttttctttttttctttttttttttttttccgacag

SEQ ID NO: 520613 - DNA, 201 bp, Homo sapiens
gggccccacccccggctggcaggacagtgtcggttttctcgtttcagatggcagagcagctcatgaccttggcctatgataatggcatcaacctcttcgayacagcagaagtctacgcagccggcaagtacgtgtcttttcacacgggaaaaagtggttcagaatgcctgggcagagccggagctacagggattcctgccg

SEQ ID NO: 520614 - DNA, 201 bp, Homo sapiens
tgagccaagtccggttccgctgcgctgggtcccccatggcagaaaggacccgcccccccatcaccctgacagtggcttgcatgcccaagagcagccagcayccaggacaggcttccctcgttcctctgttcatcctctttaagaatcactcagagccaggcacggtggttcacgcctgtaatcccagcactttggtaggcc

SEQ ID NO: 520615 - DNA, 201 bp, Homo sapiens
ctgctgtaacaaagtaacataacctgggggcctgaaacaacagacaccgttctgtcaccttctggaggccagaggtctgataccaaggtgttggcagggcmaggttccctgtaaaggctcgggggagggtccgccccatgcctctttcagctcctgggggttgccaacagtccttggcttgtagacgtgtcactctggtct

SEQ ID NO: 520616 - DNA, 201 bp, Homo sapiens
ataacaattcagtcctcatgtgcaggtgctgggaaagattcaatgagatacaactgaatacaccgccctggctttaaggacatagactcatcccagcaacrtccacagagcccctgctggggactgccttggtttcctaggactgctgtaacaaagtaacataacctgggggcctgaaacaacagacaccgttctgtcacc

SEQ ID NO: 520617 - DNA, 201 bp, Homo sapiens
gatgtcacccaccatgcaccagctgtgggatgtcagttgctccatctacaaaaataacaattcagtcctcatgtgcaggtgctgggaaagattcaatgagrtacaactgaatacaccgccctggctttaaggacatagactcatcccagcaacatccacagagcccctgctggggactgccttggtttcctaggactgctg

SEQ ID NO: 520618 - DNA, 201 bp, Homo sapiens
ccacgaccagttctttgctcatggagcacaatcgcgtcctgacagcagccatggagcaaagtctgatgcacagcgcatttagctcgggcagtcattcatcsatcttgcccatgaggcagccaccaccacagcagtgccgctcagggccgggagtatgtgccgttggagaaacactggacaagaggccagaatggatgtcac

SEQ ID NO: 520619 - DNA, 201 bp, Homo sapiens
ctccgtcctcactctccatacctcctggccacaagggcttctgagttcagaaaggagagacgcagccctgtgaagccacccctggctggttttctgtcctrtggtttttgagggttattaagaattattcaccccacgctgggcttgttgctggtgaggcccagtgctctgagccgcacctggggaagcgtgacactcaga

SEQ ID NO: 520620 - DNA, 201 bp, Homo sapiens
ccccgggcttcctgactcaaatcacagccgctcactaaccggggctcagcttcagctgtgctgtatttcagtgtctgagatgtttggggatgagtgccagygtcgccaggctgccggccagatttccatacaccccccacccacaaacatgctgcctttctggcttctcttgagaggttggcagatctctagcaccaggtc

SEQ ID NO: 520621 - DNA, 201 bp, Homo sapiens
tgacctcgtgatccacccacctcagcctcccaaagttctgggattacaggtgtgatccaccatgcctggcccaaatgagggtctttaagaataaaactccrggggatcgtcaccaagccccaccacttcctctgaggttagcatagtgctggatcttctctgcatcttctgtccttgtttttggttttcattttggtttac

SEQ ID NO: 520622 - DNA, 201 bp, Homo sapiens
tcaaaacagagcgtgacttgatgaataatttacctttgaaaaaagatacttgtcccggcgcggtggctcacgcctggaatcccagcactttgggaggccamagtgggcggatcactcgagatgaggagttcgagaccagcctggccaacatagtgaaaccccgtctctactaaaaatacaaaaattagccgggcgtggtgg

SEQ ID NO: 520623 - DNA, 201 bp, Homo sapiens
ctcaaaacagagcgtgacttgatgaataatttacctttgaaaaaagatacttgtcccggcgcggtggctcacgcctggaatcccagcactttgggaggccrcagtgggcggatcactcgagatgaggagttcgagaccagcctggccaacatagtgaaaccccgtctctactaaaaatacaaaaattagccgggcgtggtg

SEQ ID NO: 520624 - DNA, 201 bp, Homo sapiens
gatcccaggtcccaaggagtgacaggggcttcctcccaccttctgtccttgtccagtcatgtaaataatgtgctttttctctccccgagtctttttttttwaacctaccgtggttcctcagctaactgcattccctacccaggcagagactgtcctatgcctcgagcttccaaacgagactcagaccgcgacacagccacc

SEQ ID NO: 520625 - DNA, 201 bp, Homo sapiens
gatgcacagcgcatttagctcgggcagtcattcatccatcttgcccatgaggcagccaccaccacagcagtgccgctcagggccgggagtatgtgccgttrgagaaacactggacaagaggccagaatggatgtcacccaccatgcaccagctgtgggatgtcagttgctccatctacaaaaataacaattcagtcctcat

SEQ ID NO: 520626 - DNA, 201 bp, Homo sapiens
attaagaattattcaccccacgctgggcttgttgctggtgaggcccagtgctctgagccgcacctggggaagcgtgacactcagagggaagcagccctgtycgagagccagaagctcaggggcacctttctctccggcctcttggagggagctgtcacttgcagaggggctcccctcgctccatgagtcccaccccacgac

SEQ ID NO: 520627 - DNA, 201 bp, Homo sapiens
actcctgccgccgcatagggctctgctgcgtaggactcctgcggcgagggctccctcctgccgcgtgggctcctcctgccgcgtgggctcctcctgccacrtagggcacctcctgccgcgagggcacctcctgccgcatagggcacctcctgccgcgagggcacctcctgccgcgtgggctcctcctgccgcgtagggctc

SEQ ID NO: 520628 - DNA, 201 bp, Homo sapiens
ctggaccccaagctctggacctctactacccaatttcaaaaaggtcgtagtatatagctcatgtcccagaaccagccacgtctcctcgtcgtcgtttcacygcaacctcgccagcaatgagtattttcatttaaaaatgtttttgtctgctggctatgtgattgcagaggcatggctggccccagcttgcagcggtcgctt

SEQ ID NO: 520629 - DNA, 201 bp, Homo sapiens
gacctcccggcctccccaactccccacctcctcactttcgagagcgcataaaatctgcaaatccccatttgtcagacttgggcagtttgtgctgagggccrggaggggctgtgcttagtgcttggtagatgatgagaaacagcgtggagaatccggtcagtgctaagtttctttcttcccagtttcagggggagatggtga

SEQ ID NO: 520630 - DNA, 201 bp, Homo sapiens
tggccacattataccctcccgtttgtctatagttcacttaaacattatttcctgggagatccggcagctcttcactcttccgaatcaggctgtgggaaacrtttgtgtgcatctcgctttatttcctctcttgaactattaggataaagtcacagaggtaggattcctggaccccaagctctggacctctactacccaatt

SEQ ID NO: 520631 - DNA, 201 bp, Homo sapiens
cagcagcaggtccctcgggcggcggatgcatttgatgcatggatgcatttgatacctcagggcagttgagctgcagcaggaagacaacaacagagccccgrcaggtggatcctgaaaaccgacggcctccacccccgggcttcctgactcaaatcacagccgctcactaaccggggctcagcttcagctgtgctgtatttc

SEQ ID NO: 520632 - DNA, 201 bp, Homo sapiens
tgatcaccggttgttggagtggcctggccacctgctgggctgtatgggtgctgagggcctggctgagccccgtgatacacccatgggggtgggtctctgargagcagtctgtgtgagcagcaggagaggtggcacctcaggtcaggggacgcttccccccaggctctggaggggacaggataacacctgtccccaggcttg

SEQ ID NO: 520633 - DNA, 201 bp, Homo sapiens
ggaggctgggggggcagcagcaggtccctcgggcggcggatgcatttgatgcatggatgcatttgatacctcagggcagttgagctgcagcaggaagacarcaacagagccccggcaggtggatcctgaaaaccgacggcctccacccccgggcttcctgactcaaatcacagccgctcactaaccggggctcagcttcag

SEQ ID NO: 520634 - DNA, 201 bp, Homo sapiens
gagcgtgagtgccctaaccacagacttagccccttcggggcccagcgcaccgtgccctcctgggctctctcctcctgggcctggatgtgggaggcatctgrgaaaagtcaggaggaagacgaggaggaagcagtgagcaggtgaacaagccacccgtctgtccgtgctggagccctggtgctgggaaggaaagtgctagag

SEQ ID NO: 520635 - DNA, 201 bp, Homo sapiens
tgttggttgccctgcataggttggctgcgtagtgctttacgttctgtgtaagaattgtggagtcttggggcctgggtgggccgagggtcctgagatatcgrtgtgcccagcaggcttgtagggtgtggcacctgcccagccctcaggggtcctggtgcagcttagcaagctccttggccaccagtccctggtgactcagat

SEQ ID NO: 520636 - DNA, 201 bp, Homo sapiens
ctgtttcccactcagctttgtgctcagatcccaggtcccaaggagtgacaggggcttcctcccaccttctgtccttgtccagtcatgtaaataatgtgctwtttctctccccgagtctttttttttaaacctaccgtggttcctcagctaactgcattccctacccaggcagagactgtcctatgcctcgagcttccaaac

SEQ ID NO: 520637 - DNA, 201 bp, Homo sapiens
tagagacgatttcaacggcgcattcttccatttcctgccttaatggggggcatttctggggacacccgtgaactgcgggctggggcttagccttgttggtkgccctgcataggttggctgcgtagtgctttacgttctgtgtaagaattgtggagtcttggggcctgggtgggccgagggtcctgagatatcggtgtgccc

SEQ ID NO: 520638 - DNA, 201 bp, Homo sapiens
atattttaccacaacttaaagtctctttgataaatgcagtaatgttttaattaaacaaaaagaatgaaagggatcttcatgagcaggtgtggattggtttytaggatgtattgtgagtgaaaaaatcaaagtgcagaaacatatgggtagtgtgccacccctcctggaagaaagatgggggataagaaaatacatgtgtct

SEQ ID NO: 520639 - DNA, 201 bp, Homo sapiens
gagggcacagggtggctccggggctggcgggcgtagacgaagccgctttgctgcttaaccgcaactgccagcagcaccctctttcgtccgcccctttagaracgatttcaacggcgcattcttccatttcctgccttaatggggggcatttctggggacacccgtgaactgcgggctggggcttagccttgttggttgccc

SEQ ID NO: 520640 - DNA, 201 bp, Homo sapiens
gaaccttgaggacattacactcactgaaacaagccacaaaaaggacacacggtgtgactgcatttgtctaaggtgcctagagtagttaaattcataaataycagagaatgatgggtgctggggctggaggcagggagcggggaaggggagttactgttcaatgggtacagtttcagtttaggaatatgacagggagatgga

SEQ ID NO: 520641 - DNA, 201 bp, Homo sapiens
gggaagatgaaggtcaagacagacagtagggaaccctggattcttccagagcccggggaggagaggaaaatagaggatgaggcaggtatctgctgcatccrgtgggccagctgctgccaaggaggcagcctctgttgagaggggaagcagagctgggctcccaggagcagcgagggggcgcaggaccccagattcagcacc

SEQ ID NO: 520642 - DNA, 201 bp, Homo sapiens
agcacaggtgagcgagacctcccgggagctgatgctgccgcaggctgccctccctggcccacaccagccccagggcctagagtgcccctcccccacccacyctctccttgcctgcctgacaaactcctaaacacccttcaaaacccagtctttgtcggccgcactttgggaggctgaggcgggcagatcacttgaggtcag

SEQ ID NO: 520643 - DNA, 201 bp, Homo sapiens
cagattctggactaatttgcaggggaagccgcggcaggggctgaacttcaggctccagtgatgggaggattagtcaaggagggctccccagggtttgacckgagcacaggtgagcgagacctcccgggagctgatgctgccgcaggctgccctccctggcccacaccagccccagggcctagagtgcccctcccccaccca

SEQ ID NO: 520644 - DNA, 201 bp, Homo sapiens
tgtcacctgctctccagcccctcctgagcccgtggacctgcctgcctgccgtgtgtctgtctgtcgtctgtctgtctgtctctctgctgaggggctccccratgccctgaacccagacagcctcctcagcctttgtgatcccagagtctcccggccaaacctggttgatcttttttaaccaccaccctcttcccctccctt

SEQ ID NO: 520645 - DNA, 201 bp, Homo sapiens
cagcccacactccaggacaggggctgcccaagggcaggaatcccaggagctgcggacatcagtggcatctgagaagctgcctgacttaggagctcaatggmagcaccaggaagctgcactgggctggagtcagggcaagggacagtgtcagcgatgaccctgggggacagcagtgcagtcaggagctcagaaagtacacag

SEQ ID NO: 520646 - DNA, 201 bp, Homo sapiens
gaggacagaaggaggaagagaaagagaggtgctcgcttggggctggagagttgcatgggaaacagcagcaactcagagcagagccggccatctcacagccrcgggcctctctcccctttctgggctcctagagttggaagtgagtggggccatgaggtcctggtgagcaagaggaaggaggaggaactggctttgcagacc

SEQ ID NO: 520647 - DNA, 201 bp, Homo sapiens
gcacccggaacacccccagcctctgtgagtttaggtcggaaggcgctgcgtggtcttggtcttaatctactttccaaagcacatgtctcgttcgggctgcrtcctagatggtgggaagacaggactgactggaagctggtctgaggctctctctgcagtccagatgtggatggcagggagcctctgcggtccttgggcact

SEQ ID NO: 520648 - DNA, 201 bp, Homo sapiens
tcctctgtacacgaggggcactcccatgggcactgagcagggggcagtggcagtggcaggaggcagaagggtccctgccctcctggactcaaccttcaggrgagtgaattcagcacacaggacagctagaaaggaatcagcaaggtggatgatggcgagcgccatggagacagatcacagcaggaaagaggcacatggtgt

SEQ ID NO: 520649 - DNA, 201 bp, Homo sapiens
ggggctacagcctgcccagctggccttctttctaaacacagacctcagggaagtgagggttggcccccatttgccccacaccggactggcagctagccacrtggccacctcagaagcagctgcctgccacgcgcatggagggaagggagtggccggccagtaggcagggaagggaagctggtgctgctgtctgtgggtgcc

SEQ ID NO: 520650 - DNA, 201 bp, Homo sapiens
aatcagcatctcttccttgctcccgtgtctgcgggttgaccaggcagctcgtctaagctggcttggctgggtttgtctccaagctgcaagttggatccccrtgtcctccatcttcccatgcttaactggggcctaccccaggcatgtccttcccatggcaaaagtaccagaggaaaagcagaaacatgcagggtctcttac

SEQ ID NO: 520651 - DNA, 201 bp, Homo sapiens
gtcccccctctcgggagggggtattgggtaggaccatccaagaaagggcagaagaccaagggcagtcggggtctagaaaggagggcgctggccctgctggrcgcttcggagcccccactgtttcccactcagctttgtgctcagatcccaggtcccaaggagtgacaggggcttcctcccaccttctgtccttgtccagtc

SEQ ID NO: 520652 - DNA, 201 bp, Homo sapiens
gatttcatcagtgaaacaaaacatgtacctgaactgcatcctcagagagccgggagcagcctcagtcctcagaagggaaggggtgaggtctgatgagcagrcaggaaaatcccaggtgcagacctgccagctcaaaagggctgcccacaggtacagaccatccagctccaagggcctgcccctaggaggggccaagtaaat

SEQ ID NO: 520653 - DNA, 201 bp, Homo sapiens
cacgacctggttcctggatgtcctgcttgctccacacccatctacagggaggatgtgagggggctctgcctcctagggccaggtcccccctctcgggaggrggtattgggtaggaccatccaagaaagggcagaagaccaagggcagtcggggtctagaaaggagggcgctggccctgctgggcgcttcggagcccccact

SEQ ID NO: 520654 - DNA, 201 bp, Homo sapiens
gggttgcagagccatgctctgagcatgctccccctccttcaccatgaatgtgttttcattttccacccccgggcagcttcatgatctttcattgcaatctyaggccctggtatccacaggctctcaatgcagcctaggacagaagactctagaattctgcctcggagccctgtgatcccaaacactcagccgtggcagggg

SEQ ID NO: 520655 - DNA, 201 bp, Homo sapiens
tccccaggagagagcacactgggggagatggggtggcacacctgggcttcgtcctgtcactgcccactggctcgaggctttcctgcctgcctgggcttggsagatgcgtgagactccctgtctcatgggcctgagcagatgctgggccctcttgtcctctgccacatcctggggaactcagatgaaggccagcctccctct

SEQ ID NO: 520656 - DNA, 201 bp, Homo sapiens
cgtgggaagccccacactgctctttccttggtgacgggtgacccgccatgttcaggcccctcctggtctatcttcgggtgagtctattaagggatacaccrtctccgctcagccagtcccgaggaggcaaagggaacaggaccctcttccccaggagagagcacactgggggagatggggtggcacacctgggcttcgtcc

SEQ ID NO: 520657 - DNA, 201 bp, Homo sapiens
aggccacagctgtcccactgtctgtcgtttcaggattttttctttctctgcaacttctcctccccgacaaaaaccccagcctcacccctcccctttccccmagtgccaagagtaagctcctgctctgctaaggaagccgcattcaggccccgcgttgcaggttgcagggtttggggacctacgtgtggagagtcacatctg

SEQ ID NO: 520658 - DNA, 201 bp, Homo sapiens
atcccatgtactcggaaggcacatcctgatgtggcagggctgtcgtggagcctgggaggccgcatttctgatctcatgctgatgctggcccatggaccacsctttgcctggggaaggtgcagggagagaggatggaagcagagagctaggaggctattgtgagaaaccacccaagagccgctggaggctcagagcagggtg

SEQ ID NO: 520659 - DNA, 201 bp, Homo sapiens
agcacttccgcacctccctacctgctgctgctcccaggatgcaaagaccccactgctgcaccgcgtcctgcggcattagcagcagccggggtacctgcccrccttcccaccccgccaaccagccgcatcctggtgtccctcctcctggcatttgtcctgggggctcttacagggactgtgctttgcccgcagcatcccggg

SEQ ID NO: 520660 - DNA, 201 bp, Homo sapiens
cttccttctgacttcagtgtctgggacccagatactggaaggaaccaaaaagtcacaacataaaggctgcgtaaactgaaccaggatgcagccacagagcrgagggctttagaagtcatgttttaggtctaggggcggtggctcatgcccgtaatcccagcactttgggagattgaggcgggtggatcacaaggataggag

SEQ ID NO: 520661 - DNA, 201 bp, Homo sapiens
tccctcctgccaggccttggcacaaagcacttccgcacctccctacctgctgctgctcccaggatgcaaagaccccactgctgcaccgcgtcctgcggcaktagcagcagccggggtacctgcccaccttcccaccccgccaaccagccgcatcctggtgtccctcctcctggcatttgtcctgggggctcttacagggac

SEQ ID NO: 520662 - DNA, 201 bp, Homo sapiens
tgtaatcccagctactcaggaggctgaggcaggagaattgcttgaacccagaagggggaggttgcagtgagccgagatcatatcactgcactccagcctasgccgtagagtaagactctgtctcgaaaaaaaaaaaaaaagacaatagctggttatagaatgatttgccccttgctttgaagttgctggataggcgctatc

SEQ ID NO: 520663 - DNA, 201 bp, Homo sapiens
ctgcaccagttcctcgggctgtttacagcacacacaccgccacttctgaccctgagcccctactcctatcttaagcttctccctcctgccaggccttggcrcaaagcacttccgcacctccctacctgctgctgctcccaggatgcaaagaccccactgctgcaccgcgtcctgcggcattagcagcagccggggtacctg

SEQ ID NO: 520664 - DNA, 201 bp, Homo sapiens
gggggcagggggcagggggcagggggcaaagggcaagggcagaaaggaacccacgtagccaaacggcacccagcggccccgaccccaagtgtcccgacgasgggggacgcctgcgactaacgcggggacagcccccgccgcgcgccaccgccgcaccccaggcaccgggcccccacgcagggacggcgtggaccaccctac

SEQ ID NO: 520665 - DNA, 201 bp, Homo sapiens
aggcgcctgctgcgtagggcacctgccgcttaggactcctgccaccgcgtagggctctgctgcgtaggactcctgccgccgcatagggctctgctgcgtargactcctgcggcgagggctccctcctgccgcgtgggctcctcctgccgcgtgggctcctcctgccacatagggcacctcctgccgcgagggcacctcctg

SEQ ID NO: 520666 - DNA, 201 bp, Homo sapiens
cttccgaaactgtcgtcttccattatccacgagattgatagtattttgggcaataaaccctacagcaaaaaggactacagatcctaagccgcccccgcccrcctgctcggacagtttccgttccctcctagtctctgttcgctcgcttaagctgttttgaagccaagtgaagagtgtggtttgcatccaagagaaaacacc

SEQ ID NO: 520667 - DNA, 201 bp, Homo sapiens
gagctggagccggggggcggggaggaggggcggaggggcgcggccaggcggggtccgcggactccggcctgggaaggatgcgcgcggactagggcgcgggsagccaaggcccagaacatcggtaccgcgctcccttcagccgaggggctgcagagaggccagggggcagggggcagggggcagggggcagggggcaaaggg

SEQ ID NO: 520668 - DNA, 201 bp, Homo sapiens
ctgtggccttctatcctcatggatcttcttctgtcctcgtggcagccaccgtgagaaaggcagcctcgtgagcccattctgcagatgagaacactgaggcwtcgggccactccataaaatgcccggtgtcctccagccaggaaagttgtaccaggatttgggctctggcttcagagcctcagcccatagccgccacccggt

SEQ ID NO: 520669 - DNA, 201 bp, Homo sapiens
ctggagtttcccgatggtcagcccaggcaccttgcttccctccacccgggctcagcccccatctggctcccggtgctgtgacttgtatgtggggaggatgscgaccactcatgtcaggagcagggcctccctcctcttccctgccggggcctttctccaaggctgggtgaatgtgcccaggatggaaaagggagggtccca

SEQ ID NO: 520670 - DNA, 201 bp, Homo sapiens
ttctccatgtgccaatcccccagcggataccccactctccggagggagaaccccaagcaggtgccgctgggcatgcgccagggaggctgtgaccggagcargcactgccttgcttggagctggctgcctacaagctcagacatccagcccgcagagtccaccctggctgcagcgcctgcccaggcctcaggccagtcctgg

SEQ ID NO: 520671 - DNA, 201 bp, Homo sapiens
ctcagcctcccacagtgctgggattacaggcatgagccaccacactggacacttccttctttttatggctgaataacacttcattttctggagagggctayatcctgtttctccatttgtcggttgatgggtgtttgggttgtttccagtttggggctattgtgaataaggctgctgtggacatttgtgttgaagtttttg

SEQ ID NO: 520672 - DNA, 201 bp, Homo sapiens
agatcattttcagacttttcatactgcttggtaagttcttttaattgttcccttactgaaataatacaatttgaacatttttaattgaacagtaatcttartgtgtttaagtcgctacgtctcactttactgtttacgtaagtctacttcactttacctaagtttcacatccactgtttcaaaccataaaagaaataatgc

SEQ ID NO: 520673 - DNA, 201 bp, Homo sapiens
aaataatacaatttgaacatttttaattgaacagtaatcttagtgtgtttaagtcgctacgtctcactttactgtttacgtaagtctacttcactttaccyaagtttcacatccactgtttcaaaccataaaagaaataatgctgtttgtaatgagtaggtggcatgtataacaacaaaatgttacagagaaagcaccata

SEQ ID NO: 520674 - DNA, 201 bp, Homo sapiens
aatttgagaccagcctggacaacatggtgaaacccgtctctacaaaaaatacaaaaattagctgggtgtggtggcgcacgcctatagtcccagctactggragataaaggagaaatgatcaggtctgggctacagggagcagtgatcatgccactgcactccagcctgggccagagtgagactccgtctcaaaagaaaaaa

SEQ ID NO: 520675 - DNA, 201 bp, Homo sapiens
tttagtgaataagtaaatctgcacaagagatgcctggccaggcctggtagcttgtgcctgtaatcccagcattttgggaggcccaggtgggtggattactygggcccaggaatttgagaccagcctggacaacatggtgaaacccgtctctacaaaaaatacaaaaattagctgggtgtggtggcgcacgcctatagtccc

SEQ ID NO: 520676 - DNA, 201 bp, Homo sapiens
cttccccactcctcctctacttctttttcattttcacctcaaggccgccgatgttctgtcacccgggctggactgggccatttctacacccgaaggagtgytgctccacaagctcagggccggatgacaaagcgccttgtccctggccctaggcctggtcatctctaaggctcggttgccgggctcggcgaaaggcttctg

SEQ ID NO: 520677 - DNA, 201 bp, Homo sapiens
tttcgactccaagaacaagccgactccctgagtctcatctcttgtttgagcttacttgactcaagcgccttcccctctccaagtcccgggactccaccaasactgcccttcttgcaccctaacctgggaaacatcctcggcccacttccccactcctcctctacttctttttcattttcacctcaaggccgccgatgttct

SEQ ID NO: 520678 - DNA, 201 bp, Homo sapiens
ttatggccaggcgcagtggtttatgcttgtaatcccaacattttgggaggctaaggtgggcagatcgcttgagtccaggagtttgagatagcctgagcaayatggcaaaattgcttctctacaaaacatacaaaaattaaccagacatggtgatgcacgcctgcagtcccagctacgtgggagactgaggtgggagaatca

SEQ ID NO: 520679 - DNA, 201 bp, Homo sapiens
gttatttattgagacggagtctcgctctgtcgccaggctggagtgcagtggtgtgatctcggctcactgcaacctacgtctcctgggttcaagcgattctygtgcctcagcctcctcagtagctgggattacaggcatgtgccaccacatccagctaatttttgtatttttagtagagacagggtttcaccatgttggcca

SEQ ID NO: 520680 - DNA, 201 bp, Homo sapiens
gaaattcagtgctattcttcttagcaagaatagtaaatacataatattcttaactaccatttagacaaaaagtactttttcatcctgtttctcctgttaakaatcctaaaactagtagtatttattagctaagttcagagaacaaggcacacagtaccaacctctcttaattcccggatctgttctgatagccctccaatc

SEQ ID NO: 520681 - DNA, 201 bp, Homo sapiens
agagtaaatactgtatgctttgcaagccatatggtttctgttgtaactattcaactcagctattccagtaggaaagcagccatagacaacagataaatgascatgcttgggttacaacaaaactttgtgtgtttccaaaaacacagggcaggcagaatttggttcacaagccatgttttactggcctgcaccctagtccaa

SEQ ID NO: 520682 - DNA, 201 bp, Homo sapiens
agctcagtatttgtggaagaaacctatacattgacatcctttgttcagttcggtctttccagctcaaaactctctaacaggggcaatgaagatagtgaaaktcaacaatcagctatttgtcattattctggaccattaacttctaaagagtttttaaggctgcctggaaattatactagatttccctagtctggaggtcag

SEQ ID NO: 520683 - DNA, 201 bp, Homo sapiens
acagaagtatctgacctgcatatctgatgcagatactgactcacagcatacccaatacccatgaagatacctgtactgagaagccctccctgagcagccaytttaaacactgtgttgaatttactaaggctaaacatgatatgaaaagcaagaggaaatcacatattctaatacttaagaaaatctataacctataaagtc

SEQ ID NO: 520684 - DNA, 201 bp, Homo sapiens
gatatcagattacatcaattatttttagctttttctccgttcctttgccacaaaaagagcaggatttttctaacaccaaattatctccaaataaaaaaaamcagtaattttcacagctagaaattcagtgctattcttcttagcaagaatagtaaatacataatattcttaactaccatttagacaaaaagtactttttca

SEQ ID NO: 520685 - DNA, 201 bp, Homo sapiens
cagcaaatatgaaaagcttcaacactttccctttgtaacttgctgcaataaatgcaactttaacaaacatacaaatttcttctgtatcttaaaagttgaaytactaatttttatgatgttactcatatttttattcatatacttttaatgacatcattaccaatacatacattattttctttaactttatttttacaataa

SEQ ID NO: 520686 - DNA, 201 bp, Homo sapiens
tttaacaaacatacaaatttcttctgtatcttaaaagttgaattactaatttttatgatgttactcatatttttattcatatacttttaatgacatcattrccaatacatacattattttctttaactttatttttacaataagccaacatctgtcatgcagccatcaaaaatcttacagtaaattacacaggtttgtagt

SEQ ID NO: 520687 - DNA, 201 bp, Homo sapiens
gtgaagtgaagtatggaaaaagaaatgggcacaaagggaaatggacagtaggtaaagaatcttaactcacgtatttttctatctaatcttcctggacgcascaaagcaggatccagtgtatctggtctgtttgtagccatgatcattttaactctatgcagagtatcaaatccatccatttgattcagtaactaagaatat

SEQ ID NO: 520688 - DNA, 201 bp, Homo sapiens
caaattatctccaaataaaaaaaaacagtaattttcacagctagaaattcagtgctattcttcttagcaagaatagtaaatacataatattcttaactacyatttagacaaaaagtactttttcatcctgtttctcctgttaagaatcctaaaactagtagtatttattagctaagttcagagaacaaggcacacagtacc

SEQ ID NO: 520689 - DNA, 201 bp, Homo sapiens
cattctgaatctattccgttaaagatttttaacacacctggccatatttattaaattgtgtaactgcatgaatgttcaaaagtattttctgatagtttgayctttacaatctaggcgttattcccagtctaccgatgaggaagctggagcacctggaactcccaagacttgccccttaggtaacacagcaagtaagtgact

SEQ ID NO: 520690 - DNA, 201 bp, Homo sapiens
aaaaaaacctagttttgaaaaacagatttcaaattacgagaatagcaaaaggaagacagtatgaaaataagcaatatattaagcaggtgggcttacaggcwattattttttcagaactttctataatcttttaattattagaataaagtgaaccctattcttctataatcactacatataacaaaaataacaggttttacc

SEQ ID NO: 520691 - DNA, 201 bp, Homo sapiens
tacctgtaatcctagcactctgggaagccgaggcaggcgatcgctagagcccaggggtttgacaccagcctgggaaacacggcaaaaccccatctctacamaatataaaaattagtagggcatgatggcacatgcctaaagtcgcagctactccagaggctgaggggggaagatcacctgagcccagagaggtcaaggctg

SEQ ID NO: 520692 - DNA, 201 bp, Homo sapiens
atgtggtctagaaaacatgaaaaatagggttaataattttcatgagagggaagaagtatacaggaaaacaactaggattatgaagcccttaaataatgaawtttaaccaggaaatactaatattttcttgtacttttctttgatgagacagtccttttccacgaatgatcataaaaataaataatattggctaacacttat

SEQ ID NO: 520693 - DNA, 201 bp, Homo sapiens
aatgtggtctagaaaacatgaaaaatagggttaataattttcatgagagggaagaagtatacaggaaaacaactaggattatgaagcccttaaataatgawttttaaccaggaaatactaatattttcttgtacttttctttgatgagacagtccttttccacgaatgatcataaaaataaataatattggctaacactta

SEQ ID NO: 520694 - DNA, 201 bp, Homo sapiens
gccattataatcacatcaaaaagcttccattaacattttatgaatttggcaatctagtacaatacattaagtattgtgtttcactcaattttgtgatactmcatttttgaaaaaacttagaggcttcagatacccatgaaaagaaaaaaatcagggtagaaacacataggctgaggtttgctaattcactgtttacagagg

SEQ ID NO: 520695 - DNA, 201 bp, Homo sapiens
tactaaatgtttaaagctgttttaccatagtaatttaccttccatttctaaagaaaatattaccaagtagttgaaatatcagcaattagtatcaattggartataacctacacattcaaaatatctgctagcaaaataaagactaatatagctattttagatgaacaacacttaaaatacaagtaaatggctgatgttgcc

SEQ ID NO: 520696 - DNA, 201 bp, Homo sapiens
cagcacagaattgctaaaagaaacagatgcttcccaacaattaaaagttgagtattccttatccaaaatgcttgggaccagaaatgtttcaggttttggattttttttttttttttttttttttttttttttcagatttggggatatttgcatatacataatgagatatcttggggatgggacccaagtcaaaattcattt

SEQ ID NO: 520697 - DNA, 201 bp, Homo sapiens
atctgggattataggcacgtgacaccacgcccggctaatttttttgtatttttaatagagacgggatttcgccgtgttagccaggctggtctcaaactccygacctcaggtgatctgcccgcctcggcctcccaaagtgctgggattacaggcgtgagccactgcgcccggctagtatcaggtcttttaaaacatgttttt

SEQ ID NO: 520698 - DNA, 201 bp, Homo sapiens
gtgtggtggcatgcacctatagtcccagccacatgggaggctgaggtggaaggatcatttgagcccaggagattgaagcggcagtgtgtggtgattgtgcycctgcgctctagcctgggcaacagcgagaccttgtctcaacaacaacaacaacaaaaggctatctattgtgggtacactgcctatggggtagtcctgctc

SEQ ID NO: 520699 - DNA, 201 bp, Homo sapiens
cgcgccacagttgggaaccgcggcccagacgtggcagcgccaacgcctccacctcgcctctgccccctcacgcagggccgcgcgcaggcgagcggaggcgsaggccaaggcgccacccgcccaggcccggagagcgaggggcggggcccggagagcgggggcgggaccaggagggcgaggggcggggctcggagagcgggg

SEQ ID NO: 520700 - DNA, 201 bp, Homo sapiens
cttaaaaaaacctagttttgaaaaacagatttcaaattacgagaatagcaaaaggaagacagtatgaaaataagcaatatattaagcaggtgggcttacasgcaattattttttcagaactttctataatcttttaattattagaataaagtgaaccctattcttctataatcactacatataacaaaaataacaggtttt

SEQ ID NO: 520701 - DNA, 201 bp, Homo sapiens
ctcagcacttcttatgtgccagactgttgaaagagctttactaattcatttatttcaaccatcctacaggttaggagtggttattatctacattttaacaratgagaaaatgttaagtaacttgcccaaggtcacaaaattagcggagccaggatttaaacctaggcatagaaagagcatgagctttggattcatacctgg

SEQ ID NO: 520702 - DNA, 201 bp, Homo sapiens
gcacagaattgctaaaagaaacagatgcttcccaacaattaaaagttgagtattccttatccaaaatgcttgggaccagaaatgtttcaggttttggattytttttttttttttttttttttttttttttcagatttggggatatttgcatatacataatgagatatcttggggatgggacccaagtcaaaattcatttgt

SEQ ID NO: 520703 - DNA, 201 bp, Homo sapiens
accctgctgccactgttttgaagttcttaattttttaacaaggaaccctgcattttaatttggattaccacagattacgtagccagtcctgctaggtagtrtgacttcagactctgctcttaaccattacactgaagatgcactagagtagataaattccctatcttactgttgtacaagggttaaaaattaagtcataag

SEQ ID NO: 520704 - DNA, 201 bp, Homo sapiens
agtagtattcgagaccccacccccaggctggcagggcctcaccaccagtgttcccccttttctgcagcggctcccagaagcagctgcctataggttctatwgaacctgctcaaggatcaccttcaggagctcctcccttccctgggtgggtaagaggcctccccagccccagcctttcctggctctcctgggatgcttgct

SEQ ID NO: 520705 - DNA, 201 bp, Homo sapiens
tagtgagatgccttagtctgtgggggtgggtgggggactggggccccgttttcctttgtgagtcttggttggccccagccctggcaggggcctgtctggarcaggggtaggtagggctgtgggttccagaactctataactgggcccctctccagtgtccaggggcttggagagacctgcgcccacccctccactctccca

SEQ ID NO: 520706 - DNA, 201 bp, Homo sapiens
agcgcagtctgggtgcccaggcgggagctgctggactactgcactagtccaggagtgagctgggaggggcagggtggggcctggacggatcccgaaggtgrtgggatttggctggcaggtggcacgtggggaggtacgggattgacacaagggtgggtatgcctgcctgcgtgtttggcgggaacagcagggggtttggaa

SEQ ID NO: 520707 - DNA, 201 bp, Homo sapiens
gttggccccagccctggcaggggcctgtctggagcaggggtaggtagggctgtgggttccagaactctataactgggcccctctccagtgtccaggggctyggagagacctgcgcccacccctccactctcccaggagtcgctgatcactgggacctggttccagccgtttgcaggggaggcggctccgagaggcgtgtgc

SEQ ID NO: 520708 - DNA, 201 bp, Homo sapiens
gacctctgggttcttccaaagaacatttgactcagtggggtcgggagggaatcctggcttatttattttcctctgtcctcgggtgtgggggccctagctcsccctctctgggtgggtgggtgagagaggctgcaggggaggctggcaccgggcttgggcctccagtccctgccttgctgactttggccgttgcggtatcac

SEQ ID NO: 520709 - DNA, 201 bp, Homo sapiens
ccgcagtacctcccccagcgactcgctgccctgcagcctggccgggagccctgcgcccagccccgcgcccagcccagcccccgcaggcctgtagggccctygtgcagcccaccctgaccgccaggatgcttctgccatccaggggtgtagtgaggacccacggggagcctgggccccttccagccgtgggcaaaccctgaa

SEQ ID NO: 520710 - DNA, 201 bp, Homo sapiens
tctcctgccctctgtgctccaagcgcttcacccgcagtgaccacctggccaagcacgcccgccgccaccccggcttccacccggacctgctccggcgcccyggtgcccgcagtacctcccccagcgactcgctgccctgcagcctggccgggagccctgcgcccagccccgcgcccagcccagcccccgcaggcctgtagg

SEQ ID NO: 520711 - DNA, 201 bp, Homo sapiens
gggctcccccagggttgtggggggcgataaccacccccacccaggctctctgataaaagcagcccagatcggtggggaggaggcacatgataccagcaggrtgagctgtgggggcggggggcaccaccctggcttagaccatttctggaacagaggttacacaggcaccagggtccttgagggggttgtcccctgccgacc

SEQ ID NO: 520712 - DNA, 201 bp, Homo sapiens
ttacttacggttaacagattctgggctcgccggagagtcctttctaagagctggtaggaaataagaggattatttattagggtctcgtgttgggccaccgsggggcgggtaagggttgtattctttgtgcttctccatgttttgaactcacaccagagctcagcctctaaaacggcacgggacaaatgcccgccacccttt

SEQ ID NO: 520713 - DNA, 201 bp, Homo sapiens
ccgccccctcccctccctgtgagctttcctgcctgtcttccatctaaccacaccccgagatcggggcccagactgactgtgcctgcgggttcctcccatgyccccttgctcgtggaggggccaggagggttagggaggttgccatgattgtacccccttaacccagcctttgcatcccaggtggtcatttggaaaaggagg

SEQ ID NO: 520714 - DNA, 201 bp, Homo sapiens
tgtccaggggcttggagagacctgcgcccacccctccactctcccaggagtcgctgatcactgggacctggttccagccgtttgcaggggaggcggctccragaggcgtgtgctttccgtgggtggcgcccctcccccgccctgcctggcctcatccttgtatttaattaattaaacaagcccctttttaaaccctactcc

SEQ ID NO: 520715 - DNA, 201 bp, Homo sapiens
accccgccccctcccctccctgtgagctttcctgcctgtcttccatctaaccacaccccgagatcggggcccagactgactgtgcctgcgggttcctcccrtgcccccttgctcgtggaggggccaggagggttagggaggttgccatgattgtacccccttaacccagcctttgcatcccaggtggtcatttggaaaagg

SEQ ID NO: 520716 - DNA, 201 bp, Homo sapiens
ttggatggcactggtgtgcacctggacccagccccggcctggcaggatccagggatgggtgcctgggatcctggggggagggaggcaggggacgcccttcyggagctgggctcggagggtcctgccccatccagccctcggctctctgtgttctctgtccctagcctcaaaccctcttctggcagcgctagtgagatgcct

SEQ ID NO: 520717 - DNA, 201 bp, Homo sapiens
gtggggtcccttccagggctgctctgcgcctcttgcttgggttgtagacggcccccagctggggcggacccgcgaccccagctgcatcctgggttgcttgsgggagacttggggtgtggagcaggcagccccagggatttgaggctactgttggtcttggtgacagctggtctctccccctctccagctgcctggattcac

SEQ ID NO: 520718 - DNA, 201 bp, Homo sapiens
cctgtctccaggcccctcctgtgccggctcagacggggccgggccaggtttccaggacttcctggactccatttttctgagcctgcctgtttccgaggctrtcctgagctcacccgggcccagcctgagtcagagggtcaagtccaccgcggccccgcccacactgccctcccgcgttgtccccacccaccgcatcctcag

SEQ ID NO: 520719 - DNA, 201 bp, Homo sapiens
gggcccagtgaggcccagtatgttgcattttttgcccttgagggacgtgatgtggctgctccagcctgggaccccccagctcctggacacagaggggtgaccccctccccgttcagtccatgcagttaacgcccgcctgagcccgggggtggtggaggatgcagagctccaaggcctgagttggtggcaccctcctcattg

SEQ ID NO: 520720 - DNA, 201 bp, Homo sapiens
gcctgcacccctcagccgagctctggagtcccccgggccaggcgggcttcgggcccatgctgggtgggggctcatccccgctgcccctcccgcccggtagyggcccggtgggcagcagtggaagcagcagcacgtttggtggcctgcaccagcacgagcgtatggtaggacccagggcagggggcagggggtgggcggagg

SEQ ID NO: 520721 - DNA, 201 bp, Homo sapiens
tgcccagagcccagccatgtcccacctgccacccccacgggtggggcccaggccatagccaggcagcttggagagggcaggcgggggtcccggggaggcayggggggcttttgccataacctcagtctcctatggcctcagttttctcacccgaggagccgggcgagtgactgctgtggccgggtgtggcctgtggggtgg

SEQ ID NO: 520722 - DNA, 201 bp, Homo sapiens
ggacgaggccatccacgtgctccgcagccacgccgtgggcacagccggcgacatgcacacgctgctgcctggccacggggcgctggcctcaggtttcaccrgccccatgtcgctgggcgggcggcacgcaggcctggtgagcgctgggcgagggtggagctgggcagtgggcggggacccggctccccctgatgcacccgt

SEQ ID NO: 520723 - DNA, 201 bp, Homo sapiens
gcccagacgaggacgaggacgaccttctccccccagagcagaaggccgagcgggagaaggagcgccgggtggccaataacgcccgggagcggctgcgggtscgtgacatcaacgaggcctttaaggagctggggcgcatgtgccaactgcacctcaacagcgagaagccccagaccaaactgctcatcctgcaccaggctg

SEQ ID NO: 520724 - DNA, 201 bp, Homo sapiens
acgaggccatccacgtgctccgcagccacgccgtgggcacagccggcgacatgcacacgctgctgcctggccacggggcgctggcctcaggtttcaccggycccatgtcgctgggcgggcggcacgcaggcctggtgagcgctgggcgagggtggagctgggcagtgggcggggacccggctccccctgatgcacccgtct

SEQ ID NO: 520725 - DNA, 201 bp, Homo sapiens
cagtggttcatgcctataatcccagcactttgggggaccaaggcggaaggatcgcttgagcgcaggagttagagaccagcctgggtaacacagcaaaaccycatctctactaaaaatacaaaaattagctgggcgtggtggcgcacacttggggtcccagctactcgggaggctgaggcaggaggattgctggagcctggg

SEQ ID NO: 520726 - DNA, 201 bp, Homo sapiens
caggaacctgccaatgtttgcagatgtattttctgtggttcccacagagtctcgccctgtgctccggccctgccccaatgctgcaggttgggagggtctcrccttgtcccctcacacgttagggcggaggctttggagggcccagtgaggcccagtatgttgcattttttgcccttgagggacgtgatgtggctgctccag

SEQ ID NO: 520727 - DNA, 201 bp, Homo sapiens
ctctgctgtccccttcccgcctcaccccgtgagctctgctgtccccttcccgcctcaccccgtgagctctgctgtccccttcccgcctcacccccgtgagytctgctgtccccttcccgcctcaccccctgtgagctctgctgtcccctttccgcctcaccccgtgagctctgctgtccccttcccgcctcaccccgtgag

SEQ ID NO: 520728 - DNA, 201 bp, Homo sapiens
ctgttcctccctttcccgggggtagggggcctcagaggaagcccggggttggttggaaatgagagagttggagaaaggagaggttctggctgccctgcgtrcagtttaaacttggcaacttgatgccctggtgttccctgggggagttagggagtttatatttgcacaccctccccccatttttcagactccctgtggtct

SEQ ID NO: 520729 - DNA, 201 bp, Homo sapiens
agaggatggcgcctgtgggcacagacaaggagctcagtgacctcctggacttcagcatggtgagccaggacccccgcccagcccccgacacccctttgccyccacagttcacgggaaggttttcaggggagagtgtttgctgaatacttcagcgatggagcctcagctgtttggatgggaggccccggtggggctggggga

SEQ ID NO: 520730 - DNA, 201 bp, Homo sapiens
tggtacagtggggccatgtgttatgggttcctggagaagcccagggaccttggtttgtttcttctggcctgtctacagatgtccttaaattctgctccccaccccccccatgcccagtggcagcgtttggggttgaaacaggttgggggagggcactttcagtctgaatttaaccctcccgcctatgaggcacaggccact

SEQ ID NO: 520731 - DNA, 201 bp, Homo sapiens
ctattggaattgattcaactctactgttgcagcaaaagcagccgttgatagtacatggacaaacgggcatagtgtgtgccaataaaactttatttaaaaarcagcttaggggccagacttggtccttgtgtactgtttgcagatccctgctgcagaccaatctcagtcctacccggtatttactaagcgccttttgaagcc

SEQ ID NO: 520732 - DNA, 201 bp, Homo sapiens
gcagcgtcacttgagggcacgcgagtcctcagagtcttctggtctgtgatggggcggagcaggacgggccgggcctagatggagcgcagtctcaggttccygggtgtccccagctctgctcccagcttgggtttgaacccgggactgtagggtttggtttgccacccgccccgctcacgtctcccctcccctccctgcaga

SEQ ID NO: 520733 - DNA, 201 bp, Homo sapiens
ctcccatttgccaacgagccaccaggcaaagaccagtccccggtccctctcaggaggggacccaacagggaccgggactgggaaaccaccagcctggagcrttccttggctacggatggcctctctgaagcagcatctttcattgttatcctcacggcagcccaggcaggtgggcggcttccacaccccgtgactggaatt

SEQ ID NO: 520734 - DNA, 201 bp, Homo sapiens
ctccccccagagcaaaggcagggggaacagcgagttttcagcggcagggactctgcctggcggtacagcggggtcatcgtctggagttttctcactctggkcgtgggtgtccagggtgcagcgtcacttgagggcacgcgagtcctcagagtcttctggtctgtgatggggcggagcaggacgggccgggcctagatggag

SEQ ID NO: 520735 - DNA, 201 bp, Homo sapiens
attcacccagcgcgaggaggaagaaacagcagttcctgggaaccacaattatggggggtggggggtgtgatctgagtgcctcaagatggttttcaaaaaawtttttttaaagaaaataattgtatacgtgtcaacacagctggctggatgattgggactttaaaacgaccctctttcaggtggattcagagacctgtcctg

SEQ ID NO: 520736 - DNA, 201 bp, Homo sapiens
gctgggtgaggctgggttaggaagggttccacaagccccccgggtccactgaggtttgcccctgagatgatgaaccgaagcttttagagctgggcaggcgygagggtgacccataactctctctgtcctgcctgcaggtcttgaggaccggcccagctcaggctcctggggcagcggcgaccagagcagctcctcctttga

SEQ ID NO: 520737 - DNA, 201 bp, Homo sapiens
catctaacccaccctcctcctgcctgaccccccagggctaccagctgcatggagcagaggtgaacggtgggctcccatctgcatcctccttctcctcagcscccggagccacgtacggcggcgtctccagccacacgccgcctgtcagcggggccgacagcctcctgggtatggcccctccctgggatgcggcctctccga

SEQ ID NO: 520738 - DNA, 201 bp, Homo sapiens
aacctcaaggccagctcaatgcctggtatctgcccccagtccaggccaggcggaggggaggggctgtccggctgcctctcccttctcggtggcttcccctrcgccctgggagtttgatctcttaagggaacttgcctctccctcttgttttgctcctggccctgcccctaggtctgggtgggcagtggccccatagcctct

SEQ ID NO: 520739 - DNA, 201 bp, Homo sapiens
tccaggaacgtcacagtggcctcgagcaggagcccccggtgccttatcgcccagctacgacgggggtctccacggcctggtgagtgcctgccccgccccascccacccttccccgacagaatttgcaggacagacgctccttgagaaggagaaacctttttgttagtttcttgtaaataagccccaagctgttattgaggc

SEQ ID NO: 520740 - DNA, 201 bp, Homo sapiens
tcctggaacagtgggtgcagcttccttccaggcggggcctagttggcttcggggacgccacccttcgccaggagtccccaacgctgatggctgatggggtmccccagccgcattctccaccttggccccttcttcatgtgccctgttctagctcccttttaagtcacctcgcttttcttaagttcatttgaaaggaaactt

SEQ ID NO: 520741 - DNA, 201 bp, Homo sapiens
gtaggaagccagggaacagagcgaggtcacccatgcagggccatgcagcacagaggcctgggccgggacccgcacccctgcggcagcagcaacagtgcccrctcgccagctgcatgctgctcggctggagagggggctcagccttgggcctggcacagaacaggctcttggaacctcagagctcctactgcgaccattcac

SEQ ID NO: 520742 - DNA, 201 bp, Homo sapiens
cccactcccttccaggaacgtcacagtggcctcgagcaggagcccccggtgccttatcgcccagctacgacgggggtctccacggcctggtgagtgcctgmcccgccccaccccacccttccccgacagaatttgcaggacagacgctccttgagaaggagaaacctttttgttagtttcttgtaaataagccccaagctg

SEQ ID NO: 520743 - DNA, 201 bp, Homo sapiens
gaggcaaggagaatcacttgagccctggaggttgaggctgcagtgagctgtgattgcgccactgcactccttcctgggcgatagagtaagatccttcctcagaagtaaaggagggggtgcccagtgctgagcggaccaccctccgtgaacagggcagacacaacctgccccatacgggactcccctggtgggcagaggatg

SEQ ID NO: 520744 - DNA, 201 bp, Homo sapiens
tgctccgcagccacgccgtgggcacagccggcgacatgcacacgctgctgcctggccacggggcgctggcctcaggtttcaccggccccatgtcgctgggygggcggcacgcaggcctggtgagcgctgggcgagggtggagctgggcagtgggcggggacccggctccccctgatgcacccgtctccccacgcctgcagg

SEQ ID NO: 520745 - DNA, 201 bp, Homo sapiens
gatctcttgacctcgtgatctgcctgccttggcctcccaaagtcctggtattacaggcatgaggcaccgcacccagccgacccgaggtttttaatatatgraacgggaattgtgagggtctctcctccagggtgtagggcaggggttgttctcatggccggtggccggttctcaccccttttgcttctaacagacacgcag

SEQ ID NO: 520746 - DNA, 201 bp, Homo sapiens
tgggctgatcgtggtccctccgtcctgactgcaccccccaccgcccacccgcccgcaggtgtacccacccagctcaggtgaggactacggcagggatgccrccgcctacccgtccgccaagacccccagcagcacctatcccgcccccttctacgtggcaggtacatggcagggcgggggctcgccagggacggtagggca

SEQ ID NO: 520747 - DNA, 201 bp, Homo sapiens
ctggtacagtggggccatgtgttatgggttcctggagaagcccagggaccttggtttgtttcttctggcctgtctacagatgtccttaaattctgctccccaccccccccatgcccagtggcagcgtttggggttgaaacaggttgggggagggcactttcagtctgaatttaaccctcccgcctatgaggcacaggccac

SEQ ID NO: 520748 - DNA, 201 bp, Homo sapiens
gtgaaaacagcagtgtgggatgcggtcagtctcaagtcagaaaaacacagcaggtgtcacagagaaacaccgtgacaggcagaaggggcatcacccactgmagggcgggtctgagtggcttcggcctttgcagttttttcttgaatggaacagcctggggtctggatgccagctgggcgctttctgaccatccgctcccca

SEQ ID NO: 520749 - DNA, 201 bp, Homo sapiens
ctaccaggaggggacaggaggccggcaaggtgcatgggctgatcgtggtccctccgtcctgactgcaccccccaccgcccacccgcccgcaggtgtacccrcccagctcaggtgaggactacggcagggatgccaccgcctacccgtccgccaagacccccagcagcacctatcccgcccccttctacgtggcaggtacat

SEQ ID NO: 520750 - DNA, 201 bp, Homo sapiens
aaggtcagaagttcagggaggcgggaggtgggggctggaaaaggagtaggagagagagaccaggacatcataagaacctcaaacttggccaggggctgggwtttacctaaaggggggtggctttacagggaagggaaacggggtggtagatgtgctaccaggaggggacaggaggccggcaaggtgcatgggctgatcgtg

SEQ ID NO: 520751 - DNA, 201 bp, Homo sapiens
caccagagtgcaggggcatgatcacagctcacggtagccatgaccccctggcctcaagtgacccttccacctcagcctcccaaagtgctgggatcacaggygtgagtcagccactgtgcccggcctgtgttctttcaaaagcagcgctttgagcacttgcttggacagctcttggactaaaatgagaatgataaagattag

SEQ ID NO: 520752 - DNA, 201 bp, Homo sapiens
gaggcacgtcacagcctcgggctcaggagcactggacggcgccttgaactacccggggcccattccaggcagcacagtcgccaggcatggcggcactcacmtggggtcccagcttctctggaggccgagacaggaggatcacttgaggccaaaagttgcaaaccattctgggcaacatagggagatcccatctttgcgaaa

SEQ ID NO: 520753 - DNA, 201 bp, Homo sapiens
gctccgcagccacgccgtgggcacagccggcgacatgcacacgctgctgcctggccacggggcgctggcctcaggtttcaccggccccatgtcgctgggcrggcggcacgcaggcctggtgagcgctgggcgagggtggagctgggcagtgggcggggacccggctccccctgatgcacccgtctccccacgcctgcaggt

SEQ ID NO: 520754 - DNA, 201 bp, Homo sapiens
tccacgtgctccgcagccacgccgtgggcacagccggcgacatgcacacgctgctgcctggccacggggcgctggcctcaggtttcaccggccccatgtcrctgggcgggcggcacgcaggcctggtgagcgctgggcgagggtggagctgggcagtgggcggggacccggctccccctgatgcacccgtctccccacgcc

SEQ ID NO: 520755 - DNA, 201 bp, Homo sapiens
tggggtcattgtgggcgctgtcctggccctgtgccttccaccagcccaggaatcctgcctgctttccaggcagactttccaagtaccttgattctatcacycctaggccagggcatctcaccgcagcggctctgcccccaggggacactgggtgatgtctggggacatctacagttgtcagggctgaggggagctcctggc

SEQ ID NO: 520756 - DNA, 201 bp, Homo sapiens
catccccccagccttctcaaggaaggaggtgagagccggaaatacaggaggccacacgtgatggggctctgcccccacccccccccccgacatcctacccmccactcccacctcacatctttctcctccctgggaccgtctcccacagagctctcccccctccctccagagcggaacctgaatcccaaagcagcctgtttg

SEQ ID NO: 520757 - DNA, 201 bp, Homo sapiens
tgaaaacagcagtgtgggatgcggtcagtctcaagtcagaaaaacacagcaggtgtcacagagaaacaccgtgacaggcagaaggggcatcacccactgcrgggcgggtctgagtggcttcggcctttgcagttttttcttgaatggaacagcctggggtctggatgccagctgggcgctttctgaccatccgctccccac

SEQ ID NO: 520758 - DNA, 201 bp, Homo sapiens
ccccttcgggcatgaaggggacctcccagtactacccctcctactccggcagctcccggcggagagcggcagacggcagcctaggtgagcggggtctggcyggggcatcgggggcttctgggagggagcctgcaaagggaggtaggaggcttcccgttagctgagggcaccagagggagcagaccccgcaccttccaggtc

SEQ ID NO: 520759 - DNA, 201 bp, Homo sapiens
acctcactgtctccctctggccccctcccggcgccctccccatagcccagacgaggacgaggacgaccttctccccccagagcagaaggccgagcgggagmaggagcgccgggtggccaataacgcccgggagcggctgcgggtccgtgacatcaacgaggcctttaaggagctggggcgcatgtgccaactgcacctcaa

SEQ ID NO: 520760 - DNA, 201 bp, Homo sapiens
tttttttttccagtaaacaaaacctgaaagcaagcaacaaaacatacactttgtcagagaagaaaaaaatgccttaactataaaaagcggagaaatggaarcatatcactcaagggggatgctgtggaaacctggcttattcttctaaagccaccagcaaattgtgcctaagcgaaatattttttttaaggaaaataaaaa

SEQ ID NO: 520761 - DNA, 201 bp, Homo sapiens
tggcacggaccactgtgagattggtccctgggtaaccagagctgtggtgtgtaggccgtgtggacctgagaatgctccctctgggttgcctctccctggaygcccagcccggtcccagcaggaacctgccaatgtttgcagatgtattttctgtggttcccacagagtctcgccctgtgctccggccctgccccaatgctg

SEQ ID NO: 520762 - DNA, 201 bp, Homo sapiens; identical to SEQ ID NO: 298514

SEQ ID NO: 520763 - DNA, 201 bp, Homo sapiens
gtgtgcgcacgtgtgtgtgcgtctgcgcgtgcgtgtctgtgcgtctgcgcgtgtgtgcgtgtctgcgtctgtgtctgcgtgcgtgtgtgtacgcgtgcgtktgtgtgtgtgtgtgtgtgtgtgtgtgtgtgtagttctgtgcagttttgagacatgcaccttctttaagcccaggaatcaccaatctgttcttcatctgta

SEQ ID NO: 520764 - DNA, 201 bp, Homo sapiens
acaaagcagatagaaatgcagttggctgtcccccacagcaggcctttgtttcccaaatgagaggttggcccttggaggtctgggtccaggggaggctgggygcaccggagcctgcgggagggggtgtggtccagggcgaacactgccttcagcgcgggtgccacccctacccgcaagaccgttcttcctctccagggccag

SEQ ID NO: 520765 - DNA, 201 bp, Homo sapiens
ctgcccccaggggacactgggtgatgtctggggacatctacagttgtcagggctgaggggagctcctggcatggagtgggtgggggccagggatgctgctyagcaccctgcagtgcccaggacggccccaccccagagaagggtccggacccacaggtcagcagtttccaggggcagccccaagcttagtctttcacccat

SEQ ID NO: 520766 - DNA, 201 bp, Homo sapiens
ctgcactccttcctgggcgatagagtaagatccttcctcagaagtaaaggagggggtgcccagtgctgagcggaccaccctccgtgaacagggcagacacracctgccccatacgggactcccctggtgggcagaggatgcgggcatgaaactgactgtgtggttaattagtcacacgtgggtgctgaagttaagctgcca

SEQ ID NO: 520767 - DNA, 201 bp, Homo sapiens
gcccccaggggacactgggtgatgtctggggacatctacagttgtcagggctgaggggagctcctggcatggagtgggtgggggccagggatgctgctcascaccctgcagtgcccaggacggccccaccccagagaagggtccggacccacaggtcagcagtttccaggggcagccccaagcttagtctttcacccatag

SEQ ID NO: 520768 - DNA, 201 bp, Homo sapiens
cgctcttcccccaacctcactgtctccctctggccccctcccggcgccctccccatagcccagacgaggacgaggacgaccttctccccccagagcagaargccgagcgggagaaggagcgccgggtggccaataacgcccgggagcggctgcgggtccgtgacatcaacgaggcctttaaggagctggggcgcatgtgcc

SEQ ID NO: 520769 - DNA, 201 bp, Homo sapiens
agccgggtaggagtccccgtgaggcctgagaccctgagtttcctgtccccagagttgggggcgaggggtgtggggaaactgaggctgagagaaggggccasccttccaggggtttggactgggggacatgggtttgagtcctgcctctccagctgtaatgcggggtggagggggggcctgtgaagccccagcacctctcat

SEQ ID NO: 520770 - DNA, 201 bp, Homo sapiens
gtggccaataacgcccgggagcggctgcgggtccgtgacatcaacgaggcctttaaggagctggggcgcatgtgccaactgcacctcaacagcgagaagcsccagaccaaactgctcatcctgcaccaggctgtctcggtcatcctgaacttggagcagcaagtgcgaggtcagtgggggcgcgggccaccagcgtccctg

SEQ ID NO: 520771 - DNA, 201 bp, Homo sapiens
ccccctgtgagctctgctgtccccttcccgcctcaccccctgtgagctctgctgtccccttcccgcctcaccccgtgagctctgctgtccccttcccgccycaccccctgtgagctctgctgtccccttcccacctcaccccgtgagctctgctgtcccctttccgccccaccccctgggcagggcttctgtgggctgcag

SEQ ID NO: 520772 - DNA, 201 bp, Homo sapiens
acgcccgggagcggctgcgggtccgtgacatcaacgaggcctttaaggagctggggcgcatgtgccaactgcacctcaacagcgagaagccccagaccaarctgctcatcctgcaccaggctgtctcggtcatcctgaacttggagcagcaagtgcgaggtcagtgggggcgcgggccaccagcgtccctgcagcgccacc

SEQ ID NO: 520773 - DNA, 201 bp, Homo sapiens
aacgagattcacccagcgcgaggaggaagaaacagcagttcctgggaaccacaattatggggggtggggggtgtgatctgagtgcctcaagatggttttcraaaaaatttttttaaagaaaataattgtatacgtgtcaacacagctggctggatgattgggactttaaaacgaccctctttcaggtggattcagagacct

SEQ ID NO: 520774 - DNA, 201 bp, Homo sapiens
tccctcggcttgggcccctcaccacccatccccccaccctgcagcagagtaagatagaagaccacctggacgaggccatccacgtgctccgcagccacgcygtgggcacagccggcgacatgcacacgctgctgcctggccacggggcgctggcctcaggtttcaccggccccatgtcgctgggcgggcggcacgcaggcc

SEQ ID NO: 520775 - DNA, 201 bp, Homo sapiens
gcgctggcctcaggtttcaccggccccatgtcgctgggcgggcggcacgcaggcctggtgagcgctgggcgagggtggagctgggcagtgggcggggaccyggctccccctgatgcacccgtctccccacgcctgcaggttggaggcagccaccccgaggacggcctcgcaggcagcaccagcctcatgcacaaccacgcg

SEQ ID NO: 520776 - DNA, 201 bp, Homo sapiens
tcacattccgtgcccagtgtcagccagaaggggatttaagtggctcaggtcctgagtaatcggggtgcctgcttcaggcaaggctggatccaggtgtcacygcatcagccccaggccctccacactgggggctcgccccggcaggctgtcctcctccgtagcccaggccctccatgctgggggctcgccttggccagctgt

SEQ ID NO: 520777 - DNA, 201 bp, Homo sapiens
gcggggcagggacggtcctgtctcgctttgcccggcctcgaacttggagtacagtagagtcagttggtgtcctgagtaggaagcgaatagcgtgaaggtckggcgggtgtgtctgagggcccaccacgtgccacgggcgatttctgcccgttccccttacggggtaggtgaggcctggccccgcccccctgccgggggtgg

SEQ ID NO: 520778 - DNA, 201 bp, Homo sapiens
aagaggaaaccccgggagaacctggcgcatgggtcatttcctccgggtgcgtgtctgggagtggaattgctgggtccctggatgctttttcacattgaaarcgtcccttgtgaccgggcgcggtggctcaggcctgtaatcccagcacttgggaggccaaggcaagaggagtacctgggactaggtgttcgagaccagcct

SEQ ID NO: 520779 - DNA, 201 bp, Homo sapiens
gaaggggccgtgggagcatgaggggaggaatttgccaggcagagagagcagcccgtacggacgccctgcggtgggaccggccggcggggcgggctaggggygctgtgttcgttgcaggggcagcggggagccctggatggttgtgaatggagagagggtctagtctgatgtgcatttgggcggcccaggctggctgtcgac

SEQ ID NO: 520780 - DNA, 201 bp, Homo sapiens
ccttcccgcctcaccccgtgagctctgctgtccccttcccgcctcaccccgtgagctctgctgtccccttcccgcctcaccccgtgagctctgctgtcccyttcccgcctcacccccgtgagctctgctgtccccttcccgcctcaccccctgtgagctctgctgtcccctttccgcctcaccccgtgagctctgctgtcc

SEQ ID NO: 520781 - DNA, 201 bp, Homo sapiens
gatcaagggtctgttgaagacagtgtgcgggcgagggaggctggggcagcaaaggagggagacaatggggaaagggccacacaggccgggtcgggggcagygagcctgaagacccctgaaatcagctgccgttgcccgtgtgacctgccttgggagcccgagcccctgagcccctcgtcccctcgtccctcccgcgcctgg

SEQ ID NO: 520782 - DNA, 201 bp, Homo sapiens
agtgaggagatcaagggtctgttgaagacagtgtgcgggcgagggaggctggggcagcaaaggagggagacaatggggaaagggccacacaggccgggtcrggggcagcgagcctgaagacccctgaaatcagctgccgttgcccgtgtgacctgccttgggagcccgagcccctgagcccctcgtcccctcgtccctccc

SEQ ID NO: 520783 - DNA, 201 bp, Homo sapiens
tggatgattgggactttaaaacgaccctctttcaggtggattcagagacctgtcctgtatataacagcactgtagcaataaacgtgacattttataacgawgccctgcagtccccgggttctttctggtgtcacatgtttaggaagggaagtgggggggggccctgacgttcacctcgggtgcagcaaggaccgtggtcca

SEQ ID NO: 520784 - DNA, 201 bp, Homo sapiens
caccacaggagcacaaagagatatgtcagttggccctggaggccgacgcaggcccctgaccctaggcctgttgcagggctagggcgagcaggtgccacggyggccgccagcgagatcaagcgggaggagaaggaggacgaggagaacacgtcagcggctgaccactcggaggaggagaagaaggagctgaaggccccccgg

SEQ ID NO: 520785 - DNA, 201 bp, Homo sapiens
ctgtctccctctggccccctcccggcgccctccccatagcccagacgaggacgaggacgaccttctccccccagagcagaaggccgagcgggagaaggagmgccgggtggccaataacgcccgggagcggctgcgggtccgtgacatcaacgaggcctttaaggagctggggcgcatgtgccaactgcacctcaacagcga

SEQ ID NO: 520786 - DNA, 201 bp, Homo sapiens
gtctccctctggccccctcccggcgccctccccatagcccagacgaggacgaggacgaccttctccccccagagcagaaggccgagcgggagaaggagcgscgggtggccaataacgcccgggagcggctgcgggtccgtgacatcaacgaggcctttaaggagctggggcgcatgtgccaactgcacctcaacagcgaga

SEQ ID NO: 520787 - DNA, 201 bp, Homo sapiens
gcctgctcccagggctccccgtgcccccagggctctgctggaactcagaccccagggcggttgagggttttttaggtggcttttagcactctgtgctttgrccactcacaactcttctcccctccctgtttctccctgtccatctgtccccacatccaccaagcagggtttccaggcctgaggtgcccgccctggccccag

SEQ ID NO: 520788 - DNA, 201 bp, Homo sapiens
tccctctggccccctcccggcgccctccccatagcccagacgaggacgaggacgaccttctccccccagagcagaaggccgagcgggagaaggagcgccgsgtggccaataacgcccgggagcggctgcgggtccgtgacatcaacgaggcctttaaggagctggggcgcatgtgccaactgcacctcaacagcgagaagc

SEQ ID NO: 520789 - DNA, 201 bp, Homo sapiens
ccctctggccccctcccggcgccctccccatagcccagacgaggacgaggacgaccttctccccccagagcagaaggccgagcgggagaaggagcgccggrtggccaataacgcccgggagcggctgcgggtccgtgacatcaacgaggcctttaaggagctggggcgcatgtgccaactgcacctcaacagcgagaagcc

SEQ ID NO: 520790 - DNA, 201 bp, Homo sapiens
cccggcgccctccccatagcccagacgaggacgaggacgaccttctccccccagagcagaaggccgagcgggagaaggagcgccgggtggccaataacgcscgggagcggctgcgggtccgtgacatcaacgaggcctttaaggagctggggcgcatgtgccaactgcacctcaacagcgagaagccccagaccaaactgc

SEQ ID NO: 520791 - DNA, 201 bp, Homo sapiens
tccccatagcccagacgaggacgaggacgaccttctccccccagagcagaaggccgagcgggagaaggagcgccgggtggccaataacgcccgggagcggstgcgggtccgtgacatcaacgaggcctttaaggagctggggcgcatgtgccaactgcacctcaacagcgagaagccccagaccaaactgctcatcctgca

SEQ ID NO: 520792 - DNA, 201 bp, Homo sapiens
gagtgcagtgacacgatctcggctcactgcagcctctgcctcccgggttcaagtgattctcctgcctcggcctcccgagtagctggaattataggcacccrccaccacgcccggctactttttgtattttcagtagagacggggtttcactgtgttggccaggatggtcttgatctcttgacctcgtgatctgcctgcctt

SEQ ID NO: 520793 - DNA, 201 bp, Homo sapiens
ttccttggggtcgcctcccactaaccttccttctccccttgcaggcaagagcggtgagcggggcgcctatgcctccttcgggagagacgcaggcgtgggcrgcctgactcaggtgaggggctcgggccgggctggggtgtattttgattttaaacaaatctgtcacccaccctctctgatctgcagaagctctcctggctt

SEQ ID NO: 520794 - DNA, 201 bp, Homo sapiens
ggtgagtcgcacgagggagaagggaccccacagctcgtcagtggcagtgccaggccctgtgtcctggcgaagcttgggaacacacatggcggggtgggccstgagtggacaggccccctgtgatttctgagccaagatctgagctctgacccgaggccgcctccaagggaaggcggggaagtccttccctaggtccagcct

SEQ ID NO: 520795 - DNA, 201 bp, Homo sapiens
ttggggtcgcctcccactaaccttccttctccccttgcaggcaagagcggtgagcggggcgcctatgcctccttcgggagagacgcaggcgtgggcggccygactcaggtgaggggctcgggccgggctggggtgtattttgattttaaacaaatctgtcacccaccctctctgatctgcagaagctctcctggcttagct

SEQ ID NO: 520796 - DNA, 201 bp, Homo sapiens
ctggcgctactcacagacccctcttcctgttactttagtgaaggacgaatgttgctctgggaccaagggaagctcagcactggaagattgattccagctgrggaacaagggagaaggatgggatggggtgttggagctggggttttgatgggtcgataggagttttctggattaaggaggaaaaaggtttagtaggcagag

SEQ ID NO: 520797 - DNA, 201 bp, Homo sapiens
tgctgctcaggagccagcacaggacaccccccaccccaccccaccatgtccccattacaccagagggccatcgtgacgtagacaggatgccaggggcctgrccagcctcccccaatgctggggagcatccctgggcctggggccacacctgctgccctccctctgtgtggtccaagggcaagagtggctggagccggggga

SEQ ID NO: 520798 - DNA, 201 bp, Homo sapiens
tgaggcaggagaattgcttgaacccaggaggtggaggctgcagtgagccgagatcacgccattgccctccagcctgggtgatggagcgagattccatcttaaaaaaaaaaaaagaatgaagactcaggcctggtgtctggtcccaccccaccacggaacctgggcaagcgccatcctcttctgagcctcagtttccccact

SEQ ID NO: 520799 - DNA, 201 bp, Homo sapiens
cgtttgctcagttgggggtctctgcacctcctggggtactggctatggccggaggggaccagacaacatgcaggtggtatagaggcaaactgagacccagrgggtgccggcgctgtgcccacccctacacagccagcccaccctggcctcagcagctgccctgttcaccagggcccacgtgcaggaccaggatcttggggt

SEQ ID NO: 520800 - DNA, 201 bp, Homo sapiens
tctcttccctgctggtatttgctaccaataaattgctacttttaaaaaacattgtccgaggccagcggatcatgaggtcaggagatcgagaccatcctggytaacacggtgaaatgccgtatctgttaaaaatacaaaaaaattagccgggcgcggtggtgggcgcctgtagtccagcctgggcgacagagccagactcag

SEQ ID NO: 520801 - DNA, 201 bp, Homo sapiens
gttgcaacccttcctttttgttggtgtggcttggcagatctttgtgctcctggttgtatctcctgagtcgcttgtttcaaaactgtctttggtcggcaccrtgttttcagattaaagacgttaagcacccgtccatcttcgttctcagcttttccttccatcgtcttattttgtttttccatctgtgtgctcccaactccg

SEQ ID NO: 520802 - DNA, 201 bp, Homo sapiens
ccgaaatcatcggggaccccttcttgtccccaagcctgtcattgggcaggagatgggcacactgagggcagggctctgcgggagatgggcatactggggcyagggctccccgagatgggcacactggggtcaggctctgccagcatcctgccgtggcgctctcagtcgtgtgcacttactgagagcctattgtaggcacat

SEQ ID NO: 520803 - DNA, 201 bp, Homo sapiens
aaacgtaaagacaactttgtatcactgtcaagagctgataagttgtatccttcgcctaatgggatacccctccccccagagcaaaggcagggggaacagcragttttcagcggcagggactctgcctggcggtacagcggggtcatcgtctggagttttctcactctgggcgtgggtgtccagggtgcagcgtcacttgag

SEQ ID NO: 520804 - DNA, 201 bp, Homo sapiens
atagcccagacgaggacgaggacgaccttctccccccagagcagaaggccgagcgggagaaggagcgccgggtggccaataacgcccgggagcggctgcgsgtccgtgacatcaacgaggcctttaaggagctggggcgcatgtgccaactgcacctcaacagcgagaagccccagaccaaactgctcatcctgcaccagg

SEQ ID NO: 520805 - DNA, 201 bp, Homo sapiens
gggtgtgaccacatccacagcctcccctagagctgagtctgagggcacttgcacctgggcagccagtcgcgtacacacacaggcgccccaccatggggctytgctgcattccagggagcacattcgccgcgtgcacagagaagcacattttcacgcatgtgacaacacacacatcagcatgtggacccgtactgctgccca

SEQ ID NO: 520806 - DNA, 201 bp, Homo sapiens
cagacgaggacgaggacgaccttctccccccagagcagaaggccgagcgggagaaggagcgccgggtggccaataacgcccgggagcggctgcgggtccgkgacatcaacgaggcctttaaggagctggggcgcatgtgccaactgcacctcaacagcgagaagccccagaccaaactgctcatcctgcaccaggctgtct

SEQ ID NO: 520807 - DNA, 201 bp, Homo sapiens
ggccttccaggggatgagggctggggtgccaggagcctcccgtttgctcagttgggggtctctgcacctcctggggtactggctatggccggaggggaccmgacaacatgcaggtggtatagaggcaaactgagacccagagggtgccggcgctgtgcccacccctacacagccagcccaccctggcctcagcagctgccc

SEQ ID NO: 520808 - DNA, 201 bp, Homo sapiens
acgaggacgaggacgaccttctccccccagagcagaaggccgagcgggagaaggagcgccgggtggccaataacgcccgggagcggctgcgggtccgtgayatcaacgaggcctttaaggagctggggcgcatgtgccaactgcacctcaacagcgagaagccccagaccaaactgctcatcctgcaccaggctgtctcgg

SEQ ID NO: 520809 - DNA, 201 bp, Homo sapiens
aggacgaggacgaccttctccccccagagcagaaggccgagcgggagaaggagcgccgggtggccaataacgcccgggagcggctgcgggtccgtgacatyaacgaggcctttaaggagctggggcgcatgtgccaactgcacctcaacagcgagaagccccagaccaaactgctcatcctgcaccaggctgtctcggtca

SEQ ID NO: 520810 - DNA, 201 bp, Homo sapiens
gggttttttaggtggcttttagcactctgtgctttgaccactcacaactcttctcccctccctgtttctccctgtccatctgtccccacatccaccaagcrgggtttccaggcctgaggtgcccgccctggccccaggagaatgaaccagccgcagaggatggcgcctgtgggcacagacaaggagctcagtgacctcctg

SEQ ID NO: 520811 - DNA, 201 bp, Homo sapiens
ccttctccccccagagcagaaggccgagcgggagaaggagcgccgggtggccaataacgcccgggagcggctgcgggtccgtgacatcaacgaggcctttmaggagctggggcgcatgtgccaactgcacctcaacagcgagaagccccagaccaaactgctcatcctgcaccaggctgtctcggtcatcctgaacttgga

SEQ ID NO: 520812 - DNA, 201 bp, Homo sapiens
ggagaatgaaccagccgcagaggatggcgcctgtgggcacagacaaggagctcagtgacctcctggacttcagcatggtgagccaggacccccgcccagcycccgacacccctttgcctccacagttcacgggaaggttttcaggggagagtgtttgctgaatacttcagcgatggagcctcagctgtttggatgggaggc

SEQ ID NO: 520813 - DNA, 201 bp, Homo sapiens
tccccaggcccccctaagctgctctcccttggaacctgcacagctctctgaaatggggcattttgttgggaccagtgacccctggcatggggaccacaccytggagcccggtgctggggacctcctggacaccctgtccttcactcctttgccccagggacccaggctcatgctctgaactctggctgagaggatgctgct

SEQ ID NO: 520814 - DNA, 201 bp, Homo sapiens
ctcccctccctgcagatgttcccgctgcctgtcaccaacgggaagggccggcccgcctccctggccggggcgcagttcggaggttcaggtaggaccccgcyttcctgccagcgctcgtggagtgaggagatcaagggtctgttgaagacagtgtgcgggcgagggaggctggggcagcaaaggagggagacaatggggaaa

SEQ ID NO: 520815 - DNA, 201 bp, Homo sapiens
ccttctccccttgcaggcaagagcggtgagcggggcgcctatgcctccttcgggagagacgcaggcgtgggcggcctgactcaggtgaggggctcgggccrggctggggtgtattttgattttaaacaaatctgtcacccaccctctctgatctgcagaagctctcctggcttagctaggttatgtttgcttcctgatagc

SEQ ID NO: 520816 - DNA, 201 bp, Homo sapiens
aacatgtacagaatccaaccgagggctttacaaaacaaaaccaaaaagataggaagcagccgggtgcacagacgcttagccacgcagctttgtactttgcrtctcagaatcgggggagcagccccttgggttggccacactggtatctgtttctcagtctttcgttcttcgtgaaaacagcagtgtgggatgcggtcagtc

SEQ ID NO: 520817 - DNA, 201 bp, Homo sapiens
ccgcacccagccgacccgaggtttttaatatatgaaacgggaattgtgagggtctctcctccagggtgtagggcaggggttgttctcatggccggtggccrgttctcaccccttttgcttctaacagacacgcagcccaagaaggtccggaaggtcccgccgggtcttccatcctcggtgagtcgcacgagggagaaggga

SEQ ID NO: 520818 - DNA, 201 bp, Homo sapiens
ggtttttaatatatgaaacgggaattgtgagggtctctcctccagggtgtagggcaggggttgttctcatggccggtggccggttctcaccccttttgctyctaacagacacgcagcccaagaaggtccggaaggtcccgccgggtcttccatcctcggtgagtcgcacgagggagaagggaccccacagctcgtcagtgg

SEQ ID NO: 520819 - DNA, 201 bp, Homo sapiens
gcatgaggcaccgcacccagccgacccgaggtttttaatatatgaaacgggaattgtgagggtctctcctccagggtgtagggcaggggttgttctcatgkccggtggccggttctcaccccttttgcttctaacagacacgcagcccaagaaggtccggaaggtcccgccgggtcttccatcctcggtgagtcgcacgag

SEQ ID NO: 520820 - DNA, 201 bp, Homo sapiens
agtggaattgctgggtccctggatgctttttcacattgaaagcgtcccttgtgaccgggcgcggtggctcaggcctgtaatcccagcacttgggaggccarggcaagaggagtacctgggactaggtgttcgagaccagcctggccaacgtggtgacagcacggcctgtctcatttaataggtgacaaagatcgtgtcctt

SEQ ID NO: 520821 - DNA, 201 bp, Homo sapiens
gcaggaatgataaacccagaatatttttgttaagttagttcatcataaccattaggcctgtaattgcaattctgcagtgatagggagaatggcatttaagsgttcttaggttatttttttaagttattaacttactgaattatgtatgcatttcttcagatatgctactttagaaaattaatacttccttttaaggtttct

SEQ ID NO: 520822 - DNA, 201 bp, Homo sapiens
cagatggttttatattcatgatctcccttattttctccatttccccaaagaagaagctgggcataaagagtgattttctcagggtctcataatcagtaacggagcagaattcaactacaggacctccctgggaacctgttctctttccttgtcctgatgtgttactcttataggccaatttttgcctttgtgttgtgccta

SEQ ID NO: 520823 - DNA, 201 bp, Homo sapiens
ttagtagagatggggtttcactatgttgggcagtctggtcttgaactcctgacctggtgatcctcctgcctcagcctcccaaagtgctgggattataggcrtgagccactgcgcccagcctgtccctttttcttaaatgacctttttggtgaggaccattataggtttgtaccaggataaggttgtagagttaatcataat

SEQ ID NO: 520824 - DNA, 201 bp, Homo sapiens
tatgtcactacagacaggacagcaaccgttattcacactagttgaatgggttcctgcctttttttggtggggggggcctcaggagaatttttacaaacccrttatgactgtttagttaggctgagttactgtaaaatttgtaaataaaaccctactggatggatagggttaatagatggctatagagagtttaaagttaag

SEQ ID NO: 520825 - DNA, 201 bp, Homo sapiens
gaaatatttatattgaattctgaatacaaaatgtccctgtggtagaaaacttactctttatgcctggtgcagtataattcccaagtgtactgtctaccagaaaaaaaaaacaaaactaataaaaaatgaaatatgaaaattaagtttgtatttattgattattattacttaaggggagaaaatcatatttcttgtctaaaa

SEQ ID NO: 520826 - DNA, 201 bp, Homo sapiens
gaaatttgctctgcagtttgctttacaggttgatttgggattgaagtgtgtgagagggaactgactaaggcagttcagtagctgggaaactgtttgtttamatgcttttgaattgtagataaaaataaattcacattggcatcattagtatctgagcatttctcagtgtcttaaggctggctctccatgagtgctggctga

SEQ ID NO: 520827 - DNA, 201 bp, Homo sapiens
gaagtgactaatagtaactttgcttcaatttattttgatgtatcttatacacaagtataggaaggcttttgggtggtttttaagaaacatgggctgtagaktcccataattgctttcctgaattattaagcgtgagctttcattacatctttgtaccggaacttttgcttttgctgtggaacagattcagggacatcgtct

SEQ ID NO: 520828 - DNA, 201 bp, Homo sapiens
attcatctgcatcgtttcagagatgttcctaatggtcgtcaattcagaattcagaagccgatcattatccagctattggataacagggaatttttcatgctttttttttgtttgtttgtttcttgctgtatttaagcatctccacagaagatatttagaagcaggtagagataaaatttaaactaatcaatactgtttttt

SEQ ID NO: 520829 - DNA, 201 bp, Homo sapiens
tgtttttctcctcttgaagtttccctgaaacctgggctcttgaagacgcatcactggagcagatggataatggagactggggctatatggtgagtgcttcytggagatgcattttgaaggctggggaattatttttgtgtgtctttttatccttatgtatttttaggtatatcttataagaaaagaaaattgtgaatttgt

SEQ ID NO: 520830 - DNA, 201 bp, Homo sapiens
aagagaaaatgattacttgtagagaaaaatccatttctgcagtggtatggttaaggataatctaaccataatcacattatccttgtatgcctggctacttrtgctggcctgtatgtgaatgttaaccccaaagactcctttagatgtcgctgaactagttactataaaaagtatttcgctttcaaactcccacatttcaag

SEQ ID NO: 520831 - DNA, 201 bp, Homo sapiens
agcatcatcttttttttttatattgtaagataaataccattctgatgtatttctcttggaaagggatgctggtatcctgggaggtttatgatttttgatgyttttactcaggtgattggcttgtatagctgaaatgctgatgaaaaggagttttcccttctccctttttcttttcttttctttttttttttttttttgaga

SEQ ID NO: 520832 - DNA, 201 bp, Homo sapiens
acagatggttttatattcatgatctcccttattttctccatttccccaaagaagaagctgggcataaagagtgattttctcagggtctcataatcagtaayggagcagaattcaactacaggacctccctgggaacctgttctctttccttgtcctgatgtgttactcttataggccaatttttgcctttgtgttgtgcct

SEQ ID NO: 520833 - DNA, 201 bp, Homo sapiens
cggagggggaggtgctgagacatcgagggcggaagtgggtgtggtcttcggtccgaaggcctggctgcggggagtgggtgcggcgggagttggggtgatcrttaacatttagactggagctgtttccctggaggtgcgcccttgggaagggcctgactgtgtgaagagtggacagcagtcctccgccccctgctgggctcg

SEQ ID NO: 520834 - DNA, 201 bp, Homo sapiens
tgttcatattaaagttgtcattaataactacttcctcttattaataagttcaagtggggaaggtgggagagcagtattgtctggggatcattgctcaaatrgaagatttggttagactctcctgtggggctcaaggaaactcccttccagtcactcgggtttgaaactttgcttttgaattccttcttattcacatccagt

SEQ ID NO: 520835 - DNA, 201 bp, Homo sapiens
aatcccagctactcgggaggctgaggcaggagaattgcttgaactcgggagccagagactgcagtgagctgataatcgtgccactgtactctagcccaggygacagagcaagactctgtctcaaaagaaaaaaaaaaaaaaacttccactaggcagctcttaaagtcagaggcacttaaaattatgggcgccagccatagg

SEQ ID NO: 520836 - DNA, 201 bp, Homo sapiens
aagtggggaaggtgggagagcagtattgtctggggatcattgctcaaatagaagatttggttagactctcctgtggggctcaaggaaactcccttccagtmactcgggtttgaaactttgcttttgaattccttcttattcacatccagttatcatatttcattgaatctaagataacatcaactttaagatgcggtagta

SEQ ID NO: 520837 - DNA, 201 bp, Homo sapiens
ttgcacacactgaagtgtgctagcttttcccacctcattttttgttactgaagaattttaataggtttattaagagataaaaggtaggctaggcacggtgmctgatgcctgtaattccagtactttaggaggccaatgcaggcaaatcgcttgagctcaggaattcaagaccagccttggcaacatggtgaaaccctgtct

SEQ ID NO: 520838 - DNA, 201 bp, Homo sapiens
ttttctcaccttttttcatcagtgttgcttgggggttatcaagtttttttttggtttgttttttgttttttttttttttttgagttgaggtccactctgtygcccaggctggagtgcagcggcacgacctcagctcactgcaacctccacctcccaggctccagtgattctcctgcctcagcctcctgagtagctgggact

SEQ ID NO: 520839 - DNA, 201 bp, Homo sapiens
agagaaatgtcttcaggtattcacccagatttcacttgattttttacacaaaattctagtaagggaatttgcctttttatctatggtatcaaatttattgkcataaacttgttcaaaatatctcattatccttttagtgtctgtagaacctgaagctatgttccattttcatttctgatattaataatttttattttctca

SEQ ID NO: 520840 - DNA, 201 bp, Homo sapiens
tgcacatggctgccctgttgttaaatgaaatctagatccagtggggtaggctcctggcataggtgctcttttaaagctcccctagtgatttgcagggtgcrggcagaagccagcaactgtttacttacagaagttctctgtgaaaaatgtggcaacaaattatgtaggtaaatcaaagaatatttggagtcatgaatatag

SEQ ID NO: 520841 - DNA, 201 bp, Homo sapiens
ccaacttcatagacttgagaggattgaaagagttgagtgcttacaaagtacacacagtaagtgctaaatgttttagttaatatattacggtcattgtcatrattatcatacagtttttcactattttaaagtagtcttcatggagcatcttgtgcttcatactttgttttatttgggattgctagcttaaggtaggagctc

SEQ ID NO: 520842 - DNA, 201 bp, Homo sapiens
gagatttgtagactctttataaactgccttgaatggctacatagtaatctatgtgacattatagtttgcctaactgtgctcctaggcaagtcagtaggctrtagtgggaccttgggcaaggtatttcgtctttctctgctcagtcttcttgtctgtcaaatagggataataactagtgccaacttcatagacttgagagga

SEQ ID NO: 520843 - DNA, 201 bp, Homo sapiens
gtaggttaggaattcaacatatgaattttggggagatacaattcagtctgtcaccgctacatctcacccccttttagaacttgtttatacttcaaaacatktagataagacattaatcatctttgtttttgtacttacgtatttcttccaaaattcttgtttaatatcagtaatttacacatttaaatggaaaattccttt

SEQ ID NO: 520844 - DNA, 201 bp, Homo sapiens
atgatttgttataattcctgctagggacctgggtcgagtactttaattatattgatctatgactattgtatgaatttactagggctgccatgacaaaatgmcacagactgcatggcttagatgatagaaatgtattttctgacagttttgaaggctggaagtccaagattaaggtgttggcagttttggtttcttctgagg

SEQ ID NO: 520845 - DNA, 201 bp, Homo sapiens
aacttggatgatcaggaaatagaaaggagtatttaatctgagcctggcctgcaaagatgagtagaatttccttaggtcaacacaagtgaatgagaccataygggatgaagaccagaaaatactttgaactgaattttaatgaaaactcaacatatcaaattatgtaaaatgtagctaaagtagtgctaagctggaaaatat

SEQ ID NO: 520846 - DNA, 201 bp, Homo sapiens
tggcatttacgaaaaatggattggtgctatgaagctggagagcctttatgtgaagaagtaagatgatttctatacattgtactttcgtatgattacatttrtgtcatattttcgtacaaggtacccattccactcatgagaaagctttaattactttctataggatacaaatatctatgaatgggtctattttactttttt

SEQ ID NO: 520847 - DNA, 201 bp, Homo sapiens
aggcctctctcaccctgtccctctctgccacatcgtacctgctcaggccgccacctctttccttttctcccgcactgaggaagttccctaccacgtctggsggggctctgctgtgtaccgagaatgggatcttcacttccgctcttcattccaagattaaaggaaattgaaatgcggaataagagtttgccactagcatcc

SEQ ID NO: 520848 - DNA, 201 bp, Homo sapiens
ccaaaatctgaaactatttaaaaaaaattaaattgacacgtatttatggggtacattttaatattctggtacatatatgtgttgtataatgattaaatcagggtatttagcatactcattacctcatgcacttagcatttcttggtggtgagaacattcaagagcttttctaactattttttaatatacaatccttactgt

SEQ ID NO: 520849 - DNA, 201 bp, Homo sapiens
tccaaaatctgaaactatttaaaaaaaattaaattgacacgtatttatggggtacattttaatattctggtacatatatgtgttgtataatgattaaatcagggtatttagcatactcattacctcatgcacttagcatttcttggtggtgagaacattcaagagcttttctaactattttttaatatacaatccttactg

SEQ ID NO: 520850 - DNA, 201 bp, Homo sapiens
ggtcacggcaaatgccattaattcattcctttttatggctgagtggtattccatcatacacacacacacacacacacacacacacacacacacacacacaccacagtttctttatccactcattgattgatgggcatttgggttggttccatgattttgcaattgcaaactgtgctgctataaacatgcatgtgcaggccg

SEQ ID NO: 520851 - DNA, 201 bp, Homo sapiens
tttgtttgtttgtttggatctggcgcttgacggttttctggtacagcccccaggacgtgctgctgaggacacaggtgcgcatccctggtgagaggacctaygcccctgccctggacctggtgtggaacgcggcccagggtgggactgccggctccctgaggcagagagttgccgatttctatcgtcttcccgtggagaaga

SEQ ID NO: 520852 - DNA, 201 bp, Homo sapiens
aggtcacggcaaatgccattaattcattcctttttatggctgagtggtattccatcatacacacacacacacacacacacacacacacacacacacacacaccacagtttctttatccactcattgattgatgggcatttgggttggttccatgattttgcaattgcaaactgtgctgctataaacatgcatgtgcaggcc

SEQ ID NO: 520853 - DNA, 201 bp, Homo sapiens
taggtcacggcaaatgccattaattcattcctttttatggctgagtggtattccatcatacacacacacacacacacacacacacacacacacacacacacaccacagtttctttatccactcattgattgatgggcatttgggttggttccatgattttgcaattgcaaactgtgctgctataaacatgcatgtgcaggc

SEQ ID NO: 520854 - DNA, 201 bp, Homo sapiens
ctaggtcacggcaaatgccattaattcattcctttttatggctgagtggtattccatcatacacacacacacacacacacacacacacacacacacacacacaccacagtttctttatccactcattgattgatgggcatttgggttggttccatgattttgcaattgcaaactgtgctgctataaacatgcatgtgcagg

SEQ ID NO: 520855 - DNA, 201 bp, Homo sapiens
ggcgtgtgccaccacgcccagctaatttttgtgtttttagtagagacagggtttcaccatgttggccaggctggtctcaaactcctgacctcaggtaatcygcccacctcggcctcccaaagtgctgggattacaggcatgagacactgagcccagccatcttttttttttttttttttttttttttttttagaatctgtt

SEQ ID NO: 520856 - DNA, 201 bp, Homo sapiens
agagtgagctaagattgcgccactgcactccagcctgggcgacaaagtgagactccgtctcaaaaaaaaaaaaaaaaagaaaaagaaaaagaaaaaaaaaagatgaaaatctgggtgttctttttaaaaagtatacttaaaagagttgaaaaaatggaattcttctagcttgtcttaaagaaatatttacttttcatttgt

SEQ ID NO: 520857 - DNA, 201 bp, Homo sapiens
gcagagtgagctaagattgcgccactgcactccagcctgggcgacaaagtgagactccgtctcaaaaaaaaaaaaaaaaagaaaaagaaaaagaaaaaaaaaagatgaaaatctgggtgttctttttaaaaagtatacttaaaagagttgaaaaaatggaattcttctagcttgtcttaaagaaatatttacttttcattt

SEQ ID NO: 520858 - DNA, 201 bp, Homo sapiens
ggcagagtgagctaagattgcgccactgcactccagcctgggcgacaaagtgagactccgtctcaaaaaaaaaaaaaaaaagaaaaagaaaaagaaaaaaaaaagatgaaaatctgggtgttctttttaaaaagtatacttaaaagagttgaaaaaatggaattcttctagcttgtcttaaagaaatatttacttttcatt

SEQ ID NO: 520859 - DNA, 201 bp, Homo sapiens
atgtggaattcctaagtccaaaggtgtgacctcttgaaagccttgatgttctatgcagtagcatatgagagggctcatttcactgccctttcgtaagcatygcatagcactactttctaaaaccagtatcgtttcttttaaactgaggatgcacgtaaaagtgaacccaaaagagaaacaaatggccccaaactccaagac

SEQ ID NO: 520860 - DNA, 201 bp, Homo sapiens
actgttagggtagccttaggaataattttatcacaggagagttggaatctagttggtcatcttgttggtccaaatagcatgatatttcccagttcaaatgmgtagccttagaagaagacccaaaataaagctctgtggggagtctgagggagctgtggtcagccgccctttccccagtcttcacctgcctacttcctgttc

SEQ ID NO: 520861 - DNA, 201 bp, Homo sapiens
aggagatgcctggcatttacgaaaaatggattggtgctatgaagctggagagcctttatgtgaagaagtaagatgatttctatacattgtactttcgtatrattacatttatgtcatattttcgtacaaggtacccattccactcatgagaaagctttaattactttctataggatacaaatatctatgaatgggtctatt

SEQ ID NO: 520862 - DNA, 201 bp, Homo sapiens
aattttttcatttttttagagacagggtctcgctgtattgcccaggttggtcttgaactcctggcctcagatgatgctcacacctcagcctcccaaaatgmtggtgtcatcggtagagggtcatgagtgcaagttgtccaggttcttggcatttcgaacaaagaattagacaaaacgcccagcaaagcaaagaatgaagca

SEQ ID NO: 520863 - DNA, 201 bp, Homo sapiens
cactatatgttactactactgcttaaacactttagtgacttttaaagaaattaaggaaagaatagtgtttcgtatttatcttttctggagtttactgctcrttatttatccaggtttgcatttaatatcatttcccttcaacctagagagtttcctttagcatttcttgaagttcagaattgcaggtgaaaaatgctttca

SEQ ID NO: 520864 - DNA, 201 bp, Homo sapiens
aggcagtttcacactctggtgaggcagcatgttttgagagtagtgatttctctcttccttgaatttcttttgggttgtggtttcctggacatctcttttgsagttttgtgctcatttcttcagaattgatcagcttctttctagcagcatcaggatctcttcccagttctgtgacatgactcaaagggcaggcaggcattc

SEQ ID NO: 520865 - DNA, 201 bp, Homo sapiens
gatgagtgtgtgctagagtcagggctacatttccctcaacattgctaattctgcaaattagtcttgctcttttgagtaaaaattcctaggctgacatgctcatcaacttgctttctgagaaaagtgctcttcatatatattaagcagaattgtttagatggttgttgtgccctttgtgtaggccagaattcttcactcagg

SEQ ID NO: 520866 - DNA, 201 bp, Homo sapiens
tcttttgttattcataatgggcccctttccaccaaacctgagttgatgttaatgaagtcactcttagatgcctcaggatggaggctggttgccagagaagscagtcccattattagagggttgaaactttcagccctgcttccctgaccttggggaggggagagagacaggaaattgagttcagtcaccagtgacgagtga

SEQ ID NO: 520867 - DNA, 201 bp, Homo sapiens
ctcagatctagaaacttaaagagcaaagccatggtaatctattaagtaaactggtaatgcacctttataaatttgcaatgggagacattcctttcaagcarctagaagatgagtgtgtgctagagtcagggctacatttccctcaacattgctaattctgcaaattagtcttgctcttttgagtaaaaattcctaggctga

SEQ ID NO: 520868 - DNA, 201 bp, Homo sapiens
ccccttcatccagtatcaaggtcaaggcaagccagttcctcattgtcctttattgtaaggtggattttttttctaggtcgtggttatattgaaggtatagmcatttagggattccaactttttgccggattttgtcattgtgatatattaagaagtatatatttggtcatcctttccagttcccattcctagcacagagct

SEQ ID NO: 520869 - DNA, 201 bp, Homo sapiens
agtttggatatgaaaaaagtcaaactgtgttctaccaggaacatgtttaccagggagatgatctatgcctaaattttgtgttttctggagtgtttgtggcygatgtattgaaatgtaactttctttagtatgttgattttatataccaaaatatataaaatattaaacaatttatacactaacaaccaataatcttgctaa

SEQ ID NO: 520870 - DNA, 201 bp, Homo sapiens
ggctggggagaagattggaaaaacggggagaagtacaagagctgatttttacaatttctaccctaagagtctttatgtagtctagttgagatacaacacckattacatggagattacctaccatttatataggaaactgttgatcagttttttagtctttgaccaacaataatggatcaattacattgtaagtaaattttt

SEQ ID NO: 520871 - DNA, 201 bp, Homo sapiens
tcctagaatggtttcctatgagaggtgtaagaaggatttttttccacttgaaaaaattacctatttctatttattgagtaatcaatttttctctaccaatstactatgccagttctgttatgtctactcttcatttttgtgtgagtctgtttttcagctctctattctattccattgttcatttttttctattcctgggca

SEQ ID NO: 520872 - DNA, 201 bp, Homo sapiens
aggcagagtgagctaagattgcgccactgcactccagcctgggcgacaaagtgagactccgtctcaaaaaaaaaaaaaaaaagaaaaagaaaaagaaaaaaaaaagatgaaaatctgggtgttctttttaaaaagtatacttaaaagagttgaaaaaatggaattcttctagcttgtcttaaagaaatatttacttttcat

SEQ ID NO: 520873 - DNA, 201 bp, Homo sapiens
cctgggaggcagagtgagctaagattgcgccactgcactccagcctgggcgacaaagtgagactccgtctcaaaaaaaaaaaaaaaaagaaaaagaaaaagaaaaaaaaaagatgaaaatctgggtgttctttttaaaaagtatacttaaaagagttgaaaaaatggaattcttctagcttgtcttaaagaaatatttact

SEQ ID NO: 520874 - DNA, 201 bp, Homo sapiens
ggataggggcgtagtggatggggaggtagagacaggcaatggagaaagagatttttttcttcttaatcctttagcaagaactttgggattgtgacttaacmcttactatgctttgattttctgagcttgtctgccagcttttagaacagacaacattcactttagtccaggttaaaagataatttaggttgataattacta

SEQ ID NO: 520875 - DNA, 201 bp, Homo sapiens
tttactcttaaataacaaacagtgaagtttcttattaatttcagtagttgaaattattttttcttttgattattatcagcattttatgaaaactatatcawtatttttgttcttttttcttttagagtgaattggatgacttagaatatatatatgacctcttctcagttattatacacaaaggtggctgctacggaggcc

SEQ ID NO: 520876 - DNA, 201 bp, Homo sapiens
ttgttcctctgatgcttaacagacatttgtgaaaattttattttacttggaaaaaatgagggttgttctctaagagtaatcttttaccatgttatgttgayggtgttggcaaatatcagctgtactaatggttgtcttggtatgattgcaggttggtggagtccacattcaaactggtattgactgcgaacctctactttt

SEQ ID NO: 520877 - DNA, 201 bp, Homo sapiens
tattcttccgtttaaaaagtacggaaaggaaggtttctcagctgtgaggcattttcactgagcagattgagaaagccccagagcctgaaccatgccgtgcygccagtgcaaagcaggggaaggcagctggcctggcacagggctggtggcagggcaaaatggggccctctggcaggtggctgagatctgtctgtgcaattg

SEQ ID NO: 520878 - DNA, 201 bp, Homo sapiens
catcaacttgctttctgagaaaagtgctcttcatatatattaagcagaattgtttagatggttgttgtgccctttgtgtaggccagaattcttcactcagraatggaggagattagccgtctttggctttgactaatttaacaagtgatgccttcttttcaagttttcggtgttgggtgggggtgagagtattcatttgct

SEQ ID NO: 520879 - DNA, 201 bp, Homo sapiens
gtctcaacatattgtttgaatgtttccttctcacattaaaaaattacaagccagaaatatatatttttagacacttgctgtatacaggattttatgaatgkctgtgatttggggctggggagaagattggaaaaacggggagaagtacaagagctgatttttacaatttctaccctaagagtctttatgtagtctagttga

SEQ ID NO: 520880 - DNA, 201 bp, Homo sapiens
acaatagtataatttcattttcccattcccatttttcctactattgccttcttatattttaccattacatgtaatgtaaattacactatatgttactactwctgcttaaacactttagtgacttttaaagaaattaaggaaagaatagtgtttcgtatttatcttttctggagtttactgctcattatttatccaggtttg

SEQ ID NO: 520881 - DNA, 201 bp, Homo sapiens
gggaaattcagacagtcataaagagaagagagaagggagaactttccccaaatgctatcaatctcgccttttataggattcagagtttaatgtctatgaarttaacttgattaatcatatctggccaaagacacacagttaatccttacaggaagaaagtcatggttcaaacctgggagttggtggatgaaactttgaact

SEQ ID NO: 520882 - DNA, 201 bp, Homo sapiens
tttgtcactgggctccagaagaccacaactccaggttttccttatatcccactggcctacccttctcagtttgctgtctcctcctcttctctatctttgarcattctgctgcccagttcttagattggacctcggcccagaacatccagctgccacttggttgtctaacaatcatccaaacctagaacatattcacagtaa

SEQ ID NO: 520883 - DNA, 201 bp, Homo sapiens
cccagggctcaagtgatccttccatctcagcctccgaagtagctgggatcgcaggtatatgctactatgcccagctattttttttttttttttttttttgkattttcggtagaggcagtgtctcaccatgttgcccaggctggtcttgaactactgaactcaagtgatctgcccatctcggcctcccaaagtgctggtatt

SEQ ID NO: 520884 - DNA, 201 bp, Homo sapiens
aataaaataattatgatggaatcaacttacgtgtttgctgttctaggcatatttaattaggtataatcctgttggtctctttgaatttgttaagtatgcarttatttctcatcagattttcttgagtgactgtgtttctctcataaggaggagaataatctaattcctgttgatcagctgggccagaaacttttgaaaaag

SEQ ID NO: 520885 - DNA, 201 bp, Homo sapiens
tcagtctgtcaccgctacatctcacccccttttagaacttgtttatacttcaaaacatgtagataagacattaatcatctttgtttttgtacttacgtatytcttccaaaattcttgtttaatatcagtaatttacacatttaaatggaaaattcctttttaatgttgggaatttacgaaaccttgagctacttttgatat

SEQ ID NO: 520886 - DNA, 201 bp, Homo sapiens
cctccaccttttgtgacctttttcaatattgccgtgtctctcttcagtcttaggaagtgctcccagcctctgtgccagcccaggttccacctcagggagtrtgcccctacattccttgatgcctgctacagtttttgctcagccagtttgaagatttgaggtatttttctagctggcaatatttatcctcagttttttgat

SEQ ID NO: 520887 - DNA, 201 bp, Homo sapiens
attctatgcattggatttgttgcattctaagtttatgtttggctgtactgctaaataaatgcagattttcttgtcctaagcagtcttttctcagccacatwatagttgaattactcagtttttttagatgcatttttagagcttgtttgaaaatctaccatgttgttatattgctggggttttttgttttttttttttcat

SEQ ID NO: 520888 - DNA, 201 bp, Homo sapiens
tttttccagcaaataaaatgagcattgatttagataatacacaatactgattttgtatcctggagattatagataaaactataataaaaccttaaaccctrtgcctgtagctttcacgggaagattgaattttatactgtttcacatgtatttccatccagtttttgccccttcatcaaacccaaagagagaggtttatca

SEQ ID NO: 520889 - DNA, 201 bp, Homo sapiens
cagcgaaagccagtctcttgagtgggatgccaagtggcctgtctctccgggcaagactgaaggggcagaggcagcctctgcatcatgtcacacaggtgtgygtgattgtgacgagtcgtgcagcggtgtgtgtgcactccggatgttattcttccgtttaaaaagtacggaaaggaaggtttctcagctgtgaggcatttt

SEQ ID NO: 520890 - DNA, 201 bp, Homo sapiens
tggagtgcagtggcgcaatctcggctcactgcgacctccgcctcccaggttcaagcaattctcctgcctcagcctccccagtagctgggactacaggcatrcaccaccacacccagctaattttttttgtatttttagtagagatagggtttcaccatattggccaggctggccatataatttttttttcttataacttct

SEQ ID NO: 520891 - DNA, 201 bp, Homo sapiens
ccctggtgagaggacctatgcccctgccctggacctggtgtggaacgcggcccagggtgggactgccggctccctgaggcagagagttgccgatttctatygtcttcccgtggagaagattgaaattgccaaatactttcccgaaaagttcgagtggcttccgatatctagctgggtaaagttgtggggctgtctcagaga

SEQ ID NO: 520892 - DNA, 201 bp, Homo sapiens
tgtcacaatggttgtaagctgtgtcaggttttgataggcacagtgccttttgcccttttgaagagcagctgtgtgcctcctcaggccccttccatgggctyttctgtccttgaccaacttccagggcactcctgctctcaaggaggcctctagtccctcctgtttctctccagcagcctctgtcccctccttggcaacttc

SEQ ID NO: 520893 - DNA, 201 bp, Homo sapiens
ttttctttggttgttggggggtttttggtttgtttttgtttttagctttctgtagttttctgctaattaacacaatagagcatctctcttttgttttctgwgtttgatgctgtaaccagcttccttttattttgataataggatgaaggttattaattcctagctctctaagaaaaataatattccttttatatatagctg

SEQ ID NO: 520894 - DNA, 201 bp, Homo sapiens
ggatttcttccccacattcccatttcacttttttgacctcagaagagttttccctgatgttcttgcaagctcatggtgtgtttaagatgtttttatttgtkttggttttactttatctagcatttttagtaattttgtagcaggatggttgtatctggcctgccatatttttccatcacttattgattatttatttttggc

SEQ ID NO: 520895 - DNA, 201 bp, Homo sapiens
agaagaaacaatatctgtgagagatgtaagtaattttaccttttgttttcagaggctgtgtgtgtttgtatgtttgctgtgaggaacagtggtatcctgtsttaagatttggaggtcctaaactaggcctgatatggtgtacttcagagaattatatgtactcactagaggaattattttgggagcttgaaaattggtgaa

SEQ ID NO: 520896 - DNA, 201 bp, Homo sapiens
cagacaacgagctcgaggctagactctcgagttgtgtttttttagttttcttctgaggaaaagaaaaataattgcatttcagcgcttcctgtcatttggtrcctatgctaggcgctttacgtttctcatctccaagtgaccctccgccacactcgatgtgaaaccttggggaagtcacctaggcccccagggctaacgatg

SEQ ID NO: 520897 - DNA, 201 bp, Homo sapiens
cagtatcatttcttcaatggggctctgcacccagtagtctctcaaacagaaagcgtgtgggatttgacctttgataaaagaaaaactttaggagatctccrgcagtcaatatttcaggtaatatcgccttacttcctcttaattcagacatcgagcaccatctccagctagactctccatttcattctgtttaggatacaa

SEQ ID NO: 520898 - DNA, 201 bp, Homo sapiens
ttcattctgtttaggatacaactttatttttcaaagctgcttaggaagatctgacatctgccacttcatagagggttgacccaaatcttctctcctaagtmttttagagaggcttttctccacagctcctaccagcagcttttcaggtagacaatcaggcctggtacattttatttgaggggaagaaagagtataaagttg

SEQ ID NO: 520899 - DNA, 201 bp, Homo sapiens
tcctgaaactttgaacttaaagagcaggtttgggtcatttcctttgcaaaaagcagccttgaggctttttgtttctttctttctcgtttctttcttttctytctttcctttctttccttttctttcttttcttaatagacagggtctggctctgtcgcccaggctggagtgcagtggcgtgatcatggctcaactacagcc

SEQ ID NO: 520900 - DNA, 201 bp, Homo sapiens
aaaccaaaaggtaattttaaattgcttttagagtttgactagtattccggagaataaagatctgatttaggccttaagcattcagtaatgaaaattaaaargaaaaaaaatagtcaacttgttaatgcaagtgtctgtttggctgctgaatttttatagtgagggtaactttaactctgaaattatcccttatgtgtgaga

SEQ ID NO: 520901 - DNA, 201 bp, Homo sapiens
ccaaaggaatgaccagcaaattttcaagatgcttcctccagaatccccaggtttaaacaatagcatctcctgtccccactggtttgatataaatgattctraagtccagccaatcagggaaaaggatattgaacagcaatttcagggtaaagaaagtgcctacatgttgttttatcggaaatcccagttgcagagaccccc

SEQ ID NO: 520902 - DNA, 201 bp, Homo sapiens
tttttttcttttaaccagaaaatgcacaacgtgtgcgtgaaccgcaggtatggaggcagcggcatgccgttgctccgctgtgggaggtgtgtggggtcagsccagccactttcctccgtgttcagatgactctcgttcgccctgaccggcttctcacagtgtctcaggccactgcgccaccgcgctggtgctgagcagaag

SEQ ID NO: 520903 - DNA, 201 bp, Homo sapiens
gttcctattctatacagaggactgtagtgtcaggaggggtgatagttgatctggctttgactttgaggcacatgacaacctagttgaaatagaggacaatytcaactagatatatatcaataaaaaaaaggggatgcattttaaaagaagagtgcatctataaagcagcgtaaataggtattgtacgaagatgggtttctc

SEQ ID NO: 520904 - DNA, 201 bp, Homo sapiens
gggcacggaagaaggctgctgttgtgtcccttgttgtactgttagagcgggctctgccctggtgaattctactcccatggaagttaattccaaagtttcaytttttaaacatgatgattaaaaagaagcttttgactcagatttagagagagggaactcacttctttctcaaggtgatttcagtgcagaggaatatgaaga

SEQ ID NO: 520905 - DNA, 201 bp, Homo sapiens
ttttagagtgaattggatgacttagaatatatatatgacctcttctcagttattatacacaaaggtggctgctacggaggccattaccatgtatatattawagatgttgatcatttgggaaactggcagtttcaagtacgtatagaaattcgtttagaaatatctttgcaatttcttttctattcctattattttgttgag

SEQ ID NO: 520906 - DNA, 201 bp, Homo sapiens
ccttcctgggtgcgcccctgaggcgtcctccctgtggacagcatttacggaaataacatgcgtgtggaaaacaacctgcgagtcctgggaaagggaggagkcttgcccagtcacgggaatgcagggagcagcctgtgtttgtgaaaccctgcagttaaggcttgcaggagatgccaaggaagtaaagccaagttcatgcct

SEQ ID NO: 520907 - DNA, 201 bp, Homo sapiens
tggtaattttagaggctccaacctaagtatatcagtaggggcttaaagtgatcccttcagaattagaacaagcagtttgggcctactgattgcagccaaarattttgaaatacttcagaatcaaaagctgattcatcggcagagcagacactggtggaggattgcgcgggcacggaagaaggctgctgttgtgtcccttgt

SEQ ID NO: 520908 - DNA, 201 bp, Homo sapiens
caggccttttttataaaggcactactcccattcatgagggctcatcttttgtgacctaattatctcctgaagaccccacctcttaatactattgcattggyggttaggtttcaacgtatgaattttgggggaacctaactactctggccatagcagttgcacatctggaggcctcatctttggatttcttccccacattcc

SEQ ID NO: 520909 - DNA, 201 bp, Homo sapiens
ttattagaggtatagtatgtgtgtgtatgtatttgtatgtatggtatgtattgtgtgtatgtgtgcatgtgtgtatatatgtaagaatgtatgcggtttarttgctaggtgtgatattattaccattcatagtctttccttaaggacattctctgtatctatattttaatgatgtttgtggggattttctggttatgaatg

SEQ ID NO: 520910 - DNA, 201 bp, Homo sapiens
tgccagtaggtgctgggctctctcacacagcacccggccccagctgcctttttttttcttttaaccagaaaatgcacaacgtgtgcgtgaaccgcaggtayggaggcagcggcatgccgttgctccgctgtgggaggtgtgtggggtcaggccagccactttcctccgtgttcagatgactctcgttcgccctgaccggct

SEQ ID NO: 520911 - DNA, 201 bp, Homo sapiens
ttctgggaacgagcctgcgcaagtttctctcctctacttgggagacatagagatctcagaagatgccacgctggcggagctgaagtctcaggtcagacttmttcctgcaccataacttagtggtaatgtggcttcttccagtgagatattaatatattcttctatctccttttccctcaattacagtctgttctgatatgg

SEQ ID NO: 520912 - DNA, 201 bp, Homo sapiens
aacttagtggtaatgtggcttcttccagtgagatattaatatattcttctatctccttttccctcaattacagtctgttctgatatggcatttgtcatatrccatgttcagtggtaagtacccgcaggcaatacacgcccatggtgcagacggctcctcgtggcctcactggtccctcctctgacaggcatgctgtgcttt

SEQ ID NO: 520913 - DNA, 201 bp, Homo sapiens
cttctgggaacgagcctgcgcaagtttctctcctctacttgggagacatagagatctcagaagatgccacgctggcggagctgaagtctcaggtcagactycttcctgcaccataacttagtggtaatgtggcttcttccagtgagatattaatatattcttctatctccttttccctcaattacagtctgttctgatatg

SEQ ID NO: 520914 - DNA, 201 bp, Homo sapiens
tgctgtgaaaattttttttgttttttgtctaaataagatcttgcagaaaaccctctaggactggacctgcagtggtaggagaaggtctctgtggtaccttygcgaagtgtaggattgtttaggaacagagcttgaaaacttccacaagttttctatcccatcatagccagtgatattagataaattacatccttgagggtc

SEQ ID NO: 520915 - DNA, 201 bp, Homo sapiens
ttggattcagctgatcctcctcctgaaactttgaacttaaagagcaggtttgggtcatttcctttgcaaaaagcagccttgaggctttttgtttctttctytctcgtttctttcttttctttctttcctttctttccttttctttcttttcttaatagacagggtctggctctgtcgcccaggctggagtgcagtggcgtg

SEQ ID NO: 520916 - DNA, 201 bp, Homo sapiens
gctcttcacacaaaactttttttttttttttttttttttttgagatgaggtctcactgtcaccagcctggagtgcaatggcatgatcatagctcactgcakccctgggttcaaggcatcctgctgcctcggcctcccaggtagctgagattttaggcatgagctattgctcttggttgaaacttatttttgaaattgtctt

SEQ ID NO: 520917 - DNA, 201 bp, Homo sapiens
tagacgtctgtgcgtttccgtgaagcactgcgccctaaggacccaactctgactagcagctgcctcccactcccaaacactaaccccgctcaggagactcrcactgggtgtagactgcgtctttgcagagggagatgatagaggcttctgatgacgccagagctgtaagtgtcgtgacgagctgggcgcccagcccttctt

SEQ ID NO: 520918 - DNA, 201 bp, Homo sapiens
ggtatatagtactgaagggtgtgacaagcagagattttagagagttgattctcagaatttagggttggctttgccgtcccagcagtggattagttgtggcracaggttttcttttttaaaaaaattagtgatgtgaacgtgcctttttaaaaacagctgttacttattgtgggccaaaccctgtacactaactgcccttct

SEQ ID NO: 520919 - DNA, 201 bp, Homo sapiens
gatatttctactcagttcagatgaaagtacagttcgtctcttgaagaatagttctctccaggctgagtctgatttccaaaggaatgaccagcaaattttcmagatgcttcctccagaatccccaggtttaaacaatagcatctcctgtccccactggtttgatataaatgattctaaagtccagccaatcagggaaaagga

SEQ ID NO: 520920 - DNA, 201 bp, Homo sapiens
cagaaatgttggattcagctgatcctcctcctgaaactttgaacttaaagagcaggtttgggtcatttcctttgcaaaaagcagccttgaggctttttgtytctttctttctcgtttctttcttttctttctttcctttctttccttttctttcttttcttaatagacagggtctggctctgtcgcccaggctggagtgca

SEQ ID NO: 520921 - DNA, 201 bp, Homo sapiens
atcaacattaaagataaaactgggttgtaaattattaattgtaagcacaaatgagtggctccacctttagacccataaaatagatgagttgacatcgagtkatgttgaatccatggtaatgagtttatgtaatatttctcttagaactgtgtcataggttgttttttcagaccttaagaaacattatgtatccttttatat

SEQ ID NO: 520922 - DNA, 201 bp, Homo sapiens
tctcactcagaaatgttggattcagctgatcctcctcctgaaactttgaacttaaagagcaggtttgggtcatttcctttgcaaaaagcagccttgaggcyttttgtttctttctttctcgtttctttcttttctttctttcctttctttccttttctttcttttcttaatagacagggtctggctctgtcgcccaggctg

SEQ ID NO: 520923 - DNA, 201 bp, Homo sapiens
gtggagacaccaaggatgaaggtgaaaggccagaaattgggcaggaaataggcaccactcatcaaatagtatttcaggatatcaacattaaagataaaacygggttgtaaattattaattgtaagcacaaatgagtggctccacctttagacccataaaatagatgagttgacatcgagttatgttgaatccatggtaatg

SEQ ID NO: 520924 - DNA, 201 bp, Homo sapiens
gagccagctccccacctccacacctgagaatgcagccagcgacctgggcaacccccagcacgaaccccgcagaccctgcgctgtgtctttcctgacacgcrcttcccttcctgggtgcgcccctgaggcgtcctccctgtggacagcatttacggaaataacatgcgtgtggaaaacaacctgcgagtcctgggaaaggga

SEQ ID NO: 520925 - DNA, 201 bp, Homo sapiens
tgaagagtttaactgtgatgtctagccagagccagctccccacctccacacctgagaatgcagccagcgacctgggcaacccccagcacgaaccccgcagrccctgcgctgtgtctttcctgacacgcacttcccttcctgggtgcgcccctgaggcgtcctccctgtggacagcatttacggaaataacatgcgtgtgga

SEQ ID NO: 520926 - DNA, 201 bp, Homo sapiens
tctcttggattttcataggaagaccttcttatcctagcttaacgtaattcttttttttgagatggagtctcactctgttgcccaggctggagtgcagtggygcaatctcggctcactgcgacctccgcctcccaggttcaagcaattctcctgcctcagcctccccagtagctgggactacaggcatgcaccaccacaccc

SEQ ID NO: 520927 - DNA, 201 bp, Homo sapiens
aaacacaaaataagtttcaagttccttgtaaacatcccgctctgtcctttggaaggtgcttctgggaacgagcctgcgcaagtttctctcctctacttggkagacatagagatctcagaagatgccacgctggcggagctgaagtctcaggtcagacttcttcctgcaccataacttagtggtaatgtggcttcttccagt

SEQ ID NO: 520928 - DNA, 201 bp, Homo sapiens
gatccgcccgcctaggccttccaaagtgctgggattacaggtgtgagccactgcacctggccagatgatacagtattcttaagaggataattcttccccawttgatgtgtagatttaatatattcttacacagaatcttaacattttttaaagaaattgacaagctgactctacaattttcatggaaatacaaataattta

SEQ ID NO: 520929 - DNA, 201 bp, Homo sapiens
accacaagcagtaaccattcacttcatttctttcaagtctggtggtttgtcactgcatgtacacttcattacacagacagcaaagcatgtagttgtgttgyagtgctaaacccaccatgacattttacaagaatacataatcaaaagagggaattgaccaacagagaagaaagtacacaaagaaacaaaagtatatggagt

SEQ ID NO: 520930 - DNA, 201 bp, Homo sapiens
acatgtccctgcctgcttacctgccagacagggcctcctcataagacttggatgcagaggctcttgagtggaattttaataacctatttacaatatcaaarcatggcaatgtatttcagaaacacaaaataagtttcaagttccttgtaaacatcccgctctgtcctttggaaggtgcttctgggaacgagcctgcgcaag

SEQ ID NO: 520931 - DNA, 201 bp, Homo sapiens
gtatcctcaaacatagcacatgctggccgatttaataagcataaaatcacccaacatattttaaatataggcagtctgcttgtactgctctgacatgcacraatttcattactaccatttagttatataacatcaatcccccagcaagatggttaaaatttcagcaaccatggtatatggtatattaactgtaactgaata

SEQ ID NO: 520932 - DNA, 201 bp, Homo sapiens
tttttaaacaaacttggaaaggccttcttattgtcaagatttccttataaataaacatttattgggcatttactatgtggcacccattgtaccaggaactkgggagacaagatagatggcctgcctcctcttgaaaattctgttgttttgaggaggcagattaaacgcctgcacacagacagacagacacacacacacaca

SEQ ID NO: 520933 - DNA, 201 bp, Homo sapiens
ccgctgcacgtcagcccgcaggccaagggtccagcttatcctgggtgctctgtgatcagaaggtccttggatcccgaggactgcagctgctgccgtccacrgcgcctcagcctctcttcctgtgtggaagcggggcaggcagggctgtggcagacaggcctggcatagcccaggttccaggtgtcctgggcagcctgaccg

SEQ ID NO: 520934 - DNA, 201 bp, Homo sapiens
ttgtttgtttgtttggatctggcgcttgacggttttctggtacagcccccaggacgtgctgctgaggacacaggtgcgcatccctggtgagaggacctatrcccctgccctggacctggtgtggaacgcggcccagggtgggactgccggctccctgaggcagagagttgccgatttctatcgtcttcccgtggagaagat

SEQ ID NO: 520935 - DNA, 201 bp, Homo sapiens
gttgttttgtagatctttttcttcctttctggttgtttacttctgtggtttgatggttgtctatggtgctaagctttgtttctttttcttatttgtgtatwttctgtcatgtctttctttgtggttactgttgcactaagatagagagtcttgtacttataatagactattttaagctgtatccaactcacctttggtcat

SEQ ID NO: 520936 - DNA, 201 bp, Homo sapiens
caggatggtcttgatctgctgacctcgtgatccgcccgcctaggccttccaaagtgctgggattacaggtgtgagccactgcacctggccagatgatacartattcttaagaggataattcttccccatttgatgtgtagatttaatatattcttacacagaatcttaacattttttaaagaaattgacaagctgactcta

SEQ ID NO: 520937 - DNA, 201 bp, Homo sapiens
ggaggagaataatctaattcctgttgatcagctgggccagaaacttttgaaaaagataggaatatcttggaacaagaagtacagaaaacagcatggaccaytgcggaaggtaatacatggcatcgttttgggaagtcctagtcccaagaaatttcattatgatcgcaacaacatgaattcctttgcagaaggatatttaaa

SEQ ID NO: 520938 - DNA, 201 bp, Homo sapiens
acagtacctcctgctgcatctgctgggcacttcccggtacccagccttctactcctcaaaaacatggacgcgtgcctaccaggatatccccaaaattacamggcagcttcattcaccatggccagattctggccgtattgaaggaaaggctgctcagcagtgggatggcgggtgggccgcggaggctttctgtcggggact

SEQ ID NO: 520939 - DNA, 201 bp, Homo sapiens
gccaagttcatgcctctcagaagctggggctggctatagaaatacagaggcgagaacagactgacggtgtctataaagtaaacagctgtgcttctggcgcrgcgatgagagatccgtgtgctgatgtggatgatctctgtcttcatgttgcctggtagccctttaaagtccccctgtttggccactcgcagtggaagcttc

SEQ ID NO: 520940 - DNA, 201 bp, Homo sapiens
gttacagcgcttgtttgctcagcttctgctcttagaccaggaagctgcatccacagcagacctcactgacagctttgggtggaccagtaatgaggtacgakgatcagctctttaaggaagagttaccagcaatagaggaaagaataaggctggtttaatgttatctaacttcctttaattttgtcttagggtctcaacata

SEQ ID NO: 520941 - DNA, 201 bp, Homo sapiens
ctatagactttattttcttaatgtttaatgtaattggaatcataaaacatatagtcttttgtgtctggcttctttcacatagcatatcatttttgaggttmgtccatgatttagtacgtatcaatagcttgttcctttgcattgctgactagtctagtattccattatatggatagtatcacattttgtttatcctggaca

SEQ ID NO: 520942 - DNA, 201 bp, Homo sapiens
actcagtttaagtgtttaattcagtaatcatcagtaaatgtgtagagttctataaccatcaccacaatccagttttagaatacttccattactccaaaaakatccctgtacccatctgtattccaagcccctggcaaccactaatctgctttctgtctctatagactttattttcttaatgtttaatgtaattggaatcat

SEQ ID NO: 520943 - DNA, 201 bp, Homo sapiens
ctggatattttgtttcaggagacccataagacaactcattgtttccttataatccgttctgtgactcttgagaacccagttgcccaaatagagcagttacstggcgaattacccccatgaatcctgtggtcacatttaaagctgcatctctttgtcatctatgtctgtgacagtacattgctgtagtcaatgtgtcataca

SEQ ID NO: 520944 - DNA, 201 bp, Homo sapiens
gtgatgccactgacttcatcagacttctccaagcatcctctctgtcaaagccttagttgtcaccagggctgttatttggagacatccaatagttccccaggccctgggagctccattgtcatctgtgctgtttgagatagcacattttaaaaattcatggtgctgtcactgaaaacctcatcttaagcctcacacgtgctg

SEQ ID NO: 520945 - DNA, 201 bp, Homo sapiens
caggtggaggtggcagggcaggtgagcgtgacctcgtgaccatggcagaagtgggggttcgagcgtggttagaggctgctggagggtgtgaagggggacgygttgacatgatcactggctgctttgtggtgagtggattctaggaggtagaagtagaatcagggagccgagcgaggagactccctgagtgaagatggaggt

SEQ ID NO: 520946 - DNA, 201 bp, Homo sapiens
atcctctccagtgcagagacgcctgcccggccccgagccccggaaacttctctctccatccacgtggggagcttcagataaccgcgccgctgcacggctcyactcccgatgaactctccggctgatgccacaaacgtgggtttcctgggcatggggactggctgcctggcgcctccaatcccaaatcctctgcttcctttg

SEQ ID NO: 520947 - DNA, 201 bp, Homo sapiens
tgaaggtgaaaggccagaaattgggcaggaaataggcaccactcatcaaatagtatttcaggatatcaacattaaagataaaactgggttgtaaattattwattgtaagcacaaatgagtggctccacctttagacccataaaatagatgagttgacatcgagttatgttgaatccatggtaatgagtttatgtaatattt

SEQ ID NO: 520948 - DNA, 201 bp, Homo sapiens
cctctgaaattgtttttcaatattatattcatgtctatttcaggaagacttcttagatctaacagtagcagtcaaaaatgtatccggtttggaagatgctytctggaacatgtatgtagaagaggaagtttttgattgtgacaacttgtaccactgtggaacttgtgacaggctggttaaagcagcaaaggtaaagacaga

SEQ ID NO: 520949 - DNA, 201 bp, Homo sapiens
agaaggataatttagtgttatgaacttcacaacatctaatcaggagatctacatctttatttgtaatgttttagaaaacatatatctgattattcccaatwtatatgtgagttgatgatgtgtttgtaaacctctgaaattgtttttcaatattatattcatgtctatttcaggaagacttcttagatctaacagtagcag

SEQ ID NO: 520950 - DNA, 201 bp, Homo sapiens
accccatgatggccctgaagtgtcagcaagaggcccacccgcagctgttgtcagtgtgttcggacagtctgccatccaacggattcatcattgctcccgtygctctgcccccttattctactttcttcatcctagtatcacctgacatatctgtacttactgatttatttgttagtatctgtctcccactactagaatata

SEQ ID NO: 520951 - DNA, 201 bp, Homo sapiens
caacactgaaagaacttctgatatgttctggagatactttgcttttaattgaaggacaacttcctcctctggtaagattttacttctgaatagacaactcktaagtaataattgttatctgattacagagatgatacagcctcatttagggaaaatggggaaattcagacagtcataaagagaagggagaactttccccaa

SEQ ID NO: 520952 - DNA, 201 bp, Homo sapiens
cagccacgggggctggtgcagctctggatgtcgcccacccagctgccagtaggtgctgggctctctcacacagcacccggccccagctgcctttttttttyttttaaccagaaaatgcacaacgtgtgcgtgaaccgcaggtatggaggcagcggcatgccgttgctccgctgtgggaggtgtgtggggtcaggccagcca

SEQ ID NO: 520953 - DNA, 201 bp, Homo sapiens
cagctctgttctttttgctcacaattgctttgactatttgggtttttttgtggttccttatgaattttttcatccttgggatgaataccacttgataattrtgaatggtctttttaacgtgcttgttaaattcagtttgctaataccttgttgacagtttttcatctatgttcatcagggatattggcctatagttttctt

SEQ ID NO: 520954 - DNA, 201 bp, Homo sapiens
tcattgtggttttgatttacatttcctttatgatttgtgatgttgagcattttttgtgtgcgtacctgttggccatttgtatgtcttttgagaaatgtttrctaaagtcttttgccaatttttatatcaggtactttttttttgctgttgaattgtttaagttccttatataatatattccggatattaactctttgttag

SEQ ID NO: 520955 - DNA, 201 bp, Homo sapiens
ttttctataatggccgtactaatttacagtctcaccgacagtgcataaatgttcccttttcaccacattcttgtaaatacatgttttctcttgtttttttratagtagccattctaactggagtgagatggtacttcattgtggttttgatttacatttcctttatgatttgtgatgttgagcattttttgtgtgcgtacc

SEQ ID NO: 520956 - DNA, 201 bp, Homo sapiens
ggagtgtattttggggtcttcgtgaacccctcaccctgacacccactgcatccatgagtcaatgacagtgtctgtgtctctgcagccaagaagccctccaygagcagagcagctacatcctctccagtgcagagacgcctgcccggccccgagccccggaaacttctctctccatccacgtggggagcttcagataaccgc

SEQ ID NO: 520957 - DNA, 201 bp, Homo sapiens
cacatttaaatgtgatgccactgacttcatcagacttctccaagcatcctctctgtcaaagccttagttgtcaccagggctgttatttggagacatccaayagttccccaggccctgggagctccattgtcatctgtgctgtttgagatagcacattttaaaaattcatggtgctgtcactgaaaacctcatcttaagcct

SEQ ID NO: 520958 - DNA, 201 bp, Homo sapiens
caaactggtattgactgcgaacctctacttttaaatgttcttcatctagacacaagcagtgatggagaaaagtgttgtcaggtgatagaatctccacatgyctttccagctaatgcagaagtgggcactgtcctcacagccttagcaatcccagcaggtgtcatcttcatcaacagtgctggatgtccaggtggggagggt

SEQ ID NO: 520959 - DNA, 201 bp, Homo sapiens
ggtgatctctttctaggggatgaactgacactgtgtgaaactgaaattgctgatggggaagacatctttgtgtggaatggggtggaggtaaaaaaaattaytgaagaaatattcgtgataattttggatgttttaaaagtcatcgtaatggccgggcatggtggctcatgcctgtaatcccagcactttgggagggcgagg

SEQ ID NO: 520960 - DNA, 201 bp, Homo sapiens
gttctcagacttcattaacatggaggcccatagctttattatctggaaaggaagttaaggtgctctgggtgcaagacattcttctagaagttacacgcaaygtctcacctaactttgaattttttttatcccaattttgactcctttataggagatgcctggcatttacgaaaaatggattggtgctatgaagctggagag

SEQ ID NO: 520961 - DNA, 201 bp, Homo sapiens
cccttgctgccttccagttcttatctatagcttttcctccatggcctgtgctgacctctgcacgtccctgttcctcctgccttgctgagtgttgttctttstgctcctcctgctaaggtttcccatctcccacagctgcagccttgtgtctcacccgccctgtgtctctcttcccaattccaaccctcaggttcttctccc

SEQ ID NO: 520962 - DNA, 201 bp, Homo sapiens
tgtgtgttttggtgttttaagtgtatatgcctactaactattctcttagaaggaagccactgacaagaggctagaaaacttaattcacagcaaactaatcrcttgtaaataagaagtttctttttaagaaaataccttatggtattgtagagaatgactagataggaatgacttttatggtgatattattttggtgacctt

SEQ ID NO: 520963 - DNA, 201 bp, Homo sapiens
ttccgatatctagctgggtaaagttgtggggctgtctcagagaaattggggcttaccggcatagcaatgaggttatgcaatttttcacagtgatagagaakttagtgagaacttgaggttgagttttgcttatttaagatgtttgattttcccatagaaccaacaaataaccaagaggaaaaagaaaaaaaaacaagatta

SEQ ID NO: 520964 - DNA, 201 bp, Homo sapiens
tctctcagtcattgaagagtttaactgtgatgtctagccagagccagctccccacctccacacctgagaatgcagccagcgacctgggcaacccccagcaygaaccccgcagaccctgcgctgtgtctttcctgacacgcacttcccttcctgggtgcgcccctgaggcgtcctccctgtggacagcatttacggaaataa

SEQ ID NO: 520965 - DNA, 201 bp, Homo sapiens
ctctctgctttctgtggcatggccatgtgtgtggtttcccacaagaataaatgcacattctgggtgtcaaaggaattgagttacatgtacacactgaaccmagcctgttcatattttcattttttagtataaataaaaataggtggtaatctcttaaccagctcagcttgttttgctgagtcattcttatatctgatcttc

SEQ ID NO: 520966 - DNA, 201 bp, Homo sapiens
cctctctgccacatcgtacctgctcaggccgccacctctttccttttctcccgcactgaggaagttccctaccacgtctgggggggctctgctgtgtaccragaatgggatcttcacttccgctcttcattccaagattaaaggaaattgaaatgcggaataagagtttgccactagcatccagcatttagggaaaaatct

SEQ ID NO: 520967 - DNA, 201 bp, Homo sapiens
agccatttttctttgttatacaaatcacttaaatgaaattatagttcctttaatatttatgtaaaaaaggaatcgtaaaatgtgtaaaatataaatatttsatcttaaggtaaagaaaacctttctaagcataaaagcaaagaaagaaaaaactagggcaaagtgatataacccttaaaacagaattaaaaggcaaatgac

SEQ ID NO: 520968 - DNA, 201 bp, Homo sapiens
tttttaaattcagattaaattgcatttacacatctgtcttgttattagttgttcctgttttttgcaatggggagtgacgttcaacctgggacagaaatggraatcgtagtagaagaaacaatatctgtgagagatgtaagtaattttaccttttgttttcagaggctgtgtgtgtttgtatgtttgctgtgaggaacagtg

SEQ ID NO: 520969 - DNA, 201 bp, Homo sapiens
taacctagcctacaagaacctgaataatttgacccctgcttaactgtaaccttgtgatctgcttttctgcgtactcacaactcacttcccatgctgacttytctgcgtttctcagtgcacaagctctctttaacccccaagacttcttagtgctcagtctctctttcaagtctcttccctttgcttttaacttcagctgtt

SEQ ID NO: 520970 - DNA, 201 bp, Homo sapiens
tgtttaaacaagaagcatgtgcaacagagatcacatgtggcccgtgaagcctaaaatatttacagtggaactcagagaatctagaaataggtgcgtagtcrttgactttcaacaaaggtgccaaggtattttcatgcagagagatagcattttttcaacaaatagtgctgggccatttagatatttgtatgtgcagaaatg

SEQ ID NO: 520971 - DNA, 201 bp, Homo sapiens
aggcagcctctgcatcatgtcacacaggtgtgcgtgattgtgacgagtcgtgcagcggtgtgtgtgcactccggatgttattcttccgtttaaaaagtacrgaaaggaaggtttctcagctgtgaggcattttcactgagcagattgagaaagccccagagcctgaaccatgccgtgctgccagtgcaaagcaggggaagg

SEQ ID NO: 520972 - DNA, 201 bp, Homo sapiens
caaaccatgaaagaatcagtaaatttcattacattagaagtgagaacttttgttcgtcaaaggaaatcataaaaaacagtgaaaagggaagtcacaaacaggggagcgacatacgcagtaacacagcagagggttattctccagcatagacagcagatcttctgcaaatctgttatcaaaaaataacccaatagagaagtg

SEQ ID NO: 520973 - DNA, 201 bp, Homo sapiens
gcaaaccatgaaagaatcagtaaatttcattacattagaagtgagaacttttgttcgtcaaaggaaatcataaaaaacagtgaaaagggaagtcacaaacaggggagcgacatacgcagtaacacagcagagggttattctccagcatagacagcagatcttctgcaaatctgttatcaaaaaataacccaatagagaagt

SEQ ID NO: 520974 - DNA, 201 bp, Homo sapiens
atattaactgtaactgaataaagtacacacttgactgccagctcttcagggcacaattcatcacataaataacacatgtgcaccacaagcagtaaccattsacttcatttctttcaagtctggtggtttgtcactgcatgtacacttcattacacagacagcaaagcatgtagttgtgttgtagtgctaaacccaccatga

SEQ ID NO: 520975 - DNA, 201 bp, Homo sapiens
tgtgaaaaccactcattttcaatctttagaagacataagaaaatctttgacttcaagttaaggatttcttttttttattttttgagatggggtctcactcygtcacccaggttggagtgcagcagcatgatttccactcactgtaacctctgcctcacgggctcaagcgatcctcccacgttagcctcccaagtagctggg

SEQ ID NO: 520976 - DNA, 201 bp, Homo sapiens
actgtgcacccagtggagtaaataaaacttaaaatgttaagtcaaccaagtgttagcaaggatgtggagcaactggaactcccatatattgctgatgggarggtaaaatgggtaagccactttggaaaagttagcttatttcttataaatttaaacatccacttaccaattctacgtctaggtatttactgaataagagtt

SEQ ID NO: 520977 - DNA, 201 bp, Homo sapiens
taaaaccgttggagaaatgtctgtttctttttctaggccatgaccttgcctcctttcctggagttcggtgtcccgtccccagcccacctcagagcctggayggtggagaggaagcgcccaggcaggcttttacgaactgaccggcagccactcaggtaggttccttgctggacgcaacactgtccctctctgctgctgacg

SEQ ID NO: 520978 - DNA, 201 bp, Homo sapiens
aaaaaaaaaaaaaaaaaaaggagaaaagaaaaagcagacagccttattctcatgagaacaaatgggaaaatactttttttttctcatattaagttgaaagrtataaaattgctgtttttaggtcaaaaaatggatgaatattggtaattttagaggctccaacctaagtatatcagtaggggcttaaagtgatcccttcag

SEQ ID NO: 520979 - DNA, 201 bp, Homo sapiens
accccaaagtctgatttttatgattttaaatttttgattgtaaaaacaagtataatttatgacagttaataaatctaaaaggaaaaatgataagttcaagracatcttaggtcatcaaggtgtttctttctatggaagtaaaagtagagtttcacttaatctttgtaatcacagcagttaaacatgctccattcttcaggg

SEQ ID NO: 520980 - DNA, 201 bp, Homo sapiens
aaattgctgatggggaagacatctttgtgtggaatggggtggaggtaaaaaaaattactgaagaaatattcgtgataattttggatgttttaaaagtcatygtaatggccgggcatggtggctcatgcctgtaatcccagcactttgggagggcgaggcaggcagatcacctgaggtcaggaattcaagaccagcctggcc

SEQ ID NO: 520981 - DNA, 201 bp, Homo sapiens
ttgggaaagaagggatagaatttataaaatgattctaaaattcacctggagaaataaagtaataaaaactgaagaagagatgactgagggagaatttgctrtatcagtaaaaacatatttataaagttatagcaatgaagacagtgtagtggtaatgcaaaaaggtagacagatcattgaaaaagagcagtaaacccagga

SEQ ID NO: 520982 - DNA, 201 bp, Homo sapiens
tctttttcacagaattgaattttagtgtgtatgtaattggaatatgtaaatgacagttttcttgttagcttaggaattgaacaaagatccaacaaaaaatytaggtgtacttttttgggaaagaagggatagaatttataaaatgattctaaaattcacctggagaaataaagtaataaaaactgaagaagagatgactga

SEQ ID NO: 520983 - DNA, 201 bp, Homo sapiens
aagaataagaataaagcagttactaatttgcatgtgaatcaaaggaaattaactttccagatctaaaacagttacataactatgctgttaatgaaaaaggmtttgtatttttctgggaggaaaaaaagatatggaaatggttctggtaaaaatattgtgtatcagaattcacagttatagaaatatatactatcagaaaaa

SEQ ID NO: 520984 - DNA, 201 bp, Homo sapiens
gcttgagcccaggagtttaagaccagtcctggcaacatagcaagaccccatctgtacaaaaaatttaaaaattagctggatgcggtggtgcgcacatgtartcccagctatttgggaagctggggtggaggattgcttaagcccaagagtctgaggctgcagtgagctatgatcatgcactgcactgcagactgggcaaca

SEQ ID NO: 520985 - DNA, 201 bp, Homo sapiens
tgggtcatttcctttgcaaaaagcagccttgaggctttttgtttctttctttctcgtttctttcttttctttctttcctttctttccttttctttcttttyttaatagacagggtctggctctgtcgcccaggctggagtgcagtggcgtgatcatggctcaactacagcctcaacctcctgggctcaagtgatcctccca

SEQ ID NO: 520986 - DNA, 201 bp, Homo sapiens
agaggagaaaatgtggggcctatatatgactagtggttgttgatgtttggcttttgtgcgccctcagtatatgaaatacccttcctcaagaaaaagcataygttggctgggtgtggtggctcatgcctataatcccagcactttaggagtctgaggcaggcggatcacttgaggtcaggagtttgggaccaacctggccaa

SEQ ID NO: 520987 - DNA, 201 bp, Homo sapiens
acaagatagatggcctgcctcctcttgaaaattctgttgttttgaggaggcagattaaacgcctgcacacagacagacagacacacacacacacacacacacacacacgaggaacaggttgggatgagtgttatgatgaggaaacaggaagctaacatacagaatgcagccagcatatcctacccaaaaagtcctctttga

SEQ ID NO: 520988 - DNA, 201 bp, Homo sapiens
gacaagatagatggcctgcctcctcttgaaaattctgttgttttgaggaggcagattaaacgcctgcacacagacagacagacacacacacacacacacacacacacacgaggaacaggttgggatgagtgttatgatgaggaaacaggaagctaacatacagaatgcagccagcatatcctacccaaaaagtcctctttg

SEQ ID NO: 520989 - DNA, 201 bp, Homo sapiens
agacaagatagatggcctgcctcctcttgaaaattctgttgttttgaggaggcagattaaacgcctgcacacagacagacagacacacacacacacacacmcacacacacgaggaacaggttgggatgagtgttatgatgaggaaacaggaagctaacatacagaatgcagccagcatatcctacccaaaaagtcctcttt

SEQ ID NO: 520990 - DNA, 201 bp, Homo sapiens
actgcaacctccacccccagggctcaagtgatccttccatctcagcctccgaagtagctgggatcgcaggtatatgctactatgcccagctattttttttytttttttttttttgtattttcggtagaggcagtgtctcaccatgttgcccaggctggtcttgaactactgaactcaagtgatctgcccatctcggcctcc

SEQ ID NO: 520991 - DNA, 201 bp, Homo sapiens
gagcgcttccgcccggagagagctggccgggttgaggcgccggctttcccgggtcttctccagctgccaccgctttactgcaaaactgacgggcgcaaaarcatgagtgactccgcgggagggcgcgctggtctccggcgttaccccaagctcccagtgtgggtggtggaggatcatcaggaggtgagcggacggcaacag

SEQ ID NO: 520992 - DNA, 201 bp, Homo sapiens
aaagcctccaataaaatatttgattagtgtgttttttcatactttgcacttgcgtactctaggcaaaactatgacatagttaagttccagttttcaaaacrttaaagttaaggttgcagaatggtagcatgtgagccacttctaactttcaggcaagtttagtgtagtgctaagactagaacatattccattcaaatttaa

SEQ ID NO: 520993 - DNA, 201 bp, Homo sapiens
ttaaaaatgagataagaatatgtacaatttttttttttctttttgagacggagtttcgctcttgttgcccaggctggagtgcaatggcacgatcttggctyactgtaacctctgcctcccgtgttcaagtgattctcctgccttagcaggagaagctgggattataggcatgtgccaccacgcccggctaattttgtattt

SEQ ID NO: 520994 - DNA, 201 bp, Homo sapiens
agaatgagaactgacatttatgggcgcttcctacgagtcggggcaacttatttacctcggtttgcccccaaatcccagaaccaaacaaaaggtggcatcgrgattcgaaaccggacagtctggctgcagagccatgtgttcttaacctgcagttaactctggcttccaagtatctcctggaatcgccaccacagccctgct

SEQ ID NO: 520995 - DNA, 201 bp, Homo sapiens
caaaagaccctttggagcccgcgccccctccccctacgtcctccaatccgaaaacgcaaccgggtgagggagcgcttccgcccggagagagctggccgggwtgaggcgccggctttcccgggtcttctccagctgccaccgctttactgcaaaactgacgggcgcaaaaacatgagtgactccgcgggagggcgcgctggt

SEQ ID NO: 520996 - DNA, 201 bp, Homo sapiens
aaagatgttccatcgctaagataataagcccctgtattcccaagcaacatctcactttcaggcaaacaatggtctagcaatcaagcattaaggcacacacygcatgtcaccttacacaggttaatctctttcagatttctttaaagggatagtaattgtgcctatttcatagagttgctgtgaaaattaaagaacataatt

SEQ ID NO: 520997 - DNA, 201 bp, Homo sapiens
cgctaagataataagcccctgtattcccaagcaacatctcactttcaggcaaacaatggtctagcaatcaagcattaaggcacacactgcatgtcaccttrcacaggttaatctctttcagatttctttaaagggatagtaattgtgcctatttcatagagttgctgtgaaaattaaagaacataatttatgtaaggtgac

SEQ ID NO: 520998 - DNA, 201 bp, Homo sapiens
agatttctttaaagggatagtaattgtgcctatttcatagagttgctgtgaaaattaaagaacataatttatgtaaggtgactaacatggggtaaaccttyactagctttcaattgatattaatccaaagttcagcacaccttaatttctgttttacattgaaatgaacacatgcagcttttcctcacagtatgattttat

SEQ ID NO: 520999 - DNA, 201 bp, Homo sapiens
aaacctttactagctttcaattgatattaatccaaagttcagcacaccttaatttctgttttacattgaaatgaacacatgcagcttttcctcacagtatrattttatcctatgtgtatttttcttctttctctttctgttggttctaggtcaagtctggatgattactgtccttctgaccaagttgacactattcaagaa

SEQ ID NO: 521000 - DNA, 201 bp, Homo sapiens
atcacctcccatcggcttcctcccactacatgtgggaattgtgggggttacaattcaagatgagatttggatggggacacagccacaccatatcattccayccttagcccctcccaaatctcctgttctcgaatttcaaaaccaatcctgccttcccaacagtccctcaaagtcttaacttatttcagcattaactcaaaa

SEQ ID NO: 521001 - DNA, 201 bp, Homo sapiens
tgagtaaacttgaccaaacaaaaattaactgttttttgcttttctgtttttgttttgctgatcaaaaaagcccttcagggtcttttgtgcatccaggaggycattgtagatatcaataatatagtgcctaagtgccactttattgccaagtctagattgatacttttttcagataaaccagctttttatgtaaagagtaag

SEQ ID NO: 521002 - DNA, 201 bp, Homo sapiens
acttaaagtatatgagagggtatgcatatgttatatgcaaatactacactattttatgtcagggacttgagcatccacagattttggtatccacaggaggwcccagaaccaatcccccacggataccaagggacaagtgtacattgaaaaacagcactctcttatccccattccctcagttctttgcttcagaaacaaata

SEQ ID NO: 521003 - DNA, 201 bp, Homo sapiens
ctacactattttatgtcagggacttgagcatccacagattttggtatccacaggaggtcccagaaccaatcccccacggataccaagggacaagtgtacaytgaaaaacagcactctcttatccccattccctcagttctttgcttcagaaacaaatactgtgatcagtttcttgtgtatctttccagcgatattctatat

SEQ ID NO: 521004 - DNA, 201 bp, Homo sapiens
aaccactctagggaccacactttgagacctgtggtcttaaaatgttgtggataaaattacacttgggaaaaaataaaaataaaagttttaatgttgtctcyatgtttcttttccagagaattaagtattgaaaattggattatgcctgcagtttatgctggccatttttcacatgtaatatggtttcatcccacatgggct

SEQ ID NO: 521005 - DNA, 201 bp, Homo sapiens
ttgtcaaataggtccgttcttatatttctgccataccatagtgaaatgtcaactgatttgcccattcttcttaaaaatcgttttttcctctgattcagggytacaagtacagatcattatttcctaagtgatggtctgtatgtacctgaagaccagctagagaaccaaaaacctttacaattggatgtaattatggtaaaa

SEQ ID NO: 521006 - DNA, 201 bp, Homo sapiens
ccttacccacatgtgttcctatagagttgcatgtagctaaaattatagtgtgctgcctaactttgtgctaataacgaaggacacacattatcattgcctcwcagtggatggcacctgaccccatttttccaaggattctattttccagtgaatttttgtcaccgagttaatttcccaagtctgatagcatgaatgcttatt

SEQ ID NO: 521007 - DNA, 201 bp, Homo sapiens
aaaaaaaaaaaaaaaaaaaagcgaaaacttagcttcttttaaggaaaacccaaacacaagtggaagggtattttcaatctcttgacgtgaaggagcagtayttgaaggctagattctccatcaggtaatttatttgactggctgttcatatcaccttgaaagaatggagagagaagttctttttgagtgaaagcctttggt

SEQ ID NO: 521008 - DNA, 201 bp, Homo sapiens
gtgagggagcgcttccgcccggagagagctggccgggttgaggcgccggctttcccgggtcttctccagctgccaccgctttactgcaaaactgacgggcscaaaaacatgagtgactccgcgggagggcgcgctggtctccggcgttaccccaagctcccagtgtgggtggtggaggatcatcaggaggtgagcggacgg

SEQ ID NO: 521009 - DNA, 201 bp, Homo sapiens
tcgcttgaacctgagaggcaaaggctgcagtgagccgagatggtaccactgcactccagcttgggtgacagagcgagactccatttcaaaaaaaaaaaaaactggatgcctttaacagcacccatgtcacctcttgaatgctttgctgcttggcagtttcttccaccagatatgctaaatcatctctcaacttcaaagttc

SEQ ID NO: 521010 - DNA, 201 bp, Homo sapiens
gccctgtttctctcttaaaactgaatgccttggccaggcacagtggttcacgcctataatcccagcactttgggaggccaaggctggcggatcatttgagkccaggagttcaagaccaacctggccaacatgttgaaaccccgtctctactaaaaatacaaaacttagctgggtgtggcagtgcacacctgtaatcctagc

SEQ ID NO: 521011 - DNA, 201 bp, Homo sapiens
agttaaactgccctattccgttgctgtggagaggaccccaaaacagctaactaggaagaatgagaactgacatttatgggcgcttcctacgagtcggggcracttatttacctcggtttgcccccaaatcccagaaccaaacaaaaggtggcatcgggattcgaaaccggacagtctggctgcagagccatgtgttcttaa

SEQ ID NO: 521012 - DNA, 201 bp, Homo sapiens
ttaccccaagctcccagtgtgggtggtggaggatcatcaggaggtgagcggacggcaacagggctctggggcagaatcagcggaagccctgacgctcagasggccaagcagagggcgcaaccttagcatcggaggccagagagttaaccagagttaaactgccctattccgttgctgtggagaggaccccaaaacagctaa

SEQ ID NO: 521013 - DNA, 201 bp, Homo sapiens
gcggacggcaacagggctctggggcagaatcagcggaagccctgacgctcagagggccaagcagagggcgcaaccttagcatcggaggccagagagttaamcagagttaaactgccctattccgttgctgtggagaggaccccaaaacagctaactaggaagaatgagaactgacatttatgggcgcttcctacgagtcgg

SEQ ID NO: 521014 - DNA, 201 bp, Homo sapiens
cgagtcggggcaacttatttacctcggtttgcccccaaatcccagaaccaaacaaaaggtggcatcgggattcgaaaccggacagtctggctgcagagccmtgtgttcttaacctgcagttaactctggcttccaagtatctcctggaatcgccaccacagccctgctgtttagatgggaggctttatgcttggaacgtgg

SEQ ID NO: 521015 - DNA, 201 bp, Homo sapiens
atttactgttggtgacagctaataggagaggaagataggtttctcaggacctggatatagtgtctatgaccttgagagaatgagaaagcctaggttagacrgtgctttcaaattaggtattaaacctagaattagagaagatgtaagaggagaaatggcctttatagaccacctagcccaaccccaccattctaagggtac

SEQ ID NO: 521016 - DNA, 201 bp, Homo sapiens
gttattccttttagagtgctattaggaaacctgggaacacaaggatttgtatagcctaaataccctttggtacaatggactttttaaaaagcatatattamactttattatttagtagcaattttttaaatatcattaggaaagacagatgttcatctttttttttttcttaagagcatgttcaggctgggcatggtggct

SEQ ID NO: 521017 - DNA, 201 bp, Homo sapiens
gatagtattcattattttgcatttattaattggggtaatgtatacatgggtgatggataaaaattaagtcatacagtacaggtatatacagtcagccctcygtatccgtgggttctgtattcctggatttaaccagccacagataggaaatattcagaaaaaataaaaaacaactagaaataacaatacaagagtaaaaaa

SEQ ID NO: 521018 - DNA, 201 bp, Homo sapiens
tttactgtattagtctgttttcacgctgctgataaagacatacccaagactgggcaatttacaaaagaaagagatttaatggacttagtgttccacatgaytggagaggcctcacaatcatggcagaaggtgaaaggcacatctcacatggcagcagacaagaagagagagcttgtgcagcgagacttgtgtttttaaaac

SEQ ID NO: 521019 - DNA, 201 bp, Homo sapiens
tttatcacactgactgatcattgccagttaaattgttgatgtgtatccaaagcctccaataaaatatttgattagtgtgttttttcatactttgcacttgygtactctaggcaaaactatgacatagttaagttccagttttcaaaacattaaagttaaggttgcagaatggtagcatgtgagccacttctaactttcagg

SEQ ID NO: 521020 - DNA, 201 bp, Homo sapiens
agtatgctttcaattatgtgcattatttagcattgtttttcagtctgcagttgagtgtgtgctcatggtttcagtgttaattcttattgtgtgcctgtgtmttttacaggttctaccctttatataccgggccataggctcaaagcatcttcctgccagtaatgtaagttttttacatttcgactcacatccagacctcct

SEQ ID NO: 521021 - DNA, 201 bp, Homo sapiens
tatttttcttctttctctttctgttggttctaggtcaagtctggatgattactgtccttctgaccaagttgacactattcaagaaaaggtcctcaatatgstacgtgccctctatggaaatctagacctccaagtgtatgcagcagagtctcctccatcttgaaacaaacaaaacattaggctcctgttgtatcttggttt

SEQ ID NO: 521022 - DNA, 201 bp, Homo sapiens
aggacaaagtaatgcttgagattatcatctgcaccatctacagtaaacaaattttatgtttttccactttacagcaacatagtatgctttcaattatgtgyattatttagcattgtttttcagtctgcagttgagtgtgtgctcatggtttcagtgttaattcttattgtgtgcctgtgtcttttacaggttctacccttt

SEQ ID NO: 521023 - DNA, 201 bp, Homo sapiens
tcagtaatttttacctacctacttgatttattttcctttaaaaggtgaaatgacatttaaagaaaaacaaacacccatcattcctcagtcccaacacagcmgttcttttcactcttgcttgtaactttcaggccttacccacatgtgttcctatagagttgcatgtagctaaaattatagtgtgctgcctaactttgtgct

SEQ ID NO: 521024 - DNA, 201 bp, Homo sapiens
aaattgaccctttgtaaagacaattttctgggtagaagaatttcctttttgttaaagtggttcgtttttgtttgtgttcctgtgaagtctgaaacaattawtaagaaaagaaatgagtgaaaaaaatacatacgttgaaacagaatactgttttcctggaaaagtcttccaggaaaaacttttttttctcaattttatgta

SEQ ID NO: 521025 - DNA, 201 bp, Homo sapiens
cctatttaaaaacttttccgtttgtaaaaaccacaagacaaagaaaaaagagagagctgtgactagcacattttaaatgtgttagctgtttgtcaacaggkatctgaatgctatggccaaagatacttttagtcataatttatttgtatatcattttgcagtctttgaagcatatattttcccatttgacctggtacttga

SEQ ID NO: 521026 - DNA, 201 bp, Homo sapiens
tgtttagggtccagaagcctagaaaatgtcattaattaaaaggaaaaagtaacaggacaagtgggcaagcaggcaggcctccatgcctccttttttctttstttttttactcccagcaaattcgtgaatatttgtggaggaggaattaaaacactagaagcattagccaatcagagcttccaaaaggtccacctaaactta

SEQ ID NO: 521027 - DNA, 201 bp, Homo sapiens
actggaaaaggacacagcaacacagagaagtgaccagacttgcctagaaccatcatgttcatgttcttctgaaaatcaggaatgccagactgctgccagcmctggggaaattctggaaattttgaagaaagggaaggcatttgttttagatattgacttggattttttttcagtcaagaatcccttcaaagaaatgttcac

SEQ ID NO: 521028 - DNA, 201 bp, Homo sapiens
ttacaaaaacagcctagccaatgtttaatccttttaatatttgcctttatagagaccattggattctcacgtctatttctgcatttagtccattgccatakgctgttttggttgaaatatatgatgaagattcaggctttcacaggcatgtaattggaaaaggaaagaatattttgatagcctttttagataattgtgaat

SEQ ID NO: 521029 - DNA, 201 bp, Homo sapiens
tgacactaacaaagcagtgatgtggaagaataattcacagtaatattaatcacatcagtaagtattgattaggcactttaacatcagttaatggccgggcrtggtggctcacctctgtaatctgagcactttgggaggccaaggtgggcagatcgcctgagctcaggagttcgagaccagcctgggtgacatggtgaaatc

SEQ ID NO: 521030 - DNA, 201 bp, Homo sapiens
atcctccggaatttgggcttcattggtgattaactccttaagccattgaagtatcttatagatttatacattcagtagtacattttactgtttcctgtcartataactgttgtctgctgaatttgccgcagtggctcacgcctgtaatcccagcactttgggaggccgaggtgggcagaagacgaggtcaagagatcgaga

SEQ ID NO: 521031 - DNA, 201 bp, Homo sapiens
gtctgacctcacgtgatcggcccccgccggcctcccaaagtgctgggattgcaggcgtgagctactgcgcacggcccatattgcgtaaaaaaaaaaaaaaatttaacacggtgccctgcatagataaacactaaaaggggtttccatgtttatggccgtgctgatttacagtagccaaattggtgtcttaatctagacttt

SEQ ID NO: 521032 - DNA, 201 bp, Homo sapiens
ccaaggattctattttccagtgaatttttgtcaccgagttaatttcccaagtctgatagcatgaatgcttatttgtgctgtgaaaagcagagcagcctgastcagctttccattttcataggataatatgtgccaaaaaaggtttattttcttggtaaaatcagaattgtagaattgtgctatttttaatttttaaaattt

SEQ ID NO: 521033 - DNA, 201 bp, Homo sapiens
atgcttatttgtgctgtgaaaagcagagcagcctgactcagctttccattttcataggataatatgtgccaaaaaaggtttattttcttggtaaaatcagrattgtagaattgtgctatttttaatttttaaaatttttggttagagcttatagacattacttttatgattattttgcgtgctaaataagttaaagggtat

SEQ ID NO: 521034 - DNA, 201 bp, Homo sapiens
tttcatatgtttgatggccgcacaaatgtcttcttttgagaagtgtctgttcatatcctctgcccactttttgatggggttgtttttttcttgtaaatgtytttaagttccttgtggattctggattttagagctttgtcagatgggtagattgtaaaaattttctcccattctgtaggttgccttttcactctgatgata

SEQ ID NO: 521035 - DNA, 201 bp, Homo sapiens
gggccatgtttcttttcttcccatatggattcataattctactggtactatttacggaaaagactctcctttccccactgttccgcagtcaacctttgtcrtaaatcgagtgcccatatatatgtttaggtctatttctagactctttattctgttccattggactctgtttttacgtcaataccatcatttcttaattac

SEQ ID NO: 521036 - DNA, 201 bp, Homo sapiens
tcaggcaggaccacctggggaagtactagggttggtcgagaggcagaaggagcaaggagaaacatgggcaaaaatgccaggaagttgctaggtagggaagycacctgttgggcaggaagtaaaacacagatgttgaagtttgtgattggagagtttgtaatatgattttcacatgcctgcaaaagccagactgcaagggag

SEQ ID NO: 521037 - DNA, 201 bp, Homo sapiens
cgattttagaataagtgctatgtggtgctgagaagaatgtatattctgttgatttggggtagagagttctatagatgtctattaggtccacttggttcagrgctgggttcaagtcttgaatatccttgttaattttctgtctcattattgtcagattcgccaaggttgaaacaaaaggaaaaaatgttaagggaagccaga

SEQ ID NO: 521038 - DNA, 201 bp, Homo sapiens
tacctactctaatatcttgattgtacccatggaattttaattttaatttatgaagatgattgaatgataacatggagacactaatgctattgtttattacrtatagttcccaagaggagagggcatgtcaggcaggaccacctggggaagtactagggttggtcgagaggcagaaggagcaaggagaaacatgggcaaaaa

SEQ ID NO: 521039 - DNA, 201 bp, Homo sapiens
ttttttcaaatgatttcagactgccatatagagtatctgaagtatatgattccttctttgatttattctatgattcattttagtaagtattatgataagtrctaaaatataataagaattacagctctgatccaaaagaatttatactccaatgttatatttgggtaaaaataaaataagcaattacagcatagtattatc

SEQ ID NO: 521040 - DNA, 201 bp, Homo sapiens
cccgttgccaggcggaccttggtctagcggtagcataagtgtcaagggaaaacacccgctacttagcagaccgggaaagggagtctccctttccccagggragtttagagaagactctactcctccacctcttgtggagggcctgacattagtcaggctcgtccacagttatccggaggcctaacagtctcactgtgatgc

SEQ ID NO: 521041 - DNA, 201 bp, Homo sapiens
agtgaccagaagacaagagtgcgagccttctgttatgcccggacagggccaccagagggctccttggtctagtggtaatgccagcgtctgggaggacgcckgttgccaggcggaccttggtctagcggtagcataagtgtcaagggaaaacacccgctacttagcagaccgggaaagggagtctccctttccccaggggag

SEQ ID NO: 521042 - DNA, 201 bp, Homo sapiens
ttttgatttgtctcattatgatgataagtttgtatacttggttgagatggtgtaaaattgctgcacaattatgattcccccatttaattaataagtatttygtggggaggtagcttgaaaccatgtaaatattttgctcttctttcaatttatccaactttcaatttatgtatgtatgtatttaatccatatggactgatg

SEQ ID NO: 521043 - DNA, 201 bp, Homo sapiens
tataccagatatagatcttagatatgattatatatgaatatcattaatcattagtttgtagcaattactctttattccaatattataataatcctcactcyataatcataccctaggaaaaaccaggccatacagagataggagctgaggagacacagtgagaagtgaccagaagacaagagtgcgagccttctgttatgc

SEQ ID NO: 521044 - DNA, 201 bp, Homo sapiens
tggcacacaattttgatttgtctcattatgatgataagtttgtatacttggttgagatggtgtaaaattgctgcacaattatgattcccccatttaattartaagtattttgtggggaggtagcttgaaaccatgtaaatattttgctcttctttcaatttatccaactttcaatttatgtatgtatgtatttaatccata

SEQ ID NO: 521045 - DNA, 201 bp, Homo sapiens
aggaaagagaccgaggacaggagctgttccagtatagtaaaatataaaacaagaatagttataccagatatagatcttagatatgattatatatgaatatmattaatcattagtttgtagcaattactctttattccaatattataataatcctcactccataatcataccctaggaaaaaccaggccatacagagatagg

SEQ ID NO: 521046 - DNA, 201 bp, Homo sapiens
atacttacatccttgcttttcatcacccagtatgattataacagttttagttagatcaaaattattatgaaaattattacgttatacagagctgagcctgygtgactttttgtgggcttttccccagaaattagtaactatttttctttgtttgtttgtttgtttgtttgtttgagacagagtttcactctgtcacccagg

SEQ ID NO: 521047 - DNA, 201 bp, Homo sapiens
ttttatagcagcttgaatggaataagagcatttgttaggtgttcctcaatcacctgaaacttaatgtacccaaattgtgcccttttttttttttttttttttgagacggagtcttgctgtcacctaccctggagtgcaatggtgcaatctcagctcactacaacctctgcctcccaggttcaagtgattctcttgcctcag

SEQ ID NO: 521048 - DNA, 201 bp, Homo sapiens
ttttgactattatgaataatgctatgaatatttgtgtgcaggtttttctagggacatacatttttcatttgtcttgatatatacctaggaatggaattgcygggtcatgtgataactctatgtttaataatttgaggaactgctggattgttttgcaaagtgactttatcattttaggtatccaccagcagtgtttgaggg

SEQ ID NO: 521049 - DNA, 201 bp, Homo sapiens
ccctctgaaattattctgatcaatagaaaaagagggaatcctccctaactcattttatgaggctggcaacatcctgataccaaagcctggcagagacacaataaaaaaagagaattttagaccaatatccctgatgaacatcgatgcaaaaatcctcaataaagtactggcaaaccgaatccagcagctcatcaaaaagct

SEQ ID NO: 521050 - DNA, 201 bp, Homo sapiens
cctaccaaccaaaaaagtccaggaccatatggattcacagccgaattctaccagagttacaaggaggagctggtaccattccctctgaaattattctgatsaatagaaaaagagggaatcctccctaactcattttatgaggctggcaacatcctgataccaaagcctggcagagacacaataaaaaaagagaattttaga

SEQ ID NO: 521051 - DNA, 201 bp, Homo sapiens
aaatagatgcaataaaaaatgataaagtggatattaccaccaattccacaggaatgcaaactaccagcagagaatactataaacacctctatgcaaataarctagaaaatctagaagaaatggataaattcccggagacatacaccctcccaagactaaaccaggaagaagttgaatctctgaatagaccaataacaggct

SEQ ID NO: 521052 - DNA, 201 bp, Homo sapiens
caaggagctggttttttgaaaagatcaacaaaattgatagaccactagcaagattaataaagaagaaaagagagaagaatcaaatagatgcaataaaaaakgataaagtggatattaccaccaattccacaggaatgcaaactaccagcagagaatactataaacacctctatgcaaataaactagaaaatctagaagaaa

SEQ ID NO: 521053 - DNA, 201 bp, Homo sapiens
tgtagtgggtaagcactgtggaaccttatccaacaagaatgggggctgtggctccaaaccaagtagacagcattgcagttggaataattccttaggaatgmaaattattttcagaatatactatattttgttatgtttttagacttatcttttactttaacacatttggaaccaagctgaggtttggagtccaatgagttc

SEQ ID NO: 521054 - DNA, 201 bp, Homo sapiens
tcagagcagaactgaaggacatagagacacaaaaaacccttcaaaaaatcaatgaatcaaggagctggttttttgaaaagatcaacaaaattgatagaccrctagcaagattaataaagaagaaaagagagaagaatcaaatagatgcaataaaaaatgataaagtggatattaccaccaattccacaggaatgcaaacta

SEQ ID NO: 521055 - DNA, 201 bp, Homo sapiens
gccctcatgacctaaccatctcttaaagatcctacctctcaagacagttgcattggggatcaagtttccaacacatgaacgttggggatcatattcaaacygtagcacaagtattacctcacttaattctcacaacacacctgggaggtagatgttatcagcatttaaaagatgagaacagctattgtttagagaagttag

SEQ ID NO: 521056 - DNA, 201 bp, Homo sapiens
gtggtggctctgccccatgataagtctctgcctgggccccaggctgtcctcaacatcctttgaaatttaggcagaagccaccatggcttcatacctattgyattctgtgtgcctgcagaattagcaccatgtggacactgccaagatacacagcttataccttctggagcagtgggttgagctgcagctgggctcacctga

SEQ ID NO: 521057 - DNA, 201 bp, Homo sapiens
ggaatgtattctaagggtgtgggataagggtggaaggaacataaagttggattaggctgaagtttttgatatgggcttactaagccaggtgtgcatttaakgttgcaactcaaagagttagaaagcgatctaacagtttgattgactggctgaaaaacagaccaaaagttggcccaccatgaatgagttgccttggtttaa

SEQ ID NO: 521058 - DNA, 201 bp, Homo sapiens
aaaacaacagtaagtcttaagaagaagaatcttctttgactccatatcccacatcaggggcacagtggggaagaagtagggctctcaaggcctcaggcagygtcagggcttagtccactcagcagctctcatggtttgcagtctcatgcccatggctttctcagattggagttacatgcttgtgccccctatagttctgtg

SEQ ID NO: 521059 - DNA, 201 bp, Homo sapiens
agttaacccttgagttccatatgtctatggaaggagatagaatattgccaacatgtggtttaaataaaaattatggtatttgtgtatatatatatatatawtttttttttcaatgacagcaaaaccaaaggagtacccctgagatggaaagacagagagctgtgtaccatctagccactaggcttgttcaaactgctcgaa

SEQ ID NO: 521060 - DNA, 201 bp, Homo sapiens
agtgaaggagaaataaaatcctttacagacaagcaaatgctgagggattttgtcaccatcaggcctgccttgcaagaactcctgaaggaagcattaaatawggaaaggaaaaaccagtaccagccactgtaaaaatacaccataatataaacaccaacaacacagtgaagaaactgcatcaactaatgtgcaaaataacca

SEQ ID NO: 521061 - DNA, 201 bp, Homo sapiens
gacccatctcacatgcaaagacacacataggctcaaaataaagggatggaggaatatttaccaagaaaatggaaagcaaaaaaaaaaaaaaagtaaagtaraaagcagagattgcaatcctagtctctgataaaatggactttaaaccaacaaagatcaaaagagacaaagaagggcattatataatggtaaagggatcaa

SEQ ID NO: 521062 - DNA, 201 bp, Homo sapiens
ggtggtttctcccatactgttcttttggtagtgaataagtctcacaaggtctgatggttttataaagcagagttcccctgcacatgttcttcttgcctacyggcatgtaagatgtaactttgctcctgatttaccttctgccatgattgtgaggcctccccagccatgtggaactgtgagtcaattaaacctttttccttt

SEQ ID NO: 521063 - DNA, 201 bp, Homo sapiens
ttgatttgacctatatcaaatattcttaataataaaaacttattttattaatatcatataaaagcagttatttcaaaaatgttatgttaatacacaagaaratagattctttgccactaagtagctgtgatcttgagcaaaaacttcaatttcctcatctctaaaatgagacagatgaacaataggctttatctatagtgt

SEQ ID NO: 521064 - DNA, 201 bp, Homo sapiens
tgaaattaaggcaataaataatagcctaccaaccaaaaaagtccaggaccatatggattcacagccgaattctaccagagttacaaggaggagctggtacyattccctctgaaattattctgatcaatagaaaaagagggaatcctccctaactcattttatgaggctggcaacatcctgataccaaagcctggcagagac

SEQ ID NO: 521065 - DNA, 201 bp, Homo sapiens
ctctacagatttgcctatcctggacattttatataaatggaacattttagtatgtacaggtagtcttttgtgactggatttttaacttagcataacgtttwcaagtttcatgttgtagcatttatcaatactttattctttttattgacaaataatattccattgtatggatataacacatttggtttatcagtttatcag

SEQ ID NO: 521066 - DNA, 201 bp, Homo sapiens
actagtataccatcatttccctcttccctaccattatgctattattgtaacatgtttaacttctacatatatttcacaattcatttttaaaaataagacarctttattgagatgtaattacatagattacaattcacacattcaaagcctacaatttaattgtctttaatgcattcacagagttgtacaaccatcaccaca

SEQ ID NO: 521067 - DNA, 201 bp, Homo sapiens
tgttgggattataggtgtgaaccatcggacacagcctcagaccactttaaataatattataatactttacatatgatataagagccttgcactagtatacyatcatttccctcttccctaccattatgctattattgtaacatgtttaacttctacatatatttcacaattcatttttaaaaataagacagctttattgag

SEQ ID NO: 521068 - DNA, 201 bp, Homo sapiens
agaatccccacatttcaagggcggggactggtggagataattgaatcatgggggtggtttctcccatactgttcttttggtagtgaataagtctcacaagktctgatggttttataaagcagagttcccctgcacatgttcttcttgcctaccggcatgtaagatgtaactttgctcctgatttaccttctgccatgattg

SEQ ID NO: 521069 - DNA, 201 bp, Homo sapiens
tgtgtagacttccctttcctaataattaattttttattatacctaacaaccttaatgatactagtattgcatactaacttcatctgtaggtattttatacrtttttacaatttcaaaagagtaggaaaaaagtttttaaaaaaaaggaatgttagacaaattgagaatttctgtgtttggaatagttctaagaaatacacc

SEQ ID NO: 521070 - DNA, 201 bp, Homo sapiens
taagagctgggacagactcttctgctgctgccttggacatcagaaatttgactccacagaagttcgttatcacaacattgactgtgtgtaagcattgtgcrtatacattaaaatgttgaaatttttttgataaatgaagacatgtcctttttgtacatcatttatttgtgaaagataaaatttatttcttgaaatcttagc

SEQ ID NO: 521071 - DNA, 201 bp, Homo sapiens
atttagtgtaatacgtaagtgccaagaatatgaaaagtcatttaatcatgttacattggtcaagctccaaccattgatacctttttaaactttctgctacsaaatatgcatttatacttatctacttttcactccctttgtttaagccagaagtggtattctctagctaattcctccatctgttccctggatcccatcctt

SEQ ID NO: 521072 - DNA, 201 bp, Homo sapiens
actttaataccccactgtcaacattagacagatcgagacacaaacttaacaaggatatccaggaattgaactcagctctgcaccaagtggacctaacagayatctacagaactctccaccccaaagcagcagaatatacattttctcagcaccacatcacacttattccaaaattggccacatagttggaagtacagcact

SEQ ID NO: 521073 - DNA, 201 bp, Homo sapiens
ggagactttaataccccactgtcaacattagacagatcgagacacaaacttaacaaggatatccaggaattgaactcagctctgcaccaagtggacctaayagacatctacagaactctccaccccaaagcagcagaatatacattttctcagcaccacatcacacttattccaaaattggccacatagttggaagtacag

SEQ ID NO: 521074 - DNA, 201 bp, Homo sapiens
aggatcaaattcacacgtaaccatattaaccttaaatgtaaatgggctaaatgctccaattaaaagacacagactggcaagttggataaagagtcaagacscatcaatgtgctgtattcaggagacccatctcacttgcagagacacacataggctcacaataaagggatggaggaaggtgtaccaagcaaatggaaaaca

SEQ ID NO: 521075 - DNA, 201 bp, Homo sapiens
gtgggtgagtctgagtggactaggcggtgaaaatctgcccttagtgttggtgggcaccttgcagttgaccagggcccagagagagcaaatacagaaattgmatttgtctctctctaagagctgggacagactcttctgctgctgccttggacatcagaaatttgactccacagaagttcgttatcacaacattgactgtgt

SEQ ID NO: 521076 - DNA, 201 bp, Homo sapiens
taaaatcctttaagacaaacaaatgctgagagattctgtcaccaccaggcctgccttacaagagctcctgaagaaagcactaaacatggaaaggaacaachagtaccagccactgcaaaaacatgccaaattgcaaagaccatcaatgctagaaagaaacttcaccaactgacgagcaaaatcaccagctaacatcataat

SEQ ID NO: 521077 - DNA, 201 bp, Homo sapiens
ttctggatttattccaaaggtaatatatgtgataatgtggtactgatcataatccttaaagacacaatcccaaatgccataatcccgatgttcaaatcttsaaagatcaaaatccttaatgttgaaatcctgaaagcttaattctagggaagggattaatgcgtttttggttgtacacaagatagttgcatcatgttagat

SEQ ID NO: 521078 - DNA, 201 bp, Homo sapiens
atattcaacattcttaaagaaaagaattttcaacccagaatttcatatccagccaaactaagcttcataagtgaaggagaaataaaatcctttaagacaarcaaatgctgagagattctgtcaccaccaggcctgccttacaagagctcctgaagaaagcactaaacatggaaaggaacaaccagtaccagccactgcaaa

SEQ ID NO: 521079 - DNA, 201 bp, Homo sapiens
aaccaagttggaaaacactcttcaggatattatccaggagaacttccccagcctagcaaggcaggccaacaattcaaattcaggaaatacagagaacgccrcaaagatactcctcaagaagagcaattccaagacacataattgtcagattcaccaaagttgaaatgaaggaaaaaatgttaagggcaaccagagagaaag

SEQ ID NO: 521080 - DNA, 201 bp, Homo sapiens
gcactatgtgaaaaaaccaaatctacatctcattggtgtacctaaaagtgacggggagaatggaaccaagttggaaaacactcttcaggatattatccagkagaacttccccagcctagcaaggcaggccaacaattcaaattcaggaaatacagagaacgccgcaaagatactcctcaagaagagcaattccaagacaca

SEQ ID NO: 521081 - DNA, 201 bp, Homo sapiens
gctgatttgatcaagtggaagaaaggctatcagtgattgaagatcaaatgaatgaaatgaagcaaaaagacaagtttagagaaaaaagggtaaaaaaaacygaacaaagcctacaagaaatgtggcactatgtgaaaaaaccaaatctacatctcattggtgtacctaaaagtgacggggagaatggaaccaagttggaaa

SEQ ID NO: 521082 - DNA, 201 bp, Homo sapiens
tctaggggcagggcatagctgaacaaaaggcagcagaaacttctgcagacttaaacatccctgtctgacagctttgaagagactggtggttctcccagcayggagtttgagatctgagaatggacagactgcctccccaagtggggccatgacccccaagtagcctaactgggaggcatctcccagtaggggccgactgac

SEQ ID NO: 521083 - DNA, 201 bp, Homo sapiens
acactcccaccctaatactgcgcttttccaatggccttagcaaacagcacaccaggagattatatcccgcacctggcttggagggtcccacgtccatggarcctcgctcactgctagcacagcagtctgagatcgaactgcaaggtggcagcgaggctgggggatgggcatctggctttgctgaggcttgagtaggtaaac

SEQ ID NO: 521084 - DNA, 201 bp, Homo sapiens
cagcctacttgggatccaaaacctgtgtcagggtttccctcttctcttgcatgaataacctcctgttgttcatattcaggctcatatacccttgctaggtrgaccttcagtttaaatggcttccttgtcctcctgtgctataccacccctccgtcctctccctgctctggctttgccacccccacaccaacgatgctctct

SEQ ID NO: 521085 - DNA, 201 bp, Homo sapiens
ggagaaacatgggcaaaaatgccaggaagttgctaggtagggaagtcacctgttgggcaggaagtaaaacacagatgttgaagtttgtgattggagagttygtaatatgattttcacatgcctgcaaaagccagactgcaagggagatgtaaacaactttagctattagtttcaccgtgtgattaatggatgccaaatcat

SEQ ID NO: 521086 - DNA, 201 bp, Homo sapiens
cacctggcttggagggtcccacgtccatggagcctcgctcactgctagcacagcagtctgagatcgaactgcaaggtggcagcgaggctgggggatgggcwtctggctttgctgaggcttgagtaggtaaacaaagcggccaggaagctcaaactgggtggagcccaccgcagctcaaggaggcctgccttgcctctgtag

SEQ ID NO: 521087 - DNA, 201 bp, Homo sapiens
ctttaacttcattcccctgacattttgattttttcttgtctcaatttacaccttcttatattgtctatttctttaaaggtgtctgtagttactattttcayaaacgtgtctttttttttttcttttttttttgagattgagtctcactctcttgcccaggctgcagtgcagtggcgcgatcttggctcactgcaagctctg

SEQ ID NO: 521088 - DNA, 201 bp, Homo sapiens
ggactcagaagtgctatgcagtgaggtctaacataaatgaatttcttgacatagcaagaagaacatacacagagattgtagatgacatagcaggtaatttmtttatttgataatgttttttgtagggataaaacagccttttcaggacatgctgtccttttttgctgctgatgactagccatacatattttaaatttattt

SEQ ID NO: 521089 - DNA, 201 bp, Homo sapiens
gttcttttttaactctgatgggtcattatgtctagctgtgtaccaatatcacaccatctttagctttataataagtcttgatattttgtaggacagccttrccacctgtaccctccacaagccaccttactcttctttagaggagtcttgattcttcttggccctttgctcttccatgtaaattttgggccaatttttcaa

SEQ ID NO: 521090 - DNA, 201 bp, Homo sapiens
ctgaccataagtgttcactaaaaataaagcttaaatttcttatcttaacacaattttctttctgtacagtatctataaccatagcacttaatgtattgcaytaagaatatttgtgttttccactacaaatgcttaaaatactttccccaacatttgaaaaatttatattaaagatatttttctaatttttatcatgagttt

SEQ ID NO: 521091 - DNA, 201 bp, Homo sapiens
caatcttggtaagttgtatgtctccagaaatttctttctttcttttaagttttccaatttgttggcatatagttgtttacaatagtctctaatgatccttygtatttctgtggtatcaattgttatgtctcctttttcatttctgattttatttgggtcttctctctttttagttggtctagtaaagatttgtttgtcttt

SEQ ID NO: 521092 - DNA, 201 bp, Homo sapiens
acaaatcaaaaccacaatgagatgccatctcacaccagttggaatagctattattaaaaagtcaaaaaataacagatgttggcaagtctgcagagagaagraaatgctcatacattgttcttaggattgtaaattagttcagcctctgtggaaagcagtttggagatttctcagagaactaaaaatagaattaccattcaa

SEQ ID NO: 521093 - DNA, 201 bp, Homo sapiens
catcaactaatgtgcaaaataaccagctagcatcatgatgataggatcaaattcacacataacaatattaaccttaaatgtaaatgggctaaatgccccarttaaaagacacagactgacaaattggataatgagtcaagacccatcagtgtgctgtattcaggagacccatctcacatgcaaagacacacataggctcaa

SEQ ID NO: 521094 - DNA, 201 bp, Homo sapiens
acctatcattggagatgactcacactctttaccctgccccttttgctttgtatccaataaataacagcgcagccagacattcggggccactaccggtctcygtgcattggtcatagtggtcccctggcccagctgccttttcttttatctctttgtcttgtgtctttatttctacactctctcgttgctgcacacggggag

SEQ ID NO: 521095 - DNA, 201 bp, Homo sapiens
aacagagtgatttttctcattaaaatttattcattttgttttgtttttgtttttcttgtttctggtcaccaggaatgatatcacaacttggagaaaaatayagtctacctttaaggacaagttttagctctgctcgaggatttttcatccagatgactacagattgtatagccctacctagtgatcaacttccttcagaat

SEQ ID NO: 521096 - DNA, 201 bp, Homo sapiens
ctgggattacaggcatgagccaccgcgcccggccttttctgttagtttctatgtttctagttcttttttaactctgatgggtcattatgtctagctgtgtrccaatatcacaccatctttagctttataataagtcttgatattttgtaggacagccttaccacctgtaccctccacaagccaccttactcttctttagag

SEQ ID NO: 521097 - DNA, 201 bp, Homo sapiens
atttagtgctataaatttccctcttaaccctggtttagctgtgtcccagagattctggtacattgtctctttgttttcattggtttcaaagtacttctttstttctgacttaattttgttatttacccagtagtcattcaggaggaggttgtttactttccatgcagttgtgcagttttgagtgagtttcttaatcctgag

SEQ ID NO: 521098 - DNA, 201 bp, Homo sapiens
atgtgtccaggaatttatccatttcttctagattttctagtttatttgtgtagaggtgtttatagtattctctgatgttagtttgtatttctgtgggatcrgtggtgatatcccctttatcatttcttattgtgtctatttgattcttctcccttttcttctttattagtctgcatagtggtctattttgttaatcttttc

SEQ ID NO: 521099 - DNA, 201 bp, Homo sapiens
tatgtgtccaggaatttatccatttcttctagattttctagtttatttgtgtagaggtgtttatagtattctctgatgttagtttgtatttctgtgggatcagtggtgatatcccctttatcatttcttattgtgtctatttgattcttctcccttttcttctttattagtctgcatagtggtctattttgttaatctttt

SEQ ID NO: 521100 - DNA, 201 bp, Homo sapiens
tattctattgtttgaaatagtttcaaaaggaatggtaccagctcctccttgtacctctggtagaattcggctgtgaatccatctggtcctgagctttttttggttggtgggctattaattactccctcaatttcagaacttgttattggtctagtcacagattcaacttcttcctggtttagtcttgggagggtgtatgtg

SEQ ID NO: 521101 - DNA, 201 bp, Homo sapiens
atttgcatttctctaatgaccagtgatgatgagctttttttcatatgtttgatggccgcacaaatgtcttcttttgagaagtgtctgttcatatcctctgyccactttttgatggggttgtttttttcttgtaaatgtctttaagttccttgtggattctggattttagagctttgtcagatgggtagattgtaaaaattt

SEQ ID NO: 521102 - DNA, 201 bp, Homo sapiens
ttttagctctgctcgaggatttttcatccagatgactacagattgtatagccctacctagtgatcaacttccttcagaatttattaaggttcattttagartggttaggaaattagtgtttctgattttatagaattacatctacatatttttgggacttcttgagttttgcaagccaaatttctgaatgttctgtatctt

SEQ ID NO: 521103 - DNA, 201 bp, Homo sapiens
taacctcacattagcttgattacatttgcaaagatgcaatttccaaataaggtcacactaacagatacctggagttaagacttcacagtatcatttgggggtcacaattcaacccataacatgggataagaaaattgcccttgcctcagggtctgtttctggagaactcaccctaacacagtcaccaacaggcatattgct

SEQ ID NO: 521104 - DNA, 201 bp, Homo sapiens
ctcccacctcagcctcccgagtagctgggaccaaggcatgtgcccctacagatggctaatttaaaaaatttttttgtagagacagtgttttcctacgttgmccagcctggtctcgaacttctaggctcaagcgatcctcctacctcagcctcccaaaatgctgggattacaggtgtgagccactgcacctagccctcaaac

SEQ ID NO: 521105 - DNA, 201 bp, Homo sapiens
ttttctactgagtcctgtagtaaataatttcaggggtacattatgtaatgtattttgatttcctgtatgcttttcttttccacttttttctgtttttttttgttgttgtttttgttgttgttgttcatagatactttacattctttttctccatggtaatcctcaaagatgggaagatttgtccagactacgtaattatca

SEQ ID NO: 521106 - DNA, 201 bp, Homo sapiens; identical to SEQ ID NO: 299901

SEQ ID NO: 521107 - DNA, 201 bp, Homo sapiens
aattgacaccctaacatcacaattaaaagaactagagaagcaagagcaaacacattcaaaagctagcggaatgcaaaaaataactaagatcagagcagaamtgaaggaaatagagacacaaaaatcccttcaaaaaatcaaaatatatctaaaaactttttttgagacaagatctcactctgtctccacactggaatacag

SEQ ID NO: 521108 - DNA, 201 bp, Homo sapiens
ctaaaagtagtctgagaacaagaaacagccctctccatctccagtttccgcatctccagtttctggcaaccactctcttccttagctccctaaagcctagraatgctaatggagcacattttatgctggttctacacacgtctttatgatagcacccctacaccctgtccacacctttgtaaatattctctttatcaaatt

SEQ ID NO: 521109 - DNA, 201 bp, Homo sapiens
acctggagctacattgtctgatagaatattctgtgataatagaaacgtttcatacttatgctgtccgatgtggtaactagtagccgtatgtggcttttgarcatttgaaaatgttgctagtgtgactgaggaacagaatttaaattgtatttaattttgatttagttaaatactcacatatgctgctttattgaacaatgc

SEQ ID NO: 521110 - DNA, 201 bp, Homo sapiens
gcgacaaagagagaccttgtctttataagacagtaaaatagactgggcatggtggctcccgattataatcccagcattttgggaggctgagatgggaagawcacttgagcccaggagtttgagaccagcctgggcaacatggcaaaaccccatctctacaaaaatacaaaaaattagcctggcatggtggcatgagcctat

SEQ ID NO: 521111 - DNA, 201 bp, Homo sapiens
gttgtggaaatcaaagagaataggtgaacagagcccaaacattttaaaatttttttagaacttctatgtgccaagaggctatgctaggttgtttatgtacwttatttaaaaattttatgacaatcctgtaaaataggtaatagcttacatcagtagataagtacctaaataaggaactgaagccaattgagtctaaaatgc

SEQ ID NO: 521112 - DNA, 201 bp, Homo sapiens
ttgcccctttctagcttttggtggtcgctgtcagtccatgatgggccttggctcacaggtttgtcattgcaatctctgcttctattgtcatatggttttcyccctgcgtgtcttcacattgtcgtcttataaagacactagtcgtattgtattaagacctaccttaataacctcacattagcttgattacatttgcaaaga

SEQ ID NO: 521113 - DNA, 201 bp, Homo sapiens
aaaagatcacatggtttttgtccttgattctgttaatatgacatatcatatttattgatttgcatatgttttatcattctggcatccctgggatgaattcygtgtaatcatggtgaatgatcttttcagtgtgttgttgtatttggtttgctagtatttggttgggttcttaatttatgtttaacaggaatattggcctgt

SEQ ID NO: 521114 - DNA, 201 bp, Homo sapiens
cctttccagtttggatgccttttgtttctttctcttgcttaattgctctggctaggacatccagtactatgttgaataaaagtggtgaaagtgggtgtccytgttttgttccagaagttagaggaaagactttccatttttactcccatagtattatttagttgtgggtttgtaatgtatgtcctttattgttttgaggtg

SEQ ID NO: 521115 - DNA, 201 bp, Homo sapiens
tatttttttcagtttgttcactattgacgtatacaaatgtcactgatttttatatttttggtggagtctttagggttttctaagtataatatgtcatctgyaaaaaggatattttgacttcttcctttccagtttggatgccttttgtttctttctcttgcttaattgctctggctaggacatccagtactatgttgaata

SEQ ID NO: 521116 - DNA, 201 bp, Homo sapiens
ttattcttccaatcaatgaacacatttatagcaatatttattcttccagtccataaatgggatttcttcttgtatttttttcagtttgttcactattgacrtatacaaatgtcactgatttttatatttttggtggagtctttagggttttctaagtataatatgtcatctgtaaaaaggatattttgacttcttcctttc

SEQ ID NO: 521117 - DNA, 201 bp, Homo sapiens
ctatgtgtcttggataagtaattaaatctaataattggcaagttgtcatccagaattttagaaagcttaattctgagaattattgagtagttcagaagtgmctctagaagggaagtttaaatctgtgactaaaagattaatactagttaaaagaagcataaaaatgccagcagtaacaatattgaagccaaatttaaaaca

SEQ ID NO: 521118 - DNA, 201 bp, Homo sapiens
atattattattttctaactatctcttttgttcctgatatctcagagctatattgagaggtaactgatattctaatttgccctatgtgtcttggataagtawttaaatctaataattggcaagttgtcatccagaattttagaaagcttaattctgagaattattgagtagttcagaagtgcctctagaagggaagtttaaa

SEQ ID NO: 521119 - DNA, 201 bp, Homo sapiens
gatactacatcacattgttcatattaaaatgatttttcagtatatatggagggttcttcactttatttttgaatatgttgctagcctaacctttttttctytgcatttgtttaacagtgttgttggaatcagtaaatgttttaggattttcagagacttaaacatgaataatcaatataaataaaaacaaagtaccacagt

SEQ ID NO: 521120 - DNA, 201 bp, Homo sapiens
gcatgaataacctcctgttgttcatattcaggctcatatacccttgctaggtagaccttcagtttaaatggcttccttgtcctcctgtgctataccacccstccgtcctctccctgctctggctttgccacccccacaccaacgatgctctcttcttcctatttgggccctaacaactgatactacatcacattgttcata

SEQ ID NO: 521121 - DNA, 201 bp, Homo sapiens
gccactaccggtctccgtgcattggtcatagtggtcccctggcccagctgccttttcttttatctctttgtcttgtgtctttatttctacactctctcgtygctgcacacggggagaaactcacccaccctgtggggctggaccctacagaaaacgaaggggtaaggggattctctatagaatgtgaattattcccacaag

SEQ ID NO: 521122 - DNA, 201 bp, Homo sapiens
acattttagtatgtacaggtagtcttttgtgactggatttttaacttagcataacgttttcaagtttcatgttgtagcatttatcaatactttattctttktattgacaaataatattccattgtatggatataacacatttggtttatcagtttatcagttgatggctatttaggttgttttcacttttgactattatga

SEQ ID NO: 521123 - DNA, 201 bp, Homo sapiens
attgcggctaggctgatatataaaaatatatgggatatggaaagagtaagaatgttcaagaggaaaacccattgttctattaaatatttatggtgtccatycaaatttgggtttttatcttaacaggtcaatgctgctgaatcaaagataacaaatttaatatacttaaaacataccttggaacttgtggatcctttaaag

SEQ ID NO: 521124 - DNA, 201 bp, Homo sapiens
gtgatttttctcattaaaatttattcattttgttttgtttttgtttttcttgtttctggtcaccaggaatgatatcacaacttggagaaaaatatagtctwcctttaaggacaagttttagctctgctcgaggatttttcatccagatgactacagattgtatagccctacctagtgatcaacttccttcagaatttatta

SEQ ID NO: 521125 - DNA, 201 bp, Homo sapiens
gcggacgtaatagacatctacagaactctccaccccaaatcaacagaatatacattcttttcagcaccacaccacacctattccaaaattgaccacatagytggaagtaaagcactcctcagcaaatgtaaaagaacagaaattataacaaactgtctctcagaccacagtgcaatcaaactggaactcaggattaagaaa

SEQ ID NO: 521126 - DNA, 201 bp, Homo sapiens
gatgactacagattgtatagccctacctagtgatcaacttccttcagaatttattaaggttcattttagagtggttaggaaattagtgtttctgattttayagaattacatctacatatttttgggacttcttgagttttgcaagccaaatttctgaatgttctgtatcttctcctattcctacccacccacctaactaat

SEQ ID NO: 521127 - DNA, 201 bp, Homo sapiens
gcctttgttcatgatactgacattttgaagcataagggtcaactttttaagtagaatttcctcaatttatgtgattgctttctcctgattaaattcatctrtgcatatttggccttaatactctatgatgtatcctttttagtgcatcacatcaagaggcacataatgccatttcctcattcttggtgatattaactgatc

SEQ ID NO: 521128 - DNA, 201 bp, Homo sapiens
gccattacataatggtaaagggatcaattcaacaagaagagctaactatcctaaatatatatgcacccaatacaggagcacccagattcataaagcaagtmcttagagacctacaaagagacttagactcccacacaataataatgggagactttaacaccccactgtcaacattagacagatcaacgagacagaaagtta

SEQ ID NO: 521129 - DNA, 201 bp, Homo sapiens
ttcattcatgaaggcagagccctcatgccccatcacctcttaaaggccccacctctgtcctgccacacttcactggggattaaatttcaatgtaagtttcrgaggggacagatattcataccttagcaacacatctggtatatttgaagattaaagggtaatttatgattttagccagagtagttgcagtgaacttgtaga

SEQ ID NO: 521130 - DNA, 201 bp, Homo sapiens
tgagaccagcctcagcaacatggcaaaaccccatctctaccaaaaatacaaaaattacctgggtgtggtggtgcatgactgtcatcctagctacttgggargctgaggcaggagtattgcttgagcctgggaggtggaggttgcagtgagccgagatcacaccactgtaccccagcctggttgacagagctagaccctgtc

SEQ ID NO: 521131 - DNA, 201 bp, Homo sapiens
cctggggaactagagtgagaccctgtctcaaaaagattataattttctctttgttctaaataaattcaattcactttatgtaaatagtatatcatagataggtagaattggtgttttcatcttttcacctggggcattataagaatctaccctttctcaattatgatagactatggaaagatgaatataaaactgtgaaag

SEQ ID NO: 521132 - DNA, 201 bp, Homo sapiens
gcctggggaactagagtgagaccctgtctcaaaaagattataattttctctttgttctaaataaattcaattcactttatgtaaatagtatatcatagataggtagaattggtgttttcatcttttcacctggggcattataagaatctaccctttctcaattatgatagactatggaaagatgaatataaaactgtgaaa

SEQ ID NO: 521133 - DNA, 201 bp, Homo sapiens
agcctgggcgacaagagcaagactctgtctcaaaaaagaaaaaaagaaaaaaaaggaaagtgaacatggtataaattataatgactaatacatcattgcayaattcaaatctttaagaattgactgttaatttttcaaatttaggttcatactttggaaacaaaagagcttatgcagaaaacacagttgcatcaaatttta

SEQ ID NO: 521134 - DNA, 201 bp, Homo sapiens
taaccatactggtaataaagaattaattttgagggaaagatagagttcacttttggacatttagaatgctgggaagatacctaaaggtttatgcccaagakatagatatagtgacctggagctacattgtctgatagaatattctgtgataatagaaacgtttcatacttatgctgtccgatgtggtaactagtagccgta

SEQ ID NO: 521135 - DNA, 201 bp, Homo sapiens
  misc_feature (1)...(201): n = A,T,C or G
tacatcattgcataattcaaatctttaagaattgactgttaatttttcaaatttaggttcatactttggaaacaaaagagcttatgcagaaaacacagttncatcaaattttacttttggtgcaagctcatcttctgcacgagatactaattatcctcaaacacttaaaactccattgtctactggaaatcctcagagatc

SEQ ID NO: 521136 - DNA, 201 bp, Homo sapiens
atctacagattgcattattttgtcctcttgattaagaatttcctagttttttttaaaaaaagaaatgattattatcaatgtttatatcttttctttatttwaaaatttacagcttcatcctcatctgcgatttctgcacactccccatcagttattgtagctgttgtagaagggagaggacttgccagaggtgaaatagga

SEQ ID NO: 521137 - DNA, 201 bp, Homo sapiens
agcctggggaactagagtgagaccctgtctcaaaaagattataattttctctttgttctaaataaattcaattcactttatgtaaatagtatatcatagataggtagaattggtgttttcatcttttcacctggggcattataagaatctaccctttctcaattatgatagactatggaaagatgaatataaaactgtgaa

SEQ ID NO: 521138 - DNA, 201 bp, Homo sapiens
tttagagtggttaggaaattagtgtttctgattttatagaattacatctacatatttttgggacttcttgagttttgcaagccaaatttctgaatgttctrtatcttctcctattcctacccacccacctaactaatgtactaatctaagagtgatttagatgcttttgcagaaataccaaactcagtgttttccacagtt

SEQ ID NO: 521139 - DNA, 201 bp, Homo sapiens
gccagaggtgaaataggaatggcaagtattgatttaaaaaacccccaaattatactatcccagtttgcagacaacacaacatatgcaaaggtaagtattartaattctagaaaatggttgctctgttaggcagtatctagagtttaaagtcagtgccttcccaatttgtttactttttggtagaataaaggttattcatta

SEQ ID NO: 521140 - DNA, 201 bp, Homo sapiens
cagcctggggaactagagtgagaccctgtctcaaaaagattataattttctctttgttctaaataaattcaattcactttatgtaaatagtatatcatagataggtagaattggtgttttcatcttttcacctggggcattataagaatctaccctttctcaattatgatagactatggaaagatgaatataaaactgtga

SEQ ID NO: 521141 - DNA, 201 bp, Homo sapiens
gtagctgtgatcttgagcaaaaacttcaatttcctcatctctaaaatgagacagatgaacaataggctttatctatagtgtataactcagatgtgaatatyattttacttcaggcaatgaatttaatattattttacgattacaatgtatgtcccttttgaaaaaacattattacatgtcttaccaaacgtgttttcagga

SEQ ID NO: 521142 - DNA, 201 bp, Homo sapiens
atgttgaaatcctgaaagcttaattctagggaagggattaatgcgtttttggttgtacacaagatagttgcatcatgttagatgcatcatattaggcaatrctactaccttattattttatttggaaattaggtatggtttaaggagatgcataggggtgccaaattggcaagggatagacttgtggatttaagtataggt

SEQ ID NO: 521143 - DNA, 201 bp, Homo sapiens
cccagctactcaggaggatgaagcaagcagattgcttgtaccctggagttcaaatttgtagtgagctatgatcatgccgctgtattccagcctggggaactagagtgagaccctgtctcaaaaagattataattttctctttgttctaaataaattcaattcactttatgtaaatagtatatcatagataggtagaattgg

SEQ ID NO: 521144 - DNA, 201 bp, Homo sapiens
ttgagttccatatgtctatggaaggagatagaatattgccaacatgtggtttaaataaaaattatggtatttgtgtatatatatatatatattttttttttcaatgacagcaaaaccaaaggagtacccctgagatggaaagacagagagctgtgtaccatctagccactaggcttgttcaaactgctcgaaactctcaat

SEQ ID NO: 521145 - DNA, 201 bp, Homo sapiens
ttaggtatggtttaaggagatgcataggggtgccaaattggcaagggatagacttgtggatttaagtataggtgacaacttgactgtattaaaaaaatacstagtaaagcattatttgggctgtgtctgtgaggttgcttccagaggagatgagtgggtgagtctgagtggactaggcggtgaaaatctgcccttagtgtt

SEQ ID NO: 521146 - DNA, 201 bp, Homo sapiens
gggaggccaatgcgggagaatcacttgagcccaggagtttgacaccagcctgggcagcatagtgagaacttatctctgctcaaaaaaaaaaaaaaaaaaaattagccagatgtaatggtgtgtgcctgtagtcccagctactcaggaggatgaagcaagcagattgcttgtaccctggagttcaaatttgtagtgagctat

SEQ ID NO: 521147 - DNA, 201 bp, Homo sapiens
gttaacccttgagttccatatgtctatggaaggagatagaatattgccaacatgtggtttaaataaaaattatggtatttgtgtatatatatatatatatwttttttttcaatgacagcaaaaccaaaggagtacccctgagatggaaagacagagagctgtgtaccatctagccactaggcttgttcaaactgctcgaaa

SEQ ID NO: 521148 - DNA, 201 bp, Homo sapiens
gaggtaaagaaaactagtatcttagatcagtcagaatttagcctcttaatttcttgccttcacttcttattttgccttcattttatatcactcatcattcrtttgggccactcgcctattgtcatgggaatttgcatgatctatcaggtagagatagtttactcctaatttctatgttatttaactcaattattattttat

SEQ ID NO: 521149 - DNA, 201 bp, Homo sapiens
taaaccttttacttaacaacttgatgctttttaaaagttccattatcaaccgggtgctgatgtctcacactggtaattccagcactttgggaggccaatgygggagaatcacttgagcccaggagtttgacaccagcctgggcagcatagtgagaacttatctctgctcaaaaaaaaaaaaaaaaaaaattagccagatgt

SEQ ID NO: 521150 - DNA, 201 bp, Homo sapiens
cctccgcttcttggattcaagtatttcttgtgcctcagctacccaagtagctggaattacaggcatgtgccaccgtgcctgtctaatttttttagtgagayggggtttcaccatgttggccaggctggtctctaactcctaggctgaagtgatctgcctgcctcagtctcccaaagtgctggtattataggcatgagccac

SEQ ID NO: 521151 - DNA, 201 bp, Homo sapiens
tcaagtgtttcattattttttaattctcttcctttagtccctctttatggtcctccagtgtgtagacttccctttcctaataattaattttttattatacytaacaaccttaatgatactagtattgcatactaacttcatctgtaggtattttatacgtttttacaatttcaaaagagtaggaaaaaagtttttaaaaaa

SEQ ID NO: 521152 - DNA, 201 bp, Homo sapiens
ttagtaggttttccattttattcctttaaataggcattctactctttgctctttctcaattctctcttgaacaccagtgaatcttagatttgctcttccayggtgtatctctctctctctctctctctctctatactatatatatatatatatatatatatatatgtataaaatctttcaggctgtctttattcctttcat

SEQ ID NO: 521153 - DNA, 201 bp, Homo sapiens
gctgcttttaggattctctttgtccttgacctttgagagtttgattattatatcatttggcttgtcttatttgggatgaatatatttggtgttctgtgacmtcttgtacctagatattaacatatttctctaggtttagtaggttttccattttattcctttaaataggcattctactctttgctctttctcaattctctc

SEQ ID NO: 521154 - DNA, 201 bp, Homo sapiens
ggaaaataatttctttattccagtgtccatgtatgaattccagggaaggatgctgactgatcccgctttgttcagtttctcacacgttagagtaatcactrtttctgggggtagatacactataattgactaatccttttgctgtgagacacagaatactatgatagctaggccttccagaatcacatggaatgggggata

SEQ ID NO: 521155 - DNA, 201 bp, Homo sapiens
aacttccccaagaaacttccctgaatttttttccagtggagcaatgtactcatttcttgttcttaaaggccccttttcacaacaactatgatgtagttgcmataatatatccacattgcctattttttgtttatttttattttactttattttagattgagggggtacatgtgcttgcttgttacataggtatattgcata

SEQ ID NO: 521156 - DNA, 201 bp, Homo sapiens
agctgaaaattttataaactattttggagctcaggacagtggtaaagaactaaattctagagttctctagaagtgaataaaagttgtgatagtgattagartgtgtccattataatttagaagaatttgggtggggatttgggataatatagtaccttaatgttattattccaaattgaccagtgtgaaaatcactaagat

SEQ ID NO: 521157 - DNA, 201 bp, Homo sapiens
taatataaaatctcaaaacattttaaaatggattgataatgttagcctccaaattattagttttattcctacatctctgccaagctacttagaaaattaamctaaaattttatgttcacatagttaaaatagaattttctagttaatttttaaagtactaatattcattgtctgttatatattccaggcatttacactgtt

SEQ ID NO: 521158 - DNA, 201 bp, Homo sapiens
tattattttctaacacagtatccttagtgcctagcacaattcttgcaacagatagggtctgaataattatttgctaaattgaattaacctgaaatagagtytacaaagttcctctaatagattggtttggcatataacttttaaggacattattgttattgaatatagtctctaccttttaaatagcttactgtgttctaa

SEQ ID NO: 521159 - DNA, 201 bp, Homo sapiens
ataaataatttaataaaaatgtaatattgctacttattttaaatttaattattattttctaacacagtatccttagtgcctagcacaattcttgcaacagrtagggtctgaataattatttgctaaattgaattaacctgaaatagagtctacaaagttcctctaatagattggtttggcatataacttttaaggacatta

SEQ ID NO: 521160 - DNA, 201 bp, Homo sapiens
tgtccgatgtggtaactagtagccgtatgtggcttttgaacatttgaaaatgttgctagtgtgactgaggaacagaatttaaattgtatttaattttgatwtagttaaatactcacatatgctgctttattgaacaatgcaggtatagagctgagaacggtttttgcacttttgaaggattaaagaatcaagaatattttg

SEQ ID NO: 521161 - DNA, 201 bp, Homo sapiens
ggttttgaaatgtgaagacatgagatttggcaggggctaggggcagaattatatggtttggctgtttccctacccaaaactcaccttgagttgtaataatycccacatgtcaaaggcagggccaggtggaggtaattgaatcatagggcagtttcccccatgttctcctggtagtgaataagtctcacgagatctgatggt

SEQ ID NO: 521162 - DNA, 201 bp, Homo sapiens
gagttgtaataatccccacatgtcaaaggcagggccaggtggaggtaattgaatcatagggcagtttcccccatgttctcctggtagtgaataagtctcasgagatctgatggttgtttaaaggggagttcccctgcacatgttcttcttgcctgctgccatgtaaaacatgactttgctccttattcaccttctgccatg

SEQ ID NO: 521163 - DNA, 201 bp, Homo sapiens
ctttatgtatccttttattattattgaattttatggacacccacaaatagcttttaaaacaatttagatagtaaacacatatcatcgcatttatatttttrttccttcatttccaatgaaagtgggaatcattagtttgataaccatgatatagataaggaaaagatgaaatcaagaaattcaaataatgcaaaattagtc

SEQ ID NO: 521164 - DNA, 201 bp, Homo sapiens
attaggcacttaaggtatatttttaaatggtcctagcactcaaaaagcttagtctcatagaaaggtaaaatgtccatcaaagttactattgtgtcataatrtaataaagataaaattctatttttgagaaagaggttaataatcttcagtggaaaagagcacttctgtcaatttaagtcttagtctccattggtcatggat

SEQ ID NO: 521165 - DNA, 201 bp, Homo sapiens
ctatttgtatattttatcttcttataatgttagaatgcattttagattttattctatattgagactggtgcattaatcagattgatttgttttcaaaaaaygaatattttagatgagttagcacaataacttcttgggcagaaacagtcttgtgggtgaaaattcaccttttttttctttttattaaatgttttgctttta

SEQ ID NO: 521166 - DNA, 201 bp, Homo sapiens
tccccaatgttgttcttgtgatagtgaattctcacaagatctgatggtttaaaagtgtttggcagttcccaccttgctctctccctctcctgctcgcataygaggacggtccttgctttctatttgccttccgtcatgattgtaagtttcctgaagcctccccagccatgcagaattgtgagttaattaaacctcttttgt

SEQ ID NO: 521167 - DNA, 201 bp, Homo sapiens
gcatctgaggggattaacctagcattacctgaggaaactgtaatggcatcccagccaatgctgagtctcctcaagtcgcacttccaccacatttctttgcytctagacctataactagatctctaaaggtgaggtacaaaatgtgactataaggagatacattgcactctgaaagaactacttgaattttctactttatac

SEQ ID NO: 521168 - DNA, 201 bp, Homo sapiens
ctccataattgcatgagccaattccatataataaatctctttacacacatacaacacacacacacacacacacacacacacacacacacacacacacacaycctattggtctctttctctggagaaccccatctaatacagtatctgttttcttttttttaatttttttttgagatggagttttactctttttgcccaggc

SEQ ID NO: 521169 - DNA, 201 bp, Homo sapiens
tgtttttcttaatcagcctggctagatattatcaattttattggtattctcaaggagccaactttctatttcattggtttctcttttttgctcctgttctytatttcactgatttctggttttatcactcttctgcttactctgtgcctactgttcttttttgaggttgtaaaggaggaagctgaggtcattgatttgaga

SEQ ID NO: 521170 - DNA, 201 bp, Homo sapiens
acagtttccccgcaacacgcccggctaggactgggaaagtttaagtgctgtctaagcttttataataagggatagaactggggtcatgtcttctaatgccrtatctagtgttctttctaccatataatccttgtaaataatctgagaagtacaaaatgttattagtaattatattttataaacacatttcagtttatcttg

SEQ ID NO: 521171 - DNA, 201 bp, Homo sapiens
atttatttgttatttattatttatttatttttttgagacagagtttcactctgtcacccaggctggagtgaaagggcgtgatctcggcttactgcaacctscagctcccgagttcgagtgattctcctgcctcagcctcccaagtagctgggactacaggcgtgtgttaccacacccagctaatttttgtatttttagtag

SEQ ID NO: 521172 - DNA, 201 bp, Homo sapiens
aattgaatataggaaactagagctaagaagagagaaacttgagggaaatatggatttgaaagttaccagtatgttgggaccacagcagagaatatgaagaytatatagcaaaatagaggtcaaggaagtaggaggagaattaagacaagtgaatgagtttcaagaaagggtatatagtctaaaagtagtctgagaacaaga

SEQ ID NO: 521173 - DNA, 201 bp, Homo sapiens
atctgtgtttatgtacttttcaacagttaatctgtaccagtgtggccatactgattgtattgccatagttacccttttttttttttttttttttgagacartgtctcactttgttgcccaggttgccaggttggagtgcagtggcacaatcttgactcactgcgacctctgccttccgggttcaagcaattctcctgcctc

SEQ ID NO: 521174 - DNA, 201 bp, Homo sapiens; identical to SEQ ID NO: 299931

SEQ ID NO: 521175 - DNA, 201 bp, Homo sapiens
ttgaacctgggaggcagaggctgcagtgagctgagattgtgccattgcactctagcctgggcaacaagagtgaaactccatctcaaaaaaaaaaaaaaaaagtttatgctgaggcatggtggcttatgcttgtaatctcagtgctttgggaggctgaagtgggaggattgcttgaggccaggtgtttgagatcagcctggg

SEQ ID NO: 521176 - DNA, 201 bp, Homo sapiens
ttcctccatctacctcatccatataatttttatttaacatttttacctagctcagatgtgaacttccccaagaaacttccctgaatttttttccagtggarcaatgtactcatttcttgttcttaaaggccccttttcacaacaactatgatgtagttgcaataatatatccacattgcctattttttgtttatttttatt

SEQ ID NO: 521177 - DNA, 201 bp, Homo sapiens
ccaggtgtggtgggcatgcctataatgccagctgcttgggaggctgaggcaggaggattgcttgaacctgggaggcagaggctgcagtgagctgagattgygccattgcactctagcctgggcaacaagagtgaaactccatctcaaaaaaaaaaaaaaaaagtttatgctgaggcatggtggcttatgcttgtaatctca

SEQ ID NO: 521178 - DNA, 201 bp, Homo sapiens
agagtagattttttttttgttcctgttttacagatagaaccaaggcccaaataggcgaacaaaggttcaaattatgttagcagctggggataataatctgygctctcaatgaacttaaggttcagtagagaagacagacttaaaaatcaacaaatacacatttaagaaataactgtatttgaggtatttataatttttgag

SEQ ID NO: 521179 - DNA, 201 bp, Homo sapiens
tggctatatgtttgttttgttttttaatcttttatttcacttatgttgttccctctgctaagaatttaattcctcttcctccatctacctcatccatatartttttatttaacatttttacctagctcagatgtgaacttccccaagaaacttccctgaatttttttccagtggagcaatgtactcatttcttgttcttaa

SEQ ID NO: 521180 - DNA, 201 bp, Homo sapiens
ttctttattccagtgtccatgtatgaattccagggaaggatgctgactgatcccgctttgttcagtttctcacacgttagagtaatcactatttctggggrtagatacactataattgactaatccttttgctgtgagacacagaatactatgatagctaggccttccagaatcacatggaatgggggataagtcctccaa

SEQ ID NO: 521181 - DNA, 201 bp, Homo sapiens
taatagaaacgtttcatacttatgctgtccgatgtggtaactagtagccgtatgtggcttttgaacatttgaaaatgttgctagtgtgactgaggaacagaatttaaattgtatttaattttgatttagttaaatactcacatatgctgctttattgaacaatgcaggtatagagctgagaacggtttttgcacttttgaa

SEQ ID NO: 521182 - DNA, 201 bp, Homo sapiens
ctcctgttaaagtgagggcattagttgggaaggaatgggagactaccagttggaataggaatgtgtagggagacactgatgaacctggggacatttaggcyctaaattctgatgagttgtctttgccagtagaagagaccacttcaccgcatctgaggggattaacctagcattacctgaggaaactgtaatggcatccca

SEQ ID NO: 521183 - DNA, 201 bp, Homo sapiens
ataatagaaacgtttcatacttatgctgtccgatgtggtaactagtagccgtatgtggcttttgaacatttgaaaatgttgctagtgtgactgaggaacagaatttaaattgtatttaattttgatttagttaaatactcacatatgctgctttattgaacaatgcaggtatagagctgagaacggtttttgcacttttga

SEQ ID NO: 521184 - DNA, 201 bp, Homo sapiens
ggggctgtaagaagggcagggtttcttaacctgggatccatggatccctgggctgcatgaatctgaaaacttgagttcagaagcctcaacttagatgggamaaaagcctctttatggtcactaacttctactcgaaattgagccttttcttccaggtgaatgcaggcaaacaagcacaccagggttagcaggaactgtgtt

SEQ ID NO: 521185 - DNA, 201 bp, Homo sapiens
gtcatgtttattttttattattgtatctaacatattccattaaatctcataagagtaaggtctaataagagatacaaactactataattcacttagcaagrataatcattctttttatagaaataactaagaaaagttcttatttaaatgttgaaatttttatacaatatttaagccacttacctagcatgtgtttaagaa

SEQ ID NO: 521186 - DNA, 201 bp, Homo sapiens
ccggcttcaagtgattcttgtgcctcagcctccctagtagctgggactacaggcatgccaccatgccatgctaactttggtatttttagtacagatggggwtttgccatgttggccaggctggtctcaaactcctaacctcaagcgatccacctgcctaggccttccaaaatgttgggattataggtgtgaaccatcggac

SEQ ID NO: 521187 - DNA, 201 bp, Homo sapiens
agagtgcccagacatttggtcaaacattgttctggatatgtctgtgagggtgtttctggatgagattagaattggtaaactgagtaaagcagattgccctmcctaatgtgggtgggtcccactcaataaatgcaagcctgaatagaacaaaaagccttccaatgagtaagaggaaactcctccttcctggctgccttcagt

SEQ ID NO: 521188 - DNA, 201 bp, Homo sapiens
tgattcccatcccatcgtcatctttgcattgctgccttcttttttaatcattcagttctcaactctactgtcaaattcatagggaagtctttcttaatcarcctaactaaagcaaccaccctggtccttctctgtatattccgtttttttgtttgtttgttttttgttttgagatggagtctcactctgttgaccaggctg

SEQ ID NO: 521189 - DNA, 201 bp, Homo sapiens
actttttttgagacaagatctcactctgtctccacactggaatacagtggtgcaagtatggttcactgcagccttgacctcctgggctcaagcaatcctcycatctcagcctcctgactaactgggactaaaggcctgtgccaccctgtccagttaatttttagttttttgtagactcggggtctcactatgttgtccatg

SEQ ID NO: 521190 - DNA, 201 bp, Homo sapiens
tataatgtattatatattatatagtatatatagtatatataatgtattatatatagtatatataatgtattatatagtatatatactatataatgtattayatattatgtatagtatatgtaatgtattatatattatatagtatatgtaatgtattatatgtattatatagtatatattatatatgatgtattatttagt

SEQ ID NO: 521191 - DNA, 201 bp, Homo sapiens
gaaaatattttcctgaaattttctactgagtcctgtagtaaataatttcaggggtacattatgtaatgtattttgatttcctgtatgcttttcttttccayttttttctgtttttttttgttgttgtttttgttgttgttgttcatagatactttacattctttttctccatggtaatcctcaaagatgggaagatttgtc

SEQ ID NO: 521192 - DNA, 201 bp, Homo sapiens
atatataaagtattatatataatgtattatatattatatagtatatatagtatatataatgtattatatattatatagtatatatagtatatataatgtaktatatatagtatatataatgtattatatagtatatatactatataatgtattacatattatgtatagtatatgtaatgtattatatattatatagtatat

SEQ ID NO: 521193 - DNA, 201 bp, Homo sapiens
tggtagcatataaattcagagttgggaatgatagtgatgccaaacaatcacaaattgtccacctaagtgcctgaaatagtgacacctttgctttctggtgkttccatgtacatagacttctatgtgcaaaattatttaaagtgttgtataaaattacctcaggctatgtgtataaggtgtacatgaaacataaatgaattt

SEQ ID NO: 521194 - DNA, 201 bp, Homo sapiens
cttttttctgtttttttttgttgttgtttttgttgttgttgttcatagatactttacattctttttctccatggtaatcctcaaagatgggaagatttgtycagactacgtaattatcaacggataggatgtattagtttcctaggctgctctaaaaactagtacctactccatggtttaaaacaacagaaagtttttgtc

SEQ ID NO: 521195 - DNA, 201 bp, Homo sapiens
aagtgttaaaaaatgattgcttattggtagcatataaattcagagttgggaatgatagtgatgccaaacaatcacaaattgtccacctaagtgcctgaaayagtgacacctttgctttctggtggttccatgtacatagacttctatgtgcaaaattatttaaagtgttgtataaaattacctcaggctatgtgtataagg

SEQ ID NO: 521196 - DNA, 201 bp, Homo sapiens
ttttctgtttttttttgttgttgtttttgttgttgttgttcatagatactttacattctttttctccatggtaatcctcaaagatgggaagatttgtccasactacgtaattatcaacggataggatgtattagtttcctaggctgctctaaaaactagtacctactccatggtttaaaacaacagaaagtttttgtctta

SEQ ID NO: 521197 - DNA, 201 bp, Homo sapiens
agcggaatgcaaaaaataactaagatcagagcagaactgaaggaaatagagacacaaaaatcccttcaaaaaatcaaaatatatctaaaaactttttttgmgacaagatctcactctgtctccacactggaatacagtggtgcaagtatggttcactgcagccttgacctcctgggctcaagcaatcctctcatctcagcc

SEQ ID NO: 521198 - DNA, 201 bp, Homo sapiens
ggcttgttcaaactgctcgaaactctcaattggatccagacagtttacgaatatatttaagtaacctcaagaagaagtacaaagaagattttcccaggacygaacaagttccagaaaagactgaagaataatcacaattctaatgtaataatatatcttaattcaaggaacctagaatttatttttctccttagagataag

SEQ ID NO: 521199 - DNA, 201 bp, Homo sapiens
caatttacaccttcttatattgtctatttctttaaaggtgtctgtagttactattttcataaacgtgtctttttttttttcttttttttttgagattgagyctcactctcttgcccaggctgcagtgcagtggcgcgatcttggctcactgcaagctctgcctcctgggttcgcaccattctcctgcctcagcctcctgag

SEQ ID NO: 521200 - DNA, 201 bp, Homo sapiens
gttgtgatagtgattagagtgtgtccattataatttagaagaatttgggtggggatttgggataatatagtaccttaatgttattattccaaattgaccartgtgaaaatcactaagatatagacaatacatacacactacaaaatctttagacacaaatatattaatctttaaaaaccattctattttttttcttaagtt

SEQ ID NO: 521201 - DNA, 201 bp, Homo sapiens
gggaagatacctaaaggtttatgcccaagagatagatatagtgacctggagctacattgtctgatagaatattctgtgataatagaaacgtttcatacttatgctgtccgatgtggtaactagtagccgtatgtggcttttgaacatttgaaaatgttgctagtgtgactgaggaacagaatttaaattgtatttaatttt

SEQ ID NO: 521202 - DNA, 201 bp, Homo sapiens
gccaaagcaattgggatcggtttctaatctttacagatttatccctcatcatttaatatttaccctgctttctaacaaaactgagctacttgcaattcctytaaagcaacatgaatgttcacattgtcagtctaatccctctcttcatcagatgcttggtcacccacttatttatcagtaatgataacattcactaattta

SEQ ID NO: 521203 - DNA, 201 bp, Homo sapiens
actggaccaaacatgagtggaaaatccacatatttaaaacagattgctctttgtcagattatggcccagattggtaagttatggctttatttataatgacsagttttacactcttttcagaatgctttgtgcctaatttttttagggccatgtgcctaattaacccaagaacagtttggagcagattctgttacctaaaag

SEQ ID NO: 521204 - DNA, 201 bp, Homo sapiens
ctatctctactaaaagtacaaaaattatctgggtgtggtggcacgtgactgtggtcccagctactcaggaggttgaggtgggaggatggcgagtccgggargtcgaggctgccgtgagctgagattgcgccactgcatttcagcctgggtgacacagtgagaccctgactcaaaacaaacaaacaaaaaagatgcatgtcc

SEQ ID NO: 521205 - DNA, 201 bp, Homo sapiens
ttgaatgttacctcctaacacaggatttatcggaatttaaagtcccttaagtgtcagacttgaacttgaaattaatacttgaaattatttattttcattcrtttttatgatttagaggttatttacctagttttcaaaaatatgaaatacctggtgtaccttttccttttgagtttaagcaatgctatgcaaatatttata

SEQ ID NO: 521206 - DNA, 201 bp, Homo sapiens
attaagagatttagtcttgcttcattttagtttgagaaggatcattctgaaactccatatctataaataatgaatttttgaaaatacttaaaatttttttyctaacctcacttttatgatgaatgttttcaagtttatgcattttagataaaggtatggaacattttggttttcacatatgctttcaccctcttcctcctc

SEQ ID NO: 521207 - DNA, 201 bp, Homo sapiens
cattgcggctaggctgatatataaaaatatatgggatatggaaagagtaagaatgttcaagaggaaaacccattgttctattaaatatttatggtgtccayccaaatttgggtttttatcttaacaggtcaatgctgctgaatcaaagataacaaatttaatatacttaaaacataccttggaacttgtggatcctttaaa

SEQ ID NO: 521208 - DNA, 201 bp, Homo sapiens
aaatgaatgaaagatgccaagaatctttgagagaaatctatcacatgacttatatgtaagagcatttgaagtatttgaatattgaattaaattggtttaawttgagaaactgttacaattgtattagtttaatttttatctaattacagacaattgtagaattatgcatgttagcaaaggaagtctgtctttgtgattaga

SEQ ID NO: 521209 - DNA, 201 bp, Homo sapiens
ttaaaaaatttggctttatcctttgaagtgatctacctcttacatttcacaaatattatttagaactttctttgtgataccatatctcaaagagtaaaatkattaacctaaatacccatatttctgttgtttaaaatcttacatttcatagtagtgtgcatttatcttgacatttgttttttaatctccaagcagatttct

SEQ ID NO: 521210 - DNA, 201 bp, Homo sapiens
ctgggggtgctaccgtgctgttagcctgaacacattttttcactatattaatggtatgtcaggttttttttttactgttaagtacttatgggtaaataagdgttaaaaaatgattgcttattggtagcatataaattcagagttgggaatgatagtgatgccaaacaatcacaaattgtccacctaagtgcctgaaatagt

SEQ ID NO: 521211 - DNA, 201 bp, Homo sapiens
gagcttgagtacgattagagattgagttgaggttcagatataggacaagggctgcgacaggggtcagagatggagtgaggatcactgatgtccatcatgcrtgttacttggtaataagatgtagtgtttttaacattttaagacctatcagagtagtcatcccagatgaactaggtcaaaatatcctgctttttaaaaatg

SEQ ID NO: 521212 - DNA, 201 bp, Homo sapiens
gttgttcagtttccatgtagttgtgtggttttgagtgagtctcttaatcctgacttctaatttattgcactgtggtctgagaggcagtttgttgtgatttytattcttatacatttgctgaggagtgttttacttccaattatgtggttgattttagaattagtgtgatatggtgctgagaagaatgtatattctgtttat

SEQ ID NO: 521213 - DNA, 201 bp, Homo sapiens
aggaaattagtgtttctgattttatagaattacatctacatatttttgggacttcttgagttttgcaagccaaatttctgaatgttctgtatcttctcctrttcctacccacccacctaactaatgtactaatctaagagtgatttagatgcttttgcagaaataccaaactcagtgttttccacagttctgggagcttgg

SEQ ID NO: 521214 - DNA, 201 bp, Homo sapiens
ttagcccctcgaagtggtgggattacaggtgtgagccatggcgccaggccaattgacatttttaacatcaataatgaggccccagctgttcattaatcaayggatgatgaaatagacaaaatggttctgattcaaggtgatcatgacagtaatgacgatgaagatgatgttgtaacactgcagaaaaaacgcctacagata

SEQ ID NO: 521215 - DNA, 201 bp, Homo sapiens
tctaattgtattctatggaacaattacttgagttttggttaacagaatctttaacctattcatcaaaattctaattgtacatttcacattataagtagaakaaatagggtaacaacacattgattatttgtgttaaaggacaattagaatagcatgaaaacttgaaatccaagcacaattttaatatttccttttaaagcc

SEQ ID NO: 521216 - DNA, 201 bp, Homo sapiens
ctggagtgcagtggtgcaatctcagctcactgcaacgtttgcctcccaggctcaagccatcctcccacctcagcctcctgagtagctgggaccacaggcaygcaccaccatgcccagctaattgtttgtctttttgatagagacggggtttcgccatgttggccacactggtatcgaactcctgagctcaagcaatttgtc

SEQ ID NO: 521217 - DNA, 201 bp, Homo sapiens
catatcaaatttaaaaaaggagataatggccaggctaaatatgctttctcttcttcttttctgtttatttagttagtgaccccctcatagttttcattaarcaaaataaaatccctatttttactatataagaattgagaaattgctctatttatgaatatacaaagcacttttttggtctaatgtatatctaacctaaat

SEQ ID NO: 521218 - DNA, 201 bp, Homo sapiens
aattgaagggaactgtcaatattcaacaggctggttgcagaaatttaagaagaaaataacattaaatttttaaagatttatagtgattgagcatctgctgmtcatgaagcattggagaaattcattgatgagtttgccaaggtcattgctgatgaaaatctgatgccagaacaaatcgataatgctgattaaacatcattg

SEQ ID NO: 521219 - DNA, 201 bp, Homo sapiens
tgcagtcaaaatgcaggtagtcaacacagtttattcagcatcctaaagggaaaaaagaccctcccagctatcttcatctgtaatatatctttcctgtgcaytcccagattcttctatgcaaacattcccacaaagggtaacacaatgacacagctacaggtcagatgtgccaatggcaagtttccatgatgctccacatag

SEQ ID NO: 521220 - DNA, 201 bp, Homo sapiens
tactgttaagtacttatgggtaaataagtgttaaaaaatgattgcttattggtagcatataaattcagagttgggaatgatagtgatgccaaacaatcacmaattgtccacctaagtgcctgaaatagtgacacctttgctttctggtggttccatgtacatagacttctatgtgcaaaattatttaaagtgttgtataaa

SEQ ID NO: 521221 - DNA, 201 bp, Homo sapiens
cggaaatgcctggatgtccaggcagaagtcttcttcagggacgggaccctcatggagagcctctgttaggacagtgcagaaggaaaatgggcaaaagcccycacacagagtccccacttgggcattgcctagtggatctgtgagaagagggccactgtcctccagactccagaatggtagatccaccgacagattgcacca

SEQ ID NO: 521222 - DNA, 201 bp, Homo sapiens
caggcctcaagccttggcagcctccatgtggtgttgagcctgcaggtgcacagaagtcaagaatagtttgggagcctccacctagatttcagaggatgtayggaaatgcctggatgtccaggcagaagtcttcttcagggacgggaccctcatggagagcctctgttaggacagtgcagaaggaaaatgggcaaaagcccc

SEQ ID NO: 521223 - DNA, 201 bp, Homo sapiens
agctatggctaaaagtggccaacacacagctcgggccatggcttcagagggtgcaggcctcaagccttggcagcctccatgtggtgttgagcctgcaggtkcacagaagtcaagaatagtttgggagcctccacctagatttcagaggatgtacggaaatgcctggatgtccaggcagaagtcttcttcagggacgggacc

SEQ ID NO: 521224 - DNA, 201 bp, Homo sapiens
ttttgttggaaaaaaatttcaaactcggaaaattgcaagaataacatggcgaatttcccatattttttttctttgtacatactttacatacacatacacaytgttagccttattatgcttactgaaccatttaagaataaattgcagcacctaagtactaaggtactaagtacttaggagactaaagtctcccaacaaaaa

SEQ ID NO: 521225 - DNA, 201 bp, Homo sapiens
gccactcagctgcaggtctgttggagtttgctggaagtccactccagaccctgtttgcctggatatcaccagcagaggctgcagaacagcaaatattgctkcctgatccttcctctggaagcttcgtcccagaggggcaaccgcctgtatgcggtgtctgttggcccctactgggaggtgtctccaagtcaggctacacag

SEQ ID NO: 521226 - DNA, 201 bp, Homo sapiens
tttatgttagctgtcctcattattgttgtcatgattcccatcccatcgtcatctttgcattgctgccttcttttttaatcattcagttctcaactctactrtcaaattcatagggaagtctttcttaatcaacctaactaaagcaaccaccctggtccttctctgtatattccgtttttttgtttgtttgttttttgtttt

SEQ ID NO: 521227 - DNA, 201 bp, Homo sapiens
gagatggaaagacagagagctgtgtaccatctagccactaggcttgttcaaactgctcgaaactctcaattggatccagacagtttacgaatatatttaartaacctcaagaagaagtacaaagaagattttcccaggactgaacaagttccagaaaagactgaagaataatcacaattctaatgtaataatatatcttaa

SEQ ID NO: 521228 - DNA, 201 bp, Homo sapiens
ataaacgtgtctttttttttttcttttttttttgagattgagtctcactctcttgcccaggctgcagtgcagtggcgcgatcttggctcactgcaagctcygcctcctgggttcgcaccattctcctgcctcagcctcctgagtagctgggactacaggcgcccaccaccacgcccagctaataaatgtgtcttatagtct

SEQ ID NO: 521229 - DNA, 201 bp, Homo sapiens
gcctcagcctcccaaagtgctgggattacagccgtgagctactgctctcagcctaaacttctttgaattatttgatggagaattttatttaagaggtaggktcttgctattttgtccaggctggtctcaaactcctgggctcaaatgattgtcctgcctcagcctccaagtagctgaaactatgggcacaaactgccatgc

SEQ ID NO: 521230 - DNA, 201 bp, Homo sapiens
aaccattaagactgtaagctccttgagttctgttatcatgtgaggtttacatttttgtatcccccatagatatataaacgtaagcttagaggcctggaacrtagatgatagtagatattcaataactttcttaaaataatagactaattggtaattgatctgtgtaccaaatagatagatgggtgaatatatggtaatctt

SEQ ID NO: 521231 - DNA, 201 bp, Homo sapiens
ttaggcttgcattgcggctaggctgatatataaaaatatatgggatatggaaagagtaagaatgttcaagaggaaaacccattgttctattaaatatttakggtgtccatccaaatttgggtttttatcttaacaggtcaatgctgctgaatcaaagataacaaatttaatatacttaaaacataccttggaacttgtgga

SEQ ID NO: 521232 - DNA, 201 bp, Homo sapiens
ggctgttttatctatcaggattaatttcaatactccatcctattcaagcttttcttggcctgagctggaagtgagtttcccttcctctgagtattttatgkctgttttatgggacttttcttaattattataatcagttgcttacaacaagccttttgtttttttaaccattaagactgtaagctccttgagttctgttat

SEQ ID NO: 521233 - DNA, 201 bp, Homo sapiens
caaaattttgttttgaatatttctgtttttcttccatctctcttccatcttatctcagaggaagagactgactttcagacagaaggttaactattctaccwtttaaaaaaatctccactaagttattattacttctcagttccctttattctcttttgcatctttaatattttcgtcacaggcttttcctttttctaagag

SEQ ID NO: 521234 - DNA, 201 bp, Homo sapiens
catgattttcctttgttttctacacctcccttacataatatcactcggtttcacgtaatctacatttctgcaatttcaatcttgtaaattaaattacttgycattactacattgaattacttgccatttcatcatattgacctgattgtgtaccatgctttcaaatgtacctgctctaactgtttcctctgtggaataccc

SEQ ID NO: 521235 - DNA, 201 bp, Homo sapiens
tgttgttgttgttcatagatactttacattctttttctccatggtaatcctcaaagatgggaagatttgtccagactacgtaattatcaacggataggatrtattagtttcctaggctgctctaaaaactagtacctactccatggtttaaaacaacagaaagtttttgtcttacagttctggaagctagaaacttaaaat

SEQ ID NO: 521236 - DNA, 201 bp, Homo sapiens
tccctccctttgcctcccaccccctccccccgctgacaggccatggtatgtgatgagaattgtatttttttctttttatttattatttagcttcttttacrataactcttttgaaacagtttcactcttcctgtactctcaatcacttcactttctacagataatctgcctcctactttttaacaaatttgaggtcatctt

SEQ ID NO: 521237 - DNA, 201 bp, Homo sapiens
tattttcattctcctacctgtttgattatttcttctgtcccttcttcactagtactttttcttttctttttttttcttttttttgaaacaaggtctcactrtgttgcccagcctggtttttaacaaattcctgggctcaagcattccacccgcctcttcctcccaaagtgctgggattacaggcatgaaccaccgcaccca

SEQ ID NO: 521238 - DNA, 201 bp, Homo sapiens
actagtcgtattgtattaagacctaccttaataacctcacattagcttgattacatttgcaaagatgcaatttccaaataaggtcacactaacagataccyggagttaagacttcacagtatcatttgggggtcacaattcaacccataacatgggataagaaaattgcccttgcctcagggtctgtttctggagaactca

SEQ ID NO: 521239 - DNA, 201 bp, Homo sapiens
caatgtgtaatgatcaaatcagggtagttgggatagccatcaccccaaacatttatctttacttcatgttgaaaacattgcaattcttatcttctagctaytttgaactatacgacacatattaactatagtcaccctactgaactatcgtacactagactatttcttcaatctaactgtatttttgtacgcattaaccaa

SEQ ID NO: 521240 - DNA, 201 bp, Homo sapiens
tgttctttttggcagcatggatgtagctggaggccattattctaagtgaatgaacgcagaaacagaaaaccaaatactgcatgttcttacttatatgtggragctaaacattgggtacacatggggatataaagatgggaacaatagctattggggactccaaaaggggagaggaatggggcaagggttcaaaactattgg

SEQ ID NO: 521241 - DNA, 201 bp, Homo sapiens
atatgtactactctttgtccagtatttggttgctttcagcttggtctgtcttccatacctccacttgcctgactaccctagcttgtgttctggtagtctaratgaaagtggtgcattcaaatctagaaggcatttactacctgagtaggttttcttcagtccaattccaaatacctttaattagcgtaattccttcaaaat

SEQ ID NO: 521242 - DNA, 201 bp, Homo sapiens
ttgtcaaggtcactggagcagatcttgttggttctctgtacagattgtcttggatcccttttacctttcggagttcaccttttgctggtctgcgtgcctartggcccacacctggactctttttctatgcctaccttcaggctgttagagcgctttgttcttaaacacagagtacccaaaatgcctggtagcccttaaatg

SEQ ID NO: 521243 - DNA, 201 bp, Homo sapiens
ggtagagagttctatagatgtctattaggtccacttggttcagagctgggttcaagtcttgaatatccttgttaattttctgtctcattattgtcagattygccaaggttgaaacaaaaggaaaaaatgttaagggaagccagagagaaaggtcaggttatttacaaagggaagcccatgagactaacagcggatctctgt

SEQ ID NO: 521244 - DNA, 201 bp, Homo sapiens
cagcctgggcagcatagtgagaacttatctctgctcaaaaaaaaaaaaaaaaaaaattagccagatgtaatggtgtgtgcctgtagtcccagctactcagraggatgaagcaagcagattgcttgtaccctggagttcaaatttgtagtgagctatgatcatgccgctgtattccagcctggggaactagagtgagaccct

SEQ ID NO: 521245 - DNA, 201 bp, Homo sapiens
tagtcccagctactcaggaggatgaagcaagcagattgcttgtaccctggagttcaaatttgtagtgagctatgatcatgccgctgtattccagcctgggsaactagagtgagaccctgtctcaaaaagattataattttctctttgttctaaataaattcaattcactttatgtaaatagtatatcatagataggtagaa

SEQ ID NO: 521246 - DNA, 201 bp, Homo sapiens
aaggcagcaggaaagagaaggaatgcaggaggaactatcacacacttataaaacgatcagatctgatgagaactcactcaccatcatgagaacagcatgasggaaactgcccacattattcaattacctccatctggtctctccctggaaaagtgaggattatgggaattctagggattataatttatgatgagatttggg

SEQ ID NO: 521247 - DNA, 201 bp, Homo sapiens
aagggtggaaggaacataaagttggattaggctgaagtttttgatatgggcttactaagccaggtgtgcatttaatgttgcaactcaaagagttagaaagygatctaacagtttgattgactggctgaaaaacagaccaaaagttggcccaccatgaatgagttgccttggtttaatgcagggattcaaagcttagggagg

SEQ ID NO: 521248 - DNA, 201 bp, Homo sapiens
aatgacagtttattagtctgttttcatactgctataaagaactaccaaagactgggaaattcataaaggaaacagatttaattgactcacagttcagtatrgctgggtaggcctcaggaaatgtacaatcatggcagaaggagaaggggaaacaaggcacctttgttacaaggcagcaggaaagagaaggaatgcaggagg

SEQ ID NO: 521249 - DNA, 201 bp, Homo sapiens
tagctgggcgtggtggcgggcgcctgtagtcccagctactcaggaagctgaggcaggagaatggcgtgaaccttggaggcggagcttacagtgagccgagrtcgcgccactgtactccatactgggagagagagcgagactctgtttcaaaaaaaaaaaaaaaaaaagaatcattgctgtagattataggattatttaatt

SEQ ID NO: 521250 - DNA, 201 bp, Homo sapiens
aactttggtatgtcaaaagcaaagtaaaaggcaaaggtaggaaaaatttataacaaatgacagtttattagtctgttttcatactgctataaagaactacsaaagactgggaaattcataaaggaaacagatttaattgactcacagttcagtatggctgggtaggcctcaggaaatgtacaatcatggcagaaggagaag

SEQ ID NO: 521251 - DNA, 201 bp, Homo sapiens
ctttctctggctgcccttaacattttttccttcatttcaaccttggtgaatctgccaattatgtgtcttggggttgctcttcttgaggagtatctttgtgrtgttctctgtatttcttgaatttgaatgttggcctgtcttgctaggttggggaagttctcctggataatatcctgaagagtgttttctaacttggggcca

SEQ ID NO: 521252 - DNA, 201 bp, Homo sapiens
tttatcccatttacatttaaggttaatattgttatatctgaatttgatcctgtcatcatgatgctagctggtcatttctcccattaatttatgcagttttyccatagcattgatggtctttacaatttggcatgtgtttgcagtggttggtactggttattcctatccatgtttagtgcttcctgcaggagctcttgtaag

SEQ ID NO: 521253 - DNA, 201 bp, Homo sapiens
ttctaataaatattaacatggtttggctgtgtctccacccaaatctcaccttaaattgtaagaatccccacatttcaagggcggggactggtggagataaytgaatcatgggggtggtttctcccatactgttcttttggtagtgaataagtctcacaaggtctgatggttttataaagcagagttcccctgcacatgttc

SEQ ID NO: 521254 - DNA, 201 bp, Homo sapiens
tgtcatctgcaaacagagacaatttgacttcctctcttcctattcaaataccctttatttctttctcttgcctgattgccctggccagaacttccaatacyatgttgaataggagtggtgagaaagggcatccttgtcttgtgccagttttcaaagggaatgcttccagtttttgcccattcagtatgatattggctgtag

SEQ ID NO: 521255 - DNA, 201 bp, Homo sapiens
gctcaggattggactgcatctccttttgctattcagtttaaattgaacccaagagattgaaatagaaatgaaaattggatacaaagagatgaactcttctyatttccagacttttgggaaaccggtgtgctaggttaattatggtgggtcaataattttgtatcattctttaggcttgcattgcggctaggctgatatata

SEQ ID NO: 521256 - DNA, 201 bp, Homo sapiens
attcttcttatccatgagcatggaatatttttccatttgtttgtgtcctgtcttatttctttgagcagtggtttgtagctctccttgaagaggtccttcayatcccttgtaagttggattcctaggtattttattctcttagtagcaatagtgaatgggagttcactcatgatttggctctctgtttatctgttattggtg

SEQ ID NO: 521257 - DNA, 201 bp, Homo sapiens
attgctttattttggcaaactataattcctagtggaattatgaaaagttttacttgaacaaacaggaaccaatgagggaaatcagtgttgttctataactrtctgggaggtttggattcagccttttaaaatatcatctatctacaaatactctttgtgcctttttcagttaatcttagtctcttggtgctgctcaggatt

SEQ ID NO: 521258 - DNA, 201 bp, Homo sapiens
gtcataattgtagtcctaaaactctacttcatctgtcagtattggtaaattagtccaggcacaggatcattcctcattcctccaggtttggtaaaactgcycaattctagagtgcaatttaatttatataaaatttattaataaaatttggaatgttgatattgctttattttggcaaactataattcctagtggaattat

SEQ ID NO: 521259 - DNA, 201 bp, Homo sapiens
cgacaggccccggtgtgtggtgttcccctccctgtgtccgtgtgttctcgttgttcaactcccacttatgagtgagaacatgcggtgtttggttttctaawcttgtgatagtttgctgagaataatggtttccagcttcatccatgtccctgcaaagcacatgaactcatccttttttatggctgcacagtattccatggt

SEQ ID NO: 521260 - DNA, 201 bp, Homo sapiens
atttttaatcttccagttagtttcagagatccattgtaagagaacatgacataacccatttggggctaacaacatttattatggcattttttctaaattgrtgcatatggtcacagaacagtccaggtattgtgcagtggggctatagaccacggtacctcaaaaagaaacatctggctaggcatggtggctcatgcctgt

SEQ ID NO: 521261 - DNA, 201 bp, Homo sapiens
tcagtttgactatcagattttagaaaagtcttctggtctaggtttaaggtaattcagtaagctaagaatctggaacctttttttctgttcagaaaaaaaaattataattagcgccataaggttttaaagggtcaatgttacttcccatccttttttctttctttctttctttttttatgtatattttaggttctgggttac

SEQ ID NO: 521262 - DNA, 201 bp, Homo sapiens
cttgttattatcttaatttttgattctggtgagcctgtcgggtgtctcatggttttggtatacatttccatgatgactgacaatgtcgagcatctttttayatgcttattggccatttgtatcttccttggagaaatatttattaatattatttgcccattttaaattgggttgtttgtatttttattactgagttgtgag

SEQ ID NO: 521263 - DNA, 201 bp, Homo sapiens
agaaataggcaataagaaaggagtaacaggcccaaggaaatcagttcaaacctcacaaggaaaacaacagtaagtcttaagaagaagaatcttctttgacyccatatcccacatcaggggcacagtggggaagaagtagggctctcaaggcctcaggcagcgtcagggcttagtccactcagcagctctcatggtttgcag

SEQ ID NO: 521264 - DNA, 201 bp, Homo sapiens
tacttagcagaccgggaaagggagtctccctttccccaggggagtttagagaagactctactcctccacctcttgtggagggcctgacattagtcaggctygtccacagttatccggaggcctaacagtctcactgtgatgctgtgcttcagtggtcacactcctagtctgccttcgtgttccatcctgtacacctggctc

SEQ ID NO: 521265 - DNA, 201 bp, Homo sapiens
agattactaaaaggcatagattttagtacaatctatacaaaagattactaaaaggcaaaagattactaaaaggcaaagattactaaaggcaataaaaaatraactgtcatgtttattttttattattgtatctaacatattccattaaatctcataagagtaaggtctaataagagatacaaactactataattcacttag

SEQ ID NO: 521266 - DNA, 201 bp, Homo sapiens
gccaccatacttagctaatttttatgtttttggtagacacgggatttcactatgttgcccaggcttggaagcacattcttaataaattactggcacataartccttgcctcagtgtctgtttctggagaacccaacctaacacagtcaacaacaggcatattgttaaatgtaatggacacgttagttctcttatttgaata

SEQ ID NO: 521267 - DNA, 201 bp, Homo sapiens
taaatttctcttgtttataagccactcagcttgtggtaattttttatagcagcttgaatggaataagagcatttgttaggtgttcctcaatcacctgaaasttaatgtacccaaattgtgcccttttttttttttttttttttgagacggagtcttgctgtcacctaccctggagtgcaatggtgcaatctcagctcacta

SEQ ID NO: 521268 - DNA, 201 bp, Homo sapiens
aattaattttacttcttaaaactcttttggtttggtctattataatcctcgcagcaaatcagctaacaagctaggagataaaaattaaacagtttagtttmtaaaataattattgctatactaactttatgatgaggaaataaatctattttaagtggacattaaaaatgaaaatcactatgcacaatatttgtataatta

SEQ ID NO: 521269 - DNA, 201 bp, Homo sapiens
gctcaaggctgatgtcatctcagcttagctaacccagagggaaaataatttctttattccagtgtccatgtatgaattccagggaaggatgctgactgatyccgctttgttcagtttctcacacgttagagtaatcactatttctgggggtagatacactataattgactaatccttttgctgtgagacacagaatactat

SEQ ID NO: 521270 - DNA, 201 bp, Homo sapiens
aatcccaactagaaacttccttttatcagttaacatattcacaaattccagaaattaggaagcagatctctttgggggtctgggggagggtggtggttacyatactcatctgcataaaatccttcaatcttttctctttagattctcttctcacaacttttagattaaaatgcaaacttttctatatagctgttttcctgt

SEQ ID NO: 521271 - DNA, 201 bp, Homo sapiens
ttaggattttattttcagttttgttctctttcccataatgtggcatacacgtctgtgcacaaacataataaacatatcttcttcatttaatataaaatctsaaaacattttaaaatggattgataatgttagcctccaaattattagttttattcctacatctctgccaagctacttagaaaattaaactaaaattttatg

SEQ ID NO: 521272 - DNA, 201 bp, Homo sapiens
atccttttgcttttaacttatttttgtctttatatttaaagaaggttttttgtaggtgacatatagttaagtcttaactttttgcatacaatcagagaatrccttacttttaattgaggtatttattacatttacacttaataagattattgatatgtttttatttaaatctgccatcgttttttttttcatttttctcat

SEQ ID NO: 521273 - DNA, 201 bp, Homo sapiens
tgtttggaattaaattagcagccctcataaaataagtttggaagtagcccttcctctttaattttctggtagagtttacatagaactggtattatttcttmcttacatatttggtagaatttacaaatgaagccattaaagcctggaatttttttggtaggaaggtttttaactataaattccacttattaaataggcata

SEQ ID NO: 521274 - DNA, 201 bp, Homo sapiens
gggtttcaccatgttggccaggctgatctcgaactcctgacctcaagtgatctgcccacctcggcctcccaaagtactgggattgcaggtgtgagccaccrtgcttggccaagtctttaaatattcttaacctttaagaatgaaacaacacattttctggatatttttccaatttaaatagtgcttatgggtatattctgc

SEQ ID NO: 521275 - DNA, 201 bp, Homo sapiens
ctaatttttgtatttttagtagagatggggtttcaccatgttggccaggctgatctcgaactcctgacctcaagtgatctgcccacctcggcctcccaaartactgggattgcaggtgtgagccaccatgcttggccaagtctttaaatattcttaacctttaagaatgaaacaacacattttctggatatttttccaatt

SEQ ID NO: 521276 - DNA, 201 bp, Homo sapiens
attattattatttttgagatggagtctcactctgtcaccaaggctggagtgcagtggtgcgattttggctcactgcaacctctgtctctcaggttcaagtrattctcttgcctcagcctcccaagtagctgggattacaggcatgcactaccatgcctggctaatttttgtatttttagtagagatggggtttcaccatgt

SEQ ID NO: 521277 - DNA, 201 bp, Homo sapiens
ctgggcgtggtggcgggcgcctgtagtcccagctactcaggaagctgaggcaggagaatggcgtgaaccttggaggcggagcttacagtgagccgagatcrcgccactgtactccatactgggagagagagcgagactctgtttcaaaaaaaaaaaaaaaaaaagaatcattgctgtagattataggattatttaattaca

SEQ ID NO: 521278 - DNA, 201 bp, Homo sapiens
aaaagtaatatttgtaggtagaactgttctattttattctttgaggataatattttacatagtcaatattttgaactgtaccataaagtttaaatactcayatttgtttgtttgtttcagttatatcaagatttcttgatacagagcagcttctttctgttttagtccaaattccaaagcaagacacggtatgtttttgta

SEQ ID NO: 521279 - DNA, 201 bp, Homo sapiens
tagaccttccgaatagcttagttcattcattctctctgaactcaggctgcaggtagggattggatggtgctgggtgaggctgggcaggacttctctatgtytccgtgaggctgcttagagcctcttggaagaagtggtgttttggtcacccgtcgctgtacaagccaaggcttggtggcttaaatcagccattttacattg

SEQ ID NO: 521280 - DNA, 201 bp, Homo sapiens
ttcccgagagtgtcccgagagacccaagcagatgctacgaggcttcctatgacccagcctcagaaattccagcgtgtcatttctaccgcactctttcagtmcctagggtgagcccagattcagggggaggcaaggagctccccttgctagaggatgaccacacctacaactggtaaggacttggagggatggagtgggctg

SEQ ID NO: 521281 - DNA, 201 bp, Homo sapiens
gggtggggccggccaccttgggaccctcgggcgtgtctccccgagtgggctgcggtcagaggagcgtgggccggggcctggcggtctcagagggccagggktggggggtgcgggtccgaccgtgggcgcccgacctggcgacaggagggggtgtccagcgaccccggggcgggagaactggcggctcccgaacgcgacctc

SEQ ID NO: 521282 - DNA, 201 bp, Homo sapiens
ccactgccccttattctcctggcacacttggctgattaaggcagtgttcaagctcaggtcgaggctgcagctggtatgggaacaccctcagtccccgaggkccctgccttcccaagcctcagtgaaacagagaaaaggaagccttaaagagcaggtggaagtgcaggagaagctataactcctttttttctctctcccata

SEQ ID NO: 521283 - DNA, 201 bp, Homo sapiens
cagtccccgaggtccctgccttcccaagcctcagtgaaacagagaaaaggaagccttaaagagcaggtggaagtgcaggagaagctataactccttttttyctctctcccatagattcaccacaacatggcaaatctttttataaggaaaatggtgaaccctctgctctatctcagtcgtcacacggtgaagcctcgagcc

SEQ ID NO: 521284 - DNA, 201 bp, Homo sapiens
ttgcacactcacctacacttgcagcaggcgggaaagggaaggaagccaccgtccactgccccttattctcctggcacacttggctgattaaggcagtgttsaagctcaggtcgaggctgcagctggtatgggaacaccctcagtccccgaggtccctgccttcccaagcctcagtgaaacagagaaaaggaagccttaaag

SEQ ID NO: 521285 - DNA, 201 bp, Homo sapiens
gggcccctgggtctgggaagagttggagggaggagctcatcagttgaaccgtccttgacctggtgtctgtttggaaagggatgcggcctaagtttaagctycctcccagccaagtgagcggctcctcaacatcgcagggctttgcacactcacctacacttgcagcaggcgggaaagggaaggaagccaccgtccactgcc

SEQ ID NO: 521286 - DNA, 201 bp, Homo sapiens
gccggccaccttgggaccctcgggcgtgtctccccgagtgggctgcggtcagaggagcgtgggccggggcctggcggtctcagagggccagggttgggggrtgcgggtccgaccgtgggcgcccgacctggcgacaggagggggtgtccagcgaccccggggcgggagaactggcggctcccgaacgcgacctcacagccc

SEQ ID NO: 521287 - DNA, 201 bp, Homo sapiens
acccacttccaagatggcaccggctctcctgtctggggtctcagtgctcctcaggctgtacgtagcacctcctcaggcagggcccacagcgtggcttgcaytgccccacagtgagcttcccgagagtgtcccgagagacccaagcagatgctacgaggcttcctatgacccagcctcagaaattccagcgtgtcatttcta

SEQ ID NO: 521288 - DNA, 201 bp, Homo sapiens
tccgtgaggctgcttagagcctcttggaagaagtggtgttttggtcacccgtcgctgtacaagccaaggcttggtggcttaaatcagccattttacattgytcacgattttgtgaggcatttgggatgggctcagctgagcagtttgtctgatctgtgtggcattaactgcaggacccacttccaagatggcaccggctct

SEQ ID NO: 521289 - DNA, 201 bp, Homo sapiens
accttccgaatagcttagttcattcattctctctgaactcaggctgcaggtagggattggatggtgctgggtgaggctgggcaggacttctctatgtctcygtgaggctgcttagagcctcttggaagaagtggtgttttggtcacccgtcgctgtacaagccaaggcttggtggcttaaatcagccattttacattgttc

SEQ ID NO: 521290 - DNA, 201 bp, Homo sapiens
ctcatcagttgaaccgtccttgacctggtgtctgtttggaaagggatgcggcctaagtttaagctccctcccagccaagtgagcggctcctcaacatcgcrgggctttgcacactcacctacacttgcagcaggcgggaaagggaaggaagccaccgtccactgccccttattctcctggcacacttggctgattaaggca

SEQ ID NO: 521291 - DNA, 201 bp, Homo sapiens
ttgtgaggcatttgggatgggctcagctgagcagtttgtctgatctgtgtggcattaactgcaggacccacttccaagatggcaccggctctcctgtctgrggtctcagtgctcctcaggctgtacgtagcacctcctcaggcagggcccacagcgtggcttgcactgccccacagtgagcttcccgagagtgtcccgaga

SEQ ID NO: 521292 - DNA, 201 bp, Homo sapiens
agccaccgtccactgccccttattctcctggcacacttggctgattaaggcagtgttcaagctcaggtcgaggctgcagctggtatgggaacaccctcagwccccgaggtccctgccttcccaagcctcagtgaaacagagaaaaggaagccttaaagagcaggtggaagtgcaggagaagctataactcctttttttctc

SEQ ID NO: 521293 - DNA, 201 bp, Homo sapiens
cattcagggtactgcagctctgtcacagggtgctgagatacctgctggaatgatctggttctgggcctcaggggcctgtctgcaacccaagtaagaaaaamtgggcccacacatgtcccagcacccagccctgagaagcagaaatctcttcttccccaccaggcatcccacagctcacctgggaagggcccagcttggcag

SEQ ID NO: 521294 - DNA, 201 bp, Homo sapiens
gtggccaggcgcagtggctcacgcctgtaatcccagcactttgggaggatgaggcgaacagatcacaaggtcaggagttcgagaccagcctggccaacatrgtgaaccctcgtctctactaaaaatacaaaaattagctgggcatggtggcgggcgcctgtagttccaaatactcgagagggtgaggcaggagaatcgatc

SEQ ID NO: 521295 - DNA, 201 bp, Homo sapiens
gggaaaggagcgctgactggaaccctcgatccagcagggtttcctgcctcggctgcaggagggtgggcagaactgggcccctcggcctggtgaggggcatsaggatgtccgtaagagtcaggctgcagcaggggcctgactgggggttcttgcagtccttctcagggtcagggctcccatttcctggctggacccatacat

SEQ ID NO: 521296 - DNA, 201 bp, Homo sapiens
cgcctgcagacggccctggaggagcacctaatcctcaaggagctggcagcccgtgggaaggacctgctattgagtgaggcccaagggcccttcagccacasagaggtaagtgggacttttcccaagcaagctccaaagcctcaccccaagggagagcctctgagtgggagtggcctgcagagtggggatggaggggtgtct

SEQ ID NO: 521297 - DNA, 201 bp, Homo sapiens
cagcctgcctgtggctggccaagaaggcattgttgaacctcatgagatcacagaggtagctgtgcaggccccgcccacttcctataaccctggttctggcygtccctgtgccaagcctccaagttccctgagagctaccggccaggggtcgggaggctatgggagctcagggcaggcacctcccatgctcccgcgggagcc

SEQ ID NO: 521298 - DNA, 201 bp, Homo sapiens
agaccagcctggccaacatggtgaaccctcgtctctactaaaaatacaaaaattagctgggcatggtggcgggcgcctgtagttccaaatactcgagaggstgaggcaggagaatcgatcgaatctgggaagcggaggttgcagtgagccgagatcgcgccactgcactccagcctgggcgacagaccgagactccatctc

SEQ ID NO: 521299 - DNA, 201 bp, Homo sapiens
ggagagccttcccatgacccccatgaagagatcagtgcaaacacaggtgtcagagcccttcatggagtcctggggtgaggagtccctgccggagctacccrcagagcagtccctgacggagtactctgacctcgaggaggctccctcggcgcacactctctatgtgggccatctgaacccccagttctcagtgccggtgct

SEQ ID NO: 521300 - DNA, 201 bp, Homo sapiens
aagttgggccagaaggtagggtaggggccaggtcaccaaggctatcatccaaggcaaggctgaactgctggctttattgggtgggacatgggacgttaggrtaggtcactccatgagacaggtgattttggtttcttttggtgtgaaaatgatggtgtttaaactgttgcagaactaaaaggctctgtggcttacatttca

SEQ ID NO: 521301 - DNA, 201 bp, Homo sapiens
cctctgccctccctctctctggccctgcccagtctctgccaatctgtgtacctcccaggagccgggacactccctgagtcctctgggagcccttaagccayactgagaacacagaccctgggagaagcagccagcagtgaggaatcctggaaccccttcccagggagagccttcccatgacccccatgaagagatcagtgc

SEQ ID NO: 521302 - DNA, 201 bp, Homo sapiens
ggctcccatttcctggctggacccatacattcattcttgactaccaccctaggagaaggaggaggaggaggaggacagtggcctgagccctggccccagtmcaggctctggtgtcccgctgcccacctggcctacacacacgctgcctgataggccccaggcccagcagctgcagagctgccagggccggcccagcggcgt

SEQ ID NO: 521303 - DNA, 201 bp, Homo sapiens
ccacagggacaccctggcctccctcccctggcgcctgcagacggccctggaggagcacctaatcctcaaggagctggcagcccgtgggaaggacctgctaytgagtgaggcccaagggcccttcagccacagagaggtaagtgggacttttcccaagcaagctccaaagcctcaccccaagggagagcctctgagtgggag

SEQ ID NO: 521304 - DNA, 201 bp, Homo sapiens
tgcctgtggctggccaagaaggcattgttgaacctcatgagatcacagaggtagctgtgcaggccccgcccacttcctataaccctggttctggccgtccmtgtgccaagcctccaagttccctgagagctaccggccaggggtcgggaggctatgggagctcagggcaggcacctcccatgctcccgcgggagccaccag

SEQ ID NO: 521305 - DNA, 201 bp, Homo sapiens
aggctgaggcgggcagatcacgaggtcaggagatcgagaccatggtgaaaccccgtctctactaaaaatacaaaaaaattagccgggcgtggtggcgggcscctgtaatcccagctactcgggaggctgaggcaggagaatggcttgaacccggaaggcggagcttgcagtgagccgagatcacgccactgcactccatcc

SEQ ID NO: 521306 - DNA, 201 bp, Homo sapiens
acatgagcaggcacccatgtggcttcaaccctgacagacccatctgtgtagccaagaaactgctctcagccctgtccccaaatgaccttactttcagaaasaatgtgtaaaaccctgcccagagctcccctagggctaagctataagggattgtccttctccctaaaatgctcatttggcccaggctgaggtctgtgactc

SEQ ID NO: 521307 - DNA, 201 bp, Homo sapiens
gaggtagctgtgcaggccccgcccacttcctataaccctggttctggccgtccctgtgccaagcctccaagttccctgagagctaccggccaggggtcggsaggctatgggagctcagggcaggcacctcccatgctcccgcgggagccaccaggacatgaaggtcataggcctctcctctcctcctcttcctgtttgacc

SEQ ID NO: 521308 - DNA, 201 bp, Homo sapiens
gcccacttcctataaccctggttctggccgtccctgtgccaagcctccaagttccctgagagctaccggccaggggtcgggaggctatgggagctcagggmaggcacctcccatgctcccgcgggagccaccaggacatgaaggtcataggcctctcctctcctcctcttcctgtttgacctgaatgcccccaggccaact

SEQ ID NO: 521309 - DNA, 201 bp, Homo sapiens
cctccctcccctggcgcctgcagacggccctggaggagcacctaatcctcaaggagctggcagcccgtgggaaggacctgctattgagtgaggcccaaggrcccttcagccacagagaggtaagtgggacttttcccaagcaagctccaaagcctcaccccaagggagagcctctgagtgggagtggcctgcagagtgggg

SEQ ID NO: 521310 - DNA, 201 bp, Homo sapiens
ttatcagctctagtatgtttctagtattgcattcgtttctccacttcgtaactttcatggtttttccagtggtcagatttgggcagaaagcactgattcargaacacagatttccaagtagagaggtgcagggtaaataaacctccatgtaagcccgcggtgagcgcagactgtgagtgacgaacacggtgtcagtgtaag

SEQ ID NO: 521311 - DNA, 201 bp, Homo sapiens
acgcactgtgcctggaactaataggtgcccagtaaatttttgttgaatgaatgagtaatcccatttaggaatcagtgatcataggatgaataggaacctcratagtgtgtcattagctggagaggtgctgtgaaattccagggttcttcctagacaggaaagttgattgtttctgcttgtgaggacttagcctttcacact

SEQ ID NO: 521312 - DNA, 201 bp, Homo sapiens
taaacagggtaaggcagcttaccactgtgcctggcgatgcgcagagtaagtgctcagtaaacggtagctgctgttattagcactgttattatcattgtcarcaaagaacacctagacagccttgagcactggaaggcacctcagagactgtcacaggggttccttgctaggattccaaggaccccagtttcagcagcttca

SEQ ID NO: 521313 - DNA, 201 bp, Homo sapiens
catcatagaggaagggaagtactccctggtgatggagtacatggagaagggcaacctgatgcacgtgctgaaagccgaggtagagagggcccctccgcacrgggatccccagcgcttgggccctggctgtctgttatggctccccttggggtgtttgtttgcagctcgttagcataaaatttgcaaattgcttggtagttt

SEQ ID NO: 521314 - DNA, 201 bp, Homo sapiens
tggaaggcacctcagagactgtcacaggggttccttgctaggattccaaggaccccagtttcagcagcttcacgaacaccctgaattgcacacagatggcrtgtgtgtgcacatcctatatttcttacacctttcagtagagagggtccctagtttccttggcttcctcagagaaaatgtaacaaatgagcacagtgcctg

SEQ ID NO: 521315 - DNA, 201 bp, Homo sapiens
agatggcatgtgtgtgcacatcctatatttcttacacctttcagtagagagggtccctagtttccttggcttcctcagagaaaatgtaacaaatgagcacrgtgcctggtccagagggtggcctaccttagggccaggtgtgctgacggaggtaccttgagctgatactcatttccctccctcctcagaactgtcttctca

SEQ ID NO: 521316 - DNA, 201 bp, Homo sapiens
tgctctttagggacagtaccaacacttgacaaattcagctcagcatgaatgtcattgagcccatgccccgtaccaaggcccaggctagcgagtgtaaggartacaaaaacaagtgggtgtggtcgctgcccttgggactcacattctagtggagaagtcaaacagacccagctcagatacagagcggcgcagggcagagtg

SEQ ID NO: 521317 - DNA, 201 bp, Homo sapiens
ctatggaatgaggcagctgtaccagaggctgagaaaaatgagcagtattgttcaagttctgtcaccttcctgcctgagagaggagcaagacctgaaagaamgtctttgctttgtagatgctatctgtgagcagcagttgataatgtgcataaaatctgggaacaggccagatgtggatgacatcactgagtactgcccaag

SEQ ID NO: 521318 - DNA, 201 bp, Homo sapiens
cactgtgaaaccccgtctctactaaaaaaaagaaaaaaaagaatacaaaaaaatagccgggcgtggtggcgggcgcctgtagtcccagctactcgggaggytgaggcaggagaatggcgcgaacccgggaggcggagcttgcagtgagctgagatcgcgccactgcactccagcactccagcctgggcgacagagccagac

SEQ ID NO: 521319 - DNA, 201 bp, Homo sapiens
ttctgattgtgaatcccctcaactctagcagacacatacacacccctgaaatggggctgcagagcaggctgtctcagccttgccactgtcggcatctcggsctgggtaattctgttgtggggactgtcctgttccttgtaggatgtttagtagcatccctgcccccacctactagatgccaggggcactgttctccccagc

SEQ ID NO: 521320 - DNA, 201 bp, Homo sapiens
gttgaagcaagaagaaaaactcagagaatataaaatcaacttttaaaattgtgtgctctcttcttcacgtaggctcctgttaaaaacaaagtgcagtcagwttctaagccctgttcagagacttcgtggatcacagctgcagctcaccgccacatcacaggatccgttaacgttaatacccaatactctgtcagccactgt

SEQ ID NO: 521321 - DNA, 201 bp, Homo sapiens
gagaatggcgcgaacccgggaggcggagcttgcagtgagctgagatcgcgccactgcactccagcactccagcctgggcgacagagccagactccgtctcaaaaaaaaaaaaaaaaaaaaaaaagacacggctttctgaggtgccgtgcggctgtggcgggggtggctgggggtgcgggttgtgttcattgtccaaggctc

SEQ ID NO: 521322 - DNA, 201 bp, Homo sapiens
agaatggcgcgaacccgggaggcggagcttgcagtgagctgagatcgcgccactgcactccagcactccagcctgggcgacagagccagactccgtctcaaaaaaaaaaaaaaaaaaaaaaaagacacggctttctgaggtgccgtgcggctgtggcgggggtggctgggggtgcgggttgtgttcattgtccaaggctct

SEQ ID NO: 521323 - DNA, 201 bp, Homo sapiens
gtcttttgcaaatattttctcccagtctgtggctcgtgttgtgaacgtggctagttctcttgacatacatatcttttcacagtatgtaatcctgttgtgctttttttttttccttttgagacggaatcttgctcttgtcacccaggctggagtgcagtggcgcgatctcggctcactacaatctccacctcccaggttcaa

SEQ ID NO: 521324 - DNA, 201 bp, Homo sapiens
cgatctcggctcactacaatctccacctcccaggttcaagggattctcctgcctcagcctcccgagtagctgggattgctggtgcccgccaccacgcccarttgatttttgtattttttagtagagatggggtttcaccatgttggccaggctggtctcgaactgctgacctcaagtgatccgcccgccttggcttcccaa

SEQ ID NO: 521325 - DNA, 201 bp, Homo sapiens
gaagcagaaagagaggagagagggggaccaactttgcttactcagaagtttttcctaagtccaaaggtataccaaggaagaagagaaaacatcttttctgmtactttctgtatggtggtgatcaagctattaacagtgtagctctgctacgttatgtcataaatatggtttgagggggaatctcacttctatcattaaaat

SEQ ID NO: 521326 - DNA, 201 bp, Homo sapiens
ccccctggtcggggttcgcgcgccctcccccagcacgcccgggcaaggctgccgcggcgtcggagtaatccccaaccctccgccgccgcttcttccctcayccgggcctccagacgtttgccgcggaaacgaaagtaacgctcgggtgcttgcgtggaggccggggcggccgcgggcttcccggaaggagagggactctgc

SEQ ID NO: 521327 - DNA, 201 bp, Homo sapiens
aggagaatggcttgaacccaggaggcggtagttgcagtgagccgagattgccacttacactctatcctgggcgacagagggagactctgtatcaaaaaaawaaataaataaagaaatggggaatactgcagctcttctattcacaaaaagtgaagactaggcttgtttaaaatgaaatttggagtgtatcattattactga

SEQ ID NO: 521328 - DNA, 201 bp, Homo sapiens
tggggaaaaagttaattagaatattttgatatgtatacttaccctgccttagaaggtaatcgtgaaattccttgagatttcacattaatttcaatagaaamaaattcactgtcctgagtccctgaattaatatttatgcaaaacatttacaaattccttcaaatggacgtaattattagttaaaattatttgctataacag

SEQ ID NO: 521329 - DNA, 201 bp, Homo sapiens
gaagaaagtaaaaatcaacctatcatcaagatacaatccttgttaacattttggtgtctttatgtcttttttatctgtacttatatctttatctatttacatatatatatatataaaacacacacaaatgtgaatataatttttacagatttattcgtcaaaaacaattttgaatggctatataatattctgttaggagtg

SEQ ID NO: 521330 - DNA, 201 bp, Homo sapiens
tatgaagggcgaagggaaggaaccagtagaaggagagaggttatggctattggagaagaggcaatgtcggtcggcagtggggtggagtaaaggaggggttagggtccaaaaacagaccttgaagagtatagttacctcgtcgcttgaaagacaaggaaggctttgtaactgaatgggttcacgcctgctggacaattcctt

SEQ ID NO: 521331 - DNA, 201 bp, Homo sapiens
gcttgctcgtatatttattcatccattcattcaacaagcattccaggtacaatcctaggttctaaagatacagtcctaaataatatatatttttgttctcraggagcttaattttatagtattttatgcattaccaaattattgtgggatttttgtttttacactaacaaaatacaacacgaataccctctgccccccccc

SEQ ID NO: 521332 - DNA, 201 bp, Homo sapiens
gagggcccgtgctctcggagctatggctcctggtctcttacctcacgcgtgtgcctcaccccacccctcagtcttcaggccttcatctaggcagccccccrcctccacccactgcccacgtcccaccgatgtagttgtttcctgaggcacttctcttgtttggtaatgtcttatgtcctaggaaagaaggcccataggtgc

SEQ ID NO: 521333 - DNA, 201 bp, Homo sapiens
tcccaccgatgtagttgtttcctgaggcacttctcttgtttggtaatgtcttatgtcctaggaaagaaggcccataggtgctgctgtatgagcttcctccrctagacagagctggccccagcctttagatgaggtgtagaaggctggttacccgggtcacctgtagccggccactgtgcaacaccatgggcagcctaggag

SEQ ID NO: 521334 - DNA, 201 bp, Homo sapiens
agctggccccagcctttagatgaggtgtagaaggctggttacccgggtcacctgtagccggccactgtgcaacaccatgggcagcctaggagtttccagartcccctctccccaaggtatttcttttttcattttttaactccctgccctccaacattttattatgaaaaacaccaagtctgaaggttacgtccaccacga

SEQ ID NO: 521335 - DNA, 201 bp, Homo sapiens
atgaatattttatgccccagaaagagtatttttcatggtctgtatctggatgtagatatttattattttattttattttaatttttttgagacagagtctyactttgttgcccaagctggagtgcagtggcatgcgatctcggctcactgcaacctccgcctcccaaatttaagcaattctcctgcctcagcctcctgagt

SEQ ID NO: 521336 - DNA, 201 bp, Homo sapiens
tggtgtattagtctttttagttttggatatcctggtagttgtgtagtggtgtctccttgtggttctccatgggtttttattctatatttcagtttggggaraatgaatgaatggaagaaaagaagggaggaaggatgaagcaaatagctgtgctttgagatctgacactgtatacttcacagccctgatggacattctcca

SEQ ID NO: 521337 - DNA, 201 bp, Homo sapiens
gagcagctgcaccatttcacattcccaccagcagtgcacaagggcttcattttttccacatctttgtcaatatgtgttatttctttttttttttttaatcrtaggcatcctaatgggtatgaggtggtttagccagatttgaaagaagaaaagtttaaagggtggcataggataattaacttaatgtttggcataaagccc

SEQ ID NO: 521338 - DNA, 201 bp, Homo sapiens
cgaggtagagagggcccctccgcacggggatccccagcgcttgggccctggctgtctgttatggctccccttggggtgtttgtttgcagctcgttagcatmaaatttgcaaattgcttggtagtttgaattttcttttcctttttttatagagacaaggtcttgctatgttgcccaggctgaactccaacacctggtctca

SEQ ID NO: 521339 - DNA, 201 bp, Homo sapiens
tacaacagagaggaggaaaggagacgcagggtctcccatgacccttttgcacagcaaagaccttacgagaattttcagaatacagagggaaaaggcactgyttattccagtgcagccagtcatggtaatgcagtgcaccagccctcagggctcaccagccaacctcaagtactgtatcagaacaatggattatatagctca

SEQ ID NO: 521340 - DNA, 201 bp, Homo sapiens
ttcaagtgattctcctgcctcagcctcctgagtagctgggattacaggcacccaccaccacgcctggctaatttttgtatttttagtagagaaggggtttyaccatgttggccaggctggtcttgaactcctgacctcaggtgatcacctgcatcagcctcccaaagtgctgggattacaggtgtgagccaccgcacctgg

SEQ ID NO: 521341 - DNA, 201 bp, Homo sapiens
gatgggctacggcagctgaagtggacgcctcacttagtggataaccccagaaagttggctgcctcagagcattcagaattctgtcctcactgataggggtwctgtgtctgcagaaattttgtttcctgtacttcatagctggagaatggggaaagaaatctgcagcaaaggggtctcactctgttgccaggctggtctcaa

SEQ ID NO: 521342 - DNA, 201 bp, Homo sapiens
ggtgtctcggcggggtcagcaacggtctctggggggtcccctgcagcgcgcagccggtttccgcctccgcagctcccagccagcgcggacgccgccctccycggcgcctcctcgctgcccttccctggccgaagccctcccctgcagcctcctccccacctgccggccctgtgttctcactgctcctctctgctctgggat

SEQ ID NO: 521343 - DNA, 201 bp, Homo sapiens
aaactctgtatccattaaacaccaactccccagctcccctcccagccccggacaaccaccattctactctctgtttctgtgactctgaccagtctaggtayctcatgtgagtggaaccatgcagcatttttctttgtggctggcttcattcacttaggaaatgtcctcaagcttcatgcatgttgtagcatgtgatgtgat

SEQ ID NO: 521344 - DNA, 201 bp, Homo sapiens
acaccaactccccagctcccctcccagccccggacaaccaccattctactctctgtttctgtgactctgaccagtctaggtacctcatgtgagtggaaccrtgcagcatttttctttgtggctggcttcattcacttaggaaatgtcctcaagcttcatgcatgttgtagcatgtgatgtgattcccttccttttcaaggc

SEQ ID NO: 521345 - DNA, 201 bp, Homo sapiens
aagaaagtaaaaatcaacctatcatcaagatacaatccttgttaacattttggtgtctttatgtcttttttatctgtacttatatctttatctatttacatatatatatatataaaacacacacaaatgtgaatataatttttacagatttattcgtcaaaaacaattttgaatggctatataatattctgttaggagtgt

SEQ ID NO: 521346 - DNA, 201 bp, Homo sapiens
ttcccttccttttcaaggctgactattccattgtgtagctagaccacagttgggttatccactcatctgctcatgggtgcctggcttacttccaccttttrgctattgtgaataatgctgcagtgaacacgtgggtagaaatatttcttcaacaccctgttttagttcttttgggtatatactcagaaacggaattgctgg

SEQ ID NO: 521347 - DNA, 201 bp, Homo sapiens
agaaagtaaaaatcaacctatcatcaagatacaatccttgttaacattttggtgtctttatgtcttttttatctgtacttatatctttatctatttacatatatatatatataaaacacacacaaatgtgaatataatttttacagatttattcgtcaaaaacaattttgaatggctatataatattctgttaggagtgtg

SEQ ID NO: 521348 - DNA, 201 bp, Homo sapiens
actattccattgtgtagctagaccacagttgggttatccactcatctgctcatgggtgcctggcttacttccaccttttagctattgtgaataatgctgcrgtgaacacgtgggtagaaatatttcttcaacaccctgttttagttcttttgggtatatactcagaaacggaattgctggatcatatggtaattctatctt

SEQ ID NO: 521349 - DNA, 201 bp, Homo sapiens
gaaagtaaaaatcaacctatcatcaagatacaatccttgttaacattttggtgtctttatgtcttttttatctgtacttatatctttatctatttacatatatatatatataaaacacacacaaatgtgaatataatttttacagatttattcgtcaaaaacaattttgaatggctatataatattctgttaggagtgtgc

SEQ ID NO: 521350 - DNA, 201 bp, Homo sapiens
ctattccattgtgtagctagaccacagttgggttatccactcatctgctcatgggtgcctggcttacttccaccttttagctattgtgaataatgctgcartgaacacgtgggtagaaatatttcttcaacaccctgttttagttcttttgggtatatactcagaaacggaattgctggatcatatggtaattctatcttt

SEQ ID NO: 521351 - DNA, 201 bp, Homo sapiens
ctgggccaaccatagctagagacataaagcaggcaacaaacgtgttttcacaaatatatacatatgtacatatatacgcatatacaaatatatacatataygtatatacacatagacaaatatagctatatatctacatatacaatatatgcatacacacatacaaatatgtgtatatatacacacatatacatttttata

SEQ ID NO: 521352 - DNA, 201 bp, Homo sapiens
tccaccttttagctattgtgaataatgctgcagtgaacacgtgggtagaaatatttcttcaacaccctgttttagttcttttgggtatatactcagaaacrgaattgctggatcatatggtaattctatctttaatttttttgaagaatcacgatttttttttttttttttttgagacagactctcactctatcaccaggc

SEQ ID NO: 521353 - DNA, 201 bp, Homo sapiens
tatacaaatatatacatatacgtatatacacatagacaaatatagctatatatctacatatacaatatatgcatacacacatacaaatatgtgtatatatacacacatatacatttttatatcatatattatatattacatatatacatatacaaatatatgtatatttatacgtatacatacatgaacgtatactttttt

SEQ ID NO: 521354 - DNA, 201 bp, Homo sapiens
atacaaatatatacatatacgtatatacacatagacaaatatagctatatatctacatatacaatatatgcatacacacatacaaatatgtgtatatatacacacatatacatttttatatcatatattatatattacatatatacatatacaaatatatgtatatttatacgtatacatacatgaacgtatacttttttt

SEQ ID NO: 521355 - DNA, 201 bp, Homo sapiens
tacaaatatatacatatacgtatatacacatagacaaatatagctatatatctacatatacaatatatgcatacacacatacaaatatgtgtatatatacacacatatacatttttatatcatatattatatattacatatatacatatacaaatatatgtatatttatacgtatacatacatgaacgtatactttttttt

SEQ ID NO: 521356 - DNA, 201 bp, Homo sapiens
acaaatatatacatatacgtatatacacatagacaaatatagctatatatctacatatacaatatatgcatacacacatacaaatatgtgtatatatacacacatatacatttttatatcatatattatatattacatatatacatatacaaatatatgtatatttatacgtatacatacatgaacgtatacttttttttt

SEQ ID NO: 521357 - DNA, 201 bp, Homo sapiens
tatacacatagacaaatatagctatatatctacatatacaatatatgcatacacacatacaaatatgtgtatatatacacacatatacatttttatatcatatattatatattacatatatacatatacaaatatatgtatatttatacgtatacatacatgaacgtatactttttttttctcataatccttaccacttct

SEQ ID NO: 521358 - DNA, 201 bp, Homo sapiens
atacacatagacaaatatagctatatatctacatatacaatatatgcatacacacatacaaatatgtgtatatatacacacatatacatttttatatcatatattatatattacatatatacatatacaaatatatgtatatttatacgtatacatacatgaacgtatactttttttttctcataatccttaccacttctg

SEQ ID NO: 521359 - DNA, 201 bp, Homo sapiens
tgccgaaaggctctaccggtgattgagaggaaggctgcaggcttgatgggatcaggagataactgtcaggataactcatatcttttgggggaggagtggarttgaatggggtagatgagaagacctctttcctagactgtgttttttcctctgttagaaacatttagaaacattcaagggttgcccttttcatcctggaat

SEQ ID NO: 521360 - DNA, 201 bp, Homo sapiens
tggcagccctcatcctactttctgtctctgtgaatttaactgcactgggtgccttatataagtggaatcatacagtatttgtccttttgtgtctggcttaytccacttggcatgatgtcctcgaggttcatctgtgttgtagcatatgtcagaatttctttccttttcaaggctgaataatattccattgtatgaatggag

SEQ ID NO: 521361 - DNA, 201 bp, Homo sapiens
tccgtggcgtcacaagctactatataaaaggcggtgcccgccggggccgagtgggagtccgcggcgagcgcagcagcagggcccggtcctgcgcctcgggrgtcggcgtccaggctcggagcgcgacacggagactaggtggcaggtgaggacgtccccgcgcacggccggggtggagcacgggagtggcgagcttcaggt

SEQ ID NO: 521362 - DNA, 201 bp, Homo sapiens
cctgggttcacgccattttcctgcctcagcctcccgagtagctgggactacagacacccgccaccacacctggctaattttttgtatttttagtagagacrgggtttcaccgtgttagccaggatggtctccatctcctgaccttgtgatcagcccgccttggcctcccaaagtgctgggattacaggtgtgagccactgt

SEQ ID NO: 521363 - DNA, 201 bp, Homo sapiens
tcccgagtagctgggactacagacacccgccaccacacctggctaattttttgtatttttagtagagacggggtttcaccgtgttagccaggatggtctcsatctcctgaccttgtgatcagcccgccttggcctcccaaagtgctgggattacaggtgtgagccactgtgtccggcctaccgagctttttattatgtttt

SEQ ID NO: 521364 - DNA, 201 bp, Homo sapiens
gcctccttctcttctcctttcagagactctgtatgtttgttttataaataatatataggatgtttttgttgtacttagaaggaagattaagaaaaaagtaygtccactccatcttcctggaactggaagtttcttttttcttttaaggctaacagctgtaacccattacactaaatccttcctctgactatcccaatctct

SEQ ID NO: 521365 - DNA, 201 bp, Homo sapiens
cgttcttgagcttcagaatgcaaccagacatgtccttgaatgtcattaagatgaaatccagtgacttcctggagagtgcagaactggacagcggaggcttygggaaggtgtctctgtgtttccacagaacccagggactcatgatcatgaaaacagtgtacaaggggcccaactgcattgagtgagtagggagcaggggtg

SEQ ID NO: 521366 - DNA, 201 bp, Homo sapiens
gtactggcattcagattggagcctacaattatatggagattggtgggacgagttcatcactactagacagcacaaatacgaacttcaaagaagagccagcygctaagtaccaagctatctttggtaagataccctggaaggactcaacgcctagcaaccttgaactttcttacttgtgagaaggacatagtggaatcttaa

SEQ ID NO: 521367 - DNA, 201 bp, Homo sapiens
gtttgagggggaatctcacttctatcattaaaatttttttcctgttaaccaacgaccaaaatacatatacatttttaggaaacatcttgtttgtatactgmttttttattgttaagcaaaactgtaatttaaccactataatagaaactggaattgtttctgttagtattgatgctcacataacaagaatacaattataag

SEQ ID NO: 521368 - DNA, 201 bp, Homo sapiens
aatgagcagtattgttcaagttctgtcaccttcctgcctgagagaggagcaagacctgaaagaaagtctttgctttgtagatgctatctgtgagcagcagytgataatgtgcataaaatctgggaacaggccagatgtggatgacatcactgagtactgcccaagagaaattatcagtctcatgaagctctgctgggaagc

SEQ ID NO: 521369 - DNA, 201 bp, Homo sapiens
acaatatgtacatgaatgagcacggctgtgttccaataaaagtggatttacaaatgctggcaggagtcagatttggcccacaggccatagttggccaaccyctggtctaacccatttgaaggacagcttttaaaatacctagaacagaacttgcgaatggtcaggggcacctgtgagaatctaatgaaacccaggatctac

SEQ ID NO: 521370 - DNA, 201 bp, Homo sapiens
tacacatagacaaatatagctatatatctacatatacaatatatgcatacacacatacaaatatgtgtatatatacacacatatacatttttatatcatatattatatattacatatatacatatacaaatatatgtatatttatacgtatacatacatgaacgtatactttttttttctcataatccttaccacttctgt

SEQ ID NO: 521371 - DNA, 201 bp, Homo sapiens
gagggctgaggaaagaagagaggtgggaaggaagaatgaaatgttttcttccttatattctgtttaatgaggtagtgtggggattaaggaattttttttgytgtggttgttgtacattttcatttgtttccttttattatttttatgaagggcgaagggaaggaaccagtagaaggagagaggttatggctattggagaag

SEQ ID NO: 521372 - DNA, 201 bp, Homo sapiens
acacatagacaaatatagctatatatctacatatacaatatatgcatacacacatacaaatatgtgtatatatacacacatatacatttttatatcatatattatatattacatatatacatatacaaatatatgtatatttatacgtatacatacatgaacgtatactttttttttctcataatccttaccacttctgtg

SEQ ID NO: 521373 - DNA, 201 bp, Homo sapiens
tttatgaagggcgaagggaaggaaccagtagaaggagagaggttatggctattggagaagaggcaatgtcggtcggcagtggggtggagtaaaggaggggwtagggtccaaaaacagaccttgaagagtatagttacctcgtcgcttgaaagacaaggaaggctttgtaactgaatgggttcacgcctgctggacaattcc

SEQ ID NO: 521374 - DNA, 201 bp, Homo sapiens
tagaaagctttgctgagtgaatagctctgcctttcgtcttttttgatatgtgtacatcttttaaaaaataatgaatagactttgttttagagctgttttgrtttacagcaaaactaagcagaaagaaaatatccccttccacaaacatcctggactgtacagcctcccctaccatcaacatcctgcattactgtggaatat

SEQ ID NO: 521375 - DNA, 201 bp, Homo sapiens
cacatagacaaatatagctatatatctacatatacaatatatgcatacacacatacaaatatgtgtatatatacacacatatacatttttatatcatatattatatattacatatatacatatacaaatatatgtatatttatacgtatacatacatgaacgtatactttttttttctcataatccttaccacttctgtga

SEQ ID NO: 521376 - DNA, 201 bp, Homo sapiens
ccgccaccacgcccagttgatttttgtattttttagtagagatggggtttcaccatgttggccaggctggtctcgaactgctgacctcaagtgatccgccygccttggcttcccaaagtgctgggattacaggcgtgaacaaccgcgcccggcctgatgtgcatataattttattatttgatttttaatatacatgaatag

SEQ ID NO: 521377 - DNA, 201 bp, Homo sapiens
tgaccacttcctgtgtaaaagttcatagtttaggcgatcctctcaattcaaagtctgtatctatttcaagacaggcccaaggttataaatttgcacaaactttttttttttttttaataccttgtgcccagtccaagacaaatatgtttgtttgccatgggctgctttttttctagttcatcctttcatcaaagggttgca

SEQ ID NO: 521378 - DNA, 201 bp, Homo sapiens
gaaggaaccagtagaaggagagaggttatggctattggagaagaggcaatgtcggtcggcagtggggtggagtaaaggaggggttagggtccaaaaacagrccttgaagagtatagttacctcgtcgcttgaaagacaaggaaggctttgtaactgaatgggttcacgcctgctggacaattccttgattaagtaagagga

SEQ ID NO: 521379 - DNA, 201 bp, Homo sapiens
ccaggaggtcgaggctccagtgagctatgattgtgccactgcactccagcctgactgacaaagtgagaccctgtctccaaaggagaaaaaaaaatacatayatatatatatatatatatatatatatagtcttgccctgaggttttctctctgttttctttacagggtacagctctgccggggggggaaaaagtggtacca

SEQ ID NO: 521380 - DNA, 201 bp, Homo sapiens
tacctcgtcgcttgaaagacaaggaaggctttgtaactgaatgggttcacgcctgctggacaattccttgattaagtaagaggaaagtgaactgttgggcyggggtggtggtcaggagttgagcggctttaactctggccagatgtaagcggagaatgtctaaaaggaacaaaaatggtggttttccctttacacccagga

SEQ ID NO: 521381 - DNA, 201 bp, Homo sapiens
atttaacattgtaactgttttcaagtgcactgttcaggggcagtaagtacagtcccatagtacattcactttccatcgtctctctccctgcccctggcagccctcatcctactttctgtctctgtgaatttaactgcactgggtgccttatataagtggaatcatacagtatttgtccttttgtgtctggcttattccact

SEQ ID NO: 521382 - DNA, 201 bp, Homo sapiens
cgcagcgcacctacctgccgcacctagtaaccgcagagcgcctacctgccgcacctagtaaccgcagcgcacctacctgccgcacctagtaaccgcagagyacctacctgccgcacctagtaaccgcagcgcgcctacctgccgcacctagtaaccgcagcgcgcctacctgccgcacctagtaaccgcagcgcgcctacc

SEQ ID NO: 521383 - DNA, 201 bp, Homo sapiens
accgcagagcgcctacctgccgcacctagtaaccgcagcgcacctacctgccgcacctagtaaccgcagagtacctacctgccgcacctagtaaccgcagmgcgcctacctgccgcacctagtaaccgcagcgcgcctacctgccgcacctagtaaccgcagcgcgcctacctgccgcacctagtaaccgcagcgcgccta

SEQ ID NO: 521384 - DNA, 201 bp, Homo sapiens
gctgagaaaaatgagcagtattgttcaagttctgtcaccttcctgcctgagagaggagcaagacctgaaagaaagtctttgctttgtagatgctatctgtragcagcagttgataatgtgcataaaatctgggaacaggccagatgtggatgacatcactgagtactgcccaagagaaattatcagtctcatgaagctctg

SEQ ID NO: 521385 - DNA, 201 bp, Homo sapiens
cctcctttccaccctatctcctcttaggttcaggctacagctcaaaacaagcaacactgcagtccttatcctcagtgtgtctttgggatccttggacactygcatccatgggcctctggacgccatttggggaaatagaaggtgtagtatttagccactgtctgctgcataaatgtgcagagaagaaaataaccattttcc

SEQ ID NO: 521386 - DNA, 201 bp, Homo sapiens
atgaaggctgagatgggaggactgcttgagcccaggagtttgaggctggagtaagctatgatcatgccgctgcactccaacctgggcaacagagtgagacyctacttctgagaaaaaaaagaaaaaaaagactgacaaaaaaggagacaagattgaaatccatgaataaggaggaatcactataggtcctgcagacatcaa

SEQ ID NO: 521387 - DNA, 201 bp, Homo sapiens
cttctgagaaaaaaaagaaaaaaaagactgacaaaaaaggagacaagattgaaatccatgaataaggaggaatcactataggtcctgcagacatcaaatgktattaagagaatattatgaacaactttttgttaattattttaaaatttaggtaaaatggaccaatgtctttaaaaagttcaatttagcaaagctaactca

SEQ ID NO: 521388 - DNA, 201 bp, Homo sapiens
gcagtgataaaaaaagaaaacttcctatagagaaaaccccacagagagcttcatcaatgatttctgccaaatattcaatgaagaaattatgtcaatcttayacagttttctctagataatagagaagagagaactcttccagattcactttgtgtaagcataaccttgattcccaaaactggaaaataaggtacaagaaag

SEQ ID NO: 521389 - DNA, 201 bp, Homo sapiens
ctcattcactccactctctaaaagactattcaggaccatatgggaaacagaagaaactataaaagtgaacacctgccttacaggaatttataataatattygagagtcaagttacatgtatttgaaatatgaagtaacagtgtgctcaccagtcatagagtgttctgaacaaaaggcctaatatatctgatggggagaagt

SEQ ID NO: 521390 - DNA, 201 bp, Homo sapiens
tcggctcactgcaagctctgcctcctgggttcatacaattctcctgcctcagtctcctgagtagctgggactacaggcgcccaccaccacacccagcgaattttttttttttttaatagagacggtgtttcaccgtgtcagctaagatggtctcgatctcccgacctcgtgatctgcccgtctcagcctcccagagtgctg

SEQ ID NO: 521391 - DNA, 201 bp, Homo sapiens
ccaccaccacacccagcgaattttttttttttttaatagagacggtgtttcaccgtgtcagctaagatggtctcgatctcccgacctcgtgatctgcccgyctcagcctcccagagtgctgggattacaggtgtgaggcaccgtgcccagccaagtattttgttttgttttgttttgtttttgagacagagtcttgctctg

SEQ ID NO: 521392 - DNA, 201 bp, Homo sapiens
cttccacattaaggtaaaccatcatcggtaggcttccagaaagttgggtgattttagttttaattctccaatgtaaatccattctcgtacattggagaagctaaaggaagacctagctcagcttataactgttgatgatggtgccgaaaggctctaccggtgattgagaggaaggctgcaggcttgatgggatcaggagat

SEQ ID NO: 521393 - DNA, 201 bp, Homo sapiens
acaaacaaaaaaaccaaaataaaagaaaaataatagacaaagaacatagacaattcaaaaaagaaactgaacaacatacttcagaaaagatatttggcctygccaacagagaaaggcaaaatgaacccgttacaatttttcatccattagattgaaatttttgaaagattagtgatacagtgtgttggtgaaaatgcagaa

SEQ ID NO: 521394 - DNA, 201 bp, Homo sapiens
taatttatggatttgttgtgaaaattaaatgagttgatatgtataaaaagcttagaacactgcctggcacatagtaagttctataaaaagtgttaaactttcatcatcatcatcatcagtattacttctcagacccagaagaaatagctgtgtcaggccctcatcgaaggagatcctgtaaaagatagaagactgtgccct

SEQ ID NO: 521395 - DNA, 201 bp, Homo sapiens
aatttatggatttgttgtgaaaattaaatgagttgatatgtataaaaagcttagaacactgcctggcacatagtaagttctataaaaagtgttaaactttcatcatcatcatcatcagtattacttctcagacccagaagaaatagctgtgtcaggccctcatcgaaggagatcctgtaaaagatagaagactgtgccctc

SEQ ID NO: 521396 - DNA, 201 bp, Homo sapiens
ggaggctgttccaatgattaattcttccctgacttacacttgaagaagccaaggcaggaagtgaactttgaaatgtgcaatgtcttagtactcatctgcawtctgtgactgctaggaagatggactgagtcaagaggaaattgtcttgttagaaatgtggaatactgcgtcgggcacggtggctcactcctgtaatccgag

SEQ ID NO: 521397 - DNA, 201 bp, Homo sapiens
atttatggatttgttgtgaaaattaaatgagttgatatgtataaaaagcttagaacactgcctggcacatagtaagttctataaaaagtgttaaactttcatcatcatcatcatcagtattacttctcagacccagaagaaatagctgtgtcaggccctcatcgaaggagatcctgtaaaagatagaagactgtgccctcc

SEQ ID NO: 521398 - DNA, 201 bp, Homo sapiens
gcatgtattagtgagccaatagtgaaagtttgaatgaagggacaaatatttcattccaggatcctaccactttaggtgaatcacttagctccaaatcttaktttctttatttgcaaattgaaatcatgataaaatttgcttcaggggttatgatgcttgtttaaactctgtttcaattcttgtctcttgctggtccttaag

SEQ ID NO: 521399 - DNA, 201 bp, Homo sapiens
ccttagaaggtaatcgtgaaattccttgagatttcacattaatttcaatagaaacaaattcactgtcctgagtccctgaattaatatttatgcaaaacatytacaaattccttcaaatggacgtaattattagttaaaattatttgctataacaggccagcatgtctttgtcactctgtgtcatggctttgtaataatatg

SEQ ID NO: 521400 - DNA, 201 bp, Homo sapiens
ctactcacaaggccttcctaagatattcagtgctcataaagttgaatctttcatgtggaaaaaagaggggtggataggaaaaacaaaagaaatcactgaamaccatgcagaagatgcagaagattaacagactaaactagcaaaccgcaagactgtaaggagaactgacttgggtcaggagctaagcccccaaagtccagt

SEQ ID NO: 521401 - DNA, 201 bp, Homo sapiens
taacattgtaactgttttcaagtgcactgttcaggggcagtaagtacagtcccatagtacattcactttccatcgtctctctccctgcccctggcagcccycatcctactttctgtctctgtgaatttaactgcactgggtgccttatataagtggaatcatacagtatttgtccttttgtgtctggcttattccacttgg

SEQ ID NO: 521402 - DNA, 201 bp, Homo sapiens
tgcagataaatctgttgataaaatgtaatgtttattcatgattaaaaatgctagcaagtcagaaaagaaattccttttctgataataaggtatcttgaaaygaacagaagttttgtacttattttaacaaaatgttaacagccttttttttttttttttgaggcaaggtcttactctgttgcctaggctggagtgcagtgg

SEQ ID NO: 521403 - DNA, 201 bp, Homo sapiens
agaaatcactgaacaccatgcagaagatgcagaagattaacagactaaactagcaaaccgcaagactgtaaggagaactgacttgggtcaggagctaagcycccaaagtccagtggacccaactagaggccttcccaaactccaccgcacacagcagcacctgcaggtcctagttggtcttgacaaatttgaggagatgtg

SEQ ID NO: 521404 - DNA, 201 bp, Homo sapiens
aacattgtaactgttttcaagtgcactgttcaggggcagtaagtacagtcccatagtacattcactttccatcgtctctctccctgcccctggcagccctyatcctactttctgtctctgtgaatttaactgcactgggtgccttatataagtggaatcatacagtatttgtccttttgtgtctggcttattccacttggc

SEQ ID NO: 521405 - DNA, 201 bp, Homo sapiens
cactatgttggccaggctggtctcaaactcctgacctcaaatggtccgcctgccttggcctcccaaagggctgggattacaggtgtgagccaccacgcccrgcctatatctcaaccttttagttttgtgtgtgtgtggcaagtgggtgtgaggagtggaacttgacaaacctactctgaaatccatatgaaaaggtaaaga

SEQ ID NO: 521406 - DNA, 201 bp, Homo sapiens
tttttatatggtatgaaataagggtccaacttcattatttcatatgtgtatattcagttttcccccatcgaatgctcttggcaaccttgtcaaaaatcaaktggccatttataggagggtttattcctaggctttccattctgccccactggcatatgtgcctgtctttatgccagtcctacgctgttttgaatactgtag

SEQ ID NO: 521407 - DNA, 201 bp, Homo sapiens
ataatatcccagtgcctgagaccaactatctaggaaatacacccaccatgccattcagctccttgccaccaacaggtaaatgggtcttcgatagtcacaakcttgtctttttttatttttcagaaaatacagcaaccaagcagctctattatagattgtgggttataatggggacagagggcatcatcagctgccagatgc

SEQ ID NO: 521408 - DNA, 201 bp, Homo sapiens
aagcttgtctttttttatttttcagaaaatacagcaaccaagcagctctattatagattgtgggttataatggggacagagggcatcatcagctgccagaygcaaattgcccctgtggaatggaccctgccaaaccacttggtctgggagtatttcatctggggctaggattcatcacagatgcccgcaagcatcgggtta

SEQ ID NO: 521409 - DNA, 201 bp, Homo sapiens
cctcctttttcttaaaagcagaaaatctcctgttctccttttgtctcagatgctggaattgaatgctgctgtgagtccctccccaagcacaggcctgagtyagttcttatttcctgcaggtaacaaatatgtacctcgggccatcctggtggatctggagcctggcaccatggactctgtcaggtctggacccttcggcca

SEQ ID NO: 521410 - DNA, 201 bp, Homo sapiens
tcaccgaggccgagagcaacatgaacgacctggtgtccgagtaccagcagtaccaggacgccacggccgacgaacaaggggagttcgaggaggaggagggygaggacgaggcttaaaaacttctcagatcaatcgtgcatccttagtgaacttctgttgtcctcaagcatggtctttctacttgtaaactatggtgctcag

SEQ ID NO: 521411 - DNA, 201 bp, Homo sapiens
taatgttcactttccctctggcaggccagagtggagccgggaataactgggccaagggccactacacagagggagccgagctggtcgactcggtcctggaygtggtgaggaaggagtcagagagctgtgactgtctccagggcttccagctgacccactctctggggggcggcacggggtccgggatgggcaccctgctca

SEQ ID NO: 521412 - DNA, 201 bp, Homo sapiens
ctttccctctggcaggccagagtggagccgggaataactgggccaagggccactacacagagggagccgagctggtcgactcggtcctggatgtggtgagraaggagtcagagagctgtgactgtctccagggcttccagctgacccactctctggggggcggcacggggtccgggatgggcaccctgctcatcagcaaga

SEQ ID NO: 521413 - DNA, 201 bp, Homo sapiens
tccgggaagagtacccagaccgcatcatgaacaccttcagcgtcatgccctcacccaaggtgtcagacacggtggtggagccctacaacgccaccctctckgtccaccagctggtggaaaacacagatgaaacctactccattgataacgaggccctgtatgacatctgcttccgcaccctgaagctgaccacccccacct

SEQ ID NO: 521414 - DNA, 201 bp, Homo sapiens
tgtctcagatgctggaattgaatgctgctgtgagtccctccccaagcacaggcctgagtcagttcttatttcctgcaggtaacaaatatgtacctcgggcsatcctggtggatctggagcctggcaccatggactctgtcaggtctggacccttcggccagatcttcagaccagacaacttcgtgttcggtatgtagtcat

SEQ ID NO: 521415 - DNA, 201 bp, Homo sapiens
ctcagatcaatcgtgcatccttagtgaacttctgttgtcctcaagcatggtctttctacttgtaaactatggtgctcagttttgcctctgttagaaattcmcactgttgatgtaatgatgtggaactcctctaaaaattacagtattgtctgtgaaggtatctatactaataaaaaagcatgtgtagaaaaccttgtggtc

SEQ ID NO: 521416 - DNA, 201 bp, Homo sapiens
cctccccaagcacaggcctgagtcagttcttatttcctgcaggtaacaaatatgtacctcgggccatcctggtggatctggagcctggcaccatggactckgtcaggtctggacccttcggccagatcttcagaccagacaacttcgtgttcggtatgtagtcatgatcactgggaactggccaaatgacacaccttcttc

SEQ ID NO: 521417 - DNA, 201 bp, Homo sapiens
ccccaagcacaggcctgagtcagttcttatttcctgcaggtaacaaatatgtacctcgggccatcctggtggatctggagcctggcaccatggactctgtyaggtctggacccttcggccagatcttcagaccagacaacttcgtgttcggtatgtagtcatgatcactgggaactggccaaatgacacaccttcttccta

SEQ ID NO: 521418 - DNA, 201 bp, Homo sapiens
ctgtgagtccctccccaagcacaggcctgagtcagttcttatttcctgcaggtaacaaatatgtacctcgggccatcctggtggatctggagcctggcacsatggactctgtcaggtctggacccttcggccagatcttcagaccagacaacttcgtgttcggtatgtagtcatgatcactgggaactggccaaatgacac

SEQ ID NO: 521419 - DNA, 201 bp, Homo sapiens
atgctgctgtgagtccctccccaagcacaggcctgagtcagttcttatttcctgcaggtaacaaatatgtacctcgggccatcctggtggatctggagccwggcaccatggactctgtcaggtctggacccttcggccagatcttcagaccagacaacttcgtgttcggtatgtagtcatgatcactgggaactggccaaa

SEQ ID NO: 521420 - DNA, 201 bp, Homo sapiens
cagatcaatcgtgcatccttagtgaacttctgttgtcctcaagcatggtctttctacttgtaaactatggtgctcagttttgcctctgttagaaattcacmctgttgatgtaatgatgtggaactcctctaaaaattacagtattgtctgtgaaggtatctatactaataaaaaagcatgtgtagaaaaccttgtggtctg

SEQ ID NO: 521421 - DNA, 201 bp, Homo sapiens
tgcagagccatggtgtggttcttttttcatttcagttttgggaggtcatcagcgatgagcatgggatcgaccccacaggcagttaccatggagacagtgayttgcagctggagagaatcaacgtgtactacaatgaggctgctggtgagtagcgggatgtgtgtgcccaggaatccttgctttccatgatgtgggagatga

SEQ ID NO: 521422 - DNA, 201 bp, Homo sapiens
gtccctccccaagcacaggcctgagtcagttcttatttcctgcaggtaacaaatatgtacctcgggccatcctggtggatctggagcctggcaccatggaytctgtcaggtctggacccttcggccagatcttcagaccagacaacttcgtgttcggtatgtagtcatgatcactgggaactggccaaatgacacaccttc

SEQ ID NO: 521423 - DNA, 201 bp, Homo sapiens
gtttaatcggggccctttcgatttccctgggacacagcccttctgcgggacgcggctggcattcccctgggtgtatttgtctcagaaacttgggtcggggstacggtcatatttattgcgctagcttcatgtgaatttaatttgtatatttttctctacggtttgaatgaaaacatgcagtgtcactggactggcagatgt

SEQ ID NO: 521424 - DNA, 201 bp, Homo sapiens
ctgcatgacccgccaggatgcccgcagcgccgcagctgtgtgtgcgtttaatcggggccctttcgatttccctgggacacagcccttctgcgggacgcggytggcattcccctgggtgtatttgtctcagaaacttgggtcggggctacggtcatatttattgcgctagcttcatgtgaatttaatttgtatatttttctc

SEQ ID NO: 521425 - DNA, 201 bp, Homo sapiens
gggcgagggcatggacgagatggagttcaccgaggccgagagcaacatgaacgacctggtgtccgagtaccagcagtaccaggacgccacggccgacgaasaaggggagttcgaggaggaggagggcgaggacgaggcttaaaaacttctcagatcaatcgtgcatccttagtgaacttctgttgtcctcaagcatggtct

SEQ ID NO: 521426 - DNA, 201 bp, Homo sapiens
tgccctcacccaaggtgtcagacacggtggtggagccctacaacgccaccctctcggtccaccagctggtggaaaacacagatgaaacctactccattgayaacgaggccctgtatgacatctgcttccgcaccctgaagctgaccacccccacctacggggacctcaaccacctggtgtcggccaccatgagcggggtca

SEQ ID NO: 521427 - DNA, 201 bp, Homo sapiens
gtggcacattccgcggcgaggccgccgggcggggtccgggaggctgcatgacccgccaggatgcccgcagcgccgcagctgtgtgtgcgtttaatcggggscctttcgatttccctgggacacagcccttctgcgggacgcggctggcattcccctgggtgtatttgtctcagaaacttgggtcggggctacggtcatatt

SEQ ID NO: 521428 - DNA, 201 bp, Homo sapiens
agcgtcatgccctcacccaaggtgtcagacacggtggtggagccctacaacgccaccctctcggtccaccagctggtggaaaacacagatgaaacctactscattgataacgaggccctgtatgacatctgcttccgcaccctgaagctgaccacccccacctacggggacctcaaccacctggtgtcggccaccatgagc

SEQ ID NO: 521429 - DNA, 201 bp, Homo sapiens
cactcaggacctcctttttcttaaaagcagaaaatctcctgttctccttttgtctcagatgctggaattgaatgctgctgtgagtccctccccaagcacasgcctgagtcagttcttatttcctgcaggtaacaaatatgtacctcgggccatcctggtggatctggagcctggcaccatggactctgtcaggtctggacc

SEQ ID NO: 521430 - DNA, 201 bp, Homo sapiens
atcctcagtgcttcattcatttctttatgaatcccaatctcagcaccacaatacttagcaaataataagtgttttttttaacaattatttcttactttatytgactatgcctagtggtaaaggtatatgaatacatagcatgtcatgatttatatgtgtagcagtcatgagaatatacccctctaatcttttttttttttt

SEQ ID NO: 521431 - DNA, 201 bp, Homo sapiens
ctagcaaactaaggttttaaaaatgttgatacctaaactgaataaaattccagtcataaatcctggtcctttgtaagtacttgtattgatcttttaatatrtaagtatgtataattaaaaaattaaagtagccatattacaaaaggatttttagccacaccactagaagaatgctgacaatgatcatctagaacaagaagt

SEQ ID NO: 521432 - DNA, 201 bp, Homo sapiens; identical to SEQ ID NO: 145288

SEQ ID NO: 521433 - DNA, 201 bp, Homo sapiens; identical to SEQ ID NO: 145340

SEQ ID NO: 521434 - DNA, 201 bp, Homo sapiens; identical to SEQ ID NO: 145343

SEQ ID NO: 521435 - DNA, 201 bp, Homo sapiens; identical to SEQ ID NO: 300508

SEQ ID NO: 521436 - DNA, 201 bp, Homo sapiens; identical to SEQ ID NO: 300486

SEQ ID NO: 521437 - DNA, 201 bp, Homo sapiens
gtcaatacctttctctgatattttccgccaccaatttgtaatttgttttgcctgctcttttttttgttttgctttttgagaaggagtctcgctctgtcgcycaggctggagtgcagtggcagcgtcttggctcactgcaagctccacctcccgggttcaagcaattctcctgcctcagcctcccaagtagctgggattaca

SEQ ID NO: 521438 - DNA, 201 bp, Homo sapiens
caccccccacttcctgtcccagcagggggtagtgggggagtccggtgaatgtggtggggctggtccctcacacagggctgcggtggtcacagctgctgccrcctccccatcagcccccaaccactttgagattcaggtggctggaggcagcctcagcatgcccctgtgtctctccccctccaggctcgacgggccacactt

SEQ ID NO: 521439 - DNA, 201 bp, Homo sapiens; identical to SEQ ID NO: 300509

SEQ ID NO: 521440 - DNA, 201 bp, Homo sapiens; identical to SEQ ID NO: 300510

SEQ ID NO: 521441 - DNA, 201 bp, Homo sapiens
ccctctgggatttctttgtcatgtacagactccctgggatcctcatgttttgggtgacaggacctatggaccactatactcggggaggcagggtagcagtkcttccagaatcccaagagcttctctgggattttcttgtgatatctgattccccagtgaggcctgggacgtttttaagatcgctgtgtgtctgtaaaccct

SEQ ID NO: 521442 - DNA, 201 bp, Homo sapiens
tcactacgtcaccaccccaaggtcacactgctgtaaaatggcagagatgggattcttgtagccagtgccctgctttgaaactcccagttattggccgggcrcagtggctcatgcctgtaatcccagcactttgggaggtcgaggtgggcggatcacctgaggccaggagttcgagaccagcctggccaacatggcgaaacc

SEQ ID NO: 521443 - DNA, 201 bp, Homo sapiens
accactatactcggggaggcagggtagcagttcttccagaatcccaagagcttctctgggattttcttgtgatatctgattccccagtgaggcctgggacstttttaagatcgctgtgtgtctgtaaaccctgaatctcatctggggtgggggccctgctggcaaccctgagccctgtccaaggttccctcttgtcagatc

SEQ ID NO: 521444 - DNA, 201 bp, Homo sapiens
atttctttgtcatgtacagactccctgggatcctcatgttttgggtgacaggacctatggaccactatactcggggaggcagggtagcagttcttccagartcccaagagcttctctgggattttcttgtgatatctgattccccagtgaggcctgggacgtttttaagatcgctgtgtgtctgtaaaccctgaatctcat

SEQ ID NO: 521445 - DNA, 201 bp, Homo sapiens
gcctcggtttctcgtctgtaaagtgggcatcactgtcatcctccccatctcacggggttatgatggagattcaatgagctcataactgtaaagtgccttgygaagcacctggcactacatgctccacggtgcattgtaaaaatcaacacacaggctgggtgtggtggctcacgcctgtaatcccagcactttgggaggctg

SEQ ID NO: 521446 - DNA, 201 bp, Homo sapiens
tcaagagaggtagtgacaggaagccagggacagggcagactcgcattacctgtgttgggccggctttgaggaggtacctcaggtgtcccctggccacagcrtggtgatctgaacaaaggccaaaatctaggctgtcaacaaagagggagaccagagccaggagggccaccgccttggcctgagaggaggaagtggagggag

SEQ ID NO: 521447 - DNA, 201 bp, Homo sapiens
aagtgtgtgtcagtgtttgtcctttttccttgctgtatagtactctatctatgatcagcccacaccacagtctgtttatcccttcttctgttgatgacacytgggctgtttccagttggagactcataataaagctgctgggatgattctggaacaaggctattttgtgcacatccattttcagttctcttgattaaatgc

SEQ ID NO: 521448 - DNA, 201 bp, Homo sapiens
aaaaaaaaaaaaaaagaaaaagaaaagaaaactcaagctcagtcatttggttgaggtttgctgggtgccgggcactgcattgagactgcacatagtaagcyctgcagcggcctcccaggttacgttccgttgttgcccctctgaacaagtgagtcaagagaggtagtgacaggaagccagggacagggcagactcgcatta

SEQ ID NO: 521449 - DNA, 201 bp, Homo sapiens
gaggtcgaggctgcagtgagctgtgattgctcctctgcactccatcctgggtgacagaacgagaccctgccttgaaaaaaaagaaattaagatgtcactaygtcaccaccccaaggtcacactgctgtaaaatggcagagatgggattcttgtagccagtgccctgctttgaaactcccagttattggccgggcgcagtgg

SEQ ID NO: 521450 - DNA, 201 bp, Homo sapiens
tatttaaaaagcattgacccctgcctctgttaagtgaaacacttccatttccccttgcccttcacctccggagcccccaggcaggcaaggctgggggagtwcttccaccccttctccaggcgccctgattcgctgactgtgtgccagtgaggggccagggttcttgggagcccaccgtcttagcaggagctggctgctgtg

SEQ ID NO: 521451 - DNA, 201 bp, Homo sapiens
caccacgcctagctaatttttgtatttttagtagagacgggatttcaccatgttggctagactggtcttgaactcctgacctcaggtgatctgcccgcctyggccccccaaagtgttgggatgacaggcgtgagccaccacgcctggcctggaggtgtatttaaaaagcattgacccctgcctctgttaagtgaaacactt

SEQ ID NO: 521452 - DNA, 201 bp, Homo sapiens
ttttcatgttcctttccttctttttgttcgtatttttaaaaattgtgttctctaacagttcagatacggaatactatacccaacacccttgaacccacaayccagtctgagtaatcaaatcttactgatgtggttgaaagaaagcccctgtttatgcccctccacattcacaccccagccatgttttttttgtttgttttt

SEQ ID NO: 521453 - DNA, 201 bp, Homo sapiens
gtttcctgagggggttttaattggtgggttcaggccaggcacagtggctcatgcctataatcccagcactttgggaggctgaggctggtagatcacctaaygtcaggagttcaagaccagcctagccaacatggtgaaaccccgtctctactaaaaatacaaaaattagctgggcctggtggtgcacgcctgtaatcccag

SEQ ID NO: 521454 - DNA, 201 bp, Homo sapiens
aggttcaagcgattctcctgcctcggcctccagagtagctgggattacagacatctgccaccaggcccagctaatttttgtattttcagtagagatggggyttccccatgttgtgcaggctggtctcgaactcctgacctcaggtgattcactggcctcagcctcccaaagtgctaggattacaggcgtgcgccaccacgc

SEQ ID NO: 521455 - DNA, 201 bp, Homo sapiens
agtcacctattttaacttaggacatttaagatggagaggatctctccaatgactaggaaagacacaagatggaaataaagattttatttatttttattcayttatttgagacggtctccatctgtcacccaggctgaagcgcagtggcgcaatctcggctcactactgcctcaaactcctgggctcaatcgatcctcctgc

SEQ ID NO: 521456 - DNA, 201 bp, Homo sapiens
cggggtccccacctgcactgcccctctgtggggcctcacccatgggcagtggtttctctgctcctcacggccggtgggtgggagtggaggggaggggtccrccctgtctcttgccccttctggttctgttccctcttcacttcggactctccatccccccagttcctatctttcctggtccccaaagatctcatttcccca

SEQ ID NO: 521457 - DNA, 201 bp, Homo sapiens
agccctgtgcccttcctgccttggggcccatttcacagataggggagctgaggcccaggggaggtcatttcctagcacaacaggataaaggtggcccgggsctatagccctcctcccctttcctctcctacccatccgctcctccatgcaaatcctggggtcagagatttgcacagcctacaatggcctctctgtgctggg

SEQ ID NO: 521458 - DNA, 201 bp, Homo sapiens
tcctgcctcagcctcccaagtagctgggattacaggcatgtgccaccatgcccagctaatttttgtatttttagtagaggcagggtttcaccatgttatcygggctggtttcaaactcctgagctcaagtgatcctcccacctcagcctcccaaattgctgggattacaggcgtgagccaccgcacccagctgcctgcttt

SEQ ID NO: 521459 - DNA, 201 bp, Homo sapiens
cagggacagggcagactcgcattacctgtgttgggccggctttgaggaggtacctcaggtgtcccctggccacagcgtggtgatctgaacaaaggccaaartctaggctgtcaacaaagagggagaccagagccaggagggccaccgccttggcctgagaggaggaagtggagggagacaaggggtccctggacatgcagg

SEQ ID NO: 521460 - DNA, 201 bp, Homo sapiens
ctgctcttttttttgttttgctttttgagaaggagtctcgctctgtcgcccaggctggagtgcagtggcagcgtcttggctcactgcaagctccacctccygggttcaagcaattctcctgcctcagcctcccaagtagctgggattacaggcatgtgccaccatgcccagctaatttttgtatttttagtagaggcaggg

SEQ ID NO: 521461 - DNA, 201 bp, Homo sapiens
cagtcaatacctttctctgatattttccgccaccaatttgtaatttgttttgcctgctcttttttttgttttgctttttgagaaggagtctcgctctgtcrcccaggctggagtgcagtggcagcgtcttggctcactgcaagctccacctcccgggttcaagcaattctcctgcctcagcctcccaagtagctgggatta

SEQ ID NO: 521462 - DNA, 201 bp, Homo sapiens
atgttttgggtgacaggacctatggaccactatactcggggaggcagggtagcagttcttccagaatcccaagagcttctctgggattttcttgtgatatmtgattccccagtgaggcctgggacgtttttaagatcgctgtgtgtctgtaaaccctgaatctcatctggggtgggggccctgctggcaaccctgagccct

SEQ ID NO: 521463 - DNA, 201 bp, Homo sapiens
cctcggtaattcgcgcctcccgcggctgtttccagggcaacaggagtagttcactccgcgagaggccgtccacgagacccccgcgcgcagccatgagcccsgccccccgctgttgcttggagaggggcgggacctggagagaggtgcgagggcggagcatgaatggaggaggcggggcggggcatgatgggaggtgatggg

SEQ ID NO: 521464 - DNA, 201 bp, Homo sapiens
tccaagcacagaggcgggccccacgctggctcccacgcctggtcggggaggggccctcctttctgttggggtgggcctcccaaagcctggcagggcagggrctcagccagcgcccacctgcctcctccctcaggaccagctgcgcttcccgcgcatgctcatgaagctggtgagcctgcgcacgctgagctctgtgcactc

SEQ ID NO: 521465 - DNA, 201 bp, Homo sapiens
gcctggctaattttgtatttttagtagagacggagtttctccatgttggtcaggctgatctcaaactcccgacctcaggtgatctgcccacctcggcctcmcaaagtgctgggattacaggcgtgagccaccgcgcccggtccgagactgagcttttttaattcttccaatcaccaagttattgaaaccatttttgcaaaa

SEQ ID NO: 521466 - DNA, 201 bp, Homo sapiens
agtagctgggattacaggcgcccgccaccatgcctggctaattttgtatttttagtagagacggagtttctccatgttggtcaggctgatctcaaactccygacctcaggtgatctgcccacctcggcctcccaaagtgctgggattacaggcgtgagccaccgcgcccggtccgagactgagcttttttaattcttccaa

SEQ ID NO: 521467 - DNA, 201 bp, Homo sapiens
cagcctctcccgagtagctgggattacaggcgcccgccaccatgcctggctaattttgtatttttagtagagacggagtttctccatgttggtcaggctgrtctcaaactcccgacctcaggtgatctgcccacctcggcctcccaaagtgctgggattacaggcgtgagccaccgcgcccggtccgagactgagcttttt

SEQ ID NO: 521468 - DNA, 201 bp, Homo sapiens
ctcggtaattcgcgcctcccgcggctgtttccagggcaacaggagtagttcactccgcgagaggccgtccacgagacccccgcgcgcagccatgagccccsccccccgctgttgcttggagaggggcgggacctggagagaggtgcgagggcggagcatgaatggaggaggcggggcggggcatgatgggaggtgatgggg

SEQ ID NO: 521469 - DNA, 201 bp, Homo sapiens
gcctggccccccgcctagccctggggttctgctgaggcctgcatccccctacaggcgtcctttctgaagaacagatccggaagaagaagattcggaaacarcagcagcaggagtcacagtcacagtcgcagtcacctgtggggccgcagggcagcagcagctcagcctctgggcctggggcttcccctggtggatctgagg

SEQ ID NO: 521470 - DNA, 201 bp, Homo sapiens
tcctgcctcagcctctcccgagtagctgggattacaggcgcccgccaccatgcctggctaattttgtatttttagtagagacggagtttctccatgttggycaggctgatctcaaactcccgacctcaggtgatctgcccacctcggcctcccaaagtgctgggattacaggcgtgagccaccgcgcccggtccgagactg

SEQ ID NO: 521471 - DNA, 201 bp, Homo sapiens
ccgtgtctgtggggacaaggcctccggcttccactacaacgtgctcagctgcgaaggctgcaagggcttcttccggcgcagtgtggtccgtggtggggccmggcgctatgcctgccggggtggcggaacctgccagatggacgctttcatgcggcgcaagtgccagcagtgccggctgcgcaagtgcaaggaggcagggat

SEQ ID NO: 521472 - DNA, 201 bp, Homo sapiens
catccactatcgaggtaatggtccatctgcccacaaggaaccccagagatagctccaggacagatgctgggagcagagttaaggaagaccagtgcttgccsttgtaggatgacattccacggcgaatagagtcttctatgagccaaggagagaaaggaaaaagggtctgaggctgagaaaattgaggatcaggctagaggc

SEQ ID NO: 521473 - DNA, 201 bp, Homo sapiens
atggcgcaatctcggctcaccgcaacctcggctcaccgcaacctccgcctcctgggttcaagcgattctcctgcctcagcctctcccgagtagctgggatyacaggcgcccgccaccatgcctggctaattttgtatttttagtagagacggagtttctccatgttggtcaggctgatctcaaactcccgacctcaggtga

SEQ ID NO: 521474 - DNA, 201 bp, Homo sapiens; identical to SEQ ID NO: 300461

SEQ ID NO: 521475 - DNA, 201 bp, Homo sapiens
ccttgagtgtgacggtcccaatggggtagagccagctgggccatcacccagggtgtgggagaatgaggctccagagggcaggggctttgggaagagggtcycccagggtgcaggcttggcctcaaggtggccacccagacttaggctcacaaagacctgggagtgaccctggtctcctgtgtcccagccctggcccctggg

SEQ ID NO: 521476 - DNA, 201 bp, Homo sapiens
gtagaaaatactgaagaaacatgcaccctcattcattccttcactgggcagcatgtgtggcacacctactacatgccagcactcatgggcacggggcacargtggacagaaatgacaagaacgctgtaattactgctgtgttcccagccccagagactgtgggcagcgccagggtccaggatgtggggcacggtttcgggc

SEQ ID NO: 521477 - DNA, 201 bp, Homo sapiens
tttctgaagaacagatccggaagaagaagattcggaaacaacagcagcaggagtcacagtcacagtcgcagtcacctgtggggccgcagggcagcagcagytcagcctctgggcctggggcttcccctggtggatctgaggcaggcagccagggctccggggaaggcgagggtgtccagctaacagcggctcaagaactaa

SEQ ID NO: 521478 - DNA, 201 bp, Homo sapiens
aaggggacaagggataatcctggtgagattagacccccatttgggccaggaggggagggactagcagctgaagggtcacagggctcaagctccccctcccrctgccgcccttagatcatgctgctagagacagccaggcgctacaaccacgagacagagtgtatcaccttcttgaaggacttcacctacagcaaggacgac

SEQ ID NO: 521479 - DNA, 201 bp, Homo sapiens
actaatgatccagcagttggtggcggcccaactgcagtgcaacaaacgctccttctccgaccagcccaaagtcacggtactgccccctccacaaccttgartgtgacggtcccaatggggtagagccagctgggccatcacccagggtgtgggagaatgaggctccagagggcaggggctttgggaagagggtcccccagg

SEQ ID NO: 521480 - DNA, 201 bp, Homo sapiens
cagaaatgacaagaacgctgtaattactgctgtgttcccagccccagagactgtgggcagcgccagggtccaggatgtggggcacggtttcgggctgaggragtcacgggctgcctcccgccccgcaggcctgcaggtggagttcatcaaccccatcttcgagttctcgcgggccatgcggcggctgggcctggacgacgc

SEQ ID NO: 521481 - DNA, 201 bp, Homo sapiens
cagctgggccatcacccagggtgtgggagaatgaggctccagagggcaggggctttgggaagagggtcccccagggtgcaggcttggcctcaaggtggccrcccagacttaggctcacaaagacctgggagtgaccctggtctcctgtgtcccagccctggcccctgggcgcagacccccagtcccgagatgcccgccagc

SEQ ID NO: 521482 - DNA, 201 bp, Homo sapiens
ctttgtgaaggggacaagaatagggactcgggaagctgcagccaccgcccaggtgggaagggagggtggtgataggatagtagaaaatactgaagaaacaygcaccctcattcattccttcactgggcagcatgtgtggcacacctactacatgccagcactcatgggcacggggcacaggtggacagaaatgacaagaac

SEQ ID NO: 521483 - DNA, 201 bp, Homo sapiens
ttgttcttgctttctccttaacatatacatctttctaaattgcaatttccctgaatgtgagcagcaactcctctctccctccatcctctggctctttgccyggggatctcctgtgggcccatctctctggttcctgtttctccttgtggctttctcatggcctctacctacccaccccagtcatcccagatcccgaagagg

SEQ ID NO: 521484 - DNA, 201 bp, Homo sapiens; identical to SEQ ID NO: 300494

SEQ ID NO: 521485 - DNA, 201 bp, Homo sapiens; identical to SEQ ID NO: 300518

SEQ ID NO: 521486 - DNA, 201 bp, Homo sapiens
cagtgacatttgatgactgaatgaacaagtcagttttgggaatgagtttgggctttaccttgagcagtggaagccagcgctgggaccagcacgatgtgacmtaggttttaaaagcttccctttgcctttgtgaaggggacaagaatagggactcgggaagctgcagccaccgcccaggtgggaagggagggtggtgatagg

SEQ ID NO: 521487 - DNA, 201 bp, Homo sapiens
ccttcccggctgccctccctccccagcttacacctcaagcccagcacgcagtgcaccttgaacagagggaggggaggacccatggctctcccccctagccsgggagaccaggggccttcctcttcctctgcttttatttaataaaaactaaaaacagaaacaggaaaataaaatatgaatacaatccagcccggagctgga

SEQ ID NO: 521488 - DNA, 201 bp, Homo sapiens
aggaggtggggtcagaatgagaaatagggatgcttggggcagaagtgaggtagagtcttaagaagaggaggtggggggaaactacatggcatggaggccgygaaggcagagcatgattaaaggagaatgggccctacctagaaaaagcaggtggattggacctgagggggcggggcctacagcaggggcggggcttaagac

SEQ ID NO: 521489 - DNA, 201 bp, Homo sapiens
gaggcccatgatgggggctttaggggctgaacctggaaggttgagggcggagcatagtaggaggaggtggggtcagaatgagaaatagggatgcttggggyagaagtgaggtagagtcttaagaagaggaggtggggggaaactacatggcatggaggccgtgaaggcagagcatgattaaaggagaatgggccctaccta

SEQ ID NO: 521490 - DNA, 201 bp, Homo sapiens; identical to SEQ ID NO: 300471

SEQ ID NO: 521491 - DNA, 201 bp, Homo sapiens; identical to SEQ ID NO: 300521

SEQ ID NO: 521492 - DNA, 201 bp, Homo sapiens
ctgaaggctggcgtggaacagaagggggcaggtcttgttagaaggatggggagggtttgtaggctggcaggaaccagggttgtggctgagagtagggtctytggagagatggaaaaaaaagggaaagccctgtcaggacctgtaactgacctaacctaacccttcttagccccacaaggctctcaatcccctgtattctac

SEQ ID NO: 521493 - DNA, 201 bp, Homo sapiens
tttacaggcaaggaaactgaggcacggggaggttaaggaactgggctcagtgttacacaggaaggaagtgacagagacaccaggttctgccatttccaacrctcatgttaatcacttgtttcgcttctaacatccctaggtggaaaattccacaatctcaaacgatgggcctgagtagacataataagttacagaagagca

SEQ ID NO: 521494 - DNA, 201 bp, Homo sapiens
cttgccgttgtaggatgacattccacggcgaatagagtcttctatgagccaaggagagaaaggaaaaagggtctgaggctgagaaaattgaggatcaggcyagaggcgctattgcagagaaaagttgccaaaaaggcttttcagaggagttagcatttgaatcaaagtagggataacatataagtattgagcacgtgctgt

SEQ ID NO: 521495 - DNA, 201 bp, Homo sapiens
ctgggattacaggcgtgagccaccgtgccctgcctttatttttttatttttgagatgcagttttgctcctgctgcccagggtggaatgcaatggcaagatyttggctcaccacaacctctgtctcccgggttcaattctcctgcctcagcctcctgagtagctgggattacaggtgcccgccaccatgcccggctaatttt

SEQ ID NO: 521496 - DNA, 201 bp, Homo sapiens
caaccttgagtgtgacggtcccaatggggtagagccagctgggccatcacccagggtgtgggagaatgaggctccagagggcaggggctttgggaagaggrtcccccagggtgcaggcttggcctcaaggtggccacccagacttaggctcacaaagacctgggagtgaccctggtctcctgtgtcccagccctggcccct

SEQ ID NO: 521497 - DNA, 201 bp, Homo sapiens
ttggggagagctggtggtttggaggaactacagggaggcccaggcagctggagcacaaggagatggggtggagaggaggtcgggaatcccaccctaccccytcccagccgctcctctgccaccaccctggaacactgccagggtccccttgaggggccgcctgcctccacccctgcctgatggggctgctcacagcacagg

SEQ ID NO: 521498 - DNA, 201 bp, Homo sapiens
ctagcctcctgtctcactctttttaatttttttatttttatttatttgtttatttatttatttattttgagacggagtcttactctgttgccaggctggartgcagtggcgcgttctcggctcactgcaacctccgcctcctgggttcaagtgattcttctgtctcagcctcccaagtagctgggattacaggcacgtacc

SEQ ID NO: 521499 - DNA, 201 bp, Homo sapiens; identical to SEQ ID NO: 300477

SEQ ID NO: 521500 - DNA, 201 bp, Homo sapiens
tgacaagaacgctgtaattactgctgtgttcccagccccagagactgtgggcagcgccagggtccaggatgtggggcacggtttcgggctgagggagtcaygggctgcctcccgccccgcaggcctgcaggtggagttcatcaaccccatcttcgagttctcgcgggccatgcggcggctgggcctggacgacgctgagta

SEQ ID NO: 521501 - DNA, 201 bp, Homo sapiens
gaaggggtgaaagggttgcaggtcccgaccactgacccttcccggctgccctccctccccagcttacacctcaagcccagcacgcagtgcaccttgaacaragggaggggaggacccatggctctcccccctagcccgggagaccaggggccttcctcttcctctgcttttatttaataaaaactaaaaacagaaacagga

SEQ ID NO: 521502 - DNA, 201 bp, Homo sapiens
gacaagaacgctgtaattactgctgtgttcccagccccagagactgtgggcagcgccagggtccaggatgtggggcacggtttcgggctgagggagtcackggctgcctcccgccccgcaggcctgcaggtggagttcatcaaccccatcttcgagttctcgcgggccatgcggcggctgggcctggacgacgctgagtac

SEQ ID NO: 521503 - DNA, 201 bp, Homo sapiens
aagagtgcatgtgccacgtgtggtggtgcacgccaatagtcccagccactcgaggctgaggagggcagattgcttgaggctatagtgagccgtgattgtgygacggcattccagcctggtgacagagaagaccgtgtctctattttttaaaaaaagcatgtattgagtgccgactctgtacattgggttgcagtggaagtt

SEQ ID NO: 521504 - DNA, 201 bp, Homo sapiens
gcttaagaccaagctgaaggctggcgtggaacagaagggggcaggtcttgttagaaggatggggagggtttgtaggctggcaggaaccagggttgtggctkagagtagggtctctggagagatggaaaaaaaagggaaagccctgtcaggacctgtaactgacctaacctaacccttcttagccccacaaggctctcaatc

SEQ ID NO: 521505 - DNA, 201 bp, Homo sapiens; identical to SEQ ID NO: 300377

SEQ ID NO: 521506 - DNA, 201 bp, Homo sapiens
tggaaagccatttttgaattgctgattactttggctttaatcagtggtcacctagaaaaagctttgtaatcataacacaatgagtaattcttgataaaagytcagatacaaaaggagcactgtaaaactggtaggagctatggtttaagagcattggaagtagttacaactcaaggattttggtagaaaggtatgagtttg

SEQ ID NO: 521507 - DNA, 201 bp, Homo sapiens
tcagaaaggaatagtggaaaaggtatcttggttatgacaaagtcattacaaatgtgactaagtcattacaaatgtgactgagtcattacagtggaccctcygggtgcattgaaaagaatccgttttatatccaggtttcagaggacctggaataataataagctttggattttgcattcagtgtagttggattttgggacc

SEQ ID NO: 521508 - DNA, 201 bp, Homo sapiens
tacaactcaaggattttggtagaaaggtatgagtttggtcgaaaaattaaaatagtggcaaaataagatttagttgtgttttctcagagccgccacaagaytgaacaaaatgttttctgtttgggcatcctgaggaagttgtattagctgttaatgctctgtgagtttagaaaaagtcttgatagtaaatctagtttttga

SEQ ID NO: 521509 - DNA, 201 bp, Homo sapiens
ttcagaccaaattctgtgtgatgttatcctaacaaaacaccttagtaatttctttggttaacatgttaatctgtaatctcacttttataagatgaggactrttaaaatgagatgtctgttgggatgctagcgtggataagcagagcttattccattactcttcagtggatctttattttcataatggcagagatcctcact

SEQ ID NO: 521510 - DNA, 201 bp, Homo sapiens
aattattgaagaaaataaagtgaggacttaaaacaattcatgaaagtggacctttaaaagcttgtcagagttgcacaaatctaactggtattttgtttttktttttaggaggagatgttaaagtaacccatcttgcaggacgacattgaagattggtcttctgttgatctaagatgattattttgtaaaagactttctagt

SEQ ID NO: 521511 - DNA, 201 bp, Homo sapiens
ttcaaagatgctgctagtgttgataaggtaggaactatgttttgcattgtgctgcttttgtggtgttttgcaaatttttctgggggttatatggtgctgtyagattaaataaatctgtcttgtaggttttggaactgaaagaacacaaactggatggcaaattgatagatcccaaaagggccaaagctttaaaagggaaag

SEQ ID NO: 521512 - DNA, 201 bp, Homo sapiens
tatgggatgacgttgagtgtgcatctcgatttcagattgaaaatattgaacttcccatggatacaaaaacaaatgaaagaagaggattttgttttatcacrtatactgatgaagagccagtaaaaaaattgttagaaagcagataccatcaaattggttctgggaaggtaaagccatttaagcactttaaatgaaaattta

SEQ ID NO: 521513 - DNA, 201 bp, Homo sapiens
aattggtttttcttgcaggggctttgaactctagatttaattcagatttcagggtctatcagttcaccaactgatgcaaatttgaacagatactctaaggytaagtgtcctaggttggatgaactgaagctactatcaagatctcgttcccaaggattaatttagaacaaagtaattggacaagtttattggggaggggat

SEQ ID NO: 521514 - DNA, 201 bp, Homo sapiens
gagatcaagaggatttggatttgtgcttttcaaagatgctgctagtgttgataaggtaggaactatgttttgcattgtgctgcttttgtggtgttttgcamatttttctgggggttatatggtgctgtcagattaaataaatctgtcttgtaggttttggaactgaaagaacacaaactggatggcaaattgatagatccc

SEQ ID NO: 521515 - DNA, 201 bp, Homo sapiens
catgtgccgccgccattgttcccctccgctcccgctactttagcctcccgcagcctctcccattggcggccgcggccgccgcggcagctagccccgctccycccttcgctcgctcccagctccgcccggcagggggcgcgccgggcccagcgccacgtcaccgcccagcagccctcccgattggcgggcggggcggctata

SEQ ID NO: 521516 - DNA, 201 bp, Homo sapiens
gcgcgcaggcgccgcgtgggacccgggggggaggggccggcctcccagcgctgcacgctgcagctgccgccgcctcttcattgtgtctctgttaccactckgcgcggttttcctgggaagagttttagaggactgagttggggcacaagcaggcgactggtacccagattcacaaaacgtgttatgattgatgagttctct

SEQ ID NO: 521517 - DNA, 201 bp, Homo sapiens
ttactgggattggcatacgtgttcacaggcagagtagttgatctcacacaacgggtgatctcacaaaactggtaagtttcttatgctcatgagccctcccyttttttttttaatttggtgcctgcaactttcttaacaatgattctacttcctgggctatcacattataatgctcttggcctcttttttgctgctgttttg

SEQ ID NO: 521518 - DNA, 201 bp, Homo sapiens
ttggattttgcattcagtgtagttggattttgggaccttggcctcagtgttatttactgggattggcatacgtgttcacaggcagagtagttgatctcacrcaacgggtgatctcacaaaactggtaagtttcttatgctcatgagccctccctttttttttttaatttggtgcctgcaactttcttaacaatgattctac

SEQ ID NO: 521519 - DNA, 201 bp, Homo sapiens
cggggttgacggctttttggtaggagtgggctggaccggacgccagagacaaaggctcccaaggcaagagggactgtggccctgcgtcggctctgctcggractgctgaccccaggaatttacgccccttcgtttttctcttctgattcttctcttctcccaagcccgcgtcccctcacgcgtggcctctctccttgccgg

SEQ ID NO: 521520 - DNA, 201 bp, Homo sapiens
ttgctgattactttggctttaatcagtggtcacctagaaaaagctttgtaatcataacacaatgagtaattcttgataaaagttcagatacaaaaggagcrctgtaaaactggtaggagctatggtttaagagcattggaagtagttacaactcaaggattttggtagaaaggtatgagtttggtcgaaaaattaaaatag

SEQ ID NO: 521521 - DNA, 201 bp, Homo sapiens
tcattcttttaagatttaatgcttgctttttctttttatagctaatagtgaaatctacaaaccaaaacaagaacttttaaatctgggatataaattaaagrtcatatgcacagatcaatttatgttcttgtaataaacttattagaaattggtgtttgtgatagcattttacttgggttactagagatgcttctagtagac

SEQ ID NO: 521522 - DNA, 201 bp, Homo sapiens
tccttgccgggagggccgcgatggaggtcccgcccaggctttcccatgtgccgccgccattgttcccctccgctcccgctactttagcctcccgcagcctytcccattggcggccgcggccgccgcggcagctagccccgctcctcccttcgctcgctcccagctccgcccggcagggggcgcgccgggcccagcgccacg

SEQ ID NO: 521523 - DNA, 201 bp, Homo sapiens
agaacgcatcattttatgttagaattgggggtcagaagttgtttcctaacaatcattgtgcattgtttcaggtcagggccaaaactggaaccaaggatttwataactattatgatcaaggatatggaaattacaatagtgcctatggtggtgatcaaaactatagtggctatggcggatatgattatactgggtataacta

SEQ ID NO: 521524 - DNA, 201 bp, Homo sapiens
taagtcattacaaatgtgactgagtcattacagtggaccctctgggtgcattgaaaagaatccgttttatatccaggtttcagaggacctggaataataawaagctttggattttgcattcagtgtagttggattttgggaccttggcctcagtgttatttactgggattggcatacgtgttcacaggcagagtagttgat

SEQ ID NO: 521525 - DNA, 201 bp, Homo sapiens
aaaataagcaataattaaggcacagttgattttgtagagtattggtccatacagagaaactgtggtcctttataaatagccagccagcgtcaccctcttcyccaatttgtaggtgtattttatgctcttaaggcttcatcttctccctgtaactgagatttctaccacacctttgaacaatgttctttcccttctggttat

SEQ ID NO: 521526 - DNA, 201 bp, Homo sapiens
tttataacagctggaaaaatagtttttcaagcagatagcaatatatatgtccattctgccctttaagatttgcagagtgagagacaagaacgcatcattttatgttagaattgggggtcagaagttgtttcctaacaatcattgtgcattgtttcaggtcagggccaaaactggaaccaaggatttaataactattatgat

SEQ ID NO: 521527 - DNA, 201 bp, Homo sapiens
tgggctggaccggacgccagagacaaaggctcccaaggcaagagggactgtggccctgcgtcggctctgctcgggactgctgaccccaggaatttacgccycttcgtttttctcttctgattcttctcttctcccaagcccgcgtcccctcacgcgtggcctctctccttgccgggagggccgcgatggaggtcccgccca

SEQ ID NO: 521528 - DNA, 201 bp, Homo sapiens
atgctcttggcctcttttttgctgctgttttgctattcttaaacttaggccaagtaccaatgttggctgttagaagggattctgttcattcaacatgcaaytttagggaatggaagtaagttcatttttaagttgtgttgtcagtaggtgcggtgtctagggtagtgaatcctgtaagttcaaatttatgattaggtgacg

SEQ ID NO: 521529 - DNA, 201 bp, Homo sapiens
atagtgaaatctacaaaccaaaacaagaacttttaaatctgggatataaattaaagatcatatgcacagatcaatttatgttcttgtaataaacttattaraaattggtgtttgtgatagcattttacttgggttactagagatgcttctagtagaccttaatctagcatagttgaacctctgaatatgggaaggttgtat

SEQ ID NO: 521530 - DNA, 201 bp, Homo sapiens
ctatctaatttagctaaaacatgggcacttaaatgtggtcagtgtttggacttgttaactagtggcatctttgggtacaaaataatattaatttctctcartgcttcaaatatacaacaaatcactgtaggctgatgttgatcataaagcagtgatgtctgtatagaagtcacccgataagaataacatgtttaagttgaa

SEQ ID NO: 521531 - DNA, 201 bp, Homo sapiens
ttttgctgctgttttgctattcttaaacttaggccaagtaccaatgttggctgttagaagggattctgttcattcaacatgcaactttagggaatggaagkaagttcatttttaagttgtgttgtcagtaggtgcggtgtctagggtagtgaatcctgtaagttcaaatttatgattaggtgacgagttgacattgagatt

SEQ ID NO: 521532 - DNA, 201 bp, Homo sapiens
ttgaacctctgaatatgggaaggttgtattcccagattctttcctgaatagatttgaatttaatgtcatttgggaactccagggtgagtttattgactacycaaactgtattttaccaataaatatgcatatgatctttaattattgaagaaaataaagtgaggacttaaaacaattcatgaaagtggacctttaaaagct

SEQ ID NO: 521533 - DNA, 201 bp, Homo sapiens
acaccgtggtgtgataggttttcttgggcaggagtccttgttttaaacagaacagtgtacctgtcttcggctttaatggaaaattgaatgattttccattmagtttaggaagtttgatactggcacaattggactttctgcctccttttttataacagctggaaaaatagtttttcaagcagatagcaatatatatgtcca

SEQ ID NO: 521534 - DNA, 201 bp, Homo sapiens
ggtttcaaaaaactgttaaaagtgtggccactttgacaattagtgtcatcactgataggaaaagtgtaccattacatgatacaccgtggtgtgataggttytcttgggcaggagtccttgttttaaacagaacagtgtacctgtcttcggctttaatggaaaattgaatgattttccattaagtttaggaagtttgatact

SEQ ID NO: 521535 - DNA, 201 bp, Homo sapiens; identical to SEQ ID NO: 426446

SEQ ID NO: 521536 - DNA, 201 bp, Homo sapiens
ctgtaggtcactttttgcttttgcaaggtaagatgctcacttgtatgagaaacagcgtattatgcacctgtagaactggtggacctgtgactcattctttytgttatgactggtgtttgcttccaggtaatagcagtgagtgcccgcctccaggaaatgctgaagatgacactgtttgcttggatcttggcaagtgtaagg

SEQ ID NO: 521537 - DNA, 201 bp, Homo sapiens
cgggagccgggctcgtgggcacccacgcagtcactttggtgacgcgcgaaggtcgttgccccttggagtccgtttgcaagaagctcggcctccgcgcttgytcacccacagcaaggctgcccccagggagtccggagcccgcgtcccgctgcgtggttcccggaagaaaagcggttgggggcccttctaagcccaccccgc

SEQ ID NO: 521538 - DNA, 201 bp, Homo sapiens
caggctggtctcaaactcttgacctcagatgatccacccaccttgacctcccaaagtgttgggattacaggcgtgaaccaccacgcctggcctctagttctttttttttttttttttggagacagagtctcgctctatcatccaggctggagtgcagtaatgtgatcttggctcactgcaacctctgcctccctgtttcaa

SEQ ID NO: 521539 - DNA, 201 bp, Homo sapiens
ggctggtctcgaacccctaacctcaagtgatccacctgccttggcttcccaaagtgctgggattacaggtgtgggtcaccacacccagccaaaaaaattayattttaaacacagaaatgtattcaaaaggataggaaaaaaggttccattttcatgtgatccactgttggcttctctgaagaaaccaatacatctactcct

SEQ ID NO: 521540 - DNA, 201 bp, Homo sapiens
tagaagaatttagtgtttaggaattattattgttttccatctcagtcgtatatattttctgttttagccactttggagatttgttaatgataccaaagacraaagaatgttagtttataaatctgaagatatcaagaatgtttcacgtttgcagtctccaaaagtgtgtggttatttaaaagtggataatgaagagttgct

SEQ ID NO: 521541 - DNA, 201 bp, Homo sapiens
atttgaggaaaaaataaaactgaagataggtcctagttctaaagcagaatactgtatttactttttttctttttttttttgagatggagtcttgctctgtkgcccaggctggagcgcagtggcacaatcttggctcactacaacctccgcctcccggattcaagtgattctcctgcctcagcctccctagtagctgggatt

SEQ ID NO: 521542 - DNA, 201 bp, Homo sapiens
aataaaataagttgattaacacatttttaaaatatgtattattactgtgttcttacaatcaagtaagctagagaaaggaaaatgttatgatgaaaatcatwaaaaaaaaaaaaagcccggcatggtggtgtgtgcctgtagtcttctgttactcaggaggctgaggtgagaggattgcttgagtccagaaattcaggctgt

SEQ ID NO: 521543 - DNA, 201 bp, Homo sapiens; identical to SEQ ID NO: 426458

SEQ ID NO: 521544 - DNA, 201 bp, Homo sapiens; identical to SEQ ID NO: 426459

SEQ ID NO: 521545 - DNA, 201 bp, Homo sapiens
ttggcagttgtctgccacggccccttacttgtttctggggaagacattcgaggtactcaccaagagatagagtgaagatggaattctttttagaagggaayacagttgacccaggaacagtgcgggggtgtggttagaagcactgaccttcttccctctgcagtcgaaaatcctcacgtgactttttttttttaaggctct

SEQ ID NO: 521546 - DNA, 201 bp, Homo sapiens
ccatgcctgactaatttttgtattttttactagagtcggggtttcactatgttggccaggctgttctcaaactcctgacctcaagtgatccacctgcctcrgcctcccgaagtgctgggattaaagacatgagccaccacgcccagcctgtgtgtggcttctttcacttagaataatgtttccaaggttcatctgtgttgt

SEQ ID NO: 521547 - DNA, 201 bp, Homo sapiens
tcacccaggctggagtgcagtggcacgatcactgcaacctctgcctcctgggttcaagtgattctgtggcctcagcctgttgagtagctgggattacaggygcccaccaccatgcccggctgatttttgtgtttcagtagagatggggtttcaccgtgttggtcaggctgttctcgaactcctggactcaagttatctgcc

SEQ ID NO: 521548 - DNA, 201 bp, Homo sapiens; identical to SEQ ID NO: 426464

SEQ ID NO: 521549 - DNA, 201 bp, Homo sapiens
aggtgatactctcacctcagcctcccaagtagctgggaccacaggtgtgcaccaccatgcctggctaatttttttttttttttttttgagacgaagtctcrccctgtctcccaggctggagtgcaatggcgtgatctcagctcactgcaacctccgccccctgggttcaagcagttctcctgcctcagcctcccgagtagt

SEQ ID NO: 521550 - DNA, 201 bp, Homo sapiens
agcttactatttatataaataatcctgggttaaacttgcatagtgagataatatttcccccaacttttatttatttatttgagatggagtcttgctctgtygcccaggctggagtgcagtggcgcaatctcggctcactgcagtctccgcctcccaggttcaagcatttctcctgcctcagcctcccaagtagctgggatt

SEQ ID NO: 521551 - DNA, 201 bp, Homo sapiens
gctgtgtataatgatcataatgagagctcagaaacgtattccattcctaggcgtttccctagggatggatgtgcaaattacaaagtaccttgaaacgtggytgtgtgttttggggtgaagcacggttcatctaaatctggttaaaactatcatttggactttgttgtcaagcttaatggtgtagatttgagctctaggaaa

SEQ ID NO: 521552 - DNA, 201 bp, Homo sapiens
cagtggctcacacttgtaatcagcactttgggaggctgaggcgggtggactgcttgagcccaggaatttgagaccagcccaggcaatatagggagaccttrtctctactcctccacaaaaaaaaaaaaaaaaaaaaaattagctgggcatggtggcacatgcctgtggtctcagctacttagaatgctgaagcagtaggat

SEQ ID NO: 521553 - DNA, 201 bp, Homo sapiens; identical to SEQ ID NO: 426465

SEQ ID NO: 521554 - DNA, 201 bp, Homo sapiens
tctttggctgttatgtgtaaacagttcctctgttactttgcatgttatgttttatttttcctctgcttgacaacttgtgccagagaaacatttttctaccmctttttgtctactcttccaacctgtcaaactgttgaattttccttctcttttcatagtctctgcatttctaatcatgttcactatagttcagtgctgccc

SEQ ID NO: 521555 - DNA, 201 bp, Homo sapiens
gaggaactgaattgtaaattctattttatttaaatttttaataatgtttgcctgtgatgggagacgggaatgggcattaactgtaaaaggacatgagtgasattactggaaggatggaaatgtcctaaaattgacttatagcaatggtttcaacacttggtaaagttattagaaatcactgagttatatacttgaaatgga

SEQ ID NO: 521556 - DNA, 201 bp, Homo sapiens; identical to SEQ ID NO: 426467

SEQ ID NO: 521557 - DNA, 201 bp, Homo sapiens
gtatctgaacaacgacacctgctgcaacagcgactgcacgttgaaggaaggtgtccagtgcaggtgaggagtctctccacagggattttgggaagttggtrtaacaagatgtccaaaataagagaagactgaacttgcaggggctttagaatcaactgaaaggggtgtgagtgtgtttgtttacatctacctcttttgccc

SEQ ID NO: 521558 - DNA, 201 bp, Homo sapiens
agccaaaatatgtgtctttaggatccaagttaaatttgctcagattacatttttttttttttaagatggcatctcgccctgtcacccagactggagtgcartggcgcgatctcggctcaccacatcctctgcctcccaggttaaagcgattctcctgcctcagtcccttgagtagctggaattacaggcgtgtgccaccat

SEQ ID NO: 521559 - DNA, 201 bp, Homo sapiens
atctcctgacctcatgatctgccagcctcggcctctgaaagtgctgagattaaaggcgtgagccactgtgcctggccagcttattaattcttaagccaaawtatgtgtctttaggatccaagttaaatttgctcagattacatttttttttttttaagatggcatctcgccctgtcacccagactggagtgcaatggcgcg

SEQ ID NO: 521560 - DNA, 201 bp, Homo sapiens
ttttttcttttttttgagatggagtatcactctgtcactcaggctagagtgcactggcgtggtctcggctcactgcaacctctggctcctgggttcaggcrgttctcccgccttagacccttgagtagctcagactacaggcacatgctacctcacctggctaatttttgtatttttagtagagacggggtttcaccatgt

SEQ ID NO: 521561 - DNA, 201 bp, Homo sapiens; identical to SEQ ID NO: 426483

SEQ ID NO: 521562 - DNA, 201 bp, Homo sapiens
agattatctgtacttggacagataactactattgacattttgacagacatccttccaaatttttttttctatgtgtaaatacacaaataaatatagttatrcccactattttttcctgcaaaactaggaccatacaatatgtacagtttgtcttcacacatttttcgtttaacaatatgattatgaaccttttcgtgttaa

SEQ ID NO: 521563 - DNA, 201 bp, Homo sapiens; identical to SEQ ID NO: 426484

SEQ ID NO: 521564 - DNA, 201 bp, Homo sapiens
acctttattttaaaatatatgctcattgcaaaattcggaaaatagattatctgtacttggacagataactactattgacattttgacagacatccttccamatttttttttctatgtgtaaatacacaaataaatatagttatacccactattttttcctgcaaaactaggaccatacaatatgtacagtttgtcttcaca

SEQ ID NO: 521565 - DNA, 201 bp, Homo sapiens
cttggagataaaatacttggtgatcctattacgtatgtatttgagaaaatttatcaaacaagcaattgcagtttactttttgacctttttctgcaatgagraaaaaaaatgtcattgaaatccacaaatagtatagttcctaggcctgtacattctaaatcatgctttctgtctctcttagttcttcctttacctagaagt

SEQ ID NO: 521566 - DNA, 201 bp, Homo sapiens; identical to SEQ ID NO: 426486

SEQ ID NO: 521567 - DNA, 201 bp, Homo sapiens
agaccatcctggctaacacggtgaaaccccgtctctactaaaaatacaaaaaattagccaggcgtggtagcaggcgcctgtagtcccagctatttgggagkctgaggcaggggaatggcgtgaacccaggaggtggagcttgcagttagccgagattgcgccactgcactccagcctgggcgacagagtgagactccgtct

SEQ ID NO: 521568 - DNA, 201 bp, Homo sapiens; identical to SEQ ID NO: 426487

SEQ ID NO: 521569 - DNA, 201 bp, Homo sapiens
gcgtcattaaagtttaaaacaagaacaaaaacaaagatagctgaagtaatcagtttgtatcagggctgaattaactctatgaaacccctcattacttgatrgtaaatgagaagattccgtttttcgatagcagtggaaggcaaagtaatttaaaccaagatcattgcattaaatttggatgtaactattagaggttgaaaa

SEQ ID NO: 521570 - DNA, 201 bp, Homo sapiens
agtttccatactaaatatttaatgggaaatttatctaacagtctatggaattttataccaggtgttttaaaataggttatttcctttaatccccaaaaccrttcagttattaggtgatattatttccatttgtagataaatacttaggattcaaagattgaggccaaggtcggacagtgagtaaatgaaagtaggacttaa

SEQ ID NO: 521571 - DNA, 201 bp, Homo sapiens
caggctggagcgcagtggcacaatcttggctcactacaacctccgcctcccggattcaagtgattctcctgcctcagcctccctagtagctgggattacargtgtgcaccaccacagccagctaatttttgtatttttagtagagtcagggtttcaccatgttggccaggctggtcttgaactcctagcctcaagtgatcc

SEQ ID NO: 521572 - DNA, 201 bp, Homo sapiens; identical to SEQ ID NO: 426490

SEQ ID NO: 521573 - DNA, 201 bp, Homo sapiens
gtcataagttgattattgttgaagctggtgaggggcacgggggcattcatgataccatcctgtctacttcatagatgcttgaatatttctgtaatagaaastgtaaaatatgtgactaggaacaaaatttaagtagccacatatggttggtggctaccatattgcatactgtttctctaagtaataggtcatatgcttctt

SEQ ID NO: 521574 - DNA, 201 bp, Homo sapiens; identical to SEQ ID NO: 426491

SEQ ID NO: 521575 - DNA, 201 bp, Homo sapiens
tattgcatactgtttctctaagtaataggtcatatgcttcttggttatgaggatagtgtcagaacttgggagcaaaatgttttactttgcagactgcctgrgtggacatgcatgctgctgactcttcctgctgccagttctggggctcttcaaaacagccctgtaagaacttgccagtgaggcatggtggctcacacctgt

SEQ ID NO: 521576 - DNA, 201 bp, Homo sapiens; identical to SEQ ID NO: 426492

SEQ ID NO: 521577 - DNA, 201 bp, Homo sapiens
gatggggtttcaccatgttggccaggttggtcaactgactggtcaacaaactcctgacctcaggtgatccacctgcctcgacctctcaaagtgctgggatkacaggcatgagctgctgtgcccagcctatgttttaaatgaattccttaataaaaatatttttaactgatgaaaagggcttacaggacaaaaataaagtag

SEQ ID NO: 521578 - DNA, 201 bp, Homo sapiens
tggacttctctgtggacagatgacattagtgaaaaggaatgtaggacctttgagattgtaacttcttaggaaggtttgctgaacggaagaggaagtcttakgacaaggatgcaaacagaagctgccagatcttcagggatgtgtaggcagaaagccagagttgcgggttggtccttttatcgttagtgctctccagctgct

SEQ ID NO: 521579 - DNA, 201 bp, Homo sapiens
tggctcacgcctgtaatcccagcactttggagaccgaggtgggcagatcatgaggtcaagagatcgagaccatcctggtcaacatggtgaaaccctgtttytacaaaaaatacaaaaattagctgggcgtggtggcatgcacctgtagtcctagctactcaggaggctgaggcagaagaatcacttgaacccgggaggcgg

SEQ ID NO: 521580 - DNA, 201 bp, Homo sapiens
acaaaaattagctgggcgtggtggcatgcacctgtagtcctagctactcaggaggctgaggcagaagaatcacttgaacccgggaggcggaggttacaatragccaagattgtgcctctgtagtccagcctggtgacagagcaagactccatctaaaaaaaaaaaaaaaaaaaaaaaaaaacagatttgaagatgtttttt

SEQ ID NO: 521581 - DNA, 201 bp, Homo sapiens
cagatttgaagatgttttttaaaaagccagttagtatttctgtgtaagatgaggtctttgctatctttctgaaagtagctcctttggtgtctgatttggtrgttacaggcacctttggagggtctcatacacttggctctcaggggcttcatgattgttgtctggggtgaaagtgaagccattttggcatctgcagagcac

SEQ ID NO: 521582 - DNA, 201 bp, Homo sapiens
cttaattcttgtcactgcatgagtggcatgcctgaggtgaggagatttcaagtctgatggagctacgagctctctgttgtgctattctgcttgtccttaartgggctttgactgggatgtttggtctcagtatttgtatagcttgcttaccttcgtaagaagaattatagatccttaaccaagttcacatcagccatttag

SEQ ID NO: 521583 - DNA, 201 bp, Homo sapiens
accatgttggccaggctggtctcgaactcctgacttcgtgatctgcctgcctcagcctcccaaagtgttgggattacaggcgtgagccactgctcctggcygcccaaagaatcttttgggcaacagagataagatttaacaagggtataagatttaacaaggtttttttatggctacatcctaatagcaaaattttggaaa

SEQ ID NO: 521584 - DNA, 201 bp, Homo sapiens
taaaactgaagataggtcctagttctaaagcagaatactgtatttactttttttctttttttttttgagatggagtcttgctctgtggcccaggctggagygcagtggcacaatcttggctcactacaacctccgcctcccggattcaagtgattctcctgcctcagcctccctagtagctgggattacaggtgtgcacca

SEQ ID NO: 521585 - DNA, 201 bp, Homo sapiens
tgcatctggccatctttattctttatataggacaagccttctcaactatgttaaaaaataaaaggaatatgtgcgtctggtttaaaaaacaagccatggakgatatgcaaagtttttacttctaactcagttagacttctcagacccagagaggtttcctttgtaaacttccaattttttgttttgttttgttttttgttt

SEQ ID NO: 521586 - DNA, 201 bp, Homo sapiens
ttagggtaggagggtaggagggtagggtattgggtagaggataaagaaggggtttgggaaaggtggggggtgtctcttggcagttgtatggttaaattgartttttgttttatttagtgatatgtgttttttgggtacatgtgatattttgatacctgtgtataatatgtagtgatcaaatcagggtgattgggataccca

SEQ ID NO: 521587 - DNA, 201 bp, Homo sapiens
gcagttctcttgcctcagcctaccgagtagctgggattataggcgtctgctgccatgcccagctaattttttgtatttttagtagagacagggttttgccrtgttggccaggctggtcttgaactcctgacctcaggtgatccacccgcctctgcctctccaagtgctgggattacaagtgtgagccaccatgcccagcca

SEQ ID NO: 521588 - DNA, 201 bp, Homo sapiens; identical to SEQ ID NO: 426496

SEQ ID NO: 521589 - DNA, 201 bp, Homo sapiens
atggctacaccattttacagtctcagcagcattgtatgagggtcccagcttctccatatcctcaccaacacttgttatcttttttattgtaactatcctargttttgtgataaggatgcaaacagaaagctggaggtcttcagggacctagtgaatgaagttgtgtcctattttggcttgattttggttttccgtgtgcat

SEQ ID NO: 521590 - DNA, 201 bp, Homo sapiens
ctccttgggtcaagcaattctctcaccttgacctcccaaagtgctgggattacaggagcgagccaccgccctcagccccatgttcttaaaaaccttttgtraacgacatttaaaatagttgcagattttttcccctgtctttggaagtgttacaacatccaaccatttcacagttactaatttaccatcattctggttttt

SEQ ID NO: 521591 - DNA, 201 bp, Homo sapiens
ggaagaactgtttttactatagtttgtaatggcttcagaatcttcaatttgagatatccagttattaaaagagaatcaattgcagttgaaatgcattagtyaagtattttaaagtgctttagcaagctacatttaaaaagtgcttattatagaaaatatacccaaaataaccaatgatgttactgtcttgtgcttattttt

SEQ ID NO: 521592 - DNA, 201 bp, Homo sapiens
tttggaagtgaagtgcagtgaaatattgagtacctgagaggttacttgttagtgaaaacacaatagcagtagtacgtagctacagtttggctccaaaggargaactgtttttactatagtttgtaatggcttcagaatcttcaatttgagatatccagttattaaaagagaatcaattgcagttgaaatgcattagttaag

SEQ ID NO: 521593 - DNA, 201 bp, Homo sapiens
acggagttttagcatgttggccaggatggtctcgatctcctgacttcatgatctgcccaccttggcctcccaaagtgctgggattacagaggggagccacygtgcctggcctttattttctttttgagacagggtctcagtctgttgcccaagatggagtgcagtggcatgatcatggctcactgcagcctcaacctccca

SEQ ID NO: 521594 - DNA, 201 bp, Homo sapiens
tcaccatgttggccaggctcatctcgaactctcctgacctcaggtgatccacccacctcggcctcccaaagtgttgggttgggattataggtgtgagccayctcgcccagcccatcttgtcttttttaaattaatgcgttaaatgaatgaaaaccaagggcaccaagatgtttcacaggtgattgctgtgttcccattctt

SEQ ID NO: 521595 - DNA, 201 bp, Homo sapiens; identical to SEQ ID NO: 426507

SEQ ID NO: 521596 - DNA, 201 bp, Homo sapiens
tagtgtggcatttatgtgacctcacgcacattaggaagggacaaagtgtgtgcaggtagctctagcagcggagatgtctgatgatgtaggagtgggtgacrgagccaggaggtcttccccggtgatcttcaggtcactgtaacgtaactgtagcgtttgatttgatatggggccataatttgaattgctctgttcctgtct

SEQ ID NO: 521597 - DNA, 201 bp, Homo sapiens
aagtgtgtgcaggtagctctagcagcggagatgtctgatgatgtaggagtgggtgacggagccaggaggtcttccccggtgatcttcaggtcactgtaacrtaactgtagcgtttgatttgatatggggccataatttgaattgctctgttcctgtctgctgttcttctccagtgacaggaacagtccttgctgtaaaaac

SEQ ID NO: 521598 - DNA, 201 bp, Homo sapiens
acaatcaaaatgacaatcttgggataatgaatgttatcatgaatctatgcactggaatagtgtggaggaagcaggatacaagttagaagggtaaccagttyttctatatgtatctatatgtatttcactgttggggacacctacatattgtttagttatatgattggctgtgttttacttacaagtcaccaagtggtagct

SEQ ID NO: 521599 - DNA, 201 bp, Homo sapiens
ctcctggcccatgtgtttgttttttatttgcaaaatgcagaccacctgtgccagaagaatgcatagacttttcttttttcttttcttttctttttctttctttttttttttttttgaggcagtgttttgctcttgttgcccaggctggagtgcaatggcgtcatctcagctcaccacaacctccgcctcccgggttcaagc

SEQ ID NO: 521600 - DNA, 201 bp, Homo sapiens
tcctggcccatgtgtttgttttttatttgcaaaatgcagaccacctgtgccagaagaatgcatagacttttcttttttcttttcttttctttttctttctttttttttttttttgaggcagtgttttgctcttgttgcccaggctggagtgcaatggcgtcatctcagctcaccacaacctccgcctcccgggttcaagca

SEQ ID NO: 521601 - DNA, 201 bp, Homo sapiens
gtgatcgcccaccttggctttctctctctttttttttttttggattttgagacaggatctggcctcgttgcctaggctggagtgcagtggcacgatatcarctcactgcaacctctgcctcctgagctcaagccatcctcccacctcagcctcctgagcagctgggactgcaggtgtacaccaccacgcctggctaatttt

SEQ ID NO: 521602 - DNA, 201 bp, Homo sapiens
atttatgcagtcatcacaattaattttagaacatttacattactccagaaagaaaccctgtatcctttagctatgatcctccaatccccccattccccacractcagagcaaccactaaccaccctattctttatggagttgtctgttttgaacatttcatataaatggaattatacaatatggtttcgtgaccacatatt

SEQ ID NO: 521603 - DNA, 201 bp, Homo sapiens
tttctagacctatttttatacatagttaagattatacaatatgaatatttctgaaatctatatttaacattataacatatgtatttttccatgttctttctttttttttttttttgagactgggtctcatcctgtcacccaggctggagtgcagtggtgctatcttggcttactgcagccttgacctcctgggctcaagtg

SEQ ID NO: 521604 - DNA, 201 bp, Homo sapiens
tcttttaaataaacgtaagtaaaacaatttgaaaacgtttgttcttatcaaacagccttttgttcccttgatattttatacaaaatagtagatagcagagkataagttcctgataaggaatcagtattttctagcaggaaaagctagagaacaacaacctcaaaaaaaaaaaaaaaaaagaagaagaaagaaaaaaagcaa

SEQ ID NO: 521605 - DNA, 201 bp, Homo sapiens
ctggcggtagaatcttcccagtaggcggcgcgggagggaaaagaggattgaggggctaggccgggcggatcccgtcctcccccgatgtgagcagttttcckaaaccccgtcaggcgaaggctgcccagagaggtggagtcggtagcggggccgggaacatgaggcagtctctcctattcctgaccagcgtggttcctttcg

SEQ ID NO: 521606 - DNA, 201 bp, Homo sapiens
tactttgagttgttaccttcctttagcttagttcagtggttttttctttttcttttttgagatggagtcttgccttgttgcccaggctggagagtagtggkgtgatctcggctcactgcaacctccgcctcccaggttcaagcagttctcttgcctcagcctaccgagtagctgggattataggcgtctgctgccatgccc

SEQ ID NO: 521607 - DNA, 201 bp, Homo sapiens
tttctagcaggaaaagctagagaacaacaacctcaaaaaaaaaaaaaaaaaagaagaagaaagaaaaaaagcaattagcatttcacaaccagcagcagcarcatcacctgggagcttattagaaatggaaattgtcagtcccctccctggatctactgcatcaaaaaatgtgggaagggaggccagcagtctgtgctgtgt

SEQ ID NO: 521608 - DNA, 201 bp, Homo sapiens
gaccatacaatatgtacagtttgtcttcacacatttttcgtttaacaatatgattatgaaccttttcgtgttaatatagatctaaattagggttttttttktttgtttgtttgttttttgagacggagtcttgctctgtcacccaggctagagtgcaatggcgtgatcttggctcactataacctctgcctccccggttca

SEQ ID NO: 521609 - DNA, 201 bp, Homo sapiens
gctcccttcctccatttggaggttgtgcgaatgacagcagtggtgagatccaagccgaggatgaggggatggggaagggcagggtggtgtctggagacagscatctctgcatgcagatccaccatacctgggagacctatcctgttggtgtttcttcttgctgcagtttcaggccatatggcaggctttgaggtgggagag

SEQ ID NO: 521610 - DNA, 201 bp, Homo sapiens
taatcagcactttgggaggctgaggcgggtggactgcttgagcccaggaatttgagaccagcccaggcaatatagggagaccttgtctctactcctccacaaaaaaaaaaaaaaaaaaaaaattagctgggcatggtggcacatgcctgtggtctcagctacttagaatgctgaagcagtaggatcagttgaattcggaag

SEQ ID NO: 521611 - DNA, 201 bp, Homo sapiens; identical to SEQ ID NO: 426508

SEQ ID NO: 521612 - DNA, 201 bp, Homo sapiens
gctgaggtgggtggatcacttcaggccaggagttcgaggccagcctggccaacatggtgaaacctcgtctctactaaaaatacaaaaattagccaggcttrgtggcttgcgcccgtaatcccaactgctcgggaggcctaggtgggagaatcgcttgaacctgggagacagaggttgcagtgagctgagatcgctccactg

SEQ ID NO: 521613 - DNA, 201 bp, Homo sapiens
tcttttctttttctttctttttttttttttttgaggcagtgttttgctcttgttgcccaggctggagtgcaatggcgtcatctcagctcaccacaacctcygcctcccgggttcaagcaattctcctgcctcagcctcccaagtagctgggattacaggcatgtgccaccacgtccggctaattttttgtatttttagtag

SEQ ID NO: 521614 - DNA, 201 bp, Homo sapiens
cgtgatccgcccacctgggcctccctaagtgctgggattacaggcatgaaccaccgctcctggcccatgtgtttgttttttatttgcaaaatgcagaccayctgtgccagaagaatgcatagacttttcttttttcttttcttttctttttctttctttttttttttttttgaggcagtgttttgctcttgttgcccaggc

SEQ ID NO: 521615 - DNA, 201 bp, Homo sapiens
tggttgttatttgttaaaaaataacatgattgtcaagtaactatagtatttggcatgaaaataagaggtttgttccagaaattttcatcttcttttgtttrtaatgtaagagttgaaaactctggaaaataatgggaacaacagagattagactttaaaaaagattagggaaaagggaaatggagtgatctgagggaaaat

SEQ ID NO: 521616 - DNA, 201 bp, Homo sapiens
gttgtactggtttcacttcatttgacagtgttctgctaatgactagacgtgtatctctgacctggacttgttctctggagttcatattcagctgcccattkggcacttcaaatataacatgtccaaaattagttaccttttttttttttttgagacagagtctcactgtcacccaggctggagcgcagtggcgcaatcttg

SEQ ID NO: 521617 - DNA, 201 bp, Homo sapiens; identical to SEQ ID NO: 426447

SEQ ID NO: 521618 - DNA, 201 bp, Homo sapiens
ttccttttttttttttctttgttgttacatgagttgtactggtttcacttcatttgacagtgttctgctaatgactagacgtgtatctctgacctggactkgttctctggagttcatattcagctgcccatttggcacttcaaatataacatgtccaaaattagttaccttttttttttttttgagacagagtctcactgt

SEQ ID NO: 521619 - DNA, 201 bp, Homo sapiens; identical to SEQ ID NO: 426448

SEQ ID NO: 521620 - DNA, 201 bp, Homo sapiens
tagctaaataaattagttcatttgtcgttacaggagatatattgctctaagtacctaataagactttagttgtaacttgcatagtgttttattaatgtcamtgcttctggctttttaagaaagtttaattatgtgaaaatgagacttaaaatttgtgtgcttagagtaaaatatgaatgcatttttcttcaggcattttaa

SEQ ID NO: 521621 - DNA, 201 bp, Homo sapiens
tggataagggatgctcaatctgtatctctttatttactcctaaaatcagccaaggaaatgggcatctctccgttcccccccttccttttttttttttcttkgttgttacatgagttgtactggtttcacttcatttgacagtgttctgctaatgactagacgtgtatctctgacctggacttgttctctggagttcatatt

SEQ ID NO: 521622 - DNA, 201 bp, Homo sapiens
tgtgttgcccaggctgatctcaaatgtctgactgtaagcaatcctcttgcttggcctcccaaagtgctgggattacaggtgtgagccactgtgcgcagccrttaaatattttaaaccgtcactgactttaccatagcttactatttatataaataatcctgggttaaacttgcatagtgagataatatttcccccaacttt

SEQ ID NO: 521623 - DNA, 201 bp, Homo sapiens; identical to SEQ ID NO: 426449

SEQ ID NO: 521624 - DNA, 201 bp, Homo sapiens
gagttcgaggccagcctggccaacatggtgaaacctcgtctctactaaaaatacaaaaattagccaggcttggtggcttgcgcccgtaatcccaactgctygggaggcctaggtgggagaatcgcttgaacctgggagacagaggttgcagtgagctgagatcgctccactgtactccaatgtgggtgacagggtgaaact

SEQ ID NO: 521625 - DNA, 201 bp, Homo sapiens; identical to SEQ ID NO: 426450

SEQ ID NO: 521626 - DNA, 201 bp, Homo sapiens
ggattaccaaagatgtatatgcatataatatttaacagttttattgagataaaattcacatactatattattcacccacttaatgtatacaattttgtagttttgtgtgtgtgtgtgtgtgtgtgtatttttgagatggagtctcactctgtcacccaggctggagtgcagtggcacgatcactgcaacctctgcctcctg

SEQ ID NO: 521627 - DNA, 201 bp, Homo sapiens; identical to SEQ ID NO: 426451

SEQ ID NO: 521628 - DNA, 201 bp, Homo sapiens; identical to SEQ ID NO: 426452

SEQ ID NO: 521629 - DNA, 201 bp, Homo sapiens
agaaggttatatccatcttgggacaatccatttagggtcatttaaaaaacgtaaccatcttggaattttactgcccaaaacacctctggttaggttttttgttttgttttgttttgttttgttttgcagcgcgatctcggctcactgcaacctttgacttccaggttcaggtgattctcctgcctcagactcctgagtagc

SEQ ID NO: 521630 - DNA, 201 bp, Homo sapiens; identical to SEQ ID NO: 426453

SEQ ID NO: 521631 - DNA, 201 bp, Homo sapiens
gacaatccatttagggtcatttaaaaaacgtaaccatcttggaattttactgcccaaaacacctctggttaggttttttgttttgttttgttttgttttgttttgcagcgcgatctcggctcactgcaacctttgacttccaggttcaggtgattctcctgcctcagactcctgagtagctggattataggcatgtgccac

SEQ ID NO: 521632 - DNA, 201 bp, Homo sapiens; identical to SEQ ID NO: 426454

SEQ ID NO: 521633 - DNA, 201 bp, Homo sapiens; identical to SEQ ID NO: 426455

SEQ ID NO: 521634 - DNA, 201 bp, Homo sapiens
accatcaaaactgcagagtccaccccagtaaacttaccacacagtggcagaggagaccagaatgggccttctctgcaggcaggcaggcaggcaggcaggcrgagagactcacagaaactctgagctgagcatggtttccttctttatctcacacttactaatgggagcctttgttacttttttttttcttctttgcaggtt

SEQ ID NO: 521635 - DNA, 201 bp, Homo sapiens; identical to SEQ ID NO: 426456

SEQ ID NO: 521636 - DNA, 201 bp, Homo sapiens
ttgagcctgggaggtcgaggctgcagtgagctgtgattgcgtcactgcattccagcctaggtgacacagcgagaccctgtctcaagcaaaataaatcaaaccccccccccaaattaaggtttttttaaacttggagacgctggacggttatggtagaggtttttaaagtaatgtatgaagcccttttaaattaagaaaaaa

SEQ ID NO: 521637 - DNA, 201 bp, Homo sapiens
cagagggcaagattacttctgcttttccctggctctgacaccctgctttctgaaatttctgcctcctgttctttttgtgatctttgattgttgcatctcatttttttttggctttttatgtatattttctgcatctcattttctttggctgttatgtgtaaacagttcctctgttactttgcatgttatgttttatttttc

SEQ ID NO: 521638 - DNA, 201 bp, Homo sapiens; identical to SEQ ID NO: 426457

SEQ ID NO: 521639 - DNA, 201 bp, Homo sapiens
gtaaagtcctgggctcaagtgatccacccttctaagcctcctaaagtgtggagattctaggtatgaggcaccatgcctggcccaaataatcttttatttctttttttttttttttgagacggagtcttgctctgtcgcccaggctggagtgcagtggcgtgatcttggctcactgcaacctccgcctcctgggttcaagcc

SEQ ID NO: 521640 - DNA, 201 bp, Homo sapiens; identical to SEQ ID NO: 426460

SEQ ID NO: 521641 - DNA, 201 bp, Homo sapiens; identical to SEQ ID NO: 426462

SEQ ID NO: 521642 - DNA, 201 bp, Homo sapiens; identical to SEQ ID NO: 426461

SEQ ID NO: 521643 - DNA, 201 bp, Homo sapiens; identical to SEQ ID NO: 426463

SEQ ID NO: 521644 - DNA, 201 bp, Homo sapiens
tatttttcttttgaagaatgactttttttttcagtttgtttgacagcttacaatataatttgttacttaaccttaccattagattgagttggtcaagactrgcaaatagtttcatagttgaaaaacatgctttattatttattttttatgtttattgtcctacaaatactactatattgcagtactcaatatcgattaggc

SEQ ID NO: 521645 - DNA, 201 bp, Homo sapiens
ttcactatgttggccaggctgttctcaaactcctgacctcaagtgatccacctgcctcggcctcccgaagtgctgggattaaagacatgagccaccacgcycagcctgtgtgtggcttctttcacttagaataatgtttccaaggttcatctgtgttgtagcatgtatctgtatcttatttatttttattgctgaatagta

SEQ ID NO: 521646 - DNA, 201 bp, Homo sapiens; identical to SEQ ID NO: 426466

SEQ ID NO: 521647 - DNA, 201 bp, Homo sapiens
gcatatgtctgcttatttccttagaataatttattcttttttgtttttttgagactgagtctcactctgttaccaggctggagtgcagtggcgtgatctcrgctcactgcagactctgcctcctgggttcaagccattctcctgcctcagcctcccgagtagctgggattacaggtgcgcaccaccacacccagctaattt

SEQ ID NO: 521648 - DNA, 201 bp, Homo sapiens
atctgaagatatcaagaatgtttcacgtttgcagtctccaaaagtgtgtggttatttaaaagtggataatgaagagttgctcccaaaagggttagtagacrgagaaccacctgaaggtaagacttaaagagtgtatttcaaataagaaacaaacatactacaattgacttcagtaggggtggttgttatttgttaaaaaat

SEQ ID NO: 521649 - DNA, 201 bp, Homo sapiens; identical to SEQ ID NO: 426468

SEQ ID NO: 521650 - DNA, 201 bp, Homo sapiens; identical to SEQ ID NO: 426469

SEQ ID NO: 521651 - DNA, 201 bp, Homo sapiens
tgcatggatatgccacattttgtttattcattcattggttgatagacatttgggttgcttccacttttttgctataacaaataatgctgctgtgaacatttatctatgagtttttgtgtggacagttcctttggatattattcaggaatagaatttctgggtcatgtggtaactatgcttaatcttttgaggagctgtcag

SEQ ID NO: 521652 - DNA, 201 bp, Homo sapiens; identical to SEQ ID NO: 426470

SEQ ID NO: 521653 - DNA, 201 bp, Homo sapiens
gcatggatatgccacattttgtttattcattcattggttgatagacatttgggttgcttccacttttttgctataacaaataatgctgctgtgaacatttatctatgagtttttgtgtggacagttcctttggatattattcaggaatagaatttctgggtcatgtggtaactatgcttaatcttttgaggagctgtcaga

SEQ ID NO: 521654 - DNA, 201 bp, Homo sapiens; identical to SEQ ID NO: 426471

SEQ ID NO: 521655 - DNA, 201 bp, Homo sapiens
catggatatgccacattttgtttattcattcattggttgatagacatttgggttgcttccacttttttgctataacaaataatgctgctgtgaacatttatctatgagtttttgtgtggacagttcctttggatattattcaggaatagaatttctgggtcatgtggtaactatgcttaatcttttgaggagctgtcagac

SEQ ID NO: 521656 - DNA, 201 bp, Homo sapiens; identical to SEQ ID NO: 426472

SEQ ID NO: 521657 - DNA, 201 bp, Homo sapiens
atggatatgccacattttgtttattcattcattggttgatagacatttgggttgcttccacttttttgctataacaaataatgctgctgtgaacatttatctatgagtttttgtgtggacagttcctttggatattattcaggaatagaatttctgggtcatgtggtaactatgcttaatcttttgaggagctgtcagact

SEQ ID NO: 521658 - DNA, 201 bp, Homo sapiens; identical to SEQ ID NO: 426473

SEQ ID NO: 521659 - DNA, 201 bp, Homo sapiens; identical to SEQ ID NO: 426474

SEQ ID NO: 521660 - DNA, 201 bp, Homo sapiens; identical to SEQ ID NO: 426475

SEQ ID NO: 521661 - DNA, 201 bp, Homo sapiens; identical to SEQ ID NO: 426476

SEQ ID NO: 521662 - DNA, 201 bp, Homo sapiens; identical to SEQ ID NO: 426477

SEQ ID NO: 521663 - DNA, 201 bp, Homo sapiens; identical to SEQ ID NO: 426478

SEQ ID NO: 521664 - DNA, 201 bp, Homo sapiens; identical to SEQ ID NO: 426479

SEQ ID NO: 521665 - DNA, 201 bp, Homo sapiens; identical to SEQ ID NO: 426480

SEQ ID NO: 521666 - DNA, 201 bp, Homo sapiens; identical to SEQ ID NO: 426481

SEQ ID NO: 521667 - DNA, 201 bp, Homo sapiens; identical to SEQ ID NO: 426482

SEQ ID NO: 521668 - DNA, 201 bp, Homo sapiens; identical to SEQ ID NO: 426485

SEQ ID NO: 521669 - DNA, 201 bp, Homo sapiens
taaaaaaaagaacaatcatctgtgtgtgcagaggtcatggtgggactgattaccatgaaacagaacggccgccctacacacttgtgggcgtgcagtgcttyctgacagcagcacggtcctaattagtgatgacttgaggctggggtgaaagactggggaaagtctagtaaactacatttacatcaaagcccacagtttgat

SEQ ID NO: 521670 - DNA, 201 bp, Homo sapiens
tagagaagggatgaggtgaactaagctgtattatggaagaggacagcaatggagtggcatacacgcgaaccttgtactatgcagtaacccggaaaaacacrgaaaacttcaaccataataatataaaaagaacaatgtgaaaaaaatgttggaaacactggaagcaaatgccaatatgcaacagtagactgttgagtgtga

SEQ ID NO: 521671 - DNA, 201 bp, Homo sapiens
agagtagacttggactcgaacagcagcagtggagatgaagacagaaaagattcaagtgcaacttagaatccttattattaactcaaattggttaccccagrggagagggtaaccagcagcggttgctatcggcagatcttgatggtttcaatgggagctgcacatacatgcctggaagaagaatccaaaattctaaaataa

SEQ ID NO: 521672 - DNA, 201 bp, Homo sapiens; identical to SEQ ID NO: 426488

SEQ ID NO: 521673 - DNA, 201 bp, Homo sapiens; identical to SEQ ID NO: 426489

SEQ ID NO: 521674 - DNA, 201 bp, Homo sapiens
cacagcaccacgcctgggtgatttttgttatttttagtagagacagagtttcaccatgttggccaggctggtcttgaactcctcacctcaagtgatccacsatctcggcctcccaaagtgctgggattacagacaggggccactgcatctggccatctttattctttatataggacaagccttctcaactatgttaaaaaa

SEQ ID NO: 521675 - DNA, 201 bp, Homo sapiens
gaaatgctagatcaatgaaaggtggtagttcatagtctgagaagttaaagaggaagctaggaaagtcaggctgtggtcactcttccattgaaagagtagcratagaaatcaagaccacagtggctgcattggttaagacacatatctatctgtcagatattagtctacaaaacaaaacgtttcctcataattgtgaattga

SEQ ID NO: 521676 - DNA, 201 bp, Homo sapiens
gcccaggctggagtgcagtggcacaatctcagctcactgcaacccccacctcctgggttcaagcaattctcctgcctcagcatcacaagtagctggaattrcaggcgtgaaccacagcactcggccccatatcaagtgaatttattatgaggctagtaagagtcactgtgattcttgttcctaaataagagagatttttac

SEQ ID NO: 521677 - DNA, 201 bp, Homo sapiens; identical to SEQ ID NO: 426493

SEQ ID NO: 521678 - DNA, 201 bp, Homo sapiens
aaaataagcagaaatgcaggattagtgaaaatgcccggctttatatatttgaggaaaaaataaaactgaagataggtcctagttctaaagcagaatactgkatttactttttttctttttttttttgagatggagtcttgctctgtggcccaggctggagcgcagtggcacaatcttggctcactacaacctccgcctccc

SEQ ID NO: 521679 - DNA, 201 bp, Homo sapiens; identical to SEQ ID NO: 426495

SEQ ID NO: 521680 - DNA, 201 bp, Homo sapiens; identical to SEQ ID NO: 426494

SEQ ID NO: 521681 - DNA, 201 bp, Homo sapiens
ctgcctcagcctccctagtagctgggattacaggtgtgcaccaccacagccagctaatttttgtatttttagtagagtcagggtttcaccatgttggccargctggtcttgaactcctagcctcaagtgatccacctgccttggcctcccaaagtgttgggattacaggcaggagtcaccatgcccagcctgtatttactt

SEQ ID NO: 521682 - DNA, 201 bp, Homo sapiens
cagcagcggttgctatcggcagatcttgatggtttcaatgggagctgcacatacatgcctggaagaagaatccaaaattctaaaataatgggcagttgatytagtagttagttctagaataatggacaaattaattagcaatttagcagtattcaggctgttgaaataaaggccatttgacattaaaagtaaacaggctcc

SEQ ID NO: 521683 - DNA, 201 bp, Homo sapiens
gggagctgcacatacatgcctggaagaagaatccaaaattctaaaataatgggcagttgatctagtagttagttctagaataatggacaaattaattagcratttagcagtattcaggctgttgaaataaaggccatttgacattaaaagtaaacaggctcccccagagaaacgaatgcattttattttaggtaacaaaag

SEQ ID NO: 521684 - DNA, 201 bp, Homo sapiens; identical to SEQ ID NO: 426497

SEQ ID NO: 521685 - DNA, 201 bp, Homo sapiens; identical to SEQ ID NO: 426498

SEQ ID NO: 521686 - DNA, 201 bp, Homo sapiens; identical to SEQ ID NO: 426499

SEQ ID NO: 521687 - DNA, 201 bp, Homo sapiens; identical to SEQ ID NO: 426500

SEQ ID NO: 521688 - DNA, 201 bp, Homo sapiens; identical to SEQ ID NO: 426501

SEQ ID NO: 521689 - DNA, 201 bp, Homo sapiens; identical to SEQ ID NO: 426503

SEQ ID NO: 521690 - DNA, 201 bp, Homo sapiens; identical to SEQ ID NO: 426502

SEQ ID NO: 521691 - DNA, 201 bp, Homo sapiens; identical to SEQ ID NO: 426504

SEQ ID NO: 521692 - DNA, 201 bp, Homo sapiens
acatctcaatgctagtttttgcgaaagtagaaacttttgcaatggcctctaaactgagattttttctttccccatagattttatattgcattgccaggagwggtaaagagttacataatgtcttttttcttttttaaatacacacagatagagctaattgacagagttgatgacatctatcggaacacttcatgggataat

SEQ ID NO: 521693 - DNA, 201 bp, Homo sapiens; identical to SEQ ID NO: 426505

SEQ ID NO: 521694 - DNA, 201 bp, Homo sapiens; identical to SEQ ID NO: 426506

SEQ ID NO: 521695 - DNA, 201 bp, Homo sapiens
gacaaggatgcaaacagaagctgccagatcttcagggatgtgtaggcagaaagccagagttgcgggttggtccttttatcgttagtgctctccagctgctkgggagttgtaactctgacaaatcagtgaagaggtcttcttatctgttcactgtgaattttaactccattttaacctgataaaatggaacccagagataca

SEQ ID NO: 521696 - DNA, 201 bp, Homo sapiens
ggcttccggctgtgggtggtgcgggggacagcggcggccggaagctggctgagccggcctttggtaacgccacctgcacttccgggggcgtcgagcctggmggtagaatcttcccagtaggcggcgcgggagggaaaagaggattgaggggctaggccgggcggatcccgtcctcccccgatgtgagcagttttccgaaac

SEQ ID NO: 521697 - DNA, 201 bp, Homo sapiens
atgattatatagaagataaatgaatactctttaaaaaaaccatcatctcataaaaaattagccagctgtggtggcgtgtgcctgtggtcccagataagagkctgaggtgggaggatcactgagccgggaaggttgaggctgcagtgagctgtgactgcaccactgcactccagcctgggcggcactgcgagaccgggtctc

SEQ ID NO: 521698 - DNA, 201 bp, Homo sapiens
gagacagagtcttgctctgtggcccagtctggagggcagtggcaccatcttggctcactgtaacctctgccttctgggttcaagcagttctcctgcttcarcctcctgagtagttgggattacaagcacctgtcaccacgcctggctaatttttgtatttttgttttagagacagggtttcaccatgttggccaggctggt

SEQ ID NO: 521699 - DNA, 201 bp, Homo sapiens
tgaagatgttgctagaggtaggtcttagaatcctggatatggtgctaacaccactttgtcatttctgatatgtggattgtatgtgttttaatgaaggagcrtgttagaaaagatggacacccagaagcagtctcctccagctgatccagcagtaaccccatcccatgtagcagcatagacaacaaataacaaaaactctat

SEQ ID NO: 521700 - DNA, 201 bp, Homo sapiens
atgtatttttgtgggatatatgaaaattaaagcataaagaagaaaataaaaatggcctgtcagccttcttttgaaacatgtgaggaccactgcttttctcraaccctctgtcctggacccctctgacctgcagcaactcttagagctccctgtctcctagtcctgcagtgcagctgtcattcaaggcatcccacaccctct

SEQ ID NO: 521701 - DNA, 201 bp, Homo sapiens
gttttttaaatttctgcctaaataaaatttatgtatttttgtgggatatatgaaaattaaagcataaagaagaaaataaaaatggcctgtcagccttcttytgaaacatgtgaggaccactgcttttctcgaaccctctgtcctggacccctctgacctgcagcaactcttagagctccctgtctcctagtcctgcagtgc

SEQ ID NO: 521702 - DNA, 201 bp, Homo sapiens
aaaaccatccttacaaaggtatgttcttttatttctaaaagaatagtgttagagtttattgtagtagaacctcagttatatatttatgtaggtattttttwaaaaaatgtaatatatactgttttttaaatttctgcctaaataaaatttatgtatttttgtgggatatatgaaaattaaagcataaagaagaaaataaaa

SEQ ID NO: 521703 - DNA, 201 bp, Homo sapiens
gacttcaacatttgaattgtggggtggcacaattcagccagtagcaggaagattaaatgacttgtctgattagtcatacaactggtgatggcagaggttgwattgagcacagatctcctgactcctagaacagctgaaccactgcgcctgtctgcttttctgtgagcctccagacagcccatggcaggggaggaaccaaag

SEQ ID NO: 521704 - DNA, 201 bp, Homo sapiens; identical to SEQ ID NO: 426509

SEQ ID NO: 521705 - DNA, 201 bp, Homo sapiens
tgcagcctgtttattgtcaaaccagttcctttccccaaagacattcatgtcactagtttcatatgtatctttctagagatgtcgtatgcaggtatagtgtrtgtatatgtctgtatttgacacaacggtgctatgcagtacacttttacaccttgctttttcatttcacagtatgttggagagtacttcatgttcatgcat

SEQ ID NO: 521706 - DNA, 201 bp, Homo sapiens; identical to SEQ ID NO: 426510

SEQ ID NO: 521707 - DNA, 201 bp, Homo sapiens
acagagtgtgtctagtaatgttatattaatgtcatcttaataatagctcatattaaaagttatttcaaattgctaggactaattaaaaaggcttctgacawagggtattgctttgggcagagagacattttgatatgtaaattatataaattgttatctctatttttttccaagctttttgtagtaaaccatatttttata

SEQ ID NO: 521708 - DNA, 201 bp, Homo sapiens
ttcactaagtggaagtggatcatcataatggtcttcatgttgagtaggctgaggaggaagaggaagagttgatcatattgtctctggtgacagaggctcarggaaatccatatgtaagtggacacttgaagttcaaatctgttgttcaagggtcaactgtatttcaggtatactgattgacttttaaatttaatttttatt

SEQ ID NO: 521709 - DNA, 201 bp, Homo sapiens
ttctcacctggcttttttgagagttgagggaattaatttgtatgtagtttgaatatcccttatctgaaatgcttggggccagaagtgtttcacattttagrttgtcttagatttcggagtgtttgcattatatgtatgggttgagcatcccaaacctgaaaatttaaaattcgaaacgctcctatgagcatttcctttgag

SEQ ID NO: 521710 - DNA, 201 bp, Homo sapiens
gaaagattagaagtcctggctgtatttgcctccacagtcttggcacagttgggagctctctttatattaaaagaaaggtacatttgtataggatattattytaaatccccccatgacacctttgggaacatgaaagaaacccgtcagacacatttgctttcaagggtatgaaaacttagatgagcagggctggagttttga

SEQ ID NO: 521711 - DNA, 201 bp, Homo sapiens
gaagtcctggctgtatttgcctccacagtcttggcacagttgggagctctctttatattaaaagaaaggtacatttgtataggatattattctaaatcccsccatgacacctttgggaacatgaaagaaacccgtcagacacatttgctttcaagggtatgaaaacttagatgagcagggctggagttttgatagtacact

SEQ ID NO: 521712 - DNA, 201 bp, Homo sapiens
acatattttatcatttcatttatatgaaatgtccaaaacaggcaaatctatggagagaaaaagtagattatgaagaagttttctttgcttaaaggaaagtaatctactaaataagtaaaattatcaacatagaacaaacacacaaacaacaataattagagacataacagtaattagagggcaggtggggcggctcatgcc

SEQ ID NO: 521713 - DNA, 201 bp, Homo sapiens
gccgctttggggtttttaggtcagtcagatgtgctgttgcttcctgctgcacagattgtgttaccttgaaggtcttacaccttttatttgggttttcatargggtactaggttactttctttgttttaatggaaatatttgaggcatttcaaacactgccaccactgctgccatcttgcaagaatcccaacataattttta

SEQ ID NO: 521714 - DNA, 201 bp, Homo sapiens
acaggcacgagccactgtgcctggccctgccttacatttttatctgaacttcttctgtcctttgtctcaactgtactactcagtttggattctcttgccawtgtttctttttgatatggagcttttttttttttttttggaggggagctttgcctggttactttcgagactcatagggctcagactattccagcccttatt

SEQ ID NO: 521715 - DNA, 201 bp, Homo sapiens
gtccacattttttttcatcatacctcttcctactaattaacataattattagttatttttccactaaactttgaaaggaaagaattctaaaaactggagtwtttttctttgaaatgtttctttgcaagtagtggccaattgtgataaaattgtgtcctgttgctcagtcctgttgctttagataattaatgttcaggagat

SEQ ID NO: 521716 - DNA, 201 bp, Homo sapiens
aactacagtaacacaacttgcttcagcataaaatttcgtattttctaattcagtttgaacctcaataccagagagactttattatgacacggttttactcrtacgttaggaatgatgaggaaaatacagaaaatgtaaagcactataatcttatcatctaaagaaaactgctgttgatattttggtgtttatacatttatt

SEQ ID NO: 521717 - DNA, 201 bp, Homo sapiens; identical to SEQ ID NO: 62854

SEQ ID NO: 521718 - DNA, 201 bp, Homo sapiens
gaattcaattacctaattgagggattttttggtgtttagagacagggtctcactctgttgcccaggctggtgttgaactcctggcctcaagcagtcctccygccttaatctcccaaacaatagaggaatgtttttattttttttccatcaaacatgttaatgataataatacaggagtgtccagataagacaaatttgtag

SEQ ID NO: 521719 - DNA, 201 bp, Homo sapiens
gtaatcccaacatagagttttttatttacattgagtgtacaatttggtgacattgcatgcagccattaccaccatccatctccagaacctttttcctcctkccttccttaaattccatgctcattaagcagctttccttttcctcctcctcacagcccctggaaaccaccattctagtttctgtctctaggaatttgactt

SEQ ID NO: 521720 - DNA, 201 bp, Homo sapiens
catttttggaccctaggttttggctcattggtatgttcttttacatatgactttagttataatttaaaatatagtcttccatttttaaaactgaaaaaaartatttccttaaaatttttatagagcctttgattcctagttatgttaagcagagtctaaaatgtacatgaattcaattacctaattgagggattttttggt

SEQ ID NO: 521721 - DNA, 201 bp, Homo sapiens
tttaaacaacttcatgaatgttatgaagataaattgtgtttgtatgagttaaagaagtactgcatgaattagaaaattaaataatgataattaagatcacyagaatttcttgaaaaaaattcataatttataaaatactataacacttactctagaaatttttaagatggtgcaaagatttagaaacactgtttccctgta

SEQ ID NO: 521722 - DNA, 201 bp, Homo sapiens
acccccatctcttgaaaaaaagaaaaaagtggataaagtaattctaataaggggttgggaggtttagatgaggtaatatgttaagcactctggtgtctaaygcacagtgggtcaattaagtgttattattatgattgtgattatttctagaaaataaggactataattgggtcctggtaattgtcttttttttttttttaa

SEQ ID NO: 521723 - DNA, 201 bp, Homo sapiens
ggattacaggcgtgagccactgcacccggcctgaaattttttttagatatttattttccctcagtaaatgtgctttggcttttgtgtaatctgcttatgamtattttattatttcctgccactgaatcagtgagactttaaaatttcaaacttaaaatcttaaatgacacattgctacttactgaaatgataggaacaccc

SEQ ID NO: 521724 - DNA, 201 bp, Homo sapiens
tagagactgggtttcgccatgttagccaggctggtcttgaactggcctcaagtgatgtgcctgcctcggcctcacaaagtgctgggattgcatgtgtgagycaccgcgcctggctctttactgcttttatgtgccacatttttcacaaatcagtggactatatatgtgtaggtctgtttctagattctcttttctgtacaa

SEQ ID NO: 521725 - DNA, 201 bp, Homo sapiens
ttgccaggctgtagtgcagtggcgcaatctcagctcactgcaacctccacctcccaggctcaagcaattctccttcctcggcctcctgagtaggtgagacyacaggcgcgtgccaccatgcccagctaactttttcttttttttttgagacagagtcttgctctgtcgcccaggctggagtgcaatggtgccgtcttggct

SEQ ID NO: 521726 - DNA, 201 bp, Homo sapiens
tagaagccttactgtttgatttttcatatttaatcctacaatccagttggaatagatttttttggtatggtgtgaagcaggagtaaaggcatattctggaytgcagtggcgcaattcggctcacttcaacctccatctcccaggttcaagcaattctcgtgcctcagcctcccaggcagctgggattacaggcccgcacca

SEQ ID NO: 521727 - DNA, 201 bp, Homo sapiens
tggaaatcaaattcacttgaagtgaatgtggaaggtaatggcctaatgaccaccctattataaatgctatgatttttatttattttatttagttatttagktattttttttttgagacagtcttgctctgttgccaggctgtagtgcagtggcgcaatctcagctcactgcaacctccacctcccaggctcaagcaattct

SEQ ID NO: 521728 - DNA, 201 bp, Homo sapiens
taatccacccaccttggcctcccaaagtgctgggattataagcatgagccaccgcacccggcctttttttttttttttttttttttttttttgaggcagartctaactctgtagcccatgttggagtacagtggcatgatcatagctcattgcagccttcaacacctgggctcaagtggctctcctgcctcagcctcctga

SEQ ID NO: 521729 - DNA, 201 bp, Homo sapiens
caggggagtggcttgaacccgggaggcggagcttgcagtgagccaagattgcgccactgcattccagcctgggcgacagagcgagattccaaaaaaaaaaaggcagtttcccagggccggatgtgcgtgtaagcactgtggttccttctgtcttaccctatgccttttccaagacttagggcagtagttccatctccagaa

SEQ ID NO: 521730 - DNA, 201 bp, Homo sapiens
ccaagaatgatcaataaagaaaaaaataataataataataataataaaaccctcccctttgcatagttgcaaaaattgaagttgtcagcacagagtcctgwgtaatcaggcccctaccaaccttactaaccatccatctatctattcctgaccatttgtggttttattgctgggtcagggttttcatgcccctgcacatgc

SEQ ID NO: 521731 - DNA, 201 bp, Homo sapiens
aggcaggagaatcacttgagaccgggaggcggagactgcagtgagccaagattgtgccactgtactccatcctccgtctcaaaaaataaaaaataaaaagyaatttcatagaagtagggaccctgtcttgttttctgtaatatctttgtgcaatttgatgaattttaagaaatgaatacatttgtatagttactatctgga

SEQ ID NO: 521732 - DNA, 201 bp, Homo sapiens; identical to SEQ ID NO: 301082

SEQ ID NO: 521733 - DNA, 201 bp, Homo sapiens
ggcgctacactcaggtcactgcaacctttgcttcctgggttcaagcgattctcctacctcagcatcccgagtagctgggactacagccatgtgccaccacrcctggctaatttttgtatttttagtagagctggggtttcactacattgaccaggatggtctcaaattcctgacctcaggtgagccacccgccttgaacct

SEQ ID NO: 521734 - DNA, 201 bp, Homo sapiens
aatcttcctatatttatattgtgacaaaatcacaaatttaaagctattattatttttcaagtgaaaagaatgttacttctttttttttttttttttttttwtgagacagagtctctctctcttgaccaggctggagtgcagtggcgctacactcaggtcactgcaacctttgcttcctgggttcaagcgattctcctacct

SEQ ID NO: 521735 - DNA, 201 bp, Homo sapiens; identical to SEQ ID NO: 301083

SEQ ID NO: 521736 - DNA, 201 bp, Homo sapiens; identical to SEQ ID NO: 301084

SEQ ID NO: 521737 - DNA, 201 bp, Homo sapiens; identical to SEQ ID NO: 301080

SEQ ID NO: 521738 - DNA, 201 bp, Homo sapiens
ttgtttgtctgttgaccttccctccactgttgtcctgtgaccctgccaagtccccctctgcgagaaacacccaagaatgatcaataaagaaaaaaataataataataataataataaaaccctcccctttgcatagttgcaaaaattgaagttgtcagcacagagtcctgtgtaatcaggcccctaccaaccttactaacc

SEQ ID NO: 521739 - DNA, 201 bp, Homo sapiens
ataatgtcctcaaggttcatctatgttgtaacatgtcagaatttccttcctttttaattggaatgctgaatcacattttccaatgcataatgggtaaacartgcattttgtttacccatttatccatcagtggatatttgaattggttgcatttctttgactattgtgaataataccactgtgaacacgagtgtacaaata

SEQ ID NO: 521740 - DNA, 201 bp, Homo sapiens
aaaagcctgggtttgaatttctgctcagccatttactagctctgtgactttggatgacttactaaaagttgtctccaccacataggtttattgtgaatatkaaatccataaatacacataaagtgtctagaataagtgcttgatgtatattgagtacttaataaatattggttatttatatcataggaaccactatatcat

SEQ ID NO: 521741 - DNA, 201 bp, Homo sapiens
attattgcttattcttaccaagtatgccatacattttcattgcttttccctcagtgtggaatgcgtctctactttttgaaattctgtttaatcaccaaccrtagattaaatgccatcttcttttgaagtcctcttcaattggaattaatacctaccttttcggctcttacattgtattttttgtatgtttcatttatattc

SEQ ID NO: 521742 - DNA, 201 bp, Homo sapiens
gtcatatttttttaaaaagtatttcacaagaatggttgtaaacagatctacttaccagttatacctttgaattaaaaaacctctttttattgtctcttttyaaaaaaaaattactagttgaagttttttgtctgtctcaagcaaataaacatatttcagctctttctagttgacagatagtttgacaaaaaaatgcctgac

SEQ ID NO: 521743 - DNA, 201 bp, Homo sapiens
tatattatgcaccaaaaattaggtcatcatagttgaggtatgtgtctgctatttgcaaataaattggtcatatttttttaaaaagtatttcacaagaatgrttgtaaacagatctacttaccagttatacctttgaattaaaaaacctctttttattgtctcttttcaaaaaaaaattactagttgaagttttttgtctgt

SEQ ID NO: 521744 - DNA, 201 bp, Homo sapiens; identical to SEQ ID NO: 62853

SEQ ID NO: 521745 - DNA, 201 bp, Homo sapiens
gtctaattggtgtcttaaacttaggaaaaaattcttggtttcttcctcaaaaacctattcctttgtagttttccccgtctcagtaaataccatcagcactstgttgctcaaacaaaaaattctgggaatttctgttgattactgtctctcatcacccacatttaatctattagcagattaattatgtcaaggtaacctaca

SEQ ID NO: 521746 - DNA, 201 bp, Homo sapiens
aacaattttttaaaaataaagccttttaggaaataggctttacagctgctttaagcttaacatgttatggcatatgattctttggctacccaccttttaartattagtctttactagaatttgtccttattgttcttgctgttttatgtattttccttaaaaatcacatgcaagtatttgtttttgtttgctacttctgtg

SEQ ID NO: 521747 - DNA, 201 bp, Homo sapiens
gaggcagaggttgcagtgagtcgagattgtgccactgcacaccagcctgggtgacagagcgagactctgtctcaaaaaaaaaaaaattagtttggggagtsagatgcagtggctcatgcctgtaatcccagcattttgggaggcccaggtggtcgatcacttgagtttaggagtttgagaccatcctgagcaaagagcgag

SEQ ID NO: 521748 - DNA, 201 bp, Homo sapiens
acagcgtttacctgtagcaagatactgttaatgctaaaagtccttacttatcctttgtaagatggagcaacagtagatgggacatgggtgatggggctagwaactaagttcagattctgtatctggaaacaccaaatcattaaagcagaccactttaccttcccacctcttagtccctctacgtattgaaattacatactg

SEQ ID NO: 521749 - DNA, 201 bp, Homo sapiens
aactggatttgtgatagcaatagatcaacaaataatttgagatttgtttccataattactgaggccaggtgtggtggctcatgcctgtaaccctagcactytggtaggttgaggcaggaggattgcttgagttagaagccagcctgggcaacatagtgagatctgtcgctgcaaaaaatgtttttaattagctgcacatgg

SEQ ID NO: 521750 - DNA, 201 bp, Homo sapiens
tgatcagtttaattccacaaagtctgacttgtccagtatatcgtaaaacaaataccattgatatttatacagatttataacagcgtttacctgtagcaagrtactgttaatgctaaaagtccttacttatcctttgtaagatggagcaacagtagatgggacatgggtgatggggctagaaactaagttcagattctgtat

SEQ ID NO: 521751 - DNA, 201 bp, Homo sapiens
gtctccactactgccagcccagaccaagctactttcatttacagccagtgtttttctttttaaacctgtatcatattatccctctccccttaaaaccatcyagttgtttcccgtaatacttagaataaaatcctaactcctttttctaatttacaaagcccttatatgatcaggaccctgcctacttttcttcaacttaat

SEQ ID NO: 521752 - DNA, 201 bp, Homo sapiens
tgcactccagcctgggcaacagagcgagactctgtctcaaaaaaaaaaaaaaaaagcatgccttttattaatcaggtaactaacatatttaactgggtctracgcagatagttgttacctcaatttcatattgtagtaacttgttttacagtgaatctactatagttggaaaatgaacataattttatctcactcaaaatg

SEQ ID NO: 521753 - DNA, 201 bp, Homo sapiens
tgggtatagggaacccacttatctgtgtaattaaatattatgtagccttagacaataaagtcaaagcattttatggttttgaggtcctaatgaggggaaamagcaagatacacaacagtgtatatagtatgctgcaatttgtattaaaaagggggaaagaataagaatacgtacatgtatacacatccacacactacactc

SEQ ID NO: 521754 - DNA, 201 bp, Homo sapiens
cttgtttgtctgttgaccttccctccactgttgtcctgtgaccctgccaagtccccctctgcgagaaacacccaagaatgatcaataaagaaaaaaataataataataataataataaaaccctcccctttgcatagttgcaaaaattgaagttgtcagcacagagtcctgtgtaatcaggcccctaccaaccttactaac

SEQ ID NO: 521755 - DNA, 201 bp, Homo sapiens
tcacttgtttgtctgttgaccttccctccactgttgtcctgtgaccctgccaagtccccctctgcgagaaacacccaagaatgatcaataaagaaaaaaataataataataataataataaaaccctcccctttgcatagttgcaaaaattgaagttgtcagcacagagtcctgtgtaatcaggcccctaccaaccttact

SEQ ID NO: 521756 - DNA, 201 bp, Homo sapiens
agaataagtgcttgatgtatattgagtacttaataaatattggttatttatatcataggaaccactatatcatatcataggaactctgaagatgattaaayatctaaatgctgatttgtatatgtttgtttgaaaggggacaattcatctctttcgaaaaccacaaagatccttttttggcaagttgttacgggaatttag

SEQ ID NO: 521757 - DNA, 201 bp, Homo sapiens
ttacctacaccaacacccaagccattaatttgaggtgccatgagaataggtgaaccacagcctaacaccatttaggtttttgtgtttttttcaggcttgcctctacttaaatatatttagatgagagagttctcttagacttctttctttgtaaggaagggttatttggggaagtgttggaaaaaagattagggcagggta

SEQ ID NO: 521758 - DNA, 201 bp, Homo sapiens
atcccaaccacctgggaggctgaagcaggagaatcgcttgaacccaggaagtggaggaggttatatatatatgagacatatatacacacacacacacacamaaatataaaatatgtgttgatatatatatataaacatatatatatgtttatttgtcccctctttcccattctcattgctgctgtccctattaagaccttt

SEQ ID NO: 521759 - DNA, 201 bp, Homo sapiens
gttcaagaccagcctggccaacatggcaaaaccccgtctctgctaaaaatacaaaaattagctgggcgtggtgatgcacacctgtaatcccaaccacctgsgaggctgaagcaggagaatcgcttgaacccaggaagtggaggaggttatatatatatgagacatatatacacacacacacacacacaaatataaaatatg

SEQ ID NO: 521760 - DNA, 201 bp, Homo sapiens
gcgcctgtgatcccagctacttgggaggctgaggcaggagaatcccttgaacccggtaggcggaggttgcagtgagccgagatcacgtcattgcactcctrcctgggtgacaaaagtgaaactccatctcaaaacaaaaaaaaaagaaaaaagatttgtgaaattacttgaaatttgagtgggaaataatattaagtactt

SEQ ID NO: 521761 - DNA, 201 bp, Homo sapiens
ggggttccaccatgttggccaggctggtcttgaactcctgacctcaagtaatccacccaccttggcctcccaaagtgctgggattataagcatgagccacygcacccggcctttttttttttttttttttttttttttttgaggcagagtctaactctgtagcccatgttggagtacagtggcatgatcatagctcattgc

SEQ ID NO: 521762 - DNA, 201 bp, Homo sapiens
cttgaacctggaaggaagaggtttcagtgagccgagatggcactactgcactccagcctgggcaacagagcgagactctgtctcaaaaaaaaaaaaaaaaagcatgccttttattaatcaggtaactaacatatttaactgggtctaacgcagatagttgttacctcaatttcatattgtagtaacttgttttacagtgaa

SEQ ID NO: 521763 - DNA, 201 bp, Homo sapiens
tcacttgagaccaggagttcaagaccagcctggccaacatgacgaaacctcgtctctactaaaaaaaaatatataaaaattagccgggcatggtggtgcaygcctgtaattacagctacttgggaggctgaggcaggacaatcacttgaacctggaaggaagaggtttcagtgagccgagatggcactactgcactccagc

SEQ ID NO: 521764 - DNA, 201 bp, Homo sapiens
aggcgcggtggctcacgcctgtaatcccagcactttggggtggccaaggcaggtggatcacttgagaccaggagttcaagaccagcctggccaacatgacraaacctcgtctctactaaaaaaaaatatataaaaattagccgggcatggtggtgcacgcctgtaattacagctacttgggaggctgaggcaggacaatca

SEQ ID NO: 521765 - DNA, 201 bp, Homo sapiens
aaaaatacaaaaattagccgggcatggtggtgcatgcctgtaatcccagctactcaggaggctgaggcaggagaatcacttgaacctgggaggcggaggtygcagtgagccgagatcgcgccattgcactccagcctgggcgatagagtgagactccatctaaaaaaagaacatatatcagttcctgctgtaatatagatg

SEQ ID NO: 521766 - DNA, 201 bp, Homo sapiens
aaaataaaaagaaatttcatagaagtagggaccctgtcttgttttctgtaatatctttgtgcaatttgatgaattttaagaaatgaatacatttgtatagwtactatctggatcatgatatagaacattacaagtcccccaaaacctcccttcgtgtccattcagaccctaccagaagtaactggtaatctgacctctaac

SEQ ID NO: 521767 - DNA, 201 bp, Homo sapiens
gagtctcacactgtcacctgggctggagtgcaatggcatgatcttggctcactgcaacctctgcctcctgagttcaagcaactctcctgcctcagcctccyaagtagataaaaactagaaagaagctatctgtgaaactgctttgtgatgtgtagattcatctcacagagttaaacctttttattgattcaggaggttgga

SEQ ID NO: 521768 - DNA, 201 bp, Homo sapiens
atgtattattaaacagttggccaatgtcagatttcagactgtggcaacataacgtttttgctggtatttcacaaacaaaattccctaatactaagactccrtttctttactcttaacagttcccaagttctaaatatttttatactacacaggaaggcctttctatcttggcttcaggcttctcattatttccaggcctag

SEQ ID NO: 521769 - DNA, 201 bp, Homo sapiens
gttccttggcctttatcttatgttttccaactattactgtatctgttattggtctactattacaggatgattcttcttcctccattgatctcaactaaatrtgaattagggtcatgcatgaaatctgaactgccgtgtcctgagttatggttaagaggtatgtgctgccaccccatgcatgtcttccccatccccatagga

SEQ ID NO: 521770 - DNA, 201 bp, Homo sapiens
caagaatttgcatttctagcaacagatgaaaccgatcctgctgggtatagggaacccacttatctgtgtaattaaatattatgtagccttagacaataaartcaaagcattttatggttttgaggtcctaatgaggggaaaaagcaagatacacaacagtgtatatagtatgctgcaatttgtattaaaaagggggaaaga

SEQ ID NO: 521771 - DNA, 201 bp, Homo sapiens
tcctaaatacctttttcttagtgaggagttggtcattgtctttggcatctgcaacccctgttcaggcatgtgacctgctaaagaaatacagcctacactaycttgactactggggaaaatgatacttcgtaaaatgtaataaggcaacctgttccttggcctttatcttatgttttccaactattactgtatctgttattg

SEQ ID NO: 521772 - DNA, 201 bp, Homo sapiens
ggaaaaatatgaggaattgttcaatttggaaatcaaattcacttgaagtgaatgtggaaggtaatggcctaatgaccaccctattataaatgctatgattyttatttattttatttagttatttagttattttttttttgagacagtcttgctctgttgccaggctgtagtgcagtggcgcaatctcagctcactgcaacc

SEQ ID NO: 521773 - DNA, 201 bp, Homo sapiens
agctcagcctcctgagtgagtggtaccacaggcttgtgccaccacacctgcctaattttttgatattttgtagaaatgaggtcttcttatgttgcccaggyaagtcacaaatttctgggctcaagtgatcctcctgcctttccctcccaaagcgttgggattacaagcatgaactacctgtcctggctggaaacaggcact

SEQ ID NO: 521774 - DNA, 201 bp, Homo sapiens
gggagtgcgatggcgtgatctcggctcactgcaacctccgcctcccaggttcaagcaattcttctgcctcagccccctgagtagctgggattataggcacrtgtcaccacacccggctaatttttgtatttttagtggaggtggggtttcaccatgttggtcaggctggtctcgaactcctgacgtcaggggtgatccgcc

SEQ ID NO: 521775 - DNA, 201 bp, Homo sapiens
acaatatacagtcctttatgactgtcttcttagcacaatgcttttctgttttgttgtagcatatatcaatagttactctttcttttttttttgagttaggrtcttactctgtcacctaggctggagtgcagtggcgtgatcttggctcaagtgattcttttgcctcagcctcccaagtagctgggattacaggcatgtacc

SEQ ID NO: 521776 - DNA, 201 bp, Homo sapiens
gtgcatgccaccatgcccagctaatttttgtatttttagtagagacgtgatttcgccatgttggccaggctggtctcaaactcctgacctcaggtgatccrcctgccttggcctcccaaagtgctgggattataggcatgagccactgcacttggcagctctcctcatttataatctagattgttgaagtttttttcctac

SEQ ID NO: 521777 - DNA, 201 bp, Homo sapiens
tacaagaaaacaataaaaacattatgctttgaagacagtcataaaggaccacatattttatcatttcatttatatgaaatgtccaaaacaggcaaatctayggagagaaaaagtagattatgaagaagttttctttgcttaaaggaaagtaatctactaaataagtaaaattatcaacatagaacaaacacacaaacaaca

SEQ ID NO: 521778 - DNA, 201 bp, Homo sapiens
gtcctttccccactgcctatttttgttgactttgtcaaagatcagatggctgtaggtatgtggctttatttctgggttctttattctgttccattggtctrtgtgtttgtctttttaccagtaccatgctgttttggttactgtagccttatagtttgaattcaggtaatgtgatgcttccagctttgttctttctgctta

SEQ ID NO: 521779 - DNA, 201 bp, Homo sapiens
catacaattcagcaataaaaacagcaactactgatatcttacaagaaaacaataaaaacattatgctttgaagacagtcataaaggaccacatattttatsatttcatttatatgaaatgtccaaaacaggcaaatctatggagagaaaaagtagattatgaagaagttttctttgcttaaaggaaagtaatctactaaat

SEQ ID NO: 521780 - DNA, 201 bp, Homo sapiens
aagagagcaagactctctcaaaaaaataaataaataaataaataaataaataaataaataaataaataataataatgatagtagccattctgagtagtgtrggatggtatctcattgtggttttgatttgcatttctctgctgattagtgatgatgagcatttttttcatgcttcttggccacttgtatgacttcttttga

SEQ ID NO: 521781 - DNA, 201 bp, Homo sapiens
ttctctggacaagctttcagttcttctctataaaggcaatcctttcacttgttgcctactgaaagatgatgtccctataattgttctgtttcttacatcaytgtttttcttgcatcatgcatcattctcctctttcttgcatcgtaattacatgttataagttccactctcagggctgcttcatttctcagcttccttttg

SEQ ID NO: 521782 - DNA, 201 bp, Homo sapiens
ctgacattgcgccactgcactccagcctgggcaagagagcaagactctctcaaaaaaataaataaataaataaataaataaataaataaataaataaataataataatgatagtagccattctgagtagtgtgggatggtatctcattgtggttttgatttgcatttctctgctgattagtgatgatgagcatttttttca

SEQ ID NO: 521783 - DNA, 201 bp, Homo sapiens
tattaagaaaggcttcccccaactcccagattataaaataatacatctagactttcttcagtcaagtactctataaatctgtattttatttttaaaaatarcaacagagtaaggagtaacggtaagggtgaaacattaccttgatcaaaataccatttattgactggcttatattttctcccagtgatattggatactgct

SEQ ID NO: 521784 - DNA, 201 bp, Homo sapiens
gtgtagaaagaagtagacatgggagacttttcattttgttctgtactaagaaaaattcttctgccttgggatcctgttgatctatgaccttacccccaacsctgtgctctctgaaacatgtgctgtgtccactcagggttaaatggattaagggcggtgcaagatgtgctttgttaaacagatgcttgaaggcagcatgct

SEQ ID NO: 521785 - DNA, 201 bp, Homo sapiens
atcttattttattttttatttattgagacagggtcttgctctgtcacccaggctagagtgcaggggtatagtcatggctcactgcagcctcaaccctctakgctcaagcagtcttcctgcctcagccttcctcgtagctgggactgcatatgtgtgcctggctaatttatttttttttataacgatagagtcttgctatgt

SEQ ID NO: 521786 - DNA, 201 bp, Homo sapiens
atcagactgtcctcctcaaaagcagctggaactgaggttcaagagatggatgtgactgtgtatagggagaggcataccatttttatttttaaagtatcaasagaaatcatgatttcacattaacaatacaaagttgcaaaagcaaatgtgaataatgagcaggtactgatttggccagctttataaatgtgtaacttttaa

SEQ ID NO: 521787 - DNA, 201 bp, Homo sapiens
ttttttttttttttttaaggagacagcgtcctgccctgtcacctaggctggagtgagtggtacagatatagctcactgcagtctcaaatgtctgggctcaratgatcctcctacctcagccttcccagtagctgggattacaggtacacgccaccatgcccagctgatctttttaattttttttgtagagacagtcttgct

SEQ ID NO: 521788 - DNA, 201 bp, Homo sapiens
ccttcagagttctggtccctttcggtccctcacctgttccgcaggcgctcacgatctaggccccgctgcaggcagagctttcagctcctggcgagtttctracttccctctgccgagatttctttaaggtaataaaagtttttgccagcgtcaacaactaggccaccaacaaaagatctgaaaacaagtccacagcaacaa

SEQ ID NO: 521789 - DNA, 201 bp, Homo sapiens
atccatctacctcagcctcccaaagtgctgggattacaggcatgagctaccatgcctggccatctattatatatatatatatatatattttttttttttttaagttcttattaggcaaatagtacccaattgttaagaaaataaaaacttgtaactaagtcataaaaaagagagtaaatatccttaataattctgccatct

SEQ ID NO: 521790 - DNA, 201 bp, Homo sapiens
cctgagctcaagtgatccatctacctcagcctcccaaagtgctgggattacaggcatgagctaccatgcctggccatctattatatatatatatatatatwttttttttttttttaagttcttattaggcaaatagtacccaattgttaagaaaataaaaacttgtaactaagtcataaaaaagagagtaaatatccttaa

SEQ ID NO: 521791 - DNA, 201 bp, Homo sapiens
gcccaaaaggtcaaggctgcagtgagctatgattgcaccactgtaatccagtcttgggtcttggtgacacactgataccctgtctcaaaaaaaaaaaaaaaggattttatttatttatttttgagacagggcctcatcctgtcacccaagctagagtacagtggcacgatcttggctcactgcatgcagcctccacctccc

SEQ ID NO: 521792 - DNA, 201 bp, Homo sapiens
aatatgccataatttatttcataagtcccttagtgaatatttagattctcttctatttttcctatattaacaggtctaggataaacttttttttttttttkttttttttttgagacggagtctcacactgtcacctgggctggagtgcaatggcatgatcttggctcactgcaacctctgcctcctgagttcaagcaactc

SEQ ID NO: 521793 - DNA, 201 bp, Homo sapiens
tagccaggatggtctcaatctcctgaccttgtgatccgcccgcctcggcttcccaaagtgctgggattacagacgtgagccaccgcacccggccaagttawttttttttaatggtgtgagattgggggttcagattcattcttttgcatgtggataaccagttgtcctatcatcatttgttgaaaagactactttccccat

SEQ ID NO: 521794 - DNA, 201 bp, Homo sapiens
aagatttttgttctggctttcttcctctctgccatttttaccttttttttttttttttttttttttttttgagacagggtctcactctgtcgccaggctaractgagtgcaatggcttgatctcggctcactgcaacctccgcctcccaggttcaagcgatcctttcacctcagcctccccagtagctgggactacaggtg

SEQ ID NO: 521795 - DNA, 201 bp, Homo sapiens
tttttattagagacggggtttcaccattttggctgggctggtctcaaactcctgacctcaagtggtccacccacctcggcctaccaaagtgctgggataayaggcgtgagctaccgtgcctgagcaataggtatgttttcttctaagagttttatagtttttgctcttacaattaggtctttgattttttttgttgttgtt

SEQ ID NO: 521796 - DNA, 201 bp, Homo sapiens
aggattttaaagtgttcaggtaccaaacacagttctgtgtgaggttttatgcctacttcctcaacaccaattcagaggcaacacctgtgcatctgtcccamcaaaggtgctttaatacctaccttcactatttgagaaaggacactcacagttgcctgtgggttatgaaagaattggccctacgtcctgcatgtaagatgt

SEQ ID NO: 521797 - DNA, 201 bp, Homo sapiens
catattttatcatttcatttatatgaaatgtccaaaacaggcaaatctatggagagaaaaagtagattatgaagaagttttctttgcttaaaggaaagtaatctactaaataagtaaaattatcaacatagaacaaacacacaaacaacaataattagagacataacagtaattagagggcaggtggggcggctcatgcct

SEQ ID NO: 521798 - DNA, 201 bp, Homo sapiens
cacatattttatcatttcatttatatgaaatgtccaaaacaggcaaatctatggagagaaaaagtagattatgaagaagttttctttgcttaaaggaaagtaatctactaaataagtaaaattatcaacatagaacaaacacacaaacaacaataattagagacataacagtaattagagggcaggtggggcggctcatgc

SEQ ID NO: 521799 - DNA, 201 bp, Homo sapiens
ccacatattttatcatttcatttatatgaaatgtccaaaacaggcaaatctatggagagaaaaagtagattatgaagaagttttctttgcttaaaggaaagtaatctactaaataagtaaaattatcaacatagaacaaacacacaaacaacaataattagagacataacagtaattagagggcaggtggggcggctcatg

SEQ ID NO: 521800 - DNA, 201 bp, Homo sapiens
accacatattttatcatttcatttatatgaaatgtccaaaacaggcaaatctatggagagaaaaagtagattatgaagaagttttctttgcttaaaggaaagtaatctactaaataagtaaaattatcaacatagaacaaacacacaaacaacaataattagagacataacagtaattagagggcaggtggggcggctcat

SEQ ID NO: 521801 - DNA, 201 bp, Homo sapiens
tgttaaagttgtgtacttatttgtctttctcactttctagactgtaagctcattgagagcaggacctatgtatttcaccctaattcccagagctttgtagmgtgcctggcccagaggaagttttcaataaacatctgttttataagacactgaaaacttatggcactatatctttatgcttgaaacattagtattagtcat

SEQ ID NO: 521802 - DNA, 201 bp, Homo sapiens
tggtcaggctgatcgcgaactcctgacctcaggtgatcctcccgcctctgcctcccaaagtgctgggattacaggcgtgagccaccgtgccaggccacaamctctttttttttttttttttttaatgcatacatgtatgcaacatccgtatttcagccacagtgaatagcttgcaaatcatgctgtattaattgagccttt

SEQ ID NO: 521803 - DNA, 201 bp, Homo sapiens
caccgcacctggccgatattttctttaatgaaatttataaatatgcttcttgaataatacacattttgggaaagggaaaaatgtctgttcaaaaagtaaargtctcttttatagcttttccaaacttaattgctaaatttttctttgaggttctcctgaattatgtcttacaaactaaaagcaaaaatttttagcagaaat

SEQ ID NO: 521804 - DNA, 201 bp, Homo sapiens
aaaaatatgaggaattgttcaatttggaaatcaaattcacttgaagtgaatgtggaaggtaatggcctaatgaccaccctattataaatgctatgattttyatttattttatttagttatttagttattttttttttgagacagtcttgctctgttgccaggctgtagtgcagtggcgcaatctcagctcactgcaacctc

SEQ ID NO: 521805 - DNA, 201 bp, Homo sapiens
tacctacctatcatttttctttcttccttcttcccttcttctcttcccatgctgggagtgcgatggcgtgatctcggctcactgcaacctccgcctcccasgttcaagcaattcttctgcctcagccccctgagtagctgggattataggcacgtgtcaccacacccggctaatttttgtatttttagtggaggtggggtt

SEQ ID NO: 521806 - DNA, 201 bp, Homo sapiens
gaagtttttttcctacctgatttccagtcatctatacctacaatttttctgaactctgattatttatttctgttaggttgcagatgttaaattgaaattcyttatcattttagagtcctctggtagcctctttttaaccttattacctacctatcatttttctttcttccttcttcccttcttctcttcccatgctgggag

SEQ ID NO: 521807 - DNA, 201 bp, Homo sapiens
taaatgggattgaattctttttttttttttcttgatacaaggtctctctttgtcacccaggctggcgtgcagtggtgcagccactgcagcctcgacctctmaggttcaatcaattctcccacctcagcctcctgcgtagctgagtagctggcactacagatgtgtgccaccacgcccagctaattttttttattttttgta

SEQ ID NO: 521808 - DNA, 201 bp, Homo sapiens
actgaaagaggatatggcatctttaatacttaggtagtgacaactgtgaatggtagtggcaaaagaaaagggaaaaatcaaagatgacttgatttcaagaygtggcttgtcttagctaaaagtaataaactggaagtcaaattcaaggaatatagatattttctctgtctcatgattgacagtagctctcttactattttt

SEQ ID NO: 521809 - DNA, 201 bp, Homo sapiens
ggataaactttttttttttttttttttttttttgagacggagtctcacactgtcacctgggctggagtgcaatggcatgatcttggctcactgcaacctcygcctcctgagttcaagcaactctcctgcctcagcctcccaagtagataaaaactagaaagaagctatctgtgaaactgctttgtgatgtgtagattcatc

SEQ ID NO: 521810 - DNA, 201 bp, Homo sapiens
aaaattaggagtggtttagggtagtgtgtacaaattcatgggtctagagctccatcttctgatgattttgtgaacgaagaaagatttttgttctggctttsttcctctctgccatttttaccttttttttttttttttttttttttttttgagacagggtctcactctgtcgccaggctagactgagtgcaatggcttgat

SEQ ID NO: 521811 - DNA, 201 bp, Homo sapiens
ccataatttatttcataagtcccttagtgaatatttagattctcttctatttttcctatattaacaggtctaggataaacttttttttttttttttttttkttttgagacggagtctcacactgtcacctgggctggagtgcaatggcatgatcttggctcactgcaacctctgcctcctgagttcaagcaactctcctgc

SEQ ID NO: 521812 - DNA, 201 bp, Homo sapiens
tttgtgtttgttctgagtaagtcttcatttctaaagtgatctttttttcttgtattacaattgtcatctcatttctaaggttttctaattctgatttatgrtcttgttttatatcttttgattggtttttaaaaagtaggttatagtttttatctgacatgtagttttatctgtctggtgatcttttataatctgttttat

SEQ ID NO: 521813 - DNA, 201 bp, Homo sapiens
attttccttagaaaatgagatcacgggctgggcgtggtagctcacgcctgtaataccagcactttgggaagccgaggcgggcagatcacctgaggttgagrgtttgagaccaacttggctaacatggtgaaaccccatctctgctaaaaatacaaaattagctgggcgtggggtgtggcacacgcctgtaattccagttac

SEQ ID NO: 521814 - DNA, 201 bp, Homo sapiens
acccagtctggagtgcagtgccgtgttctctgcttcccaccggctaattgtacttttttagtagagacagggtttcgccatgttggcctggctggactcgractcctggcctcaagtgatctgcctacctcagcctcccaaagtactggaattgcagacatgagccaccatgcccagcctagactttcttttaagttgtta

SEQ ID NO: 521815 - DNA, 201 bp, Homo sapiens
agggtttcaccatctcgaccaggctggtcttgaactcctgacctcgtgatccacccacctcgacctcccaaagtgctggggttacaggcatgagccaccasgcccggcctaacttttgtatttttagtagagacggggtttcaccatgttggccaagatggtctcaatctcttgacctcgtgatccacccgcctcggcctc

SEQ ID NO: 521816 - DNA, 201 bp, Homo sapiens
atctcggctcactgcaacctccgcctcctgagttcaagtgattcttctgcctcagcctcccaagcagctgggattataggcgcccaccacatgcctggctwatttttgtatttttagtagagacagggtttcaccatctcgaccaggctggtcttgaactcctgacctcgtgatccacccacctcgacctcccaaagtgct

SEQ ID NO: 521817 - DNA, 201 bp, Homo sapiens
ttttttttttttttttttttttctgagatggagtctcgctctgtcgcccaggctggagtgcagtggcacaatctcggctcactgcaacctccgcctcctgrgttcaagtgattcttctgcctcagcctcccaagcagctgggattataggcgcccaccacatgcctggcttatttttgtatttttagtagagacagggttt

SEQ ID NO: 521818 - DNA, 201 bp, Homo sapiens
gcctggtgttctctatcccttagaagccttgatatcatctttgatgagtcaatcttcctcatcctttacttccagctgggtatcaagtccttccattactrcctctggaatatgatatatctgtctgtccctctctgatcccactatttttggcctggctcagctctcctcttttgttttgttttgttttgttttgttttg

SEQ ID NO: 521819 - DNA, 201 bp, Homo sapiens
ccacccgcctcggcctcccaaagtgctgggattacaggcatgtccacagcgcctggcccgcccaactaacttctgtattttttttttttttttttttttttctgagatggagtctcgctctgtcgcccaggctggagtgcagtggcacaatctcggctcactgcaacctccgcctcctgagttcaagtgattcttctgcct

SEQ ID NO: 521820 - DNA, 201 bp, Homo sapiens
tccgtctcccaggttcaagtgattctcctgcctcagcctcctgagtagccgggactacagatgcatgccaccatacccagctaatttttgtatttttagtrgagacagggtttcgctgtgttggccaggctggtcttgaactcctgaccttgtgatccacccgcctcggcctcccaaagtgctgggattacaggcatgtcc

SEQ ID NO: 521821 - DNA, 201 bp, Homo sapiens
ggagtgcaatggtgccgtcttggctcactgcaacctccgtctcccaggttcaagtgattctcctgcctcagcctcctgagtagccgggactacagatgcawgccaccatacccagctaatttttgtatttttagtagagacagggtttcgctgtgttggccaggctggtcttgaactcctgaccttgtgatccacccgcct

SEQ ID NO: 521822 - DNA, 201 bp, Homo sapiens
ctctgtcgcccaggctggagtgcaatggtgccgtcttggctcactgcaacctccgtctcccaggttcaagtgattctcctgcctcagcctcctgagtagcygggactacagatgcatgccaccatacccagctaatttttgtatttttagtagagacagggtttcgctgtgttggccaggctggtcttgaactcctgacct

SEQ ID NO: 521823 - DNA, 201 bp, Homo sapiens
tccacctcccaggctcaagcaattctccttcctcggcctcctgagtaggtgagactacaggcgcgtgccaccatgcccagctaactttttcttttttttttgagacagagtcttgctctgtcgcccaggctggagtgcaatggtgccgtcttggctcactgcaacctccgtctcccaggttcaagtgattctcctgcctca

SEQ ID NO: 521824 - DNA, 201 bp, Homo sapiens
tttaacatgttgatcatgtttccttgagaccctttttcctttagctctggtgacatcattgttcttggtttctctgtctcaaacaaaaaaaaaaattatgytgaacaaaagtgccagaattcagtcttctgctgccaagtctagtgcttcttctaccgcatcagtatagatatgaggatctttgggagatgagagacaaaa

SEQ ID NO: 521825 - DNA, 201 bp, Homo sapiens
tttctcagcagccatatgtatgcatatcctagaaatgaactttggtttgctcagatcttttgttagaggagagttgaaggtgctagggaatggccttctcraagccttttggctgctcagctccaggatccatcctggtcccagacagctacctgtattctcctcttctttgccctttgctctttgctccttgctccaggc

SEQ ID NO: 521826 - DNA, 201 bp, Homo sapiens
agcaggctctagcaacatgatcactgtccttgccttcctggttctttctctcggttggttgccagggcttgcagatcgcagtgaattttccttggggaacrtcgctgttttgtcctagagtgaacttgtggcttatggccagtgctgtttggtggtctgccttctttttaatggtattttcttcctcagagcagaagggct

SEQ ID NO: 521827 - DNA, 201 bp, Homo sapiens
ttttgttagggtacttagaaataaaaagtcgttagagacagtcaactcttagatgccaatcaaatggaattgtgggctgggcttatgtctgtaatcccagygctttgggagactgaggtgggaggatcacttgagcccaggagttcaagaccagcttgggcaagtgagaccctgactctacagaaaattttaaaattagtt

SEQ ID NO: 521828 - DNA, 201 bp, Homo sapiens
tctgagcatcagttttctgatatttaaaatgggaatataagtttgtggcaatttgttacaaaaagaataaaaaatggggatatagagtaatacttccaagrtttatatgaatggcaaatgaggtcctgtgaaatcactgtaaatgatgagaccaggtatacagatagtattaatttcacattattataggtttgttacttt

SEQ ID NO: 521829 - DNA, 201 bp, Homo sapiens
tgattggaagccttactgataacataaacagtttagattagcagatattttgaatgttatatgtattatgtattgtattcttaaagtaagctagaaaaaawaaaatgttaagaaaatcacaaggaagaggaaataaatttactatttattaaggggaagtagatcattgtaaaggtgattcatcctcatcgtcttcacatt

SEQ ID NO: 521830 - DNA, 201 bp, Homo sapiens
gtcttactgttttctatttgtcactgaccaggtttcagctgggggtcttgatatactctggaatttttcaaaaaagaaagaaaactccctttactagctcytgatttagcagtgttagctcaccccaggacagctataaccaaccactgcagattagaggggtgctgatggagtccaagaacatccttactctgtggatga

SEQ ID NO: 521831 - DNA, 201 bp, Homo sapiens
gatgcattcctgagtcatgatccctttaagggcaagagtagttagattgtaattggttactctacagatggatgctgtgaagcttaggttattccccgccsccccccttcccgtaggctgctgagaggactctgatttctatccagtcacatgcatttatttttgtgatgattaaaactgcatttttcttgaatattcaat

SEQ ID NO: 521832 - DNA, 201 bp, Homo sapiens
attagctgtgtgtttgggggcacttgattcctactgtctgagcatcagttttctgatatttaaaatgggaatataagtttgtggcaatttgttacaaaaaraataaaaaatggggatatagagtaatacttccaaggtttatatgaatggcaaatgaggtcctgtgaaatcactgtaaatgatgagaccaggtatacagat

SEQ ID NO: 521833 - DNA, 201 bp, Homo sapiens
acacggactctttctactcacatctaagcacttgctgacacactgagtcacaggcacaatgaatcattctagttagcgtaaatgaagtgagctttctatawagggtcagaaagtttgggtctttcagtttaattccatcttttcccctacttccctcagtcctgaagaagagaatctcctttcccagaatcttctgttggc

SEQ ID NO: 521834 - DNA, 201 bp, Homo sapiens
ttcatcaagcctgtaactatcaattttccattgagacctgtagagctaggtggatatacagagatatagatcctgtatatattcaggtgagcataattagytcagccttacctagaatgtttgggtttctttcagaggcggacctcaggtattcaaccttaagagatgaaaccaatacagagacactctaaaaaaaaacaa

SEQ ID NO: 521835 - DNA, 201 bp, Homo sapiens
tggagtgtagtggtgcaatctctgctcactgtgacctccacctccctggctcagggatcctcccaactagctgggaccacaggcatgcaccaccacacccrggttttttttgtgtttttagtagagatgtggtcttcaccatgttgcctgggccggtcttgcactcctaagcttaagtgatctgtctgccttggcctccca

SEQ ID NO: 521836 - DNA, 201 bp, Homo sapiens
ttttgagtttgggttttttgttgtcgtttttcctggtaaataaatatagcataggctagattttctgtgattatgtgcataatgaataaatatgatgggawgtatttgaacagagactgaatgattcaggaatgctgtgaaagagtggttagtggagtcaattacagcacttctgaagttgtaggttcttgggcctccccc

SEQ ID NO: 521837 - DNA, 201 bp, Homo sapiens
ccaccagtcccactcccatgataactcattaatccatgagtgaattaattcattcatgacccagtcacctcttaaaaacccagcctctcaatactgccacactggggattaactttcaacatgagttttggaggggacagatactccatccatagtagttattattcctgtttttacaggtggggaaacaagactcttaag

SEQ ID NO: 521838 - DNA, 201 bp, Homo sapiens
  misc_feature (1)...(201): n = A,T,C or G
acatactggtgagtttaggccaatttttgtttcatcaagcctgtaactatcaattttccattgagacctgtagagctaggtggatatacagagatatagancctgtatatattcaggtgagcataattagctcagccttacctagaatgtttgggtttctttcagaggcggacctcaggtattcaaccttaagagatgaaa

SEQ ID NO: 521839 - DNA, 201 bp, Homo sapiens
tttaattttatttatttattttttttctgtgcaatggggagagaaaaatttcccttctttaggtttattagctttttgaagaaaacctcttacacatatasaggcctctatctgctaaaggacaagcccactttatcttaatctgattgctttgattcaagctgttaggaaatttgactgccattcccatggctccatgat

SEQ ID NO: 521840 - DNA, 201 bp, Homo sapiens
tgaacatcctagctcgggcctctcttcctcttcatttttttttttttgttttgacacggagtctcactctgttgtccaggctggagtgcagtggtgcgatstcggctcactgcaacctccgcctcccaggttcacaccattctcttgcctcagcctcccgagtagctgggattacaggcacccgccaccacacccgtctaa

SEQ ID NO: 521841 - DNA, 201 bp, Homo sapiens
cattgatggaaatggtgtcaactgccattttttaaatttttaaaaattctttttcttttttttctttcttttctaaatcatccagcccaaaatgttattgktattattattttttctgtcatctaggctggagtctagtggtgtgatcatagctcactgcagcctcagccttccagactcaagtggatcttcccacctcag

SEQ ID NO: 521842 - DNA, 201 bp, Homo sapiens
aggggttctataactagcttaagtttccccatccaagcaggatgtggggtcaggatttgaatcccaggaagtctgtctccagagtcacactcataccactrtgctattctctgcgtttcttttggggcaaaatatgttggatactaatatgttatgggtatagaattcttacgcacttgatcctgaagcacattaagctgg

SEQ ID NO: 521843 - DNA, 201 bp, Homo sapiens
gtagtccttgtcactaccttttcagtcccactggttttgttcatttgttcattcattcaaaaaatataaatcaagcgccacttctccacaatgctagtccyggaagttgtgtcagtgaacaggataaacgtagtccttgctctcatggagcttacagtccagccgggaagtagctattcacccatttaattggacaaatat

SEQ ID NO: 521844 - DNA, 201 bp, Homo sapiens
gatgggaaaaggaaaaagttttgatggggtaattaatgagtttggtaggagtgtattgaatgtatagtccttggagaaaagtaacatgaacaaatggaaagctcattggaaacgtgtatctgaggtcaaagaaatggtttggagttagaatagtagtagaaaggggccttcaaactgtgggtagtttacttaagggagaag

SEQ ID NO: 521845 - DNA, 201 bp, Homo sapiens
tcggcattgcttttctttaaaaatgacttgatggttttaaagttaaaataaaaaaattattcccaaggatggtttttcatttgctttggcttgctctttamgtgagagggaaaatgagccttgtggttgctgaggaggtccgtcggtcttgtggtatgactctaactctggctttgttctgttgcagacaagtcattacgt

SEQ ID NO: 521846 - DNA, 201 bp, Homo sapiens
tgatctcaaactcctggcctcaagcgatcctcccatcttagcctcccaaagtgttgggattacaggtgtgagccaccacgcccagtcggcattgcttttcwttaaaaatgacttgatggttttaaagttaaaataaaaaaattattcccaaggatggtttttcatttgctttggcttgctctttaagtgagagggaaaatg

SEQ ID NO: 521847 - DNA, 201 bp, Homo sapiens
tgtgtgactttctaaggaaacgggactttgtctcgggctggggagtgtccctcttttacctcagagggcatgtggtccaatttaaagcagaacgaagccckaagtgtggcaaccatccttcccatggttcccatggcactctgctctcacctagtccatgtatccctgtccctcatgctcctgcccctgcagctacttgaa

SEQ ID NO: 521848 - DNA, 201 bp, Homo sapiens
aggcgtggttgtgggctcccataatcccatctacttgggaggctgaggcaggagaatcgcttgaacctagcaggaggaggttgcagtgagccgagactgcrccattgcactccagcctgggcgacaagagcgaaactctgtctcagaaaaaaaaaaaaaaaaaaaaaagaattttatgacaaagggaatttttctggaata

SEQ ID NO: 521849 - DNA, 201 bp, Homo sapiens; identical to SEQ ID NO: 186020

SEQ ID NO: 521850 - DNA, 201 bp, Homo sapiens
ggaggccgaggcaggcggatcacctgaggtcaggagttcgagaccagcctggccaacctggtgaaaccccgttgtactaaaaatacaaaaattagccaggygtggttgtgggctcccataatcccatctacttgggaggctgaggcaggagaatcgcttgaacctagcaggaggaggttgcagtgagccgagactgcgcca

SEQ ID NO: 521851 - DNA, 201 bp, Homo sapiens
accacactcagtgatctgaggaagcacattcgaactcatacaggggaaaagccatttcggtaggtcttactgttttctatttgtcactgaccaggtttcasctgggggtcttgatatactctggaatttttcaaaaaagaaagaaaactccctttactagctcttgatttagcagtgttagctcaccccaggacagctata

SEQ ID NO: 521852 - DNA, 201 bp, Homo sapiens
agaactatattgggtcttcacatttaggaagtgaggttgatggtgaaacgtgatactttgaccagaggtgtcactaaatgaaaatgacagaaagctggccygctagctatgaagagatcagctcagtggacttcagctgtgttttgtttagcccataatgactgtttttgtggctcatctaaggcttgggatatgtatata

SEQ ID NO: 521853 - DNA, 201 bp, Homo sapiens
tgttccgccatccacaggaaattcagcatctttatctcttccacttgtactgcaacctggcctctccgagccaccccagcctctactacctgcctcagctycgtctgctcctccgcctgctccctccctaggacctggctcccagcaagctgcatttggcaacccccctgctctcttacaacctccagaagtgcctgttcc

SEQ ID NO: 521854 - DNA, 201 bp, Homo sapiens
atcctgcagtccagcctagtcatgggagaacagaacttacaatggatattaaatggtgccaccagttctccacaaaaccaagaacaaattgtaagtattaygtatgaatatacccagtggggtgaagtgtatttacataggtgacatgttcagaagcttttacttcaaaaagaaaagtggctgtcatatccaccgtgaaac

SEQ ID NO: 521855 - DNA, 201 bp, Homo sapiens
gaaacggggttttaccatgttttccaggctggtctcaaactccttacctcaggtgatctgcccgccccagcctcccaaagtgctgggattacaggcataarccaccacacctggcctgtaatctcattttttaatgtaagatttggtcttttagatcagaagtcagcaaggttttttttggtaatgagccagacagtaaat

SEQ ID NO: 521856 - DNA, 201 bp, Homo sapiens
ccgccctcctggtgtggaccctctgcagagtcctgaggcagcacagggcatcacatggcgaggggttgaacatcctagctcgggcctctcttcctcttcatttttttttttttgttttgacacggagtctcactctgttgtccaggctggagtgcagtggtgcgatctcggctcactgcaacctccgcctcccaggttcac

SEQ ID NO: 521857 - DNA, 201 bp, Homo sapiens
ctcctgagttcaggcaatcctcttgcctcagccccccaagtagctgggaccataggcatgctccaccaccatgcctggctaattttcttttttttctttctttttttttttttttttgagatggagtcacgttctgttgcccaggctggactgcagtggcgcaatcccggctcactgcaacccctgcctcctaggttcaag

SEQ ID NO: 521858 - DNA, 201 bp, Homo sapiens
gtgagattctgtctctattaaaaaataaataaataaaaataaagtatttgaggacccaaatctttagtgtctaaggcttaagaaaatacatgttactttawatagcagaaggtagaaacaaaatgcatatcaaaagattttcattctagttctgctgctttgaatgtgttttctcatggtgaagaattgtctcaagatggc

SEQ ID NO: 521859 - DNA, 201 bp, Homo sapiens
cccagggccaggacctcagcacaatttcaccagcaatcatctttgaatcaatgttccagaattcagatgatacggcaattcaggaagatcctcaacagacrggtttgtcacacggactctttctactcacatctaagcacttgctgacacactgagtcacaggcacaatgaatcattctagttagcgtaaatgaagtgagc

SEQ ID NO: 521860 - DNA, 201 bp, Homo sapiens
acgtgtaactgtgttaaatagcttaggagtctattctctggccaagactatgacatatgactaacgagctttctggagccctagggtcaccaggaaaataycctggcataaggggacaccaagtacttatgaaaaagggaagcctttcctatcacaatttatataatcaagagagagaagcactatcccttggggtttaat

SEQ ID NO: 521861 - DNA, 201 bp, Homo sapiens
ggggcaggggagggatagcattaggagatatacttaatgtaaatgatgagttaatgggtgcagcgcgccagcatagtacatgtatacataatgtaacaaayctgcacattgtgcacatgtaccctagaacataaagtataatttaaaaaaaattaattcatttagcccttgctttggttggcttatacttcttcagataat

SEQ ID NO: 521862 - DNA, 201 bp, Homo sapiens
aagaaatgtaagatattcttgtaagaatatcaggatttttaaaaattaactaattcacggggtggggcaggggagggatagcattaggagatatacttaaygtaaatgatgagttaatgggtgcagcgcgccagcatagtacatgtatacataatgtaacaaacctgcacattgtgcacatgtaccctagaacataaagta

SEQ ID NO: 521863 - DNA, 201 bp, Homo sapiens
ggcaagtgagaccctgactctacagaaaattttaaaattagttgggagtggtggcgcatgcgtgtggtcccagctatttaggaggctgaggtgggaagatygcttgagcctgggaggtcaaggctgtagtgagccatggtcatgccactacactccagcctgggcaacagagagagaccatgtctcagaaaaaaaaggaat

SEQ ID NO: 521864 - DNA, 201 bp, Homo sapiens
aagccatttgagtgtgacgtgcagggctgtgagaaggcattcaacacactgtacaggtcagtctcgtctccaatgctctgccagcctctgaccttgacctygttgtgatggcagagctctttccccttgcagaggagttgttttcactttcagggctttaaaagagcgcagctgtgttcaactacgtaaaattcatttctg

SEQ ID NO: 521865 - DNA, 201 bp, Homo sapiens
tgtctcagggtggccaatctcacaactttgaaagcctaatatttgccagacactatactgagtatctggaggatacagaaaagagaaaaaacatgatttattttttataaaaacatatattctagttaaagaggctaaaaatgccaaaaagaaagttaatattaccagtaggttaaatattaaatactaataatggtaatt

SEQ ID NO: 521866 - DNA, 201 bp, Homo sapiens
cagccttgagatatgggtaggaattagatggagaaaaggatgtactaagttggagaacctagaggtggatgtatgctactattagacacactagaaaggcmatttggggctcaacagggagaacactcaaattccagaactagggtgccaaccccgtctagatctagagagcctatgtccatttctagatagctagagtca

SEQ ID NO: 521867 - DNA, 201 bp, Homo sapiens; identical to SEQ ID NO: 186113

SEQ ID NO: 521868 - DNA, 201 bp, Homo sapiens
aatatgttatgggtatagaattcttacgcacttgatcctgaagcacattaagctggcatggggaggctctgtagaactttatgacaaagggaggccaggcrcagtggctcatgcctgttatcccagcactttgggaggccgaggcaggcggatcacctgaggtcaggagttcgagaccagcctggccaacctggtgaaacc

SEQ ID NO: 521869 - DNA, 201 bp, Homo sapiens
taggccaatttttgtttcatcaagcctgtaactatcaattttccattgagacctgtagagctaggtggatatacagagatatagatcctgtatatattcargtgagcataattagctcagccttacctagaatgtttgggtttctttcagaggcggacctcaggtattcaaccttaagagatgaaaccaatacagagacac

SEQ ID NO: 521870 - DNA, 201 bp, Homo sapiens; identical to SEQ ID NO: 186062

SEQ ID NO: 521871 - DNA, 201 bp, Homo sapiens
aatggtcttaattcactttaatatattttacaaatggatcttagctttgctctaagctttctgttcatggtcttagaaattagccaggatctttcttattytaatagttaaatgcttttgaattacgtgaaaatcattagcaaaggaaaataaactgtaagaccatagttaactgaacatggtcttaacataatcaaatcc

SEQ ID NO: 521872 - DNA, 201 bp, Homo sapiens
ggccgggagcgcgacgaaggcccccactccgccggcggcgcgtccttgtccgtgaggtgcggtgttcacggccccgcgaccgatctgggtctcgcggaacmtcctgccccacgtcccctcctccctcctctccctccggttccttagggcggctttccccgcagcttcgacctcttcccctctgcccccagtgccttccct

SEQ ID NO: 521873 - DNA, 201 bp, Homo sapiens
atcagttaggacttaggttcatttgtggtcacagaaacccaaatcaccaacatgtgtttccttctgtcacatgcagttgtctgggcacgagcagctgtggwtggtgtggtggctcctcggggtcagcgtccagtctcccgctgtcatgctgctcggctgttcctagggtgtttctctcatctctggtctataatgggttaa

SEQ ID NO: 521874 - DNA, 201 bp, Homo sapiens
aataaagagcagtagtaataggtggagaatgacacattgtagaagatgtacagtaaatgaacactgcatacaacagcaaaaaaaaaaaatgtgaaagtagktttaaaaataatattgaactaaaatcccaaataacaataatataagttggggggggcagagcagggtatatagaataaagtgttccaaggatctcatata

SEQ ID NO: 521875 - DNA, 201 bp, Homo sapiens
ttggatttatttgcatttatagtagcctttgaaaagcatcaagcactgcgcagatataggtggcattttttcccctacattctagagtgttcctcccagcmcccacctccactctatacagcatcccctgctagtcctggacactctaatgtctcgaggtttctcaccaaaccagtgtccttcacttgccttttccaccat

SEQ ID NO: 521876 - DNA, 201 bp, Homo sapiens
gctactcaggaggctgaggcaggagaatctcttgaacccaggaggcagacgttgcagtgagccaagattccgccattgcactccagcctgggcgacagagrgagactcagtcacacacacacaaaataatgaaattttaaaaaattaaaaataaaaaacgaatgtctggaattgaagaagaaagtcttatggttatttatg

SEQ ID NO: 521877 - DNA, 201 bp, Homo sapiens
cttttgtatgtttatcagggatctgtttatatctacacttttggtaaggagccaaccttaaataaagtcctagatgcttgtgatgggaaatttcaggcaaytgactttatcacacctggaacccaatacttcatggtaaagaatattttactgtgtcacagtaggactaaagatacgatgatgttgcaagatttaaatccc

SEQ ID NO: 521878 - DNA, 201 bp, Homo sapiens
tgactttatcacacctggaacccaatacttcatggtaaagaatattttactgtgtcacagtaggactaaagatacgatgatgttgcaagatttaaatcccyatttatatgttattgggtaactttgaaagttcatgggcaaagcaatgcgaataggaggcagaggctgtccttgaagactgtggtggagatgccagacact

SEQ ID NO: 521879 - DNA, 201 bp, Homo sapiens
tgtcacagtaggactaaagatacgatgatgttgcaagatttaaatccctatttatatgttattgggtaactttgaaagttcatgggcaaagcaatgcgaayaggaggcagaggctgtccttgaagactgtggtggagatgccagacacttccatcttcaaatctaccccccggttagaatgataccctcatattgtgactt

SEQ ID NO: 521880 - DNA, 201 bp, Homo sapiens
taatagttaatatttgctcagaaacaaagcattggcgttgaaatgataaaataagtatttataatccacgtaagtaaaatgaaattttatactaaatcatyggcacactggaaagggaggtagaacatgcttccataggaaagtcttattttccatgtagagtttttgtttttctttttttacagacacttacatattcag

SEQ ID NO: 521881 - DNA, 201 bp, Homo sapiens
gggaaggtctatgatgcaacaaaaataaagagcagtagtaataggtggagaatgacacattgtagaagatgtacagtaaatgaacactgcatacaacagcaaaaaaaaaaaatgtgaaagtaggtttaaaaataatattgaactaaaatcccaaataacaataatataagttggggggggcagagcagggtatatagaata

SEQ ID NO: 521882 - DNA, 201 bp, Homo sapiens
gaacaaagatgcttcttctttccagaaggttcagtaaatgtcttgcaatgtcttaataacatctgtgaactaatcatatgcacaggggatgagaaatgcawttaagtgcataattaatgcacaaactcagccctggaaatgggagttagattcattccactcatccctgaagataggggagggatagtttctcagtgaata

SEQ ID NO: 521883 - DNA, 201 bp, Homo sapiens
acatacacatatacacacacttcccacagaggttttcaattttacaaaaagcccactcaattgggagactgtgtgcattctaataaggcaggacacctggstgcttcatctgaagtttgtcaccacatatgggatccttgggcaagctgctggacttccttggcctgtgttttctattttgcaaaatgatctcttatgttc

SEQ ID NO: 521884 - DNA, 201 bp, Homo sapiens
ggttgatttctcttgaaaatattttttaatattttatctctaatgaagaattttctctttattttctctctggctttacatgccaactgtatatgtgtttcccccccacacacacaattttttttaaaattctccttaaaaaaaattttttttttgctcctcacactttgccaagtcccactcctaagtttttaaatttgt

SEQ ID NO: 521885 - DNA, 201 bp, Homo sapiens
aagtgggacagaggcaataattaaagagatattgactggggatttcccagaattgcttaaagacatgaatttacagatttaagaggtccagtgaatcccamacagaatacataaaatgatatccacacttagacttaccagagtgaaactgttgaaaaccaaagacagagaaaattttaaaagcagtcggagaaaagacag

SEQ ID NO: 521886 - DNA, 201 bp, Homo sapiens
cgacgaaggcccccactccgccggcggcgcgtccttgtccgtgaggtgcggtgttcacggccccgcgaccgatctgggtctcgcggaacctcctgccccamgtcccctcctccctcctctccctccggttccttagggcggctttccccgcagcttcgacctcttcccctctgcccccagtgccttccctcagcctccctc

SEQ ID NO: 521887 - DNA, 201 bp, Homo sapiens
ttacttgagagtatgttctttttgtgtgctagcctttcattcacgtcgacttcattccttttattttctacgtttatctgtatttttaaatctaaaatatrgccacatactcttcatctgtgtaaataagcaattttcctactctgctaacaaccacaaagcaggctgtcctatgcaaagttgttttttaaagtttatttt

SEQ ID NO: 521888 - DNA, 201 bp, Homo sapiens
atctaaagttggtcatcttcaattgtggggggaaacgtctgtttagcaagcatttaaaaatcattaagatctctgcctacagaaaaactagtttttgtagygaatgctcaataaatacattttttctttgttgattagactatgctaaatatattcaataaatgacaaaagcaaaattttaggattatattatggtcaatt

SEQ ID NO: 521889 - DNA, 201 bp, Homo sapiens
acaaatggatcttagctttgctctaagctttctgttcatggtcttagaaattagccaggatctttcttattctaatagttaaatgcttttgaattacgtgraaatcattagcaaaggaaaataaactgtaagaccatagttaactgaacatggtcttaacataatcaaatcctgataatggattttatattttaggcaaca

SEQ ID NO: 521890 - DNA, 201 bp, Homo sapiens
tcttttttttttttttttttttttttgagacggagtctcgctctgtctcccaggctggagtacagtggcgcgatctcggctcactgcaagctccaactccygggttcacgccattctcctgcctcagcctcccgagtagctgggactacaggtgcacaccaccacgccctgctaattattgtatttttagtagagacgggg

SEQ ID NO: 521891 - DNA, 201 bp, Homo sapiens
ttctggtagttcatatacagggagtgacacagtgtatattcttttgtcgggcttctttcatgcaacataattattttgaaattatcttatgttgctgcatrtatgtgtcagtagtcattcctttctattccatggtatggatataccatactttattcacctgttgatggatgtactgtattagcttgctagggcttctgt

SEQ ID NO: 521892 - DNA, 201 bp, Homo sapiens
ttccatggtatggatataccatactttattcacctgttgatggatgtactgtattagcttgctagggcttctgtaacaaagtatcacaaactgagtgtctygaataacagaaatgtattatctcacagctctggatacacaggataggaagcagctgggagagatgacaagtgcataaattctgatagttccaaaagcaga

SEQ ID NO: 521893 - DNA, 201 bp, Homo sapiens
cagctctggatacacaggataggaagcagctgggagagatgacaagtgcataaattctgatagttccaaaagcagaaggctccaattgtccttactaagarcaatctgtaaatattaaaaaagcagtgaagtggaatgagcacaaatgtgttagtgtaacagacttagacctgaatcctggctccacaaattactagctgt

SEQ ID NO: 521894 - DNA, 201 bp, Homo sapiens
ggttggtaaacgatggcccataggccaaatctggcccaccacctgtttttgtaaagttttgttggaacatgtttatttgcttatatattatctatggctgsttttgctctatgatggcagacttgagttgtaatagagcccatatatggtctgcaaagctaaaaagattaactgtctggtcctttatagaaagagcttgcc

SEQ ID NO: 521895 - DNA, 201 bp, Homo sapiens
tcagaatctgcattttaacaaaattcccaggtgattcatatgcacattaaactttgagaagcactgggctagaagactattgcctttttcagagcaatgayttttttttctttcctaatatttgttgaaaatccaggtgaattgatgtttgtatagcttctaaagtcaagtctctgagcctcaatttcctcattcatgaaa

SEQ ID NO: 521896 - DNA, 201 bp, Homo sapiens
acaatgtgctatacaccagcaataccaccaccagcagtttcatcagagaggcattcactgagatttccaatgggttagtgcatttaatccctgcctccccmctgcagcaacccccatgagacatctatgatggtcctcattttaaagaaagagactgaaacttcagagagatgggatgttaaaggagaattttcaaacaga

SEQ ID NO: 521897 - DNA, 201 bp, Homo sapiens
atgaaattgatactactattatctctccacatgaggcaattgaggcgaagcgaggctaagtacttgttcaaggccatgcatctagttagtggcagagcccrgttaaggaagtccagtttcagggcgtgtgctcttatccacaatgcacaaactcatgctgcagttacagaaagagaaaagagggcacaaccacgagtgatg

SEQ ID NO: 521898 - DNA, 201 bp, Homo sapiens
taaattttattttgcttttcataattgttcataattttaaaaaaacaaaattaatttatggtacaagtgatttctcttctttttccaaatctaatagtttycacaacctttgctgatgaaagaggaaggctgaaagatgaaatcattcataagtacctgtatgagttggagcacgctctgtcctctgcagtcttgggcttt

SEQ ID NO: 521899 - DNA, 201 bp, Homo sapiens
agagcccagttaaggaagtccagtttcagggcgtgtgctcttatccacaatgcacaaactcatgctgcagttacagaaagagaaaagagggcacaaccacragtgatggaattggtaggacttggtatttgatgcgaaaggaagggataagtgatgactccaaaatttctagcctgaatggtggaagtttgcaatgccatt

SEQ ID NO: 521900 - DNA, 201 bp, Homo sapiens
ggccacatactcttcatctgtgtaaataagcaattttcctactctgctaacaaccacaaagcaggctgtcctatgcaaagttgttttttaaagtttatttwaaaaaatcaaactaattataaaagaatggcccaggatgccactgtgttgagatcaagctcttttctctgttattttcactttttgtcttccaagtataga

SEQ ID NO: 521901 - DNA, 201 bp, Homo sapiens
cctgtatgagttggagcacgctctgtcctctgcagtcttgggctttcaaagtaaccaaatatatggcttctgtagtcaagtgccatacatctgtagctacyttcttcctgaagaagtatgtcaacacttaagtgtgctctcatttatcttagcaatcaagattgatacattatactgattagatgtgatcctcttgaccac

SEQ ID NO: 521902 - DNA, 201 bp, Homo sapiens
gataaaatggtcaatataacgtaaataaaaaaccaataggaggcaacactatgatccaattccatttaaaaatggattatcatatattatatatatatgaygagacagagtcttgctctgtcccccaggctggagtgcagtggcgcagtcttggctcactgcaacctccacctcccaggttcaagcgattcgcctgcctca

SEQ ID NO: 521903 - DNA, 201 bp, Homo sapiens
tatcacctactagcttccgcaatattagttgagcatttaaattttattttgcttttcataattgttcataattttaaaaaaacaaaattaatttatggtayaagtgatttctcttctttttccaaatctaatagtttccacaacctttgctgatgaaagaggaaggctgaaagatgaaatcattcataagtacctgtatga

SEQ ID NO: 521904 - DNA, 201 bp, Homo sapiens
tttacagatatccacagtgtctcttttagaaacagacatagtggaagtgatggtgctttcctcgcttccagaagcagggagaagcaggttggagatgttcrcactgcctacattactgccacaaggtaaggaaaacataagcagccagttctgctcctgagcccagatacattgttgttattgttttttgggtttgttttg

SEQ ID NO: 521905 - DNA, 201 bp, Homo sapiens
gtttcaccattttggccaggctggtcttgaactcctgacctcaggtgatccacccaccttagcctcccaaagtgctgggattacaggcatgagccaccgcyctaaaatttttttaaaacagctttattgaggtataactaacagataatgaactgttcatatataaggtaaatactttgataagttttgatttatgtataa

SEQ ID NO: 521906 - DNA, 201 bp, Homo sapiens
gcctgccatagcaaagtaccacagactgggtggcttaaacagcatgcgtatattgcctcccagttctggagactagaattctgagatcaaggtctcagcarggttggttcctactgagggctgtgagagagaatctgcccccgcgcctctcaccaacttctgctcacttgtttgctggcagtccttggcttacagacacat

SEQ ID NO: 521907 - DNA, 201 bp, Homo sapiens
ggaggctgaggtgggcaaatcacgaggtcaggagatcgagaccatcctggctaacacggtgaaatcccatctctactaaaaatacaaaaaattagctgggyatggtggcaggtacctgtagtctcagctactcgggaggctgaggcaggagaatggcgtgaacccgggaggcggagcttgcagtgagctgagattgcgcca

SEQ ID NO: 521908 - DNA, 201 bp, Homo sapiens
ttgctagggcttctgtaacaaagtatcacaaactgagtgtctcgaataacagaaatgtattatctcacagctctggatacacaggataggaagcagctggragagatgacaagtgcataaattctgatagttccaaaagcagaaggctccaattgtccttactaagaacaatctgtaaatattaaaaaagcagtgaagtgg

SEQ ID NO: 521909 - DNA, 201 bp, Homo sapiens
acacattattaccttggaagaattgcataaggcttatgacttgaaaaaaaattctttttggaaacacaagcatttctttcctttttttttttttgagacasagtctcactctgtcacccaagctggagtgcagtggtgcgatctcggctcactgcaacctctgcctcccgggttcacgccattctcctgcctcagcctccc

SEQ ID NO: 521910 - DNA, 201 bp, Homo sapiens
cctcccgagtagctgggactacaggcacccgccaccacgcccagctaattttttgtatttttagtagagacggggtttcaccgtgttagccaggatggtcycaatctcctgacctcatgagccgcccgcctcagcctcccaaagtgctgggattacaggcgtgagccactgtgcccggccttggaaacacaagcatttctt

SEQ ID NO: 521911 - DNA, 201 bp, Homo sapiens
agtccaagtacagtgagcgtgtggaccattgaaagaagtaaccaggagcattgtttcagagcaaggtaggagcctttgttacaacagtagcaacatggtgstctttgtttgcattcgtgtaatgtgattgggtcaatttgatgaattaagtggctttatacatacatatatatgcatacacacacatacacacacatacgt

SEQ ID NO: 521912 - DNA, 201 bp, Homo sapiens
ggggtttcaccgtgttagccaggatggtctcaatctcctgacctcatgagccgcccgcctcagcctcccaaagtgctgggattacaggcgtgagccactgygcccggccttggaaacacaagcatttctttaagaatgaccaggtgttgccatatgtatttacggcgcaagcaagtgttgtctaagcagtttctctgtttg

SEQ ID NO: 521913 - DNA, 201 bp, Homo sapiens
gggaggagggggccttgccaagacaagctcctcaaacctgtccaaagcactctctatttcaattgctcttactatttcacaccttgatttctgtaacaacyttaggatggacttcactgaccttaatctacatctgacccaatctatgcagtttatctctgtcaaattgcctctttgaaggccacttttaacacccagctc

SEQ ID NO: 521914 - DNA, 201 bp, Homo sapiens
ataaatgatcaattggcatcgatgagaacagtacccccagatccatatggagtactcacatgtagtacttacagattcaggcacttacacttgttttgtarcaaatgtgatgatatatttcattttctaggtttggctgagttaaattgcaaaattattaaagaagataaaatagccttggtatagcatatgacagtatag

SEQ ID NO: 521915 - DNA, 201 bp, Homo sapiens
gctcaatgttgcctaccatttgaattattagtgtttattttatttattttattttaacagagtctggctctatcacccaggctggagtgcagtggcatgaycttggctcactgcagcctccacctcctgggttcaagtgattctcctgccttggcctcccaggtagctgggattacaggtgtgcgccaccatgctcggctt

SEQ ID NO: 521916 - DNA, 201 bp, Homo sapiens
cagatatggcctaagataatagaaataaggaagtaagctagaattattacaacttcccaagatatttaaagatgtctgaataactattctaattacaatgkctcatatatttatgagattattcttgggtcatttcagaccatgctgggacatacatggtgcggtatgctcagttctgcattgaagtctagagacagtaac

SEQ ID NO: 521917 - DNA, 201 bp, Homo sapiens
tgctagggcttctgtaacaaagtatcacaaactgagtgtctcgaataacagaaatgtattatctcacagctctggatacacaggataggaagcagctgggrgagatgacaagtgcataaattctgatagttccaaaagcagaaggctccaattgtccttactaagaacaatctgtaaatattaaaaaagcagtgaagtgga

SEQ ID NO: 521918 - DNA, 201 bp, Homo sapiens
tgaggtgctgggggttaggatattaacacgggaatttgggggaggcacagttcaacccatagcaatacctaaaggatgaacaggaatcagccttgtgacgrgaagaaagaacatcctaggcagaggaatggcatgtgcaaaggccatgaagtagaaaaagcacagcaggtttcaatgaaaaggtcatgataacgggaacaa

SEQ ID NO: 521919 - DNA, 201 bp, Homo sapiens
ccaaagtgctgggattacaggcgtgagccactgtgcccggccttggaaacacaagcatttctttaagaatgaccaggtgttgccatatgtatttacggcgsaagcaagtgttgtctaagcagtttctctgtttgcttgtcatagcgacatttagaaactcgaacatgctttcatttatgtaaatagtttatgaagctttga

SEQ ID NO: 521920 - DNA, 201 bp, Homo sapiens
taaagaagataaaatagccttggtatagcatatgacagtatagtgtttttaaaacatagtttttttgctttcttaggatacaatacaatgataagcataaktatttataaatttgacattaaggtcattgattatataaattgtatcataaattatatcccaatttatgtaaattaaaaaatagataaatgttctaaatac

SEQ ID NO: 521921 - DNA, 201 bp, Homo sapiens
tgaatcattacaaaatgtggtaattattacaacagaataaatggagacagggcagcaaggatgggatgggctggttaaggaaggcctctggggagatgacrcttaagctaagatttgaaggacaaggaggcattactcatgttacaagcaggataaagagtgtttcctttgggaggccgagacgggtggatcacgaggtca

SEQ ID NO: 521922 - DNA, 201 bp, Homo sapiens
taggacttgtgcactcagtgtattttaaatttttctgaaagcagaaatgtaatattatagtttgacaaccctaaatcattcatggattattaataaagccrtatattttgtatttaagttagacattttcccagtagtttactttttcattttgtagcaaaataaagtgaggaaaatgtttaaaacattaattaatgtctg

SEQ ID NO: 521923 - DNA, 201 bp, Homo sapiens
atgtgtgttcttttatcttagaaattgggggcagaaaggacatgaaaatagaaatgtttcaaagattttgatgaccctttgctttgttaaaaaaaaaaaaktatttgaaatgtattatattgatgttgacatatcttttcccaaagatgggtgcaaggattccctaagcagaatgttcattttgtcaacgacaacaccatt

SEQ ID NO: 521924 - DNA, 201 bp, Homo sapiens
tttaaataactaaagttacttaggagaattctcacattatattttgatgtatttggaatattagagttatctgcttggtacatagttggtgctaaataaaytttcttgaatcaattattaaatacattaatgaaatggctgaacatttctaatattaacatacagagaagttgggttgatttctcttgaaaatatttttta

SEQ ID NO: 521925 - DNA, 201 bp, Homo sapiens
attaattaaaatggtttcctctttgggtactattaaaaaggatttattatgaatagcttcaaatctatacaaaatagaggggacgatataatgaactaccrtatattactgcaaacaaacacaaatagaatttaaaaatccattgcccttccgcaatgaaaaaatacctaatatctgtaacccaattccatgctcatttct

SEQ ID NO: 521926 - DNA, 201 bp, Homo sapiens
atcttggctcactgcagcctccacctcctgggttcaagtgattctcctgccttggcctcccaggtagctgggattacaggtgtgcgccaccatgctcggcttttttttttttttttttatgtttttggcagaggatggggttttaccatgttggccaggctggtctcgaactcctggcctcaagtgatccacccacctccg

SEQ ID NO: 521927 - DNA, 201 bp, Homo sapiens
acaaaatattccagaaatgattaaaggataacatactaacatttcttatacaaaaatgtaagtacctagattcagggagccacatttagtttatgtaaatttttttttttttttttttttttgagatggagtctcactctgtcccccaggctggagtgcagtggcacgatctcagctcactgcaacctccatctcccaggt

SEQ ID NO: 521928 - DNA, 201 bp, Homo sapiens
cttgctagggcttctgtaacaaagtatcacaaactgagtgtctcgaataacagaaatgtattatctcacagctctggatacacaggataggaagcagctgggagagatgacaagtgcataaattctgatagttccaaaagcagaaggctccaattgtccttactaagaacaatctgtaaatattaaaaaagcagtgaagtg

SEQ ID NO: 521929 - DNA, 201 bp, Homo sapiens
aacatgtttatttgcttatatattatctatggctgcttttgctctatgatggcagacttgagttgtaatagagcccatatatggtctgcaaagctaaaaasattaactgtctggtcctttatagaaagagcttgccaacccctatcctagaggtgtttatactcagtacatttcattcatttacattaacttcctggcccc

SEQ ID NO: 521930 - DNA, 201 bp, Homo sapiens
agctgggcatggtggctcacgcctgtaatcccaacactttgggaggccaaggtgggcggatcacctgaggtcaggagttcgagaccagcctggccaacatrgtgaaaccccatctctactaaaaatacaaaaattagccagagtggtggtgggtgcctgtaatcccagctactcaggaggctgaggcaggagaatcacttg

SEQ ID NO: 521931 - DNA, 201 bp, Homo sapiens
gcttgagaaggaaggacaaacacattattaccttggaagaattgcataaggcttatgacttgaaaaaaaattctttttggaaacacaagcatttctttcctttttttttttttgagacagagtctcactctgtcacccaagctggagtgcagtggtgcgatctcggctcactgcaacctctgcctcccgggttcacgccat

SEQ ID NO: 521932 - DNA, 201 bp, Homo sapiens
cagtggcgggcacctgtaatcccagctactcaggaggctgaggcaggagaatctcttgaacccaggaggcagacgttgcagtgagccaagattccgccatygcactccagcctgggcgacagagggagactcagtcacacacacacaaaataatgaaattttaaaaaattaaaaataaaaaacgaatgtctggaattgaag

SEQ ID NO: 521933 - DNA, 201 bp, Homo sapiens
tgaaataaggaaattgtatgaatatttaaaatgcctggaacactaaagtaatgatatttcaaaaagaaagaaaaagaaagaaagaaagaaaagaaaagaaaaagaaagaaagaaaaaaatgcaaggcttggaaggtgcacacatgactgccactaacattcattgactggctcggccataagccacagccagcttcaaggg

SEQ ID NO: 521934 - DNA, 201 bp, Homo sapiens
cagtcggagaaaagacagattacttctaaggaatttcagttagactaatagctgacttctctgtggcaataatgtaagaaatagtggaataatatcttcartgtagtgcagggttcagcaaattgtggctccatggggcaaaactagcctgctgcatgtttttcaaataagattttattggaacatagccacacccactaa

SEQ ID NO: 521935 - DNA, 201 bp, Homo sapiens
ttctcttgaaaatattttttaatattttatctctaatgaagaattttctctttattttctctctggctttacatgccaactgtatatgtgtttcccccccmcacacacaattttttttaaaattctccttaaaaaaaattttttttttgctcctcacactttgccaagtcccactcctaagtttttaaatttgtttatcat

SEQ ID NO: 521936 - DNA, 201 bp, Homo sapiens
cgcgccaggctaattttttgtatttgttagtagaaacggggtttcaccatgttagccaggatggtctcgatctcctgacctcatgatccgcccgccttggmctcccaaagtgctgggattacaggcgtgagccaccacgcctggcctttttttgtttgtttgtttgtttgttttgttttgttttgttttttagtagagaaa

SEQ ID NO: 521937 - DNA, 201 bp, Homo sapiens
tctatgtttaaacccaaatataaaaagatggaaaaagatatgtaaacattaaccaaaagaaaaccagtggaaatatattaacattagacaaattaggcttyaaggtaaaaatcattactaaagataaatgggcttatttcagaataataaaatattaaatttaccaggaatatatgaatacttaaaatatgtatgtaccta

SEQ ID NO: 521938 - DNA, 201 bp, Homo sapiens
gaaataaggaaattgtatgaatatttaaaatgcctggaacactaaagtaatgatatttcaaaaagaaagaaaaagaaagaaagaaagaaaagaaaagaaaaagaaagaaagaaaaaaatgcaaggcttggaaggtgcacacatgactgccactaacattcattgactggctcggccataagccacagccagcttcaagggt

SEQ ID NO: 521939 - DNA, 201 bp, Homo sapiens
ttaagcccttcagggtcaaggtcttactgagttgatctgtgatttcccatattctgtttccacatagagccttggttacagtaggcatttaataaatattygttgaactatatacacaacaattacaatgtgtttcttttcttttgtatgtttatcagggatctgtttatatctacacttttggtaaggagccaaccttaa

SEQ ID NO: 521940 - DNA, 201 bp, Homo sapiens
tatttagcttaagtttggaaatcgggatatgtagttcaaggcttaatgatagaattctgatcttgaaatcatggtagctgatgagatggctcaacagagtrgaagtaaacctggatgcttaataaggcaaaagaggtaactaaatatgcaaattagatggcactgagtgtggtacagcctgtggctgacctcagagtggat

SEQ ID NO: 521941 - DNA, 201 bp, Homo sapiens
aagtaatcaataagccttagcttgtctgatgaggcaagtatactatgcattgactaagactgattttctatgtttatctcactcatctctaggatggcttygtgtattcttttattattaaagatagaagttacatgatcgaggattttcttgagattgaaagacctgtagaacatatgacattttctcccaattatacag

SEQ ID NO: 521942 - DNA, 201 bp, Homo sapiens
tggtcttgatctcctggagtcaagcaatcctcccacctcagcctcccaaagtattgggattacagacatgagccactgttccctgccccatttttaatgtrtctgtttggccagagggtgggatggaagaagctgggaatagaaccctggtccacattttatattgaagctgtggacagaggaagatgaggcagtgaagaa

SEQ ID NO: 521943 - DNA, 201 bp, Homo sapiens
aagggcctgagaaagtgggcacctgcagcacagtcccatgaagaatgggagagtgaatctggaacaaatccaaggtgggctccaggcctggcacaccttgyagaggttagatcagctggctttctagtggagcaagctcataaagtcacgtttccaccacacccacagtccttgaccacagatgcaaagaaggccgatgcc

SEQ ID NO: 521944 - DNA, 201 bp, Homo sapiens
cagctcatgcagatgctggtttggagggatagggggtggagatggtgcactctggggccaccctggctgggaaggaaacccagacagactgggctggtttraatctgccagtctagacatctaatcaggagaatccctcatccattcatcaaaaatgtccctgtaacttatgtttaaaggtcactttaaatgtccagcaaa

SEQ ID NO: 521945 - DNA, 201 bp, Homo sapiens
gaaacacaagcatttctttaagaatgaccaggtgttgccatatgtatttacggcgcaagcaagtgttgtctaagcagtttctctgtttgcttgtcatagcracatttagaaactcgaacatgctttcatttatgtaaatagtttatgaagctttgacaacaaatgtaaacagacctgaaattataaatctgctaaatttgt

SEQ ID NO: 521946 - DNA, 201 bp, Homo sapiens
cagtatgagggcgtattaccttgctggccaccacttggtaccgagtgcaactggttactctatctcgaaggtggtcttctgagaggttctatgaactgctrtgaatcaggacagtcctcaggcagtgacagactgtgggtggggaaggggagaggaggagatgagaatttatccaccaactcctgtatcccatcgattgaa

SEQ ID NO: 521947 - DNA, 201 bp, Homo sapiens
ggtgaattgatgtttgtatagcttctaaagtcaagtctctgagcctcaatttcctcattcatgaaatagggataaagatggtgtctaatgtgaaggctgcrgtgatgatgatagatgaaattatataatatgctgtatgtgtatgtatgccaagtgctcaatgttgcctaccatttgaattattagtgtttattttattta

SEQ ID NO: 521948 - DNA, 201 bp, Homo sapiens
ttgatttttgcaagttataatacctccccacctcacttaaactgatatgcagtggttgcatcaataagaagtttctgttcatctcattgttctgatgcctyttttgtctacaggtcggtgaaattacctctagaagatgggtcattttttaatgaaacggatgtcgttttcccccagtcgttgccgaaagatctcatctat

SEQ ID NO: 521949 - DNA, 201 bp, Homo sapiens
gcttctaaagtcaagtctctgagcctcaatttcctcattcatgaaatagggataaagatggtgtctaatgtgaaggctgcggtgatgatgatagatgaaawtatataatatgctgtatgtgtatgtatgccaagtgctcaatgttgcctaccatttgaattattagtgtttattttatttattttattttaacagagtctg

SEQ ID NO: 521950 - DNA, 201 bp, Homo sapiens
aagaagagggatactagagaaactcaaaaaaaggggaggtcagtaaaattttaggtaattgaaaaatgcatcacaaaagagatcagactgaagcttgaccrgggaacatagttaaaagttgtctaaataaagatgagaggacagtgcatctatgcaaacatagatgatgattccaaataagcagtagaagtaatcaataag

SEQ ID NO: 521951 - DNA, 201 bp, Homo sapiens
atatttctgcctgcttgatgtccctggtggaaagataccagctagaaaaaaaatcttggaatctagactcattggactgactgaatcacgtgtctaccccrggtcaatcacttgcaccataggaatcctaaactctgattggccaggcctaagtcaaatgcatagccttggatgctgggtagagtcaacccacttaaatga

SEQ ID NO: 521952 - DNA, 201 bp, Homo sapiens
agatgaattgcaaacaaaattcaatgactttctgcctgaaagaaacttaaatttaagtatggaaagacttttgtttctgataattaccagaagtttttttwaaaaaaaaaaaaactatgctaacttatgttttaataaataaatgactaacttaaaatatctatggagaataggaaactaggaaaaagatatcataaaaga

SEQ ID NO: 521953 - DNA, 201 bp, Homo sapiens
aaataaggaaattgtatgaatatttaaaatgcctggaacactaaagtaatgatatttcaaaaagaaagaaaaagaaagaaagaaagaaaagaaaagaaaaagaaagaaagaaaaaaatgcaaggcttggaaggtgcacacatgactgccactaacattcattgactggctcggccataagccacagccagcttcaagggtg

SEQ ID NO: 521954 - DNA, 201 bp, Homo sapiens
gagagaataaatgaattcgaagatagatcagaagttattcagaatgatactagaaaagcaaaagggtaggaaatacagaagggaacataagagataagaayaatacagtgaaaagatctaacatatgtttgattagagtccagagaggagaaagtgggacagaggcaataattaaagagatattgactggggatttcccag

SEQ ID NO: 521955 - DNA, 201 bp, Homo sapiens
aataaggaaattgtatgaatatttaaaatgcctggaacactaaagtaatgatatttcaaaaagaaagaaaaagaaagaaagaaagaaaagaaaagaaaaagaaagaaagaaaaaaatgcaaggcttggaaggtgcacacatgactgccactaacattcattgactggctcggccataagccacagccagcttcaagggtgg

SEQ ID NO: 521956 - DNA, 201 bp, Homo sapiens
attgcttaaagacatgaatttacagatttaagaggtccagtgaatcccaaacagaatacataaaatgatatccacacttagacttaccagagtgaaactgytgaaaaccaaagacagagaaaattttaaaagcagtcggagaaaagacagattacttctaaggaatttcagttagactaatagctgacttctctgtggcaa

SEQ ID NO: 521957 - DNA, 201 bp, Homo sapiens
ttttcttttccttcatctagcaagggactttgttcatggtaggagttcaggatattctcttaaatgggtaaatgaataaatccattttaaaatacaccacwttatttatttatttatttatttatttatttatttatttatttttgagatggagtcttgctctgttgcccaggctggagtgcagtggcacaatcttggctc

SEQ ID NO: 521958 - DNA, 201 bp, Homo sapiens
attggctgtgaagagggtcatcttttaatgattaatggagacaccttgcaagtgactgtacttaataagatagaagaggaatcgccattgggtaagaaackgtcctacttcatattcctgtatagccatgggtgttggtttttttggttttccctatttttctctttcttggagacatctttgaatcctccttcttcttaa

SEQ ID NO: 521959 - DNA, 201 bp, Homo sapiens
tgttacaagcaggataaagagtgtttcctttgggaggccgagacgggtggatcacgaggtcaggagatcgagatcatcctggttaacacagtgaaaccccrtctctactaaaaatacaaaaaaattagccgggcatggtggcggacgcctgtaatcccagctacttgggaggctgaggcaggagaatggtgagaacccggg

SEQ ID NO: 521960 - DNA, 201 bp, Homo sapiens
aattagccgggcatggtggcggacgcctgtaatcccagctacttgggaggctgaggcaggagaatggtgagaacccgggaggcagaacttgcagtgagtcragatcacgccactgcactccagcctgggcgacagagcgagactccgtctcaaaaaaaaaaaaaaaaaaaaaaaaagagtgtttcacgtggaaggacctgc

SEQ ID NO: 521961 - DNA, 201 bp, Homo sapiens
cccaccccaacccttttctccaggctgatcatctgttaagcccaaaagccatcttgaaaattacctttctattgctcggttagaggtgttgtttttttggtttttttttagacagagtctcattctgtcacccaggctaggatgcagtggtgcaatcttggctcactgcaacctccgcctcctgggttcaagcgatctcgt

SEQ ID NO: 521962 - DNA, 201 bp, Homo sapiens
cccttggcacttactgtctctgaatctgccaatgcccagctcaaataccaccccctccagcaagttttccccattgcattgtccctcatctgccttttttsctattctctgactcactttccctgtaaaactgaggccatgaggtttcacttccctcccaactccctttctctcttccctttactcctactataccctcca

SEQ ID NO: 521963 - DNA, 201 bp, Homo sapiens
aaatgataaataaatttcctcagagtgttttcactattgtaaaaataactcaaattcctcttgagaataataaaattaacctaaatctattcacaaccagmcaaccaaccaacccgtttctattggatacttgccatgttctactactgtgtgaggaacagaaaaagaggatccgaagggaataaaaggcacactgcctac

SEQ ID NO: 521964 - DNA, 201 bp, Homo sapiens
aataaatttcctcagagtgttttcactattgtaaaaataactcaaattcctcttgagaataataaaattaacctaaatctattcacaaccagccaaccaamcaacccgtttctattggatacttgccatgttctactactgtgtgaggaacagaaaaagaggatccgaagggaataaaaggcacactgcctacccttgggt

SEQ ID NO: 521965 - DNA, 201 bp, Homo sapiens
atgatgaatgctcaatgttcctatgttttctgcgtctatggggttaagtatggttcctttttgtcagttgttctggtgagtatttctcaggcttttagccrtgattgttttcttaacacaaggttttattctctccctgaagccgaaagatgatctatatcctttgcttcacccgactatgcattgctggactccaacaag

SEQ ID NO: 521966 - DNA, 201 bp, Homo sapiens
gatgaattgcaaacaaaattcaatgactttctgcctgaaagaaacttaaatttaagtatggaaagacttttgtttctgataattaccagaagttttttttaaaaaaaaaaaaactatgctaacttatgttttaataaataaatgactaacttaaaatatctatggagaataggaaactaggaaaaagatatcataaaagaa

SEQ ID NO: 521967 - DNA, 201 bp, Homo sapiens
atgagggcatgaaaggtacaaataataaattaaagtcagtctgtccttaaaaaaaattattatgatgaatgctcaatgttcctatgttttctgcgtctatrgggttaagtatggttcctttttgtcagttgttctggtgagtatttctcaggcttttagccgtgattgttttcttaacacaaggttttattctctccctga

SEQ ID NO: 521968 - DNA, 201 bp, Homo sapiens
aaatagccttggtatagcatatgacagtatagtgtttttaaaacatagtttttttgctttcttaggatacaatacaatgataagcataagtatttataaayttgacattaaggtcattgattatataaattgtatcataaattatatcccaatttatgtaaattaaaaaatagataaatgttctaaatacatgaaattcaa

SEQ ID NO: 521969 - DNA, 201 bp, Homo sapiens
ctcctcctccatttagtcagcatttgtgccttttatgactcttgtcctcttcaagaccacccttgatgtttgtttaaccccctttaaagtaactattatarcatttgctctggtgagtgatggagaatggagatgagctcaaaaaaagcaccttgcctgctttcccttccagggcccaagcatttgaaaccagccatctaa

SEQ ID NO: 521970 - DNA, 201 bp, Homo sapiens
taggccaagtgacttttagaacatggtaggcagtgtttaggcttgtctttcctgtattctgtaatctttcaaagatggatctgatttttctgcttttcttytctccagaatagtggttgttgttttgtttaattgttttaaaagctgaggatggtgtttgccaatgtatttaagctgtatggtagcacatgaaaagaaagt

SEQ ID NO: 521971 - DNA, 201 bp, Homo sapiens
tgttatgtttatattttcaactcttatgagcagtaatcaatgacatttaccattcctttagagtcttggaatttatattcataaaccctgtctattgtatraaattttgccctttagcataaagatacaggtattagataaaatgtaccctataaaaccatccacaaactaagcttactgtgtgatacagaggtcttcctt

SEQ ID NO: 521972 - DNA, 201 bp, Homo sapiens
gagaaatccatattcttaatctcctagtacggcactctatccttttgtagtttctctctccttctctctctaatatatatatatatatatatatatatatrtatgtatctttttctgatcaagatctttgattctggaacaggcattctggactctatagtgactctggcctaattatttcactatgtatctatattaact

SEQ ID NO: 521973 - DNA, 201 bp, Homo sapiens
tatgtttatattttcaactcttatgagcagtaatcaatgacatttaccattcctttagagtcttggaatttatattcataaaccctgtctattgtataaarttttgccctttagcataaagatacaggtattagataaaatgtaccctataaaaccatccacaaactaagcttactgtgtgatacagaggtcttcctttta

SEQ ID NO: 521974 - DNA, 201 bp, Homo sapiens
ttttggcctggatcttcctcaacaacttcctttcatttatctctataatgtgatatttattattaccaagtaggctcagattcaaaactgttgttttttgtttttttttttaaattacaattgtccttttcctattttaggtaactaaaggaattaacttcaaatacagtacattaaattttaatacctaaaggaaatttt

SEQ ID NO: 521975 - DNA, 201 bp, Homo sapiens
atcttcctcaacaacttcctttcatttatctctataatgtgatatttattattaccaagtaggctcagattcaaaactgttgttttttgtttttttttttwaattacaattgtccttttcctattttaggtaactaaaggaattaacttcaaatacagtacattaaattttaatacctaaaggaaattttacatattttgg

SEQ ID NO: 521976 - DNA, 201 bp, Homo sapiens
atgtacttaacagtgatttttttttttttaattgaggcggagtcttgctctgtcgcccaggcgcgatctcggctcactgcaagctctgcctcccgggttcrcgccattctcctgcctcagcctcccaagtagctgggactacaggcgcccgccaccacgcccggctaattttttgtatttttagtagagacggggtttcac

SEQ ID NO: 521977 - DNA, 201 bp, Homo sapiens
ggctgaggcagaattgcttgaacccaggaggtggaggttgcagtgagccgagatcacaccactgcactccagcctgggagacagaacgagactcctaatcaaaaaaaaacacaagaaaatagagtgaggcttttttaccgtatatacataaaatacttatgaaaattagaagataatttggcattcctactgtttcactgt

SEQ ID NO: 521978 - DNA, 201 bp, Homo sapiens
ggttaagaaattctttaagaaattaaagtgaaagaattgttaatactgatctctaaaatttatttcttaactctgagaaagtcaccttacccatcaacagsataatgcctaattaatcttacagggtgattttgtgtgttaaatgaggtaaatttgtataagaagtttgaaccccacaagtgtaggggacatggtattact

SEQ ID NO: 521979 - DNA, 201 bp, Homo sapiens
attttcatctaacctaatctgtatctgtattttatttgcctgtctctcctacctatcatgtaacttgcttgagggcagggattttgttttatacacactgkggctagtgcctagagcagtgcacatagtaccaataacatccacataatggtactcaataaatacttgtttcaggaatcctatgatgagaatagttacagt

SEQ ID NO: 521980 - DNA, 201 bp, Homo sapiens
ttgaaaagtgcaaaaatactgtagttaagtatgagagagattttattctttagtactttgaattttatggcatgccttctactggttaaaactatttttgtttacacctaacatttattaaatatgggggtgtaccttagttttgacacttttcttttgctgtatgaaaatctgtgcctgactgaagtctaaaatcaaaca

SEQ ID NO: 521981 - DNA, 201 bp, Homo sapiens
actgtcttaaaagttatcttagaagatggtttcttttaagaagattggatttcattcattaaaacaaaacaatataaaacaaaaagctgtatatagttgtggggtgtgtgtgtgtgtgtgtgtgtgtgtgtgtgtgtgtgtgtgtagaaaatgaactaaactattcccagtgcttgtctctcggttgggagatggtgggaa

SEQ ID NO: 521982 - DNA, 201 bp, Homo sapiens
ctgtcttaaaagttatcttagaagatggtttcttttaagaagattggatttcattcattaaaacaaaacaatataaaacaaaaagctgtatatagttgtggggtgtgtgtgtgtgtgtgtgtgtgtgtgtgtgtgtgtgtgtgtagaaaatgaactaaactattcccagtgcttgtctctcggttgggagatggtgggaaa

SEQ ID NO: 521983 - DNA, 201 bp, Homo sapiens
tgtcttaaaagttatcttagaagatggtttcttttaagaagattggatttcattcattaaaacaaaacaatataaaacaaaaagctgtatatagttgtggggtgtgtgtgtgtgtgtgtgtgtgtgtgtgtgtgtgtgtgtgtagaaaatgaactaaactattcccagtgcttgtctctcggttgggagatggtgggaaaa

SEQ ID NO: 521984 - DNA, 201 bp, Homo sapiens
gtggctgttaagaactacatgaattatattatttcatccttcttttttcttagaccaacttcttagagtcattcttggcttttctttgtctctcacacctsacaatctgtaagtgagtcctgtcacatcaaaatgtattcagaatctggctagctctcaccatctacgctactaccaccctattcctagtgaccatcctct

SEQ ID NO: 521985 - DNA, 201 bp, Homo sapiens
tcttaaaagttatcttagaagatggtttcttttaagaagattggatttcattcattaaaacaaaacaatataaaacaaaaagctgtatatagttgtggggtgtgtgtgtgtgtgtgtgtgtgtgtgtgtgtgtgtgtgtgtagaaaatgaactaaactattcccagtgcttgtctctcggttgggagatggtgggaaaagg

SEQ ID NO: 521986 - DNA, 201 bp, Homo sapiens
ctaaggtggctgttaagaactacatgaattatattatttcatccttcttttttcttagaccaacttcttagagtcattcttggcttttctttgtctctcayacctgacaatctgtaagtgagtcctgtcacatcaaaatgtattcagaatctggctagctctcaccatctacgctactaccaccctattcctagtgaccat

SEQ ID NO: 521987 - DNA, 201 bp, Homo sapiens
ttaaaagttatcttagaagatggtttcttttaagaagattggatttcattcattaaaacaaaacaatataaaacaaaaagctgtatatagttgtggggtgtgtgtgtgtgtgtgtgtgtgtgtgtgtgtgtgtgtgtgtagaaaatgaactaaactattcccagtgcttgtctctcggttgggagatggtgggaaaagggg

SEQ ID NO: 521988 - DNA, 201 bp, Homo sapiens
taaaagttatcttagaagatggtttcttttaagaagattggatttcattcattaaaacaaaacaatataaaacaaaaagctgtatatagttgtggggtgtgtgtgtgtgtgtgtgtgtgtgtgtgtgtgtgtgtgtgtagaaaatgaactaaactattcccagtgcttgtctctcggttgggagatggtgggaaaaggggg

SEQ ID NO: 521989 - DNA, 201 bp, Homo sapiens
aaataccatctcatccattaagtcttcctgaataggagttctcttgtctcttccagattccaacagcacattatttatactttataatactgcattacgawaaaagttgtttaggttcttagctcccctttagagagtaagctcctgagggcaggaactatgtctagattcattattgtatctcttacaggctgtaatacg

SEQ ID NO: 521990 - DNA, 201 bp, Homo sapiens
aaaagttatcttagaagatggtttcttttaagaagattggatttcattcattaaaacaaaacaatataaaacaaaaagctgtatatagttgtggggtgtgtgtgtgtgtgtgtgtgtgtgtgtgtgtgtgtgtgtgtagaaaatgaactaaactattcccagtgcttgtctctcggttgggagatggtgggaaaagggggc

SEQ ID NO: 521991 - DNA, 201 bp, Homo sapiens
gagattaacctttctaaagcacaactcgcatcagattactgccttgcttaaaattcctcagtaattccttcttgcctaccaaatagtcccaactcctacartatgactccaaactatcttttctgcattagtcacaatgaccttcttttgctctgcattcttatcaggcttaactaacttaagactgtatcattgttactt

SEQ ID NO: 521992 - DNA, 201 bp, Homo sapiens
aagttatcttagaagatggtttcttttaagaagattggatttcattcattaaaacaaaacaatataaaacaaaaagctgtatatagttgtggggtgtgtgtgtgtgtgtgtgtgtgtgtgtgtgtgtgtgtgtgtagaaaatgaactaaactattcccagtgcttgtctctcggttgggagatggtgggaaaagggggcag

SEQ ID NO: 521993 - DNA, 201 bp, Homo sapiens
ctcccgtgttcaagcaatgctcctgcctcagcctcctgagtagctgggattacaggtgtacgccaccacgcccggctaatttttgtatttttagtagagayggggtttcaccatgttggtcaggctggactcgaactcctgacctcgtgatctgcctgccttggcctcccaaagtgctgggattacaggtgtgagccactg

SEQ ID NO: 521994 - DNA, 201 bp, Homo sapiens
gttatcttagaagatggtttcttttaagaagattggatttcattcattaaaacaaaacaatataaaacaaaaagctgtatatagttgtggggtgtgtgtgtgtgtgtgtgtgtgtgtgtgtgtgtgtgtgtgtagaaaatgaactaaactattcccagtgcttgtctctcggttgggagatggtgggaaaagggggcagag

SEQ ID NO: 521995 - DNA, 201 bp, Homo sapiens
gagtgcaatggcgtgatcttggctcactacaaccttcacctcccgtgttcaagcaatgctcctgcctcagcctcctgagtagctgggattacaggtgtacrccaccacgcccggctaatttttgtatttttagtagagacggggtttcaccatgttggtcaggctggactcgaactcctgacctcgtgatctgcctgcctt

SEQ ID NO: 521996 - DNA, 201 bp, Homo sapiens
ccgtgttagccaggatggtctcaatctcctgacctcatgatctgcccacctcggcctcccaaagtgctgggattacaagcatgagccaccgtgcctggccrcatgactcattcttgagtctcagtatttttttccctgccttttcaaatagtaagcaattaataaacgtgttacaactattattttcatttacaatattca

SEQ ID NO: 521997 - DNA, 201 bp, Homo sapiens
ggcagatgtcatatctttcttttaaatctgcctctagcaacatccacatctacctttatttatgtatatcttctaacccctgggagtataattagaacctrtggagtcacctcttaaatgagatcttaaaggttctctgtttagtctcttcaacttagctaacattcactaagcacatagtatgtgcaaggccctctgcta

SEQ ID NO: 521998 - DNA, 201 bp, Homo sapiens
ttcctgaatgcccccagaccactgtgcttttaaaatatgacttttttgctatttattttctcccttggtgacaattgggcagatgtcatatctttcttttraatctgcctctagcaacatccacatctacctttatttatgtatatcttctaacccctgggagtataattagaacctatggagtcacctcttaaatgagat

SEQ ID NO: 521999 - DNA, 201 bp, Homo sapiens
caggacgaagcttggcagctagaaaacagagctggaaactggcacggctgaattattttcaccgaagactttgtttcctaaggctagttgcttaactttcratggcctcattttatttagctgttagttgagtgtgatatccccactggtgctcagagagagttgttagtaatgataaaagggaactgcaatacttaagca

SEQ ID NO: 522000 - DNA, 201 bp, Homo sapiens
aaccagggtacacaatttaagttgccacttattgatgacagaatttctggatagtaggattttaataggcgagcaaataaaattcaaatcaatttcaaggraaaacatctggccaggggtagcttgatttcgcccccaaaaatactgaagactaatccattgacattcataatgggacagctaagtaccaaatagctaact

SEQ ID NO: 522001 - DNA, 201 bp, Homo sapiens
agggttgtggcactggcacagacacaggaaaatccattttccccactcttttatttttgctattctgatcatttgtcccccttttaaaaataaacttcccrtgtcttccatttgtggtactaaaatttgctactgttttagaccatattttcctattatttatctgttcaaatttgtattattacaactaatagctcttga

SEQ ID NO: 522002 - DNA, 201 bp, Homo sapiens
cccagaatccttcacctttcaaggagttatttaacaatgagcccagtgactcaatagggcccaaacctttttattttacaatatgagctccaagacacttrctgatctactgtgaatataaaatgttattagccttatcaaataaataaatgagcacagctctttgttcgctctattgaactgggtgataattatttagat

SEQ ID NO: 522003 - DNA, 201 bp, Homo sapiens
cgcgatctcggctcactgcaagctctgcctcccgggttcacgccattctcctgcctcagcctcccaagtagctgggactacaggcgcccgccaccacgccyggctaattttttgtatttttagtagagacggggtttcaccgtgttagccaggacggtctccatttcccaacctcatgatcctgccctcctcggcctccca

SEQ ID NO: 522004 - DNA, 201 bp, Homo sapiens
tcagcctcccaagtagctgggactacaggcgcccgccaccacgcccggctaattttttgtatttttagtagagacggggtttcaccgtgttagccaggacsgtctccatttcccaacctcatgatcctgccctcctcggcctcccagagtgctgggattacaggcatgagccaccatgcccggccagtggtttcttttttt

SEQ ID NO: 522005 - DNA, 201 bp, Homo sapiens
ggagtttgagaccagcctggccaacatggcgaaatcctctctctactaaaatacaaaaattagctgggcatggtggcaggtgcctgtaatctcagctactygggaggctgaggcagaattgcttgaacccaggaggtggaggttgcagtgagccgagatcacaccactgcactccagcctgggagacagaacgagactcct

SEQ ID NO: 522006 - DNA, 201 bp, Homo sapiens
cggatcagacacagttggttattaacaagttaccagaaaaagtagcaaaacatgttacgttggttcgagagagtggctccttaacttatgaagaatttctygggagagtagctgagcttaatgatgtgtaaggcttgctctttttgtttttcgtttttccccttgttgtatgtatgccccatatgtcatggctgtgtaaga

SEQ ID NO: 522007 - DNA, 201 bp, Homo sapiens
tacaactaatagctcttgaattctttgctaaaggtaacagcaacacttccagaggcttctaaaacactactgttttgcagggcaggagtattctggaatcyttttacttagatataaaataaacctcgaatattaaaaagttgtagccatctgagagaggaaagtttaagtgactgaaaatgtagaatacttcaacgtgca

SEQ ID NO: 522008 - DNA, 201 bp, Homo sapiens
tctatctctggaggaatatataagaaactggtaactgtggttgcccctgggaaagagaattgaagattgagataggagggagggatttatttttcactatrtatttctatgctatttcctttttaaaagccatgtgcatgtattactttaaataaaatcctgtttttaaaaaagaagaaagcaaactgttttgttttgact

SEQ ID NO: 522009 - DNA, 201 bp, Homo sapiens
ggatttttttttttttttttggcctggatcttcctcaacaacttcctttcatttatctctataatgtgatatttattattaccaagtaggctcagattcaraactgttgttttttgtttttttttttaaattacaattgtccttttcctattttaggtaactaaaggaattaacttcaaatacagtacattaaattttaat

SEQ ID NO: 522010 - DNA, 201 bp, Homo sapiens
tggttactgtctcttctccactgtattggatgctccacagtggcaagaaccatgtttcttttgttcactgttttatctccagaacataagcaccaggcacktgctacttgttgaatttaattttaaaaaagtcctgtaacacagtggctccctaataccagtctgcaacccttggcttctgatgatgttttcataagtttg

SEQ ID NO: 522011 - DNA, 201 bp, Homo sapiens
aaatgttaaacagcccaactcttggtgccagtttccctctccctttgcctctctgctttagtccttgtggcctttttaaaaattacctcaaagtcaccgtsctgcttcctgtctcaggcacttttcataacctctgcctggagtgtcctccttttgccatttccctactttttttttaatccctaactctgaccattctga

SEQ ID NO: 522012 - DNA, 201 bp, Homo sapiens
agattgggcaggcatacagtcttcaggtcatcaacaaaaatgttaaacagcccaactcttggtgccagtttccctctccctttgcctctctgctttagtcmttgtggcctttttaaaaattacctcaaagtcaccgtgctgcttcctgtctcaggcacttttcataacctctgcctggagtgtcctccttttgccatttcc

SEQ ID NO: 522013 - DNA, 201 bp, Homo sapiens
gtctgttttagtcttgatcctattattcactagataatattcatttattccagttttggtcatccgcagattgggcaggcatacagtcttcaggtcatcarcaaaaatgttaaacagcccaactcttggtgccagtttccctctccctttgcctctctgctttagtccttgtggcctttttaaaaattacctcaaagtcac

SEQ ID NO: 522014 - DNA, 201 bp, Homo sapiens
tttctatgcaataccactgttgcatggcctaggggggagtatcttgttaaaatcaaatagtaaatgtttcccagtttacataagcattaatttaatgacarattttcacagttttacattttctttcatacatatttttaacttctgcttctctccaacctagtactaatagatgactgaccaaattaacaaaagtcaaaa

SEQ ID NO: 522015 - DNA, 201 bp, Homo sapiens
tcatcaactgaaatctgcctttctaatttatacttactatacttagtggccatcccattctctgtaaatgaatcttgtttttccacatgacagctcctcasatatttaaacaaacttatattgcttcattgttaccaaactatgactatctagaataaacctctttttttttctatgcccatgaatatgttctaatttatt

SEQ ID NO: 522016 - DNA, 201 bp, Homo sapiens
tttttgaaagcatatttttatcttgcaaaaaatgactgtgttataggtggcacaataatatgagagctgctagttctttgagaaatcttgaccagaaattyatcttttgttgaattctgtgccagtggtttgcaaattatgtttctatgcaataccactgttgcatggcctaggggggagtatcttgttaaaatcaaatag

SEQ ID NO: 522017 - DNA, 201 bp, Homo sapiens
ggcgctgcagaggaaggttgggcgccgtctcccggcaacgcgcggggggcggggctttgcgtcacagaggtgcgaccgggtcccggcctgagtcgcggccrcccgcaggtctgagctgtgggctgaggcagcgcagccgctgccgcagggtgcgcgatgccttgaacctggggtgagctccgcggcgctgtcctttcgtgt

SEQ ID NO: 522018 - DNA, 201 bp, Homo sapiens
ggtaaatatgtggtatacctcattgtgaagttactgcccttcttgggaaagactttttttctaatattatatcctacttttcaggttataagttctttttragatttttgttaagttttggggaatttttgtttatttttggaaactgtccttgcttagaattaaaagaagtatccaacaccatggtgctttgagatttta

SEQ ID NO: 522019 - DNA, 201 bp, Homo sapiens
atacggtgctttacacatagtaggaactcagtatatattaagtgaacaaaaaaaatctgttgaaataatactctctttttaaatgactgggataggttgargctttccttgtttattgacacagtatattatctaaattacacttaatgttcatttttatttcataaagtactcagctcacattgaagaggccaatataaa

SEQ ID NO: 522020 - DNA, 201 bp, Homo sapiens
ctattttcctaaaccagggtacacaatttaagttgccacttattgatgacagaatttctggatagtaggattttaataggcgagcaaataaaattcaaatyaatttcaaggaaaaacatctggccaggggtagcttgatttcgcccccaaaaatactgaagactaatccattgacattcataatgggacagctaagtacca

SEQ ID NO: 522021 - DNA, 201 bp, Homo sapiens
caattaccatgtattagcccacttgaagttgtctcacagctcactggtgctatttttttctttcttttttgagtctttctctgggtttcatcctggatagytactattgctatctcttttcatattcaccatttttcttcaatgtctaacttgccattaattctatccagtgtatttttttaacctcagataattttcatt

SEQ ID NO: 522022 - DNA, 201 bp, Homo sapiens
ctggtagtatttttgtagattccataggctcttcttgaatgtccgaatatcatttttcaaagactttttttctgattcagaattctagacttgagagtatyttttctttcagtatgttaataatgttgcttcacactcatcttgtttgcattgtttctaatgagaactctgtcatccttttttcctctgtaggtaatgtgc

SEQ ID NO: 522023 - DNA, 201 bp, Homo sapiens
tgaatactggacctcagggaactttagagatcagctagtcaagttcattattttacaaaataagacttgagcgtttaggataatttataaaatacatacartaaactacatgtatttaatgtacagtttaatatgttttggcatatatacacacccataaaagttatgaatttttataaatggaatcatataatatgtgct

SEQ ID NO: 522024 - DNA, 201 bp, Homo sapiens
ggttaaaactatttttgtttacacctaacatttattaaatatgggggtgtaccttagttttgacacttttcttttgctgtatgaaaatctgtgcctgactkaagtctaaaatcaaacatttccctttttcctcctttttttctcctcatttctacatttattctgtgtatgtgtttagaaggaataaattcttgaatactg

SEQ ID NO: 522025 - DNA, 201 bp, Homo sapiens
cccgggttcacgccattctcctgcctcagcctcccaagtagctgggactacaggcgcccgccaccacgcccggctaattttttgtatttttagtagagacrgggtttcaccgtgttagccaggacggtctccatttcccaacctcatgatcctgccctcctcggcctcccagagtgctgggattacaggcatgagccacca

SEQ ID NO: 522026 - DNA, 201 bp, Homo sapiens
atgccttctactggttaaaactatttttgtttacacctaacatttattaaatatgggggtgtaccttagttttgacacttttcttttgctgtatgaaaatytgtgcctgactgaagtctaaaatcaaacatttccctttttcctcctttttttctcctcatttctacatttattctgtgtatgtgtttagaaggaataaat

SEQ ID NO: 522027 - DNA, 201 bp, Homo sapiens
tttcaaaataaactaaatgtcaagccctctttctggaaccaggttgaaaaccacttctgcaggctctctcaggtagtctctagatactgttgcattttaaygcaaggagttagtgatgaagtttcccagataccaagtacagttacaagataacaagttaatatgctgcctcaaattataaactttactcaaagttagggc

SEQ ID NO: 522028 - DNA, 201 bp, Homo sapiens
tttttcctcagttttccatacccaagtatcatgccagcttcctggttacatatacacagacataaacacacatgattttgctttttacctctacaactttrtttatgcacctagaatgtcttctattaaaatcctattgtttttctatctcatcatttcaacaagtttgagatatattcatctcttccttctttacttagc

SEQ ID NO: 522029 - DNA, 201 bp, Homo sapiens
cgtgaacatgcactctgtgttgtggttttatattgtatgcagatcacagagtcatatcttattttcacacccatatagtgatagatgttaatatttatcartattttatggttttcaaaataaactaaatgtcaagccctctttctggaaccaggttgaaaaccacttctgcaggctctctcaggtagtctctagatactg

SEQ ID NO: 522030 - DNA, 201 bp, Homo sapiens
tccaatctacaggtgatctaacaggaacaaacagcacaagactctccttccttctggtcactgtgctgctaagaaggtagcaaaaagttaagagaactttktactggttccactggctatttctgtatctcccattcttttatctctctccacaatgctcttctttgtagtcctctgcttctcacttttaaagtccagcct

SEQ ID NO: 522031 - DNA, 201 bp, Homo sapiens
gtatttactgcatttattcagtaaacatctattgagtgcttgtgtatctgccagaagacagaccatagctgctgtcctcaagaagctcactagagggaaayggccaagtgacttaacgaatgtcatagtatgatagaaatatgtgcagtcaccaaagagggacactgaaaagctgtggtggttgactagaggatggcctca

SEQ ID NO: 522032 - DNA, 201 bp, Homo sapiens
gctcggtctccgccgggctggacacccaaataagaaaccttttgcctgggacgatagctcagaaatagccacgtcgatctacttagccagccccacacttmtgaattggcttaggctgctacccttcccaaaggtctttccttgtcaaactagctgctaccttgagacccggctaagaaaagaacgttttcttgctaataa

SEQ ID NO: 522033 - DNA, 201 bp, Homo sapiens
attttttgtatttttagtagagacggggtttcaccgtgttagccaggacggtctccatttcccaacctcatgatcctgccctcctcggcctcccagagtgytgggattacaggcatgagccaccatgcccggccagtggtttctttttttttactgctctatttacagttgcattttctggttcattcttaaccaactggt

SEQ ID NO: 522034 - DNA, 201 bp, Homo sapiens
cagaatagtggttgttgttttgtttaattgttttaaaagctgaggatggtgtttgccaatgtatttaagctgtatggtagcacatgaaaagaaagtattgtttttttcttgttacagtcttcttaatgaagaaggtaaaggtgttatcccttttcatgtgccctcaaaactggaaattcagttcctgattagcttgttagg

SEQ ID NO: 522035 - DNA, 201 bp, Homo sapiens
tgtaagataatataatgcatatacattttaataactcggtggttttgtaaaacatagttttgttactgttattgccttctaactagctgtttgaatcttasagttgtctaattgctatacagcaggggtttttataatcaaattcttttttgcctcaatatctctaaccattacatcatactaatcttctatctctgtttt

SEQ ID NO: 522036 - DNA, 201 bp, Homo sapiens
tctcccctctcctgtgattccaattaccatgtattagcccacttgaagttgtctcacagctcactggtgctatttttttctttcttttttgagtctttctstgggtttcatcctggatagttactattgctatctcttttcatattcaccatttttcttcaatgtctaacttgccattaattctatccagtgtattttttt

SEQ ID NO: 522037 - DNA, 201 bp, Homo sapiens
gttgggaatctgagatacagggaagggcagcggctggccctgggtcggtcagataaattaagacaaaagcaggaccaggcatcgattattttctcctgctyatccctttcacggaggaattctaagccccgacacactgtatgacctaaagccagtctctgcctgtcgctgggcctcagttcgcctgtcctaagtttaatt

SEQ ID NO: 522038 - DNA, 201 bp, Homo sapiens
cagcacacaagcaggggccttctcctccaccagccgcatcaggatctgacctatgaggggagatggctgttgcagaagacatgggagatggatgcagggcycctgataaaagatatctcaaatgcctacctgcctcactgcagctcccaaccagccggggtctcatctgtctcttgtaccatagccccagctgccctcctg

SEQ ID NO: 522039 - DNA, 201 bp, Homo sapiens
ctggatcgaccctgtgtggaagagacagagctgcagcagcaggaacagcagcatcaggcctgggtgagtgagcagctagcacagcacagagacctcagcayagacagagacctccttcagtgggccatgacccagccttactccagaaatctacccaggaagagctttttgccctgagctgggaataatcgggctgggagc

SEQ ID NO: 522040 - DNA, 201 bp, Homo sapiens
aggtcaaacagctagtaagtggtggagccaggactcaaagccaggtctgtctgattcctagggggaggggctgctttcctgctgtcttccaccctatcccyaaatcaaattacaaccaaattaaaaacaaaaacaaagcaaaacacattcacttgaccctttccctcagtctaggagccatgtccactttgttcccctcac

SEQ ID NO: 522041 - DNA, 201 bp, Homo sapiens
tttaatctggatcgaccctgtgtggaagagacagagctgcagcagcaggaacagcagcatcaggcctgggtgagtgagcagctagcacagcacagagaccycagcacagacagagacctccttcagtgggccatgacccagccttactccagaaatctacccaggaagagctttttgccctgagctgggaataatcgggct

SEQ ID NO: 522042 - DNA, 201 bp, Homo sapiens
cagcacggtggcacctgctggcagtagggcatgggcctccagcagctgcaggtccctcaggtaacatcgtggccggtgtgccaggagcaccaggtctgccygactcagctgatactgggtgcgtaggcacgggatcacgtcctctgagctgcccacgatgagctccacctgtggggatagggggagctggaggtgagggtg

SEQ ID NO: 522043 - DNA, 201 bp, Homo sapiens
atttcctttgacccgactccccaggagctccatattgagagtccttaacccttaaagagctccagctcattggccgcttcctcgagactaagccccacccsgtcacacaaggtccgtcattcattggtgtcacttcctgtcacccagcatttctttcagttaattggtcctacccaggccccgcttttttcgcgtttagca

SEQ ID NO: 522044 - DNA, 201 bp, Homo sapiens
tgactcccattctcatccctccttgaacagcctgcaaacagctttgttgatccattatttacttaattatcagaataactttgacagtggtataattgttrttatccccattttacagatgaagacactgaggctcagagaggttaagtgactcagccaaggtcaaacagctagtaagtggtggagccaggactcaaagcc

SEQ ID NO: 522045 - DNA, 201 bp, Homo sapiens
ccaagccgatggcccgcagccaggcactcatgcctgcctcgcccagcccgctggcccgcccgccctgcaggcacggagcctaaggaaacagggcatgtcasggggagctgagtgccccccatagaaacacctgcagtcacattctgctgcatgctctggggaaaaggaagggaagggctgggctgatacatgtgtctccca

SEQ ID NO: 522046 - DNA, 201 bp, Homo sapiens
gtgggagcttaatgtctaacacctgggggtaggggaatacaggcagatgcagcccgaaggcagggcgcggtcccagggtgcttgggcagctacgggaggcmgcagggcccggacttggaggcccttgggagacccgatctgtttagctccaggctacctccgctctgtctccctcttagggcagaaagttccgagtgatgc

SEQ ID NO: 522047 - DNA, 201 bp, Homo sapiens
gacgtagtaggcagggttattgaagctgttcttgggtgggggggccgccaccccttctggttcaggagctccctctggcttcaacctgggtgtggaagcaraacgactaagccaggatccaggaacccaggtctaaggcagtggaagcagtggaaggagaactagacgggagtcagaaagtcccctggtcctagactttct

SEQ ID NO: 522048 - DNA, 201 bp, Homo sapiens
ttatctgtagctgtgaaacccaagctaaatgggtcagaatagaggtgccagaagacagggcaagaagcctccaatgagaggccaggtttggaaagcctctygaggcacccacagtcaatccgctgcagaatctttctcagagattcaggtgggtcttattcaagcctagggataaaaccggggtgactgacaacagctgaa

SEQ ID NO: 522049 - DNA, 201 bp, Homo sapiens
cagtgagctgagactgtgccattgcattccagcctgggtgacagaatgagactcggtctcaaaaaaaaaagaagaagaagaagaagaagactgggccctargctggggtttggggaagagatacgagaaatgagaacctggatttggagaaatgaggcccagggtggggagattgggtaccctgagccagatgagggtagg

SEQ ID NO: 522050 - DNA, 201 bp, Homo sapiens
ggaggccaaggcgggtggatcacttgaggtcaagagttcaagaccagcctaaccaacatggtgaaaccccatctccattaaaaatacaaaaaaaaaaaaaattagctgggcatggtggcccacgcctgtaatcccagctacttgggagtctgaggcaggagaatcgcttgaacctgggaggcagaggttgcagtgagctga

SEQ ID NO: 522051 - DNA, 201 bp, Homo sapiens
aggtaccctgggaaatcccaggccgagccatgtgcctcctccaaatagaaggctcaagctaggtctgtttacatggagggagctgtcttagaaacaatttygcattccatttttaaaggcagaattgagaggaaaggctgactgctccctttgactcagagccacagctaagggtggcctggctggccacaggcataaggc

SEQ ID NO: 522052 - DNA, 201 bp, Homo sapiens
tgggaggagcgctgagcgtgcaggcccagcaggggcatagtccacctcgctcagcgtcttggccatctgcagcaccgagcaggaccggtcatccccactgsccacttcccccaggaaagtgctggctggtgaggggcctgggggcagtggaggccttggatgggccttgggaggtggtgggccacgggcctcagccccacc

SEQ ID NO: 522053 - DNA, 201 bp, Homo sapiens
ccggtggaaggccgcagaaactggtgaaagtgggggcccagacgtacccaaatggacccccacaggcacccctggggctgggaggcggggtccagtaaaasaggacagcaccagagtaaccagggtcctcggtaaccatggcaactgaccttccgtcctgagcctaaaaggcgaggggcaggatgccctaattagggcatt

SEQ ID NO: 522054 - DNA, 201 bp, Homo sapiens
cccactggccacttcccccaggaaagtgctggctggtgaggggcctgggggcagtggaggccttggatgggccttgggaggtggtgggccacgggcctcasccccaccacggccccggaccactggccctggtaaaggatccaggctggggggcaggaagatggctgagtccggcagtggtggaggtggaaagtctggagg

SEQ ID NO: 522055 - DNA, 201 bp, Homo sapiens
ccctctccgactctcatctctgtctctttatcataataaaaaatatacaacacgttacagtttacaaagggccttcacagttatctaatttgactcttgcyagacatccgtcatattagtgtgggttatgtctattgaaaggtgaggaagaagttcagagaagctaagtgatttggccaagctgagaagtgctagtgccca

SEQ ID NO: 522056 - DNA, 201 bp, Homo sapiens
ggggaaggcctggtcctaggggatgaggaaggctgttcttgggctcttgacttgcactgatttcccctttagatcccagtgcttgctatgtctcagctccwctgtcttccagcctctagtatcctttctttgccaggtcctagaatgtttttcaagctccagggctgttgctgactacctgctttgtgcctctgtccattt

SEQ ID NO: 522057 - DNA, 201 bp, Homo sapiens
gctgggattcctgccctgacataatttgagaaatggccatggagaggttgggcttgctttctcttggggcctagggctttgtctggactcgccagggcttycatcttggaagcgaacagctttgctggggaaggcctggtcctaggggatgaggaaggctgttcttgggctcttgacttgcactgatttcccctttagatc

SEQ ID NO: 522058 - DNA, 201 bp, Homo sapiens
cttctcatttggtgcagccctggagactgaccacagatcacttgggtgcttcagtagttattcatgtcagccctgtttaccctgtgacactcttgagggcrctgaggccaagggagatgggcctagattgagtctgtgatgagctgagaccttccctcccagatacccctcctcgacaccctgcttctctggcctgagggg

SEQ ID NO: 522059 - DNA, 201 bp, Homo sapiens
gctggttgtacagtttgggatcccatgaagagaggggtccttggacagctcttctcctctcttcatcccatctctaccccacccccttggcccccagcctsactgcggcttatacagtaccctaacctgctactaatcacagagaaaaatgtgaagaaggaggagaagaggaaggctagaagcctgagcaagtgagggtag

SEQ ID NO: 522060 - DNA, 201 bp, Homo sapiens
ctctccctgacttggtgctcacatgcacctcactagggtttgtgaccagggtctggatgagcttgaatttgaatgaattgagtttgtatttctagaaccckgggtttttacatgtttggtctttttttgttttggtttgtcaccctcgataaaggaagtatattcatccatgtgctggttctggcccctctgttctaccca

SEQ ID NO: 522061 - DNA, 201 bp, Homo sapiens
cctcacctgtctctgttcctctcctccccggcccctctctgtctcaggtctccaggatagctgcttatgcctacagtgcactttctcagatccgtgtggaygcaaaagaggagctggttgtacagtttgggatcccatgaagagaggggtccttggacagctcttctcctctcttcatcccatctctaccccacccccttg

SEQ ID NO: 522062 - DNA, 201 bp, Homo sapiens
gtgatgagctgagaccttccctcccagatacccctcctcgacaccctgcttctctggcctgaggggatgaggcttacctgggctgggcagggcagactgtrgcttaactgcctacccccaccccctctctcttggtcagcacccgcttggctgtgctgagcagcagcctgacccattggaagaagctgccaccgctgccgt

SEQ ID NO: 522063 - DNA, 201 bp, Homo sapiens
accccacccccttggcccccagcctcactgcggcttatacagtaccctaacctgctactaatcacagagaaaaatgtgaagaaggaggagaagaggaaggytagaagcctgagcaagtgagggtagaaccttttgggactggcctttgaagctctggccagggatggggtgggggccaaaaggacagagcctggtatgtct

SEQ ID NO: 522064 - DNA, 201 bp, Homo sapiens
ctggccagggatggggtgggggccaaaaggacagagcctggtatgtcttcatagtcattgagaatgtggagataccagtttgggtggggggtgatcaccargggacctagggagatccccttcccaccctctctgttggcctcagagtcactcctgccccctctccctgacttggtgctcacatgcacctcactagggttt

SEQ ID NO: 522065 - DNA, 201 bp, Homo sapiens
aggggtccttggacagctcttctcctctcttcatcccatctctaccccacccccttggcccccagcctcactgcggcttatacagtaccctaacctgctastaatcacagagaaaaatgtgaagaaggaggagaagaggaaggctagaagcctgagcaagtgagggtagaaccttttgggactggcctttgaagctctggc

SEQ ID NO: 522066 - DNA, 201 bp, Homo sapiens
ctgagaagtgctagtgcccaggtgttctgacgctaggccatgtactttatccatggggccaagctgtctcagccatgcccctagaccaggtggccagtcaygggcaggctgctatgtctgtgctaaggtagacagtgaaaccctgcctcttgggttacactaatgcagagacaaaccttgatgtgacaaacctaacccatg

SEQ ID NO: 522067 - DNA, 201 bp, Homo sapiens
aggaaagactgaggaactgagataggcctggaggggagcattgaggagtctggcactgaaggttggtgagtcagcattagccaggatgtccccctgggccyatccttggctttgttcagggcactcttgctctttatgggttggatagatacccagcaggtctgtttttctcatttactgctgatacagcaagcaaggatt

SEQ ID NO: 522068 - DNA, 201 bp, Homo sapiens
acagagcctggtatgtcttcatagtcattgagaatgtggagataccagtttgggtggggggtgatcaccaggggacctagggagatccccttcccaccctytctgttggcctcagagtcactcctgccccctctccctgacttggtgctcacatgcacctcactagggtttgtgaccagggtctggatgagcttgaatttg

SEQ ID NO: 522069 - DNA, 201 bp, Homo sapiens
agagaaaaatgtgaagaaggaggagaagaggaaggctagaagcctgagcaagtgagggtagaaccttttgggactggcctttgaagctctggccagggatrgggtgggggccaaaaggacagagcctggtatgtcttcatagtcattgagaatgtggagataccagtttgggtggggggtgatcaccaggggacctaggga

SEQ ID NO: 522070 - DNA, 201 bp, Homo sapiens
tgaggccctgagttagtctgtcctgagatgaatcaggaattcgtgtatcgtcttagtccctggggttgcagaaggaaggtcgctgctagtctagggccagrggacgactctggaagttggtggcctttgaattggccaatgaaggatttaatcgatacagtgaggacatcgggacatgtgggaaattgtctgggaagcaac

SEQ ID NO: 522071 - DNA, 201 bp, Homo sapiens
caggagggcagctggggctatggtacaagagacagatgagaccccggctggttgggagctgcagtgaggcaggtaggcatttgagatatcttttatcaggrgccctgcatccatctcccatgtcttctgcaacagccatctcccctcataggtcagatcctgatgcggctggtggaggagaaggcccctgcttgtgtgctg

SEQ ID NO: 522072 - DNA, 201 bp, Homo sapiens
gtgaggggaacaaagtggacatggctcctagactgagggaaagggtcaagtgaatgtgttttgctttgtttttgtttttaatttggttgtaatttgatttrgggatagggtggaagacagcaggaaagcagcccctccccctaggaatcagacagacctggctttgagtcctggctccaccacttactagctgtttgacct

SEQ ID NO: 522073 - DNA, 201 bp, Homo sapiens
gagcggaagaacccaccagaatccgggactcaccaaacgcatgcgtccttcgtctccttttgttttccccgctcccgcccactaaaccggatgtgacgttracctaccttagtcacattgttagggaaggaagtgtgccgcgcctacctatctgccccgccttgagtctcagccagtcggcgtctccatcctggcgccagc

SEQ ID NO: 522074 - DNA, 201 bp, Homo sapiens
tcctcaccaccctggaccactggagcagccgctgcgagtacttgagccacatggggcctgtcaaaggtcagtgttccctagccttctgctccaagaagtasccccaagacagtgaaggaatatttgggatctgttgctgcttaactggatgaattgggcaggttcttgatcctcttttagggcctcttttttttctcatct

SEQ ID NO: 522075 - DNA, 201 bp, Homo sapiens
caccctcacctccagctccccctatccccacaggtggagctcatcgtgggcagctcagaggacgtgatcccgtgcctacgcacccagtatcagctgagtcrggcagacctggtgctcctggcacaccggccacgatgttacctgagggacctgcagctgctggaggcccatgccctactgccagcaggtgccaccgtgctg

SEQ ID NO: 522076 - DNA, 201 bp, Homo sapiens
agcgaactcgtaccaaatgccctcgtatgcccttgtgatatactcttctaaatgccatgcgaggggcgactgggatccaggcctgatgctccagatcgtayggtctgggtgcacacacacagatgatccagatgaccagtacctagtcggggaacacagagggtgtatcgcccagctgggctgggggtgaatacacagagg

SEQ ID NO: 522077 - DNA, 201 bp, Homo sapiens
tgctaaacgcgaaaaaagcggggcctgggtaggaccaattaactgaaagaaatgctgggtgacaggaagtgacaccaatgaatgacggaccttgtgtgacsgggtggggcttagtctcgaggaagcggccaatgagctggagctctttaagggttaaggactctcaatatggagctcctggggagtcgggtcaaaggaaat

SEQ ID NO: 522078 - DNA, 201 bp, Homo sapiens
catgaaagtgtgcaagtcttcaacactagaaaaggtgaagaagcgcaagaagttgctgctcttctgcctgagtgagtacaagaagtacatcatccttgcgraggccaagaagatcctggtaagtaatgtggaccaaaccattgatgatccctatgccacttttgtcaagatgctgacagtaaggactgccgctacgcccct

SEQ ID NO: 522079 - DNA, 201 bp, Homo sapiens
gcgagcagcactcgctaaggctctgcgtttaacagacactacctttgggaaggcgcttatcacaaaaagtccctgcccttctcgcgggctcggggcgcaamcctgacaaatcgggcagccttcttgagagtgcagaaatgctctgcgtacccagcaaatacattctctccttcccaccactctgtgcaaaccctcacgccg

SEQ ID NO: 522080 - DNA, 201 bp, Homo sapiens
ttttgggttttgtgtgtgtgtgttttctgtatcagtaactcttaaaatagttatggcagttctcctccaaggtgctgaattttccacttttgttattaaayggagtgtagctagtttgctctgcaatcaaggttaatgcactagacacctggtgggaagaaaggattccttaaattaggtgttcttggctgggcgcagtgg

SEQ ID NO: 522081 - DNA, 201 bp, Homo sapiens
gatttctcatcacaatttaggatcaaactatcttccttttgctagtaaccacccttttgatacctactgaatttgttgttcataaagcctattcttcactrgagtttgggtcctccatgctgtaccagtcacaattttgagggagagactcaagtgcagggccttacaatttaacttgtatcatatttatcaataaatgtt

SEQ ID NO: 522082 - DNA, 201 bp, Homo sapiens
ggttggagtgcagtgtctggatcatagctcactgcagcctcaaactcctcggcttaagcaatcctcccagcttggcctcccaaagcactgggattacaggyaggagccaccatgcccagccaagtacaacacatttttttgtttaatttactatgggtaattaatagaaacattcccaaagttgagggagctttactgagc

SEQ ID NO: 522083 - DNA, 201 bp, Homo sapiens
ttttttttaacttttagagacagggtctcgctctgttgcccaggttggagtgcagtgtctggatcatagctcactgcagcctcaaactcctcggcttaagmaatcctcccagcttggcctcccaaagcactgggattacaggcaggagccaccatgcccagccaagtacaacacatttttttgtttaatttactatgggta

SEQ ID NO: 522084 - DNA, 201 bp, Homo sapiens
ctgtcctttatagaaacatatttgcagagacctggggagaaaatgcaaacatgccagagggcttcataagaccatacataccctttaatgactccattaartgttatcaacaaatgttagtaataataaatatagttattatcattattgttcttattacagcctcattttatgttattactgattttttaatggggtcag

SEQ ID NO: 522085 - DNA, 201 bp, Homo sapiens
agggtaaggcagtaggtaatggtgaacagggaagcaaaaggtgactcaggttgagtaaacaacaccaagcatatctgactcaaggaatgcttcagaggccmggggtgcatgcctgtaatcccagcaccttggaaggctgacacaggaggatcactggagcccaagttcaagaccagcctgcacaacatgacaaaaccctct

SEQ ID NO: 522086 - DNA, 201 bp, Homo sapiens
aacaagatttaacctgactagagagaaaagaggatgcctaggacataggagaggtatagatttaacctgattaaagaggaaaaaaaagggaaggggggagraaagacaagtggtccaaaggtatgacatacgattcaaaccattttactgatgataattatatgattgccctatcctgatgtgtccattagaaactagtcc

SEQ ID NO: 522087 - DNA, 201 bp, Homo sapiens
taagagatatatgagaggtatttaagtggatcatgcctgtaggtcatttagtagtagtatgcaatcaataaatattcattattacttgtgtgacagtgctyaccccacactgtcctttatagaaacatatttgcagagacctggggagaaaatgcaaacatgccagagggcttcataagaccatacataccctttaatgac

SEQ ID NO: 522088 - DNA, 201 bp, Homo sapiens
taacagctaacacttacatagtgctttctgcgtgccaggcttgtcctaagtgattttacacacacacacacacacacacacacacacacacacacacacacactccctcactcagtccttataaaaacccactgataggccgggtgcggtggctcatacctgtaatcccagcaactttgggaggctgaagcaggcagatca

SEQ ID NO: 522089 - DNA, 201 bp, Homo sapiens
tgaaactaaaatgaacaagaataatttgaggtcttttatcttctaagcacaagtacactaaactctgtgtccattctgttagttcccgtaattcactttgsttagcactggcatagtactcagctcacagaattatagttgaagtctttattctcctataatatattatcatcttgaaaaaagaggatgcctagaacatag

SEQ ID NO: 522090 - DNA, 201 bp, Homo sapiens
ataacagctaacacttacatagtgctttctgcgtgccaggcttgtcctaagtgattttacacacacacacacacacacacacacacacacacacacacacacactccctcactcagtccttataaaaacccactgataggccgggtgcggtggctcatacctgtaatcccagcaactttgggaggctgaagcaggcagatc

SEQ ID NO: 522091 - DNA, 201 bp, Homo sapiens
tcaaggcaaggaagcctcatgatgagattcaggatagaacgcctttggaaggaaaaacaaatctgaaatctttgaataagtaaacacagtaaacctgactctattcattgctcattagaagtaattcacttgacaatgatttagaaagaatagaacttcaacaaataggtaaaattatataacagtaattatgccagtata

SEQ ID NO: 522092 - DNA, 201 bp, Homo sapiens
taaatttttatctaatagtaaacagaacatgagtaattcttgaccatcaagagaaggacaagtccttataattggagtggaactggactagaactaggctmttgtctcaagtgggacgaagactctagaatagatcagtgagctttgtacctaaggcaatttcatgttatgctctattgctttccaccaaatgggcttctt

SEQ ID NO: 522093 - DNA, 201 bp, Homo sapiens
aataacagctaacacttacatagtgctttctgcgtgccaggcttgtcctaagtgattttacacacacacacacacacacacacacacacacacacacacacacactccctcactcagtccttataaaaacccactgataggccgggtgcggtggctcatacctgtaatcccagcaactttgggaggctgaagcaggcagat

SEQ ID NO: 522094 - DNA, 201 bp, Homo sapiens
tcccagcactttgggaggccgaggcaggtggatcacctgaggtgaggagttcaagaccagcctggccaacatggtgaaaccttgtttctactaaaaaaaartacaaaaattagctgggtgtggtggcgggcacctgtaatcccagttacttgggaggctgaggcaggagaatcacttgaatccaggaggcagaggttgcag

SEQ ID NO: 522095 - DNA, 201 bp, Homo sapiens
ctaaactttaaaatctagttgaaagtaagaccatgaaatgccaaaatcacaaggctttaaaggatgggatgaaagggatgcatgaatgttgaaaactatgrttaagttcatggacaggaatcagaatggaattgaatacacccgtgcctgtttagtatttaaggctttatatacgtgcatgcctacattcctaatttaaaa

SEQ ID NO: 522096 - DNA, 201 bp, Homo sapiens
cgcctgtaatcccaacactttgggaggccgaagcgagaggatcacttgaggtcaggaattcgagaccagcctggacaacataatgagaaatcgtctctacraaaaaaaaaaaaaaaaaaaaaaaaaaaaaaaccacctaaaaattagctggatttggtggcgcatgtctgtagtcccagctacttgggaggctgaggtggg

SEQ ID NO: 522097 - DNA, 201 bp, Homo sapiens
ttgccaaagatctcacaactggtaagtggcagagcaaaatttgaaaacaaacaatctggttccagaaactgtacttttaacctcatgatagcttcctgagsaatttatgatctgagtatatatagtaagtacctcccctttcagggtaaggcagtaggtaatggtgaacagggaagcaaaaggtgactcaggttgagtaaa

SEQ ID NO: 522098 - DNA, 201 bp, Homo sapiens
tgcgtttaacagacactacctttgggaaggcgcttatcacaaaaagtccctgcccttctcgcgggctcggggcgcaaacctgacaaatcgggcagccttcytgagagtgcagaaatgctctgcgtacccagcaaatacattctctccttcccaccactctgtgcaaaccctcacgccgcggctttgtgtctgtactttagc

SEQ ID NO: 522099 - DNA, 201 bp, Homo sapiens
taataacagctaacacttacatagtgctttctgcgtgccaggcttgtcctaagtgattttacacacacacacacacacacacacacacacacacacacacacacactccctcactcagtccttataaaaacccactgataggccgggtgcggtggctcatacctgtaatcccagcaactttgggaggctgaagcaggcaga

SEQ ID NO: 522100 - DNA, 201 bp, Homo sapiens
ctccatggaagaaggttcccctccctcagagatattggagcttgtcaccacctgctgacattgcagtcattaccactgcttggttggcaggatttctaggwgcctggggcactagagaatggagaacaaaagagaagaaattggcagatttctcccacactctctgagtattaggagatgcttttcctgctccttgagcca

SEQ ID NO: 522101 - DNA, 201 bp, Homo sapiens
ataataacagctaacacttacatagtgctttctgcgtgccaggcttgtcctaagtgattttacacacacacacacacacacacacacacacacacacacamacacactccctcactcagtccttataaaaacccactgataggccgggtgcggtggctcatacctgtaatcccagcaactttgggaggctgaagcaggcag

SEQ ID NO: 522102 - DNA, 201 bp, Homo sapiens
atttaatcatgaaggatatttgtgctaaatatagaattctgggttgacaggtttttacttttagccctttaagttgttctacttcattctagcctccgtgrtttctgatgagaaatctgcagtcattcacactgtttttcccctgtaaataatgtatcatttttttctaccagttttcaagaatttttcttgtttcagttt

SEQ ID NO: 522103 - DNA, 201 bp, Homo sapiens
tcttttcaattctatcaggttatgattcacacattttataatgcccttctttatctccagtaattttctttgctctgaagtctactttgtctgatagtaayataactattctcgcttccttttggttagtgttcacatggcatatatttttctatttttaacatacctatataaatgtattttgaattgagttctttttta

SEQ ID NO: 522104 - DNA, 201 bp, Homo sapiens
attaatttttctctattgatttctgttttcaatttcattcatttctgctcctagcttttaaaaattttcttccttctgcttgatttgggtttattttattrttattaactttttagcttcttaaagatcagtgacgtgagaactttcttcttttttaatgtcaatatttcatgttataaatataaatttccctctaaggat

SEQ ID NO: 522105 - DNA, 201 bp, Homo sapiens
tccacccctccttagacaacctggagtaccccacccctaggaggtcaccatattgatgccaaacttagtgccaacacccaagctgcatagtgaactacagyccagagctcctgggctcaagcacttctcctccctcagactcctgagtacctggtattcttccagttctgaacatagtatatctctccattatttatagtt

SEQ ID NO: 522106 - DNA, 201 bp, Homo sapiens
tggattatgttttgatgaatgtgctgtgccatgtacattttaaagagtatgtattctgctattgttgggtggagtattttataaatacctattaggtacgkttgggttgatggtatggttcaatttttctatatttttgctgattttctgtttactacttccatccatcactgagagaggagtattgatgtttccaaatat

SEQ ID NO: 522107 - DNA, 201 bp, Homo sapiens
ctttcaccacataatatattagatgttggctttttgtacatgacctttatgaggttgtgaaatccccttctaccctcgtctgctgagaattttttttttttaatctgaatggatgttgaagtctgtcaaatgttctttctctctctctttctttctttccttttttttttttttttttttgatagagtcttgctctgtagc

SEQ ID NO: 522108 - DNA, 201 bp, Homo sapiens
ctgggctatctaattctagaacctgtattcgtactcattatgctctgttcccaaatttttctgttacatagattgttatggctttttttttttttttttttgacagggtcttgctctctcacccaggctggagtagagtgacaatgaccactgcagcctccacctcctaggctcaagtgatcctcctgcttcagcaccccc

SEQ ID NO: 522109 - DNA, 201 bp, Homo sapiens
attgctcattagaagtaattcacttgacaatgatttagaaagaatagaacttcaacaaataggtaaaattatataacagtaattatgccagtataattcamttggttacctttgttcttttaaaaatatcataaaaggataatttcaatcattattttttaattttttaaatcatgtcttctgaatcatatgaaccattat

SEQ ID NO: 522110 - DNA, 201 bp, Homo sapiens
cccaggctggagtgcagtggcatgatctcagctcactgccacctccgcctcctaggttcaagcaattctgcttcatccttctgagtagctgggactacagkcatgtgccaccacacccggctaatttttgtagagatagggtttcaccatgtttgccaggctgctctcgaactcctgacctcaggtgatctgcctgcctta

SEQ ID NO: 522111 - DNA, 201 bp, Homo sapiens
aaggctatagctaccatagatagtgattctgctgatggggaatctggggacagtaaattgagaaacttctggagggattcattattttatttattttatttatttatttatttatttatttatttattatgagatggagtctcactctgtctcccaggctggagtgtagtggcgtgatcttggctcactgcaacctcttcc

SEQ ID NO: 522112 - DNA, 201 bp, Homo sapiens
cattcccattcttaatacacccctctggctgagtcttactgatcagtagtctataaaacatttatgatagttatataaaacctgtaagatttcatccctaygacccaaagataataaagtttaacgtatttatcgatccatgaaaattatggatatttctcagttcagagaccatcattaatattggctgttattcccatc

SEQ ID NO: 522113 - DNA, 201 bp, Homo sapiens
attttataaggctatagctaccatagatagtgattctgctgatggggaatctggggacagtaaattgagaaacttctggagggattcattattttatttawtttatttatttatttatttatttatttatttattatgagatggagtctcactctgtctcccaggctggagtgtagtggcgtgatcttggctcactgcaac

SEQ ID NO: 522114 - DNA, 201 bp, Homo sapiens
catatttcttcagttgaatcaatcagaaggatttgcagcacctgaacacacactcataggccaaaaagagaagacaactaaaagtctctctagtgttaccycatttcctcctcattctacaggaagatggggtccatgatacttcattttaattatcattctcaaaatctgtttctgaacccaacacaggaaatttatcaa

SEQ ID NO: 522115 - DNA, 201 bp, Homo sapiens
gtacagcagaatgttgtttacatgcctactaacacatcatccattctgcagtccatggatcaaagagtaacttcaactttcaagtcttattactagagaartacattttataaggctatagctaccatagatagtgattctgctgatggggaatctggggacagtaaattgagaaacttctggagggattcattattttat

SEQ ID NO: 522116 - DNA, 201 bp, Homo sapiens
aagaagatcctggtaagtaatgtggaccaaaccattgatgatccctatgccacttttgtcaagatgctgacagtaaggactgccgctacgccccttatgaygccaccaaggacagcaagaagaaggacctggtgtttatcttctgggcctctgagtctgcatccattaagagcaaaatgatctatgccagctccaaagacg

SEQ ID NO: 522117 - DNA, 201 bp, Homo sapiens
cgtgcatgcctacattcctaatttaaaaaaaaaatggatgtgaagctaggtttgggattactagactatttagagagatagacctttgagaagaacggaaagattatgagacgaggacaatgttcattaaaaacaaacaacaacaacaacaacaaaaaacagaggctatcagtgctcagcagactttcaagagactctcca

SEQ ID NO: 522118 - DNA, 201 bp, Homo sapiens
atgctgtaccagtcacaattttgagggagagactcaagtgcagggccttacaatttaacttgtatcatatttatcaataaatgttaaattccctatgatayaacaaatataatttggctatttaatcagttataatgtcgtatggcatacccataagttactgtgactgacaagtggttaagaacctggtgcattttattt

SEQ ID NO: 522119 - DNA, 201 bp, Homo sapiens
ggtgaagaagcgcaagaagttgctgctcttctgcctgagtgagtacaagaagtacatcatccttgcggaggccaagaagatcctggtaagtaatgtggacsaaaccattgatgatccctatgccacttttgtcaagatgctgacagtaaggactgccgctacgccccttatgacgccaccaaggacagcaagaagaaggac

SEQ ID NO: 522120 - DNA, 201 bp, Homo sapiens
ttcttatgaatcatgtttttttcccccctgtcttatggtgctgaatgaatcatgtttaactgagaattagctaaggggagagtagagcagtaaggacatakatttatctctatttgtgttttcatttactacttttatcaagaataataacattttacctcttttttaaataccactctctagaaagtaaattcaggagta

SEQ ID NO: 522121 - DNA, 201 bp, Homo sapiens
ttttttaaataccactctctagaaagtaaattcaggagtaagaaactccttacctattcagcataatccaatttattgttaattccattgtctattaacayagtaaatagtgtgttggcttgtaacacttccctcatagaagtaacaaaccaacttcaaatttaagaatgatgcctcttttttcttgagaaagacacctgt

SEQ ID NO: 522122 - DNA, 201 bp, Homo sapiens
gaggccaagaagatcctggtaagtaatgtggaccaaaccattgatgatccctatgccacttttgtcaagatgctgacagtaaggactgccgctacgccccytatgacgccaccaaggacagcaagaagaaggacctggtgtttatcttctgggcctctgagtctgcatccattaagagcaaaatgatctatgccagctcca

SEQ ID NO: 522123 - DNA, 201 bp, Homo sapiens
tcttctgcctgagtgagtacaagaagtacatcatccttgcggaggccaagaagatcctggtaagtaatgtggaccaaaccattgatgatccctatgccacytttgtcaagatgctgacagtaaggactgccgctacgccccttatgacgccaccaaggacagcaagaagaaggacctggtgtttatcttctgggcctctga

SEQ ID NO: 522124 - DNA, 201 bp, Homo sapiens
tcgatgtgggaactgggtactatgtagagaaggtgagtgagagcatgtggatgcccctctaaacagggaagggaaattcaggggaagctctagagcgcagsatggccagagggagtctccttttagccccttattcacctctgatcttgtagacagctgaggatgccaaggacttcttcaagaggaagatagattttctaa

SEQ ID NO: 522125 - DNA, 201 bp, Homo sapiens
atcgatgtgggaactgggtactatgtagagaaggtgagtgagagcatgtggatgcccctctaaacagggaagggaaattcaggggaagctctagagcgcascatggccagagggagtctccttttagccccttattcacctctgatcttgtagacagctgaggatgccaaggacttcttcaagaggaagatagattttcta

SEQ ID NO: 522126 - DNA, 201 bp, Homo sapiens; identical to SEQ ID NO: 304303

SEQ ID NO: 522127 - DNA, 201 bp, Homo sapiens; identical to SEQ ID NO: 304291

SEQ ID NO: 522128 - DNA, 201 bp, Homo sapiens; identical to SEQ ID NO: 304304

SEQ ID NO: 522129 - DNA, 201 bp, Homo sapiens
aagatagattttctaaccaagcagatggagaaaatccaaccagctcttcaggagaagcacgccatgaaacagggtaagtttttcctggggcacctcttgamcctatctccataataaggaacatggattgcagtgtgaaccacgggggtgtcccctttgctggagtaaaactatgtcttagtttctctttggcatctttag

SEQ ID NO: 522130 - DNA, 201 bp, Homo sapiens
gttgctgtgagccaagatcgtgccactgcactccagcctcggtgacaagagcaggattctgtctcaaaaaaaaaaaaaaaaaggttattaacaaactgtarttagtcggtcgcctgtccttaaacttgcctgtcacttctccttaactctaggttctcctttttgcttctaacctttgactcttatttttttccacagccg

SEQ ID NO: 522131 - DNA, 201 bp, Homo sapiens
tggcgcagtctattaacatcacggagctgaatctgccgcagctagaaatgctcaagaaccagctggaccaggtggggacgggccccagaggcacctctttmctgctctacatcccccttgcccacgcgtacttctcgcgcccggttccaagttggcagcctacctttcccaggcgaaacctctatccgatcccaggacctg

SEQ ID NO: 522132 - DNA, 201 bp, Homo sapiens
cgtgagaactttaagattttgcagttccttgtaggcaggagtcctgtttgctgctactttacaatactaggcttaagacattttatgaaatgaactcacasaacagtctctgagaggctcaagcccctccttcccttccgggacggaggatcatagagctgtctggcgcagcgaggcctcccggcgccaccgagacgcgca

SEQ ID NO: 522133 - DNA, 201 bp, Homo sapiens
cacctcctaacccagtttttcttacctgaaacgagaaaatccattacatatcgtataccgcttcatgaaccctttgcatgttgcctgcctagaattgaaawgtacaggacattcctctgctcctattgcccctgtttccgttcttttcacactgtctgtgggtgctgtgccctgttggaactctctttaacgtcttacgtt

SEQ ID NO: 522134 - DNA, 201 bp, Homo sapiens; identical to SEQ ID NO: 304296

SEQ ID NO: 522135 - DNA, 201 bp, Homo sapiens; identical to SEQ ID NO: 304297

SEQ ID NO: 522136 - DNA, 201 bp, Homo sapiens
tctgtgtagtaccttaaatacccttagctgtctgttgataactacttgtatttacatcggatggattttgtctctgccttttagacttcccaagtaagaarcggaagaggagccgctggaaccaagacacaatggaacagaagacagtgattccaggaatgcctacagttattccccctggacttactcgagaacaagaaa

SEQ ID NO: 522137 - DNA, 201 bp, Homo sapiens
ctcaggccagtttggggacttctcacttcgggaagaccttgttcttgtgttctggtcctgtgtcataacccgaagaacaatgttgccactagggggcgcasgcagggacgttggcaggaaatgctctcacgtagtctctcatgtctaccacccagagccgcccaccctggatgaattctggcccttcagagagtcggccct

SEQ ID NO: 522138 - DNA, 201 bp, Homo sapiens
ccgggatctcaggccagtttggggacttctcacttcgggaagaccttgttcttgtgttctggtcctgtgtcataacccgaagaacaatgttgccactaggrggcgcaggcagggacgttggcaggaaatgctctcacgtagtctctcatgtctaccacccagagccgcccaccctggatgaattctggcccttcagagagt

SEQ ID NO: 522139 - DNA, 201 bp, Homo sapiens
ctgctgagaattttgaggcgttggaattgtctgtctcctttcacagtactactaatacttgttctttcccctactgttcctgtctactcccacccattccrttgtgtctcatattagactagtctgggtctttacatccttgtgaaatgcccctagtggagtgatatcccaagaacacaagcatacttagaagatgggaag

SEQ ID NO: 522140 - DNA, 201 bp, Homo sapiens; identical to SEQ ID NO: 304407

SEQ ID NO: 522141 - DNA, 201 bp, Homo sapiens
taataatatgtctacaggtcaccagtcaattcctccaaaggttgaatttttaacaaaccttctttgcttcctggataactgggattagaatttagttgatstagccgatgcctgttggaggtgaagaagtcgggccagtctaacctctagaatactagcttttgcctttcacttctgcaatttgggaggaggttaaactgt

SEQ ID NO: 522142 - DNA, 201 bp, Homo sapiens
tacgaggctgtggccttcacaaccaaaaagcttcaaggccagcatgttactacttttgagggtcttaatttcctgttttttagactgctgagaattttgargcgttggaattgtctgtctcctttcacagtactactaatacttgttctttcccctactgttcctgtctactcccacccattccgttgtgtctcatattag

SEQ ID NO: 522143 - DNA, 201 bp, Homo sapiens
ttgggaaacagttttaaccagctgacagtaacgcttttacctttttctcaatacgttttactggtggcaacatattgtgtcagttcaataaaatcatagtrtgacgactgtaccctgaccactttggggattaaggtttaattagaaatatgtatggtcagtcaacagttagaaaattggaataaaacttaaaaatgttgg

SEQ ID NO: 522144 - DNA, 201 bp, Homo sapiens
ttccgggatctcaggccagtttggggacttctcacttcgggaagaccttgttcttgtgttctggtcctgtgtcataacccgaagaacaatgttgccactakggggcgcaggcagggacgttggcaggaaatgctctcacgtagtctctcatgtctaccacccagagccgcccaccctggatgaattctggcccttcagaga

SEQ ID NO: 522145 - DNA, 201 bp, Homo sapiens
gcaaagatggccagatgttgccaggagaagatgagccacttcatgccctggttactgccaatacaatggagaacgtcaaaaaggcagtggaacaggtgagyggtgagcccagaaaggaagcctcctggcagaaacctaggtggaggccctaagcacttaactgtccattgcattttcactagataagaaacatcctgaagc

SEQ ID NO: 522146 - DNA, 201 bp, Homo sapiens; identical to SEQ ID NO: 304380

SEQ ID NO: 522147 - DNA, 201 bp, Homo sapiens
cagaactgggcacgaaactgaagatctgatgagactgttgagagccatgcccagtaaggggttagaaagatgtgtgatgatctggtgattgaattcttcaraactttccatatgttggttcctcaggataaaagcttccttcttaacaagtttttcccctttctctgtttgtgtcccccaccccacttcaggcctggtgat

SEQ ID NO: 522148 - DNA, 201 bp, Homo sapiens
aggtgagtgtcatctgcctctctggacaggccccagtggagaacaccgcaggtactgtaaaccaagtacttttcacagcgtggcctttcaccataattttrtatttctccccctaaaatgtggtcttttactttttataggtactttctgaaagaaaaaaaaatgacaaaaagtggttctgaaagtgtgtttacaatttac

SEQ ID NO: 522149 - DNA, 201 bp, Homo sapiens
aacactttctgactggctggcgaatatgtaaggttttgtttaggaagttcgttctggcagttgtgccagtcttgcatagattttcctttcctcaaactggraatgaagtttgatgaaattgacttgagagaacctgtgcttcatcggtgctcagggtctcctgtgctcttcgcccaggggcccctctactctggtgatccc

SEQ ID NO: 522150 - DNA, 201 bp, Homo sapiens
tttttaatgtttaagttttaggttaagctctcagcttcacagtctgctgagtttctgtgtagtaccttaaatacccttagctgtctgttgataactacttrtatttacatcggatggattttgtctctgccttttagacttcccaagtaagaagcggaagaggagccgctggaaccaagacacaatggaacagaagacagt

SEQ ID NO: 522151 - DNA, 201 bp, Homo sapiens
gaagatgagccacttcatgccctggttactgccaatacaatggagaacgtcaaaaaggcagtggaacaggtgagcggtgagcccagaaaggaagcctcctrgcagaaacctaggtggaggccctaagcacttaactgtccattgcattttcactagataagaaacatcctgaagcagggtatcgagactccagaggaccag

SEQ ID NO: 522152 - DNA, 201 bp, Homo sapiens
cacctattttgggaaggcatgcaaccaaccctaaattactttttttttttccttaaagggagcgtgggcctcaaacagctgtggtcatgtcatttcagttkgcagtttctctcacctcagaaaaataaattgtgtgggggagatgaacttttttaaactggaattttattagctgattgaacagctaaaattggtcattta

SEQ ID NO: 522153 - DNA, 201 bp, Homo sapiens; identical to SEQ ID NO: 304412

SEQ ID NO: 522154 - DNA, 201 bp, Homo sapiens
gaaatgtcaagcatgttagaaataaaaccagagcagggtttttcctcccttctattcagttttgaaagaggccctaatgcctgattggttttgcttttgarcccaggttggagggaaatgcatgggttttcttaattaagataatttcttaaaaaggtgttatatcacttaagccactttattgttattttgatgctgctt

SEQ ID NO: 522155 - DNA, 201 bp, Homo sapiens
tacctgtgcagctgtctcaaaaaagttcactttataaacatttcctactaaccaaataaacatcccctttggaggaaattcgggcaaagacctcctaaacytacgaggctgtggccttcacaaccaaaaagcttcaaggccagcatgttactacttttgagggtcttaatttcctgttttttagactgctgagaattttga

SEQ ID NO: 522156 - DNA, 201 bp, Homo sapiens
caacctgcgtctcccgggttcaagtgattctcccacctcagcctcccaagtagctgggactacaggcgcacgccaccatgcccagctaattttttttgtakttttagtagagacggggtttcaccatgttggccaggatggtctcgatctcttgtcctcatgatctgcctgccttggcctcccaaagtactgggattacag

SEQ ID NO: 522157 - DNA, 201 bp, Homo sapiens
ccacaggtatgatgccgccaccacctatgggcatgatgccgccgccgccgccgcctcccagtgggcagcccccaccccctccctctggtcctcttcccccrtggcaacaacagcagcagcagcctccgccaccccctccgcccagcagcagtatggcttccagtacccccttgccatggcagcaaagtgagtagaatattt

SEQ ID NO: 522158 - DNA, 201 bp, Homo sapiens
caagtacttttcacagcgtggcctttcaccataattttatatttctccccctaaaatgtggtcttttactttttataggtactttctgaaagaaaaaaaaatgacaaaaagtggttctgaaagtgtgtttacaatttacccctttttattttcttgaatttaagagtttaaccttcccttcaacatcttttctggtttggt

SEQ ID NO: 522159 - DNA, 201 bp, Homo sapiens; identical to SEQ ID NO: 304428

SEQ ID NO: 522160 - DNA, 201 bp, Homo sapiens
ggtttttcaaggtgccatagccacccccaaagatgtttgtttaaagcgtggggttttttaatctctgccacccttgtcaagggagtcttgtaaagttgcckagggtaggttcatctccaggtttcgggattcccatccgtcctggcgatcctgccagcagtgggtgggcagcctgagctccctcgggctcgcctgccagcc

SEQ ID NO: 522161 - DNA, 201 bp, Homo sapiens
taatggctgtctgctggctgtgggtcttcacctaggcttgggtgagtgggggttctggcccaagtccccgcctttccctgaggcctcatctttgcctccayctgtccacaggtatgatgccgccaccacctatgggcatgatgccgccgccgccgccgcctcccagtgggcagcccccaccccctccctctggtcctcttc

SEQ ID NO: 522162 - DNA, 201 bp, Homo sapiens; identical to SEQ ID NO: 304398

SEQ ID NO: 522163 - DNA, 201 bp, Homo sapiens; identical to SEQ ID NO: 304399

SEQ ID NO: 522164 - DNA, 201 bp, Homo sapiens
atgtcctgctaagtccctgctctttccttccatcaagatcagtacctgggaagtacgcctgtgggctctggggtctatcgcctgcatcaaggaaaaggtartggctgtctgctggctgtgggtcttcacctaggcttgggtgagtgggggttctggcccaagtccccgcctttccctgaggcctcatctttgcctccacct

SEQ ID NO: 522165 - DNA, 201 bp, Homo sapiens; identical to SEQ ID NO: 304400

SEQ ID NO: 522166 - DNA, 201 bp, Homo sapiens
ttagaaatatgtatggtcagtcaacagttagaaaattggaataaaacttaaaaatgttgggagaataaaaagttacaggaaaatggacaactggtttccarttggtaagcatgtagatcttaacctgatttacccacccttaggggacagtgaggtggcccgttaacctgccttttcagtacctgctttggccaaaagccc

SEQ ID NO: 522167 - DNA, 201 bp, Homo sapiens; identical to SEQ ID NO: 304402

SEQ ID NO: 522168 - DNA, 201 bp, Homo sapiens; identical to SEQ ID NO: 304382

SEQ ID NO: 522169 - DNA, 201 bp, Homo sapiens; identical to SEQ ID NO: 304383

SEQ ID NO: 522170 - DNA, 201 bp, Homo sapiens
ggcccctcctctattgcagatcctgggcatctacaagcagggcctcaaatgccgaggtgagatggaatgactggaagggctgctgggcagtgttttttttktttgtttgtttgtttgggagagttactattttggtggggcaattgccaaggagtgaagtaccttaaaatcagaggcgcatggccgggcatggtggctcaa

SEQ ID NO: 522171 - DNA, 201 bp, Homo sapiens; identical to SEQ ID NO: 304384

SEQ ID NO: 522172 - DNA, 201 bp, Homo sapiens
atctacaagcagggcctcaaatgccgaggtgagatggaatgactggaagggctgctgggcagtgttttttttgtttgtttgtttgtttgggagagttactrttttggtggggcaattgccaaggagtgaagtaccttaaaatcagaggcgcatggccgggcatggtggctcaagcctgtaatcccagcactttgggaggcc

SEQ ID NO: 522173 - DNA, 201 bp, Homo sapiens
ggtagttggagccaggcgcctttggaagcagcatgaccctctaggtccccggctgtccactgggacagggcaggcttggcccttgacctcatagaacttaycctagccccctaaaggaatagcacatgcctatcctttcccctccaggtttaaagtcttcgcagattatgaagactacattaaatgccaggagaaagtcag

SEQ ID NO: 522174 - DNA, 201 bp, Homo sapiens
aaggcatagactgacaattaggaggaggagaacactttggaaggagactcttattttggtggggcagctgctcaggaacaaaggttcctggtaggggggcrcaagcctgcgggatgggatggagggtattctgaccaatgtccctggctggctctccatttgctctcccccagcctgtggagtgaactgccacaagcagtg

SEQ ID NO: 522175 - DNA, 201 bp, Homo sapiens; identical to SEQ ID NO: 304387

SEQ ID NO: 522176 - DNA, 201 bp, Homo sapiens
cctgggaggtggaggttgcagagagccgagattgcgccattgcactccagcctgggcgacagagagagactctgtctcaaaaaaaaaaaaaaaaaaaaaaattgggctgtgaggtcatgcagggaattgatttttggtgggtgggtctgcttctgggatgatgtggatgcctcccgtggagaggggaagggttgatgaagt

SEQ ID NO: 522177 - DNA, 201 bp, Homo sapiens
gtgggtgcagctcatgatcctcagcaaacccacagccccgcagcgggccctggtcatcacacactttgtccacgtggcggaggtgcctgcccctccctccyggtgtctcccaaccaccccacatgccagtcaggccaacccttcccttcccctaacccactgccttctctctagataagctgggccaaattctgggcccac

SEQ ID NO: 522178 - DNA, 201 bp, Homo sapiens
ggcccgagctgaagcgcccccgcaactccccacagggatggctgcatcagcagggaggagatggtttcctatttcctgcgctccagctctgtgttgggggsgcgcatgggcttcgtacacaacttccaggagagcaactccttgcgccccgtcgcctgccgccactgcaaagccctggtgagagtccctttcccggctcac

SEQ ID NO: 522179 - DNA, 201 bp, Homo sapiens; identical to SEQ ID NO: 304391

SEQ ID NO: 522180 - DNA, 201 bp, Homo sapiens
aaattgacatttaagcaaactgcgctgacaaatctgtggctgaaaaagctgtggcaaaacaaaaacatagaaaaagagcctcaaaaattgggctgaggccrggcatggtggctcacgcctgtaatcctagcactttgggaagccaaggtgggtggatcacccgaggtcaggagttggagaccagactggccaacgtggcaa

SEQ ID NO: 522181 - DNA, 201 bp, Homo sapiens
ctcccgagtagctgggattataggtgcctgccactatgcctggctaattttttgtatttttagtagagacggggctttgccatgttggccaggctggtctygaactcctgacctcgtgatccacccgccttggcctcccaaagtgctgggactacaggcgtaagccactgtgctcggccctatatttttttcagatagcca

SEQ ID NO: 522182 - DNA, 201 bp, Homo sapiens
caggaaccgtgtcttactcatctctgtattcccagcgcctagcacagtgcctggcacagagtacgttgttcataaatgtgtgttgagtgcatgacggggtsgggggagatgaggaggagttgctgggactgggaacattcgtgcctaggacagtgcctcgcattatgtaggttctcagtaagcgtgaatggtgtgtctgtg

SEQ ID NO: 522183 - DNA, 201 bp, Homo sapiens
ttacaggcgcgcgccaccatgcctggctaattttgtatttttttttttttgagacagagtctcactctgtcacccagactggagtgcggtggcgcgatctyggctcactgcaagctctgcttcccgggttcatgccattctcctgcctcagcctccggagtagctgggactacaagcacccaccaccgtgcccggctaatt

SEQ ID NO: 522184 - DNA, 201 bp, Homo sapiens
aattctcatgcctcagcctcccaagtagctgagattacaggcactggccaccagacccggctaatttttttttctttttcttttttttgagacggagtttygctctttgttgcccaggctggagtacagtggtgtgatctcggctcactgcaacctccgcctcccgggttcaagtgattctcctgtctcagcctcccgagt

SEQ ID NO: 522185 - DNA, 201 bp, Homo sapiens
cctctgcctcccaggttcaagtaattctcatgcctcagcctcccaagtagctgagattacaggcactggccaccagacccggctaatttttttttcttttycttttttttgagacggagttttgctctttgttgcccaggctggagtacagtggtgtgatctcggctcactgcaacctccgcctcccgggttcaagtgatt

SEQ ID NO: 522186 - DNA, 201 bp, Homo sapiens
ttgagcccaggaggttgagactgcagtgagctgtcatcacaccactgcacttcagcctgggtgactgcgcgagatcacccccatcaaaaaaaaaaaaaaaagaaaaaaaaaggaagaaatgaaagtcccctctttccttttccactggtagaagttgccatgattaagcactgttaacaatattaagcttggcagtatgtg

SEQ ID NO: 522187 - DNA, 201 bp, Homo sapiens
cttgagcccaggaggttgagactgcagtgagctgtcatcacaccactgcacttcagcctgggtgactgcgcgagatcacccccatcaaaaaaaaaaaaaaaagaaaaaaaaaggaagaaatgaaagtcccctctttccttttccactggtagaagttgccatgattaagcactgttaacaatattaagcttggcagtatgt

SEQ ID NO: 522188 - DNA, 201 bp, Homo sapiens; identical to SEQ ID NO: 304393

SEQ ID NO: 522189 - DNA, 201 bp, Homo sapiens
ccattcaaaatttaaagtccatctcaggtcgatttattttttaatgttacctgtatttcaaaaatctgttgttttttatttccacattacaaaaatccacrgtaaaataaaatctaggtggtaaaataaatttatagtgaacaaaatgtttaaagtaagaagtgagaggccaggtgcggtgcctcacgcctgtaatcctag

SEQ ID NO: 522190 - DNA, 201 bp, Homo sapiens
ttcacctgtccctgaccctgactcctcctcaccccctcctacatttccagggctgaggtagggaggatagttgtgggggtatgactcctctgtcctttgtycccagctctgggagggtctcacggaactagtgacggcgacaggcaactatggcaactaccggcgtcggctggcagcctgtgtgggcttccgcttcccgat

SEQ ID NO: 522191 - DNA, 201 bp, Homo sapiens; identical to SEQ ID NO: 304403

SEQ ID NO: 522192 - DNA, 201 bp, Homo sapiens
tccctggcgtaggctgggtcacagggtgcatcaggggtttcagtgtaaccactgaaggtcagctggagggtgaggagtggctatcagtgaggggagaggcyggcaaggtgctgaggccactcctcatgcccccagtttcaggactatcacagtttcgtgactcatggctgcactgtggacaaccccgtcctggagcggttc

SEQ ID NO: 522193 - DNA, 201 bp, Homo sapiens; identical to SEQ ID NO: 304406

SEQ ID NO: 522194 - DNA, 201 bp, Homo sapiens
attgtgtgtgagagacggaggatgggaggccggtgcctgtggcccggtgcgtgtaagtgcggacgcctgcacctccacttaggtccccggcctccgacgamtaacttgggtgtggagtgtttgcccctgccagggtgcgtatgaccccgccagtgaccggagttgctaatggtgtcatgcacccaccggccacccttggcg

SEQ ID NO: 522195 - DNA, 201 bp, Homo sapiens
ccagcacgagtgtcctgttcaagacccagcactcagcccctaggagtcacagggcctggcaggccagctgcacggggctgaagtgcccctgggtagggtgsgggtggaggtatggaacgggggtggtgtcagagacctctctgagacacacctcatcaaatggactgggaacgtgggaagggacaggacctgatgtcccct

SEQ ID NO: 522196 - DNA, 201 bp, Homo sapiens
caggagccggggatagggaggaagagggcctgtggacaagctgagccgggacccctgggacctttgcggaggtggcctgggagcgctcagttcccaggctsaggcttcccgctgacgcctcctggccgcagcgggctccccccgccccaggaatgttcctctcccatccagtccgcctcccctagggcaggccccctgggg

SEQ ID NO: 522197 - DNA, 201 bp, Homo sapiens; identical to SEQ ID NO: 304414

SEQ ID NO: 522198 - DNA, 201 bp, Homo sapiens
ttgctgggactgggaacattcgtgcctaggacagtgcctcgcattatgtaggttctcagtaagcgtgaatggtgtgtctgtgtgagtggggggccacgagkcatgcgcatgtccagcaaagggctcactacccctgcccccccagccctacctacaagtggaagcggcaggtgactcagcggaaccctgtgggacagaaaa

SEQ ID NO: 522199 - DNA, 201 bp, Homo sapiens
ctagggcctaggctctgccccctccttgctcctagcgactcggtcctgtccccaggctctgtccccagccgaggccttgccctccttctccctagagtctrgggcctgcccctgcttcaggcttgggtgcgccccgtgcatctctctctcccagagcccaggctttgctttcagcctccctcagcacctagtcctccaccc

SEQ ID NO: 522200 - DNA, 201 bp, Homo sapiens
cgcaagatgtccctgttgtttgaccacctggagcccatggagctggcggagcatctcacctacttggagtatcgctccttctgcaagatcctggtgcggcycgagggctggggggtcaggggtccaatgtgggctggaagagagttctaggaggggcagggtccctggcgtaggctgggtcacagggtgcatcaggggttt

SEQ ID NO: 522201 - DNA, 201 bp, Homo sapiens
ccctggcgtaggctgggtcacagggtgcatcaggggtttcagtgtaaccactgaaggtcagctggagggtgaggagtggctatcagtgaggggagaggccrgcaaggtgctgaggccactcctcatgcccccagtttcaggactatcacagtttcgtgactcatggctgcactgtggacaaccccgtcctggagcggttca

SEQ ID NO: 522202 - DNA, 201 bp, Homo sapiens; identical to SEQ ID NO: 304417

SEQ ID NO: 522203 - DNA, 201 bp, Homo sapiens
cattcgttagaacagctgcagagtattccactgtgcggttagtccatcatttccctaaccatcctcctgctgatggacagttagactgttccagtttttcrgtatgattctatgccaggctgccatgaacgtccttttactgatccactcaggccagtatttctgtaggagaaattcctagaagtgggataattggatcaa

SEQ ID NO: 522204 - DNA, 201 bp, Homo sapiens
aaagctagtacttttttttttttttttaagacagggtctctctctctgttgtccagactggagttcagtggtgcagtcacaagctcactgcagccttgaaytcctgagctcaatcgatcctcccacctcagcctcctgagtagctgggactacaggtgtacgccaccatgcctaatttttgtattgttattaatttttttt

SEQ ID NO: 522205 - DNA, 201 bp, Homo sapiens
ttggtcttggggtctagggtgggagttgggttctggtttagatccagacaaggttctagacattgggctggggcttaagtgttaaggtttggagtggattmttagctgcttctgggctctggaggggatcagggttgaaatcagagcttctggctgggttccgacctggcttcttccctgacatcttggcaatatgttgtg

SEQ ID NO: 522206 - DNA, 201 bp, Homo sapiens
caagcgagggccagtcccgatgggaatagcacttggtggctgaggaccctcctatctgtgcagacactgttgtaaaacttcacatgcatcatctaatttartcctcaccaaaatcctatgaaatgtaggaatgatcattacacccatttatagataaggaaacggagggacagggagattactccgctacaggtcaagagg

SEQ ID NO: 522207 - DNA, 201 bp, Homo sapiens
agaatcccaggatgtgaggatgggaagagctcttagcagccacctcacccatccatcttgtaggacagaggcatcctgggggtagggcagtagtgttgggyagacttccctctcccagggattcccctctctgttccccggggctctgggctccccctgcctctggccctagctcaggcccgaccatttccatagccaacc

SEQ ID NO: 522208 - DNA, 201 bp, Homo sapiens
gctgtgttctaagccaggctttgtcctgagtctagcttctgacccgagctctggctgagctgtggcctctaggtcgacctttggccctgggctctgtggcygtgggcaggggccagtgggggtgatcagatctgtgtgtcccaggtgtctctggatcagtatcagacggaggatgagctgtaccagctgtccctgcagcgg

SEQ ID NO: 522209 - DNA, 201 bp, Homo sapiens
gtgtgtcccaggtgtctctggatcagtatcagacggaggatgagctgtaccagctgtccctgcagcgggagccgcgctccaagtcctcggtgagggggtaytccctcctctccactctgcccttccctcctgagaatcccaggatgtgaggatgggaagagctcttagcagccacctcacccatccatcttgtaggacaga

SEQ ID NO: 522210 - DNA, 201 bp, Homo sapiens
ccatcttgtaggacagaggcatcctgggggtagggcagtagtgttgggcagacttccctctcccagggattcccctctctgttccccggggctctgggctycccctgcctctggccctagctcaggcccgaccatttccatagccaaccagccccacgagttgcaccccaccaccccggcccccggtactggaggagtgga

SEQ ID NO: 522211 - DNA, 201 bp, Homo sapiens; identical to SEQ ID NO: 304421

SEQ ID NO: 522212 - DNA, 201 bp, Homo sapiens; identical to SEQ ID NO: 304423

SEQ ID NO: 522213 - DNA, 201 bp, Homo sapiens
gtagggtgggggtggaggtatggaacgggggtggtgtcagagacctctctgagacacacctcatcaaatggactgggaacgtgggaagggacaggacctgmtgtcccctttactctcccctcttctggctctgcgtgtccctctgcgtgccccagtctgtgttccggaactttgacgtcgatggggatggccacatctcac

SEQ ID NO: 522214 - DNA, 201 bp, Homo sapiens; identical to SEQ ID NO: 304425

SEQ ID NO: 522215 - DNA, 201 bp, Homo sapiens; identical to SEQ ID NO: 304429

SEQ ID NO: 522216 - DNA, 201 bp, Homo sapiens
gctcaccccttcctgggtctgggccttaattttcttttctgcgcagtgcgggtggttgtctcaagggtctaatgtacacttggagtggcgaaggaaagagstggaaccatagtttgagggtctttttgcttaggtgactataatctcaaatagctccttgcagcctgctgggtgatggtgggggaagggctatcttgggtg

SEQ ID NO: 522217 - DNA, 201 bp, Homo sapiens
gcagggcccagagtgtgagcctggaggggtctgcaccctcaccctcacccatgcacagccaccatcaccgcgccttcagcttctctctgccccgccctggmaggcgaggctccaggcctccaggtaagagggagtcattctgtactggcctgtggagggaaggatgcagggctactggggcaaagaacgcaggatggaagc

SEQ ID NO: 522218 - DNA, 201 bp, Homo sapiens; identical to SEQ ID NO: 304431

SEQ ID NO: 522219 - DNA, 201 bp, Homo sapiens; identical to SEQ ID NO: 304432

SEQ ID NO: 522220 - DNA, 201 bp, Homo sapiens; identical to SEQ ID NO: 304433

SEQ ID NO: 522221 - DNA, 201 bp, Homo sapiens; identical to SEQ ID NO: 304434

SEQ ID NO: 522222 - DNA, 201 bp, Homo sapiens
ttcctgccttggagaaaatacttcaaccagagcagggagcctgggggtgtcggggcaggaggctggggatgggggtgggatatgagggtggcatgcagctragggcagggccagggctggtgtccctaaggttgtacagactcttgtgaatatttgtattttccagatggaataaaaaggcccgtgtaattaaccttcacc

SEQ ID NO: 522223 - DNA, 201 bp, Homo sapiens; identical to SEQ ID NO: 304438

SEQ ID NO: 522224 - DNA, 201 bp, Homo sapiens
tagcacagtgcctggcacagagtacgttgttcataaatgtgtgttgagtgcatgacggggtggggggagatgaggaggagttgctgggactgggaacattygtgcctaggacagtgcctcgcattatgtaggttctcagtaagcgtgaatggtgtgtctgtgtgagtggggggccacgaggcatgcgcatgtccagcaaag

SEQ ID NO: 522225 - DNA, 201 bp, Homo sapiens; identical to SEQ ID NO: 304443

SEQ ID NO: 522226 - DNA, 201 bp, Homo sapiens
attcctgcaccagagggataagctttgggcacggatgggtttccgggctgttgtgagccgccagtgctgtgaggaggtgaggctgggaggcaacctggggwgtggggaaggctggggttcccaccccatttactgtccactctgctcctcccaggtcatggcaaaggagccattccactgggcttggactcgggaccggcg

SEQ ID NO: 522227 - DNA, 201 bp, Homo sapiens
gaggcggaggttgcagtgagccgagatcgcgccactgcactccagtctgggcgacagagagagactgtgtctcaaaacaaacaaacaaaaaccaaaaaacytcttggggttttggagaccaagggcttcacttttaaccggctgttaggcctcagcttcagtttcctcgtttgacgaccggtctgagttaaacttacctcc

SEQ ID NO: 522228 - DNA, 201 bp, Homo sapiens
tactgactttctttccctgcagcaaaacctccctgggtgcaaatgaacctgggtgcaagcccctcctcctcagagaataactaaccccccaccccgatctrtctctgcagtatctcctggccatggtgctggtctacttccagcgcgcccacctgaagctcagcgagtatacccacagcagcctgttcttggccctgtgag

SEQ ID NO: 522229 - DNA, 201 bp, Homo sapiens
ggaactggcggacccccatacaagtaaaggcgggcggcacggggcacggcccacccggggaccccctggatgcggcacggcccccgcaactcggccgccckcctgccgcctcccgtaaccccgggcgcccgccagcggcgcagctcgcgccaattctcgtacggtttcacgccgggtgcggcgctggactgcggagccagc

SEQ ID NO: 522230 - DNA, 201 bp, Homo sapiens; identical to SEQ ID NO: 285086

SEQ ID NO: 522231 - DNA, 201 bp, Homo sapiens
cccacaggcggacctggtgaatgacctggggaacaaaggctacctggtatttggcctcatcctcttcgtgtgggagctactgcccaccaccctgctggtgkgcttcttccgggtgcaccggcccccacaggacctggtaagggtctgctccctcttctgtggggccagtggagggggcggatgttgcaaatcctgggttgg

SEQ ID NO: 522232 - DNA, 201 bp, Homo sapiens
cgtcccctgcggggctggggcccaggcccctctctgcagagctggagtcttcctgctcactcggctcaaactctgggatctggaacatgctctgggctgtraggacaagatgttacgtagtcaaggcacagctggggccaacggtggccctggaaggcagaggcaggtacccctggcttcctctcccaccgtagcgccccc

SEQ ID NO: 522233 - DNA, 201 bp, Homo sapiens
ggcgatgatgcttgccggagcctgagggcccgtcccctgcggggctggggcccaggcccctctctgcagagctggagtcttcctgctcactcggctcaaaytctgggatctggaacatgctctgggctgtgaggacaagatgttacgtagtcaaggcacagctggggccaacggtggccctggaaggcagaggcaggtacc

SEQ ID NO: 522234 - DNA, 201 bp, Homo sapiens
gggaccaagccttccgtggcttcacacgcaccggaagggaatctgggtcagccctccctccaaaggagacagcacggatcctctttttgcataggcctgasggaagtacttccgcccatattcaagatggctgcccagggcagtgggaacgggtggagtttcgggatgtggagcgaaggtcactgggagggggcggagctt

SEQ ID NO: 522235 - DNA, 201 bp, Homo sapiens
aatttcatagaatgttcacgttacaaaatatagttctttggatttttgtccataacttaaaaatataggcccaatgtggtggctcatgcctgtaatcccarcactttgggaggccaaggcaaaaggactgcttgaggccaggagttcgagaccagcctgagcaacacagaaagacccttgtctctacaaaaattaaaataa

SEQ ID NO: 522236 - DNA, 201 bp, Homo sapiens
ccccagtgtcatccaccatggagggcgagctggaggctccagcccatggaagcaccaaagccatatgcactcctgggtgacctggggccgcaatgccctcrtcatttgtacagtgtcttacggtttataaagagctttcccagccatcttttatttgtacaatttccctgagaggctactatcctcccttgagagatgaag

SEQ ID NO: 522237 - DNA, 201 bp, Homo sapiens
gaggaaacagaggcacacttaattacaagacacttgcacactgaattgcacacttaattaaaacagtggtgttccagaccgtttggagcagtgaagctctrccatcaggcaagggctgggtttggatcctgcccctaccacatgccgaccacacacaatctgctgccgggggaggctgacgtcagtggccagcacagtggc

SEQ ID NO: 522238 - DNA, 201 bp, Homo sapiens; identical to SEQ ID NO: 285117

SEQ ID NO: 522239 - DNA, 201 bp, Homo sapiens
tcccttccctgaagctcagccagcttggaccccacatctaccattccttcctttgcacacacctgaagcccctacccctaactggactgagacaagcacawctctggttcagactccaagtccctgccagctcccactagcaccctgctaaaaatcccaccagatgcttaaaagccacctctagcggccagacgcggtggc

SEQ ID NO: 522240 - DNA, 201 bp, Homo sapiens; identical to SEQ ID NO: 285090

SEQ ID NO: 522241 - DNA, 201 bp, Homo sapiens
gcagatcctgccagttctgctttaaaaataaatccagggatcagctacttctcaccacctccctggtgactctctgaatgtctaaatctgaccatgctgcytctgctcaaatcctttccaggtttttactcaaaggcaatgccagagtccttagaatgaccttcaactttaggtctccaaataccctttcctaaaccccct

SEQ ID NO: 522242 - DNA, 201 bp, Homo sapiens; identical to SEQ ID NO: 285056

SEQ ID NO: 522243 - DNA, 201 bp, Homo sapiens
aatcctttccaggtttttactcaaaggcaatgccagagtccttagaatgaccttcaactttaggtctccaaataccctttcctaaaccccctcccctaggyccaccctagccaggagcaggtgttgccctcgaggccttaccatctgcccttctctctgcctggaactctcttcccatcatccctgtggccttggctccag

SEQ ID NO: 522244 - DNA, 201 bp, Homo sapiens
tcctggagaaaagagactgcccttccatgcccctgagtgaggggcctggggcccaggctgcctgtgttccccaagggcaagggtctctctgttgaggaggaggggcctgtcagccacaacttctttcctcctgagcgccccatctccctctctgcaccctgcaattcccacccctccgtatttatttccctggtcccgccg

SEQ ID NO: 522245 - DNA, 201 bp, Homo sapiens
gaggcagaagaatcgtttgaacccaggagggagaggtcgcagtgagccgagatcacgccactgcactccagcctgggcgacaggctttttttctcaaaagaaaaaaaaaaaaagcaagaagtattattagtgcaagaccttcatggggcctcctggcaacccctgggttggtagctatttcatagtgtctgttctacatcg

SEQ ID NO: 522246 - DNA, 201 bp, Homo sapiens
agaatcacttgaacctgggaggcggaggttgcagtgagctgagatctcaccattgcactccagtctggcagtctgggagacagagtgagactttgtctcamaaaaaaaaaaaaaaaaaaaaagcgagtaagggaacgagaggacggaatccggaaaggcctagggtaagataggctgtgatcagagtgcctgggcattctg

SEQ ID NO: 522247 - DNA, 201 bp, Homo sapiens
tccaaccctttggggccccagtgtcttctgtgaaatgggggcagttccccatctgccaggatcgccatgacaacaaatgagagcaggaaagccccctaccrgcccctcatagcctgaggcctctgagagtcccagccaggtgaatatccagctctccctgttgtacagatgaggaaacagaggcagaggttaagaacttgc

SEQ ID NO: 522248 - DNA, 201 bp, Homo sapiens
agcccctcctctgcgccaggcactgtttccaagcacttttcctatattaactcatcaggtcctcgccacagccctgcgaggtgggactagttctattcccrtttacagatgaggaaactcaggcagatggagttaattaacctgctcaagctcaacctgctaggaagggtagagccacgtttgaaccctgcagtctggccc

SEQ ID NO: 522249 - DNA, 201 bp, Homo sapiens
ccatttgtgtaaattgaattatatatatgtaaatacaaatatacatatatttatgtgtgtgtgtgtgtatatatttggtgtgtgtgtgtgtgtgtgtgtgwatatatatatatatgtatttttttttttttagagggagtcttgctttgtcacccaggctggagtacagtgatgtgatcttggctcactgcaacctctgct

SEQ ID NO: 522250 - DNA, 201 bp, Homo sapiens
tactcctgtcctctgccactccaccagcaccctgtctcctttctgtaccttgctactccttctaccatgatcttgtcccactctcccctcagactcattcycagggacataacctaggccttgtcaccatcaaataactccatcccaagcttcccaccagctgacccaacctgtgtggatcatgcccccgggaccccaact

SEQ ID NO: 522251 - DNA, 201 bp, Homo sapiens
gggcatggtggctggcgccttagttccagctactcgggagggtgaggcaggacaatggcgtgaacccgggaggcggagcttgcagtgagctgagatcacgycactgcactccagcctgggtgacagagtgaaactctacctcgagaaaaaaaaaaaaagcaagtaggcgcagtggctcacgccagtaatcccaacactttg

SEQ ID NO: 522252 - DNA, 201 bp, Homo sapiens
gctgcctcacaccttgggcgtgtgtgggagcaggagagggattctctggggtccccatttggaacctggagacccacttctgccaacaagtccttcagccyctctgggccttagtttccccccagtgaagtggggatagtgacagctcccccgggagccagtgaaaactttgtgaagggagtgattactgcgggcgaaggc

SEQ ID NO: 522253 - DNA, 201 bp, Homo sapiens
ggcccaatcacctctcggaacgtcactcgggtaggtccagaggcggggtcaacccggcccggccccgcccccccgccggatccaaggctcctcgtccgcakcctttttcctccctccttcggccccggggctcacatcctcgctgcctcacaccttgggcgtgtgtgggagcaggagagggattctctggggtccccattt

SEQ ID NO: 522254 - DNA, 201 bp, Homo sapiens
cgtcctgagagccatgtgagaggcgctctcactcacttatgtttggatctctgtaaacacatttttgttcttagtctatctcttgtacaaacgatgtgctytgaagatgttagtgtgtaacaactgatgtttttttctgttttgttttaaacaaagaaaataaaaggggtaatagatcctttttctttttttttttaattt

SEQ ID NO: 522255 - DNA, 201 bp, Homo sapiens
agagtcaacagcagctttggggatgtgctgagagtggcttatggcattctgagcgctggcccagatgggaggcagtgtgttggggagtctatctgaacgccaccatctggaatgcctctgttgccctgaaggcactcgtctgcatctccagtgtacacggcttagagatgccaaaaattgagccaagttcactggatgtac

SEQ ID NO: 522256 - DNA, 201 bp, Homo sapiens
atcttccagtaagactgcatgaacagagtgccttaacattgaatggaaacacaagcatatttcttaatgaatgttaagagttgggatttgaaatgttcttytattaacaggtatttttttcttttacttttagtttcgaaatcagtatgacaatgatgtcactgtttggagcccccaggtaaaataatgtttttaaacctt

SEQ ID NO: 522257 - DNA, 201 bp, Homo sapiens
ctgaagtcacagtatacctttgacttttcccagcactttaccccatccttattttacctgactttgccttccctcacgtcttttttttttttaattattaytatactttaagttctgggatacatgtgcagaacgtacaggtttgttacataggtatacacgtgccgtggtggtttgctgcacccatcaaggcgtcatcta

SEQ ID NO: 522258 - DNA, 201 bp, Homo sapiens
acctcagtttggtgtgtttgtcagattgcatttctgcagacttagttgttgtcacatctcttactttcattagattgtaagcacattaaaggcaagggctrtattttcatcatatcttctagaagtactacctaacacaattgccagtacagagtagatgctcaataagttgctgattaaattaaatttcagaggaagtaa

SEQ ID NO: 522259 - DNA, 201 bp, Homo sapiens
gagtcaacagcagctttggggatgtgctgagagtggcttatggcattctgagcgctggcccagatgggaggcagtgtgttggggagtctatctgaacgccaccatctggaatgcctctgttgccctgaaggcactcgtctgcatctccagtgtacacggcttagagatgccaaaaattgagccaagttcactggatgtaca

SEQ ID NO: 522260 - DNA, 201 bp, Homo sapiens
ttctagaaatagatatgataaaccaacacttattttgtattcatagtgctatcctacaaataagagagtaaaaaatatgacagtgaggctacagattctayataatacagaaacaaatataaatgtctagcatagctcttagaggttaaaataactaaacagttattatctggcttcaatgagtcatacaaccttattctg

SEQ ID NO: 522261 - DNA, 201 bp, Homo sapiens
agaaactaccatcagagagaacaggcaacctacagaatgggagaaaatttttacaatctacccatctgacaaagggctaatatccagaatctacaaagaayttaaacaaatttacaagaaaaaaacaaatatacaagaaaaaatcaaacaaccccatcaaaaagtgggcaaaggatatgaacagacacttctcaaaagaag

SEQ ID NO: 522262 - DNA, 201 bp, Homo sapiens
atggtgattggataattattgtttaatatcaatgtgaagactttatagcctgcattatctttttaaaaaaatgtttctagataacatagatctttggagtyactcatgataatcaaaagttagtattaatattaaatctgcaaatgacaagggtccactagtttccttcttttttctcctacacataagtggtttttaagg

SEQ ID NO: 522263 - DNA, 201 bp, Homo sapiens
tttttaaaatttaaaaaaagaaatttattctgctggataccctaaatcatctcccccaggttcaaagttccacagatctctagggcaggggtaaaattccrccagtctctttgctaaagcaaagcaagagttcatctccagttcccaacaagtttctcatctcaatctgagatcaccgcagcctgggacttcattgtccat

SEQ ID NO: 522264 - DNA, 201 bp, Homo sapiens
agatgatagtgattgcagcagagtgacagagttaaagatgaagagtagtggttcaattttggatatcttttgaaattacagccaaaaaagtttgctaatasatttgttatagggtgtgaggggggaatgtctccaaggttttgggcctaattaattggaatgaaagatttatgatttactgaggtgaagaagatagtggga

SEQ ID NO: 522265 - DNA, 201 bp, Homo sapiens
gaggtgtttatagtattctctgatggtagtttgtatttccatgggattggtggtaatatcccctttatcattttttattgtgtctgtttgattcttctctyttttcttctttattagtcttgctatcagtctatcagttttgttgatcttttcaaaaaaccagctcctggattcattgattttttgaagggttttttgtgt

SEQ ID NO: 522266 - DNA, 201 bp, Homo sapiens
atcagttttgttgatcttttcaaaaaaccagctcctggattcattgattttttgaagggttttttgtgtctctatctccttcagttctgctctgatcttarttatttcttgccttctgctagcttttgaatgtgtttgctcttgcttctctagttcttttaattgtgatgttagggtgtcaattttagatctttcttgctt

SEQ ID NO: 522267 - DNA, 201 bp, Homo sapiens
tcagattaacaggtgtgtgtgtgtgcatgtgcgtgtatgtgtgtgggcatttaatctgaagttatcatctaaagtaggattggcacgtgatcatggaaacrgtagggagtagaaatccagttttgtgagtttttgtctgggcctagccattcatactctgccattaagcaatcctataacttttactggccttgttcttct

SEQ ID NO: 522268 - DNA, 201 bp, Homo sapiens
tttttttgttttccatttgcttggtagatcttcctccatccctttattttgagcctatgtgtgtctctgcatgtgagataggtctcctgaatacagcacastgatgggtcttgactctttatccaatttgccagtatgtgtcttttaattggagcatttaactcatttacatttaaggttaatattgttatgtgtgaattt

SEQ ID NO: 522269 - DNA, 201 bp, Homo sapiens
caacctgctgatgaacctgcagaaaaggctgatgaaccaatggaacattaagtgataagccagtctatatatgtattatcaaatatgtaagaatacaggcmccacatactgatgacaataatctatactttgaaccaaaagttgcagagtggtggaatgctatgttttaggaatcagtccagatgtgagttttttccaagc

SEQ ID NO: 522270 - DNA, 201 bp, Homo sapiens
tgctcttctcaaggagtatctttgtggtggtctctgtatttcctgaatttgaatgttggcctgccttgctaggttggggaagttctcctggataatattcygaagagtgttttccaacttggttccattctccccgtcattttcaggtacaccaatcagatgtagatttggtcttttcacatagtcccatatttcttggag

SEQ ID NO: 522271 - DNA, 201 bp, Homo sapiens
agaataatttcagataatgacaagtaatatgagaaaagtaaaacataatgatattataaagcacaactaggatgagaagggctgttttagataggaggatyaggaaaggcatttctgaggaaggcattttatctgagacctgagatatgaggagactggaattatttatccatttattcagtcattcattcaaaaaatgtt

SEQ ID NO: 522272 - DNA, 201 bp, Homo sapiens
tcctgagggtttgatttgtcttggttatcttctatcatttatgttgttattctttgtatcttttcactgccttgtggcttctgtttgctcagcgctcctgtttattcatggtttctgcttactcatgaagtctgatactggcttcactctgcacctttgagctttcattcactgaagaatttttccctgtgtctctccagt

SEQ ID NO: 522273 - DNA, 201 bp, Homo sapiens
ctgaattttaaaccagctcattcactaactctctttacaaaggtttttaacttgagcttgatggacccccccaaaggagtctagagacagaattcagggtrtgcatgaacttggaaggaaagtaaaattacattattttcactgacctctaatttaaatttagcatttccttcaggatctcccccaatctctgccctatct

SEQ ID NO: 522274 - DNA, 201 bp, Homo sapiens
aatatcttattgacatagttaattgccatgtgtttgggcagaattttcctgccaggacacccaacaggccaatgtccagcctattgatcagctgcccctaggtaagggcctatcatagcctaacaagcagtaagcagagttgtaggggttggaggtgtgcatatggtatcacatgtggccacttatgttgaaggatttaca

SEQ ID NO: 522275 - DNA, 201 bp, Homo sapiens
atattaagaatccctgggtcatctttgtctgtaaagttcatttacctcaccagcagcatggacaccttgtttccttgcaacccagccctccttgcatgtgmtaaataccaaaagcagccagcctttcagttctgcttccgtctagtggtcattttctatccccttctgctctctggttgtgttaagtcctgagcttttcca

SEQ ID NO: 522276 - DNA, 201 bp, Homo sapiens
tatctctaaatggtagaattatgggcatttttttttagcttatctgcattttcttattttctacagtaaacacatattactgacataattttaaagaaacwtgatattttaaagatgttatttagaccaacccttaatccattgcttgaaaacctgcaatgaatcctcaaataattagtcacttcagtctttaataccata

SEQ ID NO: 522277 - DNA, 201 bp, Homo sapiens
tcccttctgtttaaggtatctagagtgatttctaatttcctgattagaccctgattgatacattgttagcttcaacactgccctttatttcgtttagtttwtagtttagtttagtttagtttagtttagtttagtttagtttagtttaatttagtttagtttagtttaggactagagtgcacaaatcataagctgttgtcc

SEQ ID NO: 522278 - DNA, 201 bp, Homo sapiens
ttaacactgaactcacagcctacagggctataattcctacccgaaggaagcttatctaacacacgtttgttttctgtataaggcacatcacagccttcttrctctcaggaacaccagacagcactgcaacgctattattaggaatcattgtaaagagcaaaatcaccaaaaaacacaaaaatgagaaaaacgtggcactaa

SEQ ID NO: 522279 - DNA, 201 bp, Homo sapiens
cccttctgtttaaggtatctagagtgatttctaatttcctgattagaccctgattgatacattgttagcttcaacactgccctttatttcgtttagtttakagtttagtttagtttagtttagtttagtttagtttagtttagtttaatttagtttagtttagtttaggactagagtgcacaaatcataagctgttgtcct

SEQ ID NO: 522280 - DNA, 201 bp, Homo sapiens
atattataatagtgacacctcttatagttggtcgaaagttggccccaaaaaggatgtgtccatgtcctaatacttggcccctgttaatgttaccttatttraaaaaaaaaaaaaaaaaaaaaagtctttgcagctgtaattaagttaaggatcttgaaatgagatcatccagatggattttaaatccaattccaagtatcc

SEQ ID NO: 522281 - DNA, 201 bp, Homo sapiens
tcatggtcagctctcagcaaggccagtagcagagtggtaaaggccttggccctccaaggctgggaaaagacaatgacaagtcaaatccagacctatgttgkatgttggtctactaggtgactgtctcctggaaatgttatgcagctcagcaaggtgaaggtgagaatatctttgctttttgataaaacacagaatgcatag

SEQ ID NO: 522282 - DNA, 201 bp, Homo sapiens
aaagtggtcttgaggtgtagcaggaattatccagcagagaatagcattccaagcagatggaacagcatgttcaaggctaggaaggcaataaaggataagaygtgtttgagaaatagcaagaattttagtatggcaggagcagacagtctttgagggagagtggtgagagatgattctaaaatagtaggtagaagccagctt

SEQ ID NO: 522283 - DNA, 201 bp, Homo sapiens
gaacaggacctgactacaaaggtaagtattgtcttttccaattgtagatattaacgttacagtttaaacctttattgcataaatgtaatggagtatatatrcaacattctgtaatttgggatatgattgtcttggcagattcttttcctttaagctatttgctaagtaatccaattttattttttaaacatttctttttgg

SEQ ID NO: 522284 - DNA, 201 bp, Homo sapiens
caatcatagctcactgcagccttgatctcctaggctcaagtgatcctgtctcagcctttctagcagctgggactacagatgtgtgccaccatgcacagtatttttttttttttttttttttttgtgcagatgggctctcactaccttgctcaggccagtctcgagctcctgtccttaagcagtccccccaccgtggcctcc

SEQ ID NO: 522285 - DNA, 201 bp, Homo sapiens
atctggaatgcctctgttgccctgaaggcactcgtctgcatctccagtgtacacggcttagagatgccaaaaattgagccaagttcactggatgtacaaayggcctgacgtcaatggaatttattcataatttaggcctcatgtgtgatgtactgtctgaactcaatgatctgtcaaaacaatcagggaagaagaggagaa

SEQ ID NO: 522286 - DNA, 201 bp, Homo sapiens
accctggacaattctgcaattggaggcaccagatgtctctgaagatggaattgtggggtgtaggtagaaagaaaagattatttgaaagctttataatgacygtttagatccccagatcttcttcccaacatactattgtcaaatgactgctcttctgttacccaggaaaaagcctgaaggtttattctcatgaaaggctgg

SEQ ID NO: 522287 - DNA, 201 bp, Homo sapiens
actcaggaggcggagcttgcgataagccgagatcgtgccactgcactccagcctgggcgacagagcgagactccgtctcaaaaataaaaataaaaaaaaawttttttaaatgctgcctttgtcctattagaggaagaaatatctgagtttttttgtttgtttttctgtttgtttgttttttggagtcggagtctcgctctt

SEQ ID NO: 522288 - DNA, 201 bp, Homo sapiens
gtcttgaattcctgatctcaggagatctgcctgcctcccaaagtgctgggattacaggcgtgagccaccgcacctggcctcccataagcaggtttgtttgtttttttaatttttttaaatatgcatatgtacacacgatgtatatacatgttacacatattggaaaatatattctcaggatattctcccttctccagatgg

SEQ ID NO: 522289 - DNA, 201 bp, Homo sapiens
atttgtctataatgtaatgcagtaggagttcagttttggaaaaccaggccttggtgacatctttaaaatactaatttttgtgtcctggtttataaatgacmattcctttagatgcttaggatttggataattccatatagtattcccagaaatatgtgttaccaggtacaaaacatacaggcttgattgttcaaggaaaca

SEQ ID NO: 522290 - DNA, 201 bp, Homo sapiens
tcttgaattcctgatctcaggagatctgcctgcctcccaaagtgctgggattacaggcgtgagccaccgcacctggcctcccataagcaggtttgtttgtttttttaatttttttaaatatgcatatgtacacacgatgtatatacatgttacacatattggaaaatatattctcaggatattctcccttctccagatgga

SEQ ID NO: 522291 - DNA, 201 bp, Homo sapiens
cttgaattcctgatctcaggagatctgcctgcctcccaaagtgctgggattacaggcgtgagccaccgcacctggcctcccataagcaggtttgtttgtttttttaatttttttaaatatgcatatgtacacacgatgtatatacatgttacacatattggaaaatatattctcaggatattctcccttctccagatggat

SEQ ID NO: 522292 - DNA, 201 bp, Homo sapiens
ttgaattcctgatctcaggagatctgcctgcctcccaaagtgctgggattacaggcgtgagccaccgcacctggcctcccataagcaggtttgtttgtttttttaatttttttaaatatgcatatgtacacacgatgtatatacatgttacacatattggaaaatatattctcaggatattctcccttctccagatggata

SEQ ID NO: 522293 - DNA, 201 bp, Homo sapiens
ccactcctattcaacatagcgttggaagttctggccagggcaatcagtcaagggaaagaaataaagggtattcaattaggaaatgaggaagtcaaattgtmcctgtttgcagatgacatgattgtatatttagaaaaccccatcgtctcagcccaaaatctccttaagctgataagcaacttcagcaaagtctcaggatac

SEQ ID NO: 522294 - DNA, 201 bp, Homo sapiens
taaaatcatacacaaatgtgagcaaatgtcactgttacttactgtttagtatccttcagggaatagtttctgaatttgtgaatcaaactttgaaaaacagwatgaacttaactcattggaatagtaggaccatgaaaggaataataaatggaagccagttaacaacaagttgtcatttgtctataatgtaatgcagtagga

SEQ ID NO: 522295 - DNA, 201 bp, Homo sapiens
tttggtgatgggaggtccatgctcctgggcccatgcatagcctgtctctggcagcatggccacttttttcttatgccaaaatgtcagtttcagggtagccwacaacaaagactggcttatataaactggtctggttattatatctgcttcactgttcacaatctcttccatggtagatgctttctattgggccataatatg

SEQ ID NO: 522296 - DNA, 201 bp, Homo sapiens
agtggcagctctgtttgcagtgcagcctggacctcttcactcaaagctggcaactttctatgtcactcaatctagcagtattcataggtttggaatacgcygcctccagaacccaaagaggcctaccagccacttcatttccttctttgtggtggcacacgcaagatgcagcaattttcttttactttgaaggggatatct

SEQ ID NO: 522297 - DNA, 201 bp, Homo sapiens
caggttccgtttgtagtttttgttgagggttttgttttgttttgttttgtttttgcatctatattgggtctgtagttttattttcttgtgatgtttttatycttgttatcggtaatactggccacatagaataagttggagattcctttttacaatgagcaaatataaggactaggattctacagaacacattctacaaaa

SEQ ID NO: 522298 - DNA, 201 bp, Homo sapiens
tatggactggcattagccacgtgcttatttgctgtgtccagggggctgtgacactgtaattggctctgctggggataatcactccctaggagacagatgargttagggtaggagggtatgagccctgaagccatgtggagtagtaaaggagtcccccaagtgaaaagaggctgccgttttcagaagcaggggtgtgggaaa

SEQ ID NO: 522299 - DNA, 201 bp, Homo sapiens
cagcatttactggtgaggggagcaattggcttagggaagcacaggctaagggcctgagggtgaattacaaggcaagatacagtgttctgttagaaaagagraagaaagagaatgaattttgagtaaacaacaccaatgtctactcacccactggagatttacatgccaaaattaactttctgctgccttacccaggaccac

SEQ ID NO: 522300 - DNA, 201 bp, Homo sapiens
tccttacctttttctgacagtaagcccttcacaagattttctcatgcatgaggttatttggcatggaccttgacagaattctcatttagcaaaattgttaygtacataggtattgagagttagacaacttggattttaatctcattctttcacttactagatatatggcctcggacaagttacctgagcaagttcatggag

SEQ ID NO: 522301 - DNA, 201 bp, Homo sapiens
tcagtatgacactttctatctgtagttcatctgtcattcctatcactcctgatgtgttgccactggtattaaggggaatcccaacacgattccacttcagkagtttccatgctgaagatgggagaatgaactgagggctcctaatcttcttaaacaacccccattatgcctccaaactggataatctctcagtttcctaca

SEQ ID NO: 522302 - DNA, 201 bp, Homo sapiens
acactcactagactgaaaggagtacatgtttccaaagcagctttaattcacgtctctgctgagggtgattacaatagtaggaagcaggaggcaggtcttargctatagcaagaggtacaggcaatagcctctgtggcacaggattgagatacctgttcataagacatctcggaggctgtgtcactagacacagccccactc

SEQ ID NO: 522303 - DNA, 201 bp, Homo sapiens
gctgggattacaggcatgagccacctagcctggccaatcatattgtctttattgaaaaaaaatcttcaatgtatatccccctttttttttttttttgagayggagtctcgctctgtcacccaggctggagtgcagtggcacaatctcggctcactgcaacctctgcctcccaggttcaagcaattcttctgcctcagcctc

SEQ ID NO: 522304 - DNA, 201 bp, Homo sapiens
gcattccctgccttcacctgctccccctgccaataaatctcttccatttctcatcctttcttggcgtctgcttctcagtggacccaaagttacatactatrtaataggacaacttggctagacatcatctggggtgggaaattgattttcagccaggggtacaatgttgcctacaagttaatttatctaatgtattactct

SEQ ID NO: 522305 - DNA, 201 bp, Homo sapiens
ctataaatatttccagataaaactatctactagaagagtactagaaacatagagttttagacttcaacttttggtactatgtaaattatttgaaattattbctactactactagagaacttttattcattcactaatttttttttttttttttttttgagacggagtcttgacctgtcgcccaagctagagtgcagtggag

SEQ ID NO: 522306 - DNA, 201 bp, Homo sapiens
ttttttttttttttgagacggagtcttgacctgtcgcccaagctagagtgcagtggagtgatctcggctcactgcaacctccacctcccaggttcaagcarttctcctgcctcagcctcctaagtagctaggattacaggcgtgcaccaccgcacctggccaatttttgtatttttagtagcgacagggtttcaccatgtt

SEQ ID NO: 522307 - DNA, 201 bp, Homo sapiens
ggattacaggcgtgcaccaccgcacctggccaatttttgtatttttagtagcgacagggtttcaccatgttggtcaggctggtctcgaactcctgacctcrtgatctgcccgtcttggcctcccaaagtgctgggattacgggcatgagccactgcatccagcccactaactcttaactaaattttattgagcatcgagtc

SEQ ID NO: 522308 - DNA, 201 bp, Homo sapiens
ttacacatccatgaaaaaaattttcaacttggctcttatttagaatttacttttatttgattcttttaaaagcctaacataacttaccaattacctttaattttttttttttttttttttgagacagggtctttgtcacccaggctgatcatagttcattgcaaacttgaactcctgggtgtctcatgtgtccgtgtgaag

SEQ ID NO: 522309 - DNA, 201 bp, Homo sapiens
gcaacctcgatctccctggctcaagagatcctcccacatcagcttcccgagtggctgggaccacaggcccatgccaacatgcccagccttttttttttttwttattcttattcttattcttattcttattattattgtagcgacgaggtcccactgtattaaaataatatagtgatctcaaactcctgggttcaagcgatc

SEQ ID NO: 522310 - DNA, 201 bp, Homo sapiens
aaaaccaggtatccaaaggcgaaagtatccaaccatgcctggaaggaaaggagttgtcgttttgtaggtgttggggtttgagagatcagttggacacagtyggcagggagagcacgtgtgtttttatgaagagttatgctgaggtaggtaacggatggagaagaaatttgagctttggagggggatacccgatatcctttg

SEQ ID NO: 522311 - DNA, 201 bp, Homo sapiens
tgtggattaaattaaattacacgtgtaaggtaactaacaatgagtagatgcttagtaaatgtaaattagtttatttttcttacatctatccttttccttaycctcccacatcccttcaggacttcacaggactctgttaattctgagtttttccaaggagacctccagattatattgtctgttcaactctttttaagcctt

SEQ ID NO: 522312 - DNA, 201 bp, Homo sapiens
cctcagcctctcgagtagctgggactacaggtgcatacaactacacctggctaattttctttccttcctttcttcctccctctctctctccctcccttcattttttttttttttttttttttttttgagacagggtcttgctatgttgctcaggctggtaactcctggccctaagcaattctcctgcattagcaggagaaa

SEQ ID NO: 522313 - DNA, 201 bp, Homo sapiens
ctgtgtgcagtagcgactctgttgcccaagtatgttaacaatacctatgttccttccagctaatactcatctcagaatctgagcctcattttgactcattcttttagttcttttcaacaagtagctatttagtgcccactatatgccgagatttgtactaaatgctatttagaacattttttaaaactataacaggtcctt

SEQ ID NO: 522314 - DNA, 201 bp, Homo sapiens
gggaggctgaggtaggaggatcacttgggcccaggaggtccaggctgaagtgattgtgccattgcactccagcctgggcaacagagaaataccctgtcttaaaaaaaaaaaaaaaaaatgtatcctgagagctgaggagctgagtatggtggctcactcctgtaatttcagcactttgggaggccaaggagggaggatcac

SEQ ID NO: 522315 - DNA, 201 bp, Homo sapiens
aaccagtgttgatgaattagagaaggtaacctcatatactactgttgagagtatatgttggtaaaacatttctggagaacaatttagtactttgttttttktttttttttttttgagatggagtcgcactctgtcgcccaggctggagtgcagtggcacgatctcagctcactgcaacctccgcctcccgggttcaagcga

SEQ ID NO: 522316 - DNA, 201 bp, Homo sapiens
taccatgttggccaggatggtccgatctcctgacctcgtgatccacccgcctctgccttccaaagtgttgggattacaagcgtgagccaccgcgcccggctttttttttttttgaaacagaatctctattgcccaggcgggctggagtgcaacggcgcgaccatggctcactgcaacctcgatctccctggctcaagagat

SEQ ID NO: 522317 - DNA, 201 bp, Homo sapiens
taaaataattttccttctctatttttattttatatttaataatgttatatttataattaatcacattaggcatgatgttagcatgggccaggaaatttttytttagtgaaactgaaaaaaaaaaaaaaccctgcagggaagttatagcaacttcctactctgtatcattcatgaacatacactcagtttggaaaccaccct

SEQ ID NO: 522318 - DNA, 201 bp, Homo sapiens
ggatgacaataggtttaactttgggaaaagaggattccttggacaaataagcttggtaaatgctggcttaaagtttaacattgtaaattatggtaaatggwttggggtccccaaggttacccctaaatttggagatatgctaggacttaaagcgcacagcatatagttgtactcccaggtaagacttttaacaataaaata

SEQ ID NO: 522319 - DNA, 201 bp, Homo sapiens
aatccagcaacatctagtcaatcagcttagcttttccagagctgaggaaaaccactaacttgaagctgcttctaatttttgtcctgccaacattcttattwtaagaaattataaagcctcactaccttgtgaaatgcagagaagaggaaaatatagagaggataaaataaaattaatattttaacaaattaccctaccaaa

SEQ ID NO: 522320 - DNA, 201 bp, Homo sapiens
gagatcctcccacatcagcttcccgagtggctgggaccacaggcccatgccaacatgcccagcctttttttttttttttattcttattcttattcttattmttattattattgtagcgacgaggtcccactgtattaaaataatatagtgatctcaaactcctgggttcaagcgatcctccgccctcggcctccaatagcg

SEQ ID NO: 522321 - DNA, 201 bp, Homo sapiens
ttattattattgtagcgacgaggtcccactgtattaaaataatatagtgatctcaaactcctgggttcaagcgatcctccgccctcggcctccaatagcgmtgggattacaggcgtgagccaccacacccagtctcttttttacaaagaatataaatagccggtggatgtcagattggcagctgtttgcagagatgtcaga

SEQ ID NO: 522322 - DNA, 201 bp, Homo sapiens
caaactcctgggttcaagcgatcctccgccctcggcctccaatagcgctgggattacaggcgtgagccaccacacccagtctcttttttacaaagaatataaatagccggtggatgtcagattggcagctgtttgcagagatgtcagactatttcgttatggaaagatgctctcaaaagacgaaatagataaatcgaaaga

SEQ ID NO: 522323 - DNA, 201 bp, Homo sapiens
actcctgggttcaagcgatcctccgccctcggcctccaatagcgctgggattacaggcgtgagccaccacacccagtctcttttttacaaagaatataaatagccggtggatgtcagattggcagctgtttgcagagatgtcagactatttcgttatggaaagatgctctcaaaagacgaaatagataaatcgaaagaaag

SEQ ID NO: 522324 - DNA, 201 bp, Homo sapiens
tcctgggttcaagcgatcctccgccctcggcctccaatagcgctgggattacaggcgtgagccaccacacccagtctcttttttacaaagaatataaatagccggtggatgtcagattggcagctgtttgcagagatgtcagactatttcgttatggaaagatgctctcaaaagacgaaatagataaatcgaaagaaagtg

SEQ ID NO: 522325 - DNA, 201 bp, Homo sapiens
cctgggttcaagcgatcctccgccctcggcctccaatagcgctgggattacaggcgtgagccaccacacccagtctcttttttacaaagaatataaatagccggtggatgtcagattggcagctgtttgcagagatgtcagactatttcgttatggaaagatgctctcaaaagacgaaatagataaatcgaaagaaagtgt

SEQ ID NO: 522326 - DNA, 201 bp, Homo sapiens
ctgggttcaagcgatcctccgccctcggcctccaatagcgctgggattacaggcgtgagccaccacacccagtctcttttttacaaagaatataaatagccggtggatgtcagattggcagctgtttgcagagatgtcagactatttcgttatggaaagatgctctcaaaagacgaaatagataaatcgaaagaaagtgtc

SEQ ID NO: 522327 - DNA, 201 bp, Homo sapiens
tgggttcaagcgatcctccgccctcggcctccaatagcgctgggattacaggcgtgagccaccacacccagtctcttttttacaaagaatataaatagccggtggatgtcagattggcagctgtttgcagagatgtcagactatttcgttatggaaagatgctctcaaaagacgaaatagataaatcgaaagaaagtgtcc

SEQ ID NO: 522328 - DNA, 201 bp, Homo sapiens
gggttcaagcgatcctccgccctcggcctccaatagcgctgggattacaggcgtgagccaccacacccagtctcttttttacaaagaatataaatagccggtggatgtcagattggcagctgtttgcagagatgtcagactatttcgttatggaaagatgctctcaaaagacgaaatagataaatcgaaagaaagtgtcca

SEQ ID NO: 522329 - DNA, 201 bp, Homo sapiens
gttcaagcgatcctccgccctcggcctccaatagcgctgggattacaggcgtgagccaccacacccagtctcttttttacaaagaatataaatagccggtggatgtcagattggcagctgtttgcagagatgtcagactatttcgttatggaaagatgctctcaaaagacgaaatagataaatcgaaagaaagtgtccatt

SEQ ID NO: 522330 - DNA, 201 bp, Homo sapiens
gccatgttggccaggctggtcttgaattcctgatctcaggagatctgcctgcctcccaaagtgctgggattacaggcgtgagccaccgcacctggcctccyataagcaggtttgtttgtttttttaatttttttaaatatgcatatgtacacacgatgtatatacatgttacacatattggaaaatatattctcaggatat

SEQ ID NO: 522331 - DNA, 201 bp, Homo sapiens
ctcaagctcattcttgttgagagcttgccctgtggtgcttgggtaagcaggaaagagttaggcagtgcaggttgggacagtctttaaaaaaaaaaaaaaamaaaacaaaaaacaaaaaaaacactccaaaccatattatcacatagcctattaactgacacttattttgatgcctctgagccatccggaagaggctaaatg

SEQ ID NO: 522332 - DNA, 201 bp, Homo sapiens
agacaaagaggaaaggccatatgaagatgaaggtagagatcgccgttacgtagctagaagccaaagaatgcctggagacatcagaagctggacaaggcaargaagcattctcttctagaaccttcagaaggatcatggccctgccaataccttgatttcagacttctgtcctctagaatagtaaaaggatagatttatgtt

SEQ ID NO: 522333 - DNA, 201 bp, Homo sapiens
gctagtttatatttattggaaaacaaacaaacaaaaaaaaagcttcaccctaaacaatgttagagtaaaagcaaacaaaaaagaaaaagaaaaagaaaaaraaatctgcatataagtggaccctcactgtttaaacctttgttgttcgagccaactgtattttttttaaataaaaaatctttattccctcaaatcatgagc

SEQ ID NO: 522334 - DNA, 201 bp, Homo sapiens
ttcaagcgatcctccgccctcggcctccaatagcgctgggattacaggcgtgagccaccacacccagtctcttttttacaaagaatataaatagccggtggatgtcagattggcagctgtttgcagagatgtcagactatttcgttatggaaagatgctctcaaaagacgaaatagataaatcgaaagaaagtgtccattt

SEQ ID NO: 522335 - DNA, 201 bp, Homo sapiens
atataatcataacacaagaggctttagttctattgtaagctgctgttcttaccacaactgtgtctgtaaattttccattttgtcttaaatattgaaatggrcccataattcaaatggcaacaggaaaattaagaactgagtaaagttaaatattgaaagggcagtgatctccataaacacaaaaagggggccgggtgcggt

SEQ ID NO: 522336 - DNA, 201 bp, Homo sapiens
caagcgatcctccgccctcggcctccaatagcgctgggattacaggcgtgagccaccacacccagtctcttttttacaaagaatataaatagccggtggatgtcagattggcagctgtttgcagagatgtcagactatttcgttatggaaagatgctctcaaaagacgaaatagataaatcgaaagaaagtgtccattttt

SEQ ID NO: 522337 - DNA, 201 bp, Homo sapiens
agcgatcctccgccctcggcctccaatagcgctgggattacaggcgtgagccaccacacccagtctcttttttacaaagaatataaatagccggtggatgtcagattggcagctgtttgcagagatgtcagactatttcgttatggaaagatgctctcaaaagacgaaatagataaatcgaaagaaagtgtccattttttc

SEQ ID NO: 522338 - DNA, 201 bp, Homo sapiens
cttatatcctgcaatcttgctgaacttgtttattagttctagtcatttttttatagattcctaagatcatgttgtctgggaatagagatagttttactttytcctttctaactgccgtggctggaacctctggtacaatgatgaatataagttgcatgaacaaaccttcttttttttgttcctaaacttaagggaaaaggt

SEQ ID NO: 522339 - DNA, 201 bp, Homo sapiens
accaggtatttaattctttcactgatgttttgtagttttcagtgtacaaatcatatttgtcttaaagtattttattatttttggtgctgttgtgaacagarttgttttcttaatttcattgcatattattcattgcaactatatagaaatacagttgatttttatatatcaatcttatatcctgcaatcttgctgaacttg

SEQ ID NO: 522340 - DNA, 201 bp, Homo sapiens
cgccctcggcctccaatagcgctgggattacaggcgtgagccaccacacccagtctcttttttacaaagaatataaatagccggtggatgtcagattggcagctgtttgcagagatgtcagactatttcgttatggaaagatgctctcaaaagacgaaatagataaatcgaaagaaagtgtccattttttctcagtggcct

SEQ ID NO: 522341 - DNA, 201 bp, Homo sapiens
ctggataggaaattcctaaagattgcaataaatctatagataattttggggagtactgctactttgatgatacaaagcatctgatccatgaacatggaatrtcttcatttatttaggtatttaattctttttttttttttcctgagatggggtttcactgtttttgcccaggctggagtgcaatggcgcgatctcggctta

SEQ ID NO: 522342 - DNA, 201 bp, Homo sapiens
gtttcaagcacgagtagaactttttcaaaatataaatgtgttcccaaccttgaaaattcttgattcatttggtcagaagtgtgccctgtggagtggagagyggagaaccactgtactacctgccagttgtaagctctgttcacttttagttttctgtgagtcttttgttattttaagccacacagacatttctgcattagt

SEQ ID NO: 522343 - DNA, 201 bp, Homo sapiens
ccctcggcctccaatagcgctgggattacaggcgtgagccaccacacccagtctcttttttacaaagaatataaatagccggtggatgtcagattggcagctgtttgcagagatgtcagactatttcgttatggaaagatgctctcaaaagacgaaatagataaatcgaaagaaagtgtccattttttctcagtggcctaa

SEQ ID NO: 522344 - DNA, 201 bp, Homo sapiens
cttatgtggctccagagtttagcacaaaaacgcacccttgcaggcatgtctttcttaccttctgtttttcttatatggatgttatccatgtaaacgcttgraagaatttgaagtgaaatcaaacaatttagattggaatagttgtctataatttgaaattactaaactttttttgtttcttttttagtaattttatgcgtc

SEQ ID NO: 522345 - DNA, 201 bp, Homo sapiens
taatgacagccttaagggtttccacctactcttcaaaatggaaaatgtattatattatcaaacattttatttaacccaatctataaaatattgccatgccracacataatcaatataaaaactttattaatgagttattgcacgtttttaggtactaagtctttgaaatttggtatgttattttgtacttggtgtacatct

SEQ ID NO: 522346 - DNA, 201 bp, Homo sapiens
ggaggcagaggttgtactgagctgaagattgtgccactgcactccagcctgggtgacagagtgagaacctgtctcaaaaaaaaaaaaaggtctcttgattwaaaaaaaaatcagttgagatttaactgtgctcacctgatatttgaaaaccctaatttttaatttataaaagatcttctaagatgtgtgttttttgttttt

SEQ ID NO: 522347 - DNA, 201 bp, Homo sapiens
cctcggcctccaatagcgctgggattacaggcgtgagccaccacacccagtctcttttttacaaagaatataaatagccggtggatgtcagattggcagctgtttgcagagatgtcagactatttcgttatggaaagatgctctcaaaagacgaaatagataaatcgaaagaaagtgtccattttttctcagtggcctaat

SEQ ID NO: 522348 - DNA, 201 bp, Homo sapiens
ccacgagtttatggtaaatgtagaattggcttacatctgagtacagtagtaatcttccagtaagactgcatgaacagagtgccttaacattgaatggaaayacaagcatatttcttaatgaatgttaagagttgggatttgaaatgttcttctattaacaggtatttttttcttttacttttagtttcgaaatcagtatga

SEQ ID NO: 522349 - DNA, 201 bp, Homo sapiens
tcggcctccaatagcgctgggattacaggcgtgagccaccacacccagtctcttttttacaaagaatataaatagccggtggatgtcagattggcagctgtttgcagagatgtcagactatttcgttatggaaagatgctctcaaaagacgaaatagataaatcgaaagaaagtgtccattttttctcagtggcctaatct

SEQ ID NO: 522350 - DNA, 201 bp, Homo sapiens
cggcctccaatagcgctgggattacaggcgtgagccaccacacccagtctcttttttacaaagaatataaatagccggtggatgtcagattggcagctgtttgcagagatgtcagactatttcgttatggaaagatgctctcaaaagacgaaatagataaatcgaaagaaagtgtccattttttctcagtggcctaatctg

SEQ ID NO: 522351 - DNA, 201 bp, Homo sapiens
gcctccaatagcgctgggattacaggcgtgagccaccacacccagtctcttttttacaaagaatataaatagccggtggatgtcagattggcagctgtttgcagagatgtcagactatttcgttatggaaagatgctctcaaaagacgaaatagataaatcgaaagaaagtgtccattttttctcagtggcctaatctgtc

SEQ ID NO: 522352 - DNA, 201 bp, Homo sapiens
gctctgggtctggggagtaacagtacagagatctacctgtcttgttgccacatgtttctaaattttccagtaagtcaccttctactgacaaagaaaaaaawatatatatatataatacacacacacatatatatacacacatatatatacacatatatatatacacacacatatatatacacacacacacacacacacata

SEQ ID NO: 522353 - DNA, 201 bp, Homo sapiens
cctccaatagcgctgggattacaggcgtgagccaccacacccagtctcttttttacaaagaatataaatagccggtggatgtcagattggcagctgtttgcagagatgtcagactatttcgttatggaaagatgctctcaaaagacgaaatagataaatcgaaagaaagtgtccattttttctcagtggcctaatctgtca

SEQ ID NO: 522354 - DNA, 201 bp, Homo sapiens
cagaggttgcagtgagccgagatggtgccactgcagtccagcctgggcaccatctcggctcatgaactcctctgtggagcaagactccatctcaatttttwaaaaaaaattgatttttaactcctaactttatacatgaccaatatgtgacttaataaacctatttaaaattattgactttattactgtattttacattat

SEQ ID NO: 522355 - DNA, 201 bp, Homo sapiens
gctgagttaggagaataacttgaggccaggagttcaagactagcctgggcaacatagtgaaaccctgtctctacaaaaatcacttaaaaaaaaaaaaagcytaaattttacgaagaattaagtggaatcttcgccttcaaaaaaacatatcccctttcattccattcagcaaatatttattaatttaagccctgtcctagg

SEQ ID NO: 522356 - DNA, 201 bp, Homo sapiens
acacattaataatgggagattttaacaccccaatgtcaacattagacacatcaatgagacagaaagtcaacaaggatacccaggaattgaactcatctctrcaccaagcggacctaatagacatctacagaagtctccaccccaaatcaacagaatatacatttttttcagcaccacaccacacctattccaaacttgacc

SEQ ID NO: 522357 - DNA, 201 bp, Homo sapiens
ggtatagccactctgcaaaatagtttggcaatttcttaaaaatctaaacttatacttaccacatgatctagcaatcacattcctaggcatttacccagagwaatgaaaatttatgttcacacaaaaacctatacaagaatacccattgtaagtttatttgtagtagcctaaattggaaacaacccaaatgtccttcaatgg

SEQ ID NO: 522358 - DNA, 201 bp, Homo sapiens
tatagcagaagatttgagtgacaaattttcttttttgagatggagtttcactctttttgcccaggctggagtgcagtggcacaatctcagctcactgcaamctttgcctcccgggttcaagtgattctcctacctcagcctcccaagtagctaggattacaagcacacaccaccaaacccagctaattttgtatttttggt

SEQ ID NO: 522359 - DNA, 201 bp, Homo sapiens
agcagctgggactacagatgtgtgccaccatgcacagtatttttttttttttttttttttttgtgcagatgggctctcactaccttgctcaggccagtctsgagctcctgtccttaagcagtccccccaccgtggcctccctgagtgctgggattacagccgtgagccaccatgccaaggtagattgtgacttttaatatg

SEQ ID NO: 522360 - DNA, 201 bp, Homo sapiens
ctcaaaacatcctttaaacatacacatacacatacacacacacacacacgcacacacacacgagtgtttataaccaagaagaaagcaaatcactgttgtcyttactgttaggtacacgagaattaaaagtgtttgctcaatatccttaaaaaatacaacttaaaatgccctaacttatgaaatgggaaatacttatctagg

SEQ ID NO: 522361 - DNA, 201 bp, Homo sapiens
atctgcctcaattgcctttcttctgcagatcaaggtaaccaaaccttgatttgcctttgtggaaaggttttctgctcactcagcagtagacacatgatccrggttcaggaataagtacgtgatccaatttgggctaataagaatcaggggcaaagtttttgctggaccttctactggggttattaagttgaaagttactaa

SEQ ID NO: 522362 - DNA, 201 bp, Homo sapiens
gagtgatttctaacctctttgaaattatgacaccctattttgcccgttagacatcacaactcttgctcctgttatactgtctccacacactcaaggaaaamaatctattatatgatataaaaaacacttaaatgaatttaaattaatcttaatttcttcaggcttttacttgtttttctttataattacctcttctttgaa

SEQ ID NO: 522363 - DNA, 201 bp, Homo sapiens
gctttttttttttttttttttgccttttccagtctatatagtaaataaacatagtatcctaaatgcataaaactgtaagtcttatagaaagaatttttttwaaaaaaattatgcccatgaagagtttattgtttctgtcacatatactaatcttaacttctggttaccacagtagtttcaagcacgagtagaactttttca

SEQ ID NO: 522364 - DNA, 201 bp, Homo sapiens
ctgattccagtttcagtaaagccatgagtcacagcagcggtaacagtaagaagctttcagcttgtccagctcacttgttaaccccatatacacacacacayacacacacacacatatatatatatacgtatatatatgtatatatatatttcaaaaaaaaaggacaataaagaggctgaagatgaactcaaaccaagtagc

SEQ ID NO: 522365 - DNA, 201 bp, Homo sapiens
cagtaaagccatgagtcacagcagcggtaacagtaagaagctttcagcttgtccagctcacttgttaaccccatatacacacacacacacacacacacacatatatatatatacgtatatatatgtatatatatatttcaaaaaaaaaggacaataaagaggctgaagatgaactcaaaccaagtagctgattttctgaag

SEQ ID NO: 522366 - DNA, 201 bp, Homo sapiens
agtaaagccatgagtcacagcagcggtaacagtaagaagctttcagcttgtccagctcacttgttaaccccatatacacacacacacacacacacacacatatatatatatacgtatatatatgtatatatatatttcaaaaaaaaaggacaataaagaggctgaagatgaactcaaaccaagtagctgattttctgaagc

SEQ ID NO: 522367 - DNA, 201 bp, Homo sapiens
gctcattcttgttgagagcttgccctgtggtgcttgggtaagcaggaaagagttaggcagtgcaggttgggacagtctttaaaaaaaaaaaaaaacaaaamaaaaaacaaaaaaaacactccaaaccatattatcacatagcctattaactgacacttattttgatgcctctgagccatccggaagaggctaaatgtggta

SEQ ID NO: 522368 - DNA, 201 bp, Homo sapiens
ctccaatagcgctgggattacaggcgtgagccaccacacccagtctcttttttacaaagaatataaatagccggtggatgtcagattggcagctgtttgcagagatgtcagactatttcgttatggaaagatgctctcaaaagacgaaatagataaatcgaaagaaagtgtccattttttctcagtggcctaatctgtcag

SEQ ID NO: 522369 - DNA, 201 bp, Homo sapiens
ccaatagcgctgggattacaggcgtgagccaccacacccagtctcttttttacaaagaatataaatagccggtggatgtcagattggcagctgtttgcagagatgtcagactatttcgttatggaaagatgctctcaaaagacgaaatagataaatcgaaagaaagtgtccattttttctcagtggcctaatctgtcaggt

SEQ ID NO: 522370 - DNA, 201 bp, Homo sapiens
agggaagcagataatttggttaaaatgtcttggcttaataaggaaagtgggcagttggggataactaaaaagagtgcataaaggaatgttgtccaagttgrcaccagagtgggggagttttaaggggtttagaagcctggccgtcaatacccacaacagttatggaggcaagggaaacaggcccttgaaaagaaggtaatg

SEQ ID NO: 522371 - DNA, 201 bp, Homo sapiens
ttcgttatggaaagatgctctcaaaagacgaaatagataaatcgaaagaaagtgtccattttttctcagtggcctaatctgtcaggtaccatgcttggttytgggggcatagaaagacattagcgccctcatggagttcaaagtctggtggaagaaatcaatcataataacaatgaggggttaacgacaacagacccttga

SEQ ID NO: 522372 - DNA, 201 bp, Homo sapiens
ggggagtactgctactttgatgatacaaagcatctgatccatgaacatggaatgtcttcatttatttaggtatttaattctttttttttttttcctgagayggggtttcactgtttttgcccaggctggagtgcaatggcgcgatctcggcttattgcaacctctgcctcccaggttcaagcaattctcctgcctcagcct

SEQ ID NO: 522373 - DNA, 201 bp, Homo sapiens
agaatggcgtgaacctgggaggtggagcttgcagtgagctgagattgcgccactgcactccagcctgtccagcctgggcgacagagcgagactccgtctcaaaaaaaaaaaaaaaaaaaacaaccggtttgtgggccagccgcggtggctcacgcctgtaatcccaacactttgggaggctgaggtgagtggatcacttga

SEQ ID NO: 522374 - DNA, 201 bp, Homo sapiens
tatgcattcggcatacctaactttttcttactctttttttttatatttctaggctacacagttggtctgctagtttatatttattggaaaacaaacaaacaaaaaaaaagcttcaccctaaacaatgttagagtaaaagcaaacaaaaaagaaaaagaaaaagaaaaaaaaatctgcatataagtggaccctcactgttta

SEQ ID NO: 522375 - DNA, 201 bp, Homo sapiens
aaagaaaaaccaattttctgggaagaaactcaatctggctgcagaaatttgcacaagtaacaagaagccaaatgttaatcgcccagataatggggaaaatrtctccagggcatgtcagagacctttgcagcagcccctctcatcacaggcctggagtcctaggagggaaaaatggtgtcatgggccaggcctagggccccc

SEQ ID NO: 522376 - DNA, 201 bp, Homo sapiens
acagaggctggcaggccttcttgagctgtggtgggctccacccagttcaagcttcctggctgctttgtttgcctactcaagcctcagcaatggcagacgcmcctcctccagccttgctgccgccttgccgtttgatctcagactgctgtgctagcagtgagtgaggctccgtgggtgtgggaccccctgagccaggcgtgg

SEQ ID NO: 522377 - DNA, 201 bp, Homo sapiens
gagactccatctcaaaaaaaaagaaaaggaagaaatgtatgaagtggatatttgctaggggttttttggttgttgttgttgttgttttgtttttgcttgcyctgtgtccagaggtggattatattgtgaaactaacaaagcttaagcttcagaagccttcagttgcatgggaggtgctgggagttatggagtattctaggt

SEQ ID NO: 522378 - DNA, 201 bp, Homo sapiens
aatatctcctgatacatagtaggtattcagtaattatttgcagtatgaatgaatgaatgaatcctgatgagacaagcctggattatctccatccacctatygttatgcagataactttgatatggtctttggactcaccaagtgatgtgatctggaaccataattttcctatagtatcaacattacaatctagggattagc

SEQ ID NO: 522379 - DNA, 201 bp, Homo sapiens
ctcctgggtgtctcatgtgtccgtgtgaagagaacaccaaacaggctttgtgtgagcaacatggctgtttatttcacctgggtgcaggcgggctgagtccraaaagagagtcagcaacgggtggtggattatcattaattagttcttaaagattttgggataggcagtggagttaagagcaatgttttaggggcagggggt

SEQ ID NO: 522380 - DNA, 201 bp, Homo sapiens
taactcataaagtcaaaagaatttgatttagggctttaatctctttgggttttaacttatttagacttaacttgcaagggaatctaatattttttactgtratttctccctggaatttgataatgggaagaagtctatattcagatgtgaagcatcttattattttatatattttatacataatatgtatacttttatatt

SEQ ID NO: 522381 - DNA, 201 bp, Homo sapiens
ctgggcaacatagtgagaccccgtctctataaaaaataaacaaagttagcgccaggcatggtgttgcatgcctgtagtcctagctacttgggaggctgagrtgggaggatcacttgagcctgggcgattgaggctgcagtgagccaagatcacgccgttgtattccaacctgggtgacagagtgagactctgtctcaaaaa

SEQ ID NO: 522382 - DNA, 201 bp, Homo sapiens
gggtttttttgtttgttttttgtttttgtttttcctgagatggagtctcgttctgtcgcccaagctggattgcagtggtgcaatctcggcccactgcaacytctgcctcctgggttcaagcaattctcctgcctcagcctcccgagtagctgggattacaggcgtctgccaccatgcccgctaattttgtatttttagtag

SEQ ID NO: 522383 - DNA, 201 bp, Homo sapiens
aagacccatcagtgtgctgtattcaggagacccatcttatgtgcagagacatacgtaggctcaaaataaagggaaggaggaagatctaccaagcaaatggaaaaaaaaaagcaggggttgcaatcctagtctctgataaaacagactttaaaccatcaaagatcaaaagagacaaagaaggccattaaataatggtaaagg

SEQ ID NO: 522384 - DNA, 201 bp, Homo sapiens
caaggatctagaactagaattaccatttgacccagcaatcccattactgggtatatacctcaaggattgtaaataatgctactgtaaagacacatgcacasgtatgtttattgtggcactattcacaatagcaaagacttggaaccaacccaaatgtccatcaatgatagactggattaagaaaatgtggcacatatacac

SEQ ID NO: 522385 - DNA, 201 bp, Homo sapiens
tttcacagactggcttcatgtaaggaagcctagagaagtccagcactgtctgtgactaggggttcactattaggaatcccttttgttcatagatacaaacsacattctccaccatcagtttaatctgtactaaatgtgttatttctcaagaggcaatataatgtagtggttaggtgcatagactctggagccaaactggtt

SEQ ID NO: 522386 - DNA, 201 bp, Homo sapiens
acagtgactcatgcctgtaatcccagcactttgggaggcccaggcgggcggatcacaaggtcaggaggttgagaccatcctggctaacacggtgaaacccygtctctactaaaaatacaaaaaattagcagggtgtggtggcgggcgcctgtagtcccagctacttgggacgctgaggcaggagaatggcgtgaaaccagg

SEQ ID NO: 522387 - DNA, 201 bp, Homo sapiens
ctgaggcaggagaatggcgtgaaaccaggaggtggagcttgcagtgagcagagattgcaccactgcactccagcctggggagcaaagcgagactccatctaaaaaaaaaatatatatatatatatatatatagagagagagagagagagagagactgtgtcagagttgagacggggtcgatgaggctgaccccagcgggta

SEQ ID NO: 522388 - DNA, 201 bp, Homo sapiens
tgaggcaggagaatggcgtgaaaccaggaggtggagcttgcagtgagcagagattgcaccactgcactccagcctggggagcaaagcgagactccatctaaaaaaaaaatatatatatatatatatatatagagagagagagagagagagagactgtgtcagagttgagacggggtcgatgaggctgaccccagcgggtag

SEQ ID NO: 522389 - DNA, 201 bp, Homo sapiens
gaagttagtgagatgaactggagccccattgctgcagttgggcttgagactgcaacaaggtacttaacttctcccacctctattatccattccaagtcctmtcaaccctcagctatcaccttggcaagtaatggtagcttaccttgtggtgtgacccaaaccttcattcctgatgggtctgagctcttggcagtcataccc

SEQ ID NO: 522390 - DNA, 201 bp, Homo sapiens
tttttcataccaggaacttttttttcttttacactagaacatgggagtgatactcccaagtttttgtcccccatcccaaaatgacaggggaagtaaaattmttttcacaaaaagtgtaccttttttaaaaagaacagtaagccagcattagatgacttattctaaaacaatcttcttctttaactgggcttttctgcagat

SEQ ID NO: 522391 - DNA, 201 bp, Homo sapiens
gcctgtaatcccagcactttgagaggccaaggcgggcgggttgcttgagctcaggggtttgtgaccagcctgggcagcaaacatggcaaaaccttgtctcygcaaaaaatacgaaaattagccgggcttggtgttgtgcgcctgtggtcccagctactcaggagactgagttgggaggatcgcttgagcccaggaggtcga

SEQ ID NO: 522392 - DNA, 201 bp, Homo sapiens
actttctgcttgtaagtttacccagaaaaaagagtctaaccaggatactggaggaactgttcctggaacttgtgcaaaattagtagatccaacacaaagcrttggctgtaatgaatgctgtggtttgccactcagatcccctggttggattaaggcagtcattcccacaactactaggaatattggccactgatagctctc

SEQ ID NO: 522393 - DNA, 201 bp, Homo sapiens
ccagtcttaaaggtagaagcggcttcctgaaatatgaatctttggttttcctagcttcctctttttgcttttccagctttccaacacctgtgtaagaaatyccatgaattaaatcccttctgtttaaggtatctagagtgatttctaatttcctgattagaccctgattgatacattgttagcttcaacactgccctttat

SEQ ID NO: 522394 - DNA, 201 bp, Homo sapiens
attctcttattttacttttaccatattttacccttcagaatgtttccattggaattgttggtaaagacttggagtttacaatctatgatgatgatgatgtrtctccattcctggaaggtcttgaagaaagaccacagagaaaggcacaggtatataatcataacacaagaggctttagttctattgtaagctgctgttctt

SEQ ID NO: 522395 - DNA, 201 bp, Homo sapiens
tgtttcaggtaatgcagcccctgccaatccaaggcctggaagagagggatgtaggaaaatattacaattgtactcttctgtcctctgagtttctttcagcrtgtcccactgttcaaatctaccagaaagtcagaggacaaggaaacctgttactgtcatccaaagaggtcaacctctgaggacgcagggcaagtagagaat

SEQ ID NO: 522396 - DNA, 201 bp, Homo sapiens
gagcctcattttgactcattcttttagttcttttcaacaagtagctatttagtgcccactatatgccgagatttgtactaaatgctatttagaacattttytaaaactataacaggtccttcagagttttctcagagctgcagctttatctgggagatagaatgtctgcacatagactattaaatagcacaaaagaataaa

SEQ ID NO: 522397 - DNA, 201 bp, Homo sapiens
atgaattttaatagaaaactcttaaaatagaatataatagaaaaaacttttcatattgtgattttaaaatatttttcttaacattcatttgcaccaaatcrctaaaagaaccctttttcctagatttacaaaaacaaaattacacatatgtttatgtcgtatttcactttcaacataaaataaatgtttcagagatgtgtg

SEQ ID NO: 522398 - DNA, 201 bp, Homo sapiens
agaatggcgtgaaaccaggaggtggagcttgcagtgagcagagattgcaccactgcactccagcctggggagcaaagcgagactccatctaaaaaaaaaatatatatatatatatatatatagagagagagagagagagagagactgtgtcagagttgagacggggtcgatgaggctgaccccagcgggtagaagggacga

SEQ ID NO: 522399 - DNA, 201 bp, Homo sapiens
agaagacttcaagaaatcgacatttaagctaccttaaagaaaaggaagacttttaaccatttattagggcccaataaaagggagcagcataagcaaaaatwggcaagaaagttgattgtgaactttagtaattgagcctaaaggggttgatatggagggtgttagaataagagtttggaaaaataggacccatttagatct

SEQ ID NO: 522400 - DNA, 201 bp, Homo sapiens
ccctgattgatacattgttagcttcaacactgccctttatttcgtttagtttatagtttagtttagtttagtttagtttagtttagtttagtttagtttartttagtttagtttagtttaggactagagtgcacaaatcataagctgttgtccttttgtgcaggtatccacctctgtgcccccaaaaacagcgcagggcat

SEQ ID NO: 522401 - DNA, 201 bp, Homo sapiens
aatggcgtgaaaccaggaggtggagcttgcagtgagcagagattgcaccactgcactccagcctggggagcaaagcgagactccatctaaaaaaaaaatatatatatatatatatatatagagagagagagagagagagagactgtgtcagagttgagacggggtcgatgaggctgaccccagcgggtagaagggacgagg

SEQ ID NO: 522402 - DNA, 201 bp, Homo sapiens
ggacgtttagataaagagctgtgggagtatatgttagggggatttgggaagaaaaggagaagacttcaagaaatcgacatttaagctaccttaaagaaaargaagacttttaaccatttattagggcccaataaaagggagcagcataagcaaaaataggcaagaaagttgattgtgaactttagtaattgagcctaaagg

SEQ ID NO: 522403 - DNA, 201 bp, Homo sapiens
tggcgtgaaaccaggaggtggagcttgcagtgagcagagattgcaccactgcactccagcctggggagcaaagcgagactccatctaaaaaaaaaatatatatatatatatatatatagagagagagagagagagagagactgtgtcagagttgagacggggtcgatgaggctgaccccagcgggtagaagggacgaggag

SEQ ID NO: 522404 - DNA, 201 bp, Homo sapiens
tgggcaacagagtgggacccttctcaaaaaaaaaaaaagaaagaaagaaagaaaagaaaagtactataactattaaagaaattcacttacttgtaagaacrgctgaaataaaaaatagcccccaaatgctgctaaggatgaagaaaagacaaatcactcatacattgctggtggaaagtaaaatgggacagccactctgac

SEQ ID NO: 522405 - DNA, 201 bp, Homo sapiens
gcgtgaaaccaggaggtggagcttgcagtgagcagagattgcaccactgcactccagcctggggagcaaagcgagactccatctaaaaaaaaaatatatatatatatatatatatagagagagagagagagagagagactgtgtcagagttgagacggggtcgatgaggctgaccccagcgggtagaagggacgaggagga

SEQ ID NO: 522406 - DNA, 201 bp, Homo sapiens
gtgaaaccaggaggtggagcttgcagtgagcagagattgcaccactgcactccagcctggggagcaaagcgagactccatctaaaaaaaaaatatatatatatatatatatatagagagagagagagagagagagactgtgtcagagttgagacggggtcgatgaggctgaccccagcgggtagaagggacgaggaggagc

SEQ ID NO: 522407 - DNA, 201 bp, Homo sapiens
ctgtgtccagggggctgtgacactgtaattggctctgctggggataatcactccctaggagacagatgaggttagggtaggagggtatgagccctgaagcyatgtggagtagtaaaggagtcccccaagtgaaaagaggctgccgttttcagaagcaggggtgtgggaaaaatactgagcagatatctaccacaacctaac

SEQ ID NO: 522408 - DNA, 201 bp, Homo sapiens
ggtggagcttgcagtgagcagagattgcaccactgcactccagcctggggagcaaagcgagactccatctaaaaaaaaaatatatatatatatatatatakagagagagagagagagagagagactgtgtcagagttgagacggggtcgatgaggctgaccccagcgggtagaagggacgaggaggagcgagcagcggaag

SEQ ID NO: 522409 - DNA, 201 bp, Homo sapiens
ttctcccttattttggagttgtaaggtatattaacattcttacatagctttgatccaatatagaatttttttaaaaaactttcaaagaaggactttatggwctggcattagccacgtgcttatttgctgtgtccagggggctgtgacactgtaattggctctgctggggataatcactccctaggagacagatgaggttag

SEQ ID NO: 522410 - DNA, 201 bp, Homo sapiens
cttctactgacaaagaaaaaaatatatatatatataatacacacacacatatatatacacacatatatatacacatatatatatacacacacatatatatacacacacacacacacacacatatatatatatatacacacacacatatatatatatatcttccctaatgcacctcaaattctaccatggaaaaacaaaaag

SEQ ID NO: 522411 - DNA, 201 bp, Homo sapiens
aacaaaaagagaggtccttttacctctgaagggataacttttagctgccaggaaaattcacatatgtataatcccacattgcctccataaatctaggtagytatggcagtgattcagaaaagtgaaggcatcgctttttgactttgaatgtctccatttctcccagctggtatgacagtgattttcctttctcccttattt

SEQ ID NO: 522412 - DNA, 201 bp, Homo sapiens
ttctactgacaaagaaaaaaatatatatatatataatacacacacacatatatatacacacatatatatacacatatatatatacacacacatatatatacacacacacacacacacacatatatatatatatacacacacacatatatatatatatcttccctaatgcacctcaaattctaccatggaaaaacaaaaagg

SEQ ID NO: 522413 - DNA, 201 bp, Homo sapiens
tctactgacaaagaaaaaaatatatatatatataatacacacacacatatatatacacacatatatatacacatatatatatacacacacatatatatacmcacacacacacacacacatatatatatatatacacacacacatatatatatatatcttccctaatgcacctcaaattctaccatggaaaaacaaaaagga

SEQ ID NO: 522414 - DNA, 201 bp, Homo sapiens
gtgccatgtaaaagtaagtctggacttaagagtttaaaatttttaaacatcagtttccaagtttatatcatattaatacatttcagtggataatttatttwaaaaaaaaaactatgcctaaatatcccttatttgtaatattcagtatcaaattagagcattttgaccaactgaaacatataacgttttcatctcctttcc

SEQ ID NO: 522415 - DNA, 201 bp, Homo sapiens
cagatacttatcaactgctcatggacagaagtcgtagttggggaggatggctgcaaaggcacaatgacatttggcttccagaaattctaagtactgtgccstgagtcaggtcaggtcagaagcactggggatggaaccgccttgcattggtctcccagccccaactttgtatttactgagttgtgtgctgcaagatgcagc

SEQ ID NO: 522416 - DNA, 201 bp, Homo sapiens
cacgatcttggctcactgcaacctccgcctcctgggctcaagcgattctcctgccttggcctcccaagtagctgggattacaggcatgtgccaccgcgccyggctaattttgtatttttagtagagacggggtttctccacgttggtcaggctggtctcgaactcctgacctcaggtgatccacctgactcggcctcccag

SEQ ID NO: 522417 - DNA, 201 bp, Homo sapiens; identical to SEQ ID NO: 213286

SEQ ID NO: 522418 - DNA, 201 bp, Homo sapiens
tgtccaagcattacttatggtcgtggtggtgatggtggtggcagtggtgggggtgatggaaaagtcattctggaaccttctgttctcttctcactgtcccygggactgagaaagtttttccaaacaaaagcatcatgtcttgctcctcttactcgaatgaggcattcctttctcttatcccaggagggttttctaccaaat

SEQ ID NO: 522419 - DNA, 201 bp, Homo sapiens
tctctccacgctgggaggactgcagcaagatgaagccacctcttctccagatgccactcagaggtgagcagaaggccaggcaaagcatgtggctctgaacragtccgtgagcatgacgctcgctgactgtaatagagttgaaaggaaccccaactctggtgtcgggaacctgatgccaggaagctccatgtgtctgtggtc

SEQ ID NO: 522420 - DNA, 201 bp, Homo sapiens
attaacatttaaaaagtttgtagcctaggagcaataggctataccctgtaatctataggctataccctattgtgtaataggatagaccatctaggtttgtrgaagtacgctctgtgatgttcttacagtgatgaaatcatctaacaaggcatttctcagaacatatccccgtcattaagcgacacatgactgtatacacaa

SEQ ID NO: 522421 - DNA, 201 bp, Homo sapiens
ttaaaaagtttgtagcctaggagcaataggctataccctgtaatctataggctataccctattgtgtaataggatagaccatctaggtttgtggaagtacrctctgtgatgttcttacagtgatgaaatcatctaacaaggcatttctcagaacatatccccgtcattaagcgacacatgactgtatacacaagaaagtgt

SEQ ID NO: 522422 - DNA, 201 bp, Homo sapiens
tgtgtgttttcccacattctccccccaaacaccattcattatgccatgcaaatgtaacagatgataataatagcggccaacatttactgagtgcttaatamgcgttgttctgaacaagtcacattaaattcattcaattctcacagcagtccaatgaagtgggtactctgttatatgaaggaggaaactgaggtctatgaa

SEQ ID NO: 522423 - DNA, 201 bp, Homo sapiens
tggctgtaggatctttggctattggtttaatttctctgatttttgcactttcttcctttgcaaaatagaaattaatattgtcccaccaactgtatgggctrctagagcaatgaatgagcaaacgtgtgtgaaagtgaatgatgactcaaagcactatacgaatgtccaagcattacttatggtcgtggtggtgatggtggt

SEQ ID NO: 522424 - DNA, 201 bp, Homo sapiens
tctaaggcctccgctgatctgacaggaggcggagctcaggcggtaatgctcactcgctggccgctcacctcctgctgtgcagcctgcttcctaacaggccrtggactggtactggtccctggcagggggttggagacccctgtttagagcactgttgaaagacagaacactcacgatttcactcaccatggagacatcagt

SEQ ID NO: 522425 - DNA, 201 bp, Homo sapiens
acgggggtctcgctatgtttgccagactgctctcaactcctgagctcaagcaattctctcaccttgggagcctgacgaagagcttgcaccagcccattgtrgttgttctttattcccaggacctttggggatcttctagtcactgccatattgtgttttttgttgttgttgcttgtttgtttgttttttgaaacagagtct

SEQ ID NO: 522426 - DNA, 201 bp, Homo sapiens
acctccacccacttcctcatttcttcagtgagatgcctgacatagtatgtgtttaatgaatgaatgaatgatatggggttctcaccttatttttgctgctyattagctatttaatggctttggacaaatgacttagctggccggatctcaattttctcattttacaagtgaaaaaaattgaggtgagtataggttataaat

SEQ ID NO: 522427 - DNA, 201 bp, Homo sapiens
tacgcctataatcccagctacttgggaggctgaggccagaggatcacttaagcccaagagtgcaagaccagcctgggcaacacagtgagacccacccccccacactctcaatcaaaaaaataaaatgtaacagcaatctttttacttctctgttaaataacccttcatttgatgacacctgcctacatgataccagtccca

SEQ ID NO: 522428 - DNA, 201 bp, Homo sapiens
agaggttgcagtgagctgagattgtgccactgcactccagcctgggcaacagagctagactctgtctaaaaaaaataataataactatgatgaccactctraaaaaaatgtaatttttatcattcttctcagaaatctgtatgatgtaaaaataaatatttgtcagtagtagactatgacaatcctagaaaatacttacat

SEQ ID NO: 522429 - DNA, 201 bp, Homo sapiens
tgcaacccctatttggtacgtgttgaaggaaacctccaaccataaacatcaatctagggctgattaagaaaactctccctctcagcggaaggagcagactyaggttaattaatacctggatactgagctatttgttgggacgccacctttcatgtgtcaggctcatttagacggtcattacctatatttatcttttcagat

SEQ ID NO: 522430 - DNA, 201 bp, Homo sapiens
agcctgggcaacagagctagactctgtctaaaaaaaataataataactatgatgaccactcttaaaaaaatgtaatttttatcattcttctcagaaatctrtatgatgtaaaaataaatatttgtcagtagtagactatgacaatcctagaaaatacttacattaaaataggggagggagaagagaggagagtataaatat

SEQ ID NO: 522431 - DNA, 201 bp, Homo sapiens
atggtggtacgcctataatcccagctacttgggaggctgaggccagaggatcacttaagcccaagagtgcaagaccagcctgggcaacacagtgagacccwcccccccacactctcaatcaaaaaaataaaatgtaacagcaatctttttacttctctgttaaataacccttcatttgatgacacctgcctacatgatacc

SEQ ID NO: 522432 - DNA, 201 bp, Homo sapiens
tatcattcttctcagaaatctgtatgatgtaaaaataaatatttgtcagtagtagactatgacaatcctagaaaatacttacattaaaataggggagggaraagagaggagagtataaatatggcaacctgtcagtccaagagtctttattacaaataacagaagcttaccctggctgagtaaacataaaaggaatttagt

SEQ ID NO: 522433 - DNA, 201 bp, Homo sapiens
catggtggtacgcctataatcccagctacttgggaggctgaggccagaggatcacttaagcccaagagtgcaagaccagcctgggcaacacagtgagacccacccccccacactctcaatcaaaaaaataaaatgtaacagcaatctttttacttctctgttaaataacccttcatttgatgacacctgcctacatgatac

SEQ ID NO: 522434 - DNA, 201 bp, Homo sapiens
atatttgtcagtagtagactatgacaatcctagaaaatacttacattaaaataggggagggagaagagaggagagtataaatatggcaacctgtcagtccragagtctttattacaaataacagaagcttaccctggctgagtaaacataaaaggaatttagttagttggttagtttcaactttaattttagtttcaaggg

SEQ ID NO: 522435 - DNA, 201 bp, Homo sapiens
tggtctgtttgatttttcttttttttaagacggagtcttgctctgtcgcccaggctgaagttcagtggcacgatctcagctcactgcaacctctgcctccygggttcaagcgattctccttcctcagcctcccgagtagctggggttacaggtgcatgccaccatgcctggctaattttttgtattttttaatagagatgg

SEQ ID NO: 522436 - DNA, 201 bp, Homo sapiens
gtatctagactcccatggtttcctcattggtctgtttgatttttcttttttttaagacggagtcttgctctgtcgcccaggctgaagttcagtggcacgawctcagctcactgcaacctctgcctcctgggttcaagcgattctccttcctcagcctcccgagtagctggggttacaggtgcatgccaccatgcctggcta

SEQ ID NO: 522437 - DNA, 201 bp, Homo sapiens
tggcactaagtaatcttttacctccacaaatctgaaaagtacagattgaagaacatagaaagaaaccttcagggctgggtgcgatggttcatacctgtcaycccagcactgtgggaggccaaggcggggggatcatttgaggtcaggagttcaagaccagcctggccaacatagtgaaaccccatttctactaaaaataaa

SEQ ID NO: 522438 - DNA, 201 bp, Homo sapiens
ggacagcctcaaagtcccacatcagaatggactaaagtgaggggagggggctgggccctgtgctgggcaggagacaccctcccggagagaggcagggaggstggcctcatgacttctgctcttgtggctttgctctgaagtaggaggctgcaccctaaccctagcaagaatactgaaaagccgtgccgatgggatggcatg

SEQ ID NO: 522439 - DNA, 201 bp, Homo sapiens
aaaaaaaaaaaaaatagaaacagcatttcctgtagctggtcccagaggatggagtcacctcatctttcttggacagcctcaaagtcccacatcagaatggrctaaagtgaggggagggggctgggccctgtgctgggcaggagacaccctcccggagagaggcagggaggctggcctcatgacttctgctcttgtggcttt

SEQ ID NO: 522440 - DNA, 201 bp, Homo sapiens
cagaaagaattaacatcacagtcagtaagggctgatgtaagagcctcaggccacgagtaaacttctaacatcttctcctgttgattaagagttttgatttytacctgcaaggccgaagcaatggtcagggagtgtctgggtggccagctaggtgagggagtggatagcgtgaagggtcccacggaaggtggatctagtttc

SEQ ID NO: 522441 - DNA, 201 bp, Homo sapiens
aaaatgattaattttattgtaagtgaattgaacctcaatacttttttaattcaagcatttcaatgtgaatttggtatttttttaaaaaggaaatggtaagygataaaacatagttggcagcagctggcagcagcctttagaaacagcatttcctggccaggtgcagtggctcacacctgtaatcccagcactttgggaggc

SEQ ID NO: 522442 - DNA, 201 bp, Homo sapiens
ccaacatggcaaaaccccgtctctactaaaaacacaaaaattagctgggcgtgatggtgggcacctgtaatcccagctactcaggaggctgaggcaggagrattacttcaactcgggaggcggaggttgcagtgagccgagattgcaccactgcacttcagcctgggtgacagagtgagactccgtctcaaaaaaaaaaaa

SEQ ID NO: 522443 - DNA, 201 bp, Homo sapiens
ccaggtgcggtggctcatgcctacaatcccagcactttgggaggccaaggtaagaagatcgcttggagccaggtgtttgagacaagcctagacagcaatgkgagacccctgtctctatttaacaacaacaacaaaaaaaaattgaggagccagacacagtggctcatacctgtaatcccagcactttaggaggccgaggcg

SEQ ID NO: 522444 - DNA, 201 bp, Homo sapiens
ttttagtagggcagccccttccctgcaggagtgaggcatggtgacagcagtcccctatgtgcccccaagtcatctgagcattggtgtgcattaaggtactyaatcttccaacaataaataccataagtgcatgtctgttttattttatttatttatctttttgagacagagtcttgctctgtcgcccgggctggaatgcaa

SEQ ID NO: 522445 - DNA, 201 bp, Homo sapiens
gggtttcaccatgttggtcaggctggtctcaaactcctgacctcgtgatccacccgcctcggcctcccaaagcgctgggattacaggcgtgagccaccacrcccggccgtggaatggttttcttagcatatcctcctggggccgtggcgccccggctgtgggccgtggtggatgtcccttgtttcagtggtcctacaaagg

SEQ ID NO: 522446 - DNA, 201 bp, Homo sapiens
ggcccttgtcacaacctgaccatgctggcaccctgagcctgaatttctaagctcagggaactgtgagaataaattttgtagtttaaaagctacccaggacrggcatgatggctcatgcctgtgatcccagcactttgggaggccaaggcgggtggatcacttgagcccaggtgttcaagaccagcctgggtaacatagcga

SEQ ID NO: 522447 - DNA, 201 bp, Homo sapiens
cggggtttcaccatgttggtcaggctggtctcaaactcctgacctcgtgatccacccgcctcggcctcccaaagcgctgggattacaggcgtgagccaccrcacccggccgtggaatggttttcttagcatatcctcctggggccgtggcgccccggctgtgggccgtggtggatgtcccttgtttcagtggtcctacaaa

SEQ ID NO: 522448 - DNA, 201 bp, Homo sapiens
cttggcaactacctagctctgttaccctgtattgctgccgtagcaagttaccacatgcttagtgacttaacaccagtttattatattacagttctagaggwcagaagtccaaaatgaatctcagtagggtaaaaccaagctgttggcagagctgtgtttcttcaggaaacaccaggagaaaatccttcttgccttttccag

SEQ ID NO: 522449 - DNA, 201 bp, Homo sapiens
tacagacctacatacataaaaaggatattacaaagaatgttatggccataaattcagcagctgaaatgaaatggataaattctatggaaaacacaaacaascaaagatcacacagaagaaatggagaatctaggccaggcgcagcggctcacgcctgtaattccaacactttggaaggctgaggcaggcagatcacttgag

SEQ ID NO: 522450 - DNA, 201 bp, Homo sapiens
aaaatacaaatgaccaatatcagaaatgaaagacggaacatcactacagacctacatacataaaaaggatattacaaagaatgttatggccataaattcarcagctgaaatgaaatggataaattctatggaaaacacaaacaaccaaagatcacacagaagaaatggagaatctaggccaggcgcagcggctcacgcctg

SEQ ID NO: 522451 - DNA, 201 bp, Homo sapiens
ttaacaaagcagctgctgtagtatagcggctgagtatagattctgtatacagtgtagattatagattctgtatcgagtgtagattctgtgtagtataaaasgggtccccaaccgccgggccatggaccagtaccagtctgtggcctgttaggaaccgggccgcacagcaggaagtgagcagcgggtgagcaagcaaagctt

SEQ ID NO: 522452 - DNA, 201 bp, Homo sapiens
agttgcagaaaaacaagctcaggcctcccattgattctgcattatggtgaattgtatataattatttcattatgtattacaatgtaataacagaaataaartgtacgataaatctaatgcacttgaatcctcctgaaaccatccccccacccccagttcatggaaaaactgtcttccacgaaaccactccctcgtgccgaa

SEQ ID NO: 522453 - DNA, 201 bp, Homo sapiens; identical to SEQ ID NO: 213314

SEQ ID NO: 522454 - DNA, 201 bp, Homo sapiens
aattggttccaccaggataatccatgataatggtcacacagaggagactatatccccacacttcaattgtgctcagcctcccctcttcgatctatgcattytctcgttctcctggtccacagaggtgcgggccaggaatctagctcctggagaatggcggcagagctcctggagctcactccttccaatccatgactgcca

SEQ ID NO: 522455 - DNA, 201 bp, Homo sapiens
caccggctttgagttgcagcactcaccatgtgattccattctcttgtgtgtccatcgcagccctgtgggcctcagagtccatttccttaagcctgtgctcyagctccttgtgatggcttcacaggccccccacaggctcagttttcccctgagactcacccatctgggaaattcctatatgggcgtcctgtaacccactgc

SEQ ID NO: 522456 - DNA, 201 bp, Homo sapiens
accggctttgagttgcagcactcaccatgtgattccattctcttgtgtgtccatcgcagccctgtgggcctcagagtccatttccttaagcctgtgctctwgctccttgtgatggcttcacaggccccccacaggctcagttttcccctgagactcacccatctgggaaattcctatatgggcgtcctgtaacccactgca

SEQ ID NO: 522457 - DNA, 201 bp, Homo sapiens
atcgcagccctgtgggcctcagagtccatttccttaagcctgtgctctagctccttgtgatggcttcacaggccccccacaggctcagttttcccctgagmctcacccatctgggaaattcctatatgggcgtcctgtaacccactgcaaacttcaaacactcctattcaactcaacatacacgtttttaggatcttaaat

SEQ ID NO: 522458 - DNA, 201 bp, Homo sapiens
ctctccaacgctcctgaattttacaaatgagggaagtgaagctcagaaaggttgagctgcttacccaaggtcacacagctagcttacgggcgggggtagawctagaagcctgatgttcaccggaactcatttctccatgccacattcttaacaaatgtaggttttgtcaggatttagactaactcatctgctaaacttcaa

SEQ ID NO: 522459 - DNA, 201 bp, Homo sapiens
caactgccatgcgccagcaggcttcagataagcctggaaagaaatggaatggaaagaactttctggtcaggagcacctctctccgcagggaagtggccacyccaagttaaaacgtgtgctggctgggcacggtggctcatgcctgtaatcccagcactttgggaagccgaggtgggcagatcacctgaggtcaggagtttg

SEQ ID NO: 522460 - DNA, 201 bp, Homo sapiens
accgccattttcctcagtctctcctatcttttagagcagcggtccccaccctttttggcactaggaactggtttcatgggagacagtttttccacaggtcrtgggggacggtttggggatgattcaagcattacatttattatgcactttattgctattattattacatactcaccataatgtagaatcagtggaagccct

SEQ ID NO: 522461 - DNA, 201 bp, Homo sapiens
ggcctgccatgcgagggcagcctccccttcttggaggcccgcttcgaaccagtctcctagatctgcacaaaccctccctccagcctgggcatgaccatgtygtaggccgtgcacacaatacagcctaccctagggcttgtccccgctgtacgtggacaccccttccctggactcactctgcaaaggggcctttaactgagc

SEQ ID NO: 522462 - DNA, 201 bp, Homo sapiens
atgaacaaaataagctggtaactgcctctccctcttagcaaatgcttgtccgcaccccgccctctcccaacctgctcttcctctggccttgagcttggggrcagtttgatgcacaactgccatgcgccagcaggcttcagataagcctggaaagaaatggaatggaaagaactttctggtcaggagcacctctctccgcag

SEQ ID NO: 522463 - DNA, 201 bp, Homo sapiens
ggcgcccccttgaggttgctcctagagaattaaaagagtcgaactggcccatgatggatgttgataaccaccgggacaggtaaactgatcaatgggaagaragctatcgtgacagtttagccagccaacttctgaccagctggattgtatgtgtagacagaaggggattggcgggtcacagcctagaggaaggggtgtctt

SEQ ID NO: 522464 - DNA, 201 bp, Homo sapiens
gttctgtatttcctgcatttccatcatcctagtaaaaagacaacaacccacaggattggaatggttttcttttgtttttttgttgttgttgttgttgttttgagatggagtctcgctctgtcacccaggctggagtgcaatggcgtgacctcagctcactgcgacctccacctcctgggttcaagcgattctcctgcctca

SEQ ID NO: 522465 - DNA, 201 bp, Homo sapiens
ggcaacagaggaagaccccatctcaggaaaaaaaaaaaaaaaaaaaaaaaaaacgggataggccgccatgttgctgtgctgaccataatggaaacgtgaamgcaagattcctcagggggcctgccagaggctaattcagatcctgtggtaattccagggagtaggccagtgacagctgtgtcagatttggttcagaaacag

SEQ ID NO: 522466 - DNA, 201 bp, Homo sapiens
ggttctgtatttcctgcatttccatcatcctagtaaaaagacaacaacccacaggattggaatggttttcttttgtttttttgttgttgttgttgttgttttgagatggagtctcgctctgtcacccaggctggagtgcaatggcgtgacctcagctcactgcgacctccacctcctgggttcaagcgattctcctgcctc

SEQ ID NO: 522467 - DNA, 201 bp, Homo sapiens
taactgaattttttttttttttttttgagatggagtcttgctctgtcacccaggctggagtgcagtggcatgatctcggctcactgcaacccctgcctcgygggttcaagcaattcttctgcctcagcctcccgagtagctgggattacaagtgtgcaccaccgcgtccagctaatttttgtattattagtagagacgggg

SEQ ID NO: 522468 - DNA, 201 bp, Homo sapiens
agaggttctgtatttcctgcatttccatcatcctagtaaaaagacaacaacccacaggattggaatggttttcttttgtttttttgttgttgttgttgttgttttgagatggagtctcgctctgtcacccaggctggagtgcaatggcgtgacctcagctcactgcgacctccacctcctgggttcaagcgattctcctgc

SEQ ID NO: 522469 - DNA, 201 bp, Homo sapiens
cagcttaactctttctctctctgggcacgagctgaactgtgctgtgccctggctccccctgtctacctgcaaaatggacagctttggctctttctctgggygccagcatgcctgtacagtgtcagcagggcaataatagcttttacaaacaacagtggcttagagccaaatgatgagccttccgatgttatggctatatgg

SEQ ID NO: 522470 - DNA, 201 bp, Homo sapiens
ggagaaagcagctgcagaggttctgtatttcctgcatttccatcatcctagtaaaaagacaacaacccacaggattggaatggttttcttttgtttttttkttgttgttgttgttgttttgagatggagtctcgctctgtcacccaggctggagtgcaatggcgtgacctcagctcactgcgacctccacctcctgggttc

SEQ ID NO: 522471 - DNA, 201 bp, Homo sapiens
ctgataaagtagtggacacctttcagctccagcaggcactctggggagcctgcagaaccagcacagagagtgagcccaccacgaccttcccatccatcatrgactgcttgccatccagttcactgtggcagtgctgagggctcatgtggtccaggtccccattctgcagcttctccatcacccccctcctcctggtgcttc

SEQ ID NO: 522472 - DNA, 201 bp, Homo sapiens
aggtacatgagacatcctatgcgtcccatgcaaggtaatttggacactaaggaatcacgaagtagaagtggctcacagccagcagtggtgctctcctttgrtacgggccagaatcagcctgggagattgtaaaatacggacgtccaggtgtgcagggccacagtgctgggagaagccagagcagccccttggagagagaaa

SEQ ID NO: 522473 - DNA, 201 bp, Homo sapiens
tcagcctcccaagtagctgggactgccggtgtgcactatcatgcctggctaattttttcattttatggtagagtcttgttatgttgcccaggctagagtcrtacgtataagaagaattaaatgacataatacatctgatgcatgtagcatagtgctggcacctgagaagcactcagtaaatgtaaatgttagcttctattt

SEQ ID NO: 522474 - DNA, 201 bp, Homo sapiens
taacagagatgtctgaaatatgctcagaatgtgcttttagggaggcagctcccaagtcttgtcttgtcttttcttttctttctttttttttttttttttttagatagaggcagagtctcactctgtcgcccagggtggagtgcggtggcacaatctcagctcactgcaacctccgcctcacagattcaagcaattctcatg

SEQ ID NO: 522475 - DNA, 201 bp, Homo sapiens
tgtggtccgtggaccagcagcctcacgaagctcgttagaagcgcaggatctcagcccctaccccagagccactcgatcaaaatctgcattttaaaatcctsaggtgattcatatgcacgttaaaattcaaaaaggactagttgagacagcccctaaggtacatgagacatcctatgcgtcccatgcaaggtaatttggaca

SEQ ID NO: 522476 - DNA, 201 bp, Homo sapiens
cattgattctgcattatggtgaattgtatataattatttcattatgtattacaatgtaataacagaaataaaatgtacgataaatctaatgcacttgaatyctcctgaaaccatccccccacccccagttcatggaaaaactgtcttccacgaaaccactccctcgtgccgaaaacgttggggacggctgtagtacagtac

SEQ ID NO: 522477 - DNA, 201 bp, Homo sapiens
ctccccattggttgcattaccgcttgagctctgcctcctgtgagatcagcagcggcattagattcttacaggagcacaaacccaattgtgaactgcgcgtktgagggatctaggttgcaagctccttatgagaatcctgtgtctgattatctgtcactgtctcccatcacctccaaatgggaccatctagttgcagaaaaa

SEQ ID NO: 522478 - DNA, 201 bp, Homo sapiens
tcccctgcaataccaacagtcagtgattcagagccttgctactcaaagtgtggtccgtggaccagcagcctcacgaagctcgttagaagcgcaggatctcrgcccctaccccagagccactcgatcaaaatctgcattttaaaatcctgaggtgattcatatgcacgttaaaattcaaaaaggactagttgagacagcccc

SEQ ID NO: 522479 - DNA, 201 bp, Homo sapiens
ttcatattcagttcaacgaaggattccactttttgtgtgtgtgtgagggaggaagcggtaacctacacaggtgattgaaagcccatctgtagcataatcaytgggctgccattctgcaaacatctgcagtgccccaaactaagtttgtgaccttacatttcagagacccctgttattcatgcttttatttatggaagtagc

SEQ ID NO: 522480 - DNA, 201 bp, Homo sapiens
attcacacatatcacccaccctcctctctctggtttccaccttcaggtataacctaacccactctaagcttgatgttgcctgtggcctaggacccacccayagggcggaagcctctccccacacaggccatccgccaacaagtaagaattgcccacactgaccaggaatagtacgaagtagttactgggatcctctgaaag

SEQ ID NO: 522481 - DNA, 201 bp, Homo sapiens
ctcacttttaaaagtctgtgaggtggacatggactggcttcgtcggtttgccaaggtttaattttgtgccttaaatgggcacttgagagctttgtaaaaaycgatgtgtttgctggccccgtgtttacgggcctttgtgatctccgcgttcgcatccaatctggcccttgggctccgagaaggtacacgtgtgtgtagggc

SEQ ID NO: 522482 - DNA, 201 bp, Homo sapiens
ttaggatcacccaggggatgagtctgttccaggagagcaggacagaccaagtgtgggggatgaaatcctaagcgccactaggccaaggtgggtaatgagcygggagcagtggcggagcagtgcttccttccactcctgctgaggagcgctgggaaattatgttacctaacctccttgaatatatttccttatctgaaaaat

SEQ ID NO: 522483 - DNA, 201 bp, Homo sapiens
tgcacacgaatcagtttgtgaacacagcccctgggctgcaactgcaggcaccactgagaaaggcttctggagagtctggcttcccaaattggctaaagaawctcatgttatccatgtgatagtaataaatcgattcacacagtgagccctgcagattagctttccttgaagccagagttctgaggcaagggatccagcgtg

SEQ ID NO: 522484 - DNA, 201 bp, Homo sapiens
tgagaatgcctagcaggtgaatgtgcacacgacgatagggcaggctgcatgggaaccagctggagggtccatggtaggaatcgtggcaactcccaggcccrcagagctggcttccaggtgagagcacggcagatgggaacccaaagaggacatcccaggcgagggcaggtaccagcaggaaaccaaaagggagcccccggg

SEQ ID NO: 522485 - DNA, 201 bp, Homo sapiens
agagagagagaacccttaaaacacaacaatgagaaaacaaccaaccacattaaaaaatgggcaaaatggccgggcgcggtggctcacacctgtaatcccarcactttgggaggccgaggtgggcggatcacgaggtcaggagatcgagaccatgctggctaacacggtgaaaccccgtctctactaaaaatacaaaaaatt

SEQ ID NO: 522486 - DNA, 201 bp, Homo sapiens
taggcaacccaaacagagcctccttttttttaaacccaaggtgacggaccaatgaggaatagcccccaaaattgacattagacacaaaatacctgtaggarcaaggacaggggcagcctgcctgccagtgactaggtgagaaggagcagacacctggtgctggcttactgttcctgcatgtgacatgtactttccttggta

SEQ ID NO: 522487 - DNA, 201 bp, Homo sapiens
aggcatggtggcaggtgcctgcaatcccagccactcaggaagctgaggtgggagatcacttgaaccccagaggtggaggttgcaccactgcagtccagccrggtggcagagcaagactcgtctagaaaaaaaaaatgtatatataaagagagagagagcgcgagcgcgtgcaagagagcaagagagagagaacccttaaaa

SEQ ID NO: 522488 - DNA, 201 bp, Homo sapiens
gaattgtaacactcacggcgcaggtccgcagcttcattcttgaagttggtgagaccaagaacccaccaattccggacacagctgtcttttgggcattgtcyggaaggccggctgtagtattctgcctacagatacttatcaactgctcatggacagaagtcgtagttggggaggatggctgcaaaggcacaatgacatttg

SEQ ID NO: 522489 - DNA, 201 bp, Homo sapiens
ctctgtctcaaaaaaaaaaaagaaaagaaaagaaaaagaaaaagaaaaaaaggaaagaaaaaagaaaaattaaaaaaaattagacttttttttttttttttggctaatctccagcatattaccatctcgtcagaagagggcttactaagaccagatcttaggcaacccaaacagagcctccttttttttaaacccaaggtg

SEQ ID NO: 522490 - DNA, 201 bp, Homo sapiens
cgaaccagtctcctagatctgcacaaaccctccctccagcctgggcatgaccatgttgtaggccgtgcacacaatacagcctaccctagggcttgtcccckctgtacgtggacaccccttccctggactcactctgcaaaggggcctttaactgagcacctctgctctgtgccctcacaggtctcccaggcagccgcggac

SEQ ID NO: 522491 - DNA, 201 bp, Homo sapiens
cagcaagatgaagccacctcttctccagatgccactcagaggtgagcagaaggccaggcaaagcatgtggctctgaacgagtccgtgagcatgacgctcgytgactgtaatagagttgaaaggaaccccaactctggtgtcgggaacctgatgccaggaagctccatgtgtctgtggtcttggggaacacaaatcagaggt

SEQ ID NO: 522492 - DNA, 201 bp, Homo sapiens
cagcctgggtgacagagcaagactctgtctcaaaaaaaaaaaagaaaagaaaagaaaaagaaaaagaaaaaaaggaaagaaaaaagaaaaattaaaaaaaattagacttttttttttttttttggctaatctccagcatattaccatctcgtcagaagagggcttactaagaccagatcttaggcaacccaaacagagcct

SEQ ID NO: 522493 - DNA, 201 bp, Homo sapiens
atctgcacaaaccctccctccagcctgggcatgaccatgttgtaggccgtgcacacaatacagcctaccctagggcttgtccccgctgtacgtggacaccycttccctggactcactctgcaaaggggcctttaactgagcacctctgctctgtgccctcacaggtctcccaggcagccgcggacctcctggcctactgtg

SEQ ID NO: 522494 - DNA, 201 bp, Homo sapiens
tattcttttcccctggagctctgggggtacaacctctccaaggaggcagaaaatatgcacggaaagttacatgagggtatatgaagcaaggaaggaatccrgcgtgatgtaagtcagtatcaccggacccatgttactagagcatctacatctcatacataccgataccaactgcaaattacatgtcagtccttggtctct

SEQ ID NO: 522495 - DNA, 201 bp, Homo sapiens
aggcaggaggctcacttaagcccaggaggtcaaagctgcagtgagccgtgatcatgccactgcactccagcctgggtgactgagcaagactctgtctccaraaaaaaaaagggtaaaatactgcagtggaattgcagaactgtaaagggaaatatgaacaataaaatcctctcacacaaatatcggacaacttttttttgc

SEQ ID NO: 522496 - DNA, 201 bp, Homo sapiens
gccgtgcacacaatacagcctaccctagggcttgtccccgctgtacgtggacaccccttccctggactcactctgcaaaggggcctttaactgagcacctstgctctgtgccctcacaggtctcccaggcagccgcggacctcctggcctactgtgaagctcacgtgcgggaagatcctctcatcattccagtgcctgcat

SEQ ID NO: 522497 - DNA, 201 bp, Homo sapiens
tgggattacaagtgtgcaccaccgcgtccagctaatttttgtattattagtagagacggggttcgccatgttggccaggctggtctcaaactcctggtctyaggtgatccgcctgccttggcctcccaaagtgctgggattacaggcctaagccaccgcagccagccctgaaactttgtgtcctttgaccaacatctctct

SEQ ID NO: 522498 - DNA, 201 bp, Homo sapiens
gacactcttgttcattgctgttgggaatgcaaaatgcaacagccactttggaagacagtttggcagttccttacaaaacgacacctcctcttcccatatgstatagcaattgcactccttggaattttcctgggttgaaaacttatgttcacacgaaaacctgcacacagatgtttatagcagctttattcataattgccc

SEQ ID NO: 522499 - DNA, 201 bp, Homo sapiens
gggctataaggcagttctcctttgcccaggcgttctcttctggcaaggaagataaattctgcaatagcatcttcacctgccacagacaccgccccaggagyccctgtgaggaccgggtgtcttcaagaatgaaggcttcttcaagagtcacttaggcacacacactgtcactaaaagaaagaggaaagtcaaagacaaatg

SEQ ID NO: 522500 - DNA, 201 bp, Homo sapiens
gacttttttacactccacatataagtgagatcatgcagtatttgtccagtgcatggcttatttcatttaatataatatccttcagggttacccatattttstcaagtaataagatttccttcttttttagggctcagtagtattctattgtgtaaatataccacatttgctttatccattcattcgctgatagacacttag

SEQ ID NO: 522501 - DNA, 201 bp, Homo sapiens
ctcaatatagttaaaatagcagtttttcccaacttgatctgtagattcaatgtgatcccaatcagaatcccagcaaattttcttcttttttttttttctttttttttttttctttttttttttcttgagacagagccttgctctgttgcccaagctggagtgcagtggtgccatcttggctctctgcaacctctgcctccc

SEQ ID NO: 522502 - DNA, 201 bp, Homo sapiens
tgcagggttattcaatcaatgtaaacttagaattaagaataactggctgggcgctgtggctcacgcctgtaatcccagcattttgggaggccaaggtgggyggatcacaggtcaagagatcaagaccatcctggccaacatggtgaaaccccatctctactaagaataccaaaataagccgggcgtggaggcacacgcctg

SEQ ID NO: 522503 - DNA, 201 bp, Homo sapiens
tttttgttgttgttgcttgtttgtttgttttttgaaacagagtctcactctgtcacaagcccaggctagagtgcagtggcacgatctcggctcactgcagyctcctcctcctgggttcaagtgattctcctgcatcagcctcctgagtagttgggattacaggcgcccatcaccaccatgcccggctaatttttgtatttt

SEQ ID NO: 522504 - DNA, 201 bp, Homo sapiens
atcttctagtcactgccatattgtgttttttgttgttgttgcttgtttgtttgttttttgaaacagagtctcactctgtcacaagcccaggctagagtgcwgtggcacgatctcggctcactgcagcctcctcctcctgggttcaagtgattctcctgcatcagcctcctgagtagttgggattacaggcgcccatcacca

SEQ ID NO: 522505 - DNA, 201 bp, Homo sapiens
gtgttctttatgaagctgctgtcttggcagcaatggtcacggaaaaggtcctatcagagagtgacgagtttgctcagtagacggtggggctggacattagygcagctgaggtctgaccacatcagcaggaccagaattaggtgagaatttaaagaggcactcggccgtgtctcatcgcacttgcaaggccctgagatagat

SEQ ID NO: 522506 - DNA, 201 bp, Homo sapiens
acagctcagtcacctgttttgatgcagggcctgttgcaggtgtgatgactagagcggggatcatgagtgctaaaggaatttgccaaggcagtcataggtttaaaaaaaaaaaagcagatttattagaaggaaagtatgttgcaaggaagcaacgggcagcacagcagaaaagggactgtctccaaaaaggcaggggctgga

SEQ ID NO: 522507 - DNA, 201 bp, Homo sapiens
tggttttttgttgttgttgttgttgttgtctttgttgttgttgttgagacagagtttcgctcttgttgcccaggctggagtgcgatggcacaatctcagcycactgcaacctccacctcccgggttcaagccattctcctgcctcagcctcctgagtagctgggattacaggtgtgtgccaccacgcccagctaattttgt

SEQ ID NO: 522508 - DNA, 201 bp, Homo sapiens
atcacaccactgcactccagcctggacagcagagcaagactccatctcaaaaaagagaaaagaaaagaagaaaagagaagaaaaaaagaaaaaaaaaaaaaggaaagaaaaagaaaagaggtccagagttgtcatttgatgaaggaaggatacaaacccagaaccttgggtactatcattacactacagtgcctcacccac

SEQ ID NO: 522509 - DNA, 201 bp, Homo sapiens
gatcacaccactgcactccagcctggacagcagagcaagactccatctcaaaaaagagaaaagaaaagaagaaaagagaagaaaaaaagaaaaaaaaaaaaaggaaagaaaaagaaaagaggtccagagttgtcatttgatgaaggaaggatacaaacccagaaccttgggtactatcattacactacagtgcctcaccca

SEQ ID NO: 522510 - DNA, 201 bp, Homo sapiens
gtggctcatgcctgtaatcccagcactttgggaggctgaggcgggcagattatctgaggtcaggagttcgagaccagcctagccaacatggtaaaaccccrtctttactaaaaatacaaaacttagctgggcatggtggcatgctagtcccagctactcgggacgctgaagcagaagaatagcttgaacccaggaggtgga

SEQ ID NO: 522511 - DNA, 201 bp, Homo sapiens
tttgattacattctttttttttttttttgagacacggtctccctctgtcacccaggctggagtgcagtgtcgtgatcttggctcactgcagcttccgcctkcccggctcgagctatcctcccacttcagcctcccaaatagctaagactaggttttgccatgttgcccaggcggtctctaactcctgagctcaaacaatcc

SEQ ID NO: 522512 - DNA, 201 bp, Homo sapiens
tgagccgagatcgtgccacggcactccagccggggtgacagagcaagactctgtctcaaaaaaaaaaaaaggagagtctctcattagaaattagctggtgwttggttaggctcacgtttcattttactgttgacattgagttgggtttagtttgcttaggtcagaatcctaggcaaaacagccatctcagcctctggccac

SEQ ID NO: 522513 - DNA, 201 bp, Homo sapiens
gcaaaaagcaaaacaaaagcaatactaataataaagagcccattaagaatataggcagaagaggccaggcgcggtggctcacacctgttatcccagcactktgggaggccgaggcggacggatcacctgaggtcaggagttcgagaccagcctggccaatgtggtaaaaccctgtctactgaaaatacaaaaatgagctgg

SEQ ID NO: 522514 - DNA, 201 bp, Homo sapiens
tcttccttcctcttttaaaagcaattttctttgaatagtctttcggtttcatccatgcttctaatctagaatgaaaactacgtgactacgttttttctttytctttttgcttttgttttttcagaatcgagccattaagttgttacttaatctcaacaaaggccgatgacaatgtctaatattctaggaatgtgccaagtc

SEQ ID NO: 522515 - DNA, 201 bp, Homo sapiens
cctattgctttcttgcaacatatttccatgcttttgctaataaatctgcatttctgtacctatgactgtcttggcaaattctttttactgcccgtgccackggccccagacagtaaccactcgtgacacaagggcattgactgggaagctttacagagagtgagtcttcctggtgcaggggtggagggtaattttgagact

SEQ ID NO: 522516 - DNA, 201 bp, Homo sapiens
ttgcgctttaaaaccattggaaccatggtttgcaaaatccttccatttctggtgctccatggttcattaacaatgccatgttctggtacattttctaaatktattcactgtctatacccggctttgtattgccttcctctatcagctgctgacttcagcaaaggaagtatttcttttttttgttttgttttttgttttttg

SEQ ID NO: 522517 - DNA, 201 bp, Homo sapiens
ctcaggtgatccacccgtctcagcctcccaaaggaatcacattttaatatgagatttggatatccaaatatccaaaccataagaggctgtaagagactgcrtttgtctgattgactttagaagggacctaatttataaatgtttaaactttgcgctttaaaaccattggaaccatggtttgcaaaatccttccatttctgg

SEQ ID NO: 522518 - DNA, 201 bp, Homo sapiens
agacagggtttctccatgttggtcaggctggtctcgaactgctgacctcaggtgatccacccgtctcagcctcccaaaggaatcacattttaatatgagayttggatatccaaatatccaaaccataagaggctgtaagagactgcgtttgtctgattgactttagaagggacctaatttataaatgtttaaactttgcgc

SEQ ID NO: 522519 - DNA, 201 bp, Homo sapiens
gacacgccgcctttaagaattgagaattgtaacactcacggcgcaggtccgcagcttcattcttgaagttggtgagaccaagaacccaccaattccggacmcagctgtcttttgggcattgtctggaaggccggctgtagtattctgcctacagatacttatcaactgctcatggacagaagtcgtagttggggaggatgg

SEQ ID NO: 522520 - DNA, 201 bp, Homo sapiens
ggctcgggacctgcagcccaccatgcctgagcctccccaccaccatgggctcctgcacggcctgagcctcctggacaatcaccgccccctgctccatggcrcccagtcccatggaccacccaagggctgaggagtgtgggcgcatggcacgggactggcaggcagctccacctgcggccccagatgggatccactaggtga

SEQ ID NO: 522521 - DNA, 201 bp, Homo sapiens
ctgctctgggtcagatctgagggttctctgtctgcctcgagctccccatctccccaaggtctgatatggagtccccaggcttttggggaaggctgctgagyttgaggagaggggaaccatgggacagggtggatggggactctgggagcaatgccagggagtccccacacctctagacatgtctctggttgtgctttcagg

SEQ ID NO: 522522 - DNA, 201 bp, Homo sapiens
catcaacaaataagtcaatagcaaaaagcaaaacaaaagcaatactaataataaagagcccattaagaatataggcagaagaggccaggcgcggtggctcrcacctgttatcccagcactgtgggaggccgaggcggacggatcacctgaggtcaggagttcgagaccagcctggccaatgtggtaaaaccctgtctactg

SEQ ID NO: 522523 - DNA, 201 bp, Homo sapiens
agtgaaaggcattgctgagcacctaatctatacttgaagggtcctgggagagaaatgtgaaggcgacagtctcctccgtatggctcagggaagacttctcrgagttgtgagctatggctggctctgagctgatagtggaggaggaaaggccggtgtgagctaatcacggctcgtgtggagcagctgggcagcgggaggagc

SEQ ID NO: 522524 - DNA, 201 bp, Homo sapiens
gtcccagctacttgggtggctgaggcaggagaattgcttgaacctaggcggagaaggtttcagtgagccgggatcacaccactgcactccagcctggacarcagagcaagactccatctcaaaaaagagaaaagaaaagaagaaaagagaagaaaaaaagaaaaaaaaaaaaaggaaagaaaaagaaaagaggtccagagt

SEQ ID NO: 522525 - DNA, 201 bp, Homo sapiens
gatctctccatcaacaaataagtcaatagcaaaaagcaaaacaaaagcaatactaataataaagagcccattaagaatataggcagaagaggccaggcgcrgtggctcacacctgttatcccagcactgtgggaggccgaggcggacggatcacctgaggtcaggagttcgagaccagcctggccaatgtggtaaaaccct

SEQ ID NO: 522526 - DNA, 201 bp, Homo sapiens
aacccgggaggcggaggttgcagtgagccaaggtcatgccattgcactctagcctgagtgacggagtgaaactccgtctcaaaaaaaaaaaaaaaaaaaaagaagaggtgaaactaacgagttggaaagggaggtggaaaagctaaggaaagaattggagggaggtgggagcaccactggaaagagtggagagtggcacac

SEQ ID NO: 522527 - DNA, 201 bp, Homo sapiens
gtagcatgtacctagctagaggctgatgtgggaggatcacctaaacctgggaggttgaggttgcagagagccgagattgcggcgctgcactcgagcctggrtgacagagtgagaccctgtcttttaaaaatttatttagactgggtgcggtgctcatgcctgtaatcccagcactttgggaggctgagagggggagtggat

SEQ ID NO: 522528 - DNA, 201 bp, Homo sapiens
ataccaccacacctgaatcattttgtatttttagtagagacagggtttctccatgttggtcaggctggtctcgaactgctgacctcaggtgatccacccgyctcagcctcccaaaggaatcacattttaatatgagatttggatatccaaatatccaaaccataagaggctgtaagagactgcgtttgtctgattgacttt

SEQ ID NO: 522529 - DNA, 201 bp, Homo sapiens
agaatattttaaggccagcacagtgactcacacctgtaattccagcactttgggaggccaaggcaggaggtttgcctgagcacaggagcttgaaaccagcytaggcaacatggcaaaaccctatctcttcaaaaaaaaaaaaaaaaggtatgtatatatatatgtgtgtgtgtgtgtgtgtgtgtatatatatatgtatac

SEQ ID NO: 522530 - DNA, 201 bp, Homo sapiens
cattgaggaggacaaggtcacgttgtcaggttcacaactataccaaatgccctgcttggggtcaggttccagcccatgctgaggttcgaggggagtgggcrgatgggcaggtagctgaaggaacactcgtggggccataagcaggtgaaatgtagttttactcaacaggtctctcagcagctgactcataccagctctctc

SEQ ID NO: 522531 - DNA, 201 bp, Homo sapiens
ggcctcaccgcaggacctggtgcctttggggttccccttttctgagacccccaaagagccttcctcaaataaatcaaaggctttagcgtctaaaacttgtycctgaagaaggctttctgaacccgctttggaagtaaaaagcaaaattcctctttgcacttctgtgtaatcgtcctcattctccttgaggcagtgcggata

SEQ ID NO: 522532 - DNA, 201 bp, Homo sapiens
acacctgtagtcccagctacttgggaggctgaggcaggaggattgcttgagcccaggagttgaggctgcagtgagccctgatcctgccactgcactccagyctggatgagagagtgagaccctgtctcaaaataattaattagttaattaattaacatttaaaaagtttgtagcctaggagcaataggctataccctgtaa

SEQ ID NO: 522533 - DNA, 201 bp, Homo sapiens
taggatcacccaggggatgagtctgttccaggagagcaggacagaccaagtgtgggggatgaaatcctaagcgccactaggccaaggtgggtaatgagctrggagcagtggcggagcagtgcttccttccactcctgctgaggagcgctgggaaattatgttacctaacctccttgaatatatttccttatctgaaaaata

SEQ ID NO: 522534 - DNA, 201 bp, Homo sapiens
catttgattagcatttttcagtttgctaaaagcattcatgtaccctgtccacttgatctttacagaaatgccaggaggcagggatttttttttttttttttgagacggagtctggctctgtcgcccaggctggagtgcagtggggaggcagggatctttatccccattcttgaaggaggagactgtggttcaaaggagaat

SEQ ID NO: 522535 - DNA, 201 bp, Homo sapiens
cttggccaaaagagagatatatactgtcaggcactacataaaaactgttttagtcagcgacagactgcatatatgacggtggtcccataagattctagtastgtatattttttgacccggcatggtggctcacgcctgtaatcccagcactttgggaggccgaggtgggtagatcacttgaggtcaggagttcaagaccag

SEQ ID NO: 522536 - DNA, 201 bp, Homo sapiens
gcatttgattagcatttttcagtttgctaaaagcattcatgtaccctgtccacttgatctttacagaaatgccaggaggcagggatttttttttttttttttgagacggagtctggctctgtcgcccaggctggagtgcagtggggaggcagggatctttatccccattcttgaaggaggagactgtggttcaaaggagaa

SEQ ID NO: 522537 - DNA, 201 bp, Homo sapiens
tcaggaaatattctcctaaaatgtcatttttaatatctattttcccccgatgtacaataattaaccagtctcctatccttagacatttcagttatttccarttgtgagtctttttttatttttccttttttttgagatggaatctcactctgtcacccaggctggagtgcagtggcacgatctcggctcactgcaacctcc

SEQ ID NO: 522538 - DNA, 201 bp, Homo sapiens
tctgtttccacctcatcattgttttcctcattctaattttttttttttttttttttttgagacaaggtcttgctctgtctcccaggctggagtgcagtggygcaatctcggctcattgcaacctccacttcccaggttcaagcgattctcatgctttagcctcccctagtagctggtattgcaggcacgcgccaccgcgcc

SEQ ID NO: 522539 - DNA, 201 bp, Homo sapiens
gataatttcaacatccgtggggtgggtgtgctcacaattcctacaagggctgcccttaggctgagattaattttgtgagcacaggctttatttgctgagtrttgacagatcaatatattgttgggcctgcgttctatagactactgaaaacatgagtgcaggaagagaggaatttcaggtgatggatgcactaaaagttga

SEQ ID NO: 522540 - DNA, 201 bp, Homo sapiens
gggaattacccacatttccggagctagaaaggagcagattcaggctccagggcctgcacctgtccactcacctctcttctgttcctcccgcctggaagggrtttaaaaacagcagtccagcagctggggcttatcggagaccaggagcattggaagatgaagctggccagatgcgcaggcaggagccagggtccgggaagc

SEQ ID NO: 522541 - DNA, 201 bp, Homo sapiens
gggaggctgaggcaagggaatcgcttgaatccgggacgcggaggtttcagtgagcccagatcacgccactgcactccagcctggcaacagagtgagactcygtctcaaaaaaaaaaaaaaaaaagtacatatatgacattgatcattaaatagagaaaatccgacaagcggttatggcaggtctgagctgagcagagtgta

SEQ ID NO: 522542 - DNA, 201 bp, Homo sapiens
atatatggtaatgtgttgtagccacaatagaaaccaatacaaccattcctctattttgaagggaagaaagcaggaggtgaagggaattacccacatttccrgagctagaaaggagcagattcaggctccagggcctgcacctgtccactcacctctcttctgttcctcccgcctggaaggggtttaaaaacagcagtccag

SEQ ID NO: 522543 - DNA, 201 bp, Homo sapiens
gccataaatatatggtaatgtgttgtagccacaatagaaaccaatacaaccattcctctattttgaagggaagaaagcaggaggtgaagggaattacccamatttccggagctagaaaggagcagattcaggctccagggcctgcacctgtccactcacctctcttctgttcctcccgcctggaaggggtttaaaaacagc

SEQ ID NO: 522544 - DNA, 201 bp, Homo sapiens
tttaagccataaatatatggtaatgtgttgtagccacaatagaaaccaatacaaccattcctctattttgaagggaagaaagcaggaggtgaagggaattrcccacatttccggagctagaaaggagcagattcaggctccagggcctgcacctgtccactcacctctcttctgttcctcccgcctggaaggggtttaaaa

SEQ ID NO: 522545 - DNA, 201 bp, Homo sapiens
ttgacagctgctgtgtgccatatcctaggggtaggaatgcaaaataagtcagaggccatccctgctcctgaggcatttacaatccagtgagggagacagasgattataacacaacacagagcggggcacggtggctcacgcctgatatcccagcactttgggagaccaaggcgggcagatcacctgagattgggagttcaa

SEQ ID NO: 522546 - DNA, 201 bp, Homo sapiens
gcaggaggacagcaggtgtcttcgccaggagcatgtgtgtgggctggggtgagactcagttctcaggatccttgatggtggccaggtcctcacagcatcaytttcttctagcaatcatcactgtcctgtccccttctcccaccctccacggcagacacggggcccttagaaaccttttgccacctcctgttatcccctatg

SEQ ID NO: 522547 - DNA, 201 bp, Homo sapiens
acgagttggaaagggaggtggaaaagctaaggaaagaattggagggaggtgggagcaccactggaaagagtggagagtggcacacatgctgtggaaagccrcagtgatgacctggagacaggcctcaggaaggtgcacaggaaacaaaagaaacagatggagtgtcagaccgaagcaattagaagctgatagaaatccaga

SEQ ID NO: 522548 - DNA, 201 bp, Homo sapiens
gagagatggccacacacagactggcacaaggcctgcacgagcaggcacgtgggcacatacagacacacccaaggacacaccaacacatgtgcaggaacgcrtgcacagttctgctgagtgggggatgaaggggatgttccttggatttcaaagctcccaacttgtcgtgattctccttcccttgttgttgagttaaagttc

SEQ ID NO: 522549 - DNA, 201 bp, Homo sapiens
ccagaggtcaggcagcagtacaggcagcctggctttgcaggctgagccaagtcatcaacacaccttggaaagggctacgtgttacccttcaacacccacaygtccacgtgggccctggggtctctggcggcccggggcccatgtggacggagtgtctgctgctgcatctccccttcctcatcagtggtctctgtcttccca

SEQ ID NO: 522550 - DNA, 201 bp, Homo sapiens
atacaatctgtgtaagtttttcatggaacaacctcttccacggtgctttgtggatggcgagtcctcaggccagggatcgggcagcccagggcctgacttcscatcccacaggctcctggcagggccctacccaatctggatctgtcctgaatatatcacgaggaccagcatgacggtgaatctggccaacagacccaggtt

SEQ ID NO: 522551 - DNA, 201 bp, Homo sapiens
gctggtctcgaactcctgacctcaggtgatcgaactgctgacctcaggtgatccacccgcctcggcctcccaaagtgctgggtgagccacctgacctcagrtgagccaccgtgcctggccgaatttttgtatttttagtagagatggggtttcaccatgttggcccagctggtctcaaactcctggcctcaagtgatctgc

SEQ ID NO: 522552 - DNA, 201 bp, Homo sapiens
agaggagggttcctggccattacctgggtgtcccctggcagtgcagcaataccaggttctcaaacactaactggttggttaaggaggttaagttaccttcwgtcttctgcccttcagcttcctcaaggtggaaggtgggccttcagagccactgcaaggggtctctgaatacaggtgcacaacccaggaaacctgtgtaga

SEQ ID NO: 522553 - DNA, 201 bp, Homo sapiens
tctaagggaaagaataccatcatagccttattctttttctcacccatcagaagttcaaacaatctaaaactctattagaaaagtacatatatggttgggcrcggtggctcacgcctataatcccagcactttaggaggcagaggcaggcagatctcaaggtcaggagatcgagaccagcctggccaacatggtgaaacccc

SEQ ID NO: 522554 - DNA, 201 bp, Homo sapiens
gttgcttagaaccacacggtttgtagtaatttgttcccacagctctaggaagctgagacgtggcccagccacgccatcgctcaactaccttttcgtccccygtgtggtgatctgcccacttcagtagagctgcgatagactcgaatgacaatgaattcattctagactgtaaggtttatagactgtacaaacacaccagac

SEQ ID NO: 522555 - DNA, 201 bp, Homo sapiens
cactgggaagagaaaggaaaatataactgcattaagcagttctggggttgcagaagtaagaaagagtaatagtgccaattcagagagctttgcacgattcrtggaggaaaaacgtagctgaaatattcattattgtcttgaagttctgcttgtccccatttgcacaaaagcacaagtgcaaatatagacttcagtagggga

SEQ ID NO: 522556 - DNA, 201 bp, Homo sapiens
gctgatccctcaccctccctggaggagtggggactagttagtgaccagtggaactaactgtgccatcctgtaggaccccaatctgagctctctctgatttsgaatcctcccatttcccaccatgaacctttcctaggaccagagctttatttttctgcttctcacatttggattctcgtctttttatccttccctatttgc

SEQ ID NO: 522557 - DNA, 201 bp, Homo sapiens
tgggtttttttttattaatgtatttactttttttttttttattaatgtatttactttgacaagtaaaaattaaagtcactcactatcatgacgacagtacygagggggatggtgtatatttatggtgtacaacatgaagttttgacataggcatacattgtggaatggctaagtcaagccatttaatgtatgtattctctc

SEQ ID NO: 522558 - DNA, 201 bp, Homo sapiens
aggtggagtttgcagtgagccaagattgtgccactgcacttcagcctgggcaacagaggaagaccccatctcaggaaaaaaaaaaaaaaaaaaaaaaaaaacgggataggccgccatgttgctgtgctgaccataatggaaacgtgaacgcaagattcctcagggggcctgccagaggctaattcagatcctgtggtaatt

SEQ ID NO: 522559 - DNA, 201 bp, Homo sapiens
cccaggaggtggagtttgcagtgagccaagattgtgccactgcacttcagcctgggcaacagaggaagaccccatctcaggaaaaaaaaaaaaaaaaaaamaaaaaacgggataggccgccatgttgctgtgctgaccataatggaaacgtgaacgcaagattcctcagggggcctgccagaggctaattcagatcctgtg

SEQ ID NO: 522560 - DNA, 201 bp, Homo sapiens
gcagcaacggcagctctgaggttctggacaccccaaaggacacagaactaccttcacccatgagccgtccaggagacatttgacagctgctgtgtgccatrtcctaggggtaggaatgcaaaataagtcagaggccatccctgctcctgaggcatttacaatccagtgagggagacagacgattataacacaacacagagc

SEQ ID NO: 522561 - DNA, 201 bp, Homo sapiens
cttaaacccaggaggtggagtttgcagtgagccaagattgtgccactgcacttcagcctgggcaacagaggaagaccccatctcaggaaaaaaaaaaaaamaaaaaaaaaaaacgggataggccgccatgttgctgtgctgaccataatggaaacgtgaacgcaagattcctcagggggcctgccagaggctaattcagat

SEQ ID NO: 522562 - DNA, 201 bp, Homo sapiens
ctgtcagagcacaagatccccacctagagaccccctcactgctcccctcccacagcagcaacggcagctctgaggttctggacaccccaaaggacacagamctaccttcacccatgagccgtccaggagacatttgacagctgctgtgtgccatatcctaggggtaggaatgcaaaataagtcagaggccatccctgctcc

SEQ ID NO: 522563 - DNA, 201 bp, Homo sapiens
cagcctcccgagtagctgggactacaggcgcccaccaccgcgcccggctaattttttgtatttttagtagagacggggtttcaccgtgttggtgaggatgktctcaatctcttgacctcgtgatccgcctgcctcggcctcccaaggtgctacacacttttaaacaaccagatctcttgagaactcactcactattacaac

SEQ ID NO: 522564 - DNA, 201 bp, Homo sapiens
gtgggtctgggctagggtccgggaattagtctttgagttttgcagccaccagatttgagatgcattgaaccaaatgatttctgtgggtccttattcctgawatctgattccccccaacctgcctaagcatccccaggctcttgtgtcctatgccagcctctcccgctcctcgtggggctgtgagggtttgaccaccgtaag

SEQ ID NO: 522565 - DNA, 201 bp, Homo sapiens
ccaggtgtgatctcggctcactgcaagctccgcctcccgggttcacgccattcttctgcctcagcctcccgagtagctgggactacaggcgcccaccaccrcgcccggctaattttttgtatttttagtagagacggggtttcaccgtgttggtgaggatgttctcaatctcttgacctcgtgatccgcctgcctcggcct

SEQ ID NO: 522566 - DNA, 201 bp, Homo sapiens
agaaagctacattaaccaaaaggagtatttggtagtgtaactcaaggtagaggaagagacagagattctttttgcaaaatgacacgcaagaagcagccccytctcactccaaagtgggcctcttcacagcctggctgttttgtgggtgctccacccatccagggactggggctgctgggcccagtgacctctgacctgcca

SEQ ID NO: 522567 - DNA, 201 bp, Homo sapiens
cacagacaccgccccaggagtccctgtgaggaccgggtgtcttcaagaatgaaggcttcttcaagagtcacttaggcacacacactgtcactaaaagaaasaggaaagtcaaagacaaatgagttactgtaggagttcattctcacattgctgtaaagaaatccctgggactgggtcatttataaagagatttaattggcc

SEQ ID NO: 522568 - DNA, 201 bp, Homo sapiens
aatgcccctgcggtctggttttctctccttttccgcacggttcttagtgtgttgtgttgcttttccgcactgtacgttggaagctctagggctacgaaaaygcaggcagttgcgggggaagcgaaaaatccccgccctcatggaagttctgttacggtggaggaatcagaccaatgataagaagtcagaaaatcaaaagta

SEQ ID NO: 522569 - DNA, 201 bp, Homo sapiens
ggttcttccaccctgcgttcgcctcggaccgctgtggttagctgtgaaatgcccctgcggtctggttttctctccttttccgcacggttcttagtgtgttrtgttgcttttccgcactgtacgttggaagctctagggctacgaaaacgcaggcagttgcgggggaagcgaaaaatccccgccctcatggaagttctgtta

SEQ ID NO: 522570 - DNA, 201 bp, Homo sapiens
cagaaagcgtgtgacaacagagggagtcttgagctggccctggtgagctgaggcaggtttttcaagccagacaaatgagaaagggctttccaggcagggcrgccagcaggggcccagggtcatgaaagaggagtggagagagcagaaaggttgctcagagccggggtgtgaaggtgagactgaccgtgaagaatggggaat

SEQ ID NO: 522571 - DNA, 201 bp, Homo sapiens
gcatgtgtgaaaacagcccacctaccctggattagtgcacagacagggagagtgttagttctttctgatagcagtgcagaaagcgtgtgacaacagagggwgtcttgagctggccctggtgagctgaggcaggtttttcaagccagacaaatgagaaagggctttccaggcagggcggccagcaggggcccagggtcatga

SEQ ID NO: 522572 - DNA, 201 bp, Homo sapiens
catttgtgaggtgttcattgactgcatgtgtgataagcacctgcaataaatatatgcatcagatagtttaggcactggtgacagggaaacaaataagatayggtcatgcactccagaggagtcagaacctagagggggtgcatgtgtgaaaacagcccacctaccctggattagtgcacagacagggagagtgttagttct

SEQ ID NO: 522573 - DNA, 201 bp, Homo sapiens
ggaagaaggaaaacatttttaactctttttaaacattcttttttttttttttttttttttgagactgagtttccctcttgtctcccaggctggagagcaayggcacgatcttggctcactgcaacctccgcctcctgggctcaagcgattctcctgccttggcctcccaagtagctgggattacaggcatgtgccaccgcg

SEQ ID NO: 522574 - DNA, 201 bp, Homo sapiens
gaatgagcaaacgtgtgtgaaagtgaatgatgactcaaagcactatacgaatgtccaagcattacttatggtcgtggtggtgatggtggtggcagtggtgrgggtgatggaaaagtcattctggaaccttctgttctcttctcactgtccccgggactgagaaagtttttccaaacaaaagcatcatgtcttgctcctctt

SEQ ID NO: 522575 - DNA, 201 bp, Homo sapiens
ttgagttaaagttccaaactaagataaggacacacatctattaaactctgatttgggtggctgatctgtcttctaacgagaatattttacttttcaaaaaytgcctttggacaaatgtagttgccattatgcctttctgggccagagaattagttcatatgtgattaaaacccacagagagagtgggtcccatacactaac

SEQ ID NO: 522576 - DNA, 201 bp, Homo sapiens
cttaatttattacttaagaatagtactgaattccaaaattacttaagaatcttgatgcaaaaattatcagaatgttaccttatagaatttggtaatatatyacaaaagtaaatatgcatttacctttgacccagtaattccagaaatgtaccttgaagacacacccccacaataatatgagaatatagatgtaaatgcccg

SEQ ID NO: 522577 - DNA, 201 bp, Homo sapiens
cacacagtggagtactgtagtatgtagttctaagaaagaatgagtatgatcttttttgcatatcagtgaactaatatgtggtgctttctaaaatgtattgytaaatataaaaacaaagttcaaaagcacacacacgttatctttttgtgtaagaaagaaggagaaatgagaaaacatatatgtaactgcttactttctaag

SEQ ID NO: 522578 - DNA, 201 bp, Homo sapiens
agggagtgagaccaacacccatccctgcccagccaacagtggccggggcttgtcttatgtttccatctgttttcttcgtggcattcaatttcatttttttycttttcattttcatgttattttcattattggcaaagaaaatcaaaatgtttatagccaaataacaaatgtgccatgtaaaagtaagtctggacttaagag

SEQ ID NO: 522579 - DNA, 201 bp, Homo sapiens
taggtggggccagattagagaataaaagcaggctgcccgcgccagctggggtaatctgcttgggtccccatccacgctgtggaggctttgttcttttgctytttgcaacaaattctgctgctgctcactctgggcccccactgcctttatgagctgtaacactcaccgcaaaggtctgcggcttcactcctgaagccagcg

SEQ ID NO: 522580 - DNA, 201 bp, Homo sapiens
tggaccattcagcaggatgtaggtggggccagattagagaataaaagcaggctgcccgcgccagctggggtaatctgcttgggtccccatccacgctgtgsaggctttgttcttttgctttttgcaacaaattctgctgctgctcactctgggcccccactgcctttatgagctgtaacactcaccgcaaaggtctgcggc

SEQ ID NO: 522581 - DNA, 201 bp, Homo sapiens
ctctgtaaaatggaccattcagcaggatgtaggtggggccagattagagaataaaagcaggctgcccgcgccagctggggtaatctgcttgggtccccatscacgctgtggaggctttgttcttttgctttttgcaacaaattctgctgctgctcactctgggcccccactgcctttatgagctgtaacactcaccgcaaa

SEQ ID NO: 522582 - DNA, 201 bp, Homo sapiens
ggggacgtggagaacttttgtgtctagctcagggattgtaaacgcaccaatcagcaccctgtcaaaacggaccaatcagctctctgtaaaacagaccaatsagctctctgtaaaatggaccattcagcaggatgtaggtggggccagattagagaataaaagcaggctgcccgcgccagctggggtaatctgcttgggtcc

SEQ ID NO: 522583 - DNA, 201 bp, Homo sapiens
caccctgtgtctagctcagggtttgcagggtttgtgaatgcatcaatcgacactctgtatctagctacgctggtggggacttggagaacctttgtgtggayactctgtatctagctaatctagtggggacgtggagaacttttgtgtctagctcagggattgtaaacgcaccaatcagcaccctgtcaaaacggaccaatc

SEQ ID NO: 522584 - DNA, 201 bp, Homo sapiens
gggagtgagaccaacacccatccctgcccagccaacagtggccggggcttgtcttatgtttccatctgttttcttcgtggcattcaatttcatttttttcyttttcattttcatgttattttcattattggcaaagaaaatcaaaatgtttatagccaaataacaaatgtgccatgtaaaagtaagtctggacttaagagt

SEQ ID NO: 522585 - DNA, 201 bp, Homo sapiens
tatgggctccaacaaagaaagagaggcagggcgataaaataggaagaaggaaaacatttttaactctttttaaacattcttttttttttttttttttttttgagactgagtttccctcttgtctcccaggctggagagcaatggcacgatcttggctcactgcaacctccgcctcctgggctcaagcgattctcctgcctt

SEQ ID NO: 522586 - DNA, 201 bp, Homo sapiens
acaatcaccgccccctgctccatggcgcccagtcccatggaccacccaagggctgaggagtgtgggcgcatggcacgggactggcaggcagctccacctgyggccccagatgggatccactaggtgaagccagctgggctcctgagtctggtggggacttggagaaactttatgtctagctaagggattgtaaatacacca

SEQ ID NO: 522587 - DNA, 201 bp, Homo sapiens
ctcctttaatagaggtataagtactacataaataacctatcaacagtggatagcaaggatattttaattgaaagtcagaaaagctaaatggtatcaggaamgaaaaggagattgcagggtaatactaccgaaagactgaaagaagctggttaaaaacctctaaagaataagccaaagactgttaataaatgatcaaaagta

SEQ ID NO: 522588 - DNA, 201 bp, Homo sapiens
ctcctgcacggcctgagcctcctggacaatcaccgccccctgctccatggcgcccagtcccatggaccacccaagggctgaggagtgtgggcgcatggcaygggactggcaggcagctccacctgcggccccagatgggatccactaggtgaagccagctgggctcctgagtctggtggggacttggagaaactttatgtc

SEQ ID NO: 522589 - DNA, 201 bp, Homo sapiens
aggtgggagatcacttgaaccccagaggtggaggttgcaccactgcagtccagccaggtggcagagcaagactcgtctagaaaaaaaaaatgtatatatawagagagagagagcgcgagcgcgtgcaagagagcaagagagagagaacccttaaaacacaacaatgagaaaacaaccaaccacattaaaaaatgggcaaaa

SEQ ID NO: 522590 - DNA, 201 bp, Homo sapiens
catagagacttgtattattcaggtagagagattgtttcttttttaaaaccagaaaccaaaatttaactcctttaatagaggtataagtactacataaatarcctatcaacagtggatagcaaggatattttaattgaaagtcagaaaagctaaatggtatcaggaaagaaaaggagattgcagggtaatactaccgaaaga

SEQ ID NO: 522591 - DNA, 201 bp, Homo sapiens
gggagccccttcctgggctggccaaggcgggagctggctccctcagcttgcagggaggtgtggagggagaggcacgggcgggaactggggctgcgcacggygcttgcggaccagcgtgagttctgggtgggcgtgggtttagcggccccgcactgggagcggccggcccgcaagccccgggcagtgaggggcttagcacct

SEQ ID NO: 522592 - DNA, 201 bp, Homo sapiens
cccaccaattccggacacagctgtcttttgggcattgtctggaaggccggctgtagtattctgcctacagatacttatcaactgctcatggacagaagtcrtagttggggaggatggctgcaaaggcacaatgacatttggcttccagaaattctaagtactgtgccctgagtcaggtcaggtcagaagcactggggatgg

SEQ ID NO: 522593 - DNA, 201 bp, Homo sapiens
cccaaacccacgcctaccacaaaactactgcttatgcagaaagcaaagactaaggtctgtacccaacaatttcttcttttatttatagctgcatctcacttatttcactatcacatttttcctagtttgtctcagtttctgcttggagaggggagaatgcctaataatgtatgtcagaagattgcccctttcttcgtggaa

SEQ ID NO: 522594 - DNA, 201 bp, Homo sapiens
cagggagtccccacacctctagacatgtctctggttgtgctttcaggtgacctcaaagcagaagctctgaattcacctctcatctgacgactgacagctgmtgccaccgccagcctctgtcccttgcccaggcctgtcacacggctgcctctcagcaggtaaggagagtgacttaccctgtgtaggggcaggaggacagca

SEQ ID NO: 522595 - DNA, 201 bp, Homo sapiens
tacaggcatgagccaccgcgcccggccccaagtgtatatttttataagaagaaaacacgtgacctgtttccatttggcataggtttggctggagctggggytccttgtgttggggggcagagcgactgggcatgaaggtttgcagggtccaggggagcagtctggtgaggcccggggtggcctgtggccctgaagttgtgt

SEQ ID NO: 522596 - DNA, 201 bp, Homo sapiens
gacccctggggaagcaagagccacagctgtctcaggagggcaggaacactgtaaaatgtgtacaatgctccttcccccaagacctacacgcccaaacccaygcctaccacaaaactactgcttatgcagaaagcaaagactaaggtctgtacccaacaatttcttcttttatttatagctgcatctcacttatttcactat

SEQ ID NO: 522597 - DNA, 201 bp, Homo sapiens
ccgcaactccttttcctgatttttgtatgaggcgggggaggggaaccagccgccatctgatctggccctgttccctgcaagaggcgactggggggacaackaagttgataaatggaaagccttttccagcccggagaaacagacagaggacctataaactggattgtttttgaaatgtagggtttgctcagtgaccggtca

SEQ ID NO: 522598 - DNA, 201 bp, Homo sapiens
cagatgctccctggcttggacagagaagctgtaggtggtgggaggtggggttcccctacccttggaagagcagctcttctaacccttttactttggttacytctaggggcagtagaatgaaagagggcatgtctaataacagcaccactagcatctcccaagccaggaaagctgtggagcagctaaagatggaagcctgta

SEQ ID NO: 522599 - DNA, 201 bp, Homo sapiens
agcatctcccaagccaggaaagctgtggagcagctaaagatggaagcctgtatggacagggtcaaggtaagcatgcatgcgtcagccccaccctccgcccraagctcagctcaaaacattcctcctgcttccaaagcagacttgtgagagttaacacgtcacccagcagagcatgcagccaaccttggcagctgtaacatt

SEQ ID NO: 522600 - DNA, 201 bp, Homo sapiens
aaaatttttaaacatcagtttccaagtttatatcatattaatacatttcagtggataatttatttaaaaaaaaaaactatgcctaaatatcccttatttgyaatattcagtatcaaattagagcattttgaccaactgaaacatataacgttttcatctcctttcctggagaaagcagctgcagaggttctgtatttcctg

SEQ ID NO: 522601 - DNA, 201 bp, Homo sapiens
aagttggtgagaccaagaacccaccaattccggacacagctgtcttttgggcattgtctggaaggccggctgtagtattctgcctacagatacttatcaastgctcatggacagaagtcgtagttggggaggatggctgcaaaggcacaatgacatttggcttccagaaattctaagtactgtgccctgagtcaggtcagg

SEQ ID NO: 522602 - DNA, 201 bp, Homo sapiens
tcttgaagttggtgagaccaagaacccaccaattccggacacagctgtcttttgggcattgtctggaaggccggctgtagtattctgcctacagatacttrtcaactgctcatggacagaagtcgtagttggggaggatggctgcaaaggcacaatgacatttggcttccagaaattctaagtactgtgccctgagtcagg

SEQ ID NO: 522603 - DNA, 201 bp, Homo sapiens
catgctgtgtgcttccctgtgggaaaagagatgctattgcagtgagcttccttgttcagcaaggatgaaaggaggtccaccactcacttcctccccactckcagtttaagctgctgggtcccttcaggctcagggatagctgtgagaggtgacagcgtgctggcaaccctcacagcccttgctcgctctcggcgcctcctc

SEQ ID NO: 522604 - DNA, 201 bp, Homo sapiens
gtctcgcactgtcgcccaggctggagtgcagtggagcgatcttggctcaccgcaagctccgcctcccgggttcacactattctcctgcctcagcctcccargtagctgggactacaggcgcccaccatcacgcctggctaattttttgtatttttagtggagacggggtttcacccagttagccaagatggtctcgatctc

SEQ ID NO: 522605 - DNA, 201 bp, Homo sapiens
ctcctgttatcccctatgtgaatggatgtgcacctgttgggggagcaggggaggagaactgagccatccccgagggctgctgggccttggctggggaaccrtgctgtgtgcttccctgtgggaaaagagatgctattgcagtgagcttccttgttcagcaaggatgaaaggaggtccaccactcacttcctccccactctc

SEQ ID NO: 522606 - DNA, 201 bp, Homo sapiens
ttgtagagatggggtcttactgtgctgcccaggctggtcttgaactcctgggctcaaacaatcctccgctgcagattcccaaagcactgggattacagacrtgagtcactgcacccagctggaatcgggatccttaaaagtccccctagtggttcagatgtacagcaaagtctgagaagctctggttgcctatagagcagt

SEQ ID NO: 522607 - DNA, 201 bp, Homo sapiens
gagtgagagcctgagatacgggtttcatgacatacacaccaaagtgtgggatgctccagctagatgcagacttgagcagtgtgtctcaaacgcggctgcayattaaaagcacctgggaaggccgggtgtggtggctcatgcctgtaatcccagcactttgggaggccaaggcaggcggatcacttgaggtcaggggttcaa

SEQ ID NO: 522608 - DNA, 201 bp, Homo sapiens
ttgagcccaggagattaaggctgcagtgagctatgattgcaccactgcactccggcctgggtgacagagcaagaccctctctcttacacacacacacatayacacacacacacacacacacacaaaagccaggcgccatggctcacgcctgtaatcccaacgctttgggaggccaaggtgggcagatcacttgaggtcagg

SEQ ID NO: 522609 - DNA, 201 bp, Homo sapiens
gcaccactagggggctcctcttttagatgatttaattaattctagtagccacatctttcatccattgcttggaatgtatttcagatgtcagcccaccagcytatcccataccctaacaaggggttttagacaccttccctgtatcatcactgtttctcaaagtaaggaagttgttggagccatcagtacatctgcatgact

SEQ ID NO: 522610 - DNA, 201 bp, Homo sapiens
gcactttcccacgcccagagcttcttttttgttgttgttgttgagatcgggtctcgctctgtggaccaggctggagtgcaatggcgcgatctcagctcackgcaacctccgcctcctgggttcaagtgattctcctgcctcagcctcttcagtagctggaattataggcacctgccaccatgcctggctaatttttgtatt

SEQ ID NO: 522611 - DNA, 201 bp, Homo sapiens
cttctgtctcaggtttaaaagcattttcaaggcagccatccagtatactaacctctgttgaaatactgtatcggttagtgagatgcaaagctgctgtgacmaagagacgcagaaacacggtgacttaaagagtgtggaaatgtatttcactttctcatatgagcccagaagtaagaagccaggctaacggggccgctcagc

SEQ ID NO: 522612 - DNA, 201 bp, Homo sapiens
tacaaatcaaggattgaatgtcaagtgttatcagaggtcaccagatgataggaaaagatgaggaagaaggattttctcctggggccttcagagggagcgtraccctgccaacaccttgattttggacttccagcctccggagctgtgagagaataaatttttgttgcttagaaccacacggtttgtagtaatttgttccca

SEQ ID NO: 522613 - DNA, 201 bp, Homo sapiens
ctcaaacaatccactcgccttggcctcccagagtgctaggattacaggcgtgagcccccacacccagccttggtacattcttaatatgtgttaggtgcttraattttcacaccagccctgagatgttggtgctatcagtaccccatttcacagacaagaaaacaggcccaggccaggtgcagtggctcacacctgttgtcc

SEQ ID NO: 522614 - DNA, 201 bp, Homo sapiens
tgcttattagctatttaatggctttggacaaatgacttagctggccggatctcaattttctcattttacaagtgaaaaaaattgaggtgagtataggttayaaattctgcttctcagttcatgctcccatcaccctgagatacattcctctcccacagccatgaaacgccatacaattgtcagagaggcgtttcttgtagg

SEQ ID NO: 522615 - DNA, 201 bp, Homo sapiens
gtgcctggacctcctcctggtgcccctgcctaatgtacagctgtaaggccttgtcttctgtcccctccatatgggctccaacaaagaaagagaggcagggygataaaataggaagaaggaaaacatttttaactctttttaaacattcttttttttttttttttttttttgagactgagtttccctcttgtctcccaggct

SEQ ID NO: 522616 - DNA, 201 bp, Homo sapiens
ccaacctttaaagactgatattcaaatgctgtagtgttgaatacttggttccatgagccatgcctttctgtatagtacacatgatatttcggaattggttwtactgttcttcagcaactattgtacaaaatgttcacatttaatttttctttcttcttttaagaacatattataaaaagaatactttcttggttgggcttt

SEQ ID NO: 522617 - DNA, 201 bp, Homo sapiens
gtgaaggaggggatctggctagtgtaattacaaagggaaccaaggaaaggtaagcataatcttttaaaaatgtaagctgaaattggtctagtttcatttawtttaagcatcttgttttaggatcagtaatatggaagagtgtatttgtatttgtttggtaggtccacagtactttagaaaattcctggtgaatcaacaccc

SEQ ID NO: 522618 - DNA, 201 bp, Homo sapiens
aggggatctggctagtgtaattacaaagggaaccaaggaaaggtaagcataatcttttaaaaatgtaagctgaaattggtctagtttcatttattttaagmatcttgttttaggatcagtaatatggaagagtgtatttgtatttgtttggtaggtccacagtactttagaaaattcctggtgaatcaacacccatatttt

SEQ ID NO: 522619 - DNA, 201 bp, Homo sapiens
ctgtagagcagtgattctcaactagggataagggaagcaaatttgcctcttatggggcatttgatgatgtttggataaatttttagttatcacagctgggsagtgcttctggcatctagagggtagagggcagggaggctacaaaatacctataatgcacaggacagccccccacaacaaagaattatatgacctcaaatg

SEQ ID NO: 522620 - DNA, 201 bp, Homo sapiens
tggtcattaataccatgacatcttgcttataaatattccattgctctgtagttcaaatctgttagctttgtgaaaattcatcactgtgatgtttgtattctttttttttttctgtttaacagaatatgagctgtctgtcatttacctacttctttcccactaaataaaagaattcttcagtttccctgtagttatgtgtct

SEQ ID NO: 522621 - DNA, 201 bp, Homo sapiens; identical to SEQ ID NO: 310926

SEQ ID NO: 522622 - DNA, 201 bp, Homo sapiens
cttgtccttgcctacctcacagtggcaggtagtgagggaaggggccagaaataagagtttattactctgcctctagctctaattgagagattaaagaccasaagaaggggaggggtgatggagggcggacggaggacagctaaaaacagagggaaaatcaataaagagattatgtggaaaaactctggctatagaatgggg

SEQ ID NO: 522623 - DNA, 201 bp, Homo sapiens
agagattatgtggaaaaactctggctatagaatggggaaggagatgttctggggaccaggctgacataagagaagaaggaaaatgccgtaggatcacagasaaggatacagatgaagtgacaggattgagagtcagtgagagagtatcttgctaaatgtagtttagaaatgcaagggcagtacttcccctaaaacagaccc

SEQ ID NO: 522624 - DNA, 201 bp, Homo sapiens
gaaaaggggaaaagggaaaaaaggtaagttaacatctgcattaccttgtggacccagaacctcatgagttaaaaccaccagtgaacttatttttccaagtktttaagacctagccataaaggagtcctttcttttgtcttggaaacacatttttgtccttttattttaactgctgtcttaggaggactattctgttatgca

SEQ ID NO: 522625 - DNA, 201 bp, Homo sapiens
aaagtggcttaggtagcccttttcatttacaaatctcaaattttaagatggatttcattgaatatatgcatttcaatggaaacaaaattctgttatagcartgatttatttcctgggttcatagacctgaggcaatgagtcatagaatttcatgtttgattttctttaccttatcaaactacatgtttagtaattgatact

SEQ ID NO: 522626 - DNA, 201 bp, Homo sapiens; identical to SEQ ID NO: 310931

SEQ ID NO: 522627 - DNA, 201 bp, Homo sapiens
ataccgtattgcatcgggatctgaaaccagccaatgttttcctggatggcaagcaaaacgtcaagcttggagactttgggctagctagaatattaaaccaygacacgagttttgcaaaaacatttgttggcacaccttattacatgtctcctgtaagtatttcagaatttagctactttttaaaacatcttttatttttgt

SEQ ID NO: 522628 - DNA, 201 bp, Homo sapiens
taggagctctggtaggctgttgttactgtagatgtggaagaaaggcaaacaataaaataggtaaggataatattagttactactgtgatttatggagtggwctaagacaaaatataaatggataattcaattagctatttatgtctatatccatttaaatgtggactagatacatattttgactattcttaaatttcctct

SEQ ID NO: 522629 - DNA, 201 bp, Homo sapiens
atgcaaactgtgaaacatctttttgcttgatttatgacacaaactaactgttaaaagttgttggtttcaaaaatcgagcatctgaattttcaataaaattyagagtttttataactcccttattccatgtaggacagcatatatgaaagctattattcccatctttaataaattgagatgtagtgtgatcaatttagtgag

SEQ ID NO: 522630 - DNA, 201 bp, Homo sapiens
  misc_feature (1)...(201): n = A,T,C or G
gtctcccaaagtgttgggattacaggcgtgagccaccatgcccagccaaaacatcttttaatgttaagcattctgaagcagggaaattgagttttctgttngtttagtaatatctagtagccaagaattgaaaatactgttatatttttccacatggaccaccagaccaataaagtctatatcagtttttgtttgctgcat

SEQ ID NO: 522631 - DNA, 201 bp, Homo sapiens
gacccttggaaggcagtgcatctgtgtgccagcctttcctatttcttctgcctggagcactcttcatccagacagccctgtggcttcttacttcagaaatrctgtatgaggctttgtatcattacacccagcacccagcacccagcatgtccctgtttccagagctatttttcctaatagcacgtattaccatcaaatatt

SEQ ID NO: 522632 - DNA, 201 bp, Homo sapiens; identical to SEQ ID NO: 310934

SEQ ID NO: 522633 - DNA, 201 bp, Homo sapiens
gaagcaaatttgcctcttatggggcatttgatgatgtttggataaatttttagttatcacagctggggagtgcttctggcatctagagggtagagggcagrgaggctacaaaatacctataatgcacaggacagccccccacaacaaagaattatatgacctcaaatgtcaatagtgccaaggttgggaaacttacttata

SEQ ID NO: 522634 - DNA, 201 bp, Homo sapiens
aggatataattaaaagggaggtaatttgttaaatcttggaactttcattctttgtttttgagcataatgagttcattcataccttggaaattcttatttcrgatattagtttggaaagaacttgactatggctccatgacagaagctgagaaacagatgcttgtttctgaagtgaatttgcttcgtgaactgaaacatcca

SEQ ID NO: 522635 - DNA, 201 bp, Homo sapiens
aaaatcagagaaggcaaattcaggcgaattccataccgttactctgatgaattgaatgaaattattacgaggatgttaaacttaaaggtaaagatgataakatgatatattgtctgtttctagctgtcagttaagtgtcagagcatacattctctcttgtagatcaatggagactgaagaaacgttaaatatactttctta

SEQ ID NO: 522636 - DNA, 201 bp, Homo sapiens
taagcatcatagcagtggggagcgggtaccattctgaactcaggacagttggaaatattctctccccatccttgggctataaaatccacacgtgaggaagscatcacaagtatattgaaatcatcacagcaagcagcagtgtcttttttaaaagctgttcttttcgtatttgatgaaatattcattcttctatttaatgga

SEQ ID NO: 522637 - DNA, 201 bp, Homo sapiens
catgcgctagccaggtagagagacacagagctgtgtacaggatgtaatattaccaacctttaaagactgatattcaaatgctgtagtgttgaatacttggytccatgagccatgcctttctgtatagtacacatgatatttcggaattggttttactgttcttcagcaactattgtacaaaatgttcacatttaatttttc

SEQ ID NO: 522638 - DNA, 201 bp, Homo sapiens
atgaagagtttgttcttcgagtgatgactcagttgactctggccctgaaggaatgccacagacgaagtgatggtggtcataccgtattgcatcgggatctkaaaccagccaatgttttcctggatggcaagcaaaacgtcaagcttggagactttgggctagctagaatattaaaccatgacacgagttttgcaaaaacat

SEQ ID NO: 522639 - DNA, 201 bp, Homo sapiens; identical to SEQ ID NO: 310924

SEQ ID NO: 522640 - DNA, 201 bp, Homo sapiens
cttctttatttaaagtctggtatatagatattcagctttctcagggccctgcctttgtgtggcattgtcccttcactctgccgcactgagatgtggttatygtatataccagtgaaccattgtctaacattctccattttatagaaaccctcaatctaatttaatcgactctttaagattatgtaaaatgcaaactgtgaa

SEQ ID NO: 522641 - DNA, 201 bp, Homo sapiens
cactgcactccagcctggaaaacatggcaagaccccatctcagacaaaaacaaaaacaaaataaaactatcccattagtaagacaatgttgacttacaaaygtaaaggtatttgtggtaataagaaggtggatagagttgaaacagtggagataaggtctaaaagcaatccagtttgctttgaagcagaagcgacgtatga

SEQ ID NO: 522642 - DNA, 201 bp, Homo sapiens
gagaaaaattaccaactgaaaagcagacagatcctgggcatgcgctagccaggtagagagacacagagctgtgtacaggatgtaatattaccaacctttaragactgatattcaaatgctgtagtgttgaatacttggttccatgagccatgcctttctgtatagtacacatgatatttcggaattggttttactgttctt

SEQ ID NO: 522643 - DNA, 201 bp, Homo sapiens
tgacccctcctcagcccccatcttaggcaggccaggggacccagcggggagccccgtggcaccttcttggtgtggcaggtgcgggctgggaggcatccagygagtatcagccctgttctgggcaggacacgtcatcaccatctccattctacaaggaaatcgaggctcggggctgttgagctggtggccagggcctgtgaa

SEQ ID NO: 522644 - DNA, 201 bp, Homo sapiens
gggaggctgaggcaggaggattgcttgagcccaggaggtaaaggctgcagtgagctatgatcacaccactgcactccagcctgggcaacagagcgagaccstgagttcaggtggtgccaggtgctctgaggggagacgcagacagcgtgagaggtggaggtgggtagcttttgtgaagtgcttggggacagtctttgcgat

SEQ ID NO: 522645 - DNA, 201 bp, Homo sapiens
gtcttgctgagttgctcaggctggtcttgaactcctgggctcaagtgatcctcccacctgggcctcccaaagagctgggattacaggcgtgagccaccgcrctcagccccacacatgggtttcaagccccttgcaaccacccagccaagtccagcagagagacaggcagctcgtgagctccactcagcatctctccatctg

SEQ ID NO: 522646 - DNA, 201 bp, Homo sapiens
ccgatgctcgaactccgccccctcttctccgcgtaggcccagctccctgaagcggctgtttcgagccacgcgcccatcgggtaccgaggcacgcgccgggmgtcacgtgcgtttcgcggcgagcggaaatgacgcgagttgtgtgagccgccagtatggccgggctatggcggcgagcactggctacgtgcgactgtgggg

SEQ ID NO: 522647 - DNA, 201 bp, Homo sapiens
gccaatggcgggggttttgggaagcgagcagccgcggcggaggcgcattctcggggggcgaggacgcctccgagggcggcgcggaggaaggagccggcggygcggggggcagcgcgggcgccggggaaggcccggtcataacggcgctcacgcccatgacgatccccgatgtgtttccgcacctgccgctcatcgccatca

SEQ ID NO: 522648 - DNA, 201 bp, Homo sapiens
tgtggggccgaggcccggcaattgggggccaatggcgggggttttgggaagcgagcagccgcggcggaggcgcattctcggggggcgaggacgcctccgakggcggcgcggaggaaggagccggcggcgcggggggcagcgcgggcgccggggaaggcccggtcataacggcgctcacgcccatgacgatccccgatgtgt

SEQ ID NO: 522649 - DNA, 201 bp, Homo sapiens
gaccaggagtccccatggctgtctttgcaaggctacccctggcttctgttgccccttcgagagtcagccaggaagtgaccatgccttcccgcagcactggmcttgcccgggggccactgtcctgagcatgccatgagtcagggtggccgccccaggtttgagggcctcaggtacctctgagatcctttcagccatgcccat

SEQ ID NO: 522650 - DNA, 201 bp, Homo sapiens
ctgaaaggcagtgtgcaggtggcgagagtcatgcgcgggtccccggcttccccagctcacgtgcccactgaacctgcctctgtctgcaggagttcattgcygttagccagctccgcggctccacccagggcaagatcctctgcttctatggcccccctggcgtgggtaagaccagcattgctcgctccatcgcccgcgccc

SEQ ID NO: 522651 - DNA, 201 bp, Homo sapiens
aggcccccagagcaagaccttgtggggtcctatcctagctccataaccttcagcaagttattcctttggcttccctcttctcatctgtgacctggacataytagtgtcttattagagttgttgtgggatttaaatgaggccatgtgggctgggcacggtgtctcacatgtttaatcccagcactttgggaggctgaggcag

SEQ ID NO: 522652 - DNA, 201 bp, Homo sapiens
cagtctttcttggcagcagctttcctcatggcggccagtacgttgctcagctcctcccgcttcctcttggcgcggatgtgcgtccccacctgccagggacraggccgccgtcagcccggccctgactcccatcccaccccgcccctcggccggcagcgcccacctacccttttcttgataaatttgagggcccgtttgtcc

SEQ ID NO: 522653 - DNA, 201 bp, Homo sapiens
agcactttgggatgtcaaggcaattggatcgcttgagcccggagtttgagtccagcctgggcaacgtagcgagatcccatctctgcaaaaaatgtagaaawattagctggatgtggtggctcatgcctgtggtcacagctacgcaagaggctgaggtgggaggatcgcttaagcccaggagtttgagaccagcctgggcaa

SEQ ID NO: 522654 - DNA, 201 bp, Homo sapiens
ctcctgggcccgggagagacaggtgggacctgcggccgaggagcagatggggccgtgagagacacaccagacgcttgcgagcagctgcaggtggcgcgagygggcgcagggtttagggcctgggactgtccaaaacaccgcccaccaccgtcaggccacacactctgtctcccggggcctccaggctgccccatggtgggg

SEQ ID NO: 522655 - DNA, 201 bp, Homo sapiens
gggctcagtctttcttggcagcagctttcctcatggcggccagtacgttgctcagctcctcccgcttcctcttggcgcggatgtgcgtccccacctgccarggacgaggccgccgtcagcccggccctgactcccatcccaccccgcccctcggccggcagcgcccacctacccttttcttgataaatttgagggcccgtt

SEQ ID NO: 522656 - DNA, 201 bp, Homo sapiens
gccaggggacccagcggggagccccgtggcaccttcttggtgtggcaggtgcgggctgggaggcatccagtgagtatcagccctgttctgggcaggacacrtcatcaccatctccattctacaaggaaatcgaggctcggggctgttgagctggtggccagggcctgtgaattggcaggtggtgccacggatttgagccca

SEQ ID NO: 522657 - DNA, 201 bp, Homo sapiens
cagaagcaagtggagaaggtgagcggccagcccgccctcctggcacctgccgcccacctcaccatcccacgctgatcaccccacctttccatgcccatcaycccactttcctgcgcccatcaccccaccaccccgcgcccgtcacacctttctgtgcccgtcaccccaccaccccgcacctgtcaccccaccttcccgtgc

SEQ ID NO: 522658 - DNA, 201 bp, Homo sapiens
aacccggcaatgccgtgtgcaagatgaagccgagccttccgggtcctaggatccccgagccaactcaggggccatcgccgtgatgctggccctgatggcasggacgggtccctcccacccacagccacgcccagcaggctgcccgtccaaggcagggtgtgggtgccgctctcactcggggtctccccagccctgaccctg

SEQ ID NO: 522659 - DNA, 201 bp, Homo sapiens
ccccaaacccgctgccccgcgccgctctcaaggtgctccctctgccccagcgtggattgcacggttgggaaaaacccagatgggtgcccgccttcgagcamcaggcaggaagtcccactcccccaccccatctcttccattcaagccccccttagttctgcgcccgaacgcgcgttctttcaggtcgagagcctttgccca

SEQ ID NO: 522660 - DNA, 201 bp, Homo sapiens
gtctccccagccctgaccctggggtctccccactgggcgggctggccaggggcacggcgaggggcaccacctgctgtctgctgccccaggtggacaagatyggccgaggctaccagggggacccgtcgtcggcactgctggagctgctggacccagagcagaatgccaacttcctggaccactacctggacgtgcccgtgg

SEQ ID NO: 522661 - DNA, 201 bp, Homo sapiens
tgagctgcttaaagtccttcaggtcatcctggtgcctgcaaaagtttgagggccattactatatatatatatatatatatatatatatatatatatatatratattttaactttattatataataaagaattaaaaacttcaaaaagaaaatagagatggggtctcactgtgttacccaggctggtctcaaactcctgggc

SEQ ID NO: 522662 - DNA, 201 bp, Homo sapiens
ctgcccgtccaaggcagggtgtgggtgccgctctcactcggggtctccccagccctgaccctggggtctccccactgggcgggctggccaggggcacggcraggggcaccacctgctgtctgctgccccaggtggacaagatcggccgaggctaccagggggacccgtcgtcggcactgctggagctgctggacccagagc

SEQ ID NO: 522663 - DNA, 201 bp, Homo sapiens
gatggagcccacccctgagctcccggctgaggtgctcatggtggaggtagagaacgttgtccacgaggacttccaggtcacggaggaggtgaaagtgagtycgtgcgtcacgcagggcggccacagctgcctcccccacgggctcccttgagccgttcctgcggcctctccgaagagtcatctcccaccctgagcccctta

SEQ ID NO: 522664 - DNA, 201 bp, Homo sapiens
tagagaacgttgtccacgaggacttccaggtcacggaggaggtgaaagtgagtccgtgcgtcacgcagggcggccacagctgcctcccccacgggctcccytgagccgttcctgcggcctctccgaagagtcatctcccaccctgagccccttaggaagggtctggcctgtctggaactcaattctaatggaacatagagg

SEQ ID NO: 522665 - DNA, 201 bp, Homo sapiens
accatgccttcccgcagcactggccttgcccgggggccactgtcctgagcatgccatgagtcagggtggccgccccaggtttgagggcctcaggtacctckgagatcctttcagccatgcccatgtccagccaggacagaacccacctggccacttcccatgcagcatgctctgttttcagcccaggaaccagttgtcacg

SEQ ID NO: 522666 - DNA, 201 bp, Homo sapiens
gccaggacagaacccacctggccacttcccatgcagcatgctctgttttcagcccaggaaccagttgtcacgccagggcagcttctaggcagaagtccccrgggcagggctgggcaggccgtaggacagcgcttagagggaaggcatgagtttctttcctggctgctggcccaggaccccgcctcagatttgaatgtcacg

SEQ ID NO: 522667 - DNA, 201 bp, Homo sapiens
agtctctcccccagggccctgagaggcactggttgcgcgcgaaggctgtggcttcccctcccagcacgccccgatttcggtgagtggcctgtgagctcccrtggctgctccgacggtgccacaacttagtgccttacacaatgccgagccctgagatcccgctgtgggccgggcccgtccctcccagaggctccagaggag

SEQ ID NO: 522668 - DNA, 201 bp, Homo sapiens
ggcagagggcacacatgcctctgtgctgggtacagcatggccaggtcctcccggcagcatctctcagggtgcgcattttcccccaacctcggccctacacrcacagatgccgacttctgctcatcctttctgtcctccctgtctcggcagattcctaagcggctgtacaaggccctctccctgctgaagaaggaatttgaa

SEQ ID NO: 522669 - DNA, 201 bp, Homo sapiens
aaggtcaggagttcgagaccagcctgaccaacatggtgaaacctcgcctctactaaaaatacaaaaaaagtagccaggcatggtgactcacacctgtaatyccagctactcaggaggctgaggcaggagaattgcttgaacccaggaggctgaggttgcagtgagatgagatcgcaccagtacactctagcctgggccaca

SEQ ID NO: 522670 - DNA, 201 bp, Homo sapiens
ccggggccgagtcccatgagctgcaggacgtcctggaagagaccaatgtgagtgctcgtcacctccacagccccccacgcctggctgcaccccacctccamtatgctccgcccacgcccggctgcccccgttcctcctcagctcccccatgcctggctgcccttgtccctccaccgtgcaccatccacacccagctgtgtg

SEQ ID NO: 522671 - DNA, 201 bp, Homo sapiens
caccttgccgccgcccccaggtgctgttcatctgcacggccaacgtcacggacaccatccccgagccgctgcgagaccgtatggagatgatcaacgtgtcrggctacgtggcccaggagaagctggccattgcggaggtaagcccagcccctccccactgctgtccccttcccagagcagggggcgccccccagagcctgc

SEQ ID NO: 522672 - DNA, 201 bp, Homo sapiens
cgagagcggtgtccgcaacctgcagaagcaagtggagaaggtgagcggccagcccgccctcctggcacctgccgcccacctcaccatcccacgctgatcaycccacctttccatgcccatcatcccactttcctgcgcccatcaccccaccaccccgcgcccgtcacacctttctgtgcccgtcaccccaccaccccgcac

SEQ ID NO: 522673 - DNA, 201 bp, Homo sapiens
tcttggcggtgccacctgccctcccgctgtagggacagtcagcgaagctaaccaaaggcctgaagcgtgtcagctccttacctgtgtgcctggtgtcatcrgcctcttccccaggctgctgcagggcctagggggaagtgctgtgagcaactggtgatgtctgctgtgggcgctggcaggggtggaaagtcctgtccacag

SEQ ID NO: 522674 - DNA, 201 bp, Homo sapiens
tgcagcacgcccccgccaatgactacctggtgacctcacacatccacctgcatgtgcccgaggtgaccgcgccatccgctcccacctgctcccgcccagtycctgggctgctggccacctgctcacccactatccccacatgcctccacagggcgccacccccaaggacggcccaagcgcaggctgcaccatcgtcacggc

SEQ ID NO: 522675 - DNA, 201 bp, Homo sapiens
caaggatggcagcctggaggtgacaggccagctgggggaggtgatgaaggagagcgcccgcatagcctacaccttcgccagagccttcctcatgcagcacrcccccgccaatgactacctggtgacctcacacatccacctgcatgtgcccgaggtgaccgcgccatccgctcccacctgctcccgcccagtccctgggct

SEQ ID NO: 522676 - DNA, 201 bp, Homo sapiens
accattgcggtgagtgtccctgtacccaccccacagcactggcagggcccacaccaccacgggacaggcccagtccccgccatgcaacctctgcctgggcsaaggagagggaagccctgggctttggaagcaggtctctctggcctggagctggccttaagctcaccgccctagctgccttctccacagcaagtcttgtgg

SEQ ID NO: 522677 - DNA, 201 bp, Homo sapiens
atgcctgtcatcccaacacttttggaggccaaggaaggaggatcacttgagccctggagttcaaaaccagcctgggcaatattgagacccctgtctccacaaaaaaaataaaatccctgggcatggtcgcacacaccagtggtctaacctgtgggaggatcgcttgagcccaggagattgaggctgcagtgagctgtgatc

SEQ ID NO: 522678 - DNA, 201 bp, Homo sapiens
actttgaatttcctttgggagtggggaaaccgctaagaagaatccagctggtcagttctgctcactgtattcaccaccacagcctcctggcctccagcacttttttttttttttttttttttttgtttaggcgttcccaaaccatgttgattagtatccaggatgcggatcagcatgtccccagagaataatctacacagc

SEQ ID NO: 522679 - DNA, 201 bp, Homo sapiens
gacgtcctggaagagaccaatgtgagtgctcgtcacctccacagccccccacgcctggctgcaccccacctccactatgctccgcccacgcccggctgccyccgttcctcctcagctcccccatgcctggctgcccttgtccctccaccgtgcaccatccacacccagctgtgtgtccctggctctgtttttgagatgatt

SEQ ID NO: 522680 - DNA, 201 bp, Homo sapiens
tcgaggctcggggctgttgagctggtggccagggcctgtgaattggcaggtggtgccacggatttgagcccagggacgcctggctctaagccagggctgctttttttttttttttttttgaaatggagtctcgctcagttgtccagactggagtgcagtggcacaatcttggctcactgcaacttccgctttgcgggttca

SEQ ID NO: 522681 - DNA, 201 bp, Homo sapiens
tgcacgcagctggagggcctgtgaagtatccgtaggatgcgtttccagcacgggatttgttggggcagagggcacacatgcctctgtgctgggtacagcayggccaggtcctcccggcagcatctctcagggtgcgcattttcccccaacctcggccctacacacacagatgccgacttctgctcatcctttctgtcctcc

SEQ ID NO: 522682 - DNA, 201 bp, Homo sapiens
gcattccctgtgagaatcttgcaacagggggaagacagcgaccaaacttacaaatgtgattagaactggcaagaccccttaggggcagcgaacttgttcttttttttttttttttttttttttttgagatggagcctctgtcgcccaggctggagtgcagtggcgtgatctcggctcaccgcaagctccacctcccgggtt

SEQ ID NO: 522683 - DNA, 201 bp, Homo sapiens
gatgcgtttccagcacgggatttgttggggcagagggcacacatgcctctgtgctgggtacagcatggccaggtcctcccggcagcatctctcagggtgcrcattttcccccaacctcggccctacacacacagatgccgacttctgctcatcctttctgtcctccctgtctcggcagattcctaagcggctgtacaaggc

SEQ ID NO: 522684 - DNA, 201 bp, Homo sapiens
ggagacagagtctcaccctgtcactcagactggagtgcactggcgcaatcttggctcatggcaacctccgcctcctgggttcaagtgattctcctgcctcrgcctccttagtagctgggattacagtcacccaccaaagtacctggctaattttttttttttttttggtatttttagtggagatggggtttcaccgtgttg

SEQ ID NO: 522685 - DNA, 201 bp, Homo sapiens
gatctcctgacctcatgatccacccgcctcggcctcccaaagtgcttggattacaggcgtgagccaccacgcccggccaagacttggtctcttaaaaaatrgaggaaagaaaacacagtctctttttttcccctgagatagcttatcctaaggacaaggctctgaggggtaaggagacagggtttggttttagttttgact

SEQ ID NO: 522686 - DNA, 201 bp, Homo sapiens
tggaactacaggtgtccgctgccacgcccagctaatttttttttttttttttattgatcattcttgggtgtttctcgcagagggggatttggcagggtcayaggacaatagtggagggagggtcagcagataaacaagtgaacaagggtctctggttttcctaggcagaggaccctgcggccttccgcagtgtttgtgtcc

SEQ ID NO: 522687 - DNA, 201 bp, Homo sapiens
ctggggcctgggcttgctggggagggtaagcggccagtcccccagcaccttgccgccgcccccaggtgctgttcatctgcacggccaacgtcacggacacyatccccgagccgctgcgagaccgtatggagatgatcaacgtgtcgggctacgtggcccaggagaagctggccattgcggaggtaagcccagcccctcccc

SEQ ID NO: 522688 - DNA, 201 bp, Homo sapiens
gtggaggggacactggttgggaggccccgagaaagcggctcacgtctccagcttgaggaccctgtagccaccctgtggctccagaggtctgggctcagcgrgacccttggaccacctgtgccaccagggaggcctcagccgggtccagctcccagcctcagcggctgattcacacctgccttgctcccgtgtcagagtcca

SEQ ID NO: 522689 - DNA, 201 bp, Homo sapiens
ggcagagggtctcctcacttctcagggctgccgggcagagacgctcttcccctcccagacggggtcgcggccgggcagaggcgctcctcatatcccagacrgggcggcggggcagaggcgctccccacatctcagatgatgggcggccgggcagagacgctcctcaccttccagactgggcagccaggcagaggggctcct

SEQ ID NO: 522690 - DNA, 201 bp, Homo sapiens
ctggaggtgcacttcgtggaacactaccgggagatcttcgacatcgccttcccggacgagcaggcagaggcgctggccgtggaacggtgacggccaccccgggactgcaggcggcggatgtcaggccctgtctgggccagaactgagcgctgtggggagcgcgcccggacctggcagtggagccaccgagcgagcagctcg

SEQ ID NO: 522691 - DNA, 201 bp, Homo sapiens
aggtgcacttcgtggaacactaccgggagatcttcgacatcgccttcccggacgagcaggcagaggcgctggccgtggaacggtgacggccaccccgggastgcaggcggcggatgtcaggccctgtctgggccagaactgagcgctgtggggagcgcgcccggacctggcagtggagccaccgagcgagcagctcggtcc

SEQ ID NO: 522692 - DNA, 201 bp, Homo sapiens
aggcagtgctggaggaagaccactacggcatggaggacgtcaagaaacgcatcctggtgagcccagtgtctggcctgttgtggatttgcatgtgggtgccygggcccaggactcttgtgtgctgtgggttgagatttcaaaggagccccctggtgaattcgtaggcctgggggtgctggtcggggggatcccggcggaggt

SEQ ID NO: 522693 - DNA, 201 bp, Homo sapiens
accttgtacacctgtgcagtgggcctcaggtggctctgaacggcctctggcggggggtggtgtgctgggagcccagggggtctgggctgagggaggggaasgctgtgacacatgggggtggcagcacaccatgggccttatggatttgggtgccactttgataggcttacaggtaaggacaagctcatccagatgggcctt

SEQ ID NO: 522694 - DNA, 201 bp, Homo sapiens
aggggtggggtcggctccaccccccaccccgaagcctgtgggctggagtcaggagagacggtctccagtgaggaccgggccgcgcacaccagagaaacctyggcgcctctgtgggctcactcgtcccggccagcctcaggcccagaagcaggggccacggccctcagagttcagcgccctcccacctgaccctttgggtgg

SEQ ID NO: 522695 - DNA, 201 bp, Homo sapiens
cgtcggcactgctggagctgctggacccagagcagaatgccaacttcctggaccactacctggacgtgcccgtggacttgtccaaggtggggggcctgtcyggggcctgggcttgctggggagggtaagcggccagtcccccagcaccttgccgccgcccccaggtgctgttcatctgcacggccaacgtcacggacacca

SEQ ID NO: 522696 - DNA, 201 bp, Homo sapiens
tctgctgccagcgcctgtctggctttcaccatggtgtcagctgagggatgggactgagggagatctggctttgaatcagtgaccccagaatctgagctggygagtcagggcaagtgaccagcgtgcctgcaggtgccacacatccggcggctgccagcatttccgcctcccacatcatggccacatcttgtggggctccag

SEQ ID NO: 522697 - DNA, 201 bp, Homo sapiens
aggccagtggttttgccttgagcctgtttccccgtgggagacggggaccctggtgggttttgggacttactgcttagaacccggcatcactgtgtatcgcsggtccccaggaagccctttcgttcctggaggttagcacacctgctgccctcccacaggcccaggcagggctgaccctgactctgcccccaggccaagcgc

SEQ ID NO: 522698 - DNA, 201 bp, Homo sapiens
ctttcgttcctggaggttagcacacctgctgccctcccacaggcccaggcagggctgaccctgactctgcccccaggccaagcgcgcaggggtgacgtgcrtcgtcctgccagccgagaacaagaaggacttctacgacctggcagccttcatcaccgagggcctggaggtgcacttcgtggaacactaccgggagatctt

SEQ ID NO: 522699 - DNA, 201 bp, Homo sapiens
tcgttcctggaggttagcacacctgctgccctcccacaggcccaggcagggctgaccctgactctgcccccaggccaagcgcgcaggggtgacgtgcatcrtcctgccagccgagaacaagaaggacttctacgacctggcagccttcatcaccgagggcctggaggtgcacttcgtggaacactaccgggagatcttcga

SEQ ID NO: 522700 - DNA, 201 bp, Homo sapiens
gagttgtgtgagccgccagtatggccgggctatggcggcgagcactggctacgtgcgactgtggggagcggcgcggtgctgggtgctgcggcggccgatgmtggccgccgccggggggcgggttcccactgcagcaggagcgtggttgctccgaggccagcggacctgcgacgcctctcctccttgggcactgtggggccg

SEQ ID NO: 522701 - DNA, 201 bp, Homo sapiens
tgaggcaggagaattgcttgaacccaggaggctgaggttgcagtgagatgagatcgcaccagtacactctagcctgggccacagagcaagactccatctcaaaaaaaaaaaaaaaaaaaacaggagccagaggcattggtggactgcttctctgggttggaccggagagagtggagcatttgcggtcttcagggtcccggg

SEQ ID NO: 522702 - DNA, 201 bp, Homo sapiens
ttcgtggaacactaccgggagatcttcgacatcgccttcccggacgagcaggcagaggcgctggccgtggaacggtgacggccaccccgggactgcaggckgcggatgtcaggccctgtctgggccagaactgagcgctgtggggagcgcgcccggacctggcagtggagccaccgagcgagcagctcggtccagtgaccc

SEQ ID NO: 522703 - DNA, 201 bp, Homo sapiens
ttcccgctgcgtgtcttggtccacatccatccgcctttcggtggcttcatagccttcggttgggagtcaccgttgcgggttcagtgggatcctctgggccrtgtacccggggcgttgccagtcttttgctgttgtgagcagcactcctgagcgcgtccccatgcacgcagctggagggcctgtgaagtatccgtaggatgc

SEQ ID NO: 522704 - DNA, 201 bp, Homo sapiens
gcccagtgtctggcctgttgtggatttgcatgtgggtgcccgggcccaggactcttgtgtgctgtgggttgagatttcaaaggagccccctggtgaattcrtaggcctgggggtgctggtcggggggatcccggcggaggtagcatcctgccctgcccccgagggctcgaggatttcccaggtggactgaagtcatgcctg

SEQ ID NO: 522705 - DNA, 201 bp, Homo sapiens
caccatcccacgctgatcaccccacctttccatgcccatcatcccactttcctgcgcccatcaccccaccaccccgcgcccgtcacacctttctgtgcccrtcaccccaccaccccgcacctgtcaccccaccttcccgtgcccattgtgttgccctgaccgcccaggtgttacggaaatcggcctacaagattgtcagcg

SEQ ID NO: 522706 - DNA, 201 bp, Homo sapiens
acggacgggtccctcccacccacagccacgcccagcaggctgcccgtccaaggcagggtgtgggtgccgctctcactcggggtctccccagccctgacccyggggtctccccactgggcgggctggccaggggcacggcgaggggcaccacctgctgtctgctgccccaggtggacaagatcggccgaggctaccaggggg

SEQ ID NO: 522707 - DNA, 201 bp, Homo sapiens
agatgaagccgagccttccgggtcctaggatccccgagccaactcaggggccatcgccgtgatgctggccctgatggcacggacgggtccctcccacccayagccacgcccagcaggctgcccgtccaaggcagggtgtgggtgccgctctcactcggggtctccccagccctgaccctggggtctccccactgggcgggc

SEQ ID NO: 522708 - DNA, 201 bp, Homo sapiens
gcaagatgaagccgagccttccgggtcctaggatccccgagccaactcaggggccatcgccgtgatgctggccctgatggcacggacgggtccctcccacscacagccacgcccagcaggctgcccgtccaaggcagggtgtgggtgccgctctcactcggggtctccccagccctgaccctggggtctccccactgggcg

SEQ ID NO: 522709 - DNA, 201 bp, Homo sapiens
tatgacgtgacaccgcccggcgtggtcatggggctggcctggaccgcaatgggtgagcgtggtggcgggagaagaccccaaagccattcccatttctaccygagaacaagcaggtcccaccttgtacacctgtgcagtgggcctcaggtggctctgaacggcctctggcggggggtggtgtgctgggagcccagggggtct

SEQ ID NO: 522710 - DNA, 201 bp, Homo sapiens
ccgagaacaagaaggacttctacgacctggcagccttcatcaccgagggcctggaggtgcacttcgtggaacactaccgggagatcttcgacatcgccttmccggacgagcaggcagaggcgctggccgtggaacggtgacggccaccccgggactgcaggcggcggatgtcaggccctgtctgggccagaactgagcgct

SEQ ID NO: 522711 - DNA, 201 bp, Homo sapiens
ccttgctcccgtgtcagagtccatatcagcagacagctggaggtggagcccgaggagccggaggcggagaacaagcacaagccccgcaggaagtcaaagcrgggcaagaaggaggcggaggacgagctgagcgccaggcacccggcggagctggcgatggagcccacccctgagctcccggctgaggtgctcatggtggag

SEQ ID NO: 522712 - DNA, 201 bp, Homo sapiens
tgaactggagccccagacccgccccctcactgccttgctataggagtcacctggagcctcggtctctcccagggccgatcctgtctgcagtcacatctttstggggcctgctgacccacaagcttttgttctctcagtacttgttacccagcttctcaacatccagggcccaatttgccctgcctggagttccccctggct

SEQ ID NO: 522713 - DNA, 201 bp, Homo sapiens
gaatcacttgaacctgggaggcaaaggttgcagtgagccaagatcgtgccactgcactccagcctgggcaacagagtgggactctgtctcaaaaaaaaaaagaaagaaaggcagccagggtgtgcaggacgctgtgggtatggacacctgagggtggtggtaactgagcggagatagtgtagtcatcatgtctagattccc

SEQ ID NO: 522714 - DNA, 201 bp, Homo sapiens
tgaaaccccatctctattaaaaatacaaaaattggccaggcacggtggctcacacctgtaatcccagcactttgggaggccgaggcgggcggatcacgagrtcaggagattgagaccatcctggctaacacagtgaaaccctgtctctaccaaaaaaaaaaaaaaaattagccgggcgtagtggcgggcgcctgtagtccc

SEQ ID NO: 522715 - DNA, 201 bp, Homo sapiens
tactacagctggccaatttttgtatttttagtagagacgggatttcatcatgttggccaggctggtctcgaactcctgacctcaagtgaaccgcctgcttyggcctcccaaagtgctggattgcaggcgggagccaccgtgcgtggcctattaagaattttctgaatgagcaattaacaactcttcaggcaaggaatttgt

SEQ ID NO: 522716 - DNA, 201 bp, Homo sapiens
atgacctctatggaccaaggtctcctctaagcctgactttgaggtgggcgatgctaggggcacagtggtgattgaatcagttccagtttctgccctcatgsagctcacagtctggtggaggagacacaagtccccagacagtgacagttcagactggtgatggctgggagaggggaagctcagggcagagtgatgggttgt

SEQ ID NO: 522717 - DNA, 201 bp, Homo sapiens
ttgaggtgggcgatgctaggggcacagtggtgattgaatcagttccagtttctgccctcatggagctcacagtctggtggaggagacacaagtccccagayagtgacagttcagactggtgatggctgggagaggggaagctcagggcagagtgatgggttgtgatgggggcagcacaggccgagggtctagggctctggt

SEQ ID NO: 522718 - DNA, 201 bp, Homo sapiens
agggtgaaaattcacactacgacactcggggggtgggtcccctccgagttctcgtccgcgggtgcctccacccagacctgaggggtgtcgggaagaccccmgcctaccgagtcagggcgggattaagacctccggcgctggaaacgcgtagggcggggcccagacctggatccagctagccgggcggtgtggggtgcgcat

SEQ ID NO: 522719 - DNA, 201 bp, Homo sapiens
ggaggcggagctttgcagtgagccgagatcgcgccactgcactccagcctaggcgacagagagagactccgtctcaaaaaaaaaaaaaaagaaaaaaaaagaaaaataacaataacaaaaattagctgggcgtggtggtgcacgcctgtagtcccagctactcgggagtcccagctactcaagcaggagaattgcttgaac

SEQ ID NO: 522720 - DNA, 201 bp, Homo sapiens; identical to SEQ ID NO: 466876

SEQ ID NO: 522721 - DNA, 201 bp, Homo sapiens
tggctggagatgtaagtaacctggggtccctggccccgtcctaaccgttccatcccttcccttgtggctgcccttgcacacacacccttgaccatgacaaycccagtgttcccattctccatgacattctcagacccctttcagtcacccctgacctgcccctaacttccgcccgcaggacatggaggtcagcgccacaga

SEQ ID NO: 522722 - DNA, 201 bp, Homo sapiens
ccccagcgtgtgagtcaaaccatactccaggcctccaggaggtgtttgtcgcgacaacacctgcagagggcccgtgcggagtcccttagtgagcggaccgwaaaccgccaccctggaaggatattggcatgccctagggtgaaaattcacactacgacactcggggggtgggtcccctccgagttctcgtccgcgggtgcc

SEQ ID NO: 522723 - DNA, 201 bp, Homo sapiens
gctggtgctcttggggttccctgtcctcactctccaccctcctctccccagtggctgcagctgactatgtattcctgaactggagccccagacccgccccytcactgccttgctataggagtcacctggagcctcggtctctcccagggccgatcctgtctgcagtcacatctttgtggggcctgctgacccacaagcttt

SEQ ID NO: 522724 - DNA, 201 bp, Homo sapiens
ggagactatcagaggggcggggcctgggaatgggaggagcctcagtgaggcgtggtctgggaggggcgtggtctaaaaatagaataggattaacctggagkctaacctgggtacatgaattaggccggggaggcctggtttgagagttctgctgtaagggggtggaccccagtgaggcggatatcagtcattgggggcggt

SEQ ID NO: 522725 - DNA, 201 bp, Homo sapiens
tgctcttggggttccctgtcctcactctccaccctcctctccccagtggctgcagctgactatgtattcctgaactggagccccagacccgccccctcacygccttgctataggagtcacctggagcctcggtctctcccagggccgatcctgtctgcagtcacatctttgtggggcctgctgacccacaagcttttgttc

SEQ ID NO: 522726 - DNA, 201 bp, Homo sapiens
cctgactttgaggtgggcgatgctaggggcacagtggtgattgaatcagttccagtttctgccctcatggagctcacagtctggtggaggagacacaagtycccagacagtgacagttcagactggtgatggctgggagaggggaagctcagggcagagtgatgggttgtgatgggggcagcacaggccgagggtctaggg

SEQ ID NO: 522727 - DNA, 201 bp, Homo sapiens
ccattcccaccaggccctgcacacacccactccgtaacctctcccctgtacctgtgccaagcctagcacttgtgatgcctccatgccccgagggccctctytcagttctgggaggatgactccagtccctgcacgccctggcacacccttcacggttgctacccaggcggccaagctccagaccgtgccagacccaggtgc

SEQ ID NO: 522728 - DNA, 201 bp, Homo sapiens
ccctgcctggagttccccctggctctaggacactctaacaagctctgtccacgggtctccccattcccaccaggccctgcacacacccactccgtaacctytcccctgtacctgtgccaagcctagcacttgtgatgcctccatgccccgagggccctctctcagttctgggaggatgactccagtccctgcacgccctgg

SEQ ID NO: 522729 - DNA, 201 bp, Homo sapiens
ccccattcccaccaggccctgcacacacccactccgtaacctctcccctgtacctgtgccaagcctagcacttgtgatgcctccatgccccgagggccctytctcagttctgggaggatgactccagtccctgcacgccctggcacacccttcacggttgctacccaggcggccaagctccagaccgtgccagacccaggt

SEQ ID NO: 522730 - DNA, 201 bp, Homo sapiens
cagtccctgcacgccctggcacacccttcacggttgctacccaggcggccaagctccagaccgtgccagacccaggtgccccagtgcctttgtctatattytgctcccagcctgccaggcccaggaggaaataaacatgccccagttgctgatctctatgggatctgcctcctgatctgacccgagagaggaggggtggct

SEQ ID NO: 522731 - DNA, 201 bp, Homo sapiens; identical to SEQ ID NO: 466874

SEQ ID NO: 522732 - DNA, 201 bp, Homo sapiens
acccctcccccttatctcttcgcagcgaggcggctgcgcagtacaacccggagcccccggtaagccccctctgcaaccagacccccttctcctgccaaggsctcttcgaggtcccatccctgttcctgtagagaagccccaccttcctccccttcttgtgaaattcctctgccagttcctcccatgccgtgtctgcagctt

SEQ ID NO: 522733 - DNA, 201 bp, Homo sapiens; identical to SEQ ID NO: 466875

SEQ ID NO: 522734 - DNA, 201 bp, Homo sapiens
aggacccccatattggggtatgggtgcctgggaggaccccacccctcagcccttcataccagctctgagctgcagtccccttcctcctattttgccagccrtccctgggtgagggcaaaggggctggtgctcttggggttccctgtcctcactctccaccctcctctccccagtggctgcagctgactatgtattcctgaa

SEQ ID NO: 522735 - DNA, 201 bp, Homo sapiens; identical to SEQ ID NO: 466877

SEQ ID NO: 522736 - DNA, 201 bp, Homo sapiens
gcttagaactggagaggatggagcatagatgtcagtaggaggctggggctgggcagaggtgatatcagtacacagaggccattattgaggagggtaacagmttggattccaatcctgatttcttcactttcttgctatgtgacctggggcatggcccctcccttcctgcctcatttctttttttcctgtttttaattttta

SEQ ID NO: 522737 - DNA, 201 bp, Homo sapiens
caccaggccctgcacacacccactccgtaacctctcccctgtacctgtgccaagcctagcacttgtgatgcctccatgccccgagggccctctctcagttytgggaggatgactccagtccctgcacgccctggcacacccttcacggttgctacccaggcggccaagctccagaccgtgccagacccaggtgccccagtg

SEQ ID NO: 522738 - DNA, 201 bp, Homo sapiens
gcactttgggaggccgaggcgggcggatcacgagatcaggagattgagaccatcctggctaacacagtgaaaccctgtctctaccaaaaaaaaaaaaaaaattagccgggcgtagtggcgggcgcctgtagtcccagctattcgggaggctgaagcaggagaatggcgtgaacccgagaggaggagcttgcagtgagccga

SEQ ID NO: 522739 - DNA, 201 bp, Homo sapiens
gatgttcctcagtgtctacaaggcctttgttatggagtgagttgggtggggtttagggctgggtccaaagtggggtgggttatctagtctcccttccttaytgtgacattttcctgcaggaccttcgtccacctctgctcgctgggcagttgggcagctctactggcccgagcagtggtaacggggctgctggccctcagc

SEQ ID NO: 522740 - DNA, 201 bp, Homo sapiens
ttctgttctcagatgctgttcttggccactttctttcccacctgggaaggcggcatctatgacttcattggggtgagaggggccagggaagggaagggagytcaggaatggggctccctgtccccctgtgcttacttaagcctcaacctgacccgcaggagttcatgaaggccagcgtggatgtggcagacctgataggtc

SEQ ID NO: 522741 - DNA, 201 bp, Homo sapiens
tctacaaggcctttgttatggagtgagttgggtggggtttagggctgggtccaaagtggggtgggttatctagtctcccttccttattgtgacattttccygcaggaccttcgtccacctctgctcgctgggcagttgggcagctctactggcccgagcagtggtaacggggctgctggccctcagcactttggccctgta

SEQ ID NO: 522742 - DNA, 201 bp, Homo sapiens
gggctgctggccctcagcactttggccctgtatgtcgccgttgtcaatgtgcactcctaggcttggtgtctcagacattgatgtaccttttccctgcctcrctccaggttttagtgaagtaaacagtatttggaaagttgttgctgcctccatttctctctcttgggaactgtctcccaataccgtgtccacctgggtctc

SEQ ID NO: 522743 - DNA, 201 bp, Homo sapiens
tgggtccaaagtggggtgggttatctagtctcccttccttattgtgacattttcctgcaggaccttcgtccacctctgctcgctgggcagttgggcagctytactggcccgagcagtggtaacggggctgctggccctcagcactttggccctgtatgtcgccgttgtcaatgtgcactcctaggcttggtgtctcagaca

SEQ ID NO: 522744 - DNA, 201 bp, Homo sapiens
ttccacgggggtgctggagggcaggggctcaaagcctggtgctgaaggtgtctgagtactggagaatcccatcctttgccttcctcagctgcattcccctrtgggtcggagcccggggcattgagtttgactggaagtacatccagatgagcatagactccaacatcagtctggtaggcagtcgtgctctcccacatacac

SEQ ID NO: 522745 - DNA, 201 bp, Homo sapiens
ggtgctgaaggtgtctgagtactggagaatcccatcctttgccttcctcagctgcattcccctatgggtcggagcccggggcattgagtttgactggaagyacatccagatgagcatagactccaacatcagtctggtaggcagtcgtgctctcccacatacacatttctgctggcggccatactcctccccaaggcctgg

SEQ ID NO: 522746 - DNA, 201 bp, Homo sapiens
tagggctgggtccaaagtggggtgggttatctagtctcccttccttattgtgacattttcctgcaggaccttcgtccacctctgctcgctgggcagttggrcagctctactggcccgagcagtggtaacggggctgctggccctcagcactttggccctgtatgtcgccgttgtcaatgtgcactcctaggcttggtgtct

SEQ ID NO: 522747 - DNA, 201 bp, Homo sapiens; identical to SEQ ID NO: 305485

SEQ ID NO: 522748 - DNA, 201 bp, Homo sapiens; identical to SEQ ID NO: 305497

SEQ ID NO: 522749 - DNA, 201 bp, Homo sapiens
gtgcactgtaggatttggggctggcaacagcagccggggttgggggcactgctggggtgcatggctgagtgtctggggctgggttaaggacaaggatcagyggagttagggatgcagctagacagggcatagaagggtagatttgaggtcagggctgaggttaaactaggtcctgatattgtttgtcacgggtcctctacc

SEQ ID NO: 522750 - DNA, 201 bp, Homo sapiens
agggcgagagggagagaggataaatagcagcgtggcttccctggctcctctctgcatccttcccgaccttcccagcaatatgcatcttgcacgtctggtcrgctcctgctccctccttctgctactgggggccctgtctggatgggcggccagcgatgaccccattgagaaggtcattgaagggatcaaccgagggctgag

SEQ ID NO: 522751 - DNA, 201 bp, Homo sapiens
cacatctgccgccagacagagccagggatgggtgggtggggaggaacggcgcagcagaggagcgggcacggcaggctgcagggtgccgcgagcagaggacrgtgcactgtaggatttggggctggcaacagcagccggggttgggggcactgctggggtgcatggctgagtgtctggggctgggttaaggacaaggatcag

SEQ ID NO: 522752 - DNA, 201 bp, Homo sapiens
ggggtcctggatctgcaagatgtgactggctcagacgtcgaagtccagagccacatctgccgccagacagagccagggatgggtgggtggggaggaacggygcagcagaggagcgggcacggcaggctgcagggtgccgcgagcagaggacggtgcactgtaggatttggggctggcaacagcagccggggttgggggcac

SEQ ID NO: 522753 - DNA, 201 bp, Homo sapiens
ttctggacagtgaggaggcagtgggttaagctgtgcctcccaccgcagccccagtcaccctggaggggaccaggtccctggggaaaaggaactgggagacyctccgcgtttgtggggttgtaacaagagtctgggctttgtccacagggcaaccatcaaagcggatcttccagccatcaaggaggggccacaaccacgccg

SEQ ID NO: 522754 - DNA, 201 bp, Homo sapiens
agtgaggaggcagtgggttaagctgtgcctcccaccgcagccccagtcaccctggaggggaccaggtccctggggaaaaggaactgggagaccctccgcgkttgtggggttgtaacaagagtctgggctttgtccacagggcaaccatcaaagcggatcttccagccatcaaggaggggccacaaccacgccgttagcctc

SEQ ID NO: 522755 - DNA, 201 bp, Homo sapiens
ctctctgcatccttcccgaccttcccagcaatatgcatcttgcacgtctggtcggctcctgctccctccttctgctactgggggccctgtctggatgggcrgccagcgatgaccccattgagaaggtcattgaagggatcaaccgagggctgagcaatgcagagagagaggtgggcaaggccctggatggcatcaacagtg

SEQ ID NO: 522756 - DNA, 201 bp, Homo sapiens
agggagtcgacaatgctgcagggcaggccggaaatgaggctgggaggtttggccagggagtccaccatgctgcagggcaggccggaaatgaggctgggagrtttggccagggggcccaccatggtctcagtgagggctggaaggagacagagaagtttggccaggggatccaccatgctgccggtcaggttgggaaggagg

SEQ ID NO: 522757 - DNA, 201 bp, Homo sapiens
gggcaaccatcaaagcggatcttccagccatcaaggaggggccacaaccacgccgttagcctctggggtaagcgcggactctggggtaggggagaggaggmccctgggagttccctagcatggctgtgggtcagacgctggagactgaccttcttgtccttgaattgcaggcctcggtcaacacgcctttcatcaaccttc

SEQ ID NO: 522758 - DNA, 201 bp, Homo sapiens
cacccttgtgtatcccaggctatgggggcggcagagcatcctctcaggctaaacacacgaggcttgttggttcctgcagaggccccagcccctctgcctgyggggactggcttccttgtgttcttaagtttagatgctaccttcctgaaacttccccagaacataactccggggccagagcagccagtccccttgtgcttc

SEQ ID NO: 522759 - DNA, 201 bp, Homo sapiens
ttttctgctctgcgtcctgatagatacgctcaccccgaccccttcccggtgtctgtttggacagctccccgggcgggcagacctgcagcctctgcaaagamcctccaacctgatacccagtcctgggcttccctctctccacctgctccctcccctttgcaccctgccctcatcttttgggtgcctttcatttccaccaag

SEQ ID NO: 522760 - DNA, 201 bp, Homo sapiens
gctggaaggagacagagaagtttggccagggggtccaccatactgctggtcaggttgggaaggaggcagagaagtttggccagggggcccaccatgctgcrgggcaggccggaaatgaggcagggagatttggccagggggcccaccatgctgcggggcaggccggaaatgaggctgggaggtttggccagggggtccacc

SEQ ID NO: 522761 - DNA, 201 bp, Homo sapiens
gggcaggctgggaaagagggagacatagcagttcatggtgtccaacctggggtccacgaggccgggaaggaggcagggcagtttggccagggagttcaccrtacccttgaacaggccgggaaggaagcagacaaagcggtccaagggttccacactggggtccaccaggctgggaaggaagcagagaaacttggccaaggg

SEQ ID NO: 522762 - DNA, 201 bp, Homo sapiens
tttggccagggtgtccaccatgctgcctcgcaggtggggaaggaggaagacagagtggtccaaggcctccatcatggcgttagtcaggctggaagggaggsggggcagtttggccacgacattcaccacacagcagggcaggctgggaaagagggagacatagcagttcatggtgtccaacctggggtccacgaggccggg

SEQ ID NO: 522763 - DNA, 201 bp, Homo sapiens
aggcaccaagaagggagcgtggggagcaggagagggtggactcctgtgcgccctcactctccaggctccatgaggggtcctggatctgcaagatgtgactggctcagacgtcgaagtccagagccacatctgccgccagacagagccagggatgggtgggtggggaggaacggcgcagcagaggagcgggcacggcaggct

SEQ ID NO: 522764 - DNA, 201 bp, Homo sapiens
ccatcacggggccaaccaggcgggaagtgaggcagggaagtttggccagggagtcgacaatgctgcagggcaggccggaaatgaggctgggaggtttggcmagggagtccaccatgctgcagggcaggccggaaatgaggctgggagatttggccagggggcccaccatggtctcagtgagggctggaaggagacagagaa

SEQ ID NO: 522765 - DNA, 201 bp, Homo sapiens
ggactctggggtaggggagaggaggcccctgggagttccctagcatggctgtgggtcagacgctggagactgaccttcttgtccttgaattgcaggcctcrgtcaacacgcctttcatcaaccttcccgccctgtggagggtgagtgccccatggtgtctcttttctgctctgcgtcctgatagatacgctcaccccgacc

SEQ ID NO: 522766 - DNA, 201 bp, Homo sapiens
atgctgcagggcaggccggaaatgaggctgggaggtttggccagggagtccaccatgctgcagggcaggccggaaatgaggctgggagatttggccagggrgcccaccatggtctcagtgagggctggaaggagacagagaagtttggccaggggatccaccatgctgccggtcaggttgggaaggaggcagagaagtttg

SEQ ID NO: 522767 - DNA, 201 bp, Homo sapiens
ctgtggagggtgagtgccccatggtgtctcttttctgctctgcgtcctgatagatacgctcaccccgaccccttcccggtgtctgtttggacagctccccrggcgggcagacctgcagcctctgcaaagaccctccaacctgatacccagtcctgggcttccctctctccacctgctccctcccctttgcaccctgccctc

SEQ ID NO: 522768 - DNA, 201 bp, Homo sapiens
gctgcagggcaggccggaaatgaggctgggaggtttggccagggagtccaccatgctgcagggcaggccggaaatgaggctgggagatttggccagggggyccaccatggtctcagtgagggctggaaggagacagagaagtttggccaggggatccaccatgctgccggtcaggttgggaaggaggcagagaagtttggc

SEQ ID NO: 522769 - DNA, 201 bp, Homo sapiens
gatacgctcaccccgaccccttcccggtgtctgtttggacagctccccgggcgggcagacctgcagcctctgcaaagaccctccaacctgatacccagtcytgggcttccctctctccacctgctccctcccctttgcaccctgccctcatcttttgggtgcctttcatttccaccaaggcaaacacaagctggcagaaaa

SEQ ID NO: 522770 - DNA, 201 bp, Homo sapiens
cagacaaactgatccatcatggggtccatcacggggccaaccaggcgggaagtgaggcagggaagtttggccagggagtcgacaatgctgcagggcaggcyggaaatgaggctgggaggtttggccagggagtccaccatgctgcagggcaggccggaaatgaggctgggagatttggccagggggcccaccatggtctca

SEQ ID NO: 522771 - DNA, 201 bp, Homo sapiens
aacagccagaggacctggtggtgctgctgggggaggaagcccggctgccgtgtgctctgggcgcctactgggggctagttcagtggactaagagtgggctrgccctagggggccaaagggacctaccaggtaagagtgttctctccacgctgggacgggctggctagggggagagttgctgggctcggctgtacctgcagt

SEQ ID NO: 522772 - DNA, 201 bp, Homo sapiens
cgcggtggcgcgcaggtacagccctaaatctgaggcggtggctggagggggaccaggcttccttacaaatccggcttctgacgccccttccctgtcgcagrtgctgggctctggagccacactgcgtcttccgtcggtggggcccgaggacgcaggcgactatgtgtgcagagctgaggctgggctatcgggcctgcgggg

SEQ ID NO: 522773 - DNA, 201 bp, Homo sapiens
gtggggtattaggaggaggagagtgtggagctggggcatattcttgcgccctagagggtgtggtgtttctgtggggctggctgatcccaggtcagtggctrcattccgccccggccatgtgacccctagtctctttcgtccagttgggccgattctgcaggcaaagccggagcccgtgtccgtggacgtgggggaagacgc

SEQ ID NO: 522774 - DNA, 201 bp, Homo sapiens
cctggctctccctgaggggaactttgctcggccaatggaaatgcagccaagatggccatatactccctaggaacccaagatggccaccatcttgattttaytttccttaaagactcagaaagacttggacccaaggagtggggatacagtgagaattaccactgttggggcaaaatattgggataaaaatatttatgttta

SEQ ID NO: 522775 - DNA, 201 bp, Homo sapiens
gagtcctgatttttgagctgcttctttgggggtgacccacggagtttgggaattattatgttattgcaaaatagtacataggccaggtgcagtggctcacrcctgtaatcccaacgctttgggaggttgaggccagaggatcgcttgaaaccaggagtttgagaccagcctgggcaacataacaagaccttatctctacac

SEQ ID NO: 522776 - DNA, 201 bp, Homo sapiens
tccgtcatgacagctcgatcattttgcctgtgttccacccatcacagccatgaccactctgatctgggcttccttatcccacccactatgctgagggctcyaccatcacagcccctgtcattgcctatgcctttcccaggcacagccctgacccctctgggtactgtctcatgatctgtcatttttcctttggtgtgggat

SEQ ID NO: 522777 - DNA, 201 bp, Homo sapiens
cagagagccgcgggggactgggtccgggcctgatctctgtgctacacatttcggggacccaggagtctgactttagcaggagctttaactgcagtgcccgraaccggctgggcgagggaggtgcccaggccagcctgggccgtagaggtgagaccccagcccgaagaccccaaatctggagagtctaaaccccacaaacgc

SEQ ID NO: 522778 - DNA, 201 bp, Homo sapiens
cattggggcggggggatcctctgactattccctctcactaagttccctaccccagggccccattgtgcacactgaccacagtgatctggttctggaggagraagggactctggagaccaaggtgagtgttgagaggggtggggctcccttcactgttgggagaggcggggctcccttcattgtgtttccgtctctctccca

SEQ ID NO: 522779 - DNA, 201 bp, Homo sapiens
tccctccagaccctgctgaaggaagggacccctgggtcagtggagagcaccttaaccctgacccctttcagccatgatgatggagccacctttgtctgccrggcccggagccaggccctgcccacaggaagagacacagctatcacactgagcctgcagtgtgagtgcagctggccctgggaaagaggggtgtggggccct

SEQ ID NO: 522780 - DNA, 201 bp, Homo sapiens
ggttgctggagttcctgcgaacctgacatgtcggagccgtggggatgcccgccctacccctgaattgctgtggttccgagatggggtcctgttggatggarccaccttccatcaggtcaggtccaaattcctgtgctagcctttgcccattgagggaaacttgggttacactctgaccacaggctcatccagaagagaaga

SEQ ID NO: 522781 - DNA, 201 bp, Homo sapiens
tcctgcgaggtcagcaacgccgtgggtagcgccaaccgcagtactgcgctggatgtgctgtgtgagctggggccggcctgtgggtgtggtcaaaggtggcmgtggctttcagggctgttgagggtcggggcctggaggggcggggccgggagagcgagcgtggggtattaggaggaggagagtgtggagctggggcatatt

SEQ ID NO: 522782 - DNA, 201 bp, Homo sapiens
ccctggctctccctgaggggaactttgctcggccaatggaaatgcagccaagatggccatatactccctaggaacccaagatggccaccatcttgattttwctttccttaaagactcagaaagacttggacccaaggagtggggatacagtgagaattaccactgttggggcaaaatattgggataaaaatatttatgttt

SEQ ID NO: 522783 - DNA, 201 bp, Homo sapiens
ccccaccctggctctccctgaggggaactttgctcggccaatggaaatgcagccaagatggccatatactccctaggaacccaagatggccaccatcttgwttttactttccttaaagactcagaaagacttggacccaaggagtggggatacagtgagaattaccactgttggggcaaaatattgggataaaaatattta

SEQ ID NO: 522784 - DNA, 201 bp, Homo sapiens
ccttgactctcacatcggggagactaggagagggcagaaggctggcacattgaggtaactggggaaattgggaactgaaagcccagactcctggctcaaarggagaaggggattaggggcccagactcctgggatggaggaaccagggactggacacctaggccagtgacggaggtgttcctggtccttgcccatctgacc

SEQ ID NO: 522785 - DNA, 201 bp, Homo sapiens
gccccaccctggctctccctgaggggaactttgctcggccaatggaaatgcagccaagatggccatatactccctaggaacccaagatggccaccatcttkattttactttccttaaagactcagaaagacttggacccaaggagtggggatacagtgagaattaccactgttggggcaaaatattgggataaaaatattt

SEQ ID NO: 522786 - DNA, 201 bp, Homo sapiens
ccaggccccaccctggctctccctgaggggaactttgctcggccaatggaaatgcagccaagatggccatatactccctaggaacccaagatggccaccawcttgattttactttccttaaagactcagaaagacttggacccaaggagtggggatacagtgagaattaccactgttggggcaaaatattgggataaaaat

SEQ ID NO: 522787 - DNA, 201 bp, Homo sapiens
tccccagactggttcttcctctggggtcctacctcaggacagccacattgactccaggccatccccaggccagagcacttctctctctctctctctcctgygtacctagcacatgccattctctctcttcttttttttttttttttttttttgagacggagtctcattctgttgcccaggctggagtgcagtggtgcaatc

SEQ ID NO: 522788 - DNA, 201 bp, Homo sapiens
caccacgcctgactgattttgtatttttagtagagattgggtttcaccatgttggccaggctggtctcaaactcctgacctcaggtgatccacccgcctcracctcccaaagtgctaggattacaggcatgagcctccacgcccggcctgagggctcaagtctttttttttctttctttcttttttttgagacggagtctt

SEQ ID NO: 522789 - DNA, 201 bp, Homo sapiens
agagtttcggcatgttagccaggctggtctcaaacttctggcctcaagtgatactcctgctgcggcctcccaaagtgctgggattacatgcatgagccacygtgctggcttcttacagcccttttattgtcctgagtgcagtccccagctcttgggtgctcttactccctcctgcctggcctccactggctggctgaaggt

SEQ ID NO: 522790 - DNA, 201 bp, Homo sapiens
cctattttttgcatttttagtagagacagagtttcggcatgttagccaggctggtctcaaacttctggcctcaagtgatactcctgctgcggcctcccaamgtgctgggattacatgcatgagccaccgtgctggcttcttacagcccttttattgtcctgagtgcagtccccagctcttgggtgctcttactccctcctg

SEQ ID NO: 522791 - DNA, 201 bp, Homo sapiens
gcccctctgtgtctctggttgctggagttcctgcgaacctgacatgtcggagccgtggggatgcccgccctacccctgaattgctgtggttccgagatggsgtcctgttggatggaaccaccttccatcaggtcaggtccaaattcctgtgctagcctttgcccattgagggaaacttgggttacactctgaccacaggct

SEQ ID NO: 522792 - DNA, 201 bp, Homo sapiens
gcacactgaccacagtgatctggttctggaggaggaagggactctggagaccaaggtgagtgttgagaggggtggggctcccttcactgttgggagaggcrgggctcccttcattgtgtttccgtctctctcccacgcctgtcccctcctttttccttctgttgtcctcagagttgggactcagctccccaccccactcct

SEQ ID NO: 522793 - DNA, 201 bp, Homo sapiens
aggggccctgctcgcctccagtgtctggttttcgcctctcccgccccagatgccgtggtaaggaaatgtcactcctcccgtgacccatccagccgtgatcyctgacctcccacctggccccccgaaactactgtgaccatttctgacttcccagacatccctcctgcttcttcctcccctcctcagtctcctccgtgtcct

SEQ ID NO: 522794 - DNA, 201 bp, Homo sapiens
gccttcacattctgaatcctaaactgagagactcctcacacctaggggccccaaaaagggaaactccaatgattgcaaagcaaattgcaaagtaaaggacmcctcaaattctaagactccctaaagccagggagtttaaactcactctcaaacttggggaaccccaaattcaagggcctttgaatcttcaaatgtgcgacc

SEQ ID NO: 522795 - DNA, 201 bp, Homo sapiens
tgccactcagcagcagagtgagactccgagcaggagaggacagacagctggggtccctggggaaagagaaagctgggccttgactctcacatcggggagastaggagagggcagaaggctggcacattgaggtaactggggaaattgggaactgaaagcccagactcctggctcaaagggagaaggggattaggggcccag

SEQ ID NO: 522796 - DNA, 201 bp, Homo sapiens
tttgggaaattgatgggctcgggtaaacatttaggagtcctgatttttgagctgcttctttgggggtgacccacggagtttgggaattattatgttattgsaaaatagtacataggccaggtgcagtggctcacgcctgtaatcccaacgctttgggaggttgaggccagaggatcgcttgaaaccaggagtttgagacca

SEQ ID NO: 522797 - DNA, 201 bp, Homo sapiens
agagtgggctggccctagggggccaaagggacctaccaggtaagagtgttctctccacgctgggacgggctggctagggggagagttgctgggctcggctstacctgcagtttctattttgacattttcaagtttgggaaattgatgggctcgggtaaacatttaggagtcctgatttttgagctgcttctttgggggtga

SEQ ID NO: 522798 - DNA, 201 bp, Homo sapiens
agcggaggaatatggggtgggggtggggagttgcttgcgggctgcctcttcactagcgagaagggagctgggggctgggactcctgggtcctgaatgaggrggcccctgaaggtgctaagctcagccctgctgccccgaactctcctaggcccgtcgccccatttcctgcaacagccagaggacctggtggtgctgctggg

SEQ ID NO: 522799 - DNA, 201 bp, Homo sapiens
agtttgcctgtctgcagactcttcccacacatctgtcccagccctagcctccatctggagccccagaccagggctcaccctgcctgtgctctcctcatcayggtcaagccccctttcagccaccaggtcctacactggccccacatctccccagactggttcttcctctggggtcctacctcaggacagccacattgactc

SEQ ID NO: 522800 - DNA, 201 bp, Homo sapiens
cggagcccgtgtccgtggacgtgggggaagacgcttccttcagctgcgcctggcgcgggaacccgcttccacgggtaacctggacccgccgcggtggcgckcaggtacagccctaaatctgaggcggtggctggagggggaccaggcttccttacaaatccggcttctgacgccccttccctgtcgcaggtgctgggctct

SEQ ID NO: 522801 - DNA, 201 bp, Homo sapiens
ggaaggccagtgcgacggcaaatctcgtgaaccttgggggacgaatgctcaggatgcgggtccccgccctcctcgtcctcctcttctgcttcagagggagmgcaggtaccgcacgaggggagcggaggaatatggggtgggggtggggagttgcttgcgggctgcctcttcactagcgagaagggagctgggggctgggac

SEQ ID NO: 522802 - DNA, 201 bp, Homo sapiens
acattgtgaccccgcccatcgcttaactccaccggtcgctgtttgtcagcctcagcctctttctccgagcaaaagaacctgatgcgaatccctggcagcarcgacggctccagttcacgaggtcctgaagaagaggagacaggcagccgcgaggaccgggtaggatgccagggtccccagacctgactgtgcctccagacc

SEQ ID NO: 522803 - DNA, 201 bp, Homo sapiens
cttcattgtgtttccgtctctctcccacgcctgtcccctcctttttccttctgttgtcctcagagttgggactcagctccccaccccactcctcctgcccyctgggccatctcactcagctcccagcctcagtttgcctgtctgcagactcttcccacacatctgtcccagccctagcctccatctggagccccagaccag

SEQ ID NO: 522804 - DNA, 201 bp, Homo sapiens
ttgggagaggcggggctcccttcattgtgtttccgtctctctcccacgcctgtcccctcctttttccttctgttgtcctcagagttgggactcagctcccyaccccactcctcctgccccctgggccatctcactcagctcccagcctcagtttgcctgtctgcagactcttcccacacatctgtcccagccctagcctcc

SEQ ID NO: 522805 - DNA, 201 bp, Homo sapiens
gaaatgctcaacactggaaagcagggtgggggcgctttagtccagagcccattgccctctctgtccagccctcccctctgcgcccatctgtgcagggatcmggcccttccgctgcagtgcttgcgggaaagcgtttacgcagcgctgctccctggaagctcaccttgctaaggtgcatggacagccggccagctacgctta

SEQ ID NO: 522806 - DNA, 201 bp, Homo sapiens
ttatgtcagaacatgggacaaggcaacaggagtgcgatgggagataagggctttttcagctgtgcatgcattggaggaaggaaagcgccagccggaatgtmatatattcatgaaagcaagccactgttctaggcatgggctgttatattcagcgggaataagacaaaaatccacaattttatggagcttatattctggttg

SEQ ID NO: 522807 - DNA, 201 bp, Homo sapiens
ggacactctgtaaatactcatttgcagagtaacaaagggtggatggggtccagccagagaggctaataactcctgcatccctccagcagcccacacagggmaacctgacctctgctcccaggggcccagggacgctgggctgcccgctctgccctaaggccttccctctgcagcgcatgctgacaaggcacctcaagtgcc

SEQ ID NO: 522808 - DNA, 201 bp, Homo sapiens
ggctagcaaagccagctgtttcgctcctgcctgctctcagccttaatgaagctgacagccccttgctcccccgacccatctgcacacgccctccagcctcrggacctgtccgcccctacttctctgtgttgggaatgcctctcctttcctagtagtgagctctctactgttaggtctcaccccaggcaccagggccggcag

SEQ ID NO: 522809 - DNA, 201 bp, Homo sapiens
ggttcctcagaggcttcccctcctttcccaccagggatagtcatcctggggctgaggtctgacagcaggtggaagcagcccctgtgtgtggagagccttcyggagggcatgccccgcgccttcctggtcaggagtcggcgtccacagccccccaactggggccatctgcctgaccagctccggggagatgcctatatccca

SEQ ID NO: 522810 - DNA, 201 bp, Homo sapiens
agtaacaaagggtggatggggtccagccagagaggctaataactcctgcatccctccagcagcccacacagggcaacctgacctctgctcccaggggcccwgggacgctgggctgcccgctctgccctaaggccttccctctgcagcgcatgctgacaaggcacctcaagtgccacagccccgtgcgccgccacctgtgcc

SEQ ID NO: 522811 - DNA, 201 bp, Homo sapiens
aggcaacaggagtgcgatgggagataagggctttttcagctgtgcatgcattggaggaaggaaagcgccagccggaatgtaatatattcatgaaagcaagscactgttctaggcatgggctgttatattcagcgggaataagacaaaaatccacaattttatggagcttatattctggttggggctgcatgtatagacaat

SEQ ID NO: 522812 - DNA, 201 bp, Homo sapiens
aaggccaggcgtggtggctcacgcctgtaatcccagcactttgggaggccgaggcgggcggatcatgaggtcaggagatcgagaccattctggccaacacrgtgaaacactgtctctactaaaaatgcaaaaaaattagccaggcgtggtggcaggcacctgtagtcccagctactctggaggctgaggcaggagaatggc

SEQ ID NO: 522813 - DNA, 201 bp, Homo sapiens
atttcatgtcatttttatgtcactcaatttttgcctctattttgttttcctctaaccatttaaacatggaaagaaattcttagtaaaaaacaaaacaggcygggcgtagtggctcatgcctgaaatcccagcactttgtgaggcagaggcgggcagatcatgaggtcaagagatggagaccatgctggccaacatggtgaa

SEQ ID NO: 522814 - DNA, 201 bp, Homo sapiens
cctcagggctccctgctggctgcccgggcaccttgtagggagttgagctgtgagtacagccaggagccctgcagaggtgagagccagggaggcctgagctkagcacccgcaggcatggagatcagaagctcacccccattgcacagagcggggaaactgaggctcggcaaggtggagccccagcctggccacggcagatca

SEQ ID NO: 522815 - DNA, 201 bp, Homo sapiens
ctcaatttttgcctctattttgttttcctctaaccatttaaacatggaaagaaattcttagtaaaaaacaaaacaggccgggcgtagtggctcatgcctgwaatcccagcactttgtgaggcagaggcgggcagatcatgaggtcaagagatggagaccatgctggccaacatggtgaaaccccgtctctactaaaaatac

SEQ ID NO: 522816 - DNA, 201 bp, Homo sapiens
ttttcctctaaccatttaaacatggaaagaaattcttagtaaaaaacaaaacaggccgggcgtagtggctcatgcctgaaatcccagcactttgtgaggcrgaggcgggcagatcatgaggtcaagagatggagaccatgctggccaacatggtgaaaccccgtctctactaaaaatacaaaaaattagccgggcgtggtg

SEQ ID NO: 522817 - DNA, 201 bp, Homo sapiens
taaaaaacaaaacaggccgggcgtagtggctcatgcctgaaatcccagcactttgtgaggcagaggcgggcagatcatgaggtcaagagatggagaccatsctggccaacatggtgaaaccccgtctctactaaaaatacaaaaaattagccgggcgtggtggcgcacgcctgtagtcccagctacttgggaggctgaggc

SEQ ID NO: 522818 - DNA, 201 bp, Homo sapiens
tcgccctggttcgccgcctccttctgcgtggtgggcctggcctccaacctgctggccctgagcgtgctggcgggcgcgcggcaggggggttcgcacacgckctcctccttcctcaccttcctctgcggcctcgtcctcaccgacttcctggggctgctggtgaccggtaccatcgtggtgtcccagcacgccgcgctcttc

SEQ ID NO: 522819 - DNA, 201 bp, Homo sapiens
agctcggcttagcccccgcggacccctccaggccgcgaccccagggcgtcctgtgccgccacgccctccatctgtgtgggtcctctgctgggcccgccccwggtcacagccagactgactcagtttccctgggaggtcccgctcgagcccgtccttcccctccctctgcccgcccccagccctcgccccaccctcggcgcc

SEQ ID NO: 522820 - DNA, 201 bp, Homo sapiens
gtcgcctcgcagcgccgcgcctgggccaccgtggggctggtgtgggcggccgcgctggcgctgggcctgctgcccctgctgggcgtgggtcgctacaccgwgcaatacccggggtcctggtgcttcctgacgctgggcgccgagtccggggacgtggccttcgggctgctcttctccatgctgggcggcctctcggtcggg

SEQ ID NO: 522821 - DNA, 201 bp, Homo sapiens
cttcctgacgctgggcgccgagtccggggacgtggccttcgggctgctcttctccatgctgggcggcctctcggtcgggctgtccttcctgctgaacacgrtcagcgtggccaccctgtgccacgtctaccacgggcaggaggcggcccagcagcgtccccgggactccgaggtggagatgatggctcagctcctggggat

SEQ ID NO: 522822 - DNA, 201 bp, Homo sapiens
ctgcgtggtgggcctggcctccaacctgctggccctgagcgtgctggcgggcgcgcggcaggggggttcgcacacgcgctcctccttcctcaccttcctcwgcggcctcgtcctcaccgacttcctggggctgctggtgaccggtaccatcgtggtgtcccagcacgccgcgctcttcgagtggcacgccgtggaccctgg

SEQ ID NO: 522823 - DNA, 201 bp, Homo sapiens
ccagcgcccgggcctctggaaacagcgccggacagagccctccgagtcacacgacctgcaagccggataccctgtcaggggtggcatcggatgagggagarctcactgtccgccttccagaaagaagccaggaattaagacagagatttctggaacccgggacccaggcagattcccatcaaagttgcaggacctcagcct

SEQ ID NO: 522824 - DNA, 201 bp, Homo sapiens
agcgtgctggcgggcgcgcggcaggggggttcgcacacgcgctcctccttcctcaccttcctctgcggcctcgtcctcaccgacttcctggggctgctggwgaccggtaccatcgtggtgtcccagcacgccgcgctcttcgagtggcacgccgtggaccctggctgccgtctctgtcgcttcatgggcgtcgtcatgatc

SEQ ID NO: 522825 - DNA, 201 bp, Homo sapiens
tgctggcgggcgcgcggcaggggggttcgcacacgcgctcctccttcctcaccttcctctgcggcctcgtcctcaccgacttcctggggctgctggtgacyggtaccatcgtggtgtcccagcacgccgcgctcttcgagtggcacgccgtggaccctggctgccgtctctgtcgcttcatgggcgtcgtcatgatcttct

SEQ ID NO: 522826 - DNA, 201 bp, Homo sapiens
gacggcgcccggacccccgggcgcgggatccagccaggtgggagccccgcagatgaggtctctgaaggtgaggtcgccccgctggcttagggcgggatgcwctgctctggtgtgagcccgggctgctgggcgcatccggcgctggccctgccctgctgtgggtgtgtcgcaaagcccgcggtgacagcggccaggtgccag

SEQ ID NO: 522827 - DNA, 201 bp, Homo sapiens
caggactggaagcgtgttagaattccacaaccctgaacccgctgagggcaaacgtctgctctcagactgcaaaattctggagttattcaacatcgaaaagsgatcttgggtccacacctctccccagacacagggagggacagtaattttcccaagagccgcagtgctgctctactgccccaccgcgtgggggcccctgct

SEQ ID NO: 522828 - DNA, 201 bp, Homo sapiens
aaagtgctgggatcacaggcatgaaccaccacacctggccatttttttttttttttttagacggagtctcactctgtggcccagcctggagtacagtggcrcgatctcggctcactgcaacctccgcctcccgggttcaagcgattctcgtgcctcagcctcccgagcagctgggattacaggcgtaagccactgcgcccg

SEQ ID NO: 522829 - DNA, 201 bp, Homo sapiens
ccctgtgccacgtctaccacgggcaggaggcggcccagcagcgtccccgggactccgaggtggagatgatggctcagctcctggggatcatggtggtggcmagcgtgtgttggctgccccttctggtgagtaggggctctgcggggtcctgctaccctcctgactggacctctggtcacccagggtggatttagatcctga

SEQ ID NO: 522830 - DNA, 201 bp, Homo sapiens
tggacagagcgcccctcccgcgcctttccgcggagcccttggcccctcggacagcccatctgcctgttctgaggattcaggggctgggggtgctggatggrcagtgggcatcagcagcagggttttgggttgaccccaatccaacccggggacccccaactcctccctgatccttttaccaagcactctcccttcctcggc

SEQ ID NO: 522831 - DNA, 201 bp, Homo sapiens
tccttttaccaagcactctcccttcctcggcccctttttcccatccagagctcccaccccttctctgcgtccctcccaaccccaggaagggcatgcagacrttggaagagggtcttgcattgctatttttttttttagacggagtcttgctctgtcccccaggctggagtgcagtggcgcaatctcagctcactgcaacct

SEQ ID NO: 522832 - DNA, 201 bp, Homo sapiens
agtggaccctggatctcaagggaccccgggcagggaccggggcgggcggggctggaggcgggggcccaggctgacagctctcccctttgcaggtcttcatygcccagacagtgctgcgaaacccgcctgccatgagccccgccgggcagctgtcccgcaccacggagaaggagctgctcatctacttgcgcgtggccacct

SEQ ID NO: 522833 - DNA, 201 bp, Homo sapiens
ggtggtgcatgcctgtaatcccagctactcgggaggctgaggcaggagaatcgcttgaacccaggaggcggaggttgtggtaagccgagaacctgccattkcactccagcctgggcaacaagagtgaaactccgtctcaaaaaaaaaaaaaaatttcccatcaatcctgacctatagataaatataatttttattatttaa

SEQ ID NO: 522834 - DNA, 201 bp, Homo sapiens
aaaatcagccagatgtggtggtgcatgcctgtaatcccagctactcgggaggctgaggcaggagaatcgcttgaacccaggaggcggaggttgtggtaagscgagaacctgccattgcactccagcctgggcaacaagagtgaaactccgtctcaaaaaaaaaaaaaaatttcccatcaatcctgacctatagataaatat

SEQ ID NO: 522835 - DNA, 201 bp, Homo sapiens
tcccaagtagcagggattacaggtgcataccactacacccagatatatatatattttaagagatagggtctcgctatgttggccaggatggtcttgaactyctgacctcaagtgatccgcccactttggcctcccaaagtgctgggataagaggcgtgagccactgcgcctggcttggctccgattttgttgtgcattgtg

SEQ ID NO: 522836 - DNA, 201 bp, Homo sapiens
aatacaaaaaaatcagccagatgtggtggtgcatgcctgtaatcccagctactcgggaggctgaggcaggagaatcgcttgaacccaggaggcggaggttktggtaagccgagaacctgccattgcactccagcctgggcaacaagagtgaaactccgtctcaaaaaaaaaaaaaaatttcccatcaatcctgacctatag

SEQ ID NO: 522837 - DNA, 201 bp, Homo sapiens
cgcgatctcagctcactgcaagctccacctcccgggttcacaccattctcctgcctcagcctcccaagtagctgggactacgggcgcccgccaccacgccyggctaattttttgtatttttagtagagacggggtttcaccgtgttagccaggatggtctcgatctcctgacctcgtgatccgcccacctgggcctccctc

SEQ ID NO: 522838 - DNA, 201 bp, Homo sapiens
cccgtctctactaaaaatacaaaaaaatcagccagatgtggtggtgcatgcctgtaatcccagctactcgggaggctgaggcaggagaatcgcttgaaccsaggaggcggaggttgtggtaagccgagaacctgccattgcactccagcctgggcaacaagagtgaaactccgtctcaaaaaaaaaaaaaaatttcccatc

SEQ ID NO: 522839 - DNA, 201 bp, Homo sapiens
agtctcgctctgtcgcccaggctggagggcagtggcgcgatctcagctcactgcaagctccacctcccgggttcacaccattctcctgcctcagcctcccragtagctgggactacgggcgcccgccaccacgcctggctaattttttgtatttttagtagagacggggtttcaccgtgttagccaggatggtctcgatct

SEQ ID NO: 522840 - DNA, 201 bp, Homo sapiens
tcagggccagcatgcattgagtgcccgctgtgctgtgctgagtgctgcgcgtggatcccttcactcccgtcatcagcaaccccgactttttttttttttttgagatggagtctcgctctgtcgcccaggctggagggcagtggcgcgatctcagctcactgcaagctccacctcccgggttcacaccattctcctgcctca

SEQ ID NO: 522841 - DNA, 201 bp, Homo sapiens
gtgctgggagtataggtgtgagccaccgcacccggccaaattattttattttattttaagatggagtttcgatgtgtcacccaggctggagtgcagtggcrcaattttagctcactgcaacctctgcctcctgggttcaagggatcctcccacttcagcctccggagtagctgggactacaggtgtgcaccaccacacccg

SEQ ID NO: 522842 - DNA, 201 bp, Homo sapiens
ggaggctgaggcgggaggatcgcttgaggccaggagtccgagaccagcctggccaacatggtgaaaccctgtctctactaaaaatacaaaaattaaggccrggcgtggtggctcacgcctgtaatcccagcactttgggaggccgaggcgggcggatcatgaggtcaggagatcgagaccattctggccaacacggtgaaa

SEQ ID NO: 522843 - DNA, 201 bp, Homo sapiens
atgtggtggtgggcgcctgtagtcccagctactcgggaggctgaggcaggagaatggcgtaaacccaggaggcggagactccgtctcaaaaaaaaaaaaaaggtatttatttatttattttgagacaggatcttgctctgtcacccaggctggagtgcaaccatgcctgggtaacttttctatttattttaactttttgta

SEQ ID NO: 522844 - DNA, 201 bp, Homo sapiens
agtagctgggactacaggtgtgcaccaccacacccggctaattttgtatgttttagtagagatggtgtttgaccatgttggtcaggctgatctcaaacaaagtattttaatataatgtaacatttaattataatataattgtatgatatatgatatatatcaattataggccacattataattatgaataattatcatata

SEQ ID NO: 522845 - DNA, 201 bp, Homo sapiens
cttggggcagccaggcctggtgcccacgcccagcccagcgcccgggcctctggaaacagcgccggacagagccctccgagtcacacgacctgcaagccggrtaccctgtcaggggtggcatcggatgagggagaactcactgtccgccttccagaaagaagccaggaattaagacagagatttctggaacccgggacccag

SEQ ID NO: 522846 - DNA, 201 bp, Homo sapiens
gagtagctgggactacaggtgtgcaccaccacacccggctaattttgtatgttttagtagagatggtgtttgaccatgttggtcaggctgatctcaaacaaagtattttaatataatgtaacatttaattataatataattgtatgatatatgatatatatcaattataggccacattataattatgaataattatcatat

SEQ ID NO: 522847 - DNA, 201 bp, Homo sapiens
tcctccttcctcaccttcctctgcggcctcgtcctcaccgacttcctggggctgctggtgaccggtaccatcgtggtgtcccagcacgccgcgctcttcgwgtggcacgccgtggaccctggctgccgtctctgtcgcttcatgggcgtcgtcatgatcttcttcggcctgtccccgctgctgctgggggccgccatggcc

SEQ ID NO: 522848 - DNA, 201 bp, Homo sapiens
ggagtagctgggactacaggtgtgcaccaccacacccggctaattttgtatgttttagtagagatggtgtttgaccatgttggtcaggctgatctcaaacaaagtattttaatataatgtaacatttaattataatataattgtatgatatatgatatatatcaattataggccacattataattatgaataattatcata

SEQ ID NO: 522849 - DNA, 201 bp, Homo sapiens
ccatgagccccgccgggcagctgtcccgcaccacggagaaggagctgctcatctacttgcgcgtggccacctggaaccagatcctggacccctgggtgtayatcctgttccgccgcgccgtgctccggcgtctccagcctcgcctcagcacccggcccaggtcgctgtccctccagccccagctcacgcagcgctccgggc

SEQ ID NO: 522850 - DNA, 201 bp, Homo sapiens
tctgcggcctcgtcctcaccgacttcctggggctgctggtgaccggtaccatcgtggtgtcccagcacgccgcgctcttcgagtggcacgccgtggacccwggctgccgtctctgtcgcttcatgggcgtcgtcatgatcttcttcggcctgtccccgctgctgctgggggccgccatggcctcagagcgctacctgggta

SEQ ID NO: 522851 - DNA, 201 bp, Homo sapiens
cggagtagctgggactacaggtgtgcaccaccacacccggctaattttgtatgttttagtagagatggtgtttgaccatgttggtcaggctgatctcaaacaaagtattttaatataatgtaacatttaattataatataattgtatgatatatgatatatatcaattataggccacattataattatgaataattatcat

SEQ ID NO: 522852 - DNA, 201 bp, Homo sapiens
tgatcttcttcggcctgtccccgctgctgctgggggccgccatggcctcagagcgctacctgggtatcacccggcccttctcgcgcccggcggtcgcctcrcagcgccgcgcctgggccaccgtggggctggtgtgggcggccgcgctggcgctgggcctgctgcccctgctgggcgtgggtcgctacaccgtgcaatacc

SEQ ID NO: 522853 - DNA, 201 bp, Homo sapiens
ggcccaggctgacagctctcccctttgcaggtcttcatcgcccagacagtgctgcgaaacccgcctgccatgagccccgccgggcagctgtcccgcaccayggagaaggagctgctcatctacttgcgcgtggccacctggaaccagatcctggacccctgggtgtatatcctgttccgccgcgccgtgctccggcgtctc

SEQ ID NO: 522854 - DNA, 201 bp, Homo sapiens
aatggcatgaacccaggaggcggagcttgcagtgagcagagattgcgccactgcactccagcctgggcgacagagcgagactccgtctcaaaaaaaaaaataaaaaataaaaaaattagccagacatggtggcatgtgcctgcaatcccagcactttgagaggtcaaggcaggaggattgctggagcctgggaggttgagg

SEQ ID NO: 522855 - DNA, 201 bp, Homo sapiens
tagtcccagctactctggaggctgaggcaggagaatggcatgaacccaggaggcggagcttgcagtgagcagagattgcgccactgcactccagcctgggygacagagcgagactccgtctcaaaaaaaaaaataaaaaataaaaaaattagccagacatggtggcatgtgcctgcaatcccagcactttgagaggtcaag

SEQ ID NO: 522856 - DNA, 201 bp, Homo sapiens
cagtgccagcctgccctgtctgcagcatcggcctgatggggtggtgactgatccctcagggctccggagccatgtggcccaacggcagttccctggggccytgtttccggcccacaaacattaccctggaggagagacggctgatcgcctcgccctggttcgccgcctccttctgcgtggtgggcctggcctccaacctgc

SEQ ID NO: 522857 - DNA, 201 bp, Homo sapiens
gtgaaacactgtctctactaaaaatgcaaaaaaattagccaggcgtggtggcaggcacctgtagtcccagctactctggaggctgaggcaggagaatggcrtgaacccaggaggcggagcttgcagtgagcagagattgcgccactgcactccagcctgggcgacagagcgagactccgtctcaaaaaaaaaaataaaaaa

SEQ ID NO: 522858 - DNA, 201 bp, Homo sapiens
ggcctcagagcgctacctgggtatcacccggcccttctcgcgcccggcggtcgcctcgcagcgccgcgcctgggccaccgtggggctggtgtgggcggccrcgctggcgctgggcctgctgcccctgctgggcgtgggtcgctacaccgtgcaatacccggggtcctggtgcttcctgacgctgggcgccgagtccgggga

SEQ ID NO: 522859 - DNA, 201 bp, Homo sapiens
aaaattaaggccaggcgtggtggctcacgcctgtaatcccagcactttgggaggccgaggcgggcggatcatgaggtcaggagatcgagaccattctggcyaacacggtgaaacactgtctctactaaaaatgcaaaaaaattagccaggcgtggtggcaggcacctgtagtcccagctactctggaggctgaggcaggag

SEQ ID NO: 522860 - DNA, 201 bp, Homo sapiens
cccgccaccacgcctggctaattttttgtatttttagtagagacggggtttcaccgtgttagccaggatggtctcgatctcctgacctcgtgatccgcccrcctgggcctccctcttttcttttctttttcttttttttttttttttgagacggagttttgctcttgttgctcaggttggttcagtggcacgatcttggct

SEQ ID NO: 522861 - DNA, 201 bp, Homo sapiens
cagcctggccacggcagatcagggactagagcctccaagcctgtctgggggaggtggggtgggctcaggccgtgacaggcaggcggggcgggcagggtggkgtgctgaggagaggggacttgttgagaaatggatggatgatgaggtgacgtgctccagggagtgggggagggggcacgaggatggaacatggggcggagg

SEQ ID NO: 522862 - DNA, 201 bp, Homo sapiens
aggtggggtgggctcaggccgtgacaggcaggcggggcgggcagggtggggtgctgaggagaggggacttgttgagaaatggatggatgatgaggtgacgygctccagggagtgggggagggggcacgaggatggaacatggggcggaggagaggcctgctgtttgggaaccaaggatcacattccactggcaaccaggct

SEQ ID NO: 522863 - DNA, 201 bp, Homo sapiens
ctggagttattcaacatcgaaaagcgatcttgggtccacacctctccccagacacagggagggacagtaattttcccaagagccgcagtgctgctctactsccccaccgcgtgggggcccctgctacccctcctggccaatgcaggagggaagggaggccctgcccggtccccccattggcatccttgcctggagaacttg

SEQ ID NO: 522864 - DNA, 201 bp, Homo sapiens
ggtccatttccccgcagcgggtatggaggatgcgtcgaggtccctgtctctgtcaaggtcgtgggaaccaaaagtcactgagccgtcctccccccacctcygagcacagggcctggagggcaggggctccccgaaggctgggggttggagaagggtgaggggcttcccccagggatccccccacctggcctgctcacgggg

SEQ ID NO: 522865 - DNA, 201 bp, Homo sapiens
cctaggccccgccctctcctgtaagactgggaggcgtttccagcgttgccctgggcccggcctctcctataagcctgggaggcgtttccagcgtgccccaytgccctaggccccggcctctcccatcccttccatggccttctgcctccaccacgtcgctcagccctcctttcccctcacgcgttacagttggggacccca

SEQ ID NO: 522866 - DNA, 201 bp, Homo sapiens
gcagggactggcccccaactcaccccgtgctggctggtggggtccatttccccgcagcgggtatggaggatgcgtcgaggtccctgtctctgtcaaggtcrtgggaaccaaaagtcactgagccgtcctccccccacctctgagcacagggcctggagggcaggggctccccgaaggctgggggttggagaagggtgaggg

SEQ ID NO: 522867 - DNA, 201 bp, Homo sapiens
cccaggaggctgggtcagtgtcatttgcagccctcagcgtggtctgtggcaggtccttcctaggaaagagcctgtggctttcctctttttcagtggagctktgtgttccccggaggtggagttcactcagccatcctgtccctccagtggtctcctccgtggggcacattctcccgtaacctcagagaggcagggcagttc

SEQ ID NO: 522868 - DNA, 201 bp, Homo sapiens
ctctgcagggactggcccccaactcaccccgtgctggctggtggggtccatttccccgcagcgggtatggaggatgcgtcgaggtccctgtctctgtcaakgtcgtgggaaccaaaagtcactgagccgtcctccccccacctctgagcacagggcctggagggcaggggctccccgaaggctgggggttggagaagggtg

SEQ ID NO: 522869 - DNA, 201 bp, Homo sapiens
cgagggtggccagcagccgccagctgacctcaccgtccaggcggacactctccaccgcccctcagccaggctgggtggggcccacagggcctgccccaagyggcggccacacagggtgttgtggagatgggccagaggggcctgggcttggcggtgccaggctcgtgagaagcaggaaactcaaggccagccctgccacat

SEQ ID NO: 522870 - DNA, 201 bp, Homo sapiens
ctttccgctcaggtttcagtgctctcagtggctctgcctgtttgacagcaagtctcgctccacctggcctgaaggccgtgcagcccagcttcagggcgctmcctgtcccgtgcgtcagttcgtgcccctccaacctgatgggcttttaaaatcacgtttcccccccctccgtgtggttgcacacacatggtcaccggggat

SEQ ID NO: 522871 - DNA, 201 bp, Homo sapiens
aggagcggaagcagcaggaggagctgatgaaggccttcgagacgcccgaggagaagcgcgcacggcggctggccaagaaggaggccaaggagcgcaagaarcgggagaagatgggctggggtgaggagtacatgggctacaccaacaccgacaaccccttcggagacaacaacctgctgggcaccttcatctggaataagg

SEQ ID NO: 522872 - DNA, 201 bp, Homo sapiens
tgaagctggtggtcactccggggccgctgtctgggctgcagggccgcgggttcacgtcccacctcaggccgcatctttctttcgccaggcctcagtttccycctatataaaaggggggtcaccattgagcctgccatggtgagctgaggagacactgggacaggctggcctagggtcctgatgcaacggagggggcgctag

SEQ ID NO: 522873 - DNA, 201 bp, Homo sapiens
cctctgtctggggtgcagggccagcagcgtccagacccagcgtcccgttaacgctgactcggcggtgccggccttatgggagccacggggctttccgctcrggtttcagtgctctcagtggctctgcctgtttgacagcaagtctcgctccacctggcctgaaggccgtgcagcccagcttcagggcgctacctgtcccgt

SEQ ID NO: 522874 - DNA, 201 bp, Homo sapiens
cgagctgggggcggggcttctccagcctcatttcccggccgaagccgctggcgtcagtggggagctgcttgctgcttctcccccgggtctctgagcgtgcrttccgtcacctgcacgcgcactggggcgttccttcattcatcctgggcttgctggcccactggccttggggccacaggtggtggaagcttttaccggccg

SEQ ID NO: 522875 - DNA, 201 bp, Homo sapiens
tggtgctctctgcaggcctcggtttccccaactggggcctccccttctgggccgagccaccagggggcagcagcgggcagtaggccctgggagggatgagkggggcgggcctctgtctggggtgcagggccagcagcgtccagacccagcgtcccgttaacgctgactcggcggtgccggccttatgggagccacggggct

SEQ ID NO: 522876 - DNA, 201 bp, Homo sapiens
gacgaaggggggccggggggcgcgtagtcccgtgccctagcgggaaggccccaggatgctccagtgccctcacctggagtcagccctgttggtctcacagrgctccccaggagcttccgccctttaacgagtacctggcgcgctccagcagccatggcatcacaggaagcccccaggcggcctgcctgtccccactgcctt

SEQ ID NO: 522877 - DNA, 201 bp, Homo sapiens
tgggccccgtggcgggtgacatcaggctcctcccagctcgggcctccctggtgacgggttcccttgggttggaccagggcccgcctgcaacgcgtaccccsctgcaggcccagaacagaaacccggctctctgccccgagtggtctgcctgggggaggaggtggttgcaaggcagtgactactctggtcccccagcctgcc

SEQ ID NO: 522878 - DNA, 201 bp, Homo sapiens
tcctgagtagctggggctacaggcgcccgctaccacgcccggctaattttttgtatttttagtagagacagggtttcaccatgttagccaggatggtctcsatctcctgaccttgtgatccacccgccttggcctcccaaagtgctgggattacaggcgtgagccaccacgcccggccagctttcttttttgactcagggt

SEQ ID NO: 522879 - DNA, 201 bp, Homo sapiens
gcctccccgtctatcgaggagggacttgagcctcgggcccctgggccagtggtagatgccagacagactccatgtaggatggggggcggcggtggggagcygtttgtcctggggcgggcccaggacttccccaggggccagcagggtggccttctttgctaggcttcacagagggaaactaaggcccagaaagggcaggcc

SEQ ID NO: 522880 - DNA, 201 bp, Homo sapiens
ggtctcgatctcctgaccttgtgatccacccgccttggcctcccaaagtgctgggattacaggcgtgagccaccacgcccggccagctttcttttttgacwcagggtctcgctctgtcacccaggctggagtgcagtggcgtgatcgtggctaactgcagccttgacctcctggcctcaagcgatcctcctacctcagcgt

SEQ ID NO: 522881 - DNA, 201 bp, Homo sapiens
cgaatgggacagagaaggatgggtagctggcaggaagcacagtgcgtgcaaaggcccagaggtggcaggggttcggcatgggcagcaaggggcagggttgygaggtgaggccagacccagcggggtgggtggaagtggcctgagagcagcactgaggccgccgggatgccacgtggtgtggggcagagcacgcggagtcag

SEQ ID NO: 522882 - DNA, 201 bp, Homo sapiens
cgagtgggaatactcgcaccgccacggcttccgctgccagtttgccaacggcatcttccagctgtggtttcacttcaagcgctaccgctatcggcggtgayggccctggggaacggcaggcaggtgtcctcgggggcacagtaaaggggcttcggtgaagctggtggtcactccggggccgctgtctgggctgcagggccg

SEQ ID NO: 522883 - DNA, 201 bp, Homo sapiens
catggaggatgcgaggaattcaggaagcgaatgggacagagaaggatgggtagctggcaggaagcacagtgcgtgcaaaggcccagaggtggcaggggttsggcatgggcagcaaggggcagggttgcgaggtgaggccagacccagcggggtgggtggaagtggcctgagagcagcactgaggccgccgggatgccacgt

SEQ ID NO: 522884 - DNA, 201 bp, Homo sapiens
gcttccacgcggggccgccctacgaggacatcgctttcaagatcgtcaaccgcgagtgggaatactcgcaccgccacggcttccgctgccagtttgccaayggcatcttccagctgtggtttcacttcaagcgctaccgctatcggcggtgacggccctggggaacggcaggcaggtgtcctcgggggcacagtaaagggg

SEQ ID NO: 522885 - DNA, 201 bp, Homo sapiens
ccagccacacccgtgtcctgacccctgccccctgcccccaggtctacatggagctggagcagggcaagaacgccgacttctggcgggacatgaccaccatyaccgaggacgagatctccaagctccgcaagctggaggcctcgggcaaggggccaggtaacggcgggcatgggcctgggctccaggggagctgcgggggct

SEQ ID NO: 522886 - DNA, 201 bp, Homo sapiens; identical to SEQ ID NO: 305684

SEQ ID NO: 522887 - DNA, 201 bp, Homo sapiens
aggtgaggccagacccagcggggtgggtggaagtggcctgagagcagcactgaggccgccgggatgccacgtggtgtggggcagagcacgcggagtcaggytaggctccagcctcccagcaccccactcccgccctcagcagcctccccgtctatcgaggagggacttgagcctcgggcccctgggccagtggtagatgcc

SEQ ID NO: 522888 - DNA, 201 bp, Homo sapiens
cattagcctcccaccctgtgtagggcctggcctttcccccacgcagccccagggcccttggcctgcacccccagcctctagcagctgctgggaccccctaracccccgggcccccttgtgggcattcgggaggcatccagacatgcagcagcatgtccagacccggctttctatagacgctgacctggcggcacctggcct

SEQ ID NO: 522889 - DNA, 201 bp, Homo sapiens
gtggagatgggccagaggggcctgggcttggcggtgccaggctcgtgagaagcaggaaactcaaggccagccctgccacatcacggggcacccactgggcrtgaggcagagcccgcggctgtggggcagctccagccctgcccacaggccaccctcgcccgcacaggcagcactgaggccgggaccctgctggcgcccgat

SEQ ID NO: 522890 - DNA, 201 bp, Homo sapiens
tcacggggcacccactgggcgtgaggcagagcccgcggctgtggggcagctccagccctgcccacaggccaccctcgcccgcacaggcagcactgaggccrggaccctgctggcgcccgatccgccactgcagaagagaccctctgtggacacccacactctgcagggactggcccccaactcaccccgtgctggctggtg

SEQ ID NO: 522891 - DNA, 201 bp, Homo sapiens
ggtcctctcagtcggactcaggagaggagcagtcacggggccagtgggctcgccggcgacggcgcgcacgctcgtggtctcctagctcctcagcatccagmtccgcgtctccagggcgatcccagagcccccgggcggccgcggctgccctgagccagcagcagagcctgcaggagcggctgcggctgcgggaggagcgga

SEQ ID NO: 522892 - DNA, 201 bp, Homo sapiens
agtgaccccgagttttgcccatatcaggacagtggctccttctcactcccctttctcaggccaggagggccgagggccacacgggtgccacagcccaggtyggagtggcccagccggcaggcttgttcttcagcatccgacgggaacatctccaacagaagcaaaacggaaagtgcctcccggacccccagagggccaccc

SEQ ID NO: 522893 - DNA, 201 bp, Homo sapiens
caacagaagcaaaacggaaagtgcctcccggacccccagagggccacccaacctcaccagtcaccagccccagaccacccacagcccctcccagacacccygcctcatctggaaatagttccgtttgtttctctaaaaagacttgtaggtgggaaaaaaaatcttttgttctcatggaattggcctattggcaagatcgca

SEQ ID NO: 522894 - DNA, 201 bp, Homo sapiens
agcgctccacgcccgagtacttcctggaggcctgcgccgacaacaaggatttcgccatcctgcgcttccacgcggggccgccctacgaggacatcgctttyaagatcgtcaaccgcgagtgggaatactcgcaccgccacggcttccgctgccagtttgccaacggcatcttccagctgtggtttcacttcaagcgctacc

SEQ ID NO: 522895 - DNA, 201 bp, Homo sapiens
gattctggaagtagaggagacaacatttgctaatggaggtgggctgtgggagggaaaaagactcggtgtcagctggcaggactcacagctgattcctagtrcctgaatctcagcttccccatggtccttttcttctggagatggggcacttggtcggatttgccttgagccggctccagtacagagaaaccaaaatgggga

SEQ ID NO: 522896 - DNA, 201 bp, Homo sapiens
gcagcgctggggatccggctcctacctcaggagcgcccgaccgagggttggagatcccggggaaccgggaaacccccgacttactcggggagggcttcctrgagaaggggacaattgaccaccggttggaattaacctggcagcggaaggaaggcgagaggcgttccaggcaggggaccgggcggttggagggacagcccg

SEQ ID NO: 522897 - DNA, 201 bp, Homo sapiens
gcttcctggcggaagggatgttctcactgagcatggaggatgcgaggaattcaggaagcgaatgggacagagaaggatgggtagctggcaggaagcacagygcgtgcaaaggcccagaggtggcaggggttcggcatgggcagcaaggggcagggttgcgaggtgaggccagacccagcggggtgggtggaagtggcctga

SEQ ID NO: 522898 - DNA, 201 bp, Homo sapiens
acagggtttcaccatgttggccaggatggtctcaatctcttgacctcatgatcctcccacctcagcctcccaaagtgctgggattacagaagtgagccacygtgcccagccacttctgaaaattttttgtagagatggggtctcactgtgttgcccaggctagtcttgaactcctggcctcaagcaatcctcctgcctcac

SEQ ID NO: 522899 - DNA, 201 bp, Homo sapiens
tggacatgctctgccccttccccggctgttctcttccgtcaggcctcaactgacacatcccctcttgagagaccccttcctggccccttgctccccagacyccccagagttctttattgaggcacacactgctgcctggcacttcatcgccaccatgtgctgtgcacctgcggtgtgctgggcaccaccgtgagctctggg

SEQ ID NO: 522900 - DNA, 201 bp, Homo sapiens
ccccatcctcaagcaggagccccagtcccccagccgcaggtaggcccggccggcaccccggggacgccgatgcagacgcggagcaggatggaggggccgtsggcagcctccgcgcctccaacgctctctcctcccagcctggagcctgaggacgcggcgcccaccccgcccgggccctcctcggagggcggccccgcggag

SEQ ID NO: 522901 - DNA, 201 bp, Homo sapiens
ggtcaggagcacccctagtcctgacaaccgcagatgtccccagacgttgcccagagtcccctgggggcagaattgccctagatgagaccccccccccccccggtctaaaagccaaccacagcagccctgccccctccccgccaaaatccacgccccagcggctgctgtaacagtgcctggctctcatgggccacgcatccc

SEQ ID NO: 522902 - DNA, 201 bp, Homo sapiens
tgtgtgacagagggagactctgtctctaataaataaaaatatagaccttgtctctagtagactctgtgtctagtagaccttgtctctaataaataaaattraaggcccctgaaccacccctgaggttgtgcatcttccattccctgcgctctactctgttaactcctgtccatcctgtgggactagttcaaataccacttc

SEQ ID NO: 522903 - DNA, 201 bp, Homo sapiens
ccgcggcccaagtggcactcaagagatgggtcctctcagtcggactcaggagaggagcagtcacggggccagtgggctcgccggcgacggcgcgcacgctygtggtctcctagctcctcagcatccagctccgcgtctccagggcgatcccagagcccccgggcggccgcggctgccctgagccagcagcagagcctgcag

SEQ ID NO: 522904 - DNA, 201 bp, Homo sapiens
cccagggtcaggagcacccctagtcctgacaaccgcagatgtccccagacgttgcccagagtcccctgggggcagaattgccctagatgagaccccccccscccccggtctaaaagccaaccacagcagccctgccccctccccgccaaaatccacgccccagcggctgctgtaacagtgcctggctctcatgggccacgc

SEQ ID NO: 522905 - DNA, 201 bp, Homo sapiens
atgaggacaccaggcattggatgagggcccgccacctccaggatgacctcatcttacctacgtctgcaagacctcatcactttttttttttttttttttttgagatggagtctcactctgttgcccagactagaatgcaaaggcgcaatctcggctcactgcaacctccgcttcctgggttcaagtgattcccctgcccca

SEQ ID NO: 522906 - DNA, 201 bp, Homo sapiens
tccatggccttctgcctccaccacgtcgctcagccctcctttcccctcacgcgttacagttggggaccccaggtggctttggtgtcttccgagggagtttstttctgattctcctttcaacatggtttccaggagtagggaaccgaggggtcttgactttgctgtccccctggagacccacagagcccctgtcctggatct

SEQ ID NO: 522907 - DNA, 201 bp, Homo sapiens
ccatcgtgcccggccgtttacatgaataagttctttagtggtgacttgtgagattttggtgcacctagctttttctaggaagttctaaccctacaggaggktgtgcagtagaaaacgggtgtcatcccagctcagcttcattagcctcccaccctgtgtagggcctggcctttcccccacgcagccccagggcccttggcc

SEQ ID NO: 522908 - DNA, 201 bp, Homo sapiens
gaggcccctcctgcctctcccagctccagtcatggccggtgattcctgggccctccctggcttgcagccgcagaacccggcctgttcctgtgttgtgtggyggtctgccttcccgtctctgtctccatacggccttctgctctgtgtgtctgtgtgtaaatgttcctcttcccatgaggacaccaggcattggatgagggc

SEQ ID NO: 522909 - DNA, 201 bp, Homo sapiens
cattaactgtgtctcttgcggtgtaagcttcagccattctttgccccgaacaccagcccaacctgaaacctatctagagagccagctcttggcatcatgtrcccaggacagggttccacagttccaggcgctctgtcgtctgagctggttctttcgttctgcgcctgccatttagccaccagtcacaccagtggcataaga

SEQ ID NO: 522910 - DNA, 201 bp, Homo sapiens
aggtaggcaccctgccagcccactgggcagggccctccctttccagggcctggaggcccgccccctttggcaggacttgaggggcttaagtgggaagtccygggggctggcttcaggtaaggctggatccaggggctcagaccatggccccaggaaactgtttccctccacctctcggctctgctggcctcgggccttcac

SEQ ID NO: 522911 - DNA, 201 bp, Homo sapiens
gcctgcccttgatcgtgcaagagttggttttacacacacacgcataagcaagcttctgccgctatcagctttcttttttgacacagggtctcgctctgtcrcccaggctggagtgaagtggtgtgatctcggctcactgcaagctccacctcccgggttcatgccattctcctgcctcagcctcctgagtagctggggcta

SEQ ID NO: 522912 - DNA, 201 bp, Homo sapiens
gcgggcagtaggccctgggagggatgagtggggcgggcctctgtctggggtgcagggccagcagcgtccagacccagcgtcccgttaacgctgactcggcrgtgccggccttatgggagccacggggctttccgctcaggtttcagtgctctcagtggctctgcctgtttgacagcaagtctcgctccacctggcctgaag

SEQ ID NO: 522913 - DNA, 201 bp, Homo sapiens
tggagaccccaacacttgagacactcccagcctgcccttgatcgtgcaagagttggttttacacacacacgcataagcaagcttctgccgctatcagcttycttttttgacacagggtctcgctctgtcgcccaggctggagtgaagtggtgtgatctcggctcactgcaagctccacctcccgggttcatgccattctcc

SEQ ID NO: 522914 - DNA, 201 bp, Homo sapiens
ctcctacctcaggagcgcccgaccgagggttggagatcccggggaaccgggaaacccccgacttactcggggagggcttcctagagaaggggacaattgaycaccggttggaattaacctggcagcggaaggaaggcgagaggcgttccaggcaggggaccgggcggttggagggacagcccggagccgggtgagcgaggc

SEQ ID NO: 522915 - DNA, 201 bp, Homo sapiens
ttgggccaggttggtgggccgggcccacaactagggttcccagacccacatatcagactcacctggggaggggcattctcagggccagtcctggcctcccmcacgctgggggcctgggcctccaggtcaaggcctcagcaactgcatcttaacgtggctcccaacctccgcccaccccctcccctccgctgtggccagggt

SEQ ID NO: 522916 - DNA, 201 bp, Homo sapiens
gcgtggagagcgagccgctgttccccatcctcaagcaggagccccagtcccccagccgcaggtaggcccggccggcaccccggggacgccgatgcagacgyggagcaggatggaggggccgtgggcagcctccgcgcctccaacgctctctcctcccagcctggagcctgaggacgcggcgcccaccccgcccgggccctc

SEQ ID NO: 522917 - DNA, 201 bp, Homo sapiens
accccggggacgccgatgcagacgcggagcaggatggaggggccgtgggcagcctccgcgcctccaacgctctctcctcccagcctggagcctgaggacgyggcgcccaccccgcccgggccctcctcggagggcggccccgcggaggccgaggtggacggcgcgaccccgacagagggcgacggcgacggggacggtgag

SEQ ID NO: 522918 - DNA, 201 bp, Homo sapiens
ttggacagtttaaagcttttattcgtcctttgacaaaagtaaatgggagggcattccatcccttcctgaagggggacactccatgagtgtctgtgagaggyagctatctgcactctaaactgcaaacagaaatcaggtgttttaagactgaatgttttatttatcaaaatgtagcttttggggagggaggggaaatgtaat

SEQ ID NO: 522919 - DNA, 201 bp, Homo sapiens
tggagttgatgactttctgttttctgtttgtaaattatttgctaagcatattttctctaggcttttttccttttggggttctacagtcgtaaaagagatawtaagattagttggacagtttaaagcttttattcgtcctttgacaaaagtaaatgggagggcattccatcccttcctgaagggggacactccatgagtgtc

SEQ ID NO: 522920 - DNA, 201 bp, Homo sapiens
agactgagcacttcagacactgtactgagatgcatttctggtctaaatctttgtagaaatgagtgcttgagcctgtttgtgtcggtatgcctctgagaagkcttccctcttatatgtctctagtttttggaatggagcctcgcatcctatacaaccctttacaaggccagaaatgtattgttcaaacaacttcatggtccc

SEQ ID NO: 522921 - DNA, 201 bp, Homo sapiens
ctttgtagaaatgagtgcttgagcctgtttgtgtcggtatgcctctgagaagtcttccctcttatatgtctctagtttttggaatggagcctcgcatcctrtacaaccctttacaaggccagaaatgtattgttcaaacaacttcatggtcccagtgctcaaagacctgtggaactggtatctccacacgagttaccaatg

SEQ ID NO: 522922 - DNA, 201 bp, Homo sapiens
gttcgcgatcgtttgcgggtagccgtttctttaagcactctccccctccccccgaagacgtgtcgggacctcttggtgggagcagccttccgaggtggccrggctggacgagatcagaggctccccgtcgatagggtcggagacccccgtccctcactgcggcagccgcggcgcccctcctgcgcaccgcgccgagtctca

SEQ ID NO: 522923 - DNA, 201 bp, Homo sapiens
tggagactgagcacttcagacactgtactgagatgcatttctggtctaaatctttgtagaaatgagtgcttgagcctgtttgtgtcggtatgcctctgagragtcttccctcttatatgtctctagtttttggaatggagcctcgcatcctatacaaccctttacaaggccagaaatgtattgttcaaacaacttcatggt

SEQ ID NO: 522924 - DNA, 201 bp, Homo sapiens
gcccccgagcagcgcccgcgccctccgcgccttctccgccgggacctcgagcgaaagacgcccgcccgccgcccagccctcgcctccctgcccaccgggcmcaccgcgccgccaccccgaccccgctgcgcacggcctgtccgctgcacaccagcttgttggcgtcttcgtcgccgcgctcgccccgggctactcctgcgc

SEQ ID NO: 522925 - DNA, 201 bp, Homo sapiens
ggtaagtggagactgagcacttcagacactgtactgagatgcatttctggtctaaatctttgtagaaatgagtgcttgagcctgtttgtgtcggtatgccwctgagaagtcttccctcttatatgtctctagtttttggaatggagcctcgcatcctatacaaccctttacaaggccagaaatgtattgttcaaacaactt

SEQ ID NO: 522926 - DNA, 201 bp, Homo sapiens
ttgtagggaactttaccataaattgaatttaacagcagaaaatatgtatgagtttcaggcggtggtttggaatcttaactttatccccttctacctttctsttttggtgatctttgcagctcagtcagagggcagaccctgtgaatataactccagaatctaccaaaacggggaaagtttccagcccaactgtaaacatca

SEQ ID NO: 522927 - DNA, 201 bp, Homo sapiens
ccaaagtcattaggaacaacctagctcacgtactcaattattcaaacaggacttattgggatacagcagtgaattaagctattaaaataagataatgattrcttttataccttcagtagagaaaagtctttgcatataaagtaatgtttaaaaaacatgtattgaacacgacattgtatgaagcacaataaagattctgaa

SEQ ID NO: 522928 - DNA, 201 bp, Homo sapiens
ggtggtttggaatcttaactttatccccttctacctttctcttttggtgatctttgcagctcagtcagagggcagaccctgtgaatataactccagaatcwaccaaaacggggaaagtttccagcccaactgtaaacatcagtgcacatgtattgatggcgccgtgggctgcattcctctgtgtccccaagaactatctct

SEQ ID NO: 522929 - DNA, 201 bp, Homo sapiens
cgggacctcgagcgaaagacgcccgcccgccgcccagccctcgcctccctgcccaccgggcccaccgcgccgccaccccgaccccgctgcgcacggcctgkccgctgcacaccagcttgttggcgtcttcgtcgccgcgctcgccccgggctactcctgcgcgccacaatgagctcccgcatcgccagggcgctcgcctta

SEQ ID NO: 522930 - DNA, 201 bp, Homo sapiens
accctcggctggtcaaagttaccgggcagtgctgcgaggagtgggtctgtgacgaggatagtatcaaggaccccatggaggaccaggacggcctccttggyaaggagctgggattcgatgcctccgaggtggagttgacgagaaacaatgaattgattgcagttggaaaaggcagctcactgaagcggctccctggtaagt

SEQ ID NO: 522931 - DNA, 201 bp, Homo sapiens
ctccctggtaagtggagactgagcacttcagacactgtactgagatgcatttctggtctaaatctttgtagaaatgagtgcttgagcctgtttgtgtcggyatgcctctgagaagtcttccctcttatatgtctctagtttttggaatggagcctcgcatcctatacaaccctttacaaggccagaaatgtattgttcaaa

SEQ ID NO: 522932 - DNA, 201 bp, Homo sapiens
aaagctgaagcctgtgtctctcaagagaaaaatacaggctagacttatttaacttgacagtctcaggcttgatgttcttctgatcttccgtcttctctccrtctagtcctgaatggcatggaatgctctactcccaagctgacagcaagaagaaatcaaacctcatgatgtctctctttgagcctggcccagaacctctcc

SEQ ID NO: 522933 - DNA, 201 bp, Homo sapiens
atgcaaattattagacgactccatatacaaatctaataactttcccagtcatcatatttgaaaccccaacctaaacagtgcatttgtgaaatgtaatacayggaaaataatgtacttttccatagaatgaattaattctgtgttgattccttcatttcagatttggaaatagtgggatttattgatatagctgatatttca

SEQ ID NO: 522934 - DNA, 201 bp, Homo sapiens
gtaatgtcttgtgaaactttcaaggtgaaaaaacgacattaggctggagaagtaggcatcaagctagtctacatggataaagctggtatctaatccgggctttttttttttttttttgagatagggtctcactctgttcccaggttagaatgcagtggtgggaccatagctctctgcagccctgacctcctggagtcaacc

SEQ ID NO: 522935 - DNA, 201 bp, Homo sapiens
aataactgttaagtgaactgaaatcaattcatcccattttcagaatctctggcagaactacaaagagttcacaataaactacctgctatctaaccctttakacaagagtttcctttctcattcaaatcattagtatttatcttcaaatttatgtgattagtatgtgtgcagaagagttaatatagcaagcctgaggctgca

SEQ ID NO: 522936 - DNA, 201 bp, Homo sapiens
atagttttattgtgatagctaaatgcataaaagtgcctaggatggtgtttagaacatagttaatattcaatagattttgttattatttttgtgatgtgttyaaaagttccttttaattttttccttcaaagtccacttaacaaaaatgtaaacttggtggactgttcactcttacctgataagaggatagaataaatggaa

SEQ ID NO: 522937 - DNA, 201 bp, Homo sapiens
gcagctaaactgctttaaaataaagtagacctttttctactcaaatgaaaaatatctagctgcttatactaatgcatttattactcagctaagggaggtayggacagcaaatctccagagaagcacacttcctaatattttagaaatagggtcgggcacggtggctcacacctgtagtcccagcagtttgggaggccaagg

SEQ ID NO: 522938 - DNA, 201 bp, Homo sapiens
gcagaggattgcaggtggtgaatgaaaatgaaacacgctgtgcctgtgtctctaacttagaggctccagactctcttaacccccaaaggaaacaagactcrggagaggtcaaaattctccagactgctcattgattcccagaagttgctacataccttcaatttagcatcataatgtaaagtgaaactacttaacactttt

SEQ ID NO: 522939 - DNA, 201 bp, Homo sapiens
cctgtgagatacaggtggaggtgcctagagacaattctgtagaagtctgaagtttaggagagagggcagagttggagataaaattttaggttgtaagcctrtcataaatagttaaaatggtgagaatgagggagattgctcagggcagtggttcacaaattttgagtttttgtgtacaaaaataaacttggaataaatacc

SEQ ID NO: 522940 - DNA, 201 bp, Homo sapiens
gctcagggcagtggttcacaaattttgagtttttgtgtacaaaaataaacttggaataaataccacatgttctcacccatatatggaagctgaaaaaaaaygagctcatagaagtacagagtagaatctagaatcatggtcattagaggttgggaagggtagtgaggagaggagaataggcagaggtaacagatacaaagt

SEQ ID NO: 522941 - DNA, 201 bp, Homo sapiens
taccctcagcttataaattttcctcccatgaaaatgactgtcctggctcagcagaccccggttttagaaacacctgcatcaagatcagaactgtattggawcagttacagattttttcacaggggtcaatttggggagtcttcccaactaaactcaaattcttataggccattccagctcattgtttgtctacatgtcctg

SEQ ID NO: 522942 - DNA, 201 bp, Homo sapiens
gagctggaaggatcacttagtccagaccttcatttaacacatgagaacaccagaactcgaagaagtgaagagacttgttcaagatcacaccgctaataaayggcagggccctgactcaacttggggtctctgactttcccattcctctgcagctaaaacctgggctctgttccaaataaaagaactctattattccccttt

SEQ ID NO: 522943 - DNA, 201 bp, Homo sapiens
ctacatgtcctgtcccttttctccaaaggaagctccatgacaggttctctgcccactgtaccactggttattattcatgctttctcaaaacaactgagcayctgcgcacggaaatcaagaagctcaagccaccagagctaagtgtaattccagaagccaaaataccccatctattggattctctccctgcttatgagagaa

SEQ ID NO: 522944 - DNA, 201 bp, Homo sapiens
tgaggcactagaaattcaggtagaatcctgctttgagagcgagactgctgagaatcagttctttatgaatgagctaattatcaccttcagggaagaattayaaacgtctagctgatggacacttggtattcaaggccaaataggtggctagggcctatttctcagactgttcctgagaaagaagagccctagttgtttgaa

SEQ ID NO: 522945 - DNA, 201 bp, Homo sapiens
tgaatggtggaaaaagtgttggcttttgaagcaggcccaactgagtcactgtgaaaccttgtataagtccaacctctctgtgccttagtttcctcatcttyaatgggactaataacatcttcgctctagagttgctataaagagagaagttgaatatgtaaagtatcttgcacatagttggaacttaataaatattcttta

SEQ ID NO: 522946 - DNA, 201 bp, Homo sapiens
cactaaactactggtattcatttcctaaaatgggaagggaagtgagaaaggaaagaacatacctctggtttcacaaggtctaagaactccaggtgaaattyatagacattgtctcctttggcaccatgtccttgagctataaagaaagaaatgtgggttactgcaaacttgagcagagcaaggccatccaaaagccagctt

SEQ ID NO: 522947 - DNA, 201 bp, Homo sapiens
gcccgtttttttctaagagttttatagttttagcttttacatgtaggtctctgatccattttgagttagttttttgtatatggtatgatgtaagggtccarctttattcttttgcttgtggatatccagttgtctcagcaccaaatgttgaagagactattttttccccattgaatcgtctttgcaaaaaagtccctggca

SEQ ID NO: 522948 - DNA, 201 bp, Homo sapiens
taattattatttttttaaatgtttaaaaagaaaaatatgtgctcacttcggcagcacatatactaaaattggaatgatacagagaagattagtatggcccstgtgcaaggatgacacgcaaattcgtgaagcgttccatatttttattaagaaaatgtggcacatatacaccatggaatactatgcagccataaaaaatga

SEQ ID NO: 522949 - DNA, 201 bp, Homo sapiens
actacctgaaaaaacacagacattctataaggtgagacagacagaagaggatgtgcccaaaatatatggttcacgacagtaaaactgtgagatggcagtgwgaatatgggcaggggttagagatgtatgacttgtgcctcagttttttcaaataaactcagtaaaagtgataggtctgttccttccctaaaatccaagaat

SEQ ID NO: 522950 - DNA, 201 bp, Homo sapiens
tcaattcactgcaacctccacctcccaggctcaagcgattcttctgcttcagcctcccgagcagctgggattacaggtgtgcgccaccacacccagctaatttttttttttttttttttttttttcccagcagagatgggattacaccatattggtcaggctggtctcaaactcctgacattgtgatccgcccacctcggc

SEQ ID NO: 522951 - DNA, 201 bp, Homo sapiens
attcctctgccatcactaaaaccagagaatatcagagctggaaggatcacttagtccagaccttcatttaacacatgagaacaccagaactcgaagaagtkaagagacttgttcaagatcacaccgctaataaatggcagggccctgactcaacttggggtctctgactttcccattcctctgcagctaaaacctgggctc

SEQ ID NO: 522952 - DNA, 201 bp, Homo sapiens
tggctgggcaaggtagctcatgcctataatcccaacacttcgggaggcctacgcaggaagatcacttgagcccaggagttcaagaccagcctgaacaacayagaccgtctctacaaaaataaaaaaattagccaagtgtggtggcacatgcctgcggtcccagctacttgggaggctaagctgggaggacaacttgagccc

SEQ ID NO: 522953 - DNA, 201 bp, Homo sapiens
gactaatacacatacccactagacaaataatgggaccttccattacccacccttcagcttaactattcaatacctggatcagagaaggcagcaccggtgaygtagtgactccaattgctgcattgatagtttccacaactgccagcatctggcagaaatacatcatgtcagccacagtatggaatgtgtcataaaaggact

SEQ ID NO: 522954 - DNA, 201 bp, Homo sapiens
tcagcttcccaaagtatggggattacaggaatgagccaccatgcctggctgtaaattttaaagtttgattattgtacttttcattaatacaagtttttaakaagtactgccttcatctacacaaggtgggaggagaccacatacatttctaactaaggagactgaaggtaggtttttcagctcctgcctaagagtcaaatt

SEQ ID NO: 522955 - DNA, 201 bp, Homo sapiens
gtgatttcataaggatattataaaaaatgaaaaagacctgaaatagtaaaagtctactttggtaaataaccctggggttttaaatgttctttcttgttcargtaaaataatgctattcctgtacaaataggtgtttttactaattgagacttcttagcaaaatgtaacatacagatatggtttggctgtgtccccattcaa

SEQ ID NO: 522956 - DNA, 201 bp, Homo sapiens
tcaagtatctgggactacaggtccacatcaccatgcctggctaatatcttttttaaattttttgcagagacaagtctcactatgttgcccaggctggtccygaactcctgggctcaagtaatcctccacctcagcctaccaaactgctgggattacaggcatgagccaccatgcccagccataattttaaaaataacaata

SEQ ID NO: 522957 - DNA, 201 bp, Homo sapiens
gagacatttgggtaggcaggcaggcattttatttgattttcttttcctttgatacttagtaattcatttacttctaatgtttgtcattatttccaaaaggkatttgagatgccctacagtaaaacatgtatatagcaaaatcattttttacaaaatttagagcaataagaatcctagaggaaggaggaagaaggaagacaa

SEQ ID NO: 522958 - DNA, 201 bp, Homo sapiens
tcagcctcccaggctcaagcaatcctcccatctcagccttccaagtagccatgacccaggtgtgcaccaccatgcctggctaatttttttttttttttttwaatttatagaagtggggtctcactgtgttgcccacactggtcttgaactcctgggctcaaggatcctcccaccttggcctcccaaaatgctgggattacg

SEQ ID NO: 522959 - DNA, 201 bp, Homo sapiens
tgttttctctttttttcacagaaggtgatgaggtgggtactggcatcactgatgacaatgaagatgaaaattcagccaatcagattgcaggcaaaataccyaacttttgtgtcctgctccatggtagcctaaaagtggaaggaatggtagcgattgttcaattagggtaggaaactttgtttacatttggttgaatgaaag

SEQ ID NO: 522960 - DNA, 201 bp, Homo sapiens
gacggaaagtttatgccgacggaaagtttatgccgacggactgtgtccggcgatgggcacggggtgagtggggaggccgagggcccgggactgcctttcgytgcttgttggggttacaggtgaaggggttatgggtgaagaacaacccagggccagcgcttggccttcccgccaccgtggcggccgccccgcgctgtctgt

SEQ ID NO: 522961 - DNA, 201 bp, Homo sapiens
ttagtaaataagtctcacaagatctggcgggcttatcaggggtttccgcttttgtttcttcctcattctctcttgccaccgccatgtaagaagtgcctttygccctgcaccacaattgtgagaccttcccccgccacatggaactgtaaatccaattaaacctctttcttttgtaaacggcctggtttcaggtatgtcttt

SEQ ID NO: 522962 - DNA, 201 bp, Homo sapiens
gctctgattagatgttgaaatgtttggtactgatactaagtgctaggggataaaagggtctacaaaaaccactatctgccagaaaaacttgaaacaatttyatggaaggggtaagataggatctggacttggaatataggtaggtaagtttggataagtaaggaacagcagtgttgaatggtggaaaaagtgttggctttt

SEQ ID NO: 522963 - DNA, 201 bp, Homo sapiens
aggtgcttcgattttcttcaggctctgacacagcatgcattgtaatttctacaaactacattttacactattggtatcttcttaagtgaaggtactaaatyaacactaatgtgttcagaaagcagcaaagttatgccttaaggaaagcatcctcctagtaaattgacttattgcaaactagtactgttatataaaacacaa

SEQ ID NO: 522964 - DNA, 201 bp, Homo sapiens
aagtttgtaagagctgtaaagcaaagcaaagcagtaagctattaaaagcaatagtcccagcaggagacaggtgtatgaggcatatctggatgacttcaacsctttttccttcctgaatgctcctaagctcccacacaaatacctggtccaggtcctcaccagcctgggctcctactcccacagagaaacatacaaggaaca

SEQ ID NO: 522965 - DNA, 201 bp, Homo sapiens
ggatatgaaaattatggagagagaagtgttaaaattgatcccaggtttctgacctgggctgcagggtgaaagatagtactattagttgaaatagataatasagagagaagagtaaatttgggaagaacatattttgtttatgttgagttcgtgcctgtgagatacaggtggaggtgcctagagacaattctgtagaagtct

SEQ ID NO: 522966 - DNA, 201 bp, Homo sapiens
gagaatatcagagctggaaggatcacttagtccagaccttcatttaacacatgagaacaccagaactcgaagaagtgaagagacttgttcaagatcacacygctaataaatggcagggccctgactcaacttggggtctctgactttcccattcctctgcagctaaaacctgggctctgttccaaataaaagaactctatt

SEQ ID NO: 522967 - DNA, 201 bp, Homo sapiens
tctctcttgccgccaccacgtaagaagtgcctttcgccctccaccatgatcgtgagaccttcccagccacatggaactgtaagtccaattaaacctctttmttttgtaaactgcccagtctcaggtatgtctttatgagcagcatgaaaatggactaatacacatacccactagacaaataatgggaccttccattaccca

SEQ ID NO: 522968 - DNA, 201 bp, Homo sapiens
aaggactctataggcaaaaatatacattaagggtgaatcagttggtaaattccaacagaactatttctcaaactagattactcctttcgtgaaaataactstaagaaaggaataacaaacatccagtcagattcaagtttcttacttaactaagcaggaagggtgcaggccaatggggtcatgaatagtaagctctaccag

SEQ ID NO: 522969 - DNA, 201 bp, Homo sapiens
aggaaaaagaatagagaaagcaatgccaaaggagccacacggatataaatttaactttcacaattactttggctctaaatctagagcagacaaaaattggkgggtgtatcatcttgactgcagggtacatggaaatgctgggttgtcttggacagctctgaatctaaaacctcccaaccagggagagagaatgaaggcaga

SEQ ID NO: 522970 - DNA, 201 bp, Homo sapiens
cagctgcccaaggcacgactctaatctgattgtgggtcctaagaccctcattccagagagggtcttgcctcatactctggaggagggaacactgcacagasaggctgagaagaatctggacagacaggccttgctgggtttaggtcagaccctttttgtccaatcacatttcaacacagttcaacacgcttcagtcatgcc

SEQ ID NO: 522971 - DNA, 201 bp, Homo sapiens
cttctgggactctctttccttatctgatcatatgtagactaataacctgcctaatattcgctacaggtagcaattattctctgtgacgataaattccttamggtaggacagtatataaggtctaagtggcaagatatgcttttatcactttaattttcatgtaaatgtatataattcccaaaaaacctgagctgagtggtg

SEQ ID NO: 522972 - DNA, 201 bp, Homo sapiens
tccaggaagactatctgttttactgttcctaattgtgtcatttcattttccccaagttgtacatttttcagataaagtgatgggtagtaatggttttttaragtaaatctatactgtctgtagatactgacttccttataatgactcagcaaaatttcaaattaacttgctcttgggcttttcagaattgaaatttcctca

SEQ ID NO: 522973 - DNA, 201 bp, Homo sapiens
acaaacaaacataaagtctgttgctctttacttagactccacagtaggccacattagtatcaaatcagagcagagtagtagcagaaaaagataactggaartttgttctatacagatacttttgaaaagtagtagcatattttgaaggaaaaagcagaaacattgctaaaagaaaaatcataatagtctacaacaggagtc

SEQ ID NO: 522974 - DNA, 201 bp, Homo sapiens
gtggcgtgatctcggctcacggcaagccccgcctcccgagttcacgccattctcctgcctcagcctcctgagcagctccgactacaggcatgcaccaccaygcccggctaattttttgtatttttagtagagacagggtttcactgtgctagccaggatggtctcaatctcctgacctcgtgatccacgcaccttggcctc

SEQ ID NO: 522975 - DNA, 201 bp, Homo sapiens
tttaaagtttgattattgtacttttcattaatacaagtttttaagaagtactgccttcatctacacaaggtgggaggagaccacatacatttctaactaargagactgaaggtaggtttttcagctcctgcctaagagtcaaatttccctagtcttaaagctctttataactttgtgatttcataaggatattataaaaaa

SEQ ID NO: 522976 - DNA, 201 bp, Homo sapiens
gtcaaaaccaaagttcaagttcacttagttgagcaaatgttcgcaaggcaaaagcagtttccacgttcagcttatctgagttcccaatttcatttctaccktgttaacttttcgatgtttttaagacatttttattcaacacttttagttgtttttattagaaagctcaatctacacaacctagcccatctcttacaagaa

SEQ ID NO: 522977 - DNA, 201 bp, Homo sapiens
tttccccaagttgtacatttttcagataaagtgatgggtagtaatggttttttaaagtaaatctatactgtctgtagatactgacttccttataatgactyagcaaaatttcaaattaacttgctcttgggcttttcagaattgaaatttcctcaccaaaaatgtcagattttgttctgttttacagatggtcagatctta

SEQ ID NO: 522978 - DNA, 201 bp, Homo sapiens
agtgaaactacttaacactttttccagtggatgagaaacaacccaactcctacttccagctcaaggttaacaagcaagaggcagctccttcccagtgtcayggtgtttgtttttcttctgtgggcttagctttctgtgttccccaactacagctgtcatctgaccacaacctcatgagattccaagccagaacaacccaac

SEQ ID NO: 522979 - DNA, 201 bp, Homo sapiens
cataagaattttgttggctctttggcactcatggttgagcatcctgttcatcttagatactgtgccattacatcctacctcattctgtttgacagaatgcrctgcagttcattaaacaatattggaaaatgcatggacgtccacttttccttgttctcatccgggaagacaatataaggtaggttgataaaagaagtaagg

SEQ ID NO: 522980 - DNA, 201 bp, Homo sapiens
aatgttctctgcaaaagtcagatagcttaatcagaccaagtcagatgtaactacgatctggctgcagaaagccggcgtctgggctccttgctttatgtctyatatcccttttacattccccacaggttctaagcagtagacctgtcatctatctagcagaaactgaaggagactgggcctcagatattgaagagtatagtt

SEQ ID NO: 522981 - DNA, 201 bp, Homo sapiens
tttggagaacagctccatctgaggagtgctttttacacaccacaaatctcaaggtgccgtaggaggaacctccctcttctcccaacacacacacacacgtacacacacacacacacacactctctctctctctctctctctctctctctgtctccatctcactcattcttgtcttctggtcctaggtttgcaaaggccgtg

SEQ ID NO: 522982 - DNA, 201 bp, Homo sapiens
tgaatgtaaaatctgccacttactacctgtgtgatctgagttttcttaacttccatgagcattaattttttatttttatgttataaggattagctggtaasgaaatacacataaagcatttactatgggacaaatacatgtttaaatggttcttccactttctgttcatactttaccattcatctacttgttgatctctgc

SEQ ID NO: 522983 - DNA, 201 bp, Homo sapiens
ttggagaacagctccatctgaggagtgctttttacacaccacaaatctcaaggtgccgtaggaggaacctccctcttctcccaacacacacacacacgtacacacacacacacacacactctctctctctctctctctctctctctctgtctccatctcactcattcttgtcttctggtcctaggtttgcaaaggccgtgt

SEQ ID NO: 522984 - DNA, 201 bp, Homo sapiens
aaatgactaatgttgtgcattttttcatgtgcttattggtaatttgtatatctcctttggagaaaagcctatatagacactgtggctattttttaatgggktttttttttctttttattattatgttgttatgaattctttatatcttctaggtgtaaatcccttacaagatatctgatttgtgaatgttttctcaccatt

SEQ ID NO: 522985 - DNA, 201 bp, Homo sapiens
tttctgctttcatttggattgtgaagaaatgaatggaaaactacacagtattcttgttttaaatgaaagataaagggcagagtagaggaaattcttttagygtcgcttttttcctgtttccttcccagttctgcacataatattgtttttgcttgtttgtatgcatttttatgctgccagctcagaaaggagctgccacag

SEQ ID NO: 522986 - DNA, 201 bp, Homo sapiens
ggatgaattttatactgaggaagtctgggcgttaagggtacccatcacccaaataatgtacattgtactcagtatgtaattatttatccctcagccccctytcaccctccagtcttctgagcctccagtgtcccctataccattctgtatgcctttgtgtacccttcatttagctcccacttgcaagggagaagatgtggc

SEQ ID NO: 522987 - DNA, 201 bp, Homo sapiens
gaatctatatttctgacatttttctctaaggaaagaaatctcagttattcataaatatgaataaatttgtgaacttaacctgaaatttacctacttcacgktttttcctgttttgaatctattcacatttttaaaggtctagtgatctttgaagaaaacctatcaattaacgccttctagctccaccttgtttaataatct

SEQ ID NO: 522988 - DNA, 201 bp, Homo sapiens
cattcatctttctgccatcctagtgcttactaagtctggatgcatgaaaaactcagcaaactctcaagggttcctcactagcagaaacctttctagtgtayaaaactgttaaattctctcattgatatagaaaacccttaggtttacttgcaaagagtgatggtggagtatctcctctgcagttgggtcccctgtgtgaat

SEQ ID NO: 522989 - DNA, 201 bp, Homo sapiens
acctaaatatttttgatattcactactttcctttttttctcttgccttactgtttggtgtctgaagtaatttcaacctctttggtttgctgggtctcaaarcaattataaagtaaaagtaacatctgtatttatcattgatgtagttcaatacctatttgggatggaattaaaaggtgacatttgaggccttttgcacgca

SEQ ID NO: 522990 - DNA, 201 bp, Homo sapiens
ctaatccaatatataaatacacagagcctaaaggaccattttctcccaggccaagttgactcttgagccaagtttagctttttaaccatgcttgatattgktattcctctgatatttctacttaactttcctctgctttcctattaattttcacatgttgctgctttggcttggttggaaatgtcagaacaagatgccagt

SEQ ID NO: 522991 - DNA, 201 bp, Homo sapiens
acttttgtgtagaaatgtaagaaaataatatatatttgcatttgctgttgtaggcatgaggaaatgctagagcaaggcataaataatcatagcagtgattsgttgttagatggaggggaactgtggggatgaaggccccaaatgggaatgacatgtcaccaaaaactttttcataattgttaaatttttgagccttatgaa

SEQ ID NO: 522992 - DNA, 201 bp, Homo sapiens
ctcccttgcctttctttcaataaaagacctatgtaagccagacacagtagattattttatgcaatatagggcatattaaaaataaaactactggccgggcrcggtggctcatgcctgtaatcccagcactttgggaggccgaggcgggtggatcatgaggtcaggagatcgagaccatcctggctaacacggcaaaacccc

SEQ ID NO: 522993 - DNA, 201 bp, Homo sapiens
ctccatgttgccacttaatagctttatgtattagctgtatgatgttggataagttttttaaccactctttgcctcagttttctcatcagtagatgagaatrattatagtaacctacctaataggggtgtttaagagtatataatttaatatagccacctgattctcaataagtgttctcagtttttgtcactgttttgttt

SEQ ID NO: 522994 - DNA, 201 bp, Homo sapiens
aaaataatatagttcaataagtcctatccatgttgcactaaaagatgtaagaatttaagctaaaagttatcactgtcagtttggattattgggacttaaawtaagtaaagaaacagtctagaggctgggcacggtggctcacgcctgtaatccgggcactttgggaggccgaggtgggcagatcatgaggccaggagttta

SEQ ID NO: 522995 - DNA, 201 bp, Homo sapiens
tacctttcctaaatcctagttttatgcctaggagatcatattttaataacaaaataatatagttcaataagtcctatccatgttgcactaaaagatgtaaraatttaagctaaaagttatcactgtcagtttggattattgggacttaaattaagtaaagaaacagtctagaggctgggcacggtggctcacgcctgtaat

SEQ ID NO: 522996 - DNA, 201 bp, Homo sapiens
ggaggtctcataagattttaatactgtatttttactgtaccttttctatctttagatacacaaatatcatcgtattacagttgcctacagtattcagtacrtgtttgtagcctaagagcaataggctgtgccatatagcttagtgcttagtaggctatgccacctacgtttgtgtaagtacactctatgggtgttcacaca

SEQ ID NO: 522997 - DNA, 201 bp, Homo sapiens
tcagttatatttgtggatctcgatgctcacaatcgcaacaggcaaactttgtgctcgctgttacccagagaatcaagatcacatgtgagacatttaataaygataaatttaacatgaactattgtttatgatttctatgtagttatatcttaatttccagtaaagtactctaaaatgttagtgatcgtccagaagggataa

SEQ ID NO: 522998 - DNA, 201 bp, Homo sapiens
ctgattgtacctttcctaaatcctagttttatgcctaggagatcatattttaataacaaaataatatagttcaataagtcctatccatgttgcactaaaaratgtaagaatttaagctaaaagttatcactgtcagtttggattattgggacttaaattaagtaaagaaacagtctagaggctgggcacggtggctcacgc

SEQ ID NO: 522999 - DNA, 201 bp, Homo sapiens
tctagctattcaaaaatgtttggcttatttgaaaatactctgttaagaggtgtgtgttgatatggttagaactgaaaaacagcagtggaattaataatacrtatagttctggtaattaactgagcatagttatttattcaaatgagatctacttagtttttgccttattatagctaagagataaccttcttcagtattata

SEQ ID NO: 523000 - DNA, 201 bp, Homo sapiens
tattagtgtccttgttgttatgttttatttttgtgttgttatattcgatagcctaaagaaaatggaccaatattaaagatagttattcatcctaatttttmcttttaacctccaaggttacagcactttctaagaatgtgcctatgtagcatgtctgtccccccactgcctccaccaaaattctgagaacaaagacactgt

SEQ ID NO: 523001 - DNA, 201 bp, Homo sapiens
tcacacaaaaaatgagtagcaaatatccaacactgtctttgattagaactattaagtccaacagcttgcatttaatgaatataatgtaattacatagtcarctgggtagttcatgctctattataagaattatatattagaataaagttattttgatgtataaggtgccaaaggaaaactggttaacaagaaagggaataa

SEQ ID NO: 523002 - DNA, 201 bp, Homo sapiens
ttatttttattgagacttacagcactgcacctttgcctttggtatgttctttagttatttgttttaaaactttttcccttacagatttatcgcattctagraaagactgtggtttgttacccgattattttcgacctaagtgatttctacatgtctcaggatgttttcctgctgatagatgacataaaggtagcttcggaa

SEQ ID NO: 523003 - DNA, 201 bp, Homo sapiens
tttatggctttccattcctttgtgttccattactctgtctatatcatcaaattgattagtaggcagtggcgagcaaggaaagaaaggtggccgctgagagycagctggtgtccatcattttaatgaactgcttagagatggttaatattgtccttgtttctcattgtagctgatgatgaccagatcttttaaaatgttttc

SEQ ID NO: 523004 - DNA, 201 bp, Homo sapiens
taaagatagttattcatcctaatttttacttttaacctccaaggttacagcactttctaagaatgtgcctatgtagcatgtctgtccccccactgcctccrccaaaattctgagaacaaagacactgtagggattgaacctgaagagtattcgctggaatggtatgctaaggtttctttcctgctgtacacctcctctgcc

SEQ ID NO: 523005 - DNA, 201 bp, Homo sapiens
acagcagccggatgtcaacattagtgaatggaaggacaaacccacccacgaaattcttcaaaaactgaatgtgagacagatgcacttcccacatggccctmagtgaggttgctggagcagaagctcccagaatcagaccatatgtctttttgtcctgtcagtgaaggtagcaattaatctggaggtggatgacttgtctac

SEQ ID NO: 523006 - DNA, 201 bp, Homo sapiens
gttgaaaaactaactgttgggttctttattcactgcctgaatgatgggatcattcacaccccaaacctcagcatcacgtaatatacccaggtaacaaactygcacgtgtacccctaaacctaaaacaaaatttgaaattattagaaataaataaacaaaatgtttttccccctaaaaccaaacaaattgtgtctaatgttt

SEQ ID NO: 523007 - DNA, 201 bp, Homo sapiens
aaaactaactgttgggttctttattcactgcctgaatgatgggatcattcacaccccaaacctcagcatcacgtaatatacccaggtaacaaacttgcacrtgtacccctaaacctaaaacaaaatttgaaattattagaaataaataaacaaaatgtttttccccctaaaaccaaacaaattgtgtctaatgttttgcac

SEQ ID NO: 523008 - DNA, 201 bp, Homo sapiens
tggaacatgccatagaaacatctgtctgatcctgggagcagagcgtgctcacttttgactgcataacctcactggcttttcatctctatcattctccttgrgctgtgttgatcacatcgctgtggacactcacagtctctctttctcattgcctccagaatacagatgctgccctgctcccctgcatcagttatcctgcat

SEQ ID NO: 523009 - DNA, 201 bp, Homo sapiens
caccccaaacctcagcatcacgtaatatacccaggtaacaaacttgcacgtgtacccctaaacctaaaacaaaatttgaaattattagaaataaataaacmaaatgtttttccccctaaaaccaaacaaattgtgtctaatgttttgcacttaattttccatactatggagtggagataatagtatatccctcataagttc

SEQ ID NO: 523010 - DNA, 201 bp, Homo sapiens
gttaactgcagcaggagcatgtctttaaggcacagatccctcatgctattgttgtatggcttaagaatgcctttaagcggttttaggccctgggcgggccwggtgttccttgccctcattccttaaacccacaactttccagagtgggcgttatggccatcatgaacgtatcgcagtgctgcagagattttgtttatggcc

SEQ ID NO: 523011 - DNA, 201 bp, Homo sapiens
cttccttttcaaatgcatttccaattagtttcatgagttatctctctcacccaggcgaattgatgatgacaagggaaggacccatgagctggagcactcasctataaaatgcatgagaggaattctctactgctatatgcgtcaggccgataaggtaaaacattgtggtgtggacgggaattctcccatcattctgaagga

SEQ ID NO: 523012 - DNA, 201 bp, Homo sapiens
aaaattcagtttatttattttcctgcaggttttgaataagaacatattttcatagtaaaaaaaagtcttctactggtcaagtccgaaaagtttcaaaattyagactcataaaataaatgtaataaatataacaaaatactgacctaggtttataatagctttatgacgtggtgagggcacttttgatttttctattaaact

SEQ ID NO: 523013 - DNA, 201 bp, Homo sapiens
tttggtttgcatctcactcaccctttcttaagccccacgttgggtgctaaactgttgtaggactttctccttagttcacctaaaaatggggtccttgtcayacaaccatgagagattaggcttgcaggcactttaaagggcaagaaaaatttatcgggcaaaaaggaaaacaaaggtaaacagagagtctcagcaaagcca

SEQ ID NO: 523014 - DNA, 201 bp, Homo sapiens
gcctgttacttggcttctatgggaaaaatactgggggtgcagtgtttccagttggaattgagatgtataaagcatctgcctgatttcttcagctaatgagkttttgctgaaaaatgagtgtaatgaaaaaatgctggatgttggcaggacctactgatgaagtctaatgagcataaatgagtgttctgtaaggcccccaaa

SEQ ID NO: 523015 - DNA, 201 bp, Homo sapiens
tgacctaaggttgtttttgttttttaattttaaaaatagagacagggtctcactatattgcccaagctggtctcaaactcctgggctcaagcaatccttcyacctcagcctcccaaagtgctaggattacaggcatgagccaccatgtctggcccagttaagctatcttacattctttaaattacaagggattattatttc

SEQ ID NO: 523016 - DNA, 201 bp, Homo sapiens
gtacctgatgttgtcctaataagatttctaacacacattgacattactggagatgtgctaaaggctttttaagtcctaattagctgagtcctttcctaaarctggaaagatttctttatgtagggtggattcccactaaggctggagtgacatgaagttgtttccacatcttcagaagtattgtactatagcaagtttaga

SEQ ID NO: 523017 - DNA, 201 bp, Homo sapiens
gtgaataaaattcagtttatttattttcctgcaggttttgaataagaacatattttcatagtaaaaaaaagtcttctactggtcaagtccgaaaagtttcaaaattcagactcataaaataaatgtaataaatataacaaaatactgacctaggtttataatagctttatgacgtggtgagggcacttttgatttttctat

SEQ ID NO: 523018 - DNA, 201 bp, Homo sapiens
ggattgtagagctagattttcctaagacaacaaagctgctgtctaattttgatctctggcatcttcaacatctcacaccctctcttcttccctcccctctyctctctcatttttttttttttcgcaagatagtagtactatcactgtagagccttggatctaattaaattcagatccagttaagcgggtttgggatagggc

SEQ ID NO: 523019 - DNA, 201 bp, Homo sapiens
gaaacaggagaattgcttgaacccgggaggcggaggttgtggtaagctgagattgtgccattgccctccagcctgggaaacaagagcgaaactacgtctcaaaaaaaaaaaaggaaagaaaagaaaaatgttatctgtgggtttttttggagatgcccttcatcagattgagaaagtttccttctattcctcgtttcttga

SEQ ID NO: 523020 - DNA, 201 bp, Homo sapiens
tgtaaatgagtcatggataaggtatcatgtaaagtttcacttggctacaaataaaagaaaacccatcgaacagtggtttcaataaataaaggactttttctttttttttttttttttattttgacggagtctcactgtctcccaggctggagtgcagtggcatgatctcagttcactgcaacctctgccacccagattcaa

SEQ ID NO: 523021 - DNA, 201 bp, Homo sapiens
gtgttgttatattcgatagcctaaagaaaatggaccaatattaaagatagttattcatcctaatttttacttttaacctccaaggttacagcactttctargaatgtgcctatgtagcatgtctgtccccccactgcctccaccaaaattctgagaacaaagacactgtagggattgaacctgaagagtattcgctggaat

SEQ ID NO: 523022 - DNA, 201 bp, Homo sapiens
caaagggccacaatgtggcaggcaaggggcacgtttcagccctatttgtgttacagctcttttagccccaccattttatgggtcccatgttcttgtcctgygattgggaagagtgaggtatgcagtcaagtggagggtgagcaaaatgaagaagagctttattgagcagtggaacaacttagaggagacctgcagtgggta

SEQ ID NO: 523023 - DNA, 201 bp, Homo sapiens
tatatgtgaaaacaacatcaagttattatgaaattcacagctgctgcgtttttaaagggagctgctctgtatacttgaaaatcatttgagcatgtagtaascaattcatagcttacttacaggataacattttgtctgttaaattttttagaatcttggagacttcctcctgtcctgccagccctgttttcattatgaaat

SEQ ID NO: 523024 - DNA, 201 bp, Homo sapiens
acttaggaattgtgttgaatgtggaaaatgcagtaactttttaggtcattggacagacaatcacttacttcactccaggtgtaccttacctgtggtccaartgagttagtgccctctccttctgatggtttcccatgtgatatacactggcctgcttctttgatgtgattatttaatcctggcatctaagtcattctactt

SEQ ID NO: 523025 - DNA, 201 bp, Homo sapiens
ccgttaagcccattgctagagatctagccaattataactgtgtttagcaatggggctttattttccccaaattaggtactatctgtaaacattaataataygttggattatattgactatgaaatacaatagttagttgtattgaatatctattgaatatagactaaggcattattataccaggctgaacaactttgctgt

SEQ ID NO: 523026 - DNA, 201 bp, Homo sapiens
cattgtactggaaagaaaccccgagctagaatttcaagacaaagtagatctagacagactggtcaaagaagcatttaatgaatttcaaaaagatcagagtyggctaaaggaaattgaaaaacaagtaagtacacagcttttttttttttttttttttttgagaattttttcattgtctcaattctttaaaatatccctaat

SEQ ID NO: 523027 - DNA, 201 bp, Homo sapiens
tgatgttagtagtttatgaatttcttttaatccttagggttaaggaagtagctttagtgactgattgtacctttcctaaatcctagttttatgcctaggaratcatattttaataacaaaataatatagttcaataagtcctatccatgttgcactaaaagatgtaagaatttaagctaaaagttatcactgtcagtttgg

SEQ ID NO: 523028 - DNA, 201 bp, Homo sapiens
accttttttgtgaattctcttttttaaagtcagagtcatcacactggactttttgtgaatgcattttctagttttgagctgcaggaagtggacagctgaaraatgcttggggctatacatgttgataaattataagcttttatctgattggatgaggaatattcagtgtgtacactccaaaaaggtatctcaagagaacaa

SEQ ID NO: 523029 - DNA, 201 bp, Homo sapiens
atcacccgtcttctgtgttgatcatgctgggagctgaagaccggagctgttcgtattcggctgtcttggaatggacccctaatttttgtattttttagtaragatgagtttctgcatgttggtcatgctggtctcaaactcccaacctcatgtaatccctcccctcagcctcccaaattgctgggattacaggcatgagcc

SEQ ID NO: 523030 - DNA, 201 bp, Homo sapiens
gcactccagcctgggtgacagaatgagactccatcacaaaaagaaagaaaaaaaaatgctaacctgtagtaaactcagaaagaaccttaaataaaagttaytactgaccctagaaagtgaggatgtcagaaggtccctggtgacaaaacaggctccaacttgtattcctataactgaggtggcagtctttaaattgattca

SEQ ID NO: 523031 - DNA, 201 bp, Homo sapiens
gagttctgagcattgttacatagtagcataattacttcactgcacaacagaggatactacttttatgtaatgtctaataagtggatattatatagtttctrtctcatccatatgagcaagtgtaatttatcaaagcaaagaaaatcacattttcaagtcataaaagagaaaataaaattataatgatcctcagttactgcc

SEQ ID NO: 523032 - DNA, 201 bp, Homo sapiens
tcactcatctctgcatccccagagtactctcctcactactgttatctgtgggaaatatttaaatattggctcattgattcaacaaatatttattgtgctcygactgtaggcactagggatgtagtgttgaatatgatacacaaggtttttgaccatatgggacttaaattctaaagggagagcccaacagaaaacaaaggt

SEQ ID NO: 523033 - DNA, 201 bp, Homo sapiens
taagtgggaattttctgctttgccctctgtctctctcctttaggaactcaggtgacatgaatgttagatactttgttatgatcccacaaatccctgaggcsctgatcatttttttccattctattttctttgttttgatcaaattggataatttctgttgttctgtcttccagtttgtttattctttcctctgtcctcatc

SEQ ID NO: 523034 - DNA, 201 bp, Homo sapiens
gtggcttatcaaggtcgcacatgtagtacgtggcagggcttggatttaaaccaagtagtctgactcaagagttcattttctatgctgacagtgagtgttaratctctgtttaacctgtacagatatgagtgacatatatgtcatgtggcaacatcatattcaagcttcaaaggcagccaaagagacctaaggcttacaggt

SEQ ID NO: 523035 - DNA, 201 bp, Homo sapiens
tatcaaatatgcataagctatccactaaaatgttacaagttatttcccctttcattaaaccttctttttcacttttgaatggaaaatgttcattcataccycctagagtggaggagactgatgtatgaacccctaactggctttcatgcagtgatgcttgattgtttctctgattgtctgaaaagtattggagcttggatt

SEQ ID NO: 523036 - DNA, 201 bp, Homo sapiens
agaaatttgatctgataagatgatttttaaaatttaccttttcagtacatatgattatcagatatcttccttgtttcttaataagcatttaatatatgtcwgtctgaccccattgccatattttcagcgtgaaatatttggaatagaagtttttctgtttataaaaactgcagtaggccagatgcagtggctcacacctgt

SEQ ID NO: 523037 - DNA, 201 bp, Homo sapiens
tggaaatatttcaaagcaaaggtacaggttatatgtattcaggattagaatggaaaaatcactgaattgtaagcaggtattgtaaacatacgtggaaaatyctctctctctctctctctctctctctctctttttaagttgaggcaaggtctctctctgtcatccaggctggagtgcagtggcgtgatcacagctcactgt

SEQ ID NO: 523038 - DNA, 201 bp, Homo sapiens
cttgatcgaattggctactgaagcttgtgcatgtgtcacgtagttcttgtgccatggttttcagctccatcagatcagttgaggtcttctctacactgttkattctagttagccattcatataatcttttttcaaagtttttagcttccttgcaatgggttctaacatcctccgttagctcggataattttgttattacca

SEQ ID NO: 523039 - DNA, 201 bp, Homo sapiens
cagctctgttggggtttgctggaggtccactccagaccctgtttccctgggtatcaccagtggaggctgcagaacagcaaatattgcagaacaacaaatamtgctgcctgaaccttcctctggaagctttgactcagaggggcacccagctgtatgaggtgttagtcagcccctactcggacgtgtctccaagttaggcta

SEQ ID NO: 523040 - DNA, 201 bp, Homo sapiens
ctccacctatagcttcctggctgctttgtttacctactcaagcctccacaatggtggacccccctcccccagccaggcttgctgccgtgcagttcgatctyggactgccgttctaacagtgagcaaggctccatggccatgggacccgctgagcaaggtgcaggatataatctcctggtgtgccgtttgccaagaccagtg

SEQ ID NO: 523041 - DNA, 201 bp, Homo sapiens
ttattttttctctaatcttgtcttctcgctttatttcattaagttgatcttcaatctctgatatcctttcttccgcttgatcgattcggctcttgataacktgtgtatgtgtcatgaagttctcgtactgtgtttttcagtttcgtcaggtcatttatgttcttctctaagctggttattctagttagcaattcatctaac

SEQ ID NO: 523042 - DNA, 201 bp, Homo sapiens
gctactagagccataacctctccttgtacaatcaccctagtcaatgcacactattgttgcctgggtgatttttctaaaatgaactaacccttaagtggttrcttaacaccactcatcagctctctgtctcctgcagggttgaagtagggacttcaaggaaagcctctctggaagtgatatttaactcctagaaataggaat

SEQ ID NO: 523043 - DNA, 201 bp, Homo sapiens
ctcataaagtgagttagggaggattccctctttttctattgattggaatagcttcagaaggaatggtaccagctcctccttgtacctcaggtagaattcgrctgtgaatccatctggtcctggactctttttggttggcaagctattgattattgccacaatttcagatcctgttattggtctattcagagatgcaacttc

SEQ ID NO: 523044 - DNA, 201 bp, Homo sapiens
cagctgcagtgttaaatggttgcaactgattatttcctttatatgcctagaaaaaaggccatttgcatctatgtgagctctgaggtcatttaaagaaaagmtcttaatgcctgtgttcaaggagctgtcagacattcaaatagtaacagtttactaagatggtgatttgggggagttctaaagctgttctgttcctccttc

SEQ ID NO: 523045 - DNA, 201 bp, Homo sapiens
ttgtctccaaagctatcatcacctcttctaggtgagtagtcatcaaagctgtctgtggcaggacgagcccttcagtctgtatctgttttgtcataatcccmatttctatcacagccagaagaatgatcattcctgtctttatcctgtgcttgatcagcaacgtccactcaaattctcctgttacctagagactcttcattg

SEQ ID NO: 523046 - DNA, 201 bp, Homo sapiens
catcttttagatttgtgaacatctggcctgctctcttctttgcccccaggtcggttgtacgccgtgcagcaagtcttttaagtaaagtagtggacagcctrgccccatccattactaatgttttagtgcagggcaaacaggtaagtatttgcttttcagacacttatttggtcccggttgcaaagatttctggctaggacc

SEQ ID NO: 523047 - DNA, 201 bp, Homo sapiens
atattgccagaattatttttctggtttcttcccatctggataaactattttttattattattattgaatttacttttgatttgactgggttcttttttttycccccgttaaggatgtgactttaatgtgtatcatttgtaatcacctagcttcagctctgggtgctttcagtggcaaagtctctgttgagtttcttggtta

SEQ ID NO: 523048 - DNA, 201 bp, Homo sapiens
ggcattagtaagtattcagtaaatatttattgaaggactgcagtttgatggactgaatgagtgagcttttgaataataagatctgaggaaaaatttttttwaaaaaaggacaaggaaactgcttacaaaatcagttcaactttattgctataaacaaatctttgacatatcgcctaactatagttcttctaatgtaattgt

SEQ ID NO: 523049 - DNA, 201 bp, Homo sapiens
ctaatacagatttgttatattttaaatacttatttttaaactccataggatatcctgttgtaccaaagtactattatgtgccagctgactttgtagaatawgaaaaaaataaccctggtagtcaaaaacgatttcctagcaactgtggccgtgatggaaaactgtttctttggggacaagcactttatatcatcgcaaaac

SEQ ID NO: 523050 - DNA, 201 bp, Homo sapiens
tttggaaagaacctgaggatttaatccaaattcagcaaaattctgcaaacattttgggaaaattgttctcagtggaatactttaggaaatgaaagaaaagraagagtcaaatgtgactatggagatttgaatcttcagtaacttaaaaaacagtgggcaggtagctgggtggacccattccagatgggcctgggcatcatt

SEQ ID NO: 523051 - DNA, 201 bp, Homo sapiens
aaactctacctctatcctgatgtaattaggttaagaaaattaaaggccacggtccagaaaactaacttccacaaatgcaacaaaaggaaaaatttctccartaacctctgtgcaatgggaaatctttcttttaagtaccaagtcaatttcttcaactgtacaatgtattctaatttgaaggttttcaaatataatatagta

SEQ ID NO: 523052 - DNA, 201 bp, Homo sapiens
cttatttttaaactccataggatatcctgttgtaccaaagtactattatgtgccagctgactttgtagaatatgaaaaaaataaccctggtagtcaaaaaygatttcctagcaactgtggccgtgatggaaaactgtttctttggggacaagcactttatatcatcgcaaaactcctgggtaagtggagaagattgggaat

SEQ ID NO: 523053 - DNA, 201 bp, Homo sapiens
ttcctcatcttttagatttgtgaacatctggcctgctctcttctttgcccccaggtcggttgtacgccgtgcagcaagtcttttaagtaaagtagtggacmgcctggccccatccattactaatgttttagtgcagggcaaacaggtaagtatttgcttttcagacacttatttggtcccggttgcaaagatttctggcta

SEQ ID NO: 523054 - DNA, 201 bp, Homo sapiens
gcattcctcatcttttagatttgtgaacatctggcctgctctcttctttgcccccaggtcggttgtacgccgtgcagcaagtcttttaagtaaagtagtgkacagcctggccccatccattactaatgttttagtgcagggcaaacaggtaagtatttgcttttcagacacttatttggtcccggttgcaaagatttctgg

SEQ ID NO: 523055 - DNA, 201 bp, Homo sapiens
ccatgcattcctcatcttttagatttgtgaacatctggcctgctctcttctttgcccccaggtcggttgtacgccgtgcagcaagtcttttaagtaaagtwgtggacagcctggccccatccattactaatgttttagtgcagggcaaacaggtaagtatttgcttttcagacacttatttggtcccggttgcaaagattt

SEQ ID NO: 523056 - DNA, 201 bp, Homo sapiens
ccaatttcttggaaaaatatcacacagatttgcattttttttccactttaattttaccattggcatagaaaattaccaaaataattgtaactgggctaatrtattttttctaaggtaaaatttttgagatccttattaagctcagctgctattggattttatattttatattttaggagtttttagaggcaatcctaagca

SEQ ID NO: 523057 - DNA, 201 bp, Homo sapiens
taagaggaataaatgttgtgcatttaattaaaagctttgttcaacaaagactctattatccaatgtctaggtaccgtttctgatcacattgagagagtctrtagaagagctggcagccaaaaactttggtttgtattagtgtccttgttgttatgttttatttttgtgttgttatattcgatagcctaaagaaaatggacc

SEQ ID NO: 523058 - DNA, 201 bp, Homo sapiens
gtggcagattctggagcgcacgcccaatgggatcattgttgctgggaagcatttgcctcaggtaaagccccaccatgttcacataaagaaaggagacttcrcaaagggtagtgaatcctttcctcttgcactgcaaataacttttctccttttcagcgttctaagagtattttcaaagaaggaatgaaatactagaaaata

SEQ ID NO: 523059 - DNA, 201 bp, Homo sapiens
ccaggttcaagcaattctcctgcctcagcctcctgagtagctgggattacaggcacacacaaccatgcccagctaatttttttttttttttttttttttgkatttttagtagagatggagtttcaccatgttggccaggctggtctcaaactcctgaccttgtgatccgcccacctcagcctcccaaagtgctgggattac

SEQ ID NO: 523060 - DNA, 201 bp, Homo sapiens
tctgtcattacttagcataaaatctacaatcccaggctcacgcctataatcccagcactgtgggaggccaaggtgggtgggttacctgaggtcagaagttmgagatcagcctggccaacatggtgaaaccctgtctctactaataatacaaaaaattagccaggtatggtggcatgcgcctgtaatctcagctactcggga

SEQ ID NO: 523061 - DNA, 201 bp, Homo sapiens
agttttgcttctaacagtcagggccctctgccacaggtctgctggactttgctggaggtccactccagaccctgtttgcctgggtatcaccagcggaggcwgcagaacgtcaaagattgccacctgtttcttcctctggaaggtttgtcccagaggggcacccgccagatgccagctggatctctcctgtatgagatatct

SEQ ID NO: 523062 - DNA, 201 bp, Homo sapiens
gtaactgctgtacccatttcattccagttcctcaccgtgatttatattttcaggattgcagttgtctggctagccaagccatcctgctgggtatactgctsaaaagagaaggccccaacttcatcacaaaggaaggtaagcatgcatgtctaggagaacattttaagaggacctctctagccttgaacatatatcaaatat

SEQ ID NO: 523063 - DNA, 201 bp, Homo sapiens
tatattttttagaggtagccggttcaaccccatattagatatgctggcagcccttaaaaaaggaataattggaggagtcaaagttcatgtggatcgtctamaggtagccttctgattttcagtatgcatctattttcaggacagttaatctacaatacagctatgtttcttaatgtatggtctatttaaggtttttgactt

SEQ ID NO: 523064 - DNA, 201 bp, Homo sapiens
gactaccacatgagtattagtgacacttagttgtttggaccatgtacacatcagttagttggattgagtgctggaggtaagggtgggaatatcccatgacrtttcaagttcttctgtatttattttcaaaggtactttattccccctcttgttcccccagcaagaaggtttacaagtagtaaagtatggtacttcacataa

SEQ ID NO: 523065 - DNA, 201 bp, Homo sapiens
aaaactgaatgtgagacagatgcacttcccacatggccctaagtgaggttgctggagcagaagctcccagaatcagaccatatgtctttttgtcctgtcaktgaaggtagcaattaatctggaggtggatgacttgtctactcccagggcaatcatgagaagttgttctcttggtctaacatctgcatggatatctttaaa

SEQ ID NO: 523066 - DNA, 201 bp, Homo sapiens
attatggattttgtaatcaacctataattatatatttaaattttgctttacatacataagatcacagctgaggttaaccataatttcaaattttatcaccmgccacttgtgctattttatcacatttgaaaatattcactcatattatttacctcaaacagtgatctataaatttgtttagactataatagttaaggacct

SEQ ID NO: 523067 - DNA, 201 bp, Homo sapiens
agaatctgtgtgtgatggctttctcaggtgctggttttagtagtagtgtacttagtgtgtgggaaggttcactgtctcctgtggggccagagtggcagagrtctcaggaagcttatcttgttccccagtagtgtgtactactctcctccccaagtctttttttcactagggtagaatacttcagcctttaggccagtagga

SEQ ID NO: 523068 - DNA, 201 bp, Homo sapiens
attattaacacccagcaaacttgtaaccatggggttacagattatttctctgacattatcatctttttcttctactttctccctccctagcttctcttccttttttttttttttttttttcttttcttacatttttcctgtgctgtagtgaaaggtgaagagtttgtggattatgagcttaggaatcagacagtccaggat

SEQ ID NO: 523069 - DNA, 201 bp, Homo sapiens
agctattagaaataaatatgcctttgctggtgtttatgttggatttgggtggtgtttcatggtcttgagaggtctttagggagtttcctagtatctagtgrtatattaatatatctatttcactgaatgatgatggacagtttctggaaagaaagcgaaataggtatgggtaccatttgtgatcatttagggggctgcatt

SEQ ID NO: 523070 - DNA, 201 bp, Homo sapiens
ccaaatcagcaccagtgcttggtagggttgagacattcccctgtggcctggattgcccagttccccagtgtcaatgtgtaatcatggaggcagtctccccsctttcacaccctggagacatattttcacctgactcaccatgtaggttgccacccacagctttcaaagtgtctgaagtttctttcattttttctgttgagt

SEQ ID NO: 523071 - DNA, 201 bp, Homo sapiens
gttccatctgggtggcccccagtcaattgggtggcacctgccgaccttgagaataggtcttccccactcagacagccaactcacgtgccagcttcctccaraaacatcctcacagatgtacccagaaataatgctttgccagctgtctaggtatccctttatccagtcaaattgacacctaaaatgaaccacacagggttg

SEQ ID NO: 523072 - DNA, 201 bp, Homo sapiens
ttggctcactgcaccttccacctcccaggttcaagcaattctcctgcctcagcctcctgagtagctgggattacaggcacacacaaccatgcccagctaatttttttttttttttttttttttgtatttttagtagagatggagtttcaccatgttggccaggctggtctcaaactcctgaccttgtgatccgcccacctc

SEQ ID NO: 523073 - DNA, 201 bp, Homo sapiens
ttattctatttttcatctttctgttttatttttcctaccttcctgtgggtacttaaagatttttttaaaatctctttttgatttatcaatagtggttttgwttgtatcattttgtataactttttagtgattgctgtaggtaacacttcagtgtagtgatgtcatcattttattagttcaaatgaagtatagaaaacttac

SEQ ID NO: 523074 - DNA, 201 bp, Homo sapiens
ctattatagctttccagttctgtaattttaaatgtatttattagaaagtagattaatttacattttgatgtcttcattataatgtggatgtgacaacttcrtactcattttatacttctctatgagatatttggttcctctcccaagggtcgtgagtttgctttgtctcccacagagacagcatggttttctgggatgttt

SEQ ID NO: 523075 - DNA, 201 bp, Homo sapiens
tttaattcgtaaatccccttccagcgcttctgttgctggcttccataatctaggttattggtaacctttaagtgactttagtggagtagtgtgcccagtcrccagactgtagggagttaaaaaggaattatatggtggaagaccatctgctcaggaagttgagtttactgcaatccaagaaaggttataaacccctcctaa

SEQ ID NO: 523076 - DNA, 201 bp, Homo sapiens
aaattacctttctgtttagagaatggagtttatccattctttcagggtaggtctgctggtgatagaatctcttattttccttcatctgagattgtcttggyttcttcctgattgctaagtgatgtatttactggtataactttctgagtgggtagtttttttctttcaatcactggaaactcttgtgccacatcctagcct

SEQ ID NO: 523077 - DNA, 201 bp, Homo sapiens
tgtttagcatttaacctgttagatttcttttatccctttgtgtgattaagactatcactgtatagacagaagccattgttttaatggcttttgaacttggtttttttttttttggttccattttttaatggagctaattttttaattagctccatatattgacagttttgatttttttttttttttttttttcttgagacg

SEQ ID NO: 523078 - DNA, 201 bp, Homo sapiens
taaggcaaaaaggaaacccagggcagttaccatagtgtcgttcatagagtcctgaagttcatagctagactgccttctacccatgtttctaagtctttttrtgtttgttttatatgtaatgtccaagcttcttggttgtacttagtgagaagactagggaaaattatgtctactccatcttcccatccatgtatctttaaa

SEQ ID NO: 523079 - DNA, 201 bp, Homo sapiens
tctcggcctcccgaagtgctaggattacaggcataagccactgcaaccaacctcattgtggctttgattcgcatttctttgatgcttagtgatattgagcttttttttttttttaatgtttcttcctgtgtgtaggagaaagattcttgatgaattcacttataaggtgatctgatggcaaaagctcctttttgttgtaga

SEQ ID NO: 523080 - DNA, 201 bp, Homo sapiens
aatattttgtatttcaaaacacatataccactatatgtagttttatactagctgcttttaagccatctagaaaatagcaccccaaaaaagtaagaagtcawgcacattgctgaagactttgctttaatgtagtgtattgaaaggtattttggttttttgtttctttccttttgagatggagtcttgctctgttgcccaggc

SEQ ID NO: 523081 - DNA, 201 bp, Homo sapiens
acgtttgtgtaagtacactctatgggtgttcacacaacaacgagattgcctaatgatgcatttctcagaatgtatcttggtcattaagcaatgcatgacagtgtgtgtgtgtgtgtgtgtgtgtgtgtgtgtgtgtgtgtgtgtagcttttttattgtctatcccctacacatacctataagaacagtttcaagaaggcaa

SEQ ID NO: 523082 - DNA, 201 bp, Homo sapiens
cgtttgtgtaagtacactctatgggtgttcacacaacaacgagattgcctaatgatgcatttctcagaatgtatcttggtcattaagcaatgcatgacagtgtgtgtgtgtgtgtgtgtgtgtgtgtgtgtgtgtgtgtgtgtagcttttttattgtctatcccctacacatacctataagaacagtttcaagaaggcaag

SEQ ID NO: 523083 - DNA, 201 bp, Homo sapiens
gaggaagtctgggcgttaagggtacccatcacccaaataatgtacattgtactcagtatgtaattatttatccctcagccccctctcaccctccagtcttytgagcctccagtgtcccctataccattctgtatgcctttgtgtacccttcatttagctcccacttgcaagggagaagatgtggcatttggtttttcattc

SEQ ID NO: 523084 - DNA, 201 bp, Homo sapiens
gtttgtgtaagtacactctatgggtgttcacacaacaacgagattgcctaatgatgcatttctcagaatgtatcttggtcattaagcaatgcatgacagtktgtgtgtgtgtgtgtgtgtgtgtgtgtgtgtgtgtgtgtgtagcttttttattgtctatcccctacacatacctataagaacagtttcaagaaggcaaga

SEQ ID NO: 523085 - DNA, 201 bp, Homo sapiens
ctgggtaagtggagaagattgggaatggtatttttttccttgttattaagctattagaaataaatatgcctttgctggtgtttatgttggatttgggtggygtttcatggtcttgagaggtctttagggagtttcctagtatctagtggtatattaatatatctatttcactgaatgatgatggacagtttctggaaagaa

SEQ ID NO: 523086 - DNA, 201 bp, Homo sapiens
ttaaaggcagaggaacttttagcaaatttcaaacagaatcttgcatgtttctaattagtcttaaaactataagtataagcagaatctcagttatatttagracattcattgaaatttgcactttatctaaaacagtaggatttttaaaaatcaaacatttcattagaaacctagaattcagaatggctgtttttttaattt

SEQ ID NO: 523087 - DNA, 201 bp, Homo sapiens
aaaagtctttattcattaaaggagcctcagctggatctctgcttgacaacattttgtggacagctaattgtggttactatttttacatgaaaataatatarcagtgaatctttaaaaatatagtatatgactttcactaattcaggccagtttgtatctcagtgaagtctaataatattttgctttatgtatgcctaagta

SEQ ID NO: 523088 - DNA, 201 bp, Homo sapiens
atgcagacaatgtcagtatttttgtgaagttttcacagtcaaaatgccaaagttctacaagtcttttttcttaatttaggaaatgtttttctttttctctstccagggctgttcgtggtcagttatatttgtggatctcgatgctcacaatcgcaacaggcaaactttgtgctcgctgttacccagagaatcaagatcaca

SEQ ID NO: 523089 - DNA, 201 bp, Homo sapiens
actgaggaagtctgggcgttaagggtacccatcacccaaataatgtacattgtactcagtatgtaattatttatccctcagccccctctcaccctccagtyttctgagcctccagtgtcccctataccattctgtatgcctttgtgtacccttcatttagctcccacttgcaagggagaagatgtggcatttggtttttca

SEQ ID NO: 523090 - DNA, 201 bp, Homo sapiens
gtctgtagtcttatttttgattaagcacatctgttcttgctttatgtattacactttatgcatttcagataaatcattaactagcaaacatttagaatgcwgactgttatgtttggaagaactcctggaagttttatttactctattttcccttttatggctttccactgacacacccaggttggcggtgcgctacggggc

SEQ ID NO: 523091 - DNA, 201 bp, Homo sapiens
ttgatttttttttaatttttatcttttagtagctaggagaattttacaataaaattctgccacttgtaggtaactctgggtgcctttgggcatgaagaagwagttatctctaatcctttgtctccaagagtgattcaaaacatcatctattataagtgtaacacccatgatgagagggaagcggtcattcagcaagaactg

SEQ ID NO: 523092 - DNA, 201 bp, Homo sapiens
cgcgatggcgggggcggcgggactcacggcagaagtgagctggaaggtcttggagcgaagagctcggaccaagcgctcaggtttggctggctggggcgcckccccccacccgagtaccttgggtggtgcttcgcctcaagcgccttggcgggaggcaggtgggggccctgggaatgaacctgtgccccgagttcctcctta

SEQ ID NO: 523093 - DNA, 201 bp, Homo sapiens
ggagggaggaagggaaagaaagaaagagagagagagacagagatagccagatatagtggtttgtgtctatagtcccagccctcccacttgggaggctgagkcaggaaaaaggatcccttgagcccaggagggcaaggctgcagagagccgtgattgtgccactgcactccagcctgggccacagagtgagatcttgtctca

SEQ ID NO: 523094 - DNA, 201 bp, Homo sapiens
ccttccaggttctctgtttaatattttatgttcaactgtaaagaggttctctaagtaaataaaaattatcaacaaaggagagaatactaaaaatatctgtytttgttttatatacacctcaggaaaatgaaagaaaagctcaggaatctcatattttccataaggaaatctttatgtgaatttatttttccccctaagctg

SEQ ID NO: 523095 - DNA, 201 bp, Homo sapiens
tgtactggaaagaaaccccgagctagaatttcaagacaaagtagatctagacagactggtcaaagaagcatttaatgaatttcaaaaagatcagagtcggstaaaggaaattgaaaaacaagtaagtacacagcttttttttttttttttttttttgagaattttttcattgtctcaattctttaaaatatccctaatctc

SEQ ID NO: 523096 - DNA, 201 bp, Homo sapiens
gtgtggtagtgcacacctgtggtcccagctactcaggaggctgaagtaggactgcatgagcccaggaggtcaaggctgcagtgagatgtgatcatgccacygaattccagcctgggtgacacagcaagaccctctcaagaaaaaaagaaacacaaaattaaaatacaattttcattaaaaggaattatcatttcaaagtta

SEQ ID NO: 523097 - DNA, 201 bp, Homo sapiens
caaggaggcagaggttgcagtgagccaaaatcgtgcccctgcactctagcctgggtgacagagcgagactccgtctcagaaaaaaaagaaagcaaaaaaawaaataaataaatactgtctgcacagcaaaagaaactaccatcagagtgaacaggcaatctacagaatgggagaaaatttttgcaatctacccatcagaca

SEQ ID NO: 523098 - DNA, 201 bp, Homo sapiens
aagatgtaaagagaagttactgggtctcagcaagatttactctgcatcaggttctgtttgtccttcccatcttcttcctacttcctgcctggaacttgaawataatgtttagagctgctggagacatcttatgttagacaataaggtaacttctaagatgaaaaccatgcactaaggagaagaaagagcctagattattaa

SEQ ID NO: 523099 - DNA, 201 bp, Homo sapiens
cagaaaagctgataattctaaaaaccagagggcctcttctccaaaggatcacagcccctcgccagcaacggaacaaagctggatggagaatggctttgatragttgacagaagtaggcttcagaaggtcggtaataacaaacttctcagagctaaaggagcatgttgtaacccatcgcaaggaagctaaaaatcttgaaaa

SEQ ID NO: 523100 - DNA, 201 bp, Homo sapiens
agacatcttatgttagacaataaggtaacttctaagatgaaaaccatgcactaaggagaagaaagagcctagattattaatgatttcatcaagcatcataycagcctcggacagcttacatccatgcactttttttttaaaaaaagacagtataccactatcttgtttaattcactgttatttaggctaaccctaatccca

SEQ ID NO: 523101 - DNA, 201 bp, Homo sapiens
ttcaccaaggttgaaatgaaggaaaaaatgttaagggcagccagagagaaaggtcgggttacccacaaagggaagcccatcaggctaacagcggatctctyggcagaaactctacaagccagaagacagtgggggccaatattcaacattcttaaagaaaagaattttcaacccagaatttcatatccagccaaactaagc

SEQ ID NO: 523102 - DNA, 201 bp, Homo sapiens
agagcaaaactgaaggagatagaaacacaaaaaaactcttcaaaaaaatcaatgaatccaggagctggttttttgaaaagatcaataaagttgatagaccrttagcaagactaataaagaagaaaagagagaagaagcacatagatgcaataaaaaatgctaaagggaatatcaccagtgatcccacagaaatacaaacta

SEQ ID NO: 523103 - DNA, 201 bp, Homo sapiens
taaagggaatatcaccagtgatcccacagaaatacaaactaccatcagagaatactataaacacctctatgcaaataaactagaaaatctagaagaaatgrataaattcctggacacatacaccctcccaagactaaaccaggaagaagtcgaatcactgaatagaacaataacaggctctgaaactgaggcaataattaa

SEQ ID NO: 523104 - DNA, 201 bp, Homo sapiens
agttcatataccacacaatttatttatttatttttagaaatgttcatagtagctttattcataatagccaaaaattgaaaacaactcagtgggtgaatgayaaataaactgtggtacatccacaccatgtaatagtactcagcaatgaaaagaaacaaattattgatacatgcaacaacttggatgttaaagccaatccaa

SEQ ID NO: 523105 - DNA, 201 bp, Homo sapiens
cactccagcctaggtgacagagcaagactctgtctcaaaataaataaataaatacataaatacaaatataaaaaacaaataaaagacataaagaggtagcrctgatcgttatgaaattgtttctttctcatttattttattagctgaggggttaagaagatactaagaatactatagttacaaaaattgaaatgttttgtt

SEQ ID NO: 523106 - DNA, 201 bp, Homo sapiens
gtatcatttctgagattaacaggctgcagcaggaggccacagagcatgctacagagagtgaagagcgcttccgaggcctagaggagggacaagcacaggcyggccagtgccccagcttagaggggcgattgggccgtcttgagggtgtctgtgaacggttggacactgtggctgggggactgcagggcctgcgcgagggcc

SEQ ID NO: 523107 - DNA, 201 bp, Homo sapiens
ccctgcaggccctgcaaggagagctctctgaggttattctcagcttcagctccctcaatgactcactgaatgagctccagaccactgtggagggccagggygctgatctggctgacctgggggcaaccaaggaccgtatcatttctgagattaacaggctgcagcaggaggccacagagcatgctacagagagtgaagagc

SEQ ID NO: 523108 - DNA, 201 bp, Homo sapiens
acgggccgggctcgggctgtcctgtggagcagcagcatccccggggccggcagaggcgccagtggctgggcgggatgagtctctgagggccactgtggagygccccgccatggccccccgcaccctctggagctgctacctctgctgcctgctgacggcagctgcaggggccgccagctaccctcctcgaggtttcagcct

SEQ ID NO: 523109 - DNA, 201 bp, Homo sapiens
gctccgtgtgcctggccgggctagatggcttccgccggcagcagcaggaggacagggagcggctgcgagcgatggagaagctgctggcctcggtggaggarcggcaacggcacctcgcagggctggcggtgggccgcaggccccctcaggaatgctgctctccagagctgggccggcgactggcagagctggagcgcaggc

SEQ ID NO: 523110 - DNA, 201 bp, Homo sapiens
cgggctcgggctgtcctgtggagcagcagcatccccggggccggcagaggcgccagtggctgggcgggatgagtctctgagggccactgtggagcgccccrccatggccccccgcaccctctggagctgctacctctgctgcctgctgacggcagctgcaggggccgccagctaccctcctcgaggtttcagcctctacac

SEQ ID NO: 523111 - DNA, 201 bp, Homo sapiens
tctccacccacgaccaggagctgggtcacctcaacaaccatcatggcggcagcagcagcagtgggggcagcagggccccagccccagcctcagcccctccrggccccagtgaggagctgctgcggcagctggagcagcggttgcaggagtcctgctccgtgtgcctggccgggctagatggcttccgccggcagcagcagg

SEQ ID NO: 523112 - DNA, 201 bp, Homo sapiens
ccaagtggcattttcagctgctctgagtttgccccggtctgaaccaggcacggtccccttcgacagagtcctgctcaatgatggaggctattatgatccaragacaggtagtcctgggaggggctgggttgaacggttggagaaatgggtgaggtgtgcagtgatatcttcccattcttgccttttccgacagtgtgaatc

SEQ ID NO: 523113 - DNA, 201 bp, Homo sapiens
tgaaaccctcaatgagatccagcaccagctgcagctcctggacacccgcgtctccacccacgaccaggagctgggtcacctcaacaaccatcatggcggcrgcagcagcagtgggggcagcagggccccagccccagcctcagcccctccgggccccagtgaggagctgctgcggcagctggagcagcggttgcaggagtc

SEQ ID NO: 523114 - DNA, 201 bp, Homo sapiens
ccaggcccagattgccccccggccagccagccgccacaggtaagagtctggatcccagcccgaggcttgggtggtgaggaaggggtcagaatgccacctcygcctggctctctgctgtgtccgctaatgcagggcagagggggagtgagaagcccatccatcaggtggctcctcacatgcccaccttcccacggggccttt

SEQ ID NO: 523115 - DNA, 201 bp, Homo sapiens
atggagtggaggtgctgtcagggttatgggggcgatgactgtgctgagagtcccgctccagcgctggggcctgcgtcttccacaccacggcccctggcccrgcctgcccgccccaacctctctggctccagtgcaggcagccccctcagtggactggggggagaaggtgagtgtgggagctgctgcgagggtggcaagttc

SEQ ID NO: 523116 - DNA, 201 bp, Homo sapiens
gtgccttggagcgcagggtgctggacagtgaggggcagctgcggctggtgggctccggcctgcacacggtggaagcagcgggggaggcccggcaggccacrctggagggattacaagaggttgtgggccggctccaggatcgtgtggatgcccaggatgagacagctgcagagttcacactacggctgaatctcactgcgg

SEQ ID NO: 523117 - DNA, 201 bp, Homo sapiens
tgacaccactccagctctgttccctccagccctccagccagacacagatcagaggccggagtgaatggggccaggagtatagaactgcaatccccaagagrggcaggctcatcaatggcttattctctacttaaccccaagctggcctgcccgtcttctcctggaggggtggggtggaagccagtgttcagatcacccaca

SEQ ID NO: 523118 - DNA, 201 bp, Homo sapiens
cacaggccggccagtgccccagcttagaggggcgattgggccgtcttgagggtgtctgtgaacggttggacactgtggctgggggactgcagggcctgcgmgagggcctttccagacacgtggctgggctctgggctgggctccgggaaaccaacaccaccagccagatgcaggcagccctgctggagaagctggtcgggg

SEQ ID NO: 523119 - DNA, 201 bp, Homo sapiens
cccctccagggccggcctgcggaggagccgatcctcgcaccctccgctccctccactggccctccaggtcgattccctgggctccaggctcccccgcgcgsgcgccgcccaccgccatactaaacgatcgaggaataaagacacttggtttttctaaaaaaaactaaacgaaccgttctgctacggtacggggtcgggggc

SEQ ID NO: 523120 - DNA, 201 bp, Homo sapiens
tgtgaaaggctgggatggcccagcagttgaacagaatggaccctacctattcctgtttttcttgataccccaattcctgctttgaagtccacgtagcaccsagcacaacaggagagcctcagcagatgtttgctgagtgacttagtgagagctgctttatttctcactgctccctttcctcttctcacaggtcctcaaggt

SEQ ID NO: 523121 - DNA, 201 bp, Homo sapiens
agggtgctggacagtgaggggcagctgcggctggtgggctccggcctgcacacggtggaagcagcgggggaggcccggcaggccacgctggagggattacragaggttgtgggccggctccaggatcgtgtggatgcccaggatgagacagctgcagagttcacactacggctgaatctcactgcggcccggctaggccaa

SEQ ID NO: 523122 - DNA, 201 bp, Homo sapiens
ctatgccagagagaagagaggggcagaagggttagtgagatcgcagagattccctgcccgtgtgtgtgtgtgtgtgtgtgtgtgtgtgtgtgtgtgtgtgkatttgtgtgtctgtgtgagagagagggagagagcacgcaaaagatggagagactgagaaaaagaaggccaaaaaagagaaggtgctcgcacacgccccat

SEQ ID NO: 523123 - DNA, 201 bp, Homo sapiens
cacgcccggggaagagggcctgacgcgctgcggggcggggccgcggggccgggtcgcgcgagcagcggagcaccaagggaacggaaaatggcgcctcacgrcccgggtagtcttacgaccctggtgccctgggctgccgccctgctcctcgctctgggcgtggaaagggctctggcgctacccgaggtacagaagcaagtt

SEQ ID NO: 523124 - DNA, 201 bp, Homo sapiens
gcgacccagcgccgaaaagccaagacttcatgaactacataggtcttaccattgacctaagatcaatctgaactatcttagcccagtcagggagctctgcytcctagaaaggcatctttcgccagtggattcgcctcaaggttgaggccgccattggaagatgaaaaattgcactcccttggtgtagacaaataccagttc

SEQ ID NO: 523125 - DNA, 201 bp, Homo sapiens
tacctgatggtccaggtcttttgcagtgtgtttgtgctgatggtttccatggatacaagtgtatgcgccaggtgaggaattaggccgtctaactagggatrcaaggaatgcatagagcaagtcttctcagaaaggagagccacaagaccaggagctgatacaaatttcctataggtggaaaactatagaattgccctagac

SEQ ID NO: 523126 - DNA, 201 bp, Homo sapiens
gccaccactctatccgtctccattctgctttgggcgacccagcgccgaaaagccaagacttcatgaactacataggtcttaccattgacctaagatcaatytgaactatcttagcccagtcagggagctctgcttcctagaaaggcatctttcgccagtggattcgcctcaaggttgaggccgccattggaagatgaaaaa

SEQ ID NO: 523127 - DNA, 201 bp, Homo sapiens
ctggggacccaggtatgctgtcttacctccaaacttctgggaattgtcttttctcccttgtattttccactttagatcagaaagacaaagttgcttaagcrcctttcattcagagttctggggctataacccctttgaaagaaaagatcttaagatatactctattatttgtctcacgtgtgtccgtgtaaagagaccacc

SEQ ID NO: 523128 - DNA, 201 bp, Homo sapiens; identical to SEQ ID NO: 306505

SEQ ID NO: 523129 - DNA, 201 bp, Homo sapiens; identical to SEQ ID NO: 306570

SEQ ID NO: 523130 - DNA, 201 bp, Homo sapiens
cattctgctttgggcgacccagcgccgaaaagccaagacttcatgaactacataggtcttaccattgacctaagatcaatctgaactatcttagcccagtyagggagctctgcttcctagaaaggcatctttcgccagtggattcgcctcaaggttgaggccgccattggaagatgaaaaattgcactcccttggtgtaga

SEQ ID NO: 523131 - DNA, 201 bp, Homo sapiens
attcagagttctggggctataacccctttgaaagaaaagatcttaagatatactctattatttgtctcacgtgtgtccgtgtaaagagaccaccaaacagrctttgtgtgagcaacaaggctgtttatttcacctgggtgcaggtgggctgagtccaaaaagagagtcagcaaagggtggtgggattatcattagttctta

SEQ ID NO: 523132 - DNA, 201 bp, Homo sapiens
cagtgctggcggatagaactttctgtgattatgaaaatgttccgagccaggcgcggtggctcatgcctgtaatcccagcactttgggaggcccagatgggyggatcacgaggtcaggagttcaagaccagcctgaccaacatggtgaaaccccgtctctactaaaaatacaaaaattagccaggcgtggtggcatgtgcct

SEQ ID NO: 523133 - DNA, 201 bp, Homo sapiens
ataacgtggcatgatccttaatgtccagcagtttacaaccaatctgtggtagaaaatacatgtggaaaaaaactttgatttatgtgacttgcttttttttttaatttaaaggccctctgtggatctgaaaatcataatatgagattcactaatgtagacaagaaacacagatttctcccaatagatgcataaccgattaga

SEQ ID NO: 523134 - DNA, 201 bp, Homo sapiens; identical to SEQ ID NO: 306532

SEQ ID NO: 523135 - DNA, 201 bp, Homo sapiens
tggggcaggatgccagagtgcatacacatccactgtggtcaggatgtgggtctcctttctggaggtcaggggcacacacctgagggtgtctgttaacgccygctctcctcctggcactgacctcttttgcagctcctgttatgcagtgttccccttccagcaggtgtccctctgcgtgggctgcctcattggcctggtcat

SEQ ID NO: 523136 - DNA, 201 bp, Homo sapiens
agactcgctggggcacatgtaaagggagcttccctgcagagccggccctgggaagacccctctctgaggactgctgtgtacctccgctctgcttgcagttygtcctgtactttgtgatggatctcctgaagggcctgccaggcctgccagggctcttcattgcctgcctcttcagcggctctctcaggtacccactttaac

SEQ ID NO: 523137 - DNA, 201 bp, Homo sapiens
ggcctggtcatgttcgcgtattaccaggagtatcccatgagcattcagcaggctcaggcagccccagaccaggtgagaaggcgctgttctgttcccatgarggcaggcctggccccacaacaggagtgtctaggtaggaaaggactgactgcagaaaggactcccaccctgggtgggagacggttgtaaaatcctttccca

SEQ ID NO: 523138 - DNA, 201 bp, Homo sapiens
tgttttggttaagagttcttttatggtaccagaaattgatctactcgaatgaaacccatatccacattcaaaaaaggactgtgtccttgccttccaggccygctctgaggtggcatcaagtccaactatgaggaggtttcttggtggtacctgtcatctccccgctttaggacaccatttcctccatagagtcccatagag

SEQ ID NO: 523139 - DNA, 201 bp, Homo sapiens
tatagatgaggagaataggtgaaattctggggtggtaagatttatgataggatttagcagtggggatggtatatgaaggtagaggatgggatgggaatgakgtcaacagggtcacagcaattacatgcctaatggcaggagagtcccctcactggtagtatgttcttagggtggatggtttcaggagtgtccaagggagag

SEQ ID NO: 523140 - DNA, 201 bp, Homo sapiens
ctgtaccgtctatacagctctggtaagtgcagtaagccctggtgtggggaggggaagggatgaagtaaggaggggacatgggaagagaaggaaaagaagasataagctgagaatatagatgaggagaataggtgaaattctggggtggtaagatttatgataggatttagcagtggggatggtatatgaaggtagaggatg

SEQ ID NO: 523141 - DNA, 201 bp, Homo sapiens
tccccagagataattggggtggggcaggatgccagagtgcatacacatccactgtggtcaggatgtgggtctcctttctggaggtcaggggcacacacctkagggtgtctgttaacgccggctctcctcctggcactgacctcttttgcagctcctgttatgcagtgttccccttccagcaggtgtccctctgcgtgggct

SEQ ID NO: 523142 - DNA, 201 bp, Homo sapiens
ggtgagcagggacagaagggagaagtgcgtgggacacgggttggggtggagaggagggacaggcacataggaaggacctgggaccctagacctcctccacytaatgagagggacagaaaactcattgtgtgtttataattctttctcagtgatgttaggtataggggcaggattggagaggagggtgctatgccgagtagg

SEQ ID NO: 523143 - DNA, 201 bp, Homo sapiens
gcccttgactaccttctccaagtaaggcagggcttgctatcttcttgttttctcaaagtcctcctttgagggctttcacaggggtcttgctaagggatggrccaccagaggccccagggaaatgttgggtattgggtcccaagaccctgggaccatgcgggcaagtagagattggtgcccaaggaatgccctgccaacgaa

SEQ ID NO: 523144 - DNA, 201 bp, Homo sapiens
tgggctgtggcgccaggctgggctctgctggcttagtgtattgtagtgactgggtctgtgccttcaagtggggctgggaaattctgctaagaaacttaggytagagtttatttttcttttggtactcgggtggagacctaagaaggttgttgaatttcacagctgtgcatactcaaaggtcctggccaagttatattgtct

SEQ ID NO: 523145 - DNA, 201 bp, Homo sapiens
catactcaaaggtcctggccaagttatattgtctcctggctgtcgcactctgatgcttctccctcacttatgtcccctaccaaacccataccagggcctcyagaccttgaagggctaccactatgctggctggtccacttctgatggcatgcgatgtacaaggcccaagggtgaatggctaccaaggccagataggcctca

SEQ ID NO: 523146 - DNA, 201 bp, Homo sapiens
ccaggtagtacctgctgtccaagtgacccctccctgcccttctccacagatgccactgactcttcaggttcccttctaccccttttctctccccctgcccygggtgcctctctcaggatcagctaagcctaggctgtcccacacggctgtctcaggttctacccacaggactgcactggcttggtgggcagaaggatctca

SEQ ID NO: 523147 - DNA, 201 bp, Homo sapiens
acccagagactcagaagcacatttccattcagggagaatgcgaggccggtccctgaaccctgcaaccatttacccagtgttgccaaagctcctgtccctcyttccgttgtcctgtcagaagcggctccactgcaggagctacggccaggtagtacctgctgtccaagtgacccctccctgcccttctccacagatgccact

SEQ ID NO: 523148 - DNA, 201 bp, Homo sapiens
tgccagccagccagtgtctgcccaagaacacactgtgggagagcggaaagacagcctaatctttctcctagtgggcaaaagcagaagacatagtttatgtyagtctgtctcttgattagttgaaatctaaactatgtcctgtgaatgactgactgcaacactctgctcctgtcctggttctgggaatagtgaggacagggc

SEQ ID NO: 523149 - DNA, 201 bp, Homo sapiens
aacttgcttctgtacctcgggtagcgccagagccctttccacgcccagagcgaggagcagggcggcagcccagggcaccagggtcgtaagactacccgggycgtgaggcgccattttccgttcccttggtgctccgctgctcgcgcgacccggccccgcggccccgccccgcagcgcgtcaggccctcttccccgggcgtg

SEQ ID NO: 523150 - DNA, 201 bp, Homo sapiens
aagacagcctaatctttctcctagtgggcaaaagcagaagacatagtttatgtcagtctgtctcttgattagttgaaatctaaactatgtcctgtgaatgmctgactgcaacactctgctcctgtcctggttctgggaatagtgaggacagggcccttgctgaacacctgtcatagctgcagacagcactgtttctctctc

SEQ ID NO: 523151 - DNA, 201 bp, Homo sapiens
ctgcaacctccacctcccacattcaagtgattctcctgtctcagcctcctaagtagctgagggactacaggcatgtgccaccgtgtctggctaatttttgkatttgtagtagagacggggttttaccatgttggccaggctagtctggagctcctgacctcaggtgatcctcccgcctcggcctcccaaactgctggaatt

SEQ ID NO: 523152 - DNA, 201 bp, Homo sapiens
tgcacctgacccctatttggtacaaggtgatgggtggagcggggtgatagtgggtggggaatccctctaagtttctcactgtgcctgccccatctgtgtgsatgacaagggatagctcatctttgtaggccacagcacaacagagatacccctgttttggttaagagttcttttatggtaccagaaattgatctactcgaa

SEQ ID NO: 523153 - DNA, 201 bp, Homo sapiens
atctctgagtctgtgttctttttccttttcttctcaccctgtcctcctaggcagcaatcagcatctttggcatggttgggggaccgctgctgggactcttytgccttggaatgttctttccatgtgctaaccctcctgtgagtgatgcatctggatccacagtcatgtgtagcaggatggacctgggggttggcagggctg

SEQ ID NO: 523154 - DNA, 201 bp, Homo sapiens
cacactagtagccagaaacagagctgcgggcgaattgtgtcattccctctgtagagctcattttctctccacttaatgtgtagacacttgggtcagcagargtgccccaggccctggcttcccttgtaatgcacccagtctcggtagactcgctggggcacatgtaaagggagcttccctgcagagccggccctgggaaga

SEQ ID NO: 523155 - DNA, 201 bp, Homo sapiens
agcaagcacgttttccacctcactgtctccatcctccacctctgagatggacacttaagagacggggcaaatgtggatccaagaaaccagggccatgaccrggtccactgtggagcagccatctatctacctgactcctgagccaggctgccgtggtgtcatttctgtcatccgtgctctgtttccttttggagtttcttc

SEQ ID NO: 523156 - DNA, 201 bp, Homo sapiens
tgggtgtccgtagctgtcaggcttttctgctgggatgtaggaggtgggtgggggctggggtctctgggggccaagggaggacatggggcccgctgctgtgratggttccacccagagactcagaagcacatttccattcagggagaatgcgaggccggtccctgaaccctgcaaccatttacccagtgttgccaaagctcc

SEQ ID NO: 523157 - DNA, 201 bp, Homo sapiens
gcctgcactgtgtctcggcagggtgctgttgtgggcctgttggctgggctcgtcatggccttctggattggcatcgggagcatcgtgaccagcatgggctycagcatgccaccctctccctctaatgggtccagcttctccctgcccaccaatctaaccgttgccactgtgaccacactgatgcccttgactaccttctcc

SEQ ID NO: 523158 - DNA, 201 bp, Homo sapiens
ccaggctcaggtgcagcggtacctcagttcccgcacggagaaggctgctgtgctgtgagtgcagggacaggaagggagtggagcaaggtctaggggaaggrgttccccagagataattggggtggggcaggatgccagagtgcatacacatccactgtggtcaggatgtgggtctcctttctggaggtcaggggcacacac

SEQ ID NO: 523159 - DNA, 201 bp, Homo sapiens
gcagctatattgaggggaatgaccggggggcaggcgtaagagattcccctttgatggaccgtctttactgtgaacagacttgcaagcagccagaggacgcrgggtcattcctgggatgttgtaggctgagagagagctaaggatcagcctcagagaactcaaaacacatccctctccatcagccccctagcagcctttcct

SEQ ID NO: 523160 - DNA, 201 bp, Homo sapiens
aggtgaggggaagccatgggcatattggcgctgaggcccatctttcttcctctctcttcccaccattctccggcccccatcacattttttccacatgcaayaggtgatctacatgggagttgtgctctatgctccgtcattggctctcaatgcaggtgaggagtcacacagcccctggctttcagccgtggtaggttagga

SEQ ID NO: 523161 - DNA, 201 bp, Homo sapiens
ggcttggggcgtgtgtgggccgtggcttcccagcacggccgcatctctgggtttgagtaagtatacccctactcctggctggggtctgcagtgcctgggcrctgagcccatcctagaggctggtctcggctatagtaagcagaaggtaaactgggaagcctgaggtgtaacagcagacagtgggaaactggtcctgcagag

SEQ ID NO: 523162 - DNA, 201 bp, Homo sapiens
ttccttcctgtctctggccacctacctctctaaaccactaaccctatagttagttctttgttctgtgttctttgcacacaggagacctcttctttcctctwactccccagtagttcccatcatctctatcatagcagtaaaaacttgccaaagacgaatgagaaaactcagggtgttgcaatgtgcaaaggcccagggcat

SEQ ID NO: 523163 - DNA, 201 bp, Homo sapiens
tcctcccgcctcggcctcccaaactgctggaattacaggcatgagccaccgctcggccacctctggagttctgattgttcccacagaagagacagatctgwcaagtggggctccaaggtcatggctggtggctatgctttatggtgagtctgggcatctctgagtctgtgttctttttccttttcttctcaccctgtcctc

SEQ ID NO: 523164 - DNA, 201 bp, Homo sapiens
ggtttgctgtgctttccttgcagggtgggctgaaggccgtcatctggacagatgtgttccagacactggtcatgttcctcgggcagctggcagttatcatygtggggtcagccaaggtgggcggcttggggcgtgtgtgggccgtggcttcccagcacggccgcatctctgggtttgagtaagtatacccctactcctggc

SEQ ID NO: 523165 - DNA, 201 bp, Homo sapiens
gcttctatgcttacagtgactggctttgatctgtggctgtccgtgctggccctgggcattgtctgtaccgtctatacagctctggtaagtgcagtaagccstggtgtggggaggggaagggatgaagtaaggaggggacatgggaagagaaggaaaagaagacataagctgagaatatagatgaggagaataggtgaaatt

SEQ ID NO: 523166 - DNA, 201 bp, Homo sapiens
ttgactgtgatgttgcaggtagaggggctgagaggtgggtggcagcacttatctagtggtgttggggagaaccttaagaaaggggttggcctggggacgcstgaaatggagtctgtggctgccacagaggcagtctcactgatgatcagttagaagggtgacactggggatcacaggaggcgagggccgaggccaggggca

SEQ ID NO: 523167 - DNA, 201 bp, Homo sapiens
gctggcaggactggccttgtgacaggcctgcactgtgtctcggcagggtgctgttgtgggcctgttggctgggctcgtcatggccttctggattggcatcrggagcatcgtgaccagcatgggcttcagcatgccaccctctccctctaatgggtccagcttctccctgcccaccaatctaaccgttgccactgtgaccac

SEQ ID NO: 523168 - DNA, 201 bp, Homo sapiens
aaacacatccctctccatcagccccctagcagcctttcctgccctctggagttctttttttttttttttttttttttttttgagacagagtctcattctgktgctcaggctggagtgcagtggcgcgatctcagttgactgcaacctccacctcccacattcaagtgattctcctgtctcagcctcctaagtagctgaggg

SEQ ID NO: 523169 - DNA, 201 bp, Homo sapiens
gactggccttgtgacaggcctgcactgtgtctcggcagggtgctgttgtgggcctgttggctgggctcgtcatggccttctggattggcatcgggagcatygtgaccagcatgggcttcagcatgccaccctctccctctaatgggtccagcttctccctgcccaccaatctaaccgttgccactgtgaccacactgatgc

SEQ ID NO: 523170 - DNA, 201 bp, Homo sapiens
cccatactgggactttccttcctgtctctggccacctacctctctaaaccactaaccctatagttagttctttgttctgtgttctttgcacacaggagacytcttctttcctcttactccccagtagttcccatcatctctatcatagcagtaaaaacttgccaaagacgaatgagaaaactcagggtgttgcaatgtgca

SEQ ID NO: 523171 - DNA, 201 bp, Homo sapiens
ctccctcagcccggtgttccccgcgtccggacgccgaggtcgcggcttcgcagaaactcgggcccctccatccgccctcagtaaacatggcggcacggcgrgcggggcgggcagggggcgggcagggggcggggcccccgcgggctcccggccagggctctcggccgggctctggctacccacgtgtggagaccgggcagg

SEQ ID NO: 523172 - DNA, 201 bp, Homo sapiens
actctgcctcagaacagggattgcttctccaggtaggtgtctgtccccagcaggatacgaccactctctttggctggtccctttgcctctcagctccgtgrctgggttgcttctctccagaatggagaatcgtcattctgaaaccctgactccagcatggtgccctctcacctttcccctctcacttttgaatccagccgc

SEQ ID NO: 523173 - DNA, 201 bp, Homo sapiens
tggccccaagaggttcagagttcaggtttagtctgcatgaggccatatcttgccagccagccagtgtctgcccaagaacacactgtgggagagcggaaagrcagcctaatctttctcctagtgggcaaaagcagaagacatagtttatgtcagtctgtctcttgattagttgaaatctaaactatgtcctgtgaatgactg

SEQ ID NO: 523174 - DNA, 201 bp, Homo sapiens
gagactcagaagcacatttccattcagggagaatgcgaggccggtccctgaaccctgcaaccatttacccagtgttgccaaagctcctgtccctccttccrttgtcctgtcagaagcggctccactgcaggagctacggccaggtagtacctgctgtccaagtgacccctccctgcccttctccacagatgccactgactc

SEQ ID NO: 523175 - DNA, 201 bp, Homo sapiens
ctacagatctgttctcagaatctggtctgttgctaggtcaggtttttcctgtcttccctggggctctctcaggccatccaggggaattctccatacatcaygcaaatagaattttatcaggaagtcccatcagcagagtgtctttatttctgtacctccgtgtcccatactgggactttccttcctgtctctggccaccta

SEQ ID NO: 523176 - DNA, 201 bp, Homo sapiens
tggcggaccgcaaaatgggctgccttccggtggcactgtccctgctggccaccttccagtcagccgtggccatcctgggtgtgccgtcagagatctaccgrtttgggacccaatattggttcctgggctgctgctactttctggggctgctgatacctgcacacatcttcatccccgttttctaccgcctgcatctcacca

SEQ ID NO: 523177 - DNA, 201 bp, Homo sapiens
gttggatattccctcatgttcctgagcatcttgagggaatttgtctgtgagttgtcggggtgaagtcaggagaaaaatctttttttctgtatacccagtayctggagcttcgattcaataaaactgtgcgagtgtgtggaactgtgaccttcatctttcagatggtaagcagaatgaggatagaaaccgagcctagggcat

SEQ ID NO: 523178 - DNA, 201 bp, Homo sapiens
atgttgtaggctgagagagagctaaggatcagcctcagagaactcaaaacacatccctctccatcagccccctagcagcctttcctgccctctggagttctttttttttttttttttttttttttttgagacagagtctcattctgttgctcaggctggagtgcagtggcgcgatctcagttgactgcaacctccacctcc

SEQ ID NO: 523179 - DNA, 201 bp, Homo sapiens
tgtccttttcccccagcctttggctatgggctgctttgtctaggaatggcctatatttcctcccagatgggacctgtgctgcaggtaataactatagaggrtaggaagcaattttaagggagagaaggaattgattgaaacaggaagttgagaagggcagctatattgaggggaatgaccggggggcaggcgtaagagatt

SEQ ID NO: 523180 - DNA, 201 bp, Homo sapiens
tggctgggcagggtcgggaagcgtcagggacgaaatcagaaccgcaggcccgccgaggagaagggggagccgctggcgagcgcgacgcacggctggccagygaccctgcttcagcccgacctcaaacttgcttctgtacctcgggtagcgccagagccctttccacgcccagagcgaggagcagggcggcagcccagggca

SEQ ID NO: 523181 - DNA, 201 bp, Homo sapiens
tgttgtaggctgagagagagctaaggatcagcctcagagaactcaaaacacatccctctccatcagccccctagcagcctttcctgccctctggagttctttttttttttttttttttttttttttgagacagagtctcattctgttgctcaggctggagtgcagtggcgcgatctcagttgactgcaacctccacctccc

SEQ ID NO: 523182 - DNA, 201 bp, Homo sapiens
gttgtaggctgagagagagctaaggatcagcctcagagaactcaaaacacatccctctccatcagccccctagcagcctttcctgccctctggagttctttttttttttttttttttttttttttgagacagagtctcattctgttgctcaggctggagtgcagtggcgcgatctcagttgactgcaacctccacctccca

SEQ ID NO: 523183 - DNA, 201 bp, Homo sapiens
ggactctagggagaaaggctcctgccctctgagctcttgggtgtccgtagctgtcaggcttttctgctgggatgtaggaggtgggtgggggctggggtctytgggggccaagggaggacatggggcccgctgctgtggatggttccacccagagactcagaagcacatttccattcagggagaatgcgaggccggtccctg

SEQ ID NO: 523184 - DNA, 201 bp, Homo sapiens
taagcctaggctgtcccacacggctgtctcaggttctacccacaggactgcactggcttggtgggcagaaggatctcagggctcagaggagctcagccccrgcctgggccagtcagctcccctccccagcccaccctgtgctccctgctgtgctatgccctccctcttttccccctgctctccctcccgaacccagccttg

SEQ ID NO: 523185 - DNA, 201 bp, Homo sapiens
tctgttaacgccggctctcctcctggcactgacctcttttgcagctcctgttatgcagtgttccccttccagcaggtgtccctctgcgtgggctgcctcaytggcctggtcatgttcgcgtattaccaggagtatcccatgagcattcagcaggctcaggcagccccagaccaggtgagaaggcgctgttctgttcccatg

SEQ ID NO: 523186 - DNA, 201 bp, Homo sapiens
cctgcccaccaatctaaccgttgccactgtgaccacactgatgcccttgactaccttctccaagtaaggcagggcttgctatcttcttgttttctcaaagycctcctttgagggctttcacaggggtcttgctaagggatgggccaccagaggccccagggaaatgttgggtattgggtcccaagaccctgggaccatgcg

SEQ ID NO: 523187 - DNA, 201 bp, Homo sapiens
atgccagagtgcatacacatccactgtggtcaggatgtgggtctcctttctggaggtcaggggcacacacctgagggtgtctgttaacgccggctctcctyctggcactgacctcttttgcagctcctgttatgcagtgttccccttccagcaggtgtccctctgcgtgggctgcctcattggcctggtcatgttcgcgta

SEQ ID NO: 523188 - DNA, 201 bp, Homo sapiens
ggcctgttggctgggctcgtcatggccttctggattggcatcgggagcatcgtgaccagcatgggcttcagcatgccaccctctccctctaatgggtccarcttctccctgcccaccaatctaaccgttgccactgtgaccacactgatgcccttgactaccttctccaagtaaggcagggcttgctatcttcttgttttc

SEQ ID NO: 523189 - DNA, 201 bp, Homo sapiens
ttcccagcacggccgcatctctgggtttgagtaagtatacccctactcctggctggggtctgcagtgcctgggcgctgagcccatcctagaggctggtctyggctatagtaagcagaaggtaaactgggaagcctgaggtgtaacagcagacagtgggaaactggtcctgcagagatggagggtgattacaggtgcccggc

SEQ ID NO: 523190 - DNA, 201 bp, Homo sapiens
gcgtactgatgcaagaggcggctcatgtaccagtgctgccacgggagcagcccttccaggaagccgatgtggccaccccgggctgtgatgagcagcgcaaygtagggggagtgttgggcggcctgtatgggaagggctaggagagggtcagaggttagaaacactggccttcactgggagcccaggctgtctgttgcgtcc

SEQ ID NO: 523191 - DNA, 201 bp, Homo sapiens
ccttaggggcagttttgttctgaagtgaccttccaaatctgatgtataaagtgaggcctacagagtattgtgaggcttggagtttttaactgttttattarggaagacttttttttttttttttgagacggagtttcactcttgttgctcaggctggagtgcaatggcacgaggctcattgcaacctccgcctcccagttt

SEQ ID NO: 523192 - DNA, 201 bp, Homo sapiens
ctggctggccccagttggccggctgtaactcgcggtcccacccgccgcccgccataggcggcctgtgcaggtccggtccccgctgcaggcagtttgcgctrctggccccgcccaccgccggtgccccgggatgggcggcgagaggcggcgctagttggtcgcggggctgggtggctggtcgcctagtgcctcgcgcggatc

SEQ ID NO: 523193 - DNA, 201 bp, Homo sapiens
taaggaagacttttttttttttttttgagacggagtttcactcttgttgctcaggctggagtgcaatggcacgaggctcattgcaacctccgcctcccagkttcaagtgattctcctgcctcaggctcccgagtagctgggattataggcatgtgccaccatgcctggctaatttttgtatttttagtagagatggggttt

SEQ ID NO: 523194 - DNA, 201 bp, Homo sapiens
gtgttcttcatgtaaaacagtaaggcttgacaatgtgtgatggggacataaaagatgacctggtggccgtgcaattatatagcccttccatataacatccrttgtcattgaaccctcaacacagggatgtagatgaggcagattacctacattttaaaagtggtagataggtttttccctagatacctggggtttcatgtt

SEQ ID NO: 523195 - DNA, 201 bp, Homo sapiens
gtggctccaggaaggccagaaactgcggcccagccaccagccgaggcctctgtaatcacacagcagtctgccccactttcctgacttttgcaccaagctartgaggcacccaacaccagagggtgagggggccccctctccagagcccagcctggaggaccctgctttgtctgcatgtgagatactcagcacagctcagtt

SEQ ID NO: 523196 - DNA, 201 bp, Homo sapiens
taggggctgagactgcaggaggacttggaagatgctttgtagtcgcccctcaaaacaccacagcgttgggtagaaagtctcggtggtgatggaacagtgtkgctccaggaaggccagaaactgcggcccagccaccagccgaggcctctgtaatcacacagcagtctgccccactttcctgacttttgcaccaagctagtg

SEQ ID NO: 523197 - DNA, 201 bp, Homo sapiens
ttgtccacattatagggagcagcaccctccggtacccaaaaggcccagctggcatggggatcacatgggatgcagaggcactagagaggcagagccgactstccattcggtggtagcaaatttcacctgtggggaagcccaaccatcccagttcccaccaagggcccaagcccgtgtctggaagctgccccctacacccaa

SEQ ID NO: 523198 - DNA, 201 bp, Homo sapiens
gctcactgcaagatctctgcctcccgggttcacacgattctcctgcctcagcctcccgagtagctgggactacatgtgcccgccaccacacctggctaatttttttttttttttttgtatttttagtaaagatggggtttcaccgtgttagccaggatggtctcgatctcctgacctcgtgatccgcccacctcggcctcc

SEQ ID NO: 523199 - DNA, 201 bp, Homo sapiens
tcactgcaagatctctgcctcccgggttcacacgattctcctgcctcagcctcccgagtagctgggactacatgtgcccgccaccacacctggctaatttktttttttttttttgtatttttagtaaagatggggtttcaccgtgttagccaggatggtctcgatctcctgacctcgtgatccgcccacctcggcctccca

SEQ ID NO: 523200 - DNA, 201 bp, Homo sapiens
tgctttatgtggttcacgactgtctctagatcttcagtattgctggcacaaaaagccctgtgggtctgagggcaaaccagatcattgggtagggagggagwccgtggccagaaggtggaggggaaactgaggaaggataggtaggaggtgagccccagggccaaggatctctaaagggagtgggtgaagggctgctatgag

SEQ ID NO: 523201 - DNA, 201 bp, Homo sapiens
caacgtagggggagtgttgggcggcctgtatgggaagggctaggagagggtcagaggttagaaacactggccttcactgggagcccaggctgtctgttgcrtccctcatggcccattttccttggggccaaagtgtcctgaatcagagtactcaccacagacgggggagaaggggtcatctgctgcactgagatagagcac

SEQ ID NO: 523202 - DNA, 201 bp, Homo sapiens
gtctcggtggtgatggaacagtgtggctccaggaaggccagaaactgcggcccagccaccagccgaggcctctgtaatcacacagcagtctgccccacttycctgacttttgcaccaagctagtgaggcacccaacaccagagggtgagggggccccctctccagagcccagcctggaggaccctgctttgtctgcatgtg

SEQ ID NO: 523203 - DNA, 201 bp, Homo sapiens
tgtagcattcttcttatctatcagtgtccggattgacttctccctaatacacgttctcagatgccaccccactctggggctgcacccatccttactggtakccatccctcagagcttggttaactaggtgcaagacgtatgtctcctggctactgccagtgatgccaggaagcagcagcacaatgggctgggtagtaggat

SEQ ID NO: 523204 - DNA, 201 bp, Homo sapiens
tgtttctgtcctcagaaggtaagagagccctgaggtcaggcagcccctctgggtcctggaagatggctttggcgtactgatgcaagaggcggctcatgtascagtgctgccacgggagcagcccttccaggaagccgatgtggccaccccgggctgtgatgagcagcgcaacgtagggggagtgttgggcggcctgtatgg

SEQ ID NO: 523205 - DNA, 201 bp, Homo sapiens
cttttttttttttttttttgagacggagttttgctctgacacccaggctggagtgcagtggtgccatctcagctcaccgcaacctccgcctcctgggttcragcgattctcctgcctcagcctcctgagtggctgggatgacaggcttgcgtcaccacacccaactaatttttgtatttttagtagagataggggtttcac

SEQ ID NO: 523206 - DNA, 201 bp, Homo sapiens
ctaggtagtctacccttaccttgaggaatgggaaaatgaacctcagcccattaggcaggaaaagttgatatttaataaacaaggaaagagtgaactgagascccaaatggtactcttgtcagctgtttctgtcctcagaaggtaagagagccctgaggtcaggcagcccctctgggtcctggaagatggctttggcgtact

SEQ ID NO: 523207 - DNA, 201 bp, Homo sapiens
cgaccctcaggctcctggctggccccagttggccggctgtaactcgcggtcccacccgccgcccgccataggcggcctgtgcaggtccggtccccgctgcrggcagtttgcgctgctggccccgcccaccgccggtgccccgggatgggcggcgagaggcggcgctagttggtcgcggggctgggtggctggtcgcctagt

SEQ ID NO: 523208 - DNA, 201 bp, Homo sapiens
cctaatacacgttctcagatgccaccccactctggggctgcacccatccttactggtagccatccctcagagcttggttaactaggtgcaagacgtatgtmtcctggctactgccagtgatgccaggaagcagcagcacaatgggctgggtagtaggatcagggtcttggctgctgtcaggctgcttggcccagtctagca

SEQ ID NO: 523209 - DNA, 201 bp, Homo sapiens; identical to SEQ ID NO: 298785

SEQ ID NO: 523210 - DNA, 201 bp, Homo sapiens; identical to SEQ ID NO: 298787

SEQ ID NO: 523211 - DNA, 201 bp, Homo sapiens; identical to SEQ ID NO: 298791

SEQ ID NO: 523212 - DNA, 201 bp, Homo sapiens; identical to SEQ ID NO: 298989

SEQ ID NO: 523213 - DNA, 201 bp, Homo sapiens; identical to SEQ ID NO: 298737

SEQ ID NO: 523214 - DNA, 201 bp, Homo sapiens; identical to SEQ ID NO: 298793

SEQ ID NO: 523215 - DNA, 201 bp, Homo sapiens; identical to SEQ ID NO: 298794

SEQ ID NO: 523216 - DNA, 201 bp, Homo sapiens; identical to SEQ ID NO: 298991

SEQ ID NO: 523217 - DNA, 201 bp, Homo sapiens; identical to SEQ ID NO: 298797

SEQ ID NO: 523218 - DNA, 201 bp, Homo sapiens; identical to SEQ ID NO: 298800

SEQ ID NO: 523219 - DNA, 201 bp, Homo sapiens; identical to SEQ ID NO: 298803

SEQ ID NO: 523220 - DNA, 201 bp, Homo sapiens; identical to SEQ ID NO: 299050

SEQ ID NO: 523221 - DNA, 201 bp, Homo sapiens; identical to SEQ ID NO: 299012

SEQ ID NO: 523222 - DNA, 201 bp, Homo sapiens; identical to SEQ ID NO: 299051

SEQ ID NO: 523223 - DNA, 201 bp, Homo sapiens; identical to SEQ ID NO: 298812

SEQ ID NO: 523224 - DNA, 201 bp, Homo sapiens; identical to SEQ ID NO: 298694

SEQ ID NO: 523225 - DNA, 201 bp, Homo sapiens; identical to SEQ ID NO: 298695

SEQ ID NO: 523226 - DNA, 201 bp, Homo sapiens; identical to SEQ ID NO: 298751

SEQ ID NO: 523227 - DNA, 201 bp, Homo sapiens; identical to SEQ ID NO: 298696

SEQ ID NO: 523228 - DNA, 201 bp, Homo sapiens; identical to SEQ ID NO: 298817

SEQ ID NO: 523229 - DNA, 201 bp, Homo sapiens; identical to SEQ ID NO: 298818

SEQ ID NO: 523230 - DNA, 201 bp, Homo sapiens; identical to SEQ ID NO: 298753

SEQ ID NO: 523231 - DNA, 201 bp, Homo sapiens; identical to SEQ ID NO: 298754

SEQ ID NO: 523232 - DNA, 201 bp, Homo sapiens; identical to SEQ ID NO: 298756

SEQ ID NO: 523233 - DNA, 201 bp, Homo sapiens; identical to SEQ ID NO: 298757

SEQ ID NO: 523234 - DNA, 201 bp, Homo sapiens; identical to SEQ ID NO: 298874

SEQ ID NO: 523235 - DNA, 201 bp, Homo sapiens; identical to SEQ ID NO: 298875

SEQ ID NO: 523236 - DNA, 201 bp, Homo sapiens; identical to SEQ ID NO: 298876

SEQ ID NO: 523237 - DNA, 201 bp, Homo sapiens; identical to SEQ ID NO: 299027

SEQ ID NO: 523238 - DNA, 201 bp, Homo sapiens; identical to SEQ ID NO: 298774

SEQ ID NO: 523239 - DNA, 201 bp, Homo sapiens; identical to SEQ ID NO: 298776

SEQ ID NO: 523240 - DNA, 201 bp, Homo sapiens; identical to SEQ ID NO: 298718

SEQ ID NO: 523241 - DNA, 201 bp, Homo sapiens; identical to SEQ ID NO: 298833

SEQ ID NO: 523242 - DNA, 201 bp, Homo sapiens; identical to SEQ ID NO: 298980

SEQ ID NO: 523243 - DNA, 201 bp, Homo sapiens; identical to SEQ ID NO: 298983

SEQ ID NO: 523244 - DNA, 201 bp, Homo sapiens; identical to SEQ ID NO: 298985

SEQ ID NO: 523245 - DNA, 201 bp, Homo sapiens; identical to SEQ ID NO: 298656

SEQ ID NO: 523246 - DNA, 201 bp, Homo sapiens; identical to SEQ ID NO: 298987

SEQ ID NO: 523247 - DNA, 201 bp, Homo sapiens; identical to SEQ ID NO: 299039

SEQ ID NO: 523248 - DNA, 201 bp, Homo sapiens; identical to SEQ ID NO: 298660

SEQ ID NO: 523249 - DNA, 201 bp, Homo sapiens; identical to SEQ ID NO: 298835

SEQ ID NO: 523250 - DNA, 201 bp, Homo sapiens
tgaagggttaattcacctttctcttttatagaaaaaaaagttcgggaattcaaatataagcgtatgagtgggccagacccacaattctcagaaacatgcarctgtagggaataaaagcaagtgcaacttaccaatcccattactacctgaaagtacttagcagtaactatcatttgcctcatgttttacagtctacagaaa

SEQ ID NO: 523251 - DNA, 201 bp, Homo sapiens
aaggcaaaatctatttccttcaatcacattatgtgtctccttagcacttagaagaacaagctgattaatacaaaaagcaggcaaggatgctatgtcttttmaacatatgtactgatttaattttcattcagatttttgtgctttgctctttcattatatttttttccaaagaaaaaaaaaacctcaaagtttattttaaat

SEQ ID NO: 523252 - DNA, 201 bp, Homo sapiens
caagcacgtagaaatgctggataaaatataacacatactcttttaaatcatagctaagggcaccaaaccaaagggaacatcacaggtgatagaaatgaaaraggaaaactgaaaaacagagaagcaagtttatgggctgacagagactatgtcagagcaacaggctgtctcagcctttgtaatgcaggcagctttaatgcc

SEQ ID NO: 523253 - DNA, 201 bp, Homo sapiens
ttctaactcagttgagaaaacaaccgatgtcctgttattacgcgctaaagggactgtgcttttgagtatagaggactttccatgggttgaaggttgcactwtttcctaaaggaaatagaaatttccagaacctatcatattgaatggacagatccagatcagaaagaaaagacacagaaggcagggaactttttacctttt

SEQ ID NO: 523254 - DNA, 201 bp, Homo sapiens
tggagctggctagtcttcctctatgtcatggccagcttgcaaaaacctgggcaagagagaggctatttgaaactgtgggtgattttgtgcaaatctattcmcactagtagatgatcatcacaagcagagaagagagcattagacgttagacaccaaccaaacgtgttgtcccaagtattccaggcaccagcacacctaaga

SEQ ID NO: 523255 - DNA, 201 bp, Homo sapiens
attcccttttttctttggactaaagcagtaaaaatttcctgaaaattttacagactaattaggaaataccacagttggaagtgggctaacctggaaccccyacccggatagcctattcatttatacaccgcagcaccttctttgccaggagatgtggtatgttaaaatacaggagtccctggggaaagagctactaaagaa

SEQ ID NO: 523256 - DNA, 201 bp, Homo sapiens
aatcacctgtttgataagtacaaacacaggagagaggaagaaatttaaataaaccatagtctgtgcccttgagtcatttgatgatttttgtccctccttamttctcgagtctcatgttaacagtctttttttagctccagacaggcttaacagtatttaattcttaaatacactgtgtcttctcacttctggagttttgag

SEQ ID NO: 523257 - DNA, 201 bp, Homo sapiens
cagcacacctaagaacagaacacaagcctactccgcaggtaactcctctgcttccagggacgtttccacatggtgacttacttgagtgaacaaatctgcgygtcaagacctgcttattttgccctgaccacttggaggcatgagaacataagggtgtcccaagctggccacaggcagcgatgcaacctgcctccaatccta

SEQ ID NO: 523258 - DNA, 201 bp, Homo sapiens
aaatttaaataaaccatagtctgtgcccttgagtcatttgatgatttttgtccctccttaattctcgagtctcatgttaacagtctttttttagctccagrcaggcttaacagtatttaattcttaaatacactgtgtcttctcacttctggagttttgagctatttcctctgtatctaagaatgcttggcctccttgctt

SEQ ID NO: 523259 - DNA, 201 bp, Homo sapiens
ggaatatgtgaataagtgtatttctcaaggcaaaagaatacttcagagacttcattgtgttctccaggaacttcactataggccaatgaagcaaagaaacyagctttgaacaaggccactggactcatccagggacctatcatttagccatgctaaaaggatttagctctcagaggtcaaggtagtcccaccgtggggaca

SEQ ID NO: 523260 - DNA, 201 bp, Homo sapiens
agtcaggcttttcacaaaggaggtgatattcgaacagcgtttagaaggatttcaaagtttgctcggtggaaaagaggacagcagatcctccgtaattagcyacgttagaatgttccagcatgcctttgtgtaggtctatagtcttgagtggttcaaatcttccaagtgcctttcagtgcaagaaagatagaaaagaataga

SEQ ID NO: 523261 - DNA, 201 bp, Homo sapiens
accacaggaagattgctgagctagcaggatttctttcatcactgatttgcttcaagttttgtctaaattagagtctcaaagtaatgaacttttgttcatcytcagctttaggaatatgtaggattgtggtgttagtaaacagtgcctgttgagtagaaccattactaatcaattatttctttatttctgaaaattcattaa

SEQ ID NO: 523262 - DNA, 201 bp, Homo sapiens
gttactgctgccccccaagccttttgtcatgatgtttcttctgctagggtatttttttcgtttctcccttacgcccttgtcagccagctaaaatctattcrgctttcaagactcagctcagatattacctcttaaaagtcttttctgaatcccaaggccatggtttttgttcctgctctgttctctggtaattattcctgc

SEQ ID NO: 523263 - DNA, 201 bp, Homo sapiens
aaggaatactggaggttgggtaatttataaagaaaaagaaggtttatttgttttatgattctggatggctggaaagttcaagattgggcatctgcatctgrtaaaaccttcaggctgcttccactcgtggtggatggcgaagaggagctggtgtgtgcagaggctgcacgctaagagaggagggcagggcagggagaagcg

SEQ ID NO: 523264 - DNA, 201 bp, Homo sapiens
gtgttatggggagatttactaggtaatatgattagaattatgcttcaggaagacaaatctggcagcaatgtgtaggatggttgaggtgggaagcccagacscaaaggcaggaagaccgaagaagctatcgaaacagctcaatgaggaggtggaaatgaggatatcaggagaggatcaatccaagagatattttggaagtta

SEQ ID NO: 523265 - DNA, 201 bp, Homo sapiens
gaagaggagctggtgtgtgcagaggctgcacgctaagagaggagggcagggcagggagaagcgaggattgttttaacaaccagctcacatgggaactaacrtagtgagaactcaccactccagagtggaagggcgttgatatattcatgaacgatccactcctgtgacccaaatacttcccactaggccccaccacccaac

SEQ ID NO: 523266 - DNA, 201 bp, Homo sapiens
ccactccagagtggaagggcgttgatatattcatgaacgatccactcctgtgacccaaatacttcccactaggccccaccacccaacatcgctacactggkgattaaatttcaacatgtgatttggtggggacaaacaaattatatccaaaccatagcattccactcctgccccccctagcaaactcatgttcttctcaca

SEQ ID NO: 523267 - DNA, 201 bp, Homo sapiens
aaatttcaacatgtgatttggtggggacaaacaaattatatccaaaccatagcattccactcctgccccccctagcaaactcatgttcttctcacattgcraaatacaatcatcctttcccaatagtcccaaaagtcttaactcattccagcatcatctcaaaagtctaaagtccaaagtctcattagagactcaaggtaa

SEQ ID NO: 523268 - DNA, 201 bp, Homo sapiens; identical to SEQ ID NO: 322409

SEQ ID NO: 523269 - DNA, 201 bp, Homo sapiens; identical to SEQ ID NO: 322410

SEQ ID NO: 523270 - DNA, 201 bp, Homo sapiens
tccactcctgccccccctagcaaactcatgttcttctcacattgcaaaatacaatcatcctttcccaatagtcccaaaagtcttaactcattccagcatcwtctcaaaagtctaaagtccaaagtctcattagagactcaaggtaagttcctttcagctatgagcctgtaagatgaaaaacaagttatttacctctaagat

SEQ ID NO: 523271 - DNA, 201 bp, Homo sapiens; identical to SEQ ID NO: 322412

SEQ ID NO: 523272 - DNA, 201 bp, Homo sapiens; identical to SEQ ID NO: 322413

SEQ ID NO: 523273 - DNA, 201 bp, Homo sapiens; identical to SEQ ID NO: 322415

SEQ ID NO: 523274 - DNA, 201 bp, Homo sapiens; identical to SEQ ID NO: 322418

SEQ ID NO: 523275 - DNA, 201 bp, Homo sapiens
cgcatgatcacttgctcttccatctttccacaatgggatgatgcatcccaaagaccctaaccagatgctaaagccatgccctttgattgcccagcctccaraactgtaagatataaacttcttttctgtataaattacctggtgtgtgctattctgttctagtaacagaaactggactaagatagtattgttatcaataaa

SEQ ID NO: 523276 - DNA, 201 bp, Homo sapiens
tcttacgatggagttgtacatttatacatttctagagagcaatttgatgatatgtattgttatcaatatcagaacattcctttggaacactcttgggtctstgaaataatgtagtgggacagaggccagactggcagagagaattttaagaaatcatactgctctggcctgcaccaaagtgagcagtaagcaacatgtcag

SEQ ID NO: 523277 - DNA, 201 bp, Homo sapiens
aacagcagctgggcttcttttctaatagctgcagagcctgagtctgcacttctgtggttctgaaggttgttagtatactcctcacactcttacggattcargtcttgcctttctcaggtgttgagaatctagcacttgatagtctctcagcacgggaatgctgggcctaaactaactagtattcaggtcccaggtgcttcc

SEQ ID NO: 523278 - DNA, 201 bp, Homo sapiens
cctgcaccaaagtgagcagtaagcaacatgtcagggtgaaagtcttattacaaaaccaggggtgatgaagaagcagaagaagaacattttgaactggacawcgctaaagaggttggcacagatccacagcacttcagcattaccaagggcttgaaacccatgagaatcatgtgaagcaagtggagtctataaatattcagg

SEQ ID NO: 523279 - DNA, 201 bp, Homo sapiens
tctccattgatacaacagtgagaggagaatattggactatgatggtctctatattttcagctcttaatttctatgattttaataaagtgcataattacttrattatcttttgttaaatgactgttttatctagccaaaggaatttcattcaaattttatatgttgtgtgagaaatgtaacagagcattgcattatatttaa

SEQ ID NO: 523280 - DNA, 201 bp, Homo sapiens
caagcagcaacctctgccacacatagcaagcatagacacaaagcactaccattacctcagctgtccctgctggtgcccaagaactcaggttttctataatscttggcactgcaaggatctccggtataggtgtatgtgattggcagggcaaaggtcatatgcctacagcccagggaaaggcagtttgagaaatgaagtgtc

SEQ ID NO: 523281 - DNA, 201 bp, Homo sapiens
caaatggatgccaaaggattaatactacacagctaaattagctaataaaatgtgagataaggttacactttttaaaaaataaaataaaatatgggtggctyatttccatacataaaatttatactgatttcacataatcattaacgataataatttttaaaactgacagttgttatgtataccacaaaattagggtctttt

SEQ ID NO: 523282 - DNA, 201 bp, Homo sapiens
atgaaataattttgaagagaaaatgatcctttcttcttactatgataactaacttatttttaaaaaatggaatacatgtattacaacctgtcagagtaagscattttgattagttctgaatcattcttctggttaacagagagatgccgtaataaagctagggctattatttcataagaaggagggtcaggatcatgttaa

SEQ ID NO: 523283 - DNA, 201 bp, Homo sapiens
atatccaggtaattggtctaatctcatctgaattatgctagagaaaaagacaatcagagaaataaaaatgcttttatttaaacaagatacatagaatagascaaatttccttgatcaaaagtttctcttgttactaaggtcatattatatcaggattaggttcacctacaataacagaaaactcaaaatagcagtgactag

SEQ ID NO: 523284 - DNA, 201 bp, Homo sapiens
ccagaatatgccaccccaaaataggcctttttggcataaggattattctgagctgaaggcaattgaggaacatcatacccagaaaaagctctgaagcagarcataaatttccctttcttaaaggaagcttacattttataaaagaaatttacatttgcaaaagtgtctccctctcccaaaccaggaaggaggaggatggct

SEQ ID NO: 523285 - DNA, 201 bp, Homo sapiens
cagaccactccttctaagcaattccagctcccagaacttgccattcccagtctcttaccaaaacctacatatccctgggatgaactttagagcccagcctyttcattttataaaccaagaaactaagtcccaaaaaagtgacatgaattccccaaagtcatgattccaagtccattgctctttctctcacatctgcgttta

SEQ ID NO: 523286 - DNA, 201 bp, Homo sapiens; identical to SEQ ID NO: 322497

SEQ ID NO: 523287 - DNA, 201 bp, Homo sapiens
catcctcatgagtgaaggggtctattcttagaagatggtaatttttcaagtgctattgtccgagctgtatgtatgtgaagttcctagagtgcagaagggawctgctttctcctactaaagggacaagatgaagcagacagcctttgttcctagtttttcaagaacctccccacctgctcaggagacagagttgcttccatg

SEQ ID NO: 523288 - DNA, 201 bp, Homo sapiens
atctcaaaagtctaaagtccaaagtctcattagagactcaaggtaagttcctttcagctatgagcctgtaagatgaaaaacaagttatttacctctaagayacaatggtggtacaggcattgggtaaaccctgacaatttgcaattaagtaagaaagccatttgcatatttggaacttatggtttaattatgtcatttaat

SEQ ID NO: 523289 - DNA, 201 bp, Homo sapiens
ttctgggattcagacgacacttgtgaaagacttatatttatgtaaataaaataaactaatgttcatgaaatagttttagaaaccagatcaagtctgttacscaaagtaaggcattagaattattataaggaaaaagaggcttaatgaacacaaggctggacatccctgtcttgtgtcaagtacagttttcttcagctacat

SEQ ID NO: 523290 - DNA, 201 bp, Homo sapiens
gcccaactacttccttaagatcatccaacttttggatgattatccgaaatgtttcatcatgggagcagacaatatgggctctaagcagatgcagcagatcygcatatccctctgcaggaaggccatggtgctgctaggcaagaacaccacgatggtcaaggccatctgaaggcacctggaaaacaacccagctctagagaa

SEQ ID NO: 523291 - DNA, 201 bp, Homo sapiens
gtgaaggggtctattcttagaagatggtaatttttcaagtgctattgtccgagctgtatgtatgtgaagttcctagagtgcagaagggatctgctttctcytactaaagggacaagatgaagcagacagcctttgttcctagtttttcaagaacctccccacctgctcaggagacagagttgcttccatggccaaaagata

SEQ ID NO: 523292 - DNA, 201 bp, Homo sapiens
caaatcacatcatccatgttatcctctcaagtcatttttcttccatgattataacaactcacaactcattatgtcaggaatcaaggctgatgatagaagtytggctgcaaatgcagacatctctcccaatttgaaggggtttatgctcatgagtctcatctagtgctagtttctttctcttgcaccttcttagaatgctag

SEQ ID NO: 523293 - DNA, 201 bp, Homo sapiens; identical to SEQ ID NO: 322502

SEQ ID NO: 523294 - DNA, 201 bp, Homo sapiens
aaggggtttatgctcatgagtctcatctagtgctagtttctttctcttgcaccttcttagaatgctagaaataaggccccagtcagccagcctcaagacaytctggtatttccgttgcaatgagatttatatagatcctaagtagctaatatgaaaacagcaaagaattctaactctgtcaaactatactgcaatcataaa

SEQ ID NO: 523295 - DNA, 201 bp, Homo sapiens; identical to SEQ ID NO: 322504

SEQ ID NO: 523296 - DNA, 201 bp, Homo sapiens
atagtaggaaggaagattacctttgataaaatagttatcttagaactgtagttagaaatggagtgaaatggagtgacatttcttttgtgttctttccttayagtatgaggatattataatgaatttaataaggtcatatgaaaatttatttttttattattatactttaagttctgagatacatgtgcagaacatgcaggt

SEQ ID NO: 523297 - DNA, 201 bp, Homo sapiens
tgaagccatttctcagcacaagctccttactcagcctgctggaaatgctgattgaacatctgtcaggcagcgtccacaagtatcacaaaatgtaaggagcrtctccccatagctgaactcaccctcaccaagaaagggctgtgctgagagagtaacccctgctgagtcgtggcttctgggctgtgagaacccaacagcaga

SEQ ID NO: 523298 - DNA, 201 bp, Homo sapiens
tacatgtgcagaacatgcaggtttgttacatagatacacatgtgccatggtggtttgctgcacccatcaacccttcatctacattaggtatttcttctaayactatccctcccctagcccccccaaactccgacaggccccagtgtattatgttcccctccctgtgtccatgtgttctcattgttcaattctcacttatga

SEQ ID NO: 523299 - DNA, 201 bp, Homo sapiens
tgtaagacttttctggtcaataaaagcagcattgctttctgggattcagacgacacttgtgaaagacttatatttatgtaaataaaataaactaatgttcmtgaaatagttttagaaaccagatcaagtctgttacgcaaagtaaggcattagaattattataaggaaaaagaggcttaatgaacacaaggctggacatcc

SEQ ID NO: 523300 - DNA, 201 bp, Homo sapiens
tatccttcacccgctttttgatggggctgtttgtttttttcttgtaaatttgattaagttccttgtagattctggatattagccctttgtcagatggatasattgcaaaaattttctcccattctgtaggttgcttgttcactctgatgatagtttcttttgctttgtggaagctctttagtttaattagatcccatttat

SEQ ID NO: 523301 - DNA, 201 bp, Homo sapiens
cgtggtagccctgaggaaagcagatgactattaatctcattcaggttcaccgggactgtcgtcaatcaaaatgacttttgtttttatctcctctgagcaayaagcctttggtgtctgccatctacacagcctcctgcagtgctcacctcctgtagcacttcatgttgcatccccacctctcatctatatgctcttccccga

SEQ ID NO: 523302 - DNA, 201 bp, Homo sapiens
tgcctatgtcctgaatggtattgcctaggttttcttctagggattttatggtttggggttttacatttaagactttaatccatcttgagttaatttttgcrtaaggtgcaaggaagggggtctagtttctgtttgcatacggctagccagttttcccagcaccatttattaaatagagaatactttcctcatttcttgttt

SEQ ID NO: 523303 - DNA, 201 bp, Homo sapiens
tttggttccatatgaaatctaaaatagttttttctaattctgtgaagaaagtcaatagtaacttgatggggatagcattgaatctataaattaccttgggyggtgtggccattttcacgatattgattcttcctatccataagcaaggaatgttttacatttgtttgtgtcctcttttatttctttgagcagtggtttgca

SEQ ID NO: 523304 - DNA, 201 bp, Homo sapiens
gcgcagtggtgggtgcctgtaatcccagctacttgggaggctgaggcaagagaatcacttgaacccaggaggcagaggttacagtgagccgagatcgcgcyactgcaccccagcttgggcaacagagcgagactccgtctcaaaaaaaaaaaaagaaaaagaaagaaaagaaaagaaaagaatttttctttggcttttgaa

SEQ ID NO: 523305 - DNA, 201 bp, Homo sapiens
tgctggcctaaattattcttttgtgactattttctcacctgcaaaagggaacaataataatacttttctcatagggttatactgaatattgagataatgtrtgtgtaaaggagaaaaataacaaccacactataaactaccacaattgctttctaaagcagagggatctatgacaggagagtcctcttgttttcctgagat

SEQ ID NO: 523306 - DNA, 201 bp, Homo sapiens
aaggagaaaaataacaaccacactataaactaccacaattgctttctaaagcagagggatctatgacaggagagtcctcttgttttcctgagattcttgcrgggtctgctcagctttgcttagtaaagaaacaagatgtatacacatttaaaaaaaagaaaaaagaaaagtaagaaagaagaatttggactttccaggaat

SEQ ID NO: 523307 - DNA, 201 bp, Homo sapiens
aagatgtatacacatttaaaaaaaagaaaaaagaaaagtaagaaagaagaatttggactttccaggaatagtccaggaggaagctcctgaggaatgggacraaaatagcaaaaaagagaagatccagtgggaagctgtgaggccagggaggagtttgtaagtttagaggatttaagacctgggttaggatcctgcctctgc

SEQ ID NO: 523308 - DNA, 201 bp, Homo sapiens; identical to SEQ ID NO: 322431

SEQ ID NO: 523309 - DNA, 201 bp, Homo sapiens; identical to SEQ ID NO: 322432

SEQ ID NO: 523310 - DNA, 201 bp, Homo sapiens
cctgaggaatgggacgaaaatagcaaaaaagagaagatccagtgggaagctgtgaggccagggaggagtttgtaagtttagaggatttaagacctgggttmggatcctgcctctgctgcttactaaccatggatctttgggcaaattatttagctttgttttgtttcagtttcctcatatggaaaattgggataataccac

SEQ ID NO: 523311 - DNA, 201 bp, Homo sapiens
agcattgatcttaggagcagtttagggagggtcacactctccagctgcatgactcctaaaccataatttttaatcttgtggctaatgttagtcctacgaargcaatctagtccccgggtaagaaggaggtctgctttgggaaaaggctgttaccgtctttgtttaaactgtaaactaagtttctctcaaagttagttcaac

SEQ ID NO: 523312 - DNA, 201 bp, Homo sapiens
tcaagcattgatcttaggagcagtttagggagggtcacactctccagctgcatgactcctaaaccataatttttaatcttgtggctaatgttagtcctacraaggcaatctagtccccgggtaagaaggaggtctgctttgggaaaaggctgttaccgtctttgtttaaactgtaaactaagtttctctcaaagttagttc

SEQ ID NO: 523313 - DNA, 201 bp, Homo sapiens
ttttaatacactatattaatacaatatatttaataaaatatttaattgtatctattgcctttttagttatacttcttgtttgttttttgttctaccttgarttaacattttacagttcacatgtaatgtaaaaagctaacaacacaaggctgtcacttaaccctacttccgtgttccttgtgttgattttgtcaaaaattt

SEQ ID NO: 523314 - DNA, 201 bp, Homo sapiens
ttttcactcaactgttgtgttcacccttgcagctttcccaactagctgagcccctctggatcctgcctgtctgccaccctggtctcctagcaaccctccgytctgcagtctgggaggtggatgtgtcaaagggagtctgggcggcagaggtgagaatgcaaagaaatctctccccttctaggccctgaagtacagaatcgc

SEQ ID NO: 523315 - DNA, 201 bp, Homo sapiens
aagctaacaacacaaggctgtcacttaaccctacttccgtgttccttgtgttgattttgtcaaaaattttagttctacatatgttataaaactcacaatayattattattatattcactttgaacagtctattgtcttttagaatatcaaggaacaagaaaaagtattattattattattattattattattattattatt

SEQ ID NO: 523316 - DNA, 201 bp, Homo sapiens
gagttaaattgtgatatatttttgatataagaacagagaggtcaatgccattcataggggatgcatttgagctgttctttgataataatgtaattttagakccagaaggtatcttaggatcatgttgtccaagtatcactttttttgtaacctgataaactaaggcccagagaagtcaaatgtctcagctgggggtcttcc

SEQ ID NO: 523317 - DNA, 201 bp, Homo sapiens
gaattccagctttctgggaaaaggtacttcttctcttttgttctctaatgctcagcaccctgcgtggctggcatttaaaagactaacaaatatttgttgawtggatggatgaatgcatgaatgaaaaaccaaatgaataatgaaaacaaaagtgtataatacactataacacgtactatattgggcttgcgtagtactatg

SEQ ID NO: 523318 - DNA, 201 bp, Homo sapiens
gatgagaaagcttgcttggatgacaaaaagacaatagctagcaacgtccattacatcttgttttccacaagtggtggaattgagcataatttccattacckcttgctattcctccctttagcccacacacatatgtgtggctatggaccattcataaatcaatgtggataattgcattggtggtccaaggaattcttggtg

SEQ ID NO: 523319 - DNA, 201 bp, Homo sapiens; identical to SEQ ID NO: 322450

SEQ ID NO: 523320 - DNA, 201 bp, Homo sapiens
tacagtgagccgagatcgcgctactgcaccccagcttgggcaacagagcgagactccgtctcaaaaaaaaaaaaagaaaaagaaagaaaagaaaagaaaaraatttttctttggcttttgaaggcattgctttcctacgattccagtgattgagaagtctggtcccattgttattccagaagttatgtatatattctattt

SEQ ID NO: 523321 - DNA, 201 bp, Homo sapiens
ttaaattttgtgtagagatgggctctcgctgtgttgcccaggctggtatcaaactcctgggctcaagtgatctgcccacttcagcctcccaaagtgctagrattacaggtgagagccaccatgcctggcctgcttctctcaatatagcaggcatcgcaagtgcaaatatttaatatctgttttctctgctagattttaaac

SEQ ID NO: 523322 - DNA, 201 bp, Homo sapiens
gaagatatacaaattgacagaaaagtacatgaaaagatgctgagcatcactaattattagggaaatgcaaatcaaaattcatacccattaggatagctacyattaaacaaacaaacaaaaaaaaaaaaacagaaaatagcaagggttggcaaggatgtgggaaaagtgggaccctgtagactgttggtgggaatgtgaaat

SEQ ID NO: 523323 - DNA, 201 bp, Homo sapiens
actaaaaatacaaaaaaattagctgggtgtggtggtgcacacaggtaatcccagctactcagaaagctgaggcatgagaatctcttgaacctgagaggcaraggtggcagtgagctgaaattgtgccactgcactccacctgggcgacagagcaagactgtcaggaaaaaaaaaaaaaaaaaaaaaaagacaaggcattta

SEQ ID NO: 523324 - DNA, 201 bp, Homo sapiens
ggctcacacctataagcccagcactttgggaagccaaggcaggaggatcgcttgaggccaggagttcaagacgatcctgggcaacatagcaagacctcatytctactaaaaatttaaaaattagctggacatggtggcgtgtgcctgtagtcccagctactcgggaggctgaggtgggaggattgcttgaggctgggagat

SEQ ID NO: 523325 - DNA, 201 bp, Homo sapiens
acagaaaagtacatgaaaagatgctgagcatcactaattattagggaaatgcaaatcaaaattcatacccattaggatagctactattaaacaaacaaacaaaaaaaaaaaaacagaaaatagcaagggttggcaaggatgtgggaaaagtgggaccctgtagactgttggtgggaatgtgaaatgatgcagccactatgg

SEQ ID NO: 523326 - DNA, 201 bp, Homo sapiens
cagaaaagtacatgaaaagatgctgagcatcactaattattagggaaatgcaaatcaaaattcatacccattaggatagctactattaaacaaacaaacaaaaaaaaaaaaacagaaaatagcaagggttggcaaggatgtgggaaaagtgggaccctgtagactgttggtgggaatgtgaaatgatgcagccactatgga

SEQ ID NO: 523327 - DNA, 201 bp, Homo sapiens
agaaaagtacatgaaaagatgctgagcatcactaattattagggaaatgcaaatcaaaattcatacccattaggatagctactattaaacaaacaaacaaaaaaaaaaaaacagaaaatagcaagggttggcaaggatgtgggaaaagtgggaccctgtagactgttggtgggaatgtgaaatgatgcagccactatggaa

SEQ ID NO: 523328 - DNA, 201 bp, Homo sapiens
atgaatagtaagttaaatatagctagagagataatttgtgaactaaaaggtaagtcttagaaaattgcccaaactacagctcaaactaaagaaagagattaaaaaaaaaaaaaggacaggagaatgaaaagtgaaaacacagcatatgttaaatagaagttccaaaaggagatagaggcaattttgaaaagcaatgaagaa

SEQ ID NO: 523329 - DNA, 201 bp, Homo sapiens
agcaagccattcatgggggatctgccccatgatccaatacctcccactaggccctacctccagcattgggaattacatttcaacatgagatttggaagggacacacatccaatataagggagtttgagcttcactgtctgtgtactgagggacattcagaaacaaggtagtgacaccattagataaggaaggaaggatgat

SEQ ID NO: 523330 - DNA, 201 bp, Homo sapiens
caaaaacaactccaactgatttaaagagaatggaattcattaaaatgatatgtgtgtcatagaatcacaagttaaggttgaaaaaccagaccagggcaatkaatcaggagtgaagcctcaaatcacaccctagaaccggccccctgcagcctgcacaccttcacgctgcagcttgcaccactgacaatgcattgattaaga

SEQ ID NO: 523331 - DNA, 201 bp, Homo sapiens
ggacttagacctttctggacatgcattttgacagagtgcacgcctgcaacagctgaggaagggaggcagcctgtgttctcaagtgccgcgtcccagcatcygcatgtcatacttgatacatgatgcataaattaatcacattgcttccctcagactcttcagcctcatccactgaattcattcagaatgtggaatggatat

SEQ ID NO: 523332 - DNA, 201 bp, Homo sapiens
gtatgtgtgtgtatgcatgcatgcatgcacactaacgagagaaaaataaagcaaatatggaaaaatgttaattggtgagtctaggtgaaggatatatattrgtatttcctttcattttcttgcagttttttgacaaatttgaaattttacaattaaaaatatcatcataattaataaaggaaaatctttgaatttaaaaaa

SEQ ID NO: 523333 - DNA, 201 bp, Homo sapiens
acacagtatgcagaaatgggaaggcaaggtgagggtttaagaaagggttcagcagaaaggtctttttacagcttatctttttatatgaaaagcttcacacrtcgaaggagtcagatggcagagtagtgactgaaggattcagagttgaacagctgagtactctgcccatgaagttccttaaggaacctttgctgaatatga

SEQ ID NO: 523334 - DNA, 201 bp, Homo sapiens
ccttctcatatgaaagtctagaggtccaggactgatcggtaaattctgttgcttgaaggccccagagatgcaggcaccttctattttcttgctcccctatrctgggcctccactactgtagttttctcattgtttatggtactaatccagcttcagccatcctgatacacattcaagccaaaagaaaagaggaacggatga

SEQ ID NO: 523335 - DNA, 201 bp, Homo sapiens
agtgggaagctgtgaggccagggaggagtttgtaagtttagaggatttaagacctgggttaggatcctgcctctgctgcttactaaccatggatctttggrcaaattatttagctttgttttgtttcagtttcctcatatggaaaattgggataataccactcccctgtcagagctgtagtgaagattaagtgaaataatc

SEQ ID NO: 523336 - DNA, 201 bp, Homo sapiens
accaagcctatttgaattctagatagacccttaaataattataattctagacaatactgattgttctgttcctcatgtgggattccgttgtgaaactatayaaaaaatattacttttggcaatggtttcctaggtatgacaccaaaatcataggcaacgtaagcaaaaatagacaaataatattctcctaaacttaaaaac

SEQ ID NO: 523337 - DNA, 201 bp, Homo sapiens; identical to SEQ ID NO: 322461

SEQ ID NO: 523338 - DNA, 201 bp, Homo sapiens
cttgctgattcataagtgcaaaaggagcctggaaatcatcatcatgaaacattttttctctgcaagttcatcggatactctatcaaatccattttcatccytagagacatctctcctagtatgctctgtcatcctactccaatctgagctggatacactgtaggcttgatgcttagtcagaaacttgggacacttatattt

SEQ ID NO: 523339 - DNA, 201 bp, Homo sapiens
cttcctgagaactcaaaggcaaaacatagtctaagccacccattttcttcctttcccttaaccctggaagcctgacaccttacccattccttagctttgcrcagatgcaaatcctggcaagatgaaatgcctgctcagcaagtgctgctagacaagtgagacggctgccacaaaccatgggtggccagtgttgaattgtga

SEQ ID NO: 523340 - DNA, 201 bp, Homo sapiens
ccttgtgtcctaggggtgtcccatcagggtccagttgaccattgctccccacgcagtaacactgagctctactggatcacccccttgctattcggagcaaytcaaatgcatctgcacttgcatcagtgcttcctggagacaagctcaggcccaggagagagggcatcagacagtcagtggatcttagcagtcctgcaggca

SEQ ID NO: 523341 - DNA, 201 bp, Homo sapiens
aggagggtcaggatcatgttaaagaaggtcagtgaaagagcaaaattggggctttccatggtatgactgcttttaggtaattgaagagaaattagccatgrtttttgctgatggggtagtattgactcactcagagtttcccccaccctacaccacatccacgtgggccaagacaaaggctaagttcagccacccctctct

SEQ ID NO: 523342 - DNA, 201 bp, Homo sapiens
ccccagctgtttgagtcagcccaacaccaaccagcaggcacgtgagtgagtgagtgagagcctccagatgacgccaatctttgggtgactctaggctgacrccaggaggaacagagatgagctgttcctgccaagctctgcccaaattatagatttatgagaataaatgttattttatgtacttattcatttttaatttta

SEQ ID NO: 523343 - DNA, 201 bp, Homo sapiens
ccagagacctatagaaatgagtattattgcttccaaagtgtgctgattgtgtatagggaagcacaactacttttcaaaatctatcctgatgtagaatgaaytataatagtgaaggagaccagaatatgccaccccaaaataggcctttttggcataaggattattctgagctgaaggcaattgaggaacatcatacccaga

SEQ ID NO: 523344 - DNA, 201 bp, Homo sapiens
cagtgagcggagattgtgccactgcactccagcctgggcaacagagcaagactccatctttaaaaaaaaaaaaatagaattacccaagattcagcaattcyacttctgggcatatacccaaaagaattgaaagcaggtacttgaacagatatttgcacactaatgctcatagcagcattattcacaatagccaaaaggtag

SEQ ID NO: 523345 - DNA, 201 bp, Homo sapiens
aatgagatttatatagatcctaagtagctaatatgaaaacagcaaagaattctaactctgtcaaactatactgcaatcataaaaggagactttctactcawttgaaggggcactttctgatggcaccctggtggcattttgcattaaataaaatttattttgcagtaaataaaatgtaatgcaaaatgccatcaggcacca

SEQ ID NO: 523346 - DNA, 201 bp, Homo sapiens
tcgcttgaacctgggaggaggaggttgcagtgagccaagattgtgccactgcactccagcctgggcaacagagtgagactctgtctaaaaaaaaaaaaaaraaagaaaatctatatatatctatatatatggatatacacacacatatatatgcgtgtgtgtgctttaatctctgttgtttcaagaatatttaaggattta

SEQ ID NO: 523347 - DNA, 201 bp, Homo sapiens
agtagccttggcacaggtgttgctgggcaatcacagcagtggaagtgcctttggccaacaccagcagcggcttcatcttccaggcatattggcaacaggamcgtggctttcagtattggttataagaatgatggctgatgaaaaccaaggctggcaggaaaactgcaatagccatggggtaaccaggaggatcttgttcca

SEQ ID NO: 523348 - DNA, 201 bp, Homo sapiens
gcaagccattcatgggggatctgccccatgatccaatacctcccactaggccctacctccagcattgggaattacatttcaacatgagatttggaagggacacacatccaatataagggagtttgagcttcactgtctgtgtactgagggacattcagaaacaaggtagtgacaccattagataaggaaggaaggatgata

SEQ ID NO: 523349 - DNA, 201 bp, Homo sapiens; identical to SEQ ID NO: 322535

SEQ ID NO: 523350 - DNA, 201 bp, Homo sapiens
acaatgaggtcctctaaatgcaatcttgacagtggttttgttttttttgttcccaaaagataattaataaactgggatgaaatattcaccgtacatatgtacacacacacacacacacacacacacacacacacacacacaaaagtatgggacttgtatccagaatatataatgagctcttacaactcaacaagaaaataa

SEQ ID NO: 523351 - DNA, 201 bp, Homo sapiens
caatgaggtcctctaaatgcaatcttgacagtggttttgttttttttgttcccaaaagataattaataaactgggatgaaatattcaccgtacatatgtacacacacacacacacacacacacacacacacacacacacaaaagtatgggacttgtatccagaatatataatgagctcttacaactcaacaagaaaataac

SEQ ID NO: 523352 - DNA, 201 bp, Homo sapiens
aatgaggtcctctaaatgcaatcttgacagtggttttgttttttttgttcccaaaagataattaataaactgggatgaaatattcaccgtacatatgtacacacacacacacacacacacacacacacacacacacacaaaagtatgggacttgtatccagaatatataatgagctcttacaactcaacaagaaaataacc

SEQ ID NO: 523353 - DNA, 201 bp, Homo sapiens
atgaggtcctctaaatgcaatcttgacagtggttttgttttttttgttcccaaaagataattaataaactgggatgaaatattcaccgtacatatgtacacacacacacacacacacacacacacacacacacacacaaaagtatgggacttgtatccagaatatataatgagctcttacaactcaacaagaaaataaccc

SEQ ID NO: 523354 - DNA, 201 bp, Homo sapiens
attccaggcaccagcacacctaagaacagaacacaagcctactccgcaggtaactcctctgcttccagggacgtttccacatggtgacttacttgagtgarcaaatctgcgcgtcaagacctgcttattttgccctgaccacttggaggcatgagaacataagggtgtcccaagctggccacaggcagcgatgcaacctgc

SEQ ID NO: 523355 - DNA, 201 bp, Homo sapiens
cacaattccctgaaatccctagagcttcactgtataataggatcaccactatccacagggggctatttaaatttaaatgctaataataacttcagtgaccwcacatagtaactacagtactggacaggacagatttaaatagcatcttcatcatcacagaaaattctattgaatggcactgctctagaagacatcctcatg

SEQ ID NO: 523356 - DNA, 201 bp, Homo sapiens; identical to SEQ ID NO: 322537

SEQ ID NO: 523357 - DNA, 201 bp, Homo sapiens; identical to SEQ ID NO: 322538

SEQ ID NO: 523358 - DNA, 201 bp, Homo sapiens
actggactaagatagtattgttatcaataaataatttaccttgactctcacaattttggaaatgttttttattttccctaaacttttaaattcagaaacgyctagggagaagagagaggccatgactattaaaaaataagttattagcataaactccacttgtgattttatacaaactgactggcaagtccgaataaagta

SEQ ID NO: 523359 - DNA, 201 bp, Homo sapiens; identical to SEQ ID NO: 322477

SEQ ID NO: 523360 - DNA, 201 bp, Homo sapiens
agcatagaggaagtaacaattttgcttgtcaagagagttaagaaagttccagaaagctaaagacaaaaaatttcaactaaaagtctattgatttacagtayggaaaaaaaagaaaggcttgggacattgagcaaatcaccagttaactggaagtttttctggaagccagcaaatggaatggttcaaatcaaccaatgatcc

SEQ ID NO: 523361 - DNA, 201 bp, Homo sapiens
taaaaatggggctaagagacatttgcaaattaatgatggctgcctgaattgaagcaatataaacttggatactgtgcagtcttctttccaccttgtgcacrgacaagcagagggcaatttgtgagagaggaagctgatgcacagtgagaaagaacatgaatgaaactggctgctaatggcttaagtccctgtgaaacagcc

SEQ ID NO: 523362 - DNA, 201 bp, Homo sapiens
cttccataggtaggttctagctctggcctctccaatcccaatttggaacttcagtttataaaaataacttaaaaaaaaaaaaacctagctcttccacgggmagttcaaatttaacaaatccaacactgaatttatccatttatcttttttttttttttttggagacagagtctcacttgctctgtcacccagactggagag

SEQ ID NO: 523363 - DNA, 201 bp, Homo sapiens
gaataaacatttattgtgttaaaccactgagattttgaggttgtttgttactgcaactaacattaatttctctaatacggcaacataaaaagattctatcygaagtcctatcattacacagatgagggcctttgaatggtcaaagatttgggttacatgaatcagacatacatccttcccccaaagagtttgcggtccagt

SEQ ID NO: 523364 - DNA, 201 bp, Homo sapiens
ataaaatgtgagataaggttacactttttaaaaaataaaataaaatatgggtggctcatttccatacataaaatttatactgatttcacataatcattaaygataataatttttaaaactgacagttgttatgtataccacaaaattagggtcttttatctgactaaatagcaaatcatttccttatcccaaaggttaaga

SEQ ID NO: 523365 - DNA, 201 bp, Homo sapiens
ccttttgcagacatcctcctggttccaaggcatttgtctccgtttttttagtccaaaggatcccagtgtgtagatttcacctctgatgcttgcttttggtwgctgagcgttttgccaccttttattttgttttgttttgttttgtttttttggagacggagtctcactctgttgcccagactggggtgcagtggcatgatc

SEQ ID NO: 523366 - DNA, 201 bp, Homo sapiens
tttccttctggaagacatggcagtgtctgccttgcagcatgcatccaagaccttatctgtttctgtatcaaacattgtcaagatcagggcatgaagagccrgggcattcctgactcccccaacagatggcatctcttctttattataggtgacttctgggggaacagaaagcatactgatggcctgcaaagcatatcggga

SEQ ID NO: 523367 - DNA, 201 bp, Homo sapiens
ctccacctgggaagaaaggacctaagtgaataaaaaaataacctcagtgcagtgcagcatctcagaattagaaatagtcttagaagtcatgggatgcagctttttttttttttttttttttgagacaaggtctcactctgatgcccaggctggagtgcagtggcatgatctcagcttactgcatcctcaatctctgaggct

SEQ ID NO: 523368 - DNA, 201 bp, Homo sapiens
tatcaccatatatctttaggaaaaatgttagtttagttacttgtgcggtgcctagcattgagcagttgcttgactgtcataataattctgctgtctctacygtactcttgcatctggataactttgtctttcttacctttggagattcaagacaagttgaacaagaccaaggatgatattagcaagaacatgtcattcctg

SEQ ID NO: 523369 - DNA, 201 bp, Homo sapiens
agagctgacctcagctgtaagcactttgtcttctgcagcgtagaaatgtagtgacctacaagtgtcccatgcccaagttgggtgcattattttgtggtgayggtcacatgtttcataaagacttcctgagtcaaaaaatgacttttctcagttcatcttccatataactcctggccacagggattttgtatccaatggtat

SEQ ID NO: 523370 - DNA, 201 bp, Homo sapiens
gctcgagcccaggaattcgagaccagcctgggcaactaggtgaaaccctgtctctacaaaaaatacaaaagttagccaggcatggtggggtgtgcctgtartcccagctactttgggggatgaggtgggaggatctcttaggcctgggaggtggagattgcagtgagccgagatcacgccatggcactccagtctaggtga

SEQ ID NO: 523371 - DNA, 201 bp, Homo sapiens
ggctttgtttttttaggtctgtagctcattctttttgtttcatggtctaggttttgaactctttgttttcttaaattcatgttcttatgatattttcctawagtgagaaagttataaggggtttccttcatcccttagcttgtttccttctgtgttgggtttttattttgcatgctacatactaccttttcccctgccttt

SEQ ID NO: 523372 - DNA, 201 bp, Homo sapiens
gcttattatccaagaaattatcatttctagttttagagaatgatgaaactcatttgtgctttgaaatataacctgtatacatgtgcacagtaagtcatttrgctatttattgtcagactctgggagttcatagcaaacttagcaacattccatgtgcaaatttgcatatttttccccccatatcttacctacttgccttag

SEQ ID NO: 523373 - DNA, 201 bp, Homo sapiens
atggcttctatttttgcagatgagcagagtccagttgcatagaggtttagtgttgtgccacacatcacacagcttctaagtgagagctaaaattagagccraaggttttgattaccagtccagactttctaggacaccacagctgcctttctgtagaacagattaacatgactctcagagtccgcaagagtagtggtgagg

SEQ ID NO: 523374 - DNA, 201 bp, Homo sapiens
aagggtctggtgccacctcagggtgaaagctagttttgccactcacttatcttgcaggattcttgattttgctttgtttgggggtttagcaagtttctttmtgttaggttagtgataggtttaaattttttttttttgatgttttatcaagttttttagttatttcagttaggaaggttgctcaaggtatataatattgct

SEQ ID NO: 523375 - DNA, 201 bp, Homo sapiens
ttcctaaaggacattcgagaatctgtcactcaaatcatgaagaatcctaaagcgaagaccacaggaatggtagggacacttggagttttttttcttctctkggaaatttaggtgttggtggagagtttgaaggaatcatatgacccggagtctgttcctgcctctgcccctttgccacagacatcttttatttgttgactg

SEQ ID NO: 523376 - DNA, 201 bp, Homo sapiens
gggacctccaaattcctagtgtgctgcgtgtatgtctgttgaaggagctcatcacttgcacaaggaccagaatcacttttactgcagcatggccagttttstggccactgttcctagttatacctttgattcttttacacacacactgtagctgctgccaaggcaggatcaaagtccaaatactgccctcaaggatgtgct

SEQ ID NO: 523377 - DNA, 201 bp, Homo sapiens
tttttttatgagccactcatttttctgggaacctagggattctttgaggcctagattgaagttaagtctggaagttctcttcttccagagaagatttgtcrtacctttttgagttgctggggattgccaccacactggaaccaaattaagtcaaatccttagcttgtcattttgtaccacagaggtagtgtgaattctgac

SEQ ID NO: 523378 - DNA, 201 bp, Homo sapiens
ctctcagtctctagcctttctactctccaatccatcttgtacacagccatcaaattgctcttataaaatacttgttacctggctaatatttagttcaagaycttcctgggggtctctaatcattcaggcctgctactgccttctttattagacttttctaacctaatcttccatgatgcctttgagtaaatgcaccactcc

SEQ ID NO: 523379 - DNA, 201 bp, Homo sapiens
tttttttaatctgcttggttgttttttatagtccttttccttggcttaacttttgtttacttaaatatattacacataaatatgttgtattctgtgtctgwtaattccaatatccatgagccttacctgattctgctggcttcagtcatggttccttgtttccttatatttgtgattttattttatttatttattttttta

SEQ ID NO: 523380 - DNA, 201 bp, Homo sapiens
gctcactgcagccttgacctctctgggctcaagcgaccctcccacctcagcccccttgagtagctgggactacaggcatgcaccaccatgcctcgctaatwtttgtatttttagtagagatggggtttcaccatgttgcccaggctggtcttgaactcccaagctgaagtgatctgcctgccttggcttctcaaagtgctg

SEQ ID NO: 523381 - DNA, 201 bp, Homo sapiens
ctggttttacctgagccaaagtttaatttattattttgctgtaaactgaacctcatttagttgctattaggcataaagaaagggggaggacatcattatayttaaagaaacacatgaggattctttgttttacctgttctttcaagtagatggttgttagttttcgtaaactatgatagataaacttctgtttagatctgt

SEQ ID NO: 523382 - DNA, 201 bp, Homo sapiens
attctgaaataggattgccttctagattgagatctggaaataatctgcatgtaggaatgtgcccaccaaaagggtgatattccacatgctgcccctcagcrcctccctttccctcacgcctcatcctgcagtgactgaggcaggacctttcccttgtgcgagaggcagcctaaatcagagctctactcatttcctgcttga

SEQ ID NO: 523383 - DNA, 201 bp, Homo sapiens
caaactaagaacagacttcttttctctctctaaatgtaatgtttttatttttcacttgtatttctagaaggcctttgagccctacttagagattttggaaktatactccacaaaagccaagaattatgtaaatggacattgcaccaagtatgagccctggcagctaattgcatggagtgtcgtgtggaccctgctgatagt

SEQ ID NO: 523384 - DNA, 201 bp, Homo sapiens
tgagtgtgaagtcctgactttgcctctttctatcagtttgactgagcaagtcacttaacctttcttgacttcagttttccccatctatagagtgatactgyacactggtttcttttcttttctttttccccttcctttccttttcctttttcttttccttccctctccctctcctccctttgcctttgcctttccctttcc

SEQ ID NO: 523385 - DNA, 201 bp, Homo sapiens
ccggtaatttagattagctgctaatggtgttttctattattttggcctgagttacattattctcctcttccctgtcatttagtgtggctccccaaagtgcycatgctgcatttaacaaagcagccagttactttgggatgaagattgtgcgggtcccattgacgaagatgatggaggtggatgtgcgggtgagtccctctg

SEQ ID NO: 523386 - DNA, 201 bp, Homo sapiens
atcctcaatctctgaggctcagatgatccttccacctcagcctcctgagtagctgggacgacaggcacatgccaccatgcccggctgatttttgtatttaytttttgtagagatggtagtttgccatgttacccaggctggtatctaactcctgggctcaagggatccaaccgcctgccttggcctcccaaagtgctggat

SEQ ID NO: 523387 - DNA, 201 bp, Homo sapiens
ttgcatgctacatactaccttttcccctgccttttagtttgtttgcatagtttccttgccattttctctcatcttggggtggcattctccagacattgttmttatgcactgtgggtgcttcctgtctgagaccatttggctggggacaaagctcagccaaagctttgttctatctgtattagaataaccaggtctattctg

SEQ ID NO: 523388 - DNA, 201 bp, Homo sapiens
tgatattcactaaagataatcttcatctcaagtattttttatatgtgggcacttctaattttatacatttttctatttaaaaagcattacattttaaaatktgtacctgttttgacatttggcaaaaaggaaactgtacctatggttcagtttaaaacaaagaatcagcatggggagtttaccggaatgaggactgaaaca

SEQ ID NO: 523389 - DNA, 201 bp, Homo sapiens
ttaaaacaaagaatcagcatggggagtttaccggaatgaggactgaaacacttaggagttaaagcaattcaaggggcgtgtgtgtgtctctccctttctcygtcaatctctctcactctctctggctctctcacagacacagactcaaacacacacagccatatgtgtaatcattttttagtacaaaatattccctgtagc

SEQ ID NO: 523390 - DNA, 201 bp, Homo sapiens
tagccagacatttatcttcagaataatcacaccacattaaatcagtcttctcttttcagccctagtaaaagttttgtttaattctaagatgccatcatagdgaacaaccttaacttttatcctacataattatattcaaagctttatgtatttttgtttataattacacagtaattataaatgtttagtaccaacctgatg

SEQ ID NO: 523391 - DNA, 201 bp, Homo sapiens
agctgtaacactcaccgcgagggtccgcggcttcattcttgaagtcagtgagaccaagaacccaccaattccggacacagtagaagcccattgggcttttmaattttatttactctaatttcattctaaagaattctgttttgtagttctccttttattttattattattttttgagacagggtgtcactctgttgctcag

SEQ ID NO: 523392 - DNA, 201 bp, Homo sapiens
catctgcttgcatttttttgcaggcttatggagattttgcatggagtaaccccctgcatccagatatcttcccaggactacgcaagatagaggcagaaatygtgaggatagcttgttccctgttcaatgggggaccagattcgtgtggatgtgtaagtatatgcaaggggcatccaatagccttattttttaggttaaaat

SEQ ID NO: 523393 - DNA, 201 bp, Homo sapiens
gaataatcacaccacattaaatcagtcttctcttttcagccctagtaaaagttttgtttaattctaagatgccatcatagtgaacaaccttaacttttatsctacataattatattcaaagctttatgtatttttgtttataattacacagtaattataaatgtttagtaccaacctgatgacaaacactattttgttgaa

SEQ ID NO: 523394 - DNA, 201 bp, Homo sapiens
ttgaacttcatggctcattacaaccattttcaaaatttaactgcaactatcttcttataaattaagagagtttaatttgtgttccatagtgcgatgacaawaaaaaagtaaaaacaaaacaaaaaaaccctcatgcctaaatttagaatattgtattatgtagcaatccaaaacattcaaaacaaattaaatagtttaact

SEQ ID NO: 523395 - DNA, 201 bp, Homo sapiens
tcccattatctacaggatgaaactcaggttcttatgcagcagagaatacaagtttcttcatgagccagctcccacttattttttcttaactacttctcttyatttcccacataaacactaatcctgccttttctctttactaaatgtgtcatgcttttacgttgttttccttcccttccatcattcctcttgttccaaatg

SEQ ID NO: 523396 - DNA, 201 bp, Homo sapiens
gcagctactatcctctctttctggtatgacttttttccttttaacttttctacctagagaattttctttcatccttttaaccagcttaaattttgccctcygtcattatctttatcccttcagagttagatagtccttcctcagtgctccatcttggcactcatatgctttttgtggctattcccctgagaagttttcgtg

SEQ ID NO: 523397 - DNA, 201 bp, Homo sapiens
caacagtctgtttggatgactgaaaacacacaggtttacgatctgtaaagatagtaggtaagtgatttaatcttgttgtataggtaggccagagggcactygcagccttctgattgatttaatagattgttgaagattaagagttgacttaacatctctcttagaaaactgagaaatagctcattactaaggtgtgtttta

SEQ ID NO: 523398 - DNA, 201 bp, Homo sapiens
acatctgcttccggtgagacctcaggaagcttacaatcatggcggaaggcaaaacttgagcaggcacgtcacatggcaagagtgagagcaagaaagagagkggggggaggtcctaggcttataaacaaccggatctcacctgaactaactgagcaagaactcattcatgaaagatgcacccccgtgatccagtcatctccc

SEQ ID NO: 523399 - DNA, 201 bp, Homo sapiens
atgtcttgcagtttttattatagggctataaaggaaattctcttatgttctttgttttttggaacaagctggctgtcaaatacaaaataccccttcatgtygacgcttgtctgggaggcttcctcatcgtctttatggagaaagcaggatacccactggagcacccatttgatttccgggtgaaaggtgtaaccagcattt

SEQ ID NO: 523400 - DNA, 201 bp, Homo sapiens
gaaacatttacttaggtttacaggtttattttaagggatactgcaaaggttacaaatgaagagatgcatggggcaaggtataggggaaggggtgtggagcytccatgcctccctgggtgcaccaccctccaggaacctccatgtgttcagctatccagaggctctctgaaccctgtccttttgggtttttatggaggctta

SEQ ID NO: 523401 - DNA, 201 bp, Homo sapiens
taagtctctagctcagagaagaatgaagtttgcagttcgaaaaggccatgcaatagcagttcacttccccaaaatgctcagcccttgtaggatgccgttaggtcatctggaagttctgtatgccttcactgggagcgtagtgaagatgagagcctttcctttggctcttggagtaaactagctgacaggactttgagaact

SEQ ID NO: 523402 - DNA, 201 bp, Homo sapiens
aaagaaaagagggttaattggctcatggttctgcatatttgtacaaacatggcttcaacatctgcttccggtgagacctcaggaagcttacaatcatggcrgaaggcaaaacttgagcaggcacgtcacatggcaagagtgagagcaagaaagagagtggggggaggtcctaggcttataaacaaccggatctcacctgaa

SEQ ID NO: 523403 - DNA, 201 bp, Homo sapiens
cctaccttagcctgccaagtagctgggactacaggagtgtgccaccatgcctgctgcttttttgtttgtttgttttttaaatttttttgtagggatgggawcttgttatgttgctcaggctggtcttgaactcctggcctcaggggatcctcctgccttagcctcccaaagtgctgggattacaagtactttataatgtgt

SEQ ID NO: 523404 - DNA, 201 bp, Homo sapiens
taacacttttgtaggcttttcattgtgtatttttgtgtatgtgtgcatatagcagctactctgtagcagaggtgggtagagacacttaatagtatcatgtygcatgcagatgtcacatcggcctctgcaaaaactgtactgtcttgtttctgcattagacttaagtagtcatgtgaatatactgctatgtcacttttaata

SEQ ID NO: 523405 - DNA, 201 bp, Homo sapiens
atatggtgcctgatgaggcccacttcctggaaggtggccttcataaaagtggttcatagaaaatgtcttctcactgtatcttcacatggtagaaggggcamatttgctctctgggggtctcttttataaagtcactaatcttattcacgaggcctctgccttcatgatctaatgaccccccaaaggctccctcttcctcct

SEQ ID NO: 523406 - DNA, 201 bp, Homo sapiens
gccatgactaccagacttttcctcaggctccttggcatgttagtctgaattgttcttgagcactgtactactgacccaacaactgtgactagctggccacrccattcagggctggtgtggcatttatgtgtgtgtgtgtgtgtgtgtgtttttcctgtttgcccagcagtgcattgtgggttccaagagtgggtagtgtgt

SEQ ID NO: 523407 - DNA, 201 bp, Homo sapiens
gatttgcagagctgacctcagctgtaagcactttgtcttctgcagcgtagaaatgtagtgacctacaagtgtcccatgcccaagttgggtgcattattttktggtgatggtcacatgtttcataaagacttcctgagtcaaaaaatgacttttctcagttcatcttccatataactcctggccacagggattttgtatcca

SEQ ID NO: 523408 - DNA, 201 bp, Homo sapiens
gttttttagttatttcagttaggaaggttgctcaaggtatataatattgctagaaatagaagttccataattgttttttccatgttacagaccttcgtctrtttgaaagcccctttctccctgaatcttctctgccccacatttttctgggttactccgcttttcatatgatttcacagacttccaaccatcgcagtcatt

SEQ ID NO: 523409 - DNA, 201 bp, Homo sapiens
gtgtgtatacacatgtatgcatgagcacatatgggatggataaatagaccaaatagcttggtgcttaagagcgtaaccctggaaccagcctggattcataycttggtttgccacttaaagtatgcctttggcgagttacttctgtatgtcacagttcctgtatctctacaatggggatagtaatagtagtacagtacttac

SEQ ID NO: 523410 - DNA, 201 bp, Homo sapiens
tagttccttttaatattttggggtcagacagtgcaagctgtcgacagcagcttaaggagatacattagagtcttcctggcagttcttagaatgccttgtgmtagtgttgaatgggacctccaaattcctagtgtgctgcgtgtatgtctgttgaaggagctcatcacttgcacaaggaccagaatcacttttactgcagca

SEQ ID NO: 523411 - DNA, 201 bp, Homo sapiens
gaggaggctggaagaggaagatgcctagcacagaccttctgatgttggtgagccttttgcagacatcctcctggttccaaggcatttgtctccgttttttyagtccaaaggatcccagtgtgtagatttcacctctgatgcttgcttttggtagctgagcgttttgccaccttttattttgttttgttttgttttgttttt

SEQ ID NO: 523412 - DNA, 201 bp, Homo sapiens
tccctgtggtttcactgagggccatatctaagaagatcttcttgtattctaattatccttggctagagatgagaaaatcttagtgtggagtgagttctggygttctttaacaaatatattgctgaaacaatagcactgtgacaaatcgtgacatgtagcttctctccccaaacctactacccaagagccttttgctataag

SEQ ID NO: 523413 - DNA, 201 bp, Homo sapiens
gtgctgcgtgtatgtctgttgaaggagctcatcacttgcacaaggaccagaatcacttttactgcagcatggccagttttctggccactgttcctagttayacctttgattcttttacacacacactgtagctgctgccaaggcaggatcaaagtccaaatactgccctcaaggatgtgctgactttagcaatgccaacca

SEQ ID NO: 523414 - DNA, 201 bp, Homo sapiens
aaagcagccagttactttgggatgaagattgtgcgggtcccattgacgaagatgatggaggtggatgtgcgggtgagtccctctggagggcccactgtctrtgctgggccctgacagcagaagggccctcctgttgactagccgtttccagtcagatgggtctgactgcctttgattgtggcagccagaatatgaaaaact

SEQ ID NO: 523415 - DNA, 201 bp, Homo sapiens
atactcatgagggcagaaccctcctgatctaaatcacctcttaaagatcccacctctcaacactgttacaatggcaattaaatttcaacgtgagttttagrggggacattcaaatcataacaggtagttagccctgttgagtaatggagaaaggattgtattagttccaaggaaagatgcatcatccagtgtgggtctgga

SEQ ID NO: 523416 - DNA, 201 bp, Homo sapiens
gactatccaatcactctccatttttcagaaacagattctgaggcttagatacaaaaagttacatgtgtgtatgtgtgtgtgtgtgtgtgtgtgcgcgcgcrcgcgtgtgtgtatacctctgtcatttattcacttaacacatgcttattgagccacctgctcagtgtcaagtacttttctgggtgctggggatatggtggt

SEQ ID NO: 523417 - DNA, 201 bp, Homo sapiens
tgccaaggactatccaatcactctccatttttcagaaacagattctgaggcttagatacaaaaagttacatgtgtgtatgtgtgtgtgtgtgtgtgtgtgygcgcgcgcgcgtgtgtgtatacctctgtcatttattcacttaacacatgcttattgagccacctgctcagtgtcaagtacttttctgggtgctggggata

SEQ ID NO: 523418 - DNA, 201 bp, Homo sapiens
aacttagaaagtaacagaattggaagatccttagcttgccaaggactatccaatcactctccatttttcagaaacagattctgaggcttagatacaaaaavttacatgtgtgtatgtgtgtgtgtgtgtgtgtgtgcgcgcgcgcgcgtgtgtgtatacctctgtcatttattcacttaacacatgcttattgagccacct

SEQ ID NO: 523419 - DNA, 201 bp, Homo sapiens
ccaaggcaaaaggatcgcttcagctcaggaattaaagaccaaccggagcaacatagtgagacattatctctacaacaaatttaaaaattagccatgaggcygggcgcggtgactcatccctgtaatcccagcactttgggaggctgaggcgggtggatcacctgaggtccagagttcaagaccagcctgaccaacagggag

SEQ ID NO: 523420 - DNA, 201 bp, Homo sapiens
ctatgtatggaagctcagctttcatagcctgttctgttgcatgagtcgccatttatgtgaattaattttttaatttacaacttaaaaaatgtcttcacatscatagcatgcccaggcattgcccaggagtgtagcctctgctccctgccagtgtgggcctcttagactattgcagacatgctcgaaaggagtggctttccc

SEQ ID NO: 523421 - DNA, 201 bp, Homo sapiens
ttgtttatatttatcatgtacaacatatgttttgaaatatgtatacattgtgaaatgggtaaattgagctaattaacatgcattacctcccatatttttctttttttgtggttaggtatttacttctgttttcagttctgcagctcactatgccatacattttgcttagctaatagtagagacacagccatcttaggttct

SEQ ID NO: 523422 - DNA, 201 bp, Homo sapiens
caagaaatatttgatcattgtagaaaggtcattttactacacaaggaatatttgatcattgtagaaagatcctaattaactgcagttttaaatgttacttrtaattttgtaacctagacaatgtcaacattttggtatatattcttctagatatttttattttcacctttttattttgaaaaactttgaacctacattgag

SEQ ID NO: 523423 - DNA, 201 bp, Homo sapiens
cctgggcgacagagcgagactgtctcaaaaaaaaaaaaatttgtgttttattttcttttacgtcgcatttaatgaattatattgaaattttaaaacttgtrtctgcaggcatagtgttataatctttaaatgccatgtcagagtagcaaaagggattacagaatatttgttataaaaagagggcattgggtcatagagttg

SEQ ID NO: 523424 - DNA, 201 bp, Homo sapiens
atgtacaacatgaagttttcaaatgtgtaagttgtggaatggctcaatcaaactaacgtgattacctcacgtacttttttttttttttttttttttttttytgagatggagttttgctctgtcacccaggctggagtgcagtggcacgatctcggctcactgcaacctccgcctcctgggttcaagcgattcacttgcttc

SEQ ID NO: 523425 - DNA, 201 bp, Homo sapiens
cttcactgctttactgtgtgtgttatgtgtttgtatttttaaaattttgaaccatgtaaatatagtacttattcacaaacttaaatttaaaagtttttttwaaattttttaaacgaaagaaactctttgcaattggaaggcaagtgaggtggaagacacattgaatggttgctatatgccaggtcatatccatggaaattt

SEQ ID NO: 523426 - DNA, 201 bp, Homo sapiens
gattataggtgcacaccaccatgcctgggtaatttttgttttttaatagagatggggtttcgccgtgttagccaggctggtctcaaactcctaacctcagrtgatccacctgccttggtctcccaaagtgctgggattacttacaggcgtgagccgccgtgtccagccaagtttgtttgtttgtttgtttttgtcacttct

SEQ ID NO: 523427 - DNA, 201 bp, Homo sapiens
cagaattggaagatccttagcttgccaaggactatccaatcactctccatttttcagaaacagattctgaggcttagatacaaaaagttacatgtgtgtakgtgtgtgtgtgtgtgtgtgtgcgcgcgcgcgcgtgtgtgtatacctctgtcatttattcacttaacacatgcttattgagccacctgctcagtgtcaagt

SEQ ID NO: 523428 - DNA, 201 bp, Homo sapiens
tactttaaaaagtattattcattcactgggcaaataatttttttttctagaggaatacctttccaattttataacagtgaaggaaggaatgttttacttayagaaactgtactgaaactactgttctattaagcaagggttggagataagcacccctgtcccccttccctgcccaggcacacacatatacagatacagctt

SEQ ID NO: 523429 - DNA, 201 bp, Homo sapiens
agggaaccatagttgataaactacctagcagaaaggaccttagttccttttaatattttggggtcagacagtgcaagctgtcgacagcagcttaaggagayacattagagtcttcctggcagttcttagaatgccttgtgctagtgttgaatgggacctccaaattcctagtgtgctgcgtgtatgtctgttgaaggagct

SEQ ID NO: 523430 - DNA, 201 bp, Homo sapiens
aggccgtgctgattctgaagggagtgcggaggaggcaggaccctggtagcctcggcaccttcagcccgggttaggtggcctgggctgggctccccaccccsatcgcgcgcagacggggcgtttcccctagtttccacctgggtggaatgctttgtgggagtctgggtctggattagtttcatcagctgtgggagggaaacc

SEQ ID NO: 523431 - DNA, 201 bp, Homo sapiens
attttggggtcagacagtgcaagctgtcgacagcagcttaaggagatacattagagtcttcctggcagttcttagaatgccttgtgctagtgttgaatggsacctccaaattcctagtgtgctgcgtgtatgtctgttgaaggagctcatcacttgcacaaggaccagaatcacttttactgcagcatggccagttttctg

SEQ ID NO: 523432 - DNA, 201 bp, Homo sapiens
ttcttgctttagggattacatatgactttttagaactgtggagatgggcagattacttttccagaaatttttttagtacatctttcatgcctcagaagcayctaggggaatataattgggagttgggtagacaggttcgaagtcagtgattgagtcattagatctagatggggtttgggccttggaattccatttttattg

SEQ ID NO: 523433 - DNA, 201 bp, Homo sapiens
atgctcatagctcaatgcagcatcaaatgcctgggctcaagtgatcctcctaccttagcctgccaagtagctgggactacaggagtgtgccaccatgcctrctgcttttttgtttgtttgttttttaaatttttttgtagggatgggatcttgttatgttgctcaggctggtcttgaactcctggcctcaggggatcctcc

SEQ ID NO: 523434 - DNA, 201 bp, Homo sapiens
tttcacattgctgataataatgatttttcatctttattttattgtgctaactctattgaacttttttcttgatttgctataagaatgctgttgggtttccwctcaacatttttttcttttgtatccagaggagtttcttcctgtttcttctttatcagaacctgtcttcccagagattcttgcttactgaccagtgacctt

SEQ ID NO: 523435 - DNA, 201 bp, Homo sapiens
aataaataagcaaacaaataaataaaaattagatatatataaaaggtcctcctatagctctgatagggccatttattaagacctgctataccatttcttgstttagggattacatatgactttttagaactgtggagatgggcagattacttttccagaaatttttttagtacatctttcatgcctcagaagcatctaggg

SEQ ID NO: 523436 - DNA, 201 bp, Homo sapiens
tgaccatacaaccttcactcacttagcactgtgcagtaatccactgagcaaaattgccacattttccttggcagggaatctgtgtgcctgtggcagttcaraaattatttgtagagtgggtcagcctgtcagcaggaatgtttttctttgatcttcagcctgtttttctttaatgtgagcagaacagtaaagagagaatac

SEQ ID NO: 523437 - DNA, 201 bp, Homo sapiens
ttgcctcatccatctttggccagtggaaacatcatattggctcctaggtccatttacatgacccaagtaatctttgaaagccttttttctctttctttccttttttttttttttttgacgaaatattccaggttcaggttcactttgtccatttcctgctccaggccttcaatcagccatttatccaaggagccctggttc

SEQ ID NO: 523438 - DNA, 201 bp, Homo sapiens
gcccccttgagtagctgggactacaggcatgcaccaccatgcctcgctaatttttgtatttttagtagagatggggtttcaccatgttgcccaggctggtsttgaactcccaagctgaagtgatctgcctgccttggcttctcaaagtgctgggattacaggcgtaagccaccacgcttggccgtcttttttttttttttt

SEQ ID NO: 523439 - DNA, 201 bp, Homo sapiens
tgtacagggcagcccccccccacccaccaaacacagaattatctggctggaaatgtcaaaatggccaaggttgagaaccctgacttaaccctttctccaaygtaactggccaaaggagagatgagaagcctgttaaggaagtaagaatttgagaaaacctgactgtattgttaggtgctttggaacaacatgcagctggct

SEQ ID NO: 523440 - DNA, 201 bp, Homo sapiens
gctggtcttgaactcccaagctgaagtgatctgcctgccttggcttctcaaagtgctgggattacaggcgtaagccaccacgcttggccgtcttttttttktttttttttttttaatctgcttggttgttttttatagtccttttccttggcttaacttttgtttacttaaatatattacacataaatatgttgtattctg

SEQ ID NO: 523441 - DNA, 201 bp, Homo sapiens
ttaccactttaaccatttttaagtgtacagttagtcctgtggcagtaagtacgttcacattattgtacaggcatcactattaccagaactttttcatcacyccactggaactccattttaataaacatcaaataataactgcccattactctctcccgcatcccctggaaaccaccatttattgtatcgccttgttttaca

SEQ ID NO: 523442 - DNA, 201 bp, Homo sapiens
aaattcaagttttggtgtccgtaattacattgtgttggaacacagccatgttcctttgtttacacaataactgactatatttgtactccagcagcagagakgagtagttgtaaaggagaatgtttgctttgcaacacttaaaatataaaataatttagtatcaagctcattacagaaccagtttgctgactactggggtag

SEQ ID NO: 523443 - DNA, 201 bp, Homo sapiens
actcttgcatctggataactttgtctttcttacctttggagattcaagacaagttgaacaagaccaaggatgatattagcaagaacatgtcattcctgaargtggacaaagagtatgtgaaagctttaccctcccagggtctgagctcatctgctgttttggagaaacttaaggagtacagctctatgggtatgatgcttg

SEQ ID NO: 523444 - DNA, 201 bp, Homo sapiens
ggaagccttcttctcattctcactgaggtgcctgtctttggtaggcaaccgttagccagctctgccttgtgttgctctcatccaaagtctctgtcccccarctttccgcctgccagcctagctttatgctttggatccctcactgtgggatcacttctgagtcctcttcctattgccagaatgatttcctaaataggaggg

SEQ ID NO: 523445 - DNA, 201 bp, Homo sapiens
tttatatggtccttgtgctaagaatgatttttacattttaaaaattgttaaagaatattttatgaacatgaaaattatatgaaattcaagttttggtgtcygtaattacattgtgttggaacacagccatgttcctttgtttacacaataactgactatatttgtactccagcagcagagatgagtagttgtaaaggagaa

SEQ ID NO: 523446 - DNA, 201 bp, Homo sapiens
atgaacaataataaaacaacgataccagattaggatataaaccatttatctctaactctacgcttcaccctgttacaaatatttcctttcttcccctctakggataaccccatcctgacttttataattattcccttgcctttttaaaaatagttttaaccacctgtgtatgcatcctaagtttagtttgtttttttttaa

SEQ ID NO: 523447 - DNA, 201 bp, Homo sapiens
tgttcttacactggcattttctattttgttaaacttaaaattctttttttaaagtaacaaataaaaattgtatgtttatgatgtacaacatgaagttttcmaatgtgtaagttgtggaatggctcaatcaaactaacgtgattacctcacgtacttttttttttttttttttttttttttttgagatggagttttgctctg

SEQ ID NO: 523448 - DNA, 201 bp, Homo sapiens
atgatctatacccacacccgaaaaaattactcacatacttaaaaatccatgccttttgttttgttttattgctgttgtttgtaatttacttatttttaccygatactatgttctggaaatttttctacgtagttcatgtagatctgtcttcttcttaatgtttcatggtatgggtacataaaatgcacgtattatagttta

SEQ ID NO: 523449 - DNA, 201 bp, Homo sapiens
atttgctctctgggggtctcttttataaagtcactaatcttattcacgaggcctctgccttcatgatctaatgaccccccaaaggctccctcttcctcctwccatcagcttgagggttagatttcaacatatgaatttttgggggatgtaaacattcagtccattgcaggtataaatgttttcaacaagcatttgttgagt

SEQ ID NO: 523450 - DNA, 201 bp, Homo sapiens
tgtgacctgtaggcctcaatgtcttcatctgtgaaggacaggttcagctctgatggcctatgatgtgatgaaccttgtgaacttgtaggcagagtgccackgtgtgcagagtccagttacagataaccagccattctcctctgcagattcaacccactgccactgtgtcttgttaagcttaaataggagagatgtgggaga

SEQ ID NO: 523451 - DNA, 201 bp, Homo sapiens
gacctcctttgaatttaagaattgccattatcttcataagaatcaaaacaaatacaaagaaaatatattcttgctgaatgtaatttttaaatgttagtgargaatgtctttatatcttaattttaaggcttttaaaaattagtttgcatttgctggttctttgctgtcaccctaatactggttatgttacttttttgctca

SEQ ID NO: 523452 - DNA, 201 bp, Homo sapiens
ctctggaaaactaggcagtggaaaaaacaatgcattttaaaccagaagatttgagtcctggctccgctatttccgagctttgtgacctgtaggcctcaatrtcttcatctgtgaaggacaggttcagctctgatggcctatgatgtgatgaaccttgtgaacttgtaggcagagtgccacggtgtgcagagtccagttaca

SEQ ID NO: 523453 - DNA, 201 bp, Homo sapiens
ctgttggtctcctgatttgtgccactgatagtttggctctggaaaactaggcagtggaaaaaacaatgcattttaaaccagaagatttgagtcctggctcygctatttccgagctttgtgacctgtaggcctcaatgtcttcatctgtgaaggacaggttcagctctgatggcctatgatgtgatgaaccttgtgaacttg

SEQ ID NO: 523454 - DNA, 201 bp, Homo sapiens
aagaagaagatagattctcttgggggctgtgcctctagtttgaaaccagggaaggcacattttggtattagtctgtggcctcagtttcttcatcactgcartgagattggactataggtggtctctaaggttccttcagacagtagcattttatgattttgaagacaacttttctgaagtacttttcaaactaatttcttt

SEQ ID NO: 523455 - DNA, 201 bp, Homo sapiens
tgcctttctgtagaacagattaacatgactctcagagtccgcaagagtagtggtgaggtgtcagttcaggggaatactcaaaggtcactgtccttttcagrtatctgggtagttgctacagtatgtgcttaggaattgctggataaaaaaatattctttaaaatctcatcattttagtcgttaataatttattattataac

SEQ ID NO: 523456 - DNA, 201 bp, Homo sapiens
aaggtgagctaaggaggagatcaagtgttaccagttgattattttgactattattgataaaataaattggtagcttccccgcaaagtataaaattaactayagaattctcatcagatgcttgttttaaactctctctttgccgtcaccagatcagctggttcaggtgatggggtatagtggtagaggtgacaagcagtagt

SEQ ID NO: 523457 - DNA, 201 bp, Homo sapiens
tttttgtatttattttttgtagagatggtagtttgccatgttacccaggctggtatctaactcctgggctcaagggatccaaccgcctgccttggcctccyaaagtgctggattacaggcatgagccactgtacctggcctgtgatgcagcttatattatacatgaatctgttgaagagtatctctggtaaatggatatcc

SEQ ID NO: 523458 - DNA, 201 bp, Homo sapiens
ccaaatttacaatatttgtagccttctgctgttgggtacattcatgaaaaggtcttgcatccttaaagtgaaggctgaaagagttttatgtcattggggcragtgggctaccaagctcccataaattctaggagctgccttttgtctaacgattaggattattgagtactattttgatgccttttgggtatcatctgaaat

SEQ ID NO: 523459 - DNA, 201 bp, Homo sapiens
atttctagttttagagaatgatgaaactcatttgtgctttgaaatataacctgtatacatgtgcacagtaagtcatttagctatttattgtcagactctgrgagttcatagcaaacttagcaacattccatgtgcaaatttgcatatttttccccccatatcttacctacttgccttaggctgggagtctattttcctaca

SEQ ID NO: 523460 - DNA, 201 bp, Homo sapiens
aaagctagttttgccactcacttatcttgcaggattcttgattttgctttgtttgggggtttagcaagtttctttatgttaggttagtgataggtttaaattttttttttttgatgttttatcaagttttttagttatttcagttaggaaggttgctcaaggtatataatattgctagaaatagaagttccataattgttt

SEQ ID NO: 523461 - DNA, 201 bp, Homo sapiens
  misc_feature (1)...(201): n = A,T,C or G
ctgctatcagttatctacaactttcagagccgtaaacagcctcctcataatcagaatctggtaacccggaggggcgtcccagataatgcataatttttcantggaagccgtagggaaaaactctctcctctactctcacaccacaacaatcaacaccgaagacttccgtgaccaaacgtgtgggatttttttccccacact

SEQ ID NO: 523462 - DNA, 201 bp, Homo sapiens
aagctagttttgccactcacttatcttgcaggattcttgattttgctttgtttgggggtttagcaagtttctttatgttaggttagtgataggtttaaattttttttttttgatgttttatcaagttttttagttatttcagttaggaaggttgctcaaggtatataatattgctagaaatagaagttccataattgtttt

SEQ ID NO: 523463 - DNA, 201 bp, Homo sapiens
tgactcatccctgtaatcccagcactttgggaggctgaggcgggtggatcacctgaggtccagagttcaagaccagcctgaccaacagggagaaccccgtytctactaaaaatacaaaattagccgggtgtggtggcgcatgcctgtaatcccagctactcaggaggctgaggcaggagaattgcttgaacccgggaggca

SEQ ID NO: 523464 - DNA, 201 bp, Homo sapiens
gggaggctgaggcgggtggatcacctgaggtccagagttcaagaccagcctgaccaacagggagaaccccgtttctactaaaaatacaaaattagccgggygtggtggcgcatgcctgtaatcccagctactcaggaggctgaggcaggagaattgcttgaacccgggaggcagaggttgcggtgagttgagatggcacca

SEQ ID NO: 523465 - DNA, 201 bp, Homo sapiens
ggttagattgcattcattataaggaagactttgaatgattaaagagatagtgaccaggggattgtatgtgactgaatttactttttcttccttcatttatttttttgttttaagactggaaaatatcaaaggcatctttgtttttgggaatccccaattgtcagtcattgctctgggatcccgtgattttgacatctaccg

SEQ ID NO: 523466 - DNA, 201 bp, Homo sapiens
ttgatgttttatcaagttttttagttatttcagttaggaaggttgctcaaggtatataatattgctagaaatagaagttccataattgttttttccatgtkacagaccttcgtctatttgaaagcccctttctccctgaatcttctctgccccacatttttctgggttactccgcttttcatatgatttcacagacttcca

SEQ ID NO: 523467 - DNA, 201 bp, Homo sapiens
acccccactggctttatggaaagaatattgaagaagaagatagattctcttgggggctgtgcctctagtttgaaaccagggaaggcacattttggtattaktctgtggcctcagtttcttcatcactgcaatgagattggactataggtggtctctaaggttccttcagacagtagcattttatgattttgaagacaactt

SEQ ID NO: 523468 - DNA, 201 bp, Homo sapiens
tggtcacagcttggatggaggggtgctcttggcatgtaatggatcgtgtccagaaatgctgctaaacactaaacatcctacagtgtacagggcagcccccscccacccaccaaacacagaattatctggctggaaatgtcaaaatggccaaggttgagaaccctgacttaaccctttctccaatgtaactggccaaaggag

SEQ ID NO: 523469 - DNA, 201 bp, Homo sapiens
gttggtctcgaactcctgaactcaggtgatctgcccaccttggcctcccaaagtgctaggattacaggtgtgagccactgtgctcggccttgacaaatacycttacaatttctaagtgacatgtgttgaggtcttgacattgaatagtacaaaatttgatatagtctaggatgtagatgaataaagcagtggttagcactc

SEQ ID NO: 523470 - DNA, 201 bp, Homo sapiens
catccataaagcaagcaaatctcagagacagtggaacttggcttttatttccttttgtaagcatgaataaaacaaatatatttgtgtttaagaagagagartataagatatgtaatacaaatgaaatacagatccatgtaaaaatgtgaaatctgcataaaggcacaaaagaaaataagtcactataattccactatcaaa

SEQ ID NO: 523471 - DNA, 201 bp, Homo sapiens
agcatttcagctgacacccataaggtgagctaaggaggagatcaagtgttaccagttgattattttgactattattgataaaataaattggtagcttcccygcaaagtataaaattaactatagaattctcatcagatgcttgttttaaactctctctttgccgtcaccagatcagctggttcaggtgatggggtatagtg

SEQ ID NO: 523472 - DNA, 201 bp, Homo sapiens
atgtagcaatccaaaacattcaaaacaaattaaatagtttaacttatgtgacaggcagataagcatttcaaaagcataatgaagtccaattatgtagtgcwtaatgtagacaggagaagaatctaacattatgcagacattttctaaataaaagctccctgtaggacagctatatataaacatgggtaaggtaagcgcaga

SEQ ID NO: 523473 - DNA, 201 bp, Homo sapiens
tggccctaggcagtcatcactttctgaagacaacatacatgttgcatgaagtgctttcactggaaaagttgtcattcattccttgactgtaatgtataatrctatttggaactaactggtaaagaaccaataaccatggctgggttttcagtggcacactaacccatcattctatgaggtgtttctcaagctactttatat

SEQ ID NO: 523474 - DNA, 201 bp, Homo sapiens
tactgctatgtcacttttaatattacgagttttatacttggaaaatggtacttgcttcttttaaatctctgtcttctctaacctcccccttcccatttcartgctcccttcctaatttcagcaataatctcaaaaagcaattaaatagttaaatgaccctaattgtaattactgtggatggttgcattcatttgattactt

SEQ ID NO: 523475 - DNA, 201 bp, Homo sapiens
cagcagtgagtacagggtaaaggccatggccgtccgaggccgccccgaagtccaagcgatttctctcccgccgccgcaagggacgtggcgcctccacggcyggcgccttcctacggaagccgatggggcccaaaacgaactctccgggaagccccgcctccatctggctaagaaccgcccctcgctgaagactgcaagtcc

SEQ ID NO: 523476 - DNA, 201 bp, Homo sapiens
ttttattttcagctttacatttttgacaagtgcaaggtcagccagctaagatataaatattccaataatgaccaaagtaataacttctactggcatgtccycttctgagtctccattttctccactgatattcatccaaataataaaagtaacacaattgcaattgagtttactattatcaatggcactgtaaagagaaaa

SEQ ID NO: 523477 - DNA, 201 bp, Homo sapiens
ccccaaacgaaggacatgagcctttttagccaaaagggtccaatcagaaaacagcccaatgaatgagaaaattaaaaggtacaatgtcttcaaaactctgyagaaaaattagtttcaatctagaatgctatatctacatcacaaatcaactataagaataaaagtcatttttttttaccattcagctatgagcaatattca

SEQ ID NO: 523478 - DNA, 201 bp, Homo sapiens
ttaacttttttatttattatatttattatttattaacttttttattatagccatcctggttggtgtgaagtggtatctcattatggtttcggtttgcactyctctaatgattaataatgttgaccatctattcatgtgcttattgatcatttgcttatgttctttggaaaaaattctattcagttcctttgtaaatgtttt

SEQ ID NO: 523479 - DNA, 201 bp, Homo sapiens
ccttgatcattcctcttcatttattaattttgagttgaggaatttagcccactacccctcttattctctgtgagtcttttacattcttttgttattctccyatgatactacaaatcattatttcttcacccttacgcattaattctattgtgtgacacattcttctgaagacttacatgtcctcatttctgcaatttgtcc

SEQ ID NO: 523480 - DNA, 201 bp, Homo sapiens
ggtccaatcagaaaacagcccaatgaatgagaaaattaaaaggtacaatgtcttcaaaactctgcagaaaaattagtttcaatctagaatgctatatctamatcacaaatcaactataagaataaaagtcatttttttttaccattcagctatgagcaatattcatagtgataatgtaaatatggaatgctgatataacca

SEQ ID NO: 523481 - DNA, 201 bp, Homo sapiens
caatagtttgcttctaaggaatggggctcaggtcgaggaggaatgaggcaaatggcttctatctttctttataaactgatgagctttttgactttgaaaaycatacacatattactttgataaaagtaaaaacaaaatttaaaaagaaagccctctgcaattaggtcttcctccccacaacatgaatatcctgagggctag

SEQ ID NO: 523482 - DNA, 201 bp, Homo sapiens
ttttttaatggactttaaattctatttcattgatctatgtctccccttatgccagcatcatcctgttttgattattggacctttgcactaagttttaaaattggaaagcacaactcctccaattttgttcttctctttcaagattgtcttgactattctggattccttgcattttctctaggatcaactcatcagtttctt

SEQ ID NO: 523483 - DNA, 201 bp, Homo sapiens
gctttcttgtcacttccacagctagagggcctggcagagaataaatgataagaccagtcagcagtacttgctgccttaatttcagaaataaagttgaataraaaaagttactgactgcaaccaccaaacacattcttctgctgtccagacttcaaaaagtcacatacaaaatggcaatccatccaggctcagccaaaaacg

SEQ ID NO: 523484 - DNA, 201 bp, Homo sapiens
aattttgtcttttagctctgacaggtaacacacaaacagattatatgtattatactaagcattctatttgtaccaactggcttagatagaagtaagaagcmaactaagaaaaaaaaaaaaaaaacccagtaactttcaagcagcaaagccatgttaaagagaaaaaaaattcccactacaaatggcatatatggtattcac

SEQ ID NO: 523485 - DNA, 201 bp, Homo sapiens
gtttatactaaggtacaaaaacaagtgcttgacttagaaatttaactttatttacaaatgttctcctataaacaaagatgccattctacacctttaaaatrttgtaactgataatttccataaaaaccatttacatagtttcaacctttctgcataaaactgtattatgagataggcaaacaatctcacaagatggtctga

SEQ ID NO: 523486 - DNA, 201 bp, Homo sapiens
gtctcccatgctggagtgcagtggcgtggcacaatcccagctcactgcaccctccacctcccgggttcaagccatcctcctgcctcagcctcccaaatagstaggattacaggtatgcaccactggctaattttgtatttttagtagagacggggtttcacccatgttggccaggctggtctcaaactcctgacctcaggt

SEQ ID NO: 523487 - DNA, 201 bp, Homo sapiens
agggtttcaccatgttggccaggctggtctcgaactcctgacctcagatgatctgcccgcctcagcctcccaaaaggctgggattacaggcatgagccaaygcacccggccccctgtaccaggagtttttaatgtaagggcacaaatctcaatcacctgcacaaattttggaaaatacacactactgaacttcactttaaa

SEQ ID NO: 523488 - DNA, 201 bp, Homo sapiens
ttctcctataaacaaagatgccattctacacctttaaaatattgtaactgataatttccataaaaaccatttacatagtttcaacctttctgcataaaacygtattatgagataggcaaacaatctcacaagatggtctgagacataaaaacaaaagacaacctatccagcatcaatgtcctattgacaaactcaatgaag

SEQ ID NO: 523489 - DNA, 201 bp, Homo sapiens
tagctttatctaactgtggtcatctgaagtactgtgacaaacaacctaagtcttttgacagatcaaaaactacagtaggtcaccattgcatatgcaattgmccaaagagccaagataacaagaaattttatttttcactaatgcagacagatataaagaacctttctttatttactgaggaagtttcaacgtttttacatg

SEQ ID NO: 523490 - DNA, 201 bp, Homo sapiens
tacttaaaccacaacattaaaacttaagaatgctctattagcttttcttcttacctctcatcacggttcttacagatcgaataaggttcattagctgtgayttaattcccggctcttctccaaatccaccaattccctggtctgttccccagccaactgtataatgtaaagattagctgtgttaaaagttattacacactt

SEQ ID NO: 523491 - DNA, 201 bp, Homo sapiens
gagaacttgtataactgggagtaagggttgcactggaacagctagatcaatgtgaaacatctgtggatagtcccggtgcaaccccaagaacatgagtgcaytggagcctggcagacgtagacccacagggttgccactgacacttgatattagaaatatagtgcatagaagattctgtagtgtcattttactacattaaaa

SEQ ID NO: 523492 - DNA, 201 bp, Homo sapiens
gccacggtgctgggccttctgttttggtctttcttagaaaacattttgtgtatatgcctcactgatcatcccctcctccactctcttcatagtgctgactkgttgaagagacagggctagttttcactgtcactgctgagatacctcaagctctaaaaacaaaaccaccaccataaaacacacccccatatcccttcaagc

SEQ ID NO: 523493 - DNA, 201 bp, Homo sapiens
cctgcagcagtgagtacagggtaaaggccatggccgtccgaggccgccccgaagtccaagcgatttctctcccgccgccgcaagggacgtggcgcctccamggccggcgccttcctacggaagccgatggggcccaaaacgaactctccgggaagccccgcctccatctggctaagaaccgcccctcgctgaagactgcaa

SEQ ID NO: 523494 - DNA, 201 bp, Homo sapiens
tgaggcatgagaatcgcttgaacccaggagatggaggttgcagtgagctgagatagtgccactgcactccagcctgggggacagaacaagactctgtctcaaaaaaaaaaaaaaaagatacatgcagaagtaaattatctggtatactgctttttcttagttctatattatttccatttaatccctgataaaattcaacaa

SEQ ID NO: 523495 - DNA, 201 bp, Homo sapiens
aacctgatgagaggaaaggctcggcttccactccaagccgagccttccgctgttcttctgtcccggcccttggtgtcccctcacgcggccccattaggttmcgcgcccccggggactccgccgccgccccagcccgcgccccgcggtcccactcactgttcttgaggaatcgctcctcgtgcagcactgcgatggcgttga

SEQ ID NO: 523496 - DNA, 201 bp, Homo sapiens
gcaagactccgtctcaaaaaaaaaaaaaaaaaaaaaaaaaaaaaatttagctaggtggtggtgggttcctgtaatcccagctattcggcaggctgaggcaraattgcttgaacctgggaggcagaggatgcagtgagcagagatcatgccattgcactccagcctgggccacagtgcaagactccatcacaaaaaaaaaaa

SEQ ID NO: 523497 - DNA, 201 bp, Homo sapiens
ccacttgtatctacttgccctatttagaattgttcttccttgggaggccgaggtgggcagatcacgaggtcaggagttcgagaccagcctgaccaacatgktgaaaccccatttctactacaaatacaaaaattagccaggcttggtggtgcgtgcctgtaatcccagccattcgggaagctgaggcaggagaatcgcttg

SEQ ID NO: 523498 - DNA, 201 bp, Homo sapiens
ttaatttataaattagacatagtaagagattaataacagtaactcataataaaatagagtaattataacaatatgccaacatcactgctcttacactttarggtcattattaagtaaaataagggttaaacataagcactgcgatattacaacatttactctgataaccaagacaactgctaagtgactaacagctagctg

SEQ ID NO: 523499 - DNA, 201 bp, Homo sapiens
ctagtactggatatgataaatacttgtcaaactggtactggataaagcaaacaaaaactctagtaagaacaattttttgcaggtatcaaaatccacttcaytatgtggcattttttttttcttgcactaaaaggaaattaacatcattgtggaaaactggaagaaaccacatattccctgtatcactgtcaaaatattggc

SEQ ID NO: 523500 - DNA, 201 bp, Homo sapiens; identical to SEQ ID NO: 115871

SEQ ID NO: 523501 - DNA, 201 bp, Homo sapiens; identical to SEQ ID NO: 115873

SEQ ID NO: 523502 - DNA, 201 bp, Homo sapiens; identical to SEQ ID NO: 115875

SEQ ID NO: 523503 - DNA, 201 bp, Homo sapiens; identical to SEQ ID NO: 115878

SEQ ID NO: 523504 - DNA, 201 bp, Homo sapiens; identical to SEQ ID NO: 115881

SEQ ID NO: 523505 - DNA, 201 bp, Homo sapiens; identical to SEQ ID NO: 115884

SEQ ID NO: 523506 - DNA, 201 bp, Homo sapiens; identical to SEQ ID NO: 115806

SEQ ID NO: 523507 - DNA, 201 bp, Homo sapiens; identical to SEQ ID NO: 115885

SEQ ID NO: 523508 - DNA, 201 bp, Homo sapiens; identical to SEQ ID NO: 115886

SEQ ID NO: 523509 - DNA, 201 bp, Homo sapiens; identical to SEQ ID NO: 115785

SEQ ID NO: 523510 - DNA, 201 bp, Homo sapiens; identical to SEQ ID NO: 116016

SEQ ID NO: 523511 - DNA, 201 bp, Homo sapiens; identical to SEQ ID NO: 116007

SEQ ID NO: 523512 - DNA, 201 bp, Homo sapiens; identical to SEQ ID NO: 115987

SEQ ID NO: 523513 - DNA, 201 bp, Homo sapiens; identical to SEQ ID NO: 115715

SEQ ID NO: 523514 - DNA, 201 bp, Homo sapiens; identical to SEQ ID NO: 115717

SEQ ID NO: 523515 - DNA, 201 bp, Homo sapiens; identical to SEQ ID NO: 115790

SEQ ID NO: 523516 - DNA, 201 bp, Homo sapiens; identical to SEQ ID NO: 115853

SEQ ID NO: 523517 - DNA, 201 bp, Homo sapiens; identical to SEQ ID NO: 115747

SEQ ID NO: 523518 - DNA, 201 bp, Homo sapiens; identical to SEQ ID NO: 115810

SEQ ID NO: 523519 - DNA, 201 bp, Homo sapiens; identical to SEQ ID NO: 115854

SEQ ID NO: 523520 - DNA, 201 bp, Homo sapiens; identical to SEQ ID NO: 115855

SEQ ID NO: 523521 - DNA, 201 bp, Homo sapiens; identical to SEQ ID NO: 115857

SEQ ID NO: 523522 - DNA, 201 bp, Homo sapiens; identical to SEQ ID NO: 115858

SEQ ID NO: 523523 - DNA, 201 bp, Homo sapiens; identical to SEQ ID NO: 115996

SEQ ID NO: 523524 - DNA, 201 bp, Homo sapiens; identical to SEQ ID NO: 115815

SEQ ID NO: 523525 - DNA, 201 bp, Homo sapiens; identical to SEQ ID NO: 115869

SEQ ID NO: 523526 - DNA, 201 bp, Homo sapiens; identical to SEQ ID NO: 115966

SEQ ID NO: 523527 - DNA, 201 bp, Homo sapiens; identical to SEQ ID NO: 115916

SEQ ID NO: 523528 - DNA, 201 bp, Homo sapiens; identical to SEQ ID NO: 116020

SEQ ID NO: 523529 - DNA, 201 bp, Homo sapiens; identical to SEQ ID NO: 115707

SEQ ID NO: 523530 - DNA, 201 bp, Homo sapiens; identical to SEQ ID NO: 115980

SEQ ID NO: 523531 - DNA, 201 bp, Homo sapiens; identical to SEQ ID NO: 115981

SEQ ID NO: 523532 - DNA, 201 bp, Homo sapiens; identical to SEQ ID NO: 115984

SEQ ID NO: 523533 - DNA, 201 bp, Homo sapiens; identical to SEQ ID NO: 115898

SEQ ID NO: 523534 - DNA, 201 bp, Homo sapiens; identical to SEQ ID NO: 115964

SEQ ID NO: 523535 - DNA, 201 bp, Homo sapiens; identical to SEQ ID NO: 116029

SEQ ID NO: 523536 - DNA, 201 bp, Homo sapiens; identical to SEQ ID NO: 115965

SEQ ID NO: 523537 - DNA, 201 bp, Homo sapiens; identical to SEQ ID NO: 115915

SEQ ID NO: 523538 - DNA, 201 bp, Homo sapiens
caaaagaaccatgactgagtttactttagaaaggaagttctaattggagataagaaacacaagtatacaaaattcctgcttgaagattacataactttttstctgcagatccacctgaaacaaattttagaattatggtcttagaagtggttaccttgaactgagtaggtgcatttagttcaccctgaatcgtatccagct

SEQ ID NO: 523539 - DNA, 201 bp, Homo sapiens
gcggttgtcacaaagtcaaatgtgacttttccccttgattcacaggtattgccaactgagataggaatagctgtgattagtaaaagggagctaataagtawgaggaatacatggacgggcatctctatactgagataggacaagcagtggtcctaacaatgctgctcgctaatttatggtcaaaatcctacttggcttggg

SEQ ID NO: 523540 - DNA, 201 bp, Homo sapiens
aagggattttattttctctttggttttttttttttttttttgagacagagtcttgctctgtcacccaggctggagtccagtggtgcgatctcagctcactrcaacctctgcctatggggttcaagcaattctcatgtctcagcctcccgagtaactgggactacaggtgtgcactaccacgcccatctaatttttgtattt

SEQ ID NO: 523541 - DNA, 201 bp, Homo sapiens
gagtaagctgcatgttgcatgcaggcacaactaaatattctatttacttgtaggttctactgcagtactgcaaactataaacattttcataaaagtcaccyacagtactaagcactgttgtaatttcttttcattattcttcacttccatagaataactatgatataatctgaattggctacgcaatagaaacactagtca

SEQ ID NO: 523542 - DNA, 201 bp, Homo sapiens
gaaaacgcttttgagacaaatagggaactctggttatagatggggtattagatagtaccaaggaattattgtgggttggaatgaggtacacatttttaaasagagaagtatagtaaagtaagcatgaaatgacacgcttgggatttgctctcaaatacatcagtgatttaaaaaaaggaaaaaggagatggacaataacaa

SEQ ID NO: 523543 - DNA, 201 bp, Homo sapiens
ggtaggaaaaaactagactggagtgtcacagaagttaaggtctcccactggccaaatgcaacaactgaaacatatttattaaagcccatgcattcaaaatrgtaattttataaagtaaagatcaaattttttttaaatcctaactccttggataccattagaaataatgagaccgccaactcctttttacaaaaattgtcc

SEQ ID NO: 523544 - DNA, 201 bp, Homo sapiens
ttgttaagaaacaatacgagaatgtaaaagacaaattttctctcatacccccaagacaaatagtgctaactgatgttcattcccctgtacctttctccttrctcatcatacagagagagcacacacacacagatccaaaataaaactaaactgtatatatcactctgtgacatggttcctttttttggttgttgtttttgt

SEQ ID NO: 523545 - DNA, 201 bp, Homo sapiens
atacataatttgttatggaaaatgcattaccaaatggacctaaatactctcactggctgataaagagattttctgaagagacaaatgagaaggttgtttgrtaggcagggaataagaacacagaaaatgggcaatattgttttaatagctttggggttatacatgccaaggggaatttctgtctgctggttagggtatact

SEQ ID NO: 523546 - DNA, 201 bp, Homo sapiens
gcttttggattttctttactcctcccacagatgagttcacaaatacaaaaactggtgtacatttatactcaagtacaaatctccaacagccaagtaattayagtttcttctgttatgtgcaaagtagattatttcatatttacttggtatggaaagcagagtacaggctcaatggacaataatcattaaacacagattatg

SEQ ID NO: 523547 - DNA, 201 bp, Homo sapiens; identical to SEQ ID NO: 115914

SEQ ID NO: 523548 - DNA, 201 bp, Homo sapiens
tgtttaaagtaggctaggctaggctatgatgcttggtaggttaggtgtattaaatgcatttctgaattacaatattttcaattatgatgggtttattgggmtgtaacccataataagttgaggagtatctgtatatctgattcatggaatcttaaactaagttttaaatatataaagaagtaatttacaaataaatacttt

SEQ ID NO: 523549 - DNA, 201 bp, Homo sapiens
aaaggcaacttctttttaaaattattttataattgctacatataaaatcaaaatatattgatctaatttttcctttccctactttcaagatcaattttttwaaaaactatactaccaatcaagaagtcaaaatgttacaagaaatgaactaagcatttaaaatagaaatatcacaatgtaatatatacccttcaattaaag

SEQ ID NO: 523550 - DNA, 201 bp, Homo sapiens
aaaaaaaaaaaatctgacctctacttcatttacttctacgaatgacttaagatggcctcttaccagtagtgcctgtgttagttggggcagaaaagctgaaygcagaacctgcagttgtagatgttgtcccaaatcctccaaacccacctaattaaaaaagaacaaaaatagaaaggaagaatcttttgtatatataaaggc

SEQ ID NO: 523551 - DNA, 201 bp, Homo sapiens
ttgtcttggaagtagcagtcaaggccatctgctaaaagtaagaacagataaatttgagatttgaagagaataaaggtttaaaattactgctatagaaagcrggagaataagttgaaagtagaaatttcacaggattaccaggcaacattgagacctgaggttggtgatcaagaatttagagaggtattatcccctcttcca

SEQ ID NO: 523552 - DNA, 201 bp, Homo sapiens
tggtaattatgcacttcttttaaagtaaatacagcttttagatataaatctttcaaaggttttctttgaagagctgtgaggtgactatttcagatttgatraacagtaatttgtcagtaaacttctcaaaaaaccaatccaagaaagaattgttttctttttccctccatgtggtcggtttcattcttaaggaaggtctga

SEQ ID NO: 523553 - DNA, 201 bp, Homo sapiens
agccaggcgtggtggtgggcgcctgtagtcctagctacttgggaggctgaggcagaacaatggcgtgaacccaggaggcggagcttgcagtgagccgagaytgcgccactgcactccagcctgggcgacagaacgagacccccatctcaaaaaaaaaaaaaaaaaaaaaatggacccactatttagagaaaaataaatctg

SEQ ID NO: 523554 - DNA, 201 bp, Homo sapiens
ggattttctttactcctcccacagatgagttcacaaatacaaaaactggtgtacatttatactcaagtacaaatctccaacagccaagtaattatagtttsttctgttatgtgcaaagtagattatttcatatttacttggtatggaaagcagagtacaggctcaatggacaataatcattaaacacagattatgtttaag

SEQ ID NO: 523555 - DNA, 201 bp, Homo sapiens
taaagcaccagacagaattatataaaagtaattacaaattaagaatttatttataagttttcatctttttagaaataaaaaggcttaaaaaacaaaatggwtgcaaaaatggttaagtagttttgttatatcctaattgcttaggtgtgctctgtaaattccaaataagtaaaataatataaaaatacattttcatatctt

SEQ ID NO: 523556 - DNA, 201 bp, Homo sapiens
aaaaaaaaaatggacccactatttagagaaaaataaatctgagttcataccacatactttatataaaggtaaacttcatgatgacaacaaaagactcaaaygtgaaaggttaaactctaaattttttttaatgtaggatactctcagactttggggtgaaaaattatttaagcaaattcccaaaaagaaaatacaaggcaa

SEQ ID NO: 523557 - DNA, 201 bp, Homo sapiens
ttttatgaaatttatgagacatcaataatctcacagaagcttcccttgcactaagatgctttatttcttcactgctttccctcaaactgtcactaaaataygaactttaggatatttttattctcctcactcaaacctatgagacttgttttccaatttcaaagttttactgaaagaattcggtacttgtaatttcacatt

SEQ ID NO: 523558 - DNA, 201 bp, Homo sapiens
gatccccaggtcggagagtctcggacagagggggcggaccagacccttccccttcttcccgggtgaaggtctagggggatcactcacccgcgggggccgcrgtggctgcagcggtaccggaggtgcccgagggagccccaaaattgaaggccatgtcgcgaaagcaggagaccaagtaggttactcctgcgacgcgcagcg

SEQ ID NO: 523559 - DNA, 201 bp, Homo sapiens
tctagtactctcctcttactctggaatcaggtctcctaaattacatcatccatatctaccactttaaatactacttacgttctgatggctttcataaatayatacaactacccaagggacacctcaaactcattatctacccacaaacatctgctcttgctttagtattctggatcttagtgaagagcaagggatccttca

SEQ ID NO: 523560 - DNA, 201 bp, Homo sapiens
agagactacaatctagagtaaatgattactgaagttcaataaagaaaaaataggaagcccagtggaaacactggccaaagatatgaatgatttcagttctrgacaagatggactaagcatatacaaccccaatctctcccatttaatatagctataaaacttggatggaatacacggggcagctatttgggaactctggca

SEQ ID NO: 523561 - DNA, 201 bp, Homo sapiens
acaaccatttattgtgtttcaaatagctataggagtgaatttcccatgataccaacaaatgataaatgtatggggtaatggatatgctaattactttattygatcattacacactatatccatgtattgaattatcacactatgccccataaatatgtagttatgtatcgattaaaaacaataaaagaaaaggccattaga

SEQ ID NO: 523562 - DNA, 201 bp, Homo sapiens
ccctggctgaaactggaaatgacagtctaattaatccactaagacaagaattctaaattcattattatatcaaatcagattcatgtgatttggggacttcwatcataaagaaggtagttgtataaaactattaaattgcagtgtatgctacattgtttcctgattaagataaaacagtagcacatatactaaaaagaatta

SEQ ID NO: 523563 - DNA, 201 bp, Homo sapiens
catctaggaattgatccaagaaagaacgcatgagattttaaaagggaatattttaaaattattttaaaggacataaaagactacaaggattaaagagacayaccacattcatggatgaaatgatttaatattaaaattcaattcccacaaattagtctttgcatttaatgcaattccaaccataattctagcattctgaca

SEQ ID NO: 523564 - DNA, 201 bp, Homo sapiens
ggaaaacccgggaggcagagcttgcagtgagcctagatcgcgccactgcactccagcctgggcaacagagcgagactctgtctcaaaaaacagacaaacawaaactatggtatggcttaaaagcagtacaaaaaaatagacaacataataccagtttcagacatttactcacagcctttccaaataaagtgttctttaaag

SEQ ID NO: 523565 - DNA, 201 bp, Homo sapiens
ttcaccctgaatcgtatccagctgaactcgcaactgctcttcatcagcctgaatggcataaccactcttcctttgaatttcctgtttgattaggacctatrcaaataaaaaccaccaataacaacagaatcatctctttttagttatgcaagtagtagtagtacaattagttactgaaagaaatcagctgaaaatcaaaca

SEQ ID NO: 523566 - DNA, 201 bp, Homo sapiens
actgccgacgaagacttgtaaaagacaatgttttcttctgaaaggatggtttcaaaaccatctattaaaaatttctatttctctctctgtacattatattygaaacactaatactagccaaaagaaccatgactgagtttactttagaaaggaagttctaattggagataagaaacacaagtatacaaaattcctgcttga

SEQ ID NO: 523567 - DNA, 201 bp, Homo sapiens
catgtattgacatgaaaagtgctaaggaatactgtaaaaaggcaagctgaaggtgtatatggagaatccttttttaaaagatctacatgtaaatatgcttrcatttcaaatcacagataaaggattaaacatagtaccataaattgacagtagttacttccggggaaaggaactaaaggtaatctatcacatagtcaatct

SEQ ID NO: 523568 - DNA, 201 bp, Homo sapiens
atactttggaagtcttacctaataattttaaagatctattcaaaattataatccaaatgcttatcatttggaagataagtgcacatttaataaaggaacaytgtaacttgcaaaactttcctaaaccacatcttttaaggcagtaaaaacttgatacagatgtttttgattcgagataaggaaataaatttcctttcccta

SEQ ID NO: 523569 - DNA, 201 bp, Homo sapiens
gcttccaacgtacttgggtatatatccagaagtagacctgctagatcatatcgtaattctatctttaattttttgagtaaacactacactgttttccatasaggctgaaccattttacattcccccaacagtgcaagaaagttccaatttctccacattctcactaacacttttcttattaggataatagccatcctaata

SEQ ID NO: 523570 - DNA, 201 bp, Homo sapiens
gtaggttaaaatctcactattttattaaagcatcccaatcagaattaatcccataattgtctctatcataattaatcattctatgccactggcttacattwacatgttacaagaaagaggttaagattgtgcaagacatattttagcacatccacctgcacacatcaccttttacagaaactttccaatgccaggccatgc

SEQ ID NO: 523571 - DNA, 201 bp, Homo sapiens
ttctttgattgattcttgggttatctccacattttgactattgtgaataaagatgctatgaacatgggtgtacaaatatgttttgagtccctgcttccaaygtacttgggtatatatccagaagtagacctgctagatcatatcgtaattctatctttaattttttgagtaaacactacactgttttccatagaggctgaa

SEQ ID NO: 523572 - DNA, 201 bp, Homo sapiens
cttatttcatgaagcataacttcttcaaggtcaaattgcattgtagcatgtgtcagaatttcattcttttttcaaggctgaataatattccattgtgtgtmtatatactacattttgtttctctattctttgattgattcttgggttatctccacattttgactattgtgaataaagatgctatgaacatgggtgtacaaa

SEQ ID NO: 523573 - DNA, 201 bp, Homo sapiens
tgctccaaaatgattctgcatcctgatttgagacatcaattcatttagtcggccctaaaagttaagactgagtcaaattacaactgccgacgaagacttgwaaaagacaatgttttcttctgaaaggatggtttcaaaaccatctattaaaaatttctatttctctctctgtacattatattcgaaacactaatactagcc

SEQ ID NO: 523574 - DNA, 201 bp, Homo sapiens
agcagaaaagtagaaacaggaatgaaaaacagaggctacaaacacaaaacaaataaatggtaggactaaatccaaactttttgctgtctacaagaatctcrcttcaaatataacaatataggtaggttaaaagcaaaaagatggacaaaggtatgccatacaaacactttttatcaaaagaaaggtagcgtggctatgtta

SEQ ID NO: 523575 - DNA, 201 bp, Homo sapiens
agctagtcaatcaagttacttaaaaaaatgaaacagaagtaattttaagaggcatcagattggaaaagtgaaaagagcactagaatgagtagttgaatttrcatccctgtacttcttctagagaggtatacaggtaagtcacaatctctcaggttcctctcttcacccataaaatggggataacaaaagtattatttcaca

SEQ ID NO: 523576 - DNA, 201 bp, Homo sapiens
tgccaatcagtgttctccccagttgctatcatatttaaacatgaaaagtaacattcctaatcctttggaatatattaataattcttataaaaagtccactraagtattctgaatgcactcaataatgtcagctagtatcattacggttttgtatttgaagctgaaaacctcatacttactagtttgctgctgctgctgtgt

SEQ ID NO: 523577 - DNA, 201 bp, Homo sapiens
caaaaaatggtcattcctcaaaagccaaataaagcaccagacagaattatataaaagtaattacaaattaagaatttatttataagttttcatctttttaraaataaaaaggcttaaaaaacaaaatggttgcaaaaatggttaagtagttttgttatatcctaattgcttaggtgtgctctgtaaattccaaataagtaa

SEQ ID NO: 523578 - DNA, 201 bp, Homo sapiens
tgaaaagtaacattcctaatcctttggaatatattaataattcttataaaaagtccactaaagtattctgaatgcactcaataatgtcagctagtatcatyacggttttgtatttgaagctgaaaacctcatacttactagtttgctgctgctgctgtgtattaaatcctccaaatcccagtccagttcccaaaccagtac

SEQ ID NO: 523579 - DNA, 201 bp, Homo sapiens
gacacagcaatttcactcctaggtttatacccaagagaaatagaagtatatgtccaaacaaacacttgtaaataaattttaatagcaatattattcataayagccaaaaaggagaaccaccaaaatgtccatcaattgagtaaaatgtggtatagccatatgatggaatattcagcaataaatgaataataatcatttatt

SEQ ID NO: 523580 - DNA, 201 bp, Homo sapiens
aatttcactcctaggtttatacccaagagaaatagaagtatatgtccaaacaaacacttgtaaataaattttaatagcaatattattcataatagccaaaraggagaaccaccaaaatgtccatcaattgagtaaaatgtggtatagccatatgatggaatattcagcaataaatgaataataatcatttattagtacctg

SEQ ID NO: 523581 - DNA, 201 bp, Homo sapiens
gtatatgtccaaacaaacacttgtaaataaattttaatagcaatattattcataatagccaaaaaggagaaccaccaaaatgtccatcaattgagtaaaaygtggtatagccatatgatggaatattcagcaataaatgaataataatcatttattagtacctgaagtactattacatggtacaacacagttgaactttga

SEQ ID NO: 523582 - DNA, 201 bp, Homo sapiens
tttactttagaaaggaagttctaattggagataagaaacacaagtatacaaaattcctgcttgaagattacataactttttgtctgcagatccacctgaawcaaattttagaattatggtcttagaagtggttaccttgaactgagtaggtgcatttagttcaccctgaatcgtatccagctgaactcgcaactgctcttc

SEQ ID NO: 523583 - DNA, 201 bp, Homo sapiens
aacctttgttctgagtaccaccaaagagtcctttgaatgaaaaattggaacttcgtaagttaaaaaaaaaaaaatctgacctctacttcatttacttctaygaatgacttaagatggcctcttaccagtagtgcctgtgttagttggggcagaaaagctgaatgcagaacctgcagttgtagatgttgtcccaaatcctcc

SEQ ID NO: 523584 - DNA, 201 bp, Homo sapiens
gaattgatccaagaaagccatctaggaattgatccaagaaagaacgcatgagattttaaaagggaatattttaaaattattttaaaggacataaaagactrcaaggattaaagagacataccacattcatggatgaaatgatttaatattaaaattcaattcccacaaattagtctttgcatttaatgcaattccaaccat

SEQ ID NO: 523585 - DNA, 201 bp, Homo sapiens
ggcaaacccatataggcaaaactggttgcataggactgacagatttgcagtgaaacggggaagtgactgacaatgggtacgggatttgtctgtagggtgayagaaatgttctaaaattgattgtggtaataacggttatacaagtctctgaatatactaaaagccattgaattgtacactttaaatgagtaaatagtatgg

SEQ ID NO: 523586 - DNA, 201 bp, Homo sapiens
tggaaatgacagtctaattaatccactaagacaagaattctaaattcattattatatcaaatcagattcatgtgatttggggacttctatcataaagaagktagttgtataaaactattaaattgcagtgtatgctacattgtttcctgattaagataaaacagtagcacatatactaaaaagaattaaatgtctataatc

SEQ ID NO: 523587 - DNA, 201 bp, Homo sapiens
aattgtctagaataatcaaaataacactggattagctcttttgtggttagacaaaatttggcaatgaaactatctgtccctaaggcctttttcatgtttcrtctttcatttttccaactgtttctgtggtatttgttttcttacttctctgtagattttggtaattttcattttcatagaaaaatcaaaataaaacttcct

SEQ ID NO: 523588 - DNA, 201 bp, Homo sapiens
ttgtagatgtgattaaattaagcatgctgagatagagggttatcctggattatcaggagggactcaacgtaatcataagatcctcaaaagtggaagagtgmgctcagagtcaaacagatctgaagatgctatgctgttggcatatggcaagatggaagagccgcgagccaagaaatgcaggaagactctaaaaactggaaa

SEQ ID NO: 523589 - DNA, 201 bp, Homo sapiens
tcaaaagtggaagagtgagctcagagtcaaacagatctgaagatgctatgctgttggcatatggcaagatggaagagccgcgagccaagaaatgcaggaakactctaaaaactggaaaatgcaagagaatggattctcccttagtgcctctagaagtaacgcagtactgccaggaccttcattttagcacagtgaaaccca

SEQ ID NO: 523590 - DNA, 201 bp, Homo sapiens
aactggactagaactcagaacacttgaatcctggtttattataaggtcgctttctatccttgagcaagaaattcctgggctttatcttcctcaacttttamatgagatgaatcaactgtgatctctataccgagacatatgcagtcagcctcccatgctgttgattattcctttggcccccaaagaaaatcttcaccttct

SEQ ID NO: 523591 - DNA, 201 bp, Homo sapiens
attcttaatactagatgatatctgaagtaagttttacttgccataccctaatcaaaatataacagcactgacaaaaatccctaggaggcaaaaataagacwtaagactaaaattcctgacttgtgattatgaatttagtacctatgtggacaaaaaatggtcattcctcaaaagccaaataaagcaccagacagaattata

SEQ ID NO: 523592 - DNA, 201 bp, Homo sapiens
acttttacatgagatgaatcaactgtgatctctataccgagacatatgcagtcagcctcccatgctgttgattattcctttggcccccaaagaaaatcttyaccttctgttgaatacacatcctccttgaaagcccttctcccttaaatttcctgacaacacagtctctcttggttttttataaacacattcattcattca

SEQ ID NO: 523593 - DNA, 201 bp, Homo sapiens; identical to SEQ ID NO: 115760

SEQ ID NO: 523594 - DNA, 201 bp, Homo sapiens; identical to SEQ ID NO: 115761

SEQ ID NO: 523595 - DNA, 201 bp, Homo sapiens; identical to SEQ ID NO: 115762

SEQ ID NO: 523596 - DNA, 201 bp, Homo sapiens
acagaactcaaaggaggtattcaaatatagatgactagcaaaataacattctgaaaactgagaatattcatgttttgaagtacaaagtacatagtgataayggtggtgatgactacagatgctaacatttttttaagactcctcctcatgggttaaggtgctgttttaacagtactggtattcactcacttaactcattta

SEQ ID NO: 523597 - DNA, 201 bp, Homo sapiens
agcaaagttggccgggcgcagtggctcacgcctgtaaccctagcactttcgggaggccgagatgggtggatcacgaggtcaggagatcgagaccatcctgrttaacacggtgaaaccccgtctctactaaaaatacaaaaaattagccgggcgtggtggcaggcgcctgtagtcccagctactccggaggctgaggaagga

SEQ ID NO: 523598 - DNA, 201 bp, Homo sapiens
ggatatacattttgtttttacactacaatgccataataaacatttttgtagctttgactctataaacaatgctgtaataaattttgtagctttgacactayaatgctataataaacattttggtgcatatatctatttaactggtatagatctttaacaatgaggctgagttttaaagtatgtacgttttcagttctaaag

SEQ ID NO: 523599 - DNA, 201 bp, Homo sapiens; identical to SEQ ID NO: 115764

SEQ ID NO: 523600 - DNA, 201 bp, Homo sapiens
cgtgatatgaagcacacagcaccacttgcaaaatgttcttaccaaaaaagcaaacgtcaagtccctaaagcaaactttatttaccacaattatgagagataaagttaaataatattacaaggaagcagaagaagaaaaatacagaatggggggcatttaacaagacaactggaaaattcatgagggaaaaaacagaatggg

SEQ ID NO: 523601 - DNA, 201 bp, Homo sapiens
aaattcattattatatcaaatcagattcatgtgatttggggacttctatcataaagaaggtagttgtataaaactattaaattgcagtgtatgctacattktttcctgattaagataaaacagtagcacatatactaaaaagaattaaatgtctataatccctttccctacttccagggccagggaataaaaagctaaatg

SEQ ID NO: 523602 - DNA, 201 bp, Homo sapiens
aaataggcctataaaatagtcttgcaaacaaacaacaaaacaacaaaatatatatatgtacgccccagatctaacccaatcatcaagaaatacagagaacmaaggaatgtgttaaactataccataggcgtgcaatcagaaaagtcttgactaaaaaactctataggataaatgatctgttttcttcaacaaattaaaaaa

SEQ ID NO: 523603 - DNA, 201 bp, Homo sapiens
cactaaagtattctgaatgcactcaataatgtcagctagtatcattacggttttgtatttgaagctgaaaacctcatacttactagtttgctgctgctgckgtgtattaaatcctccaaatcccagtccagttcccaaaccagtacctaaaccagtactagttcccgttgttgtgccaaaaccagtaccaaatccaaaacc

SEQ ID NO: 523604 - DNA, 201 bp, Homo sapiens
tctggtttcctcccaaaactttatgcaatgattctaccaactgttgttgttggcttcgaatctctgtttcttttttgttgaaaactaaaaccactagcccrtcttcatctttattactgggcatgcaactataacctactgcctgtggaatgacaaaataaacaatataaaaaatatgtacagatcttaaatcaggtgttt

SEQ ID NO: 523605 - DNA, 201 bp, Homo sapiens
atgactgcaggagtccaagaatcccaggatgggcttgactggtggtgagtttatactttggaagtcttacctaataattttaaagatctattcaaaattayaatccaaatgcttatcatttggaagataagtgcacatttaataaaggaacattgtaacttgcaaaactttcctaaaccacatcttttaaggcagtaaaaa

SEQ ID NO: 523606 - DNA, 201 bp, Homo sapiens
tcttcatctttattactgggcatgcaactataacctactgcctgtggaatgacaaaataaacaatataaaaaatatgtacagatcttaaatcaggtgtttmatattaatagcttaatatctgctaaaatgggaaaaacaacttaatgtctggtaattaagggaataatgattcttcccaccattttgtgccctaggaggtc

SEQ ID NO: 523607 - DNA, 201 bp, Homo sapiens
gaaatctcaatgaaagatgcagaaaaaatgaaaaatgactgcaggagtccaagaatcccaggatgggcttgactggtggtgagtttatactttggaagtcytacctaataattttaaagatctattcaaaattataatccaaatgcttatcatttggaagataagtgcacatttaataaaggaacattgtaacttgcaaaa

SEQ ID NO: 523608 - DNA, 201 bp, Homo sapiens; identical to SEQ ID NO: 115864

SEQ ID NO: 523609 - DNA, 201 bp, Homo sapiens
ctaatgagctgcaaacaacccacgtgcatatgaaaatcttcataattatctttttgaatgcaaagacgtctagcttaccttttagaattcgatgctatatsacataaaactaaactgctctctttgagcatttcccaaaattccagcaaagaactggggattctttctataattacaaatcttatagaaattacacatctt

SEQ ID NO: 523610 - DNA, 201 bp, Homo sapiens
tgaaggttaacacatataaaagtagttaaaacatgttacattatcataactcaaaacttaacagtgataactccaaatgaacatgaaatcaagcaaatacyaacaagtttatttattgttgttgaattatgagctgggtggctttattcagaaacacaaatttcaaagtaagatttctgttttacccagtgccaattttaa

SEQ ID NO: 523611 - DNA, 201 bp, Homo sapiens
gtatacaaaataaaaagtaaacaagaaagtctatcagccctttgctgaaggttaacacatataaaagtagttaaaacatgttacattatcataactcaaarcttaacagtgataactccaaatgaacatgaaatcaagcaaatactaacaagtttatttattgttgttgaattatgagctgggtggctttattcagaaaca

SEQ ID NO: 523612 - DNA, 201 bp, Homo sapiens
acctgccaccatgcccagctaatttttgtatttttagtagagtcggggtttcaccatcttcgccaggctggtcttgaactcctgacctcgtgatccacccrcctcggcctcccagagtgctgggattacaggcgtgagccactgcgcccggccaggatctcattttttttctttaatctgcaattcccagattcctagtaa

SEQ ID NO: 523613 - DNA, 201 bp, Homo sapiens
acctatgagacttgttttccaatttcaaagttttactgaaagaattcggtacttgtaatttcacattattctttcattttagtatttttttttctattttwaaaatctatatttagtacattatttcacacacatagtcttataaacactgggggggaaaatccaaattactacctgtaaagttctatgggaaagatccat

SEQ ID NO: 523614 - DNA, 201 bp, Homo sapiens
ttagtaatagcagatctgcaagtatacaaaataaaaagtaaacaagaaagtctatcagccctttgctgaaggttaacacatataaaagtagttaaaacatrttacattatcataactcaaaacttaacagtgataactccaaatgaacatgaaatcaagcaaatactaacaagtttatttattgttgttgaattatgagct

SEQ ID NO: 523615 - DNA, 201 bp, Homo sapiens
gctggagtgcagtggcgtgatctcggctcactgcaacctccgcctcccaggttcaagcaattctcgtgcctcagcctcccaagtaactggaactacaggcrcaagcaaccatgcctggctgatttttttgtattttagtagagatggggtttcaccgtgttgcccaggctggtcttgaactcctgagctcaggcaatccac

SEQ ID NO: 523616 - DNA, 201 bp, Homo sapiens
ggggtttcaccgtgttgcccaggctggtcttgaactcctgagctcaggcaatccactcacctcggcctcccaaagttctaggattacaagagtgagacacygtgcccggcccatgcagtatcttcttattctgttttgtatatctacgatgatgcctcttttcccactactaattttgtatattttactctgtttttccct

SEQ ID NO: 523617 - DNA, 201 bp, Homo sapiens
caatccactcacctcggcctcccaaagttctaggattacaagagtgagacaccgtgcccggcccatgcagtatcttcttattctgttttgtatatctacgrtgatgcctcttttcccactactaattttgtatattttactctgtttttcccttcttccagctgatgagatgcttagtaattttaacggtcttttcaaaga

SEQ ID NO: 523618 - DNA, 201 bp, Homo sapiens
aatatttctgttttcatgatagtttataatttcagttgttattattcttttaattcctcctgttaatttggaaattctattgtttttcgaccattatggtkacactcctttttctagcactcaaaaaattttctgaactattttatgaaactattttatgaaatttatgagacatcaataatctcacagaagcttcccttg

SEQ ID NO: 523619 - DNA, 201 bp, Homo sapiens
ggggatggagccgagatcgtgccactgcactccagcctgggcaacagagtgaaactccatctcacagaaacaaaaaacaaaaaacagagtgagactccatcacacacacacacacacacacacacacacacacacggctgggcacagtgggtcactcctgtaatcctagcactttgggaggccaaggcaagaggagtgctt

SEQ ID NO: 523620 - DNA, 201 bp, Homo sapiens
gggatggagccgagatcgtgccactgcactccagcctgggcaacagagtgaaactccatctcacagaaacaaaaaacaaaaaacagagtgagactccatcacacacacacacacacacacacacacacacacacggctgggcacagtgggtcactcctgtaatcctagcactttgggaggccaaggcaagaggagtgcttg

SEQ ID NO: 523621 - DNA, 201 bp, Homo sapiens
aacagagtgaaactccatctcacagaaacaaaaaacaaaaaacagagtgagactccatcacacacacacacacacacacacacacacacacacggctgggmacagtgggtcactcctgtaatcctagcactttgggaggccaaggcaagaggagtgcttgagaccaggattttgagacaagcttgggcaaaatggcaagac

SEQ ID NO: 523622 - DNA, 201 bp, Homo sapiens
tagttcccgttgttgtgccaaaaccagtaccaaatccaaaacctttgttctgagtaccaccaaagagtcctttgaatgaaaaattggaacttcgtaagttaaaaaaaaaaaaatctgacctctacttcatttacttctacgaatgacttaagatggcctcttaccagtagtgcctgtgttagttggggcagaaaagctgaa

SEQ ID NO: 523623 - DNA, 201 bp, Homo sapiens
gaaatagatcacatatatatatgcaaacagtgtaatttaaattctttgataatcattgaggaatatcatatttttataggcaatattaaaaatatagggcygggcgcagtggctcacgcctgtaatcccagcactttgggaggccaagacgggtggatcacgaggtcaggagatcgagaccatcctggctaacacggtgaa

SEQ ID NO: 523624 - DNA, 201 bp, Homo sapiens
tgaggcaggagaatggtgtggacccgggaggtggagcttgcagtgagccaagatcttgccactgtactccagcctgggcgacagggtgagactccgtctcaaaaaaaaaaaaaaaaaaatttattggtttttaaaccctaattcaactacttttttttgcaaggaattcaaatgttttgaaaacagcatgccaaacatatc

SEQ ID NO: 523625 - DNA, 201 bp, Homo sapiens
aaataatgatgataatattgggtgtccgttgtctagtttctaaatgcgattttagtgttttgccttttggagtatttgctattcatttttggttacagttyctattatatattttcctttaatgtgttgctataataagtcatgttgatagatgtcctgttattaaaaccaaccttgcattcctgaaataaactttacttg

SEQ ID NO: 523626 - DNA, 201 bp, Homo sapiens
aatcattgaggaatatcatatttttataggcaatattaaaaatatagggccgggcgcagtggctcacgcctgtaatcccagcactttgggaggccaagacrggtggatcacgaggtcaggagatcgagaccatcctggctaacacggtgaaaccccatttctactaaaaatacaaaaaattagccaggcgtggtggtgggc

SEQ ID NO: 523627 - DNA, 201 bp, Homo sapiens
tgcaaaatgttcttaccaaaaaagcaaacgtcaagtccctaaagcaaactttatttaccacaattatgagagataaagttaaataatattacaaggaagcagaagaagaaaaatacagaatggggggcatttaacaagacaactggaaaattcatgagggaaaaaacagaatggggaattctctacactaaaaagaactta

SEQ ID NO: 523628 - DNA, 201 bp, Homo sapiens
aggaatacatggacgggcatctctatactgagataggacaagcagtggtcctaacaatgctgctcgctaatttatggtcaaaatcctacttggcttggggrtaggagatggcagcatttaagtgttagtgtttctaagagttttgttctagtactctcctcttactctggaatcaggtctcctaaattacatcatccatat

SEQ ID NO: 523629 - DNA, 201 bp, Homo sapiens
gcaaaatgttcttaccaaaaaagcaaacgtcaagtccctaaagcaaactttatttaccacaattatgagagataaagttaaataatattacaaggaagcagaagaagaaaaatacagaatggggggcatttaacaagacaactggaaaattcatgagggaaaaaacagaatggggaattctctacactaaaaagaacttaa

SEQ ID NO: 523630 - DNA, 201 bp, Homo sapiens
caaaatgttcttaccaaaaaagcaaacgtcaagtccctaaagcaaactttatttaccacaattatgagagataaagttaaataatattacaaggaagcagaagaagaaaaatacagaatggggggcatttaacaagacaactggaaaattcatgagggaaaaaacagaatggggaattctctacactaaaaagaacttaag

SEQ ID NO: 523631 - DNA, 201 bp, Homo sapiens; identical to SEQ ID NO: 309110

SEQ ID NO: 523632 - DNA, 201 bp, Homo sapiens; identical to SEQ ID NO: 309111

SEQ ID NO: 523633 - DNA, 201 bp, Homo sapiens; identical to SEQ ID NO: 309112

SEQ ID NO: 523634 - DNA, 201 bp, Homo sapiens
cctggccaatagtagccatcttaatgggtgtgaggtggcatctcattgtagttttgatttgcatttctctaatgattaatgatatggaatatcttttcatrtgcttactggccatttgtatatcttctttggagaaatgtctattcaggtcctttgcccattttttttttgttttgagacagagtctcactctgtcactca

SEQ ID NO: 523635 - DNA, 201 bp, Homo sapiens; identical to SEQ ID NO: 309113

SEQ ID NO: 523636 - DNA, 201 bp, Homo sapiens; identical to SEQ ID NO: 309114

SEQ ID NO: 523637 - DNA, 201 bp, Homo sapiens
acttttaaaagttgtccaaaagtaattttgggaaatgattgcaaatttgtatttttttaaaatgtgagcacaaatcacaggtgtggaagactcaagttctstatgttcttcctaatatttattaagacacttcccttgatggctacataattttattttgcctggcataattaatagaattatttcctttgacataactat

SEQ ID NO: 523638 - DNA, 201 bp, Homo sapiens; identical to SEQ ID NO: 309115

SEQ ID NO: 523639 - DNA, 201 bp, Homo sapiens; identical to SEQ ID NO: 309116

SEQ ID NO: 523640 - DNA, 201 bp, Homo sapiens
aggccgaggcaggcgaatcacgaggtcaggagttcaagaccagcctggccaatgtggtgaaaccccgtctctactaaaactacaaaaaaaaaaaaaaaaaattagctgggcgtgtgggtgggtgtctgtaatcccagctacttgggaggctgaggcaggggaatcgcttgaacctgggaggcggaggttgcagtgagctga

SEQ ID NO: 523641 - DNA, 201 bp, Homo sapiens
ttttaaaatgtgagcacaaatcacaggtgtggaagactcaagttctctatgttcttcctaatatttattaagacacttcccttgatggctacataattttrttttgcctggcataattaatagaattatttcctttgacataactatcattgtatcctggtacaaaagattctgctttcaaaacttgagtgaatatctctc

SEQ ID NO: 523642 - DNA, 201 bp, Homo sapiens; identical to SEQ ID NO: 309117

SEQ ID NO: 523643 - DNA, 201 bp, Homo sapiens
tccacctccaccttctaaactgttctgtgtcatttaacaatgttgcttttaatgtaaggagctccttaaaagaataagcatctaaatgtctgcaaagtgcrtataaatctttttgataaatgtcaaagataaagccagacactagttaaagtggtaaggacagattgtaatcagtatatgctattggagtaaggaagagtc

SEQ ID NO: 523644 - DNA, 201 bp, Homo sapiens
gaggccgaggcaggcgaatcacgaggtcaggagttcaagaccagcctggccaatgtggtgaaaccccgtctctactaaaactacaaaaaaaaaaaaaaaaaattagctgggcgtgtgggtgggtgtctgtaatcccagctacttgggaggctgaggcaggggaatcgcttgaacctgggaggcggaggttgcagtgagctg

SEQ ID NO: 523645 - DNA, 201 bp, Homo sapiens
atctaaatgtctgcaaagtgcatataaatctttttgataaatgtcaaagataaagccagacactagttaaagtggtaaggacagattgtaatcagtatatrctattggagtaaggaagagtccagtgtgaactgagctcaacttcggtttgtgcagaggtgatgggtattttaaaaggtgagggaacaaggagcttaggat

SEQ ID NO: 523646 - DNA, 201 bp, Homo sapiens
aggtaattatagaagtgatgaatatatctggctgggcgcagtggctcacatctgtaatcctagtactttggaagccgaggcgggtggatcacttgaggtcrggagttcgagaccagcctggccaacatggtgaaacctcatctctactaaaaatacaaaaattagccaggcgtcatggtgcgtgcctgtaatcccagctac

SEQ ID NO: 523647 - DNA, 201 bp, Homo sapiens; identical to SEQ ID NO: 309118

SEQ ID NO: 523648 - DNA, 201 bp, Homo sapiens
attgagacaatcctggctaacacagtgaaaccctgtctctactaaaaatacaaaaaattagccaggtgtagtggcgggtgcctgtagtccaagctactccrgaggctgaggcaggagaatggcgtgtacccggaaggcggagcttgcagtgagccgagattgcgccactgcactccagcctgacagagcgagactccgtct

SEQ ID NO: 523649 - DNA, 201 bp, Homo sapiens
acttgaggtcaggagttcgagaccagcctggccaacatggtgaaacctcatctctactaaaaatacaaaaattagccaggcgtcatggtgcgtgcctgtartcccagctacttgggaggtggaggcaggaaaatcactcgaatccgggagacagaggttgcagtgagctgagattgcactccagcctgggcgacagaggga

SEQ ID NO: 523650 - DNA, 201 bp, Homo sapiens; identical to SEQ ID NO: 309130

SEQ ID NO: 523651 - DNA, 201 bp, Homo sapiens; identical to SEQ ID NO: 309133

SEQ ID NO: 523652 - DNA, 201 bp, Homo sapiens
tttcaccgttttagccaggatggccttgatctcctgacctcatgatctgcccacctcggcctcccaaattgctgggattacaggagtgagccactgcgccyggccagctctgggaatcttaaattcaaacttggccttccatagtgttgtcaaactagaaggaaaaacactttgactggctgacctcttgattcctacatt

SEQ ID NO: 523653 - DNA, 201 bp, Homo sapiens; identical to SEQ ID NO: 309134

SEQ ID NO: 523654 - DNA, 201 bp, Homo sapiens
gtgttcatcctaactcagtcaggtagctgtggacagccttcacctgttaggagctccttagaaataaattctgaatacctttggttttcttttatcctccrgaggaatttccactatctccgaagctgttccttgttccactgacaattcgcttagttaatgttcttttttagcctgtacccttgatagcagcattctgtg

SEQ ID NO: 523655 - DNA, 201 bp, Homo sapiens; identical to SEQ ID NO: 309135

SEQ ID NO: 523656 - DNA, 201 bp, Homo sapiens
tctgttttggagaaagggagataatgagactggagcttgcattctgcctcccaaaaatgacagctgatgggcttcagtgcttgttgaaatgccaagtgacyttcgacctttgtccttacagaacatctgccatcaaggcccttaatgctacaggacaagcaaacctcagcctggaggcacttttccaggtaacttgtgtca

SEQ ID NO: 523657 - DNA, 201 bp, Homo sapiens; identical to SEQ ID NO: 309136

SEQ ID NO: 523658 - DNA, 201 bp, Homo sapiens
taatttctttttcttttttttttttttttaagtgaaagcaggccaggtgcggtggctcacgcctgtaatcccagccctttgggaggccaaggcgggtggawcacttgaggtcaggagttcaagaccagcctggccaacatggtgaaacctcgtctctactaaaaatacaaaaatcaaccaggcatgacggtgcacgcctgt

SEQ ID NO: 523659 - DNA, 201 bp, Homo sapiens
cccagatctcaagtgttagggaagcacttggtcattttcttccctttctggcatattagagaaaatgatgtgtacataaaatttcctcataattttcagcytcacaatttatactacggtaatgagcgccggtagcccagacaagtacatgactaggatcagaaacccgagtagaaagtaagtcagcagaagagcgagttc

SEQ ID NO: 523660 - DNA, 201 bp, Homo sapiens; identical to SEQ ID NO: 309137

SEQ ID NO: 523661 - DNA, 201 bp, Homo sapiens
gtcaaaagaaatgttggcaaggagaataaaaaaatttccaagaaacttagcgttatgctctccctgctttctttacctccgaagtcttatggttctgaackgctgtcctgagaaagcaactctcttagttgtgatgttatttaagtgtcagcattcaagggaatgaacagctgcttggtagagtttgatttttcacatgtg

SEQ ID NO: 523662 - DNA, 201 bp, Homo sapiens; identical to SEQ ID NO: 309138

SEQ ID NO: 523663 - DNA, 201 bp, Homo sapiens; identical to SEQ ID NO: 309139

SEQ ID NO: 523664 - DNA, 201 bp, Homo sapiens
tgtccttgaggatgaagtcagaaaaggttaaaagtgtaaacgaaaatgtgcctgaagcagcactcagtccatgagagggttattttgccaaggctaaggaygtgcccgggaaaaagaaacaccagtcacaggaggacctgtcctgtgcttttcccaaagagggtttgaggaacttcggtatttaaaggggaaagagcaagc

SEQ ID NO: 523665 - DNA, 201 bp, Homo sapiens; identical to SEQ ID NO: 309140

SEQ ID NO: 523666 - DNA, 201 bp, Homo sapiens; identical to SEQ ID NO: 309141

SEQ ID NO: 523667 - DNA, 201 bp, Homo sapiens
atgtaggcgtagtttctataatcccttactgctcaggagtcatgtggctagaagtcaaagatttgtgacttccccaattgttcctgtagagaacatcactrctatagcacctaagattggtcttttgagatgtttttcagacttttgcattctggcaaccactggaccccaccaggacctgtgaccatgagtcaactagtc

SEQ ID NO: 523668 - DNA, 201 bp, Homo sapiens; identical to SEQ ID NO: 309142

SEQ ID NO: 523669 - DNA, 201 bp, Homo sapiens
cagatggcctgaagcaactgaagatccacaaaagaagagaaaatagccagttcctgccttaactgatgacatttcaccattgtgatttgttcctgccccaycctaactgatcaattgactttgtgacaagacaccctccccacccttgcaataatgtactttgtgatattcccccgcccttgtgaatgtactttgtacgat

SEQ ID NO: 523670 - DNA, 201 bp, Homo sapiens; identical to SEQ ID NO: 309143

SEQ ID NO: 523671 - DNA, 201 bp, Homo sapiens
caccctgtctctgtggacgacctggaattgcaattcttgcttcccccaaaaaatgttaaatttgtctctatattttatttgacttaaacagtagataaagsctagtttgtacagtttggtatgtagatttctctggtgccatgtccaggccaataaggatctagaattgtctctggggattagcctttgtccttcctgaaa

SEQ ID NO: 523672 - DNA, 201 bp, Homo sapiens; identical to SEQ ID NO: 309144

SEQ ID NO: 523673 - DNA, 201 bp, Homo sapiens
attcaactggtgtaaagtttcatttatacaaggtgaataacttctagagatctgtacgtcgtgcctattgtacacttaaaaatctgttaagaggccaggcrtggtggtttatcttataatcacagcactttaggaggcggaggtgggggtgaaacaggagagttccctggctccccttgcaggacactcaacaggggtgtt

SEQ ID NO: 523674 - DNA, 201 bp, Homo sapiens; identical to SEQ ID NO: 309146

SEQ ID NO: 523675 - DNA, 201 bp, Homo sapiens
gaagaaaaacttttactttgaggatttgttttacaaatgaaaaactccttttccttttttttcttatttgtcttattcattcatgttggacttttcccttytctcaggttctgcaccagtattgtggctcaagactccagaggccacatttaccatggtcggaatttggattatccttttgggaatgtcttacgcaagctg

SEQ ID NO: 523676 - DNA, 201 bp, Homo sapiens; identical to SEQ ID NO: 309148

SEQ ID NO: 523677 - DNA, 201 bp, Homo sapiens; identical to SEQ ID NO: 309149

SEQ ID NO: 523678 - DNA, 201 bp, Homo sapiens; identical to SEQ ID NO: 309150

SEQ ID NO: 523679 - DNA, 201 bp, Homo sapiens; identical to SEQ ID NO: 309151

SEQ ID NO: 523680 - DNA, 201 bp, Homo sapiens
agtgggtgcacgtgttaatcggaaaagtggtcctggagctggagcgcttcctgccccagcccttcaccggcgagatccgcggcatgtgtgacttcatgaamctcagcctggcggactgccttctggtcaacctggcctacgagtcctccgtgtgagtgccccaagccggcgcggagtaacgcggggcttgcgggggccccc

SEQ ID NO: 523681 - DNA, 201 bp, Homo sapiens; identical to SEQ ID NO: 309153

SEQ ID NO: 523682 - DNA, 201 bp, Homo sapiens
agcctgggaggtcgaggctgcaatgaactgtggtcatgccattgcattctaccctgggtgacagagtgggatcctgtctcaaaaaaagaagaaaatctgtwaaaagggtagatttcatgttgtgttcttaccaaaataaaataaattttaaaaacaagaggcaataaaattttttaattaaaaagttaaaatttatttttt

SEQ ID NO: 523683 - DNA, 201 bp, Homo sapiens
ttgagacaattgctagagcccaggaagtcaaggctgaagttaagctatgattgcaccactgcactccagcctgggcgacaggatatcttgtctctaaaaawttttttttaattataaaagggcatttagaggacaggaagaaaaagcacacagggcacaaaacattgctccaagaatgcaattcttggcaagcttgactgc

SEQ ID NO: 523684 - DNA, 201 bp, Homo sapiens
aagagaaaatagccagttcctgccttaactgatgacatttcaccattgtgatttgttcctgccccaccctaactgatcaattgactttgtgacaagacacmctccccacccttgcaataatgtactttgtgatattcccccgcccttgtgaatgtactttgtacgatacaccctccccacccttgagaaggtactttgtaa

SEQ ID NO: 523685 - DNA, 201 bp, Homo sapiens
ctggtgtaaagtttcatttatacaaggtgaataacttctagagatctgtacgtcgtgcctattgtacacttaaaaatctgttaagaggccaggcgtggtgktttatcttataatcacagcactttaggaggcggaggtgggggtgaaacaggagagttccctggctccccttgcaggacactcaacaggggtgttgatctc

SEQ ID NO: 523686 - DNA, 201 bp, Homo sapiens
ggaggcggagcttgcattgagccgagatggtgccactgaactccagcctggtcaataagagcaaaactccgtctcaaaaaaaaaaaatgaagttatgctcytaccctcctacagagacagggagacaggggccctaccttcaggtattggctggaacaaatggcaaattcttttgacagcctggagttttctcagacaggc

SEQ ID NO: 523687 - DNA, 201 bp, Homo sapiens
ttgaacccaggaagcagaggttgcagtaagccgagattgcgccattgcactccagcctgggcaacaagagcgaaactctgtctcaaaaaaaaaataataakaataataagaacacaagtaacagatttctaatataaaaataaatcaaacagtacataatgtgatcctctgcctctcttccccacttgtggatggcactct

SEQ ID NO: 523688 - DNA, 201 bp, Homo sapiens
gtgtgcacaatctaattgtgatatgttaccttaaatatttgtcttttctttacactagaaacattcaaattctagctattttttttggcggggggggggggcattaaaaatttttttttaatttttttttttagtagaaacaaggtctcactatattacccaggctggtctcaaactcctgagctcacgcagtcctcctgc

SEQ ID NO: 523689 - DNA, 201 bp, Homo sapiens
aacccaggaagcagaggttgcagtaagccgagattgcgccattgcactccagcctgggcaacaagagcgaaactctgtctcaaaaaaaaaataataataakaataagaacacaagtaacagatttctaatataaaaataaatcaaacagtacataatgtgatcctctgcctctcttccccacttgtggatggcactctccc

SEQ ID NO: 523690 - DNA, 201 bp, Homo sapiens
tgtgtgcacaatctaattgtgatatgttaccttaaatatttgtcttttctttacactagaaacattcaaattctagctattttttttggcggggggggggggcattaaaaatttttttttaatttttttttttagtagaaacaaggtctcactatattacccaggctggtctcaaactcctgagctcacgcagtcctcctg

SEQ ID NO: 523691 - DNA, 201 bp, Homo sapiens
ccaggaagcagaggttgcagtaagccgagattgcgccattgcactccagcctgggcaacaagagcgaaactctgtctcaaaaaaaaaataataataataakaagaacacaagtaacagatttctaatataaaaataaatcaaacagtacataatgtgatcctctgcctctcttccccacttgtggatggcactctccccat

SEQ ID NO: 523692 - DNA, 201 bp, Homo sapiens
gatcatgtgtgcacaatctaattgtgatatgttaccttaaatatttgtcttttctttacactagaaacattcaaattctagctattttttttggcgggggkggggggcattaaaaatttttttttaatttttttttttagtagaaacaaggtctcactatattacccaggctggtctcaaactcctgagctcacgcagtcc

SEQ ID NO: 523693 - DNA, 201 bp, Homo sapiens
ttcaggtatgataaggccaacagatcaggggacaattgccatttaaaagatagcttattactcctcgttcccaagaggagaggtcacacctgcacagccaygggagagaacactgaggttggtcacaggcagaggacaggagaactgtggttttcgagggaaggaatgggtgaggcagggtaaggcggctaagcaggtgga

SEQ ID NO: 523694 - DNA, 201 bp, Homo sapiens
taaatgcacgatcatgtgtgcacaatctaattgtgatatgttaccttaaatatttgtcttttctttacactagaaacattcaaattctagctattttttttggcggggggggggggcattaaaaatttttttttaatttttttttttagtagaaacaaggtctcactatattacccaggctggtctcaaactcctgagctc

SEQ ID NO: 523695 - DNA, 201 bp, Homo sapiens; identical to SEQ ID NO: 309163

SEQ ID NO: 523696 - DNA, 201 bp, Homo sapiens
caggtgatccacccacctcggcctcccaaagtgctgggattacaggcgtgaaccaccatgcccggccagtgttattgtttattcttatctttttacataargctttaccaggaagatggtgattgagtatatatcagtgtccacagtaagcagttctttatcctaatgtatttcttccacattttctcatatgtcagctat

SEQ ID NO: 523697 - DNA, 201 bp, Homo sapiens; identical to SEQ ID NO: 309166

SEQ ID NO: 523698 - DNA, 201 bp, Homo sapiens; identical to SEQ ID NO: 309165

SEQ ID NO: 523699 - DNA, 201 bp, Homo sapiens; identical to SEQ ID NO: 309167

SEQ ID NO: 523700 - DNA, 201 bp, Homo sapiens; identical to SEQ ID NO: 309168

SEQ ID NO: 523701 - DNA, 201 bp, Homo sapiens; identical to SEQ ID NO: 309169

SEQ ID NO: 523702 - DNA, 201 bp, Homo sapiens; identical to SEQ ID NO: 309170

SEQ ID NO: 523703 - DNA, 201 bp, Homo sapiens
cggcgagatccgcggcatgtgtgacttcatgaacctcagcctggcggactgccttctggtcaacctggcctacgagtcctccgtgtgagtgccccaagccsgcgcggagtaacgcggggcttgcgggggcccccgacacagactagcgggaggagacatattttccgtgtgataaaaacagggcggtgcctgcttgcctag

SEQ ID NO: 523704 - DNA, 201 bp, Homo sapiens; identical to SEQ ID NO: 309176

SEQ ID NO: 523705 - DNA, 201 bp, Homo sapiens
tccccaatcagcaacccccttccttagcccccagctcaccaaattatccattaaaaccctagcctctgagttcttggagagactgatttgagtaataacayccatgctcctgctaggactgttaattgaactctttctctactgcaatagtatgatctcagtgaattggttttgtctgtgcagtgagcaagaagaacccat

SEQ ID NO: 523706 - DNA, 201 bp, Homo sapiens
attacattgttggtggcacgtccccccgggagggggtggtcatcacgaggaacagagatggcccagcagacatttggcctctagatcctttgaatggagcrtaagtagaattgaaagctctggtcattttgtatcagataatcattttttttaatcggtgaaatgaggggtattttaaatttgttcatatgtctcctctgc

SEQ ID NO: 523707 - DNA, 201 bp, Homo sapiens
ggcagaggttacagtgagctgagattgtgccactgcactccagtctgggcgacagagcaagactgtctcaaaataataataataataataataataataawgaacaaacttgacctactagatatagacaaacagaatatcactttctttgagaatttccatggtgcatttagtacctaccagaacacacacacgagcatc

SEQ ID NO: 523708 - DNA, 201 bp, Homo sapiens; identical to SEQ ID NO: 309184

SEQ ID NO: 523709 - DNA, 201 bp, Homo sapiens; identical to SEQ ID NO: 309186

SEQ ID NO: 523710 - DNA, 201 bp, Homo sapiens
cggcttcccaaagtgctgggattacaggcctgagccactgcacccggccctccatagatattctatgtgtatttcttctaccatgtaatcttctctataawatgactttttcctatgcagattttgtcggtggttccagtttataacaagtaagtggcttgttaaacatgtctgttcacacatcactccagaacagtgaac

SEQ ID NO: 523711 - DNA, 201 bp, Homo sapiens
acttcgaagcagctgttggcaagttggccaagactccccttattgctgatgtttattacattgttggtggcacgtccccccgggagggggtggtcatcacraggaacagagatggcccagcagacatttggcctctagatcctttgaatggagcgtaagtagaattgaaagctctggtcattttgtatcagataatcattt

SEQ ID NO: 523712 - DNA, 201 bp, Homo sapiens; identical to SEQ ID NO: 309192

SEQ ID NO: 523713 - DNA, 201 bp, Homo sapiens; identical to SEQ ID NO: 309197

SEQ ID NO: 523714 - DNA, 201 bp, Homo sapiens; identical to SEQ ID NO: 309198

SEQ ID NO: 523715 - DNA, 201 bp, Homo sapiens; identical to SEQ ID NO: 309199

SEQ ID NO: 523716 - DNA, 201 bp, Homo sapiens; identical to SEQ ID NO: 309203

SEQ ID NO: 523717 - DNA, 201 bp, Homo sapiens; identical to SEQ ID NO: 309202

SEQ ID NO: 523718 - DNA, 201 bp, Homo sapiens; identical to SEQ ID NO: 309204

SEQ ID NO: 523719 - DNA, 201 bp, Homo sapiens; identical to SEQ ID NO: 309205

SEQ ID NO: 523720 - DNA, 201 bp, Homo sapiens
ggatcatacttgtagtcccagctacttgagacaattgctagagcccaggaagtcaaggctgaagttaagctatgattgcaccactgcactccagcctgggygacaggatatcttgtctctaaaaatttttttttaattataaaagggcatttagaggacaggaagaaaaagcacacagggcacaaaacattgctccaagaa

SEQ ID NO: 523721 - DNA, 201 bp, Homo sapiens; identical to SEQ ID NO: 309207

SEQ ID NO: 523722 - DNA, 201 bp, Homo sapiens
catatgtacagaatacgcaatatggagtacccagagaagagtaactcaaaggtttgttttgaacttgtttttatatggcatcttagcaaaggaactataartttttagagaagtgacaagacaaaggaaaaggaccttgagtctctcggggcagcaaattgtgggaaggaaaacatatagtaacaaaagatagatgaaagt

SEQ ID NO: 523723 - DNA, 201 bp, Homo sapiens
cccctaacagacttttaaaagttgtccaaaagtaattttgggaaatgattgcaaatttgtatttttttaaaatgtgagcacaaatcacaggtgtggaagaytcaagttctctatgttcttcctaatatttattaagacacttcccttgatggctacataattttattttgcctggcataattaatagaattatttcctttg

SEQ ID NO: 523724 - DNA, 201 bp, Homo sapiens
ggcgaatcacgaggtcaggagttcaagaccagcctggccaatgtggtgaaaccccgtctctactaaaactacaaaaaaaaaaaaaaaaaattagctgggcrtgtgggtgggtgtctgtaatcccagctacttgggaggctgaggcaggggaatcgcttgaacctgggaggcggaggttgcagtgagctgagatcgcaccac

SEQ ID NO: 523725 - DNA, 201 bp, Homo sapiens; identical to SEQ ID NO: 309208

SEQ ID NO: 523726 - DNA, 201 bp, Homo sapiens
gtgaataacttctagagatctgtacgtcgtgcctattgtacacttaaaaatctgttaagaggccaggcgtggtggtttatcttataatcacagcactttargaggcggaggtgggggtgaaacaggagagttccctggctccccttgcaggacactcaacaggggtgttgatctctgttcagctgccacaagctcaaaccc

SEQ ID NO: 523727 - DNA, 201 bp, Homo sapiens
atggtgtgaacctgggaggcggagcttgcattgagccgagatggtgccactgaactccagcctggtcaataagagcaaaactccgtctcaaaaaaaaaaaatgaagttatgctcctaccctcctacagagacagggagacaggggccctaccttcaggtattggctggaacaaatggcaaattcttttgacagcctggagt

SEQ ID NO: 523728 - DNA, 201 bp, Homo sapiens
gaaattgttttatgaaattaagaacaggttatccacaaaataattcatctctcattcttgtctagtgtttgtaatcttaaaagtatttttggctgggcgcrgtggctcacgcctgtaatcccaacactttgggaggccgaggcaggcgaatcacgaggtcaggagttcaagaccagcctggccaatgtggtgaaaccccgt

SEQ ID NO: 523729 - DNA, 201 bp, Homo sapiens
aaatctgctaaatattaagttattactgaatgaaggataatattatttattatttattcatgttttttctccattgttctataatgagctaatactcttaataaagagacaaaggaataaatgcaatgaaaataaattatttcagctgctctgaaactcactctaatagttgttgcttcatttgtttttgtttttcctgga

SEQ ID NO: 523730 - DNA, 201 bp, Homo sapiens; identical to SEQ ID NO: 309211

SEQ ID NO: 523731 - DNA, 201 bp, Homo sapiens
ttcctatgcagattttgtcggtggttccagtttataacaagtaagtggcttgttaaacatgtctgttcacacatcactccagaacagtgaactcactcacrtactgtttggctcagcaaggatctgagggctcctgtaaccaggctgtgggggcactcctgtgggggcactcctgtgggtacagctgcgagcaaaacaaag

SEQ ID NO: 523732 - DNA, 201 bp, Homo sapiens
aacttttactttgaggatttgttttacaaatgaaaaactccttttccttttttttcttatttgtcttattcattcatgttggacttttcccttttctcagrttctgcaccagtattgtggctcaagactccagaggccacatttaccatggtcggaatttggattatccttttgggaatgtcttacgcaagctgacagtgg

SEQ ID NO: 523733 - DNA, 201 bp, Homo sapiens; identical to SEQ ID NO: 309119

SEQ ID NO: 523734 - DNA, 201 bp, Homo sapiens
ttaaacggggacgctttactccccgccacccttggagaactggttttggctgccgccctgagcagcgtccgggttggggagaatccagcgcggcaggttcrgctttcaagttcggtgtcacccgtggcacgccagtccttgagccattccgggtcagcgtggcgcgcgagttgtcgcccgggctgcatagctaccaaggag

SEQ ID NO: 523735 - DNA, 201 bp, Homo sapiens
ctcctccctcagcctcccaagtagctgggattacaggtgcccgccaccatgctcagctaatttttatatttttaatagagacagggtttcaccatgttggsgaggctagtgtcgaactcctgacctcaggggatccgcccacctcggcctcccaaagtgctgggattacaggcatgagtcaccacacctggctaatactgt

SEQ ID NO: 523736 - DNA, 201 bp, Homo sapiens; identical to SEQ ID NO: 309120

SEQ ID NO: 523737 - DNA, 201 bp, Homo sapiens; identical to SEQ ID NO: 309121

SEQ ID NO: 523738 - DNA, 201 bp, Homo sapiens; identical to SEQ ID NO: 309122

SEQ ID NO: 523739 - DNA, 201 bp, Homo sapiens; identical to SEQ ID NO: 309123

SEQ ID NO: 523740 - DNA, 201 bp, Homo sapiens; identical to SEQ ID NO: 309124

SEQ ID NO: 523741 - DNA, 201 bp, Homo sapiens; identical to SEQ ID NO: 309125

SEQ ID NO: 523742 - DNA, 201 bp, Homo sapiens; identical to SEQ ID NO: 309126

SEQ ID NO: 523743 - DNA, 201 bp, Homo sapiens; identical to SEQ ID NO: 309127

SEQ ID NO: 523744 - DNA, 201 bp, Homo sapiens
atctcgtgctcagtaaatctacattttacataagataaagcaaccgtgtgaaattacagctatgtttgggaacaaaaggaaggcagttttggagtgtctcrgttcccaggcttaacttttcctttggcatagtgagtagaatgtctagaaggaagtgttatccaggtacagaacatcgctcccctgacatactgcagacgt

SEQ ID NO: 523745 - DNA, 201 bp, Homo sapiens; identical to SEQ ID NO: 309128

SEQ ID NO: 523746 - DNA, 201 bp, Homo sapiens; identical to SEQ ID NO: 309129

SEQ ID NO: 523747 - DNA, 201 bp, Homo sapiens
ggtgctcagtgaatctacatttagcacatgaaaacaagggaatggagggaaagtcaatgatgcatttatctcgtgctcagtaaatctacattttacataarataaagcaaccgtgtgaaattacagctatgtttgggaacaaaaggaaggcagttttggagtgtctcagttcccaggcttaacttttcctttggcatagtg

SEQ ID NO: 523748 - DNA, 201 bp, Homo sapiens; identical to SEQ ID NO: 309131

SEQ ID NO: 523749 - DNA, 201 bp, Homo sapiens; identical to SEQ ID NO: 309132

SEQ ID NO: 523750 - DNA, 201 bp, Homo sapiens
ttttcacatgtgcatgaaagaaatgtccttgaggatgaagtcagaaaaggttaaaagtgtaaacgaaaatgtgcctgaagcagcactcagtccatgagagrgttattttgccaaggctaaggacgtgcccgggaaaaagaaacaccagtcacaggaggacctgtcctgtgcttttcccaaagagggtttgaggaacttcgg

SEQ ID NO: 523751 - DNA, 201 bp, Homo sapiens
tgagggctcctgtaaccaggctgtgggggcactcctgtgggggcactcctgtgggtacagctgcgagcaaaacaaagtctctgctctcatgggactaatakgggtggggtgggggtggtggtgataaacaaatataaatcaggtgagaagtccatgaagaaatccaaaggtaaaaagaatagagtgaccctgaaggaggct

SEQ ID NO: 523752 - DNA, 201 bp, Homo sapiens; identical to SEQ ID NO: 309152

SEQ ID NO: 523753 - DNA, 201 bp, Homo sapiens; identical to SEQ ID NO: 309155

SEQ ID NO: 523754 - DNA, 201 bp, Homo sapiens
gctgcccgtgctgcggcactacgacttggacttggtgcgcgccgcgatggcgcaagtcatcgggtgagctggggccctggacggggtctgcggggacaccrgccctgcgggtcggagtcaaacgcgcgctgctcagagtgctttaaacggggacgctttactccccgccacccttggagaactggttttggctgccgccct

SEQ ID NO: 523755 - DNA, 201 bp, Homo sapiens
acacaacaaaaggaacatctgctctacaagaacctattaaaatgtgctgggttccaggccacatctacagtagtctccccttattcttggtttctgttacycacagtcaactgtggtccagaaatatgaaatggaaaattccagaaataattcatcggttttaaattgcacaatattctgaatagtgggatgaaatcagtc

SEQ ID NO: 523756 - DNA, 201 bp, Homo sapiens
aaaagcactgcgactgccttcctcttcaggaaatgctttcaggcacagaaaagacacaggcctgctaaataacatgcttttcagttgaactaagttattawaattttaccacctccctctcctacctccaactttttcctatttttaacttacagctttctcaatgaaaaatcacgaatcatttttaccctcatctgttgg

SEQ ID NO: 523757 - DNA, 201 bp, Homo sapiens
ggagttcaagaccagcctggccaacatggtgaaaccccatctctactaaaactacaaaaaaactgttagccaggtgtggtggtgggtacccaaaatcccgrctactcaggagctgaggtaggagaatcacttgaactcgggaggtggagtttgtagtgagctgagatcacaccactgcactccagcctgggaaacagagtg

SEQ ID NO: 523758 - DNA, 201 bp, Homo sapiens
tcaaactcctgacctcatgattcacccaccttggcctcccaaagtgctgggattacaggcatgagccactgtgcccttgcccagcccaagtttccatcttwaaacaaacaaacaaaaagtaacacttttttccccaattataaaagtaacatgtaatcgttgtagaaaatcagtaaatgtagaaaagtaaaaaaacaaagc

SEQ ID NO: 523759 - DNA, 201 bp, Homo sapiens; identical to SEQ ID NO: 309158

SEQ ID NO: 523760 - DNA, 201 bp, Homo sapiens
agtttgtagtgagctgagatcacaccactgcactccagcctgggaaacagagtgagactccattaaaaaaaaaaaaaaaatcagtctttgaattaaatgcrtttttttcttcccttacagatgattttttaaaaaatgaaattcttgaagagctgcaccttaaaaaataagacaaagtgaaagtattgtattatgttacaa

SEQ ID NO: 523761 - DNA, 201 bp, Homo sapiens
tttatcctaatgtatttcttccacattttctcatatgtcagctatgtatagtactggttctcaacctgtggtacccaaaccacagcatgacaattactaargtttttaatagaatgcctataattacatgtatatttattaaaaatgactggctttcattttgcaactcaagttgtttaccaaacttgattagtagaatct

SEQ ID NO: 523762 - DNA, 201 bp, Homo sapiens
gcatgagccactgtgcccttgcccagcccaagtttccatcttaaaacaaacaaacaaaaagtaacacttttttccccaattataaaagtaacatgtaatcrttgtagaaaatcagtaaatgtagaaaagtaaaaaaacaaagctaaccaccatcctgttattaaaaaatgaccagaaaaacccttcaggatattttctctc

SEQ ID NO: 523763 - DNA, 201 bp, Homo sapiens; identical to SEQ ID NO: 309159

SEQ ID NO: 523764 - DNA, 201 bp, Homo sapiens
tgtaaagttgtagccaaataataaatggtccttcattctgcaagtgtgattgacccacaccactttcttgtgtatgatctttaaaaaattatacttagatyttttgtttatagcatggtccctttaaaactataatctagtgtgtgctgttgtcaactgtgtaaacttttagagagacagaattaatcaatgttcattgag

SEQ ID NO: 523765 - DNA, 201 bp, Homo sapiens; identical to SEQ ID NO: 309160

SEQ ID NO: 523766 - DNA, 201 bp, Homo sapiens
gtcaggagaatatgcccattctgtcacaggaactggcaagacctatgggtgctatcctctcccagaaaatgtacctgagccccttcgccagtgccttggcygggaagggagtgttgtgtggaggagagcagtgggcagagcctctcagcagctgggcgggtgttgggaggctgtcagggtcaggagccctagagcccacca

SEQ ID NO: 523767 - DNA, 201 bp, Homo sapiens
ttaatgattaatgatatggagtatcttttcatgtgcttactgcccatttgtatatcttctttggagaaatatctattcaagtcctttgcccatttttttttgtttgttttgagacagagtctttctgtctcaaatcacacattcataaatgcacgatcatgtgtgcacaatctaattgtgatatgttaccttaaatatttg

SEQ ID NO: 523768 - DNA, 201 bp, Homo sapiens
attgagtacgcaaagcatgttttgctgtaaaacagaatacagagtgcaaaagccagattttggctgtaaggacaaggactatattccctttgttctttgcwtttaggggttgattcacaaatactaaaaactcatttactaactactcagtcatctgcttttacaaacactttttttcataaaaaattcaaacagtacaga

SEQ ID NO: 523769 - DNA, 201 bp, Homo sapiens
ctagtcctgtggccctcacccaaagggcatactcagtgcataaagactgttttccatacccctgtaatttcatccccaatcagcaacccccttccttagcmcccagctcaccaaattatccattaaaaccctagcctctgagttcttggagagactgatttgagtaataacatccatgctcctgctaggactgttaattga

SEQ ID NO: 523770 - DNA, 201 bp, Homo sapiens
cttgaagagctgcaccttaaaaaataagacaaagtgaaagtattgtattatgttacaaacaatgcaggctccttcctcatttaactttacaaccttgcgargtgggtccaggagatttggagtttgtggtaaagccagtaatgggcattgtcctgcattcccttcccttcatggtttgcctcgatcctctctaagcttcta

SEQ ID NO: 523771 - DNA, 201 bp, Homo sapiens
tggacttttcccttttctcaggttctgcaccagtattgtggctcaagactccagaggccacatttaccatggtcggaatttggattatccttttgggaatrtcttacgcaagctgacagtggatgtgcaattcttaaagaatgggcaggtataatccgtaccatataagataaaaaatcagaaagatttgcaaactcaagt

SEQ ID NO: 523772 - DNA, 201 bp, Homo sapiens; identical to SEQ ID NO: 309171

SEQ ID NO: 523773 - DNA, 201 bp, Homo sapiens
ttttttttcttttttagtaaagacagggtctctctatgttgcccaggctggtcttgaactcctgggcttgagtaatcctcccacgtcggcttcccaaagtkctgggattacaggcctgagccactgcacccggccctccatagatattctatgtgtatttcttctaccatgtaatcttctctataaaatgactttttccta

SEQ ID NO: 523774 - DNA, 201 bp, Homo sapiens
tcatgacataacatatcaggagaatgtgctttggatcatttttgcatcatctggtgtggacccaactgcaggtggggttgctcacgcaagttcatcctttygttcagaccctgagtgagtcggaaaacttcgaagcagctgttggcaagttggccaagactccccttattgctgatgtttattacattgttggtggcacgt

SEQ ID NO: 523775 - DNA, 201 bp, Homo sapiens; identical to SEQ ID NO: 309180

SEQ ID NO: 523776 - DNA, 201 bp, Homo sapiens
atcaggagaatgtgctttggatcatttttgcatcatctggtgtggacccaactgcaggtggggttgctcacgcaagttcatcctttcgttcagaccctgartgagtcggaaaacttcgaagcagctgttggcaagttggccaagactccccttattgctgatgtttattacattgttggtggcacgtccccccgggagggg

SEQ ID NO: 523777 - DNA, 201 bp, Homo sapiens; identical to SEQ ID NO: 309183

SEQ ID NO: 523778 - DNA, 201 bp, Homo sapiens
taacatatcaggagaatgtgctttggatcatttttgcatcatctggtgtggacccaactgcaggtggggttgctcacgcaagttcatcctttcgttcagaycctgagtgagtcggaaaacttcgaagcagctgttggcaagttggccaagactccccttattgctgatgtttattacattgttggtggcacgtccccccgg

SEQ ID NO: 523779 - DNA, 201 bp, Homo sapiens
ccctttgttctttgcttttaggggttgattcacaaatactaaaaactcatttactaactactcagtcatctgcttttacaaacactttttttcataaaaarttcaaacagtacagaaatatttaaagtaaaagtttctcctttccagtcccatttctttactttgccactattaacaatttgatttctagctgaattactt

SEQ ID NO: 523780 - DNA, 201 bp, Homo sapiens
aatatttaaagtaaaagtttctcctttccagtcccatttctttactttgccactattaacaatttgatttctagctgaattactttaaaaatgattttaartggtaacgataatataaatgcataataaattctcaaaggaaatctgctaaatattaagttattactgaatgaaggataatattatttattatttattcat

SEQ ID NO: 523781 - DNA, 201 bp, Homo sapiens
agaaatagtctgtagaggtagttttactctcagtactcaggtgactgttactgaatatagacagtttacacttgggtattgcttttctatggaggactcawggccaagaaattgttttatgaaattaagaacaggttatccacaaaataattcatctctcattcttgtctagtgtttgtaatcttaaaagtatttttggct

SEQ ID NO: 523782 - DNA, 201 bp, Homo sapiens
aagagctgcaccttaaaaaataagacaaagtgaaagtattgtattatgttacaaacaatgcaggctccttcctcatttaactttacaaccttgcgaagtgkgtccaggagatttggagtttgtggtaaagccagtaatgggcattgtcctgcattcccttcccttcatggtttgcctcgatcctctctaagcttctatcct

SEQ ID NO: 523783 - DNA, 201 bp, Homo sapiens
cggcgcggagtaacgcggggcttgcgggggcccccgacacagactagcgggaggagacatattttccgtgtgataaaaacagggcggtgcctgcttgcctrgaaacctccagcgcttcctctttgcctctctgggtaaatctgagctgcacatcgtaggcttcgagagggaaagcagattctccgattcaacactaaactt

SEQ ID NO: 523784 - DNA, 201 bp, Homo sapiens
agtttcgctcttgttgcccaggctggagtgtgatggcgctatctcggttcaccgcaacctccgcctcccgggttcaagtgattctcctgcctcagcctccmtagtagctgggattacaggcatgtgccaccacgcccggctaattttgtatttttagtagaatccaggtttctccacgttggtcaggctggtcttgaactc

SEQ ID NO: 523785 - DNA, 201 bp, Homo sapiens
ttgcctcgatcctctctaagcttctatcctggcctgaataactcaaagataattggtctcagagatcaagccatatcctcaggccttatttccatcttctyatgattctgccatcatacctttgcttctccgctaatgaaatgagctggcaagacctctgttcattgtgaagtgcttctgaaagagcctaagaaaaaaggc

SEQ ID NO: 523786 - DNA, 201 bp, Homo sapiens
gttatactttttcttaacacattaaatagtaaggtttagcagggggtctaataactaccatgatttcaaagtagtaaattatggatagtgtttcaaaatawctgcagccaacattgtgtatgtgaaaatatctgtgatttctactagtggcaaaattataggcaccactatgattgtgtgatttgttgcatgcattcatta

SEQ ID NO: 523787 - DNA, 201 bp, Homo sapiens; identical to SEQ ID NO: 64293

SEQ ID NO: 523788 - DNA, 201 bp, Homo sapiens
tttttcccatccaaggtcacaaatctactaaaatctatctatggaccacacccccacccaccccagcttaaggttaagaacctctgtcttagaagactatktcagagttttattctattgtgttggaatttataagaaaaaaaatccagaaaattgtggggcagaacaggtgatttcagtgtatttgattggaatggtgaa

SEQ ID NO: 523789 - DNA, 201 bp, Homo sapiens; identical to SEQ ID NO: 309190

SEQ ID NO: 523790 - DNA, 201 bp, Homo sapiens
aatgattaatgatatggagtatcttttcatgtgcttactgcccatttgtatatcttctttggagaaatatctattcaagtcctttgcccatttttttttgwttgttttgagacagagtctttctgtctcaaatcacacattcataaatgcacgatcatgtgtgcacaatctaattgtgatatgttaccttaaatatttgtc

SEQ ID NO: 523791 - DNA, 201 bp, Homo sapiens
gagaaatatctattcaagtcctttgcccatttttttttgtttgttttgagacagagtctttctgtctcaaatcacacattcataaatgcacgatcatgtgygcacaatctaattgtgatatgttaccttaaatatttgtcttttctttacactagaaacattcaaattctagctattttttttggcggggggggggggcat

SEQ ID NO: 523792 - DNA, 201 bp, Homo sapiens
tcaatatggaaactagaaaatatgggtaataccacataaaaaaatatcttaggttattttccaacttttcctaatcacaaattatacagtaataaaaatcyttatatagatttttgcatgggtgtataattctgtaagatacttagaagtataatttctagattaaaggatttacatattttaagtatgtaatttaataaa

SEQ ID NO: 523793 - DNA, 201 bp, Homo sapiens; identical to SEQ ID NO: 309193

SEQ ID NO: 523794 - DNA, 201 bp, Homo sapiens; identical to SEQ ID NO: 309194

SEQ ID NO: 523795 - DNA, 201 bp, Homo sapiens
cacagtgtagatattcaagaaaaccctgtttaaataataaatgaatgaagaagcacaaaaagtcctttgtgagggcgatctgcctggagagcacacagccsgtgtttgctgagccaggcctagggcttgtcaacagttctctcctcctgtcagaatttcctgctgctcctggctccgctttgaagctgaaatttcttccat

SEQ ID NO: 523796 - DNA, 201 bp, Homo sapiens; identical to SEQ ID NO: 309200

SEQ ID NO: 523797 - DNA, 201 bp, Homo sapiens
cagacattctttttttttcttttttagtaaagacagggtctctctatgttgcccaggctggtcttgaactcctgggcttgagtaatcctcccacgtcggcytcccaaagtgctgggattacaggcctgagccactgcacccggccctccatagatattctatgtgtatttcttctaccatgtaatcttctctataaaatga

SEQ ID NO: 523798 - DNA, 201 bp, Homo sapiens; identical to SEQ ID NO: 309209

SEQ ID NO: 523799 - DNA, 201 bp, Homo sapiens; identical to SEQ ID NO: 309210

SEQ ID NO: 523800 - DNA, 201 bp, Homo sapiens
atcacacattcataaatgcacgatcatgtgtgcacaatctaattgtgatatgttaccttaaatatttgtcttttctttacactagaaacattcaaattctrgctattttttttggcggggggggggggcattaaaaatttttttttaatttttttttttagtagaaacaaggtctcactatattacccaggctggtctcaa

SEQ ID NO: 523801 - DNA, 201 bp, Homo sapiens; identical to SEQ ID NO: 309212

SEQ ID NO: 523802 - DNA, 201 bp, Homo sapiens
cttgtccaagcctctgtctgcaggtgacaggttttgggggaaatgagatgcattaagtagaacatcatctcgggtcagacattgccccttttgtttgccartgccccagtcctagagacttgtcctgacagtgccgcacacctacttttgatctctcagagcaggtggctccatccccagactagcctggctgctctccga

SEQ ID NO: 523803 - DNA, 201 bp, Homo sapiens
taccgctgtccggcatgtacaataaatctggaggaaaagtgagactcacctttaaactagaacaagaccagctgtggattggcactaaaggtatgttcttyctcgcctccttgctggcccactgcctgcctctggcacccagcagcactcacattttagagtgcgatttcacccctccttctgaaacctctctctccactg

SEQ ID NO: 523804 - DNA, 201 bp, Homo sapiens
tgtacaataaatctggaggaaaagtgagactcacctttaaactagaacaagaccagctgtggattggcactaaaggtatgttcttcctcgcctccttgctkgcccactgcctgcctctggcacccagcagcactcacattttagagtgcgatttcacccctccttctgaaacctctctctccactgtgctttgcttgcttc

SEQ ID NO: 523805 - DNA, 201 bp, Homo sapiens
tgggttccaactcaatatgtggatgcaatcaaagacactgtgctggggaaatggcagtatttttgaaagcactttcacctctggcccaggagactgacccraagtgaaggacattgccgggagaggcctgcagcatccctggatttcagagttctggaactttgttcataaaaaatctatattcaatctgaggtgatgtgg

SEQ ID NO: 523806 - DNA, 201 bp, Homo sapiens
tgggatgtagccaggaatttatttttagcaaatatcttaggtaattcttctaagtgaagtttaggaaacgctgctattgactttgatgctggttcttcacrgtcgattctgtttcttaattttaccttgttcatagctctttgccatctgagatttcttttctttttcctatttttttttttttttgagacggagtcttgc

SEQ ID NO: 523807 - DNA, 201 bp, Homo sapiens
cctcgcgccgtcctacggggcggccagaggccgccgaaggcctctcgcgctgcagcagtctcctcaggagcgccgccatgtgggatggaatagcacacgtrggcttctccctgcgtcacttccggggactgcttccagccaatcggcctccgccacagccagcgcagccttgccccttaaagtcacaggccccctagcgcg

SEQ ID NO: 523808 - DNA, 201 bp, Homo sapiens
gtcctccctctcccttcccccagatggttacaaagtcttgttagttacactgcagaactgtctgtccctttctttgccacactgttgtgccagttaaagtwcccaagcatctttaaacttggtctgttcaaagcgagttaccctgtttcactgccccatctgtgttttcttctgtcctgtccatcttacctactgcttttt

SEQ ID NO: 523809 - DNA, 201 bp, Homo sapiens
tttaattaactcacatcccaaccctcacccatgtttgtcctgcctgcttggtctcccgacctctgaagtaccgcttggttttcctttttcccttccaggcrtttcagttgggccccacggaagcctcttactactgggtgtactgggttccaactcaatatgtggatgcaatcaaagacactgtgctggggaaatggcagt

SEQ ID NO: 523810 - DNA, 201 bp, Homo sapiens
ggtgtgccaccacacctggctaatttttgtatttttagtagagacggggttttaccatgttgcccaggctagtctccaactcctgacctcaggtgatctgmccgctttggcctcccagtgtgctgggattacaggcgtgagccaccgcgcttggcccccttctctttttttctgactgtccctccatctcttaccattctc

SEQ ID NO: 523811 - DNA, 201 bp, Homo sapiens
cacaaaaatcagtgttcaaccctatactgattgttaaaatgaacaaaaattgaaatgccaaaaatgcttgagttttctatcaattttatgataacttgctrttttcttcatttcacattcaactctaactgcatggtcaaagcaagttttgcagaatatctgagggttccccccagtttttgcaagggcctttgaaccctc

SEQ ID NO: 523812 - DNA, 201 bp, Homo sapiens
ctcacccagtcccgcttcacttggctcactcccggcagtctcatctcactccaggcatcccttgctgcccccttctcttacctgccatcctccttaaactygcctcaatgtcttctgaccccatgtgatcagtggtatctcaagtgttaatcacaaaaggttataaatgttttaagagaacttcataaaagtgtgtgaata

SEQ ID NO: 523813 - DNA, 201 bp, Homo sapiens
tgtgagcattctgaaaatgaggcagccccaccgtctgacttgaggttcctccaatcctgtcccttctcttttttccctgtttttttttttttgagacagagtcttgctctgtcacccaggctggggtgtgccaccacacctggctaatttttgtatttttagtagagacggggttttaccatgttgcccaggctagtctcc

SEQ ID NO: 523814 - DNA, 201 bp, Homo sapiens
aaaatccaggcactccccttcccttgtgagagccacaggggaacgtgttgcctctttgttcgtaggcctcttgactctccctactgcccaagaccttagtmaatgctgggcttgcataaggttacaaaggaatttcttgggtatttatttattttatatttttttttgttgagatggagtttcgctctttggcccaggctg

SEQ ID NO: 523815 - DNA, 201 bp, Homo sapiens
ttgtgagcattctgaaaatgaggcagccccaccgtctgacttgaggttcctccaatcctgtcccttctcttttttccctgtttttttttttttgagacagagtcttgctctgtcacccaggctggggtgtgccaccacacctggctaatttttgtatttttagtagagacggggttttaccatgttgcccaggctagtctc

SEQ ID NO: 523816 - DNA, 201 bp, Homo sapiens
tttttgttgagatggagtttcgctctttggcccaggctgaagtaaagtggcatgatctcggctcactgcaacttctgccccccgggttcaagcgattctcrtgcttcagcctcctgagtagctgggattataggtgcccaccaccacgcctggctaattttttgtatttttagtagagacggggtttcaccatgctggcca

SEQ ID NO: 523817 - DNA, 201 bp, Homo sapiens
ggtgggtgccattttttgtctgctaggagagcaacaccctttgtcgccctctttagtttgatggtttaatcatttcagtggtgatttttttttttttttttgaggggaggagggcaatctggaaatcccgtttgctgtagaactttgatatctaatatggtagctatccacatgtggctggttaaaatgaaattaagaatt

SEQ ID NO: 523818 - DNA, 201 bp, Homo sapiens
ctgcacctcagtttccgcctctgtaaaatgggctcgcgctgccttaaccctcctccgcccgcccactctgacaccaccggaaaggattcattcgggaacaytcgtggggcggagacgggacagggggcctcggcctgtagcgtcacgtccgccagggttacctgtggggctgggagcgaaccgcactcgcaccgcaacccc

SEQ ID NO: 523819 - DNA, 201 bp, Homo sapiens
gaccactcaggtttgagaactgctgctttagggttggctcagcttaaccctcagcctgcctgtttttgtttttggttgggagaatgctccccacgtgcaargttttgtttggtttttcttccctttttaattaactcacatcccaaccctcacccatgtttgtcctgcctgcttggtctcccgacctctgaagtaccgctt

SEQ ID NO: 523820 - DNA, 201 bp, Homo sapiens
agtggctatgcctataaggccacagatggagaagaaagaagactcaggcatttgggccaggcaggagaactgtttaaggggccctgaacttagaatccttraagagctgcctcagagttcttggggcaggtggtaggggtggagtttagaggcttcttaatgtcaggttatagagtaataagcatttctttctgaaaggtg

SEQ ID NO: 523821 - DNA, 201 bp, Homo sapiens
ttgggtccttctgctcatgcattcagttcaagtgtcctttatcccaggttcagagatgctgcctttctgaagaagacatctgaccctagcaggttggccartgttattgaacaacaaaaatgggataaattgctttcacgattagctcaccttcttctggttttagcccttctgttctctgtacacgtgaacttctgtcat

SEQ ID NO: 523822 - DNA, 201 bp, Homo sapiens
ggccaacttatctatttttagactctatctttccagatttttctttctgcaaaggctgcaagtttttttccacttggtttagctgtttgctgagcctcccygcccccctccccctgcgcccccgtccctgaggtgtctgctgctccaggatggccatgtccccttgtgcaggtgcacctcgcctcccctgacctcacccag

SEQ ID NO: 523823 - DNA, 201 bp, Homo sapiens
ttatcccaggttcagagatgctgcctttctgaagaagacatctgaccctagcaggttggccaatgttattgaacaacaaaaatgggataaattgctttcaygattagctcaccttcttctggttttagcccttctgttctctgtacacgtgaacttctgtcatctccttctggcttggttgcctctgaaaggagggaaagt

SEQ ID NO: 523824 - DNA, 201 bp, Homo sapiens
ccacgcccccctggacggctgcggccgcactcgccaccagggggcagaggccagagaaagggctatttcccggacccgcccccttcagcttgggaaagcgraagcgtggcaggggccggacctgggagcggaggaggcgggtctccatagaaacctccacctgtttccggccgggctgtgagagattaggggctgctgcgg

SEQ ID NO: 523825 - DNA, 201 bp, Homo sapiens
cccgcccccctccccctgcgcccccgtccctgaggtgtctgctgctccaggatggccatgtccccttgtgcaggtgcacctcgcctcccctgacctcaccmagtcccgcttcacttggctcactcccggcagtctcatctcactccaggcatcccttgctgcccccttctcttacctgccatcctccttaaactcgcctca

SEQ ID NO: 523826 - DNA, 201 bp, Homo sapiens
atgactgaggaacaacttggaaagaatgagagctagtacttactgaacaattattcaatgctagccaccgtactaaatgccccgcattggtctcttaatcsttgaaacaggtctgtacagaaggacttactctaataaatcttctacagttctagaaactgaggttcagaggttgtaaatctcccaagttcacaaagctaa

SEQ ID NO: 523827 - DNA, 201 bp, Homo sapiens
ggctccttagttgctgctttacctgatgagggccaaagagattaactctgcctcgttgccatgtctcagaaaagttgccatatttcacccagaaggggctygttttcctcttactcttactttaaccatgtgcctggaggagccattctgggctcttgcacttgcccagcctttctttgccaggggcagagaagggaaagg

SEQ ID NO: 523828 - DNA, 201 bp, Homo sapiens
gttgtaaatctcccaagttcacaaagctaataggtggtggaggcagtattcactttttggtctgttaccaaagagctgtgtagtatccatacatttttctktccttccttcctttcactgtccaccttctaccttttcccaaggtctcccgcctgccatgcagaaagtcatgtataagggactcgtccccgaggataaaac

SEQ ID NO: 523829 - DNA, 201 bp, Homo sapiens
ctctgatgcctgtggattctcacttaatatgtgaatgatttagatgactgaggaacaacttggaaagaatgagagctagtacttactgaacaattattcartgctagccaccgtactaaatgccccgcattggtctcttaatccttgaaacaggtctgtacagaaggacttactctaataaatcttctacagttctagaaa

SEQ ID NO: 523830 - DNA, 201 bp, Homo sapiens
ggctggttaaaatgaaattaagaattcagttcctcagtcatagtagctgcatttcaagtgtgtaatagtcacagcagtaggtagtggctagcacaggtacraacatattcgccctcccagaaagttctgctggacagcactgtgctatagtttcaaaggatccatagtctgtcgtcattaaaagcttttgagccaaaacac

SEQ ID NO: 523831 - DNA, 201 bp, Homo sapiens
acacgtgggcttctccctgcgtcacttccggggactgcttccagccaatcggcctccgccacagccagcgcagccttgccccttaaagtcacaggccccckagcgcgaaatcccacgcccccctggacggctgcggccgcactcgccaccagggggcagaggccagagaaagggctatttcccggacccgcccccttcagc

SEQ ID NO: 523832 - DNA, 201 bp, Homo sapiens
gcgtcacttccggggactgcttccagccaatcggcctccgccacagccagcgcagccttgccccttaaagtcacaggccccctagcgcgaaatcccacgcycccctggacggctgcggccgcactcgccaccagggggcagaggccagagaaagggctatttcccggacccgcccccttcagcttgggaaagcgaaagcgt

SEQ ID NO: 523833 - DNA, 201 bp, Homo sapiens
agccgaagtctgacgtttaggccccagtttctcattgatgttgctctaacatctctaattaaaaaatcacctaaggcgcttgttttacagcttctgggccytttcccaggagattctgattcagtgggtctgggatgtagccaggaatttatttttagcaaatatcttaggtaattcttctaagtgaagtttaggaaacgc

SEQ ID NO: 523834 - DNA, 201 bp, Homo sapiens
ctttcttcatcctctctttcaagggaatagtaacacgacgaaatgtagtcagctgtttcatttcattctctcttctgacttatagcaacacaggaaagtgytggataaaggaaaacctgaagatgtgatgccatctgttaagggggcccaggtaaggcggatttctttgtgagcattctgaaaatgaggcagccccaccgt

SEQ ID NO: 523835 - DNA, 201 bp, Homo sapiens
gtacaataaatctggaggaaaagtgagactcacctttaaactagaacaagaccagctgtggattggcactaaaggtatgttcttcctcgcctccttgctgkcccactgcctgcctctggcacccagcagcactcacattttagagtgcgatttcacccctccttctgaaacctctctctccactgtgctttgcttgcttct

SEQ ID NO: 523836 - DNA, 201 bp, Homo sapiens
agactcacctttaaactagaacaagaccagctgtggattggcactaaaggtatgttcttcctcgcctccttgctggcccactgcctgcctctggcacccarcagcactcacattttagagtgcgatttcacccctccttctgaaacctctctctccactgtgctttgcttgcttctggcttttaaatttgcttttagatgc

SEQ ID NO: 523837 - DNA, 201 bp, Homo sapiens
tccataaaaaatgtggtcagtgaacctatcgaaggacatgaagactaccacatgatggtaagtagcgctggctgagttcagcccctctcactagactcccrcttcacctggcagggaacagttttaactgagcttgtttaacggaagaaaactcagtctccagaagatgcacttttttaagaccctgatgttttcttcatc

SEQ ID NO: 523838 - DNA, 201 bp, Homo sapiens
gaagtttaagttgaaaaaggtgggtgccattttttgtctgctaggagagcaacaccctttgtcgccctctttagtttgatggtttaatcatttcagtggtkatttttttttttttttttgaggggaggagggcaatctggaaatcccgtttgctgtagaactttgatatctaatatggtagctatccacatgtggctggtt

SEQ ID NO: 523839 - DNA, 201 bp, Homo sapiens
tagcaaatatcttaggtaattcttctaagtgaagtttaggaaacgctgctattgactttgatgctggttcttcacagtcgattctgtttcttaattttacyttgttcatagctctttgccatctgagatttcttttctttttcctatttttttttttttttgagacggagtcttgctctgttgcccaggctggagtgtact

SEQ ID NO: 523840 - DNA, 201 bp, Homo sapiens
tggtggctttccttgcatcaggtccccccatccttacagcagtcttctgaaggatacttggatgcccattactcagctggggaaagagactcaagtttatrgagctagtaagttgcagagctgggattaaagccgaagtctgacgtttaggccccagtttctcattgatgttgctctaacatctctaattaaaaaatcacc

SEQ ID NO: 523841 - DNA, 201 bp, Homo sapiens
tctgaattccgaacatgttgtgtggaatactcttaagtgtgtttgagagtagatctgccaattatgttgacaagggaatgatcaaaagctttgtttttttwaaaaaaaaaaaagcagtttcaattgaaatattttcatacatctttggttgcaaacatttggactgcattgcaatgagttggggtgttttttttttccttt

SEQ ID NO: 523842 - DNA, 201 bp, Homo sapiens
attgtctgcacccctcactgagcttggcctagaggcccagcctggcatggttgtgcctgggctgtgccgctcaacagccccagctcccaagcagacaaagrcctcttccaggaggagccaggtagaagatagttatacagccatatagctgcagatccagataaccttctttctttggaagttttcaagaaattcttaagc

SEQ ID NO: 523843 - DNA, 201 bp, Homo sapiens
aagccagaggtgatgtactttcaccattagcttaattttaacttaaaattaccagttccctttcttgcagtcagcttcataccatttttaaagtcaatacratggaaatcaataaatctgaattccgaacatgttgtgtggaatactcttaagtgtgtttgagagtagatctgccaattatgttgacaagggaatgatcaa

SEQ ID NO: 523844 - DNA, 201 bp, Homo sapiens
agtggcaattgtaaatattttgtaatttgctttaatttttttaaataaaagaaataaagtttattcacagcaatgatggccccactgtcttcccctcccccattaccatcgtcatgtgtcacgtgcgtccttcccatctatccattctttgatttacacgtgtatccacgaacaagatggagtgttgttttgtgcttccag

SEQ ID NO: 523845 - DNA, 201 bp, Homo sapiens
gatggagtctctgtcgcccgggctggggtgcagtagtgcgatcttggctcactgcaacctccgcctcctgggttcaagcagctcttctgcctcagcctccygagtagctgagattacaggtgcccgccaccacacctggctaatttttttgtattttttagtaaagatgggatttgttggccagactggtctcaaactcct

SEQ ID NO: 523846 - DNA, 201 bp, Homo sapiens
tgcctttggaggatcggatcaatcacttttctagaggaagtagcagtccctcttgtgagagcgcaaggtcattacttgtgctcctaagggcgtggacgtgytttgtggaatgaatgagctggtgtaatgagctcagattgcctgcccttaagcagcacagcattggccgaggacttgagagtcacattagtaagtttgaag

SEQ ID NO: 523847 - DNA, 201 bp, Homo sapiens
ctagagccgtaagagtgtattttgttgagatatttggccatttgtcctcggttcctgaaacagctccagagcataaaagtgaaagacagtcttttgtgggtttttttttttttttttttttttaatgaaatctcactgtcatccaggctggatggagtacagtggcaccatctctgctcactgcaacctcaacctccgcct

SEQ ID NO: 523848 - DNA, 201 bp, Homo sapiens
ttttttttttttttttttttttaatgaaatctcactgtcatccaggctggatggagtacagtggcaccatctctgctcactgcaacctcaacctccgcctytcgggttcaagcagttctcgtgcctcagcctacttagtagctgggtttggaggtgcctgccaccaagcccgactaatttttgtatttttagtagaaatga

SEQ ID NO: 523849 - DNA, 201 bp, Homo sapiens
tccctaggccttatgagagtatagagggagaaactgagtttattttttctactccttatcacagtttcatggtttaactcttactgttaaataataggaattttttttttttttttttttttttggagacagagtctcactttgttaccctggctggagtgcagtggtgcgatctctgctctgctcactgcaacctctgcc

SEQ ID NO: 523850 - DNA, 201 bp, Homo sapiens
tttgtgtaccaactaccaaaaactagacaaagcagcatagggataattctgccctttataagccagtttacaaaagacgaatttgtaacaatttcatttaratattgtatattaacacatttttatccacctctgaatatgtggaatctttttgttttttatgtatagtcaacaattgctatgcatctttcatacaaagga

SEQ ID NO: 523851 - DNA, 201 bp, Homo sapiens
ctttataatttttcaacttgtaaaatggtcataactgaaagatgtctacctgttttgtcttaaagaagaggcagaagttaactttgttttaagagatttgygtgtaacctgatttattttggccttgaatgtgatttctgattttcatgtggtctttcgtcatattatgtatgcacaaggaacttaggaaagaccagtcag

SEQ ID NO: 523852 - DNA, 201 bp, Homo sapiens
atggttcagctgtctttggttatgagggctggcttgctggctaccagatgacctttgacagtgccaaatcaaagctgacaaggaataactttgcagtgggytacaggactggggacttccagctacacactaatgtgtaagtatttctttcataggatactgtgatgtgggccctcagaggatgattttgatgtctgtcat

SEQ ID NO: 523853 - DNA, 201 bp, Homo sapiens
tttttccgttttgaaacgaattccccaagtttgtataatcatggttatctgttttagaaataattcgttggtggtatctcctttatgggtcgttatagttytattgtagctcctgaccgcataaaaaacattccaacaaatgggattgcttgaattttaatatcagcagtgggtcatgctcttgttcttggatagaaggtg

SEQ ID NO: 523854 - DNA, 201 bp, Homo sapiens
gaggttaatattttggtatttgggtgtcttgatagttcaatgaactgtttacaaaggggataaactaatatttaacttttttcgagacagggtctcactckgttgcccaggctggagtgcagtgagtgcagtggcacaatctcagctcactgcagcctcgacctcttgggctcaagcaatcttcccacctcagcctcccaa

SEQ ID NO: 523855 - DNA, 201 bp, Homo sapiens
ttgacgtatagaagtaaaaagttgttaattggggattctgcctttggaggatcggatcaatcacttttctagaggaagtagcagtccctcttgtgagagckcaaggtcattacttgtgctcctaagggcgtggacgtgctttgtggaatgaatgagctggtgtaatgagctcagattgcctgcccttaagcagcacagcat

SEQ ID NO: 523856 - DNA, 201 bp, Homo sapiens
aatacttgtttgattctttgtacttgtccagtcctaggaagtgaggctgtaggtaatagactgtttttccgttttgaaacgaattccccaagtttgtatartcatggttatctgttttagaaataattcgttggtggtatctcctttatgggtcgttatagttctattgtagctcctgaccgcataaaaaacattccaaca

SEQ ID NO: 523857 - DNA, 201 bp, Homo sapiens
ccaccaataatgaaatagacctttatgaaaactgtgcaattgtgtgcatgtttgtttttatgttcctttagaaaacattgactgttaccattgaatgagawggatcagtggatattaagatgaggttacaaattttgttaagttcagccattattacttttggtatcccagaacatgacaaattatgaataaaacaagtat

SEQ ID NO: 523858 - DNA, 201 bp, Homo sapiens
ctcctttatgggtcgttatagttctattgtagctcctgaccgcataaaaaacattccaacaaatgggattgcttgaattttaatatcagcagtgggtcatrctcttgttcttggatagaaggtgggagaatagagacattaacactggaatgttttttttctaccagcaatgtgtattcctccatcatatgctgaccttgg

SEQ ID NO: 523859 - DNA, 201 bp, Homo sapiens
ctatccagctgtctgaggctcttatttgtagggtacaagatggtcattagtgaggtatttttctttctttttttttttttgagctttgttgcctaggctgkagttcactggtgcaatcacagctcactgtgccctcagccacctgggcttgagatccttccactcaccccccacttccctggtagttgggtaggtgtgcac

SEQ ID NO: 523860 - DNA, 201 bp, Homo sapiens
tttttttttttgagctttgttgcctaggctgtagttcactggtgcaatcacagctcactgtgccctcagccacctgggcttgagatccttccactcacccmccacttccctggtagttgggtaggtgtgcaccatcataccaagctaggaaaattttgtacagacagacaggggtctcaccgtgttgcccaggctgttgaa

SEQ ID NO: 523861 - DNA, 201 bp, Homo sapiens
atcatttggagatctgttttggtcacatagtctgtttgttacctttatattgtagccctcagaatgctgaaagcaaagcaaagttgcatgtctaggcaacytaggccctggaaatgaaggcaggtgttcctggcctctggtgtgtcttcataatgttaggggtggtagagaatggagctagaaagaatctactctttacta

SEQ ID NO: 523862 - DNA, 201 bp, Homo sapiens
ttctgccttggggagggcatagtagctaaaggttgagccagtggccagtgatttaattaatcgtgcctttgtaatgaagtctcctttgtaatgaagtctcygtaaaaacccaaaggactgagtccagggggccttcaggaaggtaaacaataatacattcatgtcatgggagggtggggcaccccagctccacagggatgg

SEQ ID NO: 523863 - DNA, 201 bp, Homo sapiens
cttgtgtaaataagtcttataatactgattgatgattatatgtattgtgaaattgagttgaagcctcctcaggatataatacctatggaaagtgactggcytgaggaggaactggatctcactatcagctgatttccatcctgaatagttctgcacaaggtacaaataacagtagatcaagggaaaagaaagctggtacaa

SEQ ID NO: 523864 - DNA, 201 bp, Homo sapiens
cctctggtggccagcactagtaggtcagctgacaggctgaggaagtgacaggcaggctctggggatgactgtgaaagaaggcccagactgagtgacgtgcyaggtacatcacggttttttgtttttgtgtttttttgtcttaataggtgtgaagcttacactctctgctctggtagatgggaagagcattaatgctggagg

SEQ ID NO: 523865 - DNA, 201 bp, Homo sapiens
gtacttttgtggacttagaatgggggttttggttgtgggaatgagtctttgggtatactgaattatgttgaaaatttgaactgatttcacacagtccccastttacagatagattagttttagattttgaaatgcgcttttttgatggatacagtgttagacgttttatttccaggccaggctggtggagtttgtttaacc

SEQ ID NO: 523866 - DNA, 201 bp, Homo sapiens
cctaggccgcggcggccaagccggaggcccgcgccggactcggagtcggccctggcttcctaagatggccgcgctgccccgcggcccctcgcccctctctkcccgggatctccctttggccctttgaccccagcttaccgcacttcttgtccctcccgcagattcccctcttcccgcggcctcgccatggcgacccacgga

SEQ ID NO: 523867 - DNA, 201 bp, Homo sapiens
ccctaggccttatgagagtatagagggagaaactgagtttattttttctactccttatcacagtttcatggtttaactcttactgttaaataataggaattttttttttttttttttttttttggagacagagtctcactttgttaccctggctggagtgcagtggtgcgatctctgctctgctcactgcaacctctgcca

SEQ ID NO: 523868 - DNA, 201 bp, Homo sapiens
cctaggccttatgagagtatagagggagaaactgagtttattttttctactccttatcacagtttcatggtttaactcttactgttaaataataggaattttttttttttttttttttttttggagacagagtctcactttgttaccctggctggagtgcagtggtgcgatctctgctctgctcactgcaacctctgccac

SEQ ID NO: 523869 - DNA, 201 bp, Homo sapiens
aggcgtgagccactgcgcctggccaataataggaatgtctatccagctgtctgaggctcttatttgtagggtacaagatggtcattagtgaggtatttttctttctttttttttttttgagctttgttgcctaggctgtagttcactggtgcaatcacagctcactgtgccctcagccacctgggcttgagatccttccac

SEQ ID NO: 523870 - DNA, 201 bp, Homo sapiens
attgtgtcctactgagaatttgatttttgagttgaatggatacgaattaaatagtacctggtttgtttggcttaatacataatattgaattttattgtctyacgtgaataaaactgaacacttcatgattacatgatggggaaacatgtaggggctttgtctctattgaaatatttttcttacagttgtttttgtatttta

SEQ ID NO: 523871 - DNA, 201 bp, Homo sapiens
ccagaactcagcagcaccggcatttatgagaggtgtaagaatgtgaggataaaggattgtttgatctgattcttcagaggaattacttgtcgtttggagattttttttttttttttaaacattcatggttttgattctttaggaagagtcctggaagtagtaatgtgtgtaactaagtcatgaatttaaactttataccct

SEQ ID NO: 523872 - DNA, 201 bp, Homo sapiens
atggggaaacatgtaggggctttgtctctattgaaatatttttcttacagttgtttttgtattttattttaggcaaaagtcaacaactctagcttaattgsagtaggctatactcagactctgaggcctggtaagtattcttgataaagtaggattgttttgatagtattaaaaaatttagttttcattcttcagcttact

SEQ ID NO: 523873 - DNA, 201 bp, Homo sapiens
agaagatgatcaaaacaaaggatgatctcaacaagagctgtattttaagtatttagacagttctttgttagctggtttctagttggttatctagttaccawtgctgcagtcctgcagtcacctatacattatttaaatgtatttaactgttaaatgcgctacccaccaataatgaaatagacctttatgaaaactgtgcaa

SEQ ID NO: 523874 - DNA, 201 bp, Homo sapiens
tcaacaagagctgtattttaagtatttagacagttctttgttagctggtttctagttggttatctagttaccaatgctgcagtcctgcagtcacctatacrttatttaaatgtatttaactgttaaatgcgctacccaccaataatgaaatagacctttatgaaaactgtgcaattgtgtgcatgtttgtttttatgttcc

SEQ ID NO: 523875 - DNA, 201 bp, Homo sapiens
tcgaagcctgtcgaccagaaacccagtttgtttccccctatctttccaagaacttggaaattcggctgcttttggtggtcgccccaccgtctgaccacctyctctgcggaggaggggctgggctgctggatttcaaatggggaacaaggcccggggagttggtctgtggccgcatggacttttcagcctttgtacatgtct

SEQ ID NO: 523876 - DNA, 201 bp, Homo sapiens
ggcggcggagagtcgaagcctgtcgaccagaaacccagtttgtttccccctatctttccaagaacttggaaattcggctgcttttggtggtcgccccaccrtctgaccacctcctctgcggaggaggggctgggctgctggatttcaaatggggaacaaggcccggggagttggtctgtggccgcatggacttttcagcct

SEQ ID NO: 523877 - DNA, 201 bp, Homo sapiens
ctgaggaagtgacaggcaggctctggggatgactgtgaaagaaggcccagactgagtgacgtgccaggtacatcacggttttttgtttttgtgtttttttrtcttaataggtgtgaagcttacactctctgctctggtagatgggaagagcattaatgctggaggccacaaggttgggctcgccctggagttggaggctta

SEQ ID NO: 523878 - DNA, 201 bp, Homo sapiens
cctgaccgcataaaaaacattccaacaaatgggattgcttgaattttaatatcagcagtgggtcatgctcttgttcttggatagaaggtgggagaatagasacattaacactggaatgttttttttctaccagcaatgtgtattcctccatcatatgctgaccttggcaaagctgccagagatattttcaacaaaggattt

SEQ ID NO: 523879 - DNA, 201 bp, Homo sapiens
tttataatttttcaacttgtaaaatggtcataactgaaagatgtctacctgttttgtcttaaagaagaggcagaagttaactttgttttaagagatttgcrtgtaacctgatttattttggccttgaatgtgatttctgattttcatgtggtctttcgtcatattatgtatgcacaaggaacttaggaaagaccagtcagg

SEQ ID NO: 523880 - DNA, 201 bp, Homo sapiens
acctaaagaaaagttggaagaatggtacaatgaacatcatatgtccttaccttgcattgaccaattattaacaatttattaacaattattaacatttactrcatttattttatgtctgaaacttcacatacttttaaaaaaatgtatgttttgcagacatacagacatggcagcccctagcatgtgtatcctaagagtaag

SEQ ID NO: 523881 - DNA, 201 bp, Homo sapiens
gggctgctggatttcaaatggggaacaaggcccggggagttggtctgtggccgcatggacttttcagcctttgtacatgtctttgacgtatagaagtaaamagttgttaattggggattctgcctttggaggatcggatcaatcacttttctagaggaagtagcagtccctcttgtgagagcgcaaggtcattacttgtgc

SEQ ID NO: 523882 - DNA, 201 bp, Homo sapiens
ccgcatggacttttcagcctttgtacatgtctttgacgtatagaagtaaaaagttgttaattggggattctgcctttggaggatcggatcaatcacttttytagaggaagtagcagtccctcttgtgagagcgcaaggtcattacttgtgctcctaagggcgtggacgtgctttgtggaatgaatgagctggtgtaatgag

SEQ ID NO: 523883 - DNA, 201 bp, Homo sapiens
aatttattaacaattattaacatttactacatttattttatgtctgaaacttcacatacttttaaaaaaatgtatgttttgcagacatacagacatggcarcccctagcatgtgtatcctaagagtaagacatttttctttataagcacaataccattgtcgcatctaagaaaactaacattaatgtaataccaaatacat

SEQ ID NO: 523884 - DNA, 201 bp, Homo sapiens
cctaagggcgtggacgtgctttgtggaatgaatgagctggtgtaatgagctcagattgcctgcccttaagcagcacagcattggccgaggacttgagagtyacattagtaagtttgaagcgctatttgatatttagttgatgtagacatttgagtgaaacacacatggcagtattttttccaagtttcaatatttaaattc

SEQ ID NO: 523885 - DNA, 201 bp, Homo sapiens
cggcggacagccccgggggcagcggcggggtcctgtctgggagaggacagggttgcggcgggcggaacggtgtctccttcacttcgccctccagctgctgsagctgcagcccgaccgcgagcgtgccaagcggcttcagcagctagcggagcggtggcggcggcccccctcaggacaccaccaggtaccgccgcgcccgcc

SEQ ID NO: 523886 - DNA, 201 bp, Homo sapiens
gtattttaagtatttagacagttctttgttagctggtttctagttggttatctagttaccaatgctgcagtcctgcagtcacctatacattatttaaatgyatttaactgttaaatgcgctacccaccaataatgaaatagacctttatgaaaactgtgcaattgtgtgcatgtttgtttttatgttcctttagaaaacat

SEQ ID NO: 523887 - DNA, 201 bp, Homo sapiens
gttttgcactgtacatctcttcatctgtatcctttgtaatatcctttattaaaactggtaaatgtaaataaagtgtttcttgagttctgtgacctgctctmggagattaattgaacccaagaaggggcttgtgggaacctctgtttagaggtgccaggtcagaagcagagttaaaacaacctggggcttgcagttggcatc

SEQ ID NO: 523888 - DNA, 201 bp, Homo sapiens
gttttgtcaaggatttccttagagtaaattgaacctattcacccacatgcatcctaatatgcttttatgagttagaaaagggtaggtttccagccgtggtsttgcgtagtgtccaaaatgcaaagtttgtcccaggagctgtgagctcgtgtggcttttttttttttttttttttgagacggagtctcacttcgttgctca

SEQ ID NO: 523889 - DNA, 201 bp, Homo sapiens
ggggcggcggagagtcgaagcctgtcgaccagaaacccagtttgtttccccctatctttccaagaacttggaaattcggctgcttttggtggtcgccccaycgtctgaccacctcctctgcggaggaggggctgggctgctggatttcaaatggggaacaaggcccggggagttggtctgtggccgcatggacttttcagc

SEQ ID NO: 523890 - DNA, 201 bp, Homo sapiens
gcagcggcggggtcctgtctgggagaggacagggttgcggcgggcggaacggtgtctccttcacttcgccctccagctgctgcagctgcagcccgaccgcragcgtgccaagcggcttcagcagctagcggagcggtggcggcggcccccctcaggacaccaccaggtaccgccgcgcccgcctcacgccgacccaggggc

SEQ ID NO: 523891 - DNA, 201 bp, Homo sapiens
ttattattataaatgctaattactatactttactattgtaaaaagacattaaactattttaaaaattatacatataaataataataaaaatctgaagccayagaaaaacatgcatatagttgtgtatttaggtttgatgcaaaaattgagtttttaaaatttttttaatgttttatttatatattttttgagacaaggtct

SEQ ID NO: 523892 - DNA, 201 bp, Homo sapiens
ttgggggagtcaaaagctaaccttggaagccaggcacagtggctcatgcctgtaattccagcactttaggaggccaaggcaggtggatcgcttgagttcargagtttgagatcagcctgagcaacatggtgaaaccctgtctctaccaaaaatactaaaaattagccaggcatggtggcatgcatctgtggtcctagctgc

SEQ ID NO: 523893 - DNA, 201 bp, Homo sapiens
tgagcaacatggtgaaaccctgtctctaccaaaaatactaaaaattagccaggcatggtggcatgcatctgtggtcctagctgcccgggaggctgaagttkgtgggagatcgcactactacatgccagcctaggtgacaaagtgagagattctgtctcaaaaaaaaaagttatacttggattttcaactatgtgggttcaa

SEQ ID NO: 523894 - DNA, 201 bp, Homo sapiens
atcacttgaggtcaggagtttgagaccagcctggccaacacggcgaaactcggtctctactaaaaaatacaaaaattagccgggtatggtggcatacaccygtaaccccagctacttgggaggctgaggtaggagaatcgcttgaacccaggaggcagaggttgcagtgagccaagatcatgccattgcactccagcctgg

SEQ ID NO: 523895 - DNA, 201 bp, Homo sapiens
agcaacatggtgaaaccctgtctctaccaaaaatactaaaaattagccaggcatggtggcatgcatctgtggtcctagctgcccgggaggctgaagttggkgggagatcgcactactacatgccagcctaggtgacaaagtgagagattctgtctcaaaaaaaaaagttatacttggattttcaactatgtgggttcaagt

SEQ ID NO: 523896 - DNA, 201 bp, Homo sapiens
ggaggaggaccgtcttgtgggactgagccctcaaactgtgcgatctgacactctgtgggatctgacactgtctccaggtagatagtgttggaattgaactrgaggatacccagctggtgtccactgcagaactgattgcttacttggtgtgtggggagaaacctccacacatttggtcaccagaaatcttctgtgttgatt

SEQ ID NO: 523897 - DNA, 201 bp, Homo sapiens
tatgtgcaaatgctccaataaaggggaatacagggaactctagcagggcacagtggttcatgcctgcaatctcagcgctttgggagtccaaggcaggcagrtgacttgaggccaggagtccgagaccagcctgaccaacatggtgaaacccaatctctactaaaaatacaaattacccaggcgtggtggctcgcacctgta

SEQ ID NO: 523898 - DNA, 201 bp, Homo sapiens
aaggctcttcgtgtaagtgcaagtaacaggaaccaccttgggttcctttaaaaacaaaaggaatttattggaaaaacaatgggtaacctcacagatctaaygcaaaggctagaaaaatctaggctctgaaattaggctggtatcaaggtagagtaggcagccagaactgcggctgaaccactcacgggaacagtctggtga

SEQ ID NO: 523899 - DNA, 201 bp, Homo sapiens
ccaaggcaggcagatgacttgaggccaggagtccgagaccagcctgaccaacatggtgaaacccaatctctactaaaaatacaaattacccaggcgtggtrgctcgcacctgtaatctcagctactcaggaggctgaggcatgagaatcacttgaacccgggaggtggaggttgcagtgagctgagattataccattgcac

SEQ ID NO: 523900 - DNA, 201 bp, Homo sapiens
cctgaatttaaatgatctcagactgtgaggcaattcaggttccagggcattatggagaacaacagaacaaaattagtgaactctaacagctgttggtgtgrtaccaacagaggtggaaagcttaaatgagagatcagagaaagacactcaaagagagccctgcaaaaatcagggtcttcgcagggtgactgtgttcctgtc

SEQ ID NO: 523901 - DNA, 201 bp, Homo sapiens
tgttcactcatttgacaaataaaatttagatcataattattatttgccaaagacagtacaaagatactcaacataatactggcctatgttcccaaggaatrtaaagacaattacagcagagtgtgacaagtactgtaatagagataagcagaggattttgtgggagcactgaggagctaacacaatcttgacatctgggga

SEQ ID NO: 523902 - DNA, 201 bp, Homo sapiens
gcatgagaatcacttgaacccgggaggtggaggttgcagtgagctgagattataccattgcactccagcctgggcaacacagaaagagtgtctcaaaaaartaaaataaaataaaataataaaaatttaaaaaaaaaaaagagggaagatgcaggtcctctttccttgcctaatgcagccatggctcgtggtcccaagaag

SEQ ID NO: 523903 - DNA, 201 bp, Homo sapiens
tgctctttgtacatatagatgcttagtttgattaagtgatcccactgcagaagatatagatttgaactcaagatttcagccttcgacaattaaacagcactcttgttaaacacagggatggctaaattcagtgataattttcttaaccatctttacttaggcaaactgtgaggaaggcagcacagtatacaaggcacctgg

SEQ ID NO: 523904 - DNA, 201 bp, Homo sapiens
atcactcccttggcacataaaatactgacctctcaaatagttaccgtttcatgtgtacacactatcttcctattaataaacagactaccaatcctagcacygacctctcaaatagttacagtttcatgtgcatacactatcttcctattaataaacaggctaccaatcctagcacatggaagaaactgagaatgtcaatta

SEQ ID NO: 523905 - DNA, 201 bp, Homo sapiens
aactccaaagcattgaatgctggataaattgaccagtgtgtttgcacagtgaggtcatatatatacacagtaaggccataaatatatatatggtctctctmtatatagacagtaaacagaattgtgtctgttattaaaatattatagaacatactgggaaattctcagaaatccagaatttggatagggatgatggccaca

SEQ ID NO: 523906 - DNA, 201 bp, Homo sapiens
gaaggctaaggtgggaggatctcttgagaccagcagggcaaggttgcagtgagccatgatcatgtcactgcactccagcgtgggcaacagagcaagacctyatctcagaaaacaaaaaaaaacaaaacaaaacccacactatgtaactttcaaaaaacaatgaacgaaaaaataacacaggctaaagagcaataaaaaaga

SEQ ID NO: 523907 - DNA, 201 bp, Homo sapiens
ggaggatctcttgagaccagcagggcaaggttgcagtgagccatgatcatgtcactgcactccagcgtgggcaacagagcaagaccttatctcagaaaacaaaaaaaaacaaaacaaaacccacactatgtaactttcaaaaaacaatgaacgaaaaaataacacaggctaaagagcaataaaaaagaaccacatgaaagc

SEQ ID NO: 523908 - DNA, 201 bp, Homo sapiens
taataaacaagggctcactgttccatcacatcctcattccctccgtgaataagtttctctccaaatttagtggctcatttttgacttttaaaacactactmtatttcctcccccagttataaaactttaaaaacttgaaatactaaaacaaagaacattttaaaactaaataaaattcagtaagtttaaagaatgtcacac

SEQ ID NO: 523909 - DNA, 201 bp, Homo sapiens
ctcctgtaaaaactccctcttttttctttcttacagctaagcaagattcttactacagcttcatattggcagctaagcaaataattctattattgagaaaygtttttcaaaaatttaaatatacaagtttgcagggccaagtctcattacctcgtactgctcaagtgcttgcttccgttctaactcaagctcctccagctg

SEQ ID NO: 523910 - DNA, 201 bp, Homo sapiens
gaaataagaaaaacaaattcgaatttctgagaatttcccagtatgttctataatattttaataacagacacaattctatttactgtctgtatctagagacwatatatatatatatatatatacacactatacagcctgggtgacacagtgagaccattgtgccacagtgcagtggcacaatcatagctcactgtaacctca

SEQ ID NO: 523911 - DNA, 201 bp, Homo sapiens
cctcaaaattttaagtatttaaatgaaattcaatttgaattatttataaaaatgagctgaaacttaatgtcaatgaaaaatacctataaattcatattackgatttacaaatgctgtttcctaagcacattacttatggtaaaaatgaccccagttggtatactacatctagactggtaaaactataaacacctgatagga

SEQ ID NO: 523912 - DNA, 201 bp, Homo sapiens
tcctctctactttccaaatggcttccccgctgtattattgatttccattaggaataacaccattcacacatccatgtcaggattcttgctccccacccccmacatcaaaccaaggatataatcctgctgttttatttccctaaatgagctccctaataagtttgaaaactgtgggttatggcccactatgaagtcaactta

SEQ ID NO: 523913 - DNA, 201 bp, Homo sapiens
ctgggattacaggcatgagccactgtgcccaaccagtgtctatcattaaacacacatacacacagcaggccatcaagtatttgtgttctatagttttattrtaagtatatatgaaatatattcagcaaatatttgacatattagacatatttacatataataaaactatagaacacaaataagctacctgagcaataaaca

SEQ ID NO: 523914 - DNA, 201 bp, Homo sapiens
tcagcctcccaaagtgctgggattacaggtgtaagccaccatgcccagccacattcatgagatttgagagctatttcttgagctctttctgtacagttttktcatcttatacattattcattataacttttaccagaaccaatttctagaagggtggcataaggagctccacagaccctttccccaacaaaacaaccataa

SEQ ID NO: 523915 - DNA, 201 bp, Homo sapiens
agcacgatcagggtaatgttatcatctctgaaaaggaaattctttaaaaacatgcattgaggttgggcacaatggctcacacctataatcccaacactttrggatgctgaggcaggcagatcacctgaagtcaggagttggagactagcctggccaacatggtaaaactccatctctactaaaaatacaaaaattatccag

SEQ ID NO: 523916 - DNA, 201 bp, Homo sapiens
tgaaaaggaaattctttaaaaacatgcattgaggttgggcacaatggctcacacctataatcccaacactttaggatgctgaggcaggcagatcacctgargtcaggagttggagactagcctggccaacatggtaaaactccatctctactaaaaatacaaaaattatccaggtgtcgtggcacatgcctgttgtcacag

SEQ ID NO: 523917 - DNA, 201 bp, Homo sapiens
gttggagactagcctggccaacatggtaaaactccatctctactaaaaatacaaaaattatccaggtgtcgtggcacatgcctgttgtcacagctactcargaggctgaggaaggagaatggcttgagcccgggaggcagaggacacagtgagccgagatcatgccactgcactccacactgcagcctgggggacaaagag

SEQ ID NO: 523918 - DNA, 201 bp, Homo sapiens
attgaattcaatcttgtcaaagttgtcttggacctaaaaaggaataaggaaaaactccaacaaatcagtccgatataagcagtatctaaggcaagtaaaayagaaagacaaagcctcctttggctcccattttaatcaatccaattaaccaacagccatatcctacatatttgctttaggtattacactttcagtggctca

SEQ ID NO: 523919 - DNA, 201 bp, Homo sapiens
agtgagccgagatcatgccactgcactccacactgcagcctgggggacaaagagagactccgtctcaaaaaaaagaacccaggtcaggcacagtggctcaygcccgtaatcccagaactttgggaggccaatgggggcagatcacctgaggtcaggagtttaagaccagcctggccaacatggtaaaaccccatctcaaca

SEQ ID NO: 523920 - DNA, 201 bp, Homo sapiens
ccaaggatctccttccatatctatgctgaattaacagaaaaaataccaagccaggtctattaaatgctaaaatgaccaagtaaaaactccccaagccacamcttacctcttctgacacaataattaatggatacttgtcctcagataaaaagttgaaaataacccatattttaaatgcatcttcttctgtaatgagcaggg

SEQ ID NO: 523921 - DNA, 201 bp, Homo sapiens
agccgagatcatgccactgcactccacactgcagcctgggggacaaagagagactccgtctcaaaaaaaagaacccaggtcaggcacagtggctcacgccygtaatcccagaactttgggaggccaatgggggcagatcacctgaggtcaggagtttaagaccagcctggccaacatggtaaaaccccatctcaacaaaaa

SEQ ID NO: 523922 - DNA, 201 bp, Homo sapiens
agccttactcctattatttttttcctttggaagtttagggaaaataacaaaacaagcattctctttcttttactttgaaaggtatggaaagtcatcacccyggactttgaaacaagaatagtatttactcacacaaaacagccctgaaaacaacattctggatctcatgtgtttcccatgtataccagcactcagccagtt

SEQ ID NO: 523923 - DNA, 201 bp, Homo sapiens
aacataatggctaggctaatatattgacatgctatcatctttatgatgttttgaatctaactagcagacatacagtcaacttcctgttgaccatgtgcatstaatctgctttcttaattatacaaataatttttatttcaaattagcttctttctactactcagtataatcctctcacagcctggcatatacttggtagca

SEQ ID NO: 523924 - DNA, 201 bp, Homo sapiens
ctattgtaaatagtgctgcaataaacatacgtgtgcacgtatttttttttttttctgacacggattttcgctcttgatgcccaggctggaatgcaatggcrtgatctcgactcactgcaagctctacctcccgggttcaagcaattctcctgtctcagcctcctgagtagctgggattacaggagcatgccaccacacgta

SEQ ID NO: 523925 - DNA, 201 bp, Homo sapiens
cagatgagaaaatgaagacttgcaggttaaataatttgtccaaggttaagggattatagatgactttttttaaagtgtggggactacagctgattttaatygtgtatattaatcttttctgaattttctactgtaataaccatgtattaacatgtgtcactttttaggacagttagatagcacagaagccttactcctatt

SEQ ID NO: 523926 - DNA, 201 bp, Homo sapiens
cagctttttcactgttagtaaggtctataaaagggaagtcttcttcaaaaaatataacaacaggctgggcatggtggcttatgccaataatcctagcactytggggggctgaaacaagaggatagctagagcccagaagttcaataccaacctggacaacatggcaaaaccccatctctatagaaagtacaaaagctagct

SEQ ID NO: 523927 - DNA, 201 bp, Homo sapiens
cattataggagagctggttagctctgggaagggtgggttctaccaggagaaacctccctgaggaagtgacaatcaagtccagagctaaaggatcaacaaawattcgctgcatttgatgggcggagttggccttacagcacaggaagcagcatgtctgaaggctctgaggcaggaagggtcttggtaatctggggaacagag

SEQ ID NO: 523928 - DNA, 201 bp, Homo sapiens
tatagttttcatagaaaatagtgcataaagcattagtattcaagtgttttcacacaaggtataatgtcaaacaaaataaagaaattcaatcttgggtttcyggaatttcatataccatacactataccgaatggttttcaaggttctaagaataagaataaagaaatatatgtgaaagaatcttgctaaagaaaaaaaatg

SEQ ID NO: 523929 - DNA, 201 bp, Homo sapiens
gaacagagagaaggccaacgtgattgcactaaagtgaacaacccacatgtccaacaactgatgaactgaatatgtaaataaaacatggtatatccgtaacrgaatgttattcagccataaaaaggaatgaagtattgttataggatacaacgtggatgaaccctgaaaacattatgctaagtgaaagaagccagatacaaa

SEQ ID NO: 523930 - DNA, 201 bp, Homo sapiens
tccattaatattatatgtccagaataggcaaatatatatagacagaaagtagatttgcacttgcctagagctataggggagagggagtgattgctaaatgkgtatgagattttgggggcagcagtgagatgaaaatattctaaaatcaattgtggtaatggttgtagtgaatgaacaaaaaaaccactaaatggtacatgt

SEQ ID NO: 523931 - DNA, 201 bp, Homo sapiens
caggaaggtcaggcagaaggattgcttgtacccaggtggtcaaggctgcagtgagccatgatcatgccactgcactccagccttggagacagggcaagacrcttaatcaaaaaaaaaaaaattttttttgaaaattaaaaaaaaaaaagccatatcctggaataacatggaagatgtactggaggaggcaggcatgggcag

SEQ ID NO: 523932 - DNA, 201 bp, Homo sapiens
actcttcattttaaaagccacattctgcaccagtgcagtgcctcactcctgtagtcccagcactatgggaggctgatgcaagagaactgcttaaggctagragtttgagaccagcctgggcaatatagcaagacctcatttctatttattttttaaattaatataaacaatgtttaaaaaaataaaaataaaaaatacata

SEQ ID NO: 523933 - DNA, 201 bp, Homo sapiens
gtcaggcagaaggattgcttgtacccaggtggtcaaggctgcagtgagccatgatcatgccactgcactccagccttggagacagggcaagacacttaatmaaaaaaaaaaaaattttttttgaaaattaaaaaaaaaaaagccatatcctggaataacatggaagatgtactggaggaggcaggcatgggcagcagaata

SEQ ID NO: 523934 - DNA, 201 bp, Homo sapiens
tttcagaccagcctgggcaacagagacagacccggtctgtacaaataataattttaaaaattagctgagcacaacagtgcatgcctgtggtcccagctacycaggaaggtcaggcagaaggattgcttgtacccaggtggtcaaggctgcagtgagccatgatcatgccactgcactccagccttggagacagggcaagac

SEQ ID NO: 523935 - DNA, 201 bp, Homo sapiens
agtaacaggaaccaccttgggttcctttaaaaacaaaaggaatttattggaaaaacaatgggtaacctcacagatctaatgcaaaggctagaaaaatctargctctgaaattaggctggtatcaaggtagagtaggcagccagaactgcggctgaaccactcacgggaacagtctggtgaagacaccactgcctgtataac

SEQ ID NO: 523936 - DNA, 201 bp, Homo sapiens
gactatgattctatcagtgagaaaaagaaaggagaggcaaaaggaagacaaggagaatgttaagtcctactggcataaaagccactactcagaagaacggsattactgtacaaaaatatacaaaacaaacccaatcttcagaatttattcccagaaggggctaagaaaaccggacattcggatctaaaatatgtatatttt

SEQ ID NO: 523937 - DNA, 201 bp, Homo sapiens
ggcaactgggtcatgaggaaccttcagcaccgtgcacaggttatgggaaaggacctgcaagggaaaagaaaatcgtttaaagactcccactaaccagcacrtgacaccttcaccatgagtacaacatgctgctccctctcctgggtagagaaagatggaaaataaactagcaaaaacagggtgaggactgctcagctgcaa

SEQ ID NO: 523938 - DNA, 201 bp, Homo sapiens
cagctagacaaagcaatctcacataaatctactccaatgatcccttctttccccacacaagcactcctggccccagaggaaaatctataaaactaactcamattctacttctaaccagaagaaatgatgagagagtaaaagctgtcaaagcacagagtgagtccaaacagtaacatgacaaggtatgctgcctggctattc

SEQ ID NO: 523939 - DNA, 201 bp, Homo sapiens
ggaaaagtaactcaaagtcatctgttggaatgctgtccacagaatatatgccactgatgtcatacagcatggatggcactggattacactctaactgaacyacctttttaaagttattttggataacttaccaacttacccctcttcagaaactaaacagaaaatactggtaaatttgaccacagaaaaatgcttatattt

SEQ ID NO: 523940 - DNA, 201 bp, Homo sapiens
tcaaaaatgactacattctccaatataacataattttatctacgtctaagaatataatattcagaatctcctttcaggattttttttaaaaagccctcttrtattgcattttattctttaccaattttggaataatggaacactttaaagttattcattcactacggagccataaaaaagaacaaaatcatgtcttctgca

SEQ ID NO: 523941 - DNA, 201 bp, Homo sapiens
aagattcgcagaaagagtgacaggacaacagagctgagttctcaagcagcatcaagagtcaaacagatcaagaatgggataaagggtattccaggtagaasagaatgtgagaaagccccgaagtggaggcaagcatggttagtttggaagaactgtgagtatttaatgtgaatggggcacctggtgctggagggtggtata

SEQ ID NO: 523942 - DNA, 201 bp, Homo sapiens
aatatgcaagtagtatgaaaattatgttgtgacttgtacagaatactctttggacatgaggatagattcacttatcatcatagccatttagagaagaagaracccactttccctgtaaatctccaggggtattacatgccccaaattactatatttggagcttttctatactcaggctgctttgcctctgatccaaaaaca

SEQ ID NO: 523943 - DNA, 201 bp, Homo sapiens
atgtgtttcccatgtataccagcactcagccagttacgttttgtcaatatgcaagtagtatgaaaattatgttgtgacttgtacagaatactctttggacrtgaggatagattcacttatcatcatagccatttagagaagaagagacccactttccctgtaaatctccaggggtattacatgccccaaattactatattt

SEQ ID NO: 523944 - DNA, 201 bp, Homo sapiens
aaccatgtattaacatgtgtcactttttaggacagttagatagcacagaagccttactcctattatttttttcctttggaagtttagggaaaataacaaarcaagcattctctttcttttactttgaaaggtatggaaagtcatcaccctggactttgaaacaagaatagtatttactcacacaaaacagccctgaaaaca

SEQ ID NO: 523945 - DNA, 201 bp, Homo sapiens
ttttttgactgcccagcatttaacccttttcttatgtctggggaaacccctacctgccaatgtagaagctgaaaatgcaaatgtatcctttccaagactcygttgcagctagtgcacagtgcctgacctaggccatgccaattagatacatcatgccctgatgataattgggaagtgggcactatggagaactccccctca

SEQ ID NO: 523946 - DNA, 201 bp, Homo sapiens
ctgaaacttgtctctgcttccccacagccaggcactatatgcttggtcctgtgacctctaggttcttcccatctggccttcttttccattctcgctgtatkttagtcctcaatgccacttagcttctctcaacttctcacctcccatgtctccgtatttcatctattcacctatcactctcttcctcaaaaatcatcagtg

SEQ ID NO: 523947 - DNA, 201 bp, Homo sapiens
cccaggcctgaaacttgtctctgcttccccacagccaggcactatatgcttggtcctgtgacctctaggttcttcccatctggccttcttttccattctcrctgtattttagtcctcaatgccacttagcttctctcaacttctcacctcccatgtctccgtatttcatctattcacctatcactctcttcctcaaaaatc

SEQ ID NO: 523948 - DNA, 201 bp, Homo sapiens
tcattgttattaagcactaagaaactgttcccaccactacagcgaaactgccttctccttgatcaccagcgagcacctaattgttaaatccaagggcaacktctcacttaccattgtctaatttttccatagcatctaatgccagtaactacttctgtgcttcttaaaactttgtgtttcttagacatctatgactcagca

SEQ ID NO: 523949 - DNA, 201 bp, Homo sapiens
ccagctatttgggaggctgaggcaggagaatcgcttgaacccaggaagcagaggttgcagtgagccaagatcgcaccactgcactccagcctgggtgataragcgacactccgtctcaaaaaaataaaaaatacaacagtaatagtaataaagtgtgaaaataggatgggtgcagtggctcgtgcctgtaatcccagcatt

SEQ ID NO: 523950 - DNA, 201 bp, Homo sapiens
ggtggatcacctgaggtcaggagtttgagatgagcccagccaacatggtgaaaccccatctctactaaaaatacaaaaattagccaggtgtggtagtgggyacctgtaatcccagctatttgggaggctgaggcaggagaatcgcttgaacccaggaagcagaggttgcagtgagccaagatcgcaccactgcactccagc

SEQ ID NO: 523951 - DNA, 201 bp, Homo sapiens
ggtaacactatgcattaaacagaaagcttttgcacaaccacatatgtaaccgcttagtcgtatcaaggtccacatgtgaccagaaagcaggcagtccttargtggatggccaggggccaggcagtgtgaggtctccaagaacccagggctagagcagctaagccccaggtcatgttatcagctacagctgtggaataagcc

SEQ ID NO: 523952 - DNA, 201 bp, Homo sapiens
attacaatgggtgtatggccctgtgtgccagttagagtttactgcctctccactccaaatccaccctgaactgtcctgctggtgaaactaaaataattctccctcactagctggcagcataaagctttgtcagtagagggtgctgaagggacacgaggagggagggacttttcttctaggttccactcagcggctcctgtg

SEQ ID NO: 523953 - DNA, 201 bp, Homo sapiens
gggaggcagagcttgcagtgagccgagatcacgccactacactccagtctgggtgacagagcgagactccgtctcaaaaaaaaaaaaaaaaattacaagawctacgtgtttcaagctaaagttcttgtctttcatttaaacaatttactataaaaagtttctctttttttttaagacactgtctttttaagagactgacag

SEQ ID NO: 523954 - DNA, 201 bp, Homo sapiens
aaattcaatcttgggtttccggaatttcatataccatacactataccgaatggttttcaaggttctaagaataagaataaagaaatatatgtgaaagaatmttgctaaagaaaaaaaatgcttccttcctgtaggagatagctaaaaataaagaaaaaaaaggaaaaaaatgctgcaaagtatttattattaaattatatg

SEQ ID NO: 523955 - DNA, 201 bp, Homo sapiens
ggtgagccacactttgtggtgtatttttcagaagctttgtgaggtgattctgatacataacattggttaaaaaaccactggcttcaattatccaaaattaycccttattcaaaatatcactcattctataaacactaaataactaagactagtatttctagaattatctggttccctctgtgatctagtctctgctgtgtc

SEQ ID NO: 523956 - DNA, 201 bp, Homo sapiens
ccagctacaaggactgtgttaagctgatagcctccagctactttcagggtcccagtgacagagcggggtggtaggatcacttttcctcaatgtgggagtcycataaggggcaatctttgcttcagagctcctggttttgccaaatccatatgatggtttgacagttccttttcccaatttcatttcctctctcccacccca

SEQ ID NO: 523957 - DNA, 201 bp, Homo sapiens
caggtaagcacagctactcatatacccttgaccgaagactggtcctcctctatcgaggatggtcgttctctttgactgagcacacagcattgggagggacrcacatggagtggtgagggaggaaggggacaaccacctagccagccagatcagcgaaatcaaccctggtgatcaatggggtgacagatatcacagccagat

SEQ ID NO: 523958 - DNA, 201 bp, Homo sapiens
tgaaaatgctaaagcttggccacatatatcttctaaaccaaatattcaaggacttccacctctggtaccaacctacctttctgcctgacctctcagtattytgaaggaggaactctgccccagaccaacaggaaaatactgcaccaggagttcaaatactggcttctaaatgtggcttctaagctcacactcactagttct

SEQ ID NO: 523959 - DNA, 201 bp, Homo sapiens
atcaatgaaaatgctaaagcttggccacatatatcttctaaaccaaatattcaaggacttccacctctggtaccaacctacctttctgcctgacctctcartattctgaaggaggaactctgccccagaccaacaggaaaatactgcaccaggagttcaaatactggcttctaaatgtggcttctaagctcacactcacta

SEQ ID NO: 523960 - DNA, 201 bp, Homo sapiens
ataggtacacaagagacacatcctgttttgttcctggttctgtgagaaacaaatactaaataaaaactgtacttggcaggcacatatttccaggaatataktctaacaaaaattatggaacgaactcaaatggggacacactatttcttacaactatgtgacagaaacatcttaacttcactatgtaagtcacttaaatat

SEQ ID NO: 523961 - DNA, 201 bp, Homo sapiens
caagtcgaagttttagtagcaaggcaaaggaagcacatgtgtatagccacatgtgtgtgcagtatgactacacgtgggtgagacaagatggtagagccgawtgaccatgtcctggcacaagtcaagaatcagccttagctcttcctcacctacctcttactgaacccacgtcattcacactccaagcttcagtttcttcaa

SEQ ID NO: 523962 - DNA, 201 bp, Homo sapiens
gctaaactgaaattaactaagctaagccttaattttctcatctatgaaatgggcataataatacttacagaaatgctgtggggtgaaatgagataaatacrgagcaatttgcacaatgcccatcacatagtaggtactccactgatgttgcttcccttctgcactgagtgaaatactattcaaccattcaaaattacattt

SEQ ID NO: 523963 - DNA, 201 bp, Homo sapiens
tctactaaaaatacaaaaattagccaggtgtggtggtgcgcgcctgtactcccagctactcgggaggctgaggcaggagagtcgcttgaacccaggaggcrgagattgcagtgagccgagatcacgccactgcactccagcctgataacagagcaagactccatctcagaaaaaaaaagggagcaggggggcaaatttgtc

SEQ ID NO: 523964 - DNA, 201 bp, Homo sapiens
aatgtttgctaaactgaaattaactaagctaagccttaattttctcatctatgaaatgggcataataatacttacagaaatgctgtggggtgaaatgagayaaatacggagcaatttgcacaatgcccatcacatagtaggtactccactgatgttgcttcccttctgcactgagtgaaatactattcaaccattcaaaat

SEQ ID NO: 523965 - DNA, 201 bp, Homo sapiens
cccgagtagccgggactacaggcacacaccaccacatccagctaatttttgtatttttagtagacacggggtttcatcatgttggccaggatagtgtcgayctcttgacctcgtgatccgcccacctcagcctcccaaagtgctgggattacaggtgtaagccaccatgcccagccacattcatgagatttgagagctatt

SEQ ID NO: 523966 - DNA, 201 bp, Homo sapiens
tccttgtaggaggaaccatgtcccactcatctttaatccccaaagctcagcgtggtacctcagagctcaactaatgtttgctaaactgaaattaactaagctaagccttaattttctcatctatgaaatgggcataataatacttacagaaatgctgtggggtgaaatgagataaatacggagcaatttgcacaatgccca

SEQ ID NO: 523967 - DNA, 201 bp, Homo sapiens
tccagctaatttttgtatttttagtagacacggggtttcatcatgttggccaggatagtgtcgatctcttgacctcgtgatccgcccacctcagcctcccraagtgctgggattacaggtgtaagccaccatgcccagccacattcatgagatttgagagctatttcttgagctctttctgtacagttttttcatcttata

SEQ ID NO: 523968 - DNA, 201 bp, Homo sapiens
gtcttctctgtctagaataccttttcccacctctcgacccagttaattggtatttattcaagtcctacatcctctagaatattcctactcaaaacgaagcrtgcggaccagtgacgtcggcaccacctggaagcttgttagaaatgaagactgtcagaccaaccaaaggaccaaaaatcagaatctgtattttaattaaaa

SEQ ID NO: 523969 - DNA, 201 bp, Homo sapiens
aacaaattaaggcaaaaactctactcccagccaacagaacacagaactagggtcaaacacaaaaggagacctaaataaaaatgtttaaatattttcaattmtacgaacactggcaagatgaacagaactgaaccaatcccaaagtctcatacagacaagagagagacaaaatacaattgcacagttgcattatcaacatac

SEQ ID NO: 523970 - DNA, 201 bp, Homo sapiens
catgtgttcttccttgattttgtttttttacaaccctttagaaatataaaaactattccttagcacatgtgccacacaaatataggctgtgggctggattyagccagcaagctgtagtttgccaccacttgccatagattataagtagtttaccctcttaccatattttccttatgctttatgtcattccccactctgtct

SEQ ID NO: 523971 - DNA, 201 bp, Homo sapiens
gctggtctcaaattcctggcctcaagtgatcctcccaccctgtcctcccaaagtgattaacaggtgtgagccactgctcttccagaccagccaaacgtctgacagacagaaccagagaaagagacagctaagaagagttctcatgtagtaggaacaagtctcaaagactgaccttaaagactacatgtaggcctgaattta

SEQ ID NO: 523972 - DNA, 201 bp, Homo sapiens
atatttaagctttgtgcctccctatcatgtgttcttccttgattttgtttttttacaaccctttagaaatataaaaactattccttagcacatgtgccacrcaaatataggctgtgggctggattcagccagcaagctgtagtttgccaccacttgccatagattataagtagtttaccctcttaccatattttccttatg

SEQ ID NO: 523973 - DNA, 201 bp, Homo sapiens
ctggtctcaaattcctggcctcaagtgatcctcccaccctgtcctcccaaagtgattaacaggtgtgagccactgctcttccagaccagccaaacgtctgacagacagaaccagagaaagagacagctaagaagagttctcatgtagtaggaacaagtctcaaagactgaccttaaagactacatgtaggcctgaatttaa

SEQ ID NO: 523974 - DNA, 201 bp, Homo sapiens
tggtctcaaattcctggcctcaagtgatcctcccaccctgtcctcccaaagtgattaacaggtgtgagccactgctcttccagaccagccaaacgtctgacagacagaaccagagaaagagacagctaagaagagttctcatgtagtaggaacaagtctcaaagactgaccttaaagactacatgtaggcctgaatttaaa

SEQ ID NO: 523975 - DNA, 201 bp, Homo sapiens
cagccggtcgagtctccacagtctttctaatctggacagcacctcgagctcagtcacagccagagcagagacacttctccctctccaccagagtgttagtsattccaagaaactgtattagcccaggcaaagtacataaaggcaaagtctgcaaacaaatctggcacctggcctgaagcttccgcactgtctcttcatctt

SEQ ID NO: 523976 - DNA, 201 bp, Homo sapiens
ggtctcaaattcctggcctcaagtgatcctcccaccctgtcctcccaaagtgattaacaggtgtgagccactgctcttccagaccagccaaacgtctgacagacagaaccagagaaagagacagctaagaagagttctcatgtagtaggaacaagtctcaaagactgaccttaaagactacatgtaggcctgaatttaaat

SEQ ID NO: 523977 - DNA, 201 bp, Homo sapiens
cacagtggctcacacctataatcccagcactttaggaggccaaggcaggtgatcacttcaggccaggagtttgagaccagcctgccaacatggcaaaaacsctgtatctactaaaaacataaaaattagctgggcgtggtggcacatgcctgtaatcccagctacttgggaggctgaggcatgagaatcacttgaacccgg

SEQ ID NO: 523978 - DNA, 201 bp, Homo sapiens
atgaaataatgtcttttgcagcaatatggatagaactggaggctattatcttgaagtatttcttgaaataacccataaacagaacataaaatacatgttctttttttttttttttttttaagtagagacggggtttcaccgtgttagccaggatggtctcgatctcccaacttcatgatccacccgcctctgcctcccaaa

SEQ ID NO: 523979 - DNA, 201 bp, Homo sapiens
agactccgttgcagctagtgcacagtgcctgacctaggccatgccaattagatacatcatgccctgatgataattgggaagtgggcactatggagaactcyccctcataggaagaacagttccaggaaaagttgagttctggggcagtgatatggtttggctgtgtccctacccaaatctcaccttgaattcccaggtgtt

SEQ ID NO: 523980 - DNA, 201 bp, Homo sapiens
agctacttgggaggctgaggcatgagaatcacttgaacccgggaggcggaggttgcagtgcgcacagattgtgtcactgcactcctgcgtgggcaacagasgaagaccctgtctcaaaaaaaaataaaaataaaaataaagacaagacattctgtgtttatgaatcaaaagacttaaattttttcaaattttatattttat

SEQ ID NO: 523981 - DNA, 201 bp, Homo sapiens
tgaaataatgtcttttgcagcaatatggatagaactggaggctattatcttgaagtatttcttgaaataacccataaacagaacataaaatacatgttctttttttttttttttttttaagtagagacggggtttcaccgtgttagccaggatggtctcgatctcccaacttcatgatccacccgcctctgcctcccaaag

SEQ ID NO: 523982 - DNA, 201 bp, Homo sapiens
cgcctatcttcttcacagccatcatgttccagtaagaaaggacatgtatcattcttttttgactgcccagcatttaacccttttcttatgtctggggaaayccctacctgccaatgtagaagctgaaaatgcaaatgtatcctttccaagactccgttgcagctagtgcacagtgcctgacctaggccatgccaattagat

SEQ ID NO: 523983 - DNA, 201 bp, Homo sapiens
aataaaaaccctgtctcataatttgcttcctttatattttcaacttaccaatggcctggctgaattacctttgtaactagcaagtaaaatttttttaggctaaatgtctgtatgggaacagaaaacatggtatgattcgtaagatatccaaaccaattgtgaggcaaaagataaaaaaactaaaaaaagattttagttgaa

SEQ ID NO: 523984 - DNA, 201 bp, Homo sapiens
ttgcttgtacccaggtggtcaaggctgcagtgagccatgatcatgccactgcactccagccttggagacagggcaagacacttaatcaaaaaaaaaaaaawtttttttgaaaattaaaaaaaaaaaagccatatcctggaataacatggaagatgtactggaggaggcaggcatgggcagcagaataacatcagcgaagca

SEQ ID NO: 523985 - DNA, 201 bp, Homo sapiens
acctctaggttcttcccatctggccttcttttccattctcgctgtattttagtcctcaatgccacttagcttctctcaacttctcacctcccatgtctccrtatttcatctattcacctatcactctcttcctcaaaaatcatcagtggctcatctttccacactgcctacaggataaagtcaaaactctccagcttcatc

SEQ ID NO: 523986 - DNA, 201 bp, Homo sapiens
aagctcaaaacaatcacttagtgttcctggttagttcagcctgaaaaaccaagtaacaccaaatcaacatgacaatcagttgtcttttaacaatccaattrcaaatcaagttaacagagctgatgacttctatgaacgtgcacaggatgggtgcagagataaaggcctacgtactctcaactcaggtggggagccagtcaa

SEQ ID NO: 523987 - DNA, 201 bp, Homo sapiens
aaataaaaataaaaaataggccaggcacagtggctcatgcctatgtaatctcagcactttgggaggccaaagcataaagattccttgagcccaggagtttsagaccagcctgggcaacagagacagacccggtctgtacaaataataattttaaaaattagctgagcacaacagtgcatgcctgtggtcccagctacccag

SEQ ID NO: 523988 - DNA, 201 bp, Homo sapiens
atgacttctatgaacgtgcacaggatgggtgcagagataaaggcctacgtactctcaactcaggtggggagccagtcaagttacaactggagccagagagrcagagctccccggtagaaggcgcacagattgccaggaagatgcccagtgagattacagggaatgcaagaaggaaggagaaaaaaaatcaaggtaaggaaa

SEQ ID NO: 523989 - DNA, 201 bp, Homo sapiens
gagggttctttgaacctaagaggcaaacatgctttaaatacaggaagtattatattcttcaggataccccatcatttttctacagacaaaatagtaacttycctactttatttcttctttgaggaacatgcataaatgtcataccagctaaaacaattagaagatgtataccaaggggattaactgggccctcttacctat

SEQ ID NO: 523990 - DNA, 201 bp, Homo sapiens
caggatgggtgcagagataaaggcctacgtactctcaactcaggtggggagccagtcaagttacaactggagccagagaggcagagctccccggtagaagrcgcacagattgccaggaagatgcccagtgagattacagggaatgcaagaaggaaggagaaaaaaaatcaaggtaaggaaagggaagcagacagaagtggt

SEQ ID NO: 523991 - DNA, 201 bp, Homo sapiens
caactatgtgacagaaacatcttaacttcactatgtaagtcacttaaatatttatttaacatacttgacactactttctgggtaacagaaaactgaatcaraagcaaacattaactttttttttttttagatggagtctcgctttgttgcccagtggcacgatctcggctcactgcaacctccacctcctgggttcaagcg

SEQ ID NO: 523992 - DNA, 201 bp, Homo sapiens
tgttcttatttataagtgggaactaaaatatgtgtacacatggacatacagcaaggaataatagacattggagactcagaaatgtgggaaggcaggaggcyggcaagggatgagaaattacctaacagcaactatgcgagtgatgattacactaaaagcccagatttcatcactacacaatatatcactgtagcagaacta

SEQ ID NO: 523993 - DNA, 201 bp, Homo sapiens
gtacaataagcagtagcattaacaggtacagaaattcaatctccctaaggcagcaaaaagaagggcccaggctggcagattacaacttggggtacagggartacaggcacaagtcgaagttttagtagcaaggcaaaggaagcacatgtgtatagccacatgtgtgtgcagtatgactacacgtgggtgagacaagatggt

SEQ ID NO: 523994 - DNA, 201 bp, Homo sapiens
cagcagacactagggactactgggacgggaggtagagacgggggaagaggttggaaaactctagctgttgggtacaatgctcacttcctgggtgatagatycaatcataccccaaacttcggcattacacatatacccatgtaacagacctgcacatgtacccctgaatctaaaataaaagttgaaattttttttaaaggt

SEQ ID NO: 523995 - DNA, 201 bp, Homo sapiens
gcttgggcaacagaacaaggccctatctcattaaaaaaaaaaaaaagaaagaaagaaaaaatatattaaaaggtctattgatttaatttgatgagatgctrtaagctcttttaggacaaagatttatcttataccctaaaaacagcacatggtaagtgtttaccaaaatttacttgttggagaaaaacacgcttagatctt

SEQ ID NO: 523996 - DNA, 201 bp, Homo sapiens
tgttctttttaatccaaagatagatcatatatgaaaaccttcctcaatactcctttcaaatcagatgcatataaactatgatcccaatttccctgttagaygtatttctgttggatatttcctccgttgtcaccacagaggaagggaaaaagcagaaaagctgcccacctaacaaaggctaacataatggctaggctaata

SEQ ID NO: 523997 - DNA, 201 bp, Homo sapiens
tttatgaaacaaaagaaagtgaagaatacaaaactaaatttacctattacttctactgcacgaagattatgtaattattttgacaactatttgtcagaaayagtaggtttaatttgttacaataggatcatgagttaatttttttcctttttcttctttgcatttccaataatttggttataatgttttttgtaaaataac

SEQ ID NO: 523998 - DNA, 201 bp, Homo sapiens
agaaaaaggcatttctttccatctttgtcaggcaaggactaaaacagaaagcaaaattagttcctcaaaattttaagtatttaaatgaaattcaatttgawttatttataaaaatgagctgaaacttaatgtcaatgaaaaatacctataaattcatattactgatttacaaatgctgtttcctaagcacattacttatgg

SEQ ID NO: 523999 - DNA, 201 bp, Homo sapiens
aggagctcgagaccaatataggcaatatagcgacatcttatttctaccaaaaacattttttttaattagctgagcatgttggcatgtgcctttagccccarctactcgggagactgaggcaggaggatcacttgagcctgggaggtggaggctgcaatgaaggcaagactgtgctgctgcactccagcctgggcgacaaag

SEQ ID NO: 524000 - DNA, 201 bp, Homo sapiens
tgacaatcagttgtcttttaacaatccaattgcaaatcaagttaacagagctgatgacttctatgaacgtgcacaggatgggtgcagagataaaggcctaygtactctcaactcaggtggggagccagtcaagttacaactggagccagagaggcagagctccccggtagaaggcgcacagattgccaggaagatgcccag

SEQ ID NO: 524001 - DNA, 201 bp, Homo sapiens
tttggtcgggcctcctggttggtatctgtacctccaggtcgccaccttttatacatattctgccagagggatttttctaaaacaaaagccagagcctgacmctcccctctttaagccctgccctggctccctatcacctcaaagacagaggccaagctcctctgcatcccttggtgatcatcccccagcctactttctcaa

SEQ ID NO: 524002 - DNA, 201 bp, Homo sapiens
aatctttgcttaagaaaaagctcaaaacaatcacttagtgttcctggttagttcagcctgaaaaaccaagtaacaccaaatcaacatgacaatcagttgtmttttaacaatccaattgcaaatcaagttaacagagctgatgacttctatgaacgtgcacaggatgggtgcagagataaaggcctacgtactctcaactca

SEQ ID NO: 524003 - DNA, 201 bp, Homo sapiens
gactctgtagaatttcccaaatgtaagaaaaaagttcagatgctagacagacagacagacagacacacacacacacacataaaaggcaaatttccattacwtgggacacagtgaaagacaaaccagtgaggtaggtgaagactgatcattaggagatttatcattcatgttaaggagttaggactttatctggactgaaag

SEQ ID NO: 524004 - DNA, 201 bp, Homo sapiens
gccgctgtggtcctggtcgagtgcggtgaaggcgtgccagatggctttgagcagctcctccttcaagctccccatggccgcggccctgctgccccgccaasccctcctgcccagccagcccctccgcgcctcggacgcccctcaacctccgcagccacagcccgccgcgcagtcacctgacccgccaggccccgcccccgc

SEQ ID NO: 524005 - DNA, 201 bp, Homo sapiens
aggtcaggcattcgagaccagcctggccaacatggtaaaaccccatctctactaaatatacaaaaattagctgggcatgggggtgcatgccttcaaggcamgagaatcccttgaacccaggagatggaggttgcagtaagccaagatcacgtcactgcactccagactgggcgacagagcaagactgtctcaaaaaaacaa

SEQ ID NO: 524006 - DNA, 201 bp, Homo sapiens
tcctttttttccgaattaaagcatgatcatgtaccacatgataactatagttaataacaatgtattaaatacctaaaaattgctaagagagtagactttargtattctaaccacaaataaggatgtgaagtaatgcacactacctagtttcactttaccattccacaatgtatacacattgcaaagcatcatgttgtatcc

SEQ ID NO: 524007 - DNA, 201 bp, Homo sapiens
tctttggacatttaagaaaaagctatctcatacggcaattctactacagtcatatcctgccatcctaagaggctgagaattccacttcagatggagaccaygtctcatacctctttgtagcaccaaaaacctatacaaattcagcctcaacatttatgatgtgctccattaggaaaaaaaagaacaaagacaacactatta

SEQ ID NO: 524008 - DNA, 201 bp, Homo sapiens
tctcgaattcctgagctcaagtgatcagcctgcctcagcctcccaaagttctgggattacaggtgtgtgccactgcacccagctgacaattatatcttttttttttttttttttttttgattcagtgtctcgctctgtcccccaggctggagtgcagtggcatgatcacagctcactacaatgtctgcctcctgggtgatc

SEQ ID NO: 524009 - DNA, 201 bp, Homo sapiens
ctagtatgcaaaaatgcatgtaataagagtagtcttaagagttactgagtacatactatgtgccaggcattaaactaaaccctttaaatgcagaatttcayaacccttagactaaacattgtaattggctttatttcacagatgagaaaatgaagacttgcaggttaaataatttgtccaaggttaagggattatagatga

SEQ ID NO: 524010 - DNA, 201 bp, Homo sapiens
caggagaatggcgtgaacccaggaggtgaaggttgcagtgagccgagatggccccactgtgctccagcctgggtgatagagcaagactccgcctcagaaamaataaataaatgaaaataaaaataataataaaaaattaactctcaaaggtatgagaccatgttttccttaaaagttttctccctcagctccagcgttgcc

SEQ ID NO: 524011 - DNA, 201 bp, Homo sapiens
tcattaaatatatatgatattgattgtaagtttcagttggttattatattaagttctaatcatattacatattcagtttcctaatctttggacatttaagmaaaagctatctcatacggcaattctactacagtcatatcctgccatcctaagaggctgagaattccacttcagatggagaccatgtctcatacctctttg

SEQ ID NO: 524012 - DNA, 201 bp, Homo sapiens
aaaaatccccttttggcttgaatcagccagtgtggctgtttctaagtaagcatcctgactggcaactcagtcaagctggatacctccctcactccttttaraacatgccctttgctttcctgactcataaaacactgcctactgttgcttccatccagaattctcctctgccttcactattggccaaaatccttcccaccc

SEQ ID NO: 524013 - DNA, 201 bp, Homo sapiens
catctggtcaactgtagttgacatctgagacatttctgaatctgtcctttcccgtcctcctcccacccaatcatgggtcaaggctcataccttgacccacmatttccctcttgtccatcttcactgtctctagtccctattacctcttatcggggctattgcaatggtttctgttatcttcccaatccactctagccagca

SEQ ID NO: 524014 - DNA, 201 bp, Homo sapiens
cataaaggtatttttttttccacaagtagaggtatttttctgattttataaaaataatataaaatcatatagaaagtccaataatacagaaaggaataaaraagaaaaaaattcaccaaaatcccacaatctagaggtgatcactgtaaacattttggcaagcaccttcctgacagctctacacacatgctaacattacct

SEQ ID NO: 524015 - DNA, 201 bp, Homo sapiens
gccaccacacccagctaatttttatatttttagtagagacagggttttgccacgttggccacactagtcttgaactcctgacctcagatgatccactcacytcagcctcccaaagtgctgggattacaggtgtgaggcaccgcacctggcaagtaactttctaaagtgcaattctgatcacaactcatcattctctgaaaa

SEQ ID NO: 524016 - DNA, 201 bp, Homo sapiens
ttacctgaaggggattacaagatatctcctgttcagcaatgtggttttttttcactcaacgttatgccatggagatctttctggatcagtggttatgaatktgcacatgacaggaagatactttaaaaatattttggaaatggcctgggcgcggcggttcacgcctgtaatgccaacactttgggaggccaaggctggtgg

SEQ ID NO: 524017 - DNA, 201 bp, Homo sapiens
ctctactaaaaatacaaaaaagttagccaggcatgtggcgcacacctgtaatcccagctactcaggtggctgaggcatgagaatcgtttgaaccttgaagrcagaggttgcagtgagcggtgattgtgccactgcactccagcctgggcaagagcaagactcttgtttcaaaaaaaaaaaaaaaaaagtaaagaaagaaag

SEQ ID NO: 524018 - DNA, 201 bp, Homo sapiens
cagaaaagcaggtgttagagtagcagtacattaaagagagagagacagtcatacttaagtacaggaaaagccaaacattcttaacattcaataaagataayagaataaaaacttttagctccattagagttccagtctaacgatctgctgaatcaacatacaaaataaattaggtaaatgaaagactattgataagcctga

SEQ ID NO: 524019 - DNA, 201 bp, Homo sapiens
agttagccaggcatgtggcgcacacctgtaatcccagctactcaggtggctgaggcatgagaatcgtttgaaccttgaaggcagaggttgcagtgagcggygattgtgccactgcactccagcctgggcaagagcaagactcttgtttcaaaaaaaaaaaaaaaaaagtaaagaaagaaagaaataacagcagttaaacaa

SEQ ID NO: 524020 - DNA, 201 bp, Homo sapiens
gcactgagtgaaatactattcaaccattcaaaattacatttaaagaaagcatttatgaaacaaaagaaagtgaagaatacaaaactaaatttacctattayttctactgcacgaagattatgtaattattttgacaactatttgtcagaaatagtaggtttaatttgttacaataggatcatgagttaatttttttccttt

SEQ ID NO: 524021 - DNA, 201 bp, Homo sapiens
tcccaggctacaatgcagtggcatgatgccactctctgctcactgcaagctccacctcccaggctcaaaccaccctttcagactcaagccatcctcccacytaagcctcccaagtggctgggacaacaggtgcacaccaccatgcccagctaatttttgtatttttttgtagacacagggtttcaccatgttgcccaggct

SEQ ID NO: 524022 - DNA, 201 bp, Homo sapiens
tgaaggcagaggttgcagtgagcggtgattgtgccactgcactccagcctgggcaagagcaagactcttgtttcaaaaaaaaaaaaaaaaaagtaaagaargaaagaaataacagcagttaaacaaaacaataaggcagtaaaactgaatgagaattgatacctcttattttctggaaagcccaaatatcctatacagtgc

SEQ ID NO: 524023 - DNA, 201 bp, Homo sapiens
atgaaatgggcataataatacttacagaaatgctgtggggtgaaatgagataaatacggagcaatttgcacaatgcccatcacatagtaggtactccactratgttgcttcccttctgcactgagtgaaatactattcaaccattcaaaattacatttaaagaaagcatttatgaaacaaaagaaagtgaagaatacaaaa

SEQ ID NO: 524024 - DNA, 201 bp, Homo sapiens
gtagctgagacttcaggcatgtgccactgtgcccagctaatttttgtattttttgtagagacgaggtttcaccatgttgcccaggctggtctcaaactccycagctcaagcaatcctcccacctcagcctcccaaagattgcaggcatgaaccaccaagccaggctggttatattttacattgtattaattaaggcttaaa

SEQ ID NO: 524025 - DNA, 201 bp, Homo sapiens
ctgccagagggatttttctaaaacaaaagccagagcctgacactcccctctttaagccctgccctggctccctatcacctcaaagacagaggccaagctcytctgcatcccttggtgatcatcccccagcctactttctcaaacatgtcccacctcagactttacactccaccaataccaccaataccatagatcagggga

SEQ ID NO: 524026 - DNA, 201 bp, Homo sapiens
atggcaagatctcatctttacagaaaaattaaaaagttagccaggtgtggtggtacatgcctgtagtcccagctactcaggaggctaaacagggaagactrcttgagccaaggagtttgaggttacagtgagctatgaccacaacactgcacttgagcttgggcaacagaacaaggccctatctcattaaaaaaaaaaaaa

SEQ ID NO: 524027 - DNA, 201 bp, Homo sapiens
gtcaacttagtgggtagcaaccagcatttttttttaatggaatgaaaaacatgtgagttcatccacaataaagaaatagtgttttgtgataagttttgctktgagtgtgtgtgtgtgctgggtcatgatataaaatgtttatcttcctatgggttgcagtgaaaataaaatttaaaactttgtcccaggcagctctgaact

SEQ ID NO: 524028 - DNA, 201 bp, Homo sapiens
aaaccaaggatataatcctgctgttttatttccctaaatgagctccctaataagtttgaaaactgtgggttatggcccactatgaagtcaacttagtgggyagcaaccagcatttttttttaatggaatgaaaaacatgtgagttcatccacaataaagaaatagtgttttgtgataagttttgctgtgagtgtgtgtgtg

SEQ ID NO: 524029 - DNA, 201 bp, Homo sapiens
atgaatcctctctactttccaaatggcttccccgctgtattattgatttccattaggaataacaccattcacacatccatgtcaggattcttgctccccamccccaacatcaaaccaaggatataatcctgctgttttatttccctaaatgagctccctaataagtttgaaaactgtgggttatggcccactatgaagtca

SEQ ID NO: 524030 - DNA, 201 bp, Homo sapiens
agatatatgacagcatacaaactaattaatgtgatctgattactcgctgttaaatatttcaatatatcagaacattagtcttactcaacaaacaagcgctraattaaacatctcaaagtaatatgtacaagttattgatcaatttacaaactttccacataagccaattatttaaaattcatgctgcttcctcccactgga

SEQ ID NO: 524031 - DNA, 201 bp, Homo sapiens
ccacagctatgccctgccttaaaagcattgtctactctaagtcctgcccattcccgcatggactcattttccccttccaaacatcttttcatcctgcttgycactgcttaagtcttgcttgtttcctcttacctttaatctaaccagcctcaaaaatctcaaagtcattgttcacattgctctcaatccctaagtacaatc

SEQ ID NO: 524032 - DNA, 201 bp, Homo sapiens
agcttctgtaagcttcttaagcaggtattcaatctatataaagaatgtgaaataattatttcctagttaaaaaaaactttaacatagttatgtatttatgytataaacactgataagttcaacttaggaaatactctttacagttccaaaaatgcctacctttagagtctcctaaaatacagggagagaagtataaataaa

SEQ ID NO: 524033 - DNA, 201 bp, Homo sapiens
agtcatgcaagcataaccagacaaaaatttgcatataatttcagacacttcagagacaacccctccccaaagtgatatgcagacaatagaatccccttgayattaagtagcatttgagatttctaaaaaatcattatcttttagagatacctattgaaatatttataaacaaaataaaatacctgagatttgcttcaaaat

SEQ ID NO: 524034 - DNA, 201 bp, Homo sapiens
cagctgtagtccttactactcaagaggctgaggcaagaggactactttatttagcataggagttcaaggttgcagggagctgtgacagcattactgcactycagcctatgcgacagagcaagacattgtctcaaaaaaccaaaaaacatgtataacacatgaaatacacacacacatatacataggcgtgcatacacacaa

SEQ ID NO: 524035 - DNA, 201 bp, Homo sapiens
ttttactgtcatcaaagttgattttataatgttcaaattgttcttgctgccaacctcctcccatagcttctgtaagcttcttaagcaggtattcaatctayataaagaatgtgaaataattatttcctagttaaaaaaaactttaacatagttatgtatttatgctataaacactgataagttcaacttaggaaatactct

SEQ ID NO: 524036 - DNA, 201 bp, Homo sapiens
gcttccgttctaactcaagctcctccagctgctccatggcctcctgcagggcctgttccttcaggacacgctgattctccaactcctgcttctccgcctcrgttgtctgaatggcctgctgctgctccaagtgccacttttctagttcagccctcttggaagactcttcctccaacaacctacaatgtggaggaaagctcc

SEQ ID NO: 524037 - DNA, 201 bp, Homo sapiens
tttacttaagcaaaattatacattattataggccaaagcccttcaggcttgtttaagaatagctgctatttttagtattaaatctacaggtgctgatagcrcatgatagaatatacatatcattaaatatatatgatattgattgtaagtttcagttggttattatattaagttctaatcatattacatattcagtttcct

SEQ ID NO: 524038 - DNA, 201 bp, Homo sapiens
taaaaatataaaaaattagccaggtgtggtggcaggcacctgtaatcccagctactcgggaggctgaggcaggagaatggcgtgaacccaggaggtgaagkttgcagtgagccgagatggccccactgtgctccagcctgggtgatagagcaagactccgcctcagaaaaaataaataaatgaaaataaaaataataataa

SEQ ID NO: 524039 - DNA, 201 bp, Homo sapiens
ggctgaggcaagaggactactttatttagcataggagttcaaggttgcagggagctgtgacagcattactgcacttcagcctatgcgacagagcaagacaytgtctcaaaaaaccaaaaaacatgtataacacatgaaatacacacacacatatacataggcgtgcatacacacaaagaaagatcaggaacttgtattgtg

SEQ ID NO: 524040 - DNA, 201 bp, Homo sapiens
cgtgatccgcccacctcagcctcccaaagtgctgggattataggcgtgagccaccacgtccagccaaaatttttaaataaaataagtaaaacctcaatcamtgaaaatgttaaatgactgaggtaagtaaaacctcaatcaatgaaaatgctaaagcttggccacatatatcttctaaaccaaatattcaaggacttccac

SEQ ID NO: 524041 - DNA, 201 bp, Homo sapiens
gcagaacagtgacactagtatatacttttgtgtgtttaacaaatgggaaaataagaatgtatattcatatttccttaccttgggcaaggggtggaaattcrtaagtgggggagggggagaaaatctttcacagctgcctttttatatttgtatatttttgaacctacccaaatgattatattttttaaaagaaacaaaagt

SEQ ID NO: 524042 - DNA, 201 bp, Homo sapiens
ttttcatttagatctacaccagagttgtaaattcttttatttcaaaaaggtacaataaatttttttaaagctgtatttctaaaaacaacaggataaaaatrcacagacaatgagttcatttcaagacatttccagtgctgacatgtaattcaccctgcaaccataactgcaaagtaaagctataacagaggttgcaaaaaa

SEQ ID NO: 524043 - DNA, 201 bp, Homo sapiens
acctcgtgatccgcccacctcagcctcccaaagtgctgggattataggcgtgagccaccacgtccagccaaaatttttaaataaaataagtaaaacctcartcaatgaaaatgttaaatgactgaggtaagtaaaacctcaatcaatgaaaatgctaaagcttggccacatatatcttctaaaccaaatattcaaggactt

SEQ ID NO: 524044 - DNA, 201 bp, Homo sapiens
tcactagattttgctatatttaagaggaaaacatttactaaacaataagggtattaattttaagcttcattttgatctctcaaaggaacagaagaagctasaaataatggttacctccaggacaggggactaatatgggccaagggttaagggaaacttacttttcatttttgtaaataccctttagaattttataaaatt

SEQ ID NO: 524045 - DNA, 201 bp, Homo sapiens
caaaccatcgttcagtccagtttttccgtctgtggccctttttcatcatgtaaccctgtgaaagattaaatgtgatataaattattgtctttttatttgtmgagctgacatctcttccttgatatacttgcctactccattatttgatatatgatcctgaaaacatgaacaccaattgttcttggatcctctgagaatcta

SEQ ID NO: 524046 - DNA, 201 bp, Homo sapiens
tctacacagcaattttcatccaagagaatgtctcctttcttatccttcagatcctcactcacatagtaagaaattatgttgggttttagtacaaaccatckttcagtccagtttttccgtctgtggccctttttcatcatgtaaccctgtgaaagattaaatgtgatataaattattgtctttttatttgtcgagctgaca

SEQ ID NO: 524047 - DNA, 201 bp, Homo sapiens
gaagagaaaaaaagaaaatgttaagaaaaagggaaaagggaagagggaaggagaaaatgggacagaaaagagaaagatataaaaagattaagagattgaasgccaggcgtggtggctcacgcctgtcatcccagcaatttgggaggccaaggcgggcagatcacctgaagccaggagttccagaccagcctggccaacatg

SEQ ID NO: 524048 - DNA, 201 bp, Homo sapiens
tccttcatgggcatcacacatctcaagacattattattcactaaaatacattatagtttatgtgtgagatttcaggtatttaaatgttcttcaacacatamagacacggggacagttcatataaaaattaaaaactcaaaaatttatgttcttgagaatttcacttctttaaagaattagtacctatgaataaagtgtcct

SEQ ID NO: 524049 - DNA, 201 bp, Homo sapiens
ttacctgtctactacaggtcagtcagcatctggtatgggaggagtcccacataaaataagacatacgtagtctctaaggagcttctagtgcgaggaggaaracagactaacagttatgtgcaaatgctccaataaaggggaatacagggaactctagcagggcacagtggttcatgcctgcaatctcagcgctttgggagt

SEQ ID NO: 524050 - DNA, 201 bp, Homo sapiens
gtctactacaggtcagtcagcatctggtatgggaggagtcccacataaaataagacatacgtagtctctaaggagcttctagtgcgaggaggaagacagamtaacagttatgtgcaaatgctccaataaaggggaatacagggaactctagcagggcacagtggttcatgcctgcaatctcagcgctttgggagtccaagg

SEQ ID NO: 524051 - DNA, 201 bp, Homo sapiens
gaagggcccaggctggcagattacaacttggggtacagggagtacaggcacaagtcgaagttttagtagcaaggcaaaggaagcacatgtgtatagccacatgtgtgtgcagtatgactacacgtgggtgagacaagatggtagagccgattgaccatgtcctggcacaagtcaagaatcagccttagctcttcctcacct

SEQ ID NO: 524052 - DNA, 201 bp, Homo sapiens
aagggcccaggctggcagattacaacttggggtacagggagtacaggcacaagtcgaagttttagtagcaaggcaaaggaagcacatgtgtatagccacatgtgtgtgcagtatgactacacgtgggtgagacaagatggtagagccgattgaccatgtcctggcacaagtcaagaatcagccttagctcttcctcaccta

SEQ ID NO: 524053 - DNA, 201 bp, Homo sapiens
acttttcaaaaagccaaacaagattaagacacagtaaggacagagattcaaatttctgatatctaatttgcaacctactgtgtttagttggcctatcatcyatgccttatgcaaccccttcctgagataacaggtaacagcagctgtcatttattttaaaaataaaataaatacatcctttacatgcattatctaactgtt

SEQ ID NO: 524054 - DNA, 201 bp, Homo sapiens
tgacactactttctgggtaacagaaaactgaatcaaaagcaaacattaactttttttttttttagatggagtctcgctttgttgcccagtggcacgatctyggctcactgcaacctccacctcctgggttcaagcgattctcttgcctcaacctcccatatagctgggattacaggcatgcaccaccacacctggctaact

SEQ ID NO: 524055 - DNA, 201 bp, Homo sapiens
aactttattccaggcaagagtggctgagaattaagaggaggccagaagctccatgagaacaacacactaacacacggaccagctaaaagtgttgttggttkgttggttgactgctatgaggtctcgctatgttgcccaggctggtctcaaattcctggcctcaagtgatcctcccaccctgtcctcccaaagtgattaaca

SEQ ID NO: 524056 - DNA, 201 bp, Homo sapiens
acctcccatatagctgggattacaggcatgcaccaccacacctggctaactgccatggttatatctttttttttgagacaggatctcattctgtcacccakgctggaggcagtggagtgatcttggctcacagcagccttgacctcccaggctaaagcgattctcccacttcagcacccctgcctggctaattttttatat

SEQ ID NO: 524057 - DNA, 201 bp, Homo sapiens
gacgaaattcaactgtgctcattattatttaaaatattccttcctagccaatgaaatgtttttgctgccgagatcaacatagtttcagggctaggaaaacyagtatgtctcacttgatggtctggaaacacttctgagaacagttcaccacaagtatctccctaaaactgcactacattcatcttggtagaaccaacaccc

SEQ ID NO: 524058 - DNA, 201 bp, Homo sapiens
tgagacaggatctcattctgtcacccaggctggaggcagtggagtgatcttggctcacagcagccttgacctcccaggctaaagcgattctcccacttcakcacccctgcctggctaattttttatattttttgcagagatggggtttcaccatgttgcccaggctggtctcgaattcctgagctcaagtgatcagcctgc

SEQ ID NO: 524059 - DNA, 201 bp, Homo sapiens
ctcacaagctgtagataaacacttctagtgcacagctccacaaggatgttccacctaaaatcccaaatgtaccaaacccaccaccatgcaatatgtcccaratttgttcatcatcctaccattcattcacacacaccccttttagtgagcagctaccatgggtccaggcactttaataaatgtttcacatacatcaacttt

SEQ ID NO: 524060 - DNA, 201 bp, Homo sapiens
gccttgacctcccaggctaaagcgattctcccacttcagcacccctgcctggctaattttttatattttttgcagagatggggtttcaccatgttgcccakgctggtctcgaattcctgagctcaagtgatcagcctgcctcagcctcccaaagttctgggattacaggtgtgtgccactgcacccagctgacaattatat

SEQ ID NO: 524061 - DNA, 201 bp, Homo sapiens
acatacacgattacatcattgttattaagcactaagaaactgttcccaccactacagcgaaactgccttctccttgatcaccagcgagcacctaattgttmaatccaagggcaacttctcacttaccattgtctaatttttccatagcatctaatgccagtaactacttctgtgcttcttaaaactttgtgtttcttagac

SEQ ID NO: 524062 - DNA, 201 bp, Homo sapiens
ttttttatattttttgcagagatggggtttcaccatgttgcccaggctggtctcgaattcctgagctcaagtgatcagcctgcctcagcctcccaaagttytgggattacaggtgtgtgccactgcacccagctgacaattatatcttttttttttttttttttttttgattcagtgtctcgctctgtcccccaggctgga

SEQ ID NO: 524063 - DNA, 201 bp, Homo sapiens
ctttttatttgtcgagctgacatctcttccttgatatacttgcctactccattatttgatatatgatcctgaaaacatgaacaccaattgttcttggatcytctgagaatctatggaggggcattacacctagtcatgcaagcataaccagacaaaaatttgcatataatttcagacacttcagagacaacccctccccaa

SEQ ID NO: 524064 - DNA, 201 bp, Homo sapiens
tacagaaaacctgcattccatagcataaatacatataaagggctactggtcttgcaataacctaagttcacacttcaaagtccaggtacagtagttaaatkagcagtgtgggctaccttagtattaatcttgttttacattaaatgaaaatttcaagatagaacttaaatcccttccatttcatttgtgctttctgaacag

SEQ ID NO: 524065 - DNA, 201 bp, Homo sapiens
atggggtttcaccatgttgcccaggctggtctcgaattcctgagctcaagtgatcagcctgcctcagcctcccaaagttctgggattacaggtgtgtgccmctgcacccagctgacaattatatcttttttttttttttttttttttgattcagtgtctcgctctgtcccccaggctggagtgcagtggcatgatcacagc

SEQ ID NO: 524066 - DNA, 201 bp, Homo sapiens
tgatttaatccttatactttattcacgagtagaaggttgaaaataaattcacattagaaaaaaattttgtcagctatgtttaatttttggttcagaaaccmtggcaactgcatgcctatattattttggaaatgtaaatttggggattattttaaggttctagagtctaggtggaagaaggtgagaagctacttcagcatc

SEQ ID NO: 524067 - DNA, 201 bp, Homo sapiens
aggtctcactatgttgttcaggctagtcttgaactcctgacctcaaacaatcctctcacctcagcatcccaaaatgctggtattacagatataagccaccrtgcccagctgcaagtattttacttttaattcgaaagtattatcattatcattttttgaaaggcattattgaaatatacttgttatggagaacggtctaag

SEQ ID NO: 524068 - DNA, 201 bp, Homo sapiens
ctggtctcgaattcctgagctcaagtgatcagcctgcctcagcctcccaaagttctgggattacaggtgtgtgccactgcacccagctgacaattatatcttttttttttttttttttttttgattcagtgtctcgctctgtcccccaggctggagtgcagtggcatgatcacagctcactacaatgtctgcctcctgggt

SEQ ID NO: 524069 - DNA, 201 bp, Homo sapiens
aacctcctcagaataattctcccaggcaaaggcagaaaacccctaaaacaacctgggaaaaaaactgaaaaaaactgaccaaaatgaacactaaggaacaycatacactaattaagacaagagaatcaccttaaaacaacttgagacagaacagaagaaaactggatgaaaactgagcaagtgtgaggtaatcaaaatggc

SEQ ID NO: 524070 - DNA, 201 bp, Homo sapiens
aggtacatctgtgatgatgttacaagaggtattaactcctatgggatatgaagcacctaagccagggtgattcctacatctgcttaatgtggctttctctycttgcacttggaatgttgtggctggcaacccgtggtttctgtcctatatgtttatgagtaaactggcctttggtaaccttgtagatctccatgtttagtt

SEQ ID NO: 524071 - DNA, 201 bp, Homo sapiens
aagtctcaggaaagctgaaaattaattctatcgatgtaaaataacaaagtaaatacaaaaaccaaccgtaaaaattactttttggaaagtttcaatataayttaactcttggtatgaacctcctcagaataattctcccaggcaaaggcagaaaacccctaaaacaacctgggaaaaaaactgaaaaaaactgaccaaaat

SEQ ID NO: 524072 - DNA, 201 bp, Homo sapiens
caaatgctgtttcctaagcacattacttatggtaaaaatgaccccagttggtatactacatctagactggtaaaactataaacacctgataggatgccatrcattgggatttcctgagtatagcagctcttatcctgagcacctcccttgcaggaatcctggaaggtacatctgtgatgatgttacaagaggtattaactc

SEQ ID NO: 524073 - DNA, 201 bp, Homo sapiens
aaaaaaaaagttaacatttggaaggaaaaaatacttggtaaaggaacaacagacaggttaatcatttgaagtctcaggaaagctgaaaattaattctatcratgtaaaataacaaagtaaatacaaaaaccaaccgtaaaaattactttttggaaagtttcaatataatttaactcttggtatgaacctcctcagaataat

SEQ ID NO: 524074 - DNA, 201 bp, Homo sapiens
ttttaagtatttaaatgaaattcaatttgaattatttataaaaatgagctgaaacttaatgtcaatgaaaaatacctataaattcatattactgatttacwaatgctgtttcctaagcacattacttatggtaaaaatgaccccagttggtatactacatctagactggtaaaactataaacacctgataggatgccatac

SEQ ID NO: 524075 - DNA, 201 bp, Homo sapiens
gcaaggcacgatggcttctgcaggggaatgaagggccctctcccagcccagcgcccattcccaccttccgcacggcctccagctcctgctgcttgctttcrttggcggcctggagttccttcatttgtcgctccagttcctcttgttcagccagctgcttcttccggagttctttccgacgctggcgggcttctttgtgtg

SEQ ID NO: 524076 - DNA, 201 bp, Homo sapiens
attgtggtaatggttgtagtgaatgaacaaaaaaaccactaaatggtacatgttaaatagactaattgtatggtatgtaatttatatctcaataaaactgytactttaaaaaacaatatatctttacagtacatgactcacattgctggccaaagtattcatcagtataaagtcattcatgtttctcagcatgaaacccct

SEQ ID NO: 524077 - DNA, 201 bp, Homo sapiens
ttttaaaatcatttggaactttacccaagttaacaattcccaactactggttaaattaaggtatatccataaaacataaaaaccatgagaaagcttgctawgtacggatatgaaaagatctccaacataaattaagtgaaaaaaacaaggtacctaagaatatgtatgccatcttttgtataaaaaagaaaagggaggaag

SEQ ID NO: 524078 - DNA, 201 bp, Homo sapiens
taaggagccacattcatctcaataaatactttcatttgcattaagcgagtccctttttctgcatacacatatttcagttaggagtttttttaagattaaamatttttaatctataaaataatttgcatatcttctttctaaatttgttttgtttctcaaagcttcatttatgtggagatccttttctacatgctctactgg

SEQ ID NO: 524079 - DNA, 201 bp, Homo sapiens
gagctgaactgcagctcaagactcttattctagatcctgtctttcaccgtgtatctgtggatatgcaaatatttgttacctgtctactacaggtcagtcarcatctggtatgggaggagtcccacataaaataagacatacgtagtctctaaggagcttctagtgcgaggaggaagacagactaacagttatgtgcaaatg

SEQ ID NO: 524080 - DNA, 201 bp, Homo sapiens
gggagctaaggagaaaactaaaaagcaacacaccttgtccaggccagtaagaacagccttgacaccctcaagggaatgaaatttcccatcttcttctgacraaattcaactgtgctcattattatttaaaatattccttcctagccaatgaaatgtttttgctgccgagatcaacatagtttcagggctaggaaaaccagt

SEQ ID NO: 524081 - DNA, 201 bp, Homo sapiens
cattaaagagagagagacagtcatacttaagtacaggaaaagccaaacattcttaacattcaataaagataatagaataaaaacttttagctccattagarttccagtctaacgatctgctgaatcaacatacaaaataaattaggtaaatgaaagactattgataagcctgaacaacattttgcaaagaaagttttagta

SEQ ID NO: 524082 - DNA, 201 bp, Homo sapiens
ctgaaggcgtttcttttcctcttctgctgcacgagatgctgcttcctccagtttctagccaatcaaaaacccatccacagaaaagcaggtgttagagtagmagtacattaaagagagagagacagtcatacttaagtacaggaaaagccaaacattcttaacattcaataaagataatagaataaaaacttttagctccat

SEQ ID NO: 524083 - DNA, 201 bp, Homo sapiens
tatttagcataggagttcaaggttgcagggagctgtgacagcattactgcacttcagcctatgcgacagagcaagacattgtctcaaaaaaccaaaaaacwtgtataacacatgaaatacacacacacatatacataggcgtgcatacacacaaagaaagatcaggaacttgtattgtgaggctgatatggaataaaagat

SEQ ID NO: 524084 - DNA, 201 bp, Homo sapiens
gggtgtggtggtatgtgcctgtaatcccagctactcaggaggctaagccaggagaattgcttgagcctgggagacagaggttgctgtgagccgagattgcrgcactgcactcctgctggggaaacaagagcaaaaaaaagaaaaaaaaaagaatctcaaaaaaaaaaaagaatcctgactaacattttggcattttccaaa

SEQ ID NO: 524085 - DNA, 201 bp, Homo sapiens
ctgttattaaaatattatagaacatactgggaaattctcagaaatccagaatttggatagggatgatggccacacaacatagtaaatacattcacaactaytttactgtacactttaaaatggtaggttttatgttatgtgaattatatctcaatggttttatagtttcataaaaccatttaaaccagagcaagagccaag

SEQ ID NO: 524086 - DNA, 201 bp, Homo sapiens
gttattaaaatattatagaacatactgggaaattctcagaaatccagaatttggatagggatgatggccacacaacatagtaaatacattcacaactattytactgtacactttaaaatggtaggttttatgttatgtgaattatatctcaatggttttatagtttcataaaaccatttaaaccagagcaagagccaagaa

SEQ ID NO: 524087 - DNA, 201 bp, Homo sapiens
gttaaaaaaacaaaacctttaaaagtctctagaaattatgctaaggacattctaaaatggagaacatttatctaagaaaatctaactctcagtaagaatcrtgagggtctgtggcatatgatgcactccctccccacccccacagtgtcagtgagaagaaagctcttctcctggcagatggaaccccaaacaagggttccc

SEQ ID NO: 524088 - DNA, 201 bp, Homo sapiens
ctaacattttggcattttccaaactattaaattattattataaatgctaattactatactttactattgtaaaaagacattaaactattttaaaaattatrcatataaataataataaaaatctgaagccatagaaaaacatgcatatagttgtgtatttaggtttgatgcaaaaattgagtttttaaaatttttttaatg

SEQ ID NO: 524089 - DNA, 201 bp, Homo sapiens
agaccctttccccaacaaaacaaccataactggtgaaaattattgttaaaaaaacaaaacctttaaaagtctctagaaattatgctaaggacattctaaamtggagaacatttatctaagaaaatctaactctcagtaagaatcgtgagggtctgtggcatatgatgcactccctccccacccccacagtgtcagtgagaa

SEQ ID NO: 524090 - DNA, 201 bp, Homo sapiens
ctctaaaaggaacgaaccttttcccagtcagagcaaacgaaccttttcccagtcttctttagtgttacactaaagaagaaggaaaggtcatccagcatggrattcctcccacacttccctggctgtctccactccctggggcacctccagccctagaggaactcaagcatttcagttaatctgtatacgttaatggttttt

SEQ ID NO: 524091 - DNA, 201 bp, Homo sapiens
ctgctccccaaaacagggggtcagagatcaaagactggaccctgtgctgctactgtagtgaatactttttagtgttgtctcccatcccagacaccttaaakaatgtaaatggggcagcaaagtagaaactggcagaggataggctcaatttttccctttgggagtcttcattttattttgtcctccctgctgccatgaagg

SEQ ID NO: 524092 - DNA, 201 bp, Homo sapiens
agccatgatcatgtcactgcactccagcgtgggcaacagagcaagaccttatctcagaaaacaaaaaaaaacaaaacaaaacccacactatgtaactttcaaaaaacaatgaacgaaaaaataacacaggctaaagagcaataaaaaagaaccacatgaaagcacgggtttgggtgtttaagaacagtaccacttcctact

SEQ ID NO: 524093 - DNA, 201 bp, Homo sapiens
tgactcttctgctaaaatcactgccgagtggcactggaggggagttccaagaacctgattaacctcacagtgcagtgaatgtgcacctgtggggcctatawatgcctggcaatatgctacatgcttaattttctatttagaaaataatttttccttaaaaaaatttaaatttaaaatctaaatgtccaaaacaatttattt

SEQ ID NO: 524094 - DNA, 201 bp, Homo sapiens
tcactcagttgatgtgtattttttatgtgccttctacgtgcttttctaggcactggggatataagaatgaacaagactggatgggtctgttttttcattcyagtggtaaaagtatggagggggaatggacatttccaggtgcttaggctgcccagcctctgaactccttcatgtgtctaggggaactgccatagtagaaga

SEQ ID NO: 524095 - DNA, 201 bp, Homo sapiens
tccaagaagaccacctccagccttaactaatgggacccagcttccagactcaatatccttctttggagacactgaggtctcctcagatgtctcttggagtktgatgtacacaacagaacacgacactacagatgtggtctgaccagtgcagagtttattcactcagttgatgtgtattttttatgtgccttctacgtgctt

SEQ ID NO: 524096 - DNA, 201 bp, Homo sapiens
tggtctcgaattcctgagctcaagtgatcagcctgcctcagcctcccaaagttctgggattacaggtgtgtgccactgcacccagctgacaattatatcttttttttttttttttttttttgattcagtgtctcgctctgtcccccaggctggagtgcagtggcatgatcacagctcactacaatgtctgcctcctgggtg

SEQ ID NO: 524097 - DNA, 201 bp, Homo sapiens
atataaaatcatatagaaagtccaataatacagaaaggaataaaaaagaaaaaaattcaccaaaatcccacaatctagaggtgatcactgtaaacattttrgcaagcaccttcctgacagctctacacacatgctaacattacctgaaggggattacaagatatctcctgttcagcaatgtggttttttttcactcaacgt

SEQ ID NO: 524098 - DNA, 201 bp, Homo sapiens
atgggctaccactcgttgcctcacaaattgggccagtttatttatgggcagcttcaattcttacgaagttttttcttatactaagatgagttctcccatcyactaccctagttccacaaaggaagtatctactccctcttccctgtgatagccctttcgcaactggaaggcagctttgttgcctgttgagaacatccttct

SEQ ID NO: 524099 - DNA, 201 bp, Homo sapiens
ggtctcgaattcctgagctcaagtgatcagcctgcctcagcctcccaaagttctgggattacaggtgtgtgccactgcacccagctgacaattatatcttttttttttttttttttttttgattcagtgtctcgctctgtcccccaggctggagtgcagtggcatgatcacagctcactacaatgtctgcctcctgggtga

SEQ ID NO: 524100 - DNA, 201 bp, Homo sapiens
ttgtgagtgtttaccaggtaccagttactatgctaagagctggataacagtgaaccagttcttgccgtcacagaactcagagtctggagagggaatcagayaccaaacaatacagcaacaacccaacaactagtaagtgctatagaggaaaagcacaggctgctgcgggaaacacattataggagagctggttagctctgg

SEQ ID NO: 524101 - DNA, 201 bp, Homo sapiens
gtctcgaattcctgagctcaagtgatcagcctgcctcagcctcccaaagttctgggattacaggtgtgtgccactgcacccagctgacaattatatcttttttttttttttttttttttgattcagtgtctcgctctgtcccccaggctggagtgcagtggcatgatcacagctcactacaatgtctgcctcctgggtgat

SEQ ID NO: 524102 - DNA, 201 bp, Homo sapiens
atcccttgaacccaggagatggaggttgcagtaagccaagatcacgtcactgcactccagactgggcgacagagcaagactgtctcaaaaaaacaaaaaayaaaaaaacgaaatcagtgtaagaaaataagtgacttatactcatctttgtgacaaaaatattaattttaaaatgtcaaattctaaagatgagaaaaaaaa

SEQ ID NO: 524103 - DNA, 201 bp, Homo sapiens
gtagagccagaattggaacccaggctgtctgattccaaagcctattcttccaccatctgcatacgaattacaatgggtgtatggccctgtgtgccagttasagtttactgcctctccactccaaatccaccctgaactgtcctgctggtgaaactaaaataattctccctcactagctggcagcataaagctttgtcagta

SEQ ID NO: 524104 - DNA, 201 bp, Homo sapiens
acatcaagggtaagagacccaccccacatccagtttttcaaagaaaacacaattaattgtggaacacagtataactacaaaatgttttaaaatactgtaatttttttttttttttttttttgagacaaggtctggctctatctcccaggctacaatgcagtggcatgatgccactctctgctcactgcaagctccacctcc

SEQ ID NO: 524105 - DNA, 201 bp, Homo sapiens
ttaaaaaattcccttttaggccctgcacagtagctcatgcctgtaatcccagcactgtgggaggctgaggtaaagggatcacttgaggccaggagtttgayaccaggctgggcaacatggcaagaccccatcactgcaaaaaaaattttttttaattagctgagtgtggtgatgtacacctgtagtcccagctactcagta

SEQ ID NO: 524106 - DNA, 201 bp, Homo sapiens
aatagaaagggccaaattaatataccaaatattaattaggaatctctaagtatctaaacatttctaaaattctatgactaggctaaatttcagcatgagtrtaaaagaatataaatataaaaagagaaagaaatcaagggcctggattagattcaggaaaaaattaaatagcaaaaataggagtcgccaacatggttaaaa

SEQ ID NO: 524107 - DNA, 201 bp, Homo sapiens
gcacatggaagaaactgagaatgtcaattactcagtatgagccaagtacaggtacattatctttacatacacggtcaaagaagaggctgggcatggtggcycatgcctgtaatcccagcactctgggaggccgaggcaggcggatcacttgaggtcaggagtttgagaccaacctgaaaacatggagaaaccccatctcta

SEQ ID NO: 524108 - DNA, 201 bp, Homo sapiens
aaccttcagcaccgtgcacaggttatgggaaaggacctgcaagggaaaagaaaatcgtttaaagactcccactaaccagcacatgacaccttcaccatgartacaacatgctgctccctctcctgggtagagaaagatggaaaataaactagcaaaaacagggtgaggactgctcagctgcaagcccctacttgtaacctg

SEQ ID NO: 524109 - DNA, 201 bp, Homo sapiens
caggtacattatctttacatacacggtcaaagaagaggctgggcatggtggctcatgcctgtaatcccagcactctgggaggccgaggcaggcggatcacytgaggtcaggagtttgagaccaacctgaaaacatggagaaaccccatctctagtaaaaatacaaaaattagccaggcgtggtggcgcatgcctgaacccg

SEQ ID NO: 524110 - DNA, 201 bp, Homo sapiens
ttgcccactttttgatggggttttttcttgtaaatttgtttaagttccttgtaaattctggatattagacttgatttttttaaagcaccctgagagagaayaggtacagattaacacaaaacacagttcttaatttcaaagaatgaaccaagttggaaaaacatcaaaccaagtttagaagacagtggaggagagggaaga

SEQ ID NO: 524111 - DNA, 201 bp, Homo sapiens
gaacaaacatgcaacttcccctacagcccattccaggtcagtagcaaagccaagctgatgacatgcctcactgtagcctccagcccttccctgttcccacygacccaggctgagctactgcagctgctttctccagccatgtgatactcacaagcttctctctttccagctctgtgctgaacctggcctgaagttccactt

SEQ ID NO: 524112 - DNA, 201 bp, Homo sapiens
ctgggaggccgaggcaggcggatcacttgaggtcaggagtttgagaccaacctgaaaacatggagaaaccccatctctagtaaaaatacaaaaattagccrggcgtggtggcgcatgcctgaacccgggaggcggaggttgcagtgagctgagatcacgccattgcactccagcctgggcaacaagagcgaaactctatct

SEQ ID NO: 524113 - DNA, 201 bp, Homo sapiens
acaaaaggaatttattggaaaaacaatgggtaacctcacagatctaatgcaaaggctagaaaaatctaggctctgaaattaggctggtatcaaggtagagyaggcagccagaactgcggctgaaccactcacgggaacagtctggtgaagacaccactgcctgtataacatgagagcaccctcactattaccactgctacc

SEQ ID NO: 524114 - DNA, 201 bp, Homo sapiens
ttccagtctaacgatctgctgaatcaacatacaaaataaattaggtaaatgaaagactattgataagcctgaacaacattttgcaaagaaagttttagtayagtcattgaattaaattcacttgggattgcattcatgagatttttatttatttatttatttatttgagactgagtcttgctctgtcgccaggctggagtg

SEQ ID NO: 524115 - DNA, 201 bp, Homo sapiens
aaacaatgtttaaaaaaataaaaataaaaaatacataaataaatatgtataacaatacaaaaataaataaataaataaataaataaataaaaataaaaaayaggccaggcacagtggctcatgcctatgtaatctcagcactttgggaggccaaagcataaagattccttgagcccaggagtttcagaccagcctgggcaa

SEQ ID NO: 524116 - DNA, 201 bp, Homo sapiens
ctatttattttccaaatcagaactgttttgagaatgaaaaggaatgttattaataattataccagaatggcagggactctcccaggcaaaccaggaaatayagtcaccctaaccaagcatttatcacatcattccacaaatttctttttttttcttttttggagacagggccttgctctgtcacccaggctggagtgcagt

SEQ ID NO: 524117 - DNA, 201 bp, Homo sapiens
aggctattaggagttaagttttgggggagtcaaaagctaaccttggaagccaggcacagtggctcatgcctgtaattccagcactttaggaggccaaggcrggtggatcgcttgagttcaggagtttgagatcagcctgagcaacatggtgaaaccctgtctctaccaaaaatactaaaaattagccaggcatggtggcat

SEQ ID NO: 524118 - DNA, 201 bp, Homo sapiens
agtagtaattactgaaggaatgttaccaatcctgaatgaccaaatagaaactgcatatttcttccttattcctcaaaacctgacggcaacgttggcctgarcaggcctctgcctgcataccaatggccctctctggtctggagcgtgttgaagatgccaagctcttatcagaggtaattctgggtttgtggattttctcga

SEQ ID NO: 524119 - DNA, 201 bp, Homo sapiens
ggtcacctgagcccgaggaggtcagaggctacagtgagctgagatcgtgccactgaactccagcctgggtgacaggatgagacccctcaaaaaaaacaackattgccagtatatatgaaaccagatttttttttcttctaaaaacaaaaacaacaacaacaacaaaaaaaaacggatacctgtgcagcacgtgcaggtttg

SEQ ID NO: 524120 - DNA, 201 bp, Homo sapiens
aatcaacttcccacaaaactgcagtaatacatatagcatatttcacctgcgaattctttgcacaaaaacaatctattaactctcaacacggctcaaattakgaggtggctcaaaaaatgttgagtgtcatgtagaacgtcactctggacgtcacatggcactcaaacattcccgtagagtgactcttctgctaaaatcact

SEQ ID NO: 524121 - DNA, 201 bp, Homo sapiens
aataatgggaatctgaggtaggagggtcacctgagcccgaggaggtcagaggctacagtgagctgagatcgtgccactgaactccagcctgggtgacaggrtgagacccctcaaaaaaaacaactattgccagtatatatgaaaccagatttttttttcttctaaaaacaaaaacaacaacaacaacaaaaaaaaacggat

SEQ ID NO: 524122 - DNA, 201 bp, Homo sapiens
ggatcctgtacttgttcttttgatatgttaaattagcttcttggtctaaaatcatcattctagcctgtcaacatcttttttctgaatgcttatttttacaytccacacattatatatcttccccgtctgcaaatgagataaaggaacagaaagcaacacactcggagtgactcccaaatgctaggcattactctaaaacac

SEQ ID NO: 524123 - DNA, 201 bp, Homo sapiens
agcagagccagtagagaattcatcttgccggtggcagtaatatgcagtgttgagtgacagcaggagcgatggcactgctgatgcctggtaccaacatgggygccagcggcatcctcactggactcttcccatggcctggcttgggctgtagttggggctgctcatccccctgtgattcctgcctgtgttcaaggcctggtc

SEQ ID NO: 524124 - DNA, 201 bp, Homo sapiens
attgagaaatgtttttcaaaaatttaaatatacaagtttgcagggccaagtctcattacctcgtactgctcaagtgcttgcttccgttctaactcaagctsctccagctgctccatggcctcctgcagggcctgttccttcaggacacgctgattctccaactcctgcttctccgcctcggttgtctgaatggcctgctgc

SEQ ID NO: 524125 - DNA, 201 bp, Homo sapiens
  misc_feature (1)...(201): n = A,T,C or G
aatactttttcctcattctggaatgagggatactggagtcttctggtgtgatgtgcagtcaaaccacaggaaaggttccattccttacctaagtctcgttngtctaatacacctgccagctactgaataaaatgataatactgataaatggctgggcagaaatccaacacccaaatcagctgtcaaatttcaaaggcacat

SEQ ID NO: 524126 - DNA, 201 bp, Homo sapiens
  misc_feature (1)...(201): n = A,T,C or G
cacactgtttccatcccatagatttcacagaggtgattaggttctttgtagaatactttttcctcattctggaatgagggatactggagtcttctggtgtnatgtgcagtcaaaccacaggaaaggttccattccttacctaagtctcgtttgtctaatacacctgccagctactgaataaaatgataatactgataaatg

SEQ ID NO: 524127 - DNA, 201 bp, Homo sapiens
aaccccttctccagatgaggaagctgaaaagcagattaagacaaaagaatcagaaagaggactacaagttcttgatttgtaaaaggactgccccaaatcaytctaatcagggtgtttgcaagtttcttgaaaaagctgaatttatcccgcttcaaatgcctgttcctccaaaggccattctttcagcacccacataattgc

SEQ ID NO: 524128 - DNA, 201 bp, Homo sapiens
gaatgaaacatgccaagtgtatgatggttagggaaagaaatatcttagtagaagctagaaaacctctactaacaggatcacattccaaaagggcaaccagraaatggcaatgactccatgacttctctgtcagagcaccaatggtcaaaggcattccatgtcaagtgtcaggaaatggaaagcgaaccggccaatctagtt

SEQ ID NO: 524129 - DNA, 201 bp, Homo sapiens
gaactgcggctgaaccactcacgggaacagtctggtgaagacaccactgcctgtataacatgagagcaccctcactattaccactgctaccactgcccctrtccatgatcttctgcgtcactcactgcagattcaaagttctactggctgagcctgggtcacattcctgtgctctagctgccaaggaacagggaaaaatga

SEQ ID NO: 524130 - DNA, 201 bp, Homo sapiens
cctcggcctcccaaagtgtggtgggtgagccacactttgtggtgtatttttcagaagctttgtgaggtgattctgatacataacattggttaaaaaaccastggcttcaattatccaaaattatcccttattcaaaatatcactcattctataaacactaaataactaagactagtatttctagaattatctggttccctc

SEQ ID NO: 524131 - DNA, 201 bp, Homo sapiens
atctttgcttaagaaaaagctcaaaacaatcacttagtgttcctggttagttcagcctgaaaaaccaagtaacaccaaatcaacatgacaatcagttgtcttttaacaatccaattgcaaatcaagttaacagagctgatgacttctatgaacgtgcacaggatgggtgcagagataaaggcctacgtactctcaactcag

SEQ ID NO: 524132 - DNA, 201 bp, Homo sapiens
tgaagtgctttgagcactgaagggagtcatttcattaacagaagaaacttgagactacactttataaaagaattataagtgacatatgaacaagaaagtacaccaaggggaaaaagcataaatattagactagaaaaacagaatgcagaggctgctaggctctggaggagagacatactgaactgaaaagtttctctgtgt

SEQ ID NO: 524133 - DNA, 201 bp, Homo sapiens
ttccgaattaaagcatgatcatgtaccacatgataactatagttaataacaatgtattaaatacctaaaaattgctaagagagtagactttaagtattctmaccacaaataaggatgtgaagtaatgcacactacctagtttcactttaccattccacaatgtatacacattgcaaagcatcatgttgtatcccataaata

SEQ ID NO: 524134 - DNA, 201 bp, Homo sapiens
acatactgaactgaaaagtttctctgtgtttttcttttgtgtatgtttccaaaaaaccaaatacaaaaaggcttctgttagaaagcaccagattccccaaytggaacttggcatactgccaatggattaatgattttaatcatatagcccaaaccaagacttaatatgagaatcagagaaaagaaatgacaagatttggac

SEQ ID NO: 524135 - DNA, 201 bp, Homo sapiens
attccacaatgtatacacattgcaaagcatcatgttgtatcccataaatatatttttttggtcaattaaaaaaataaatatgaagaaaagaaaaaagcacratcagggtaatgttatcatctctgaaaaggaaattctttaaaaacatgcattgaggttgggcacaatggctcacacctataatcccaacactttaggatg

SEQ ID NO: 524136 - DNA, 201 bp, Homo sapiens
attttttacatcaaactttattgaggtgtaacttacagtaagatgcacctattttaatgggttttgtgtgatgggttttgtttaatgggttttgtttgatrggtttttttttttgacggagtctcatgctgtgtcgcccaggctggagtgcagtggcacgatcttggctcactgcaagctccgcctcctgggttcacacca

SEQ ID NO: 524137 - DNA, 201 bp, Homo sapiens
gggctaggcagcaaacattttaggctttgctgaccatgtggctttctgtttttttgtttgtttgagatggagtctcactctgtcgcccagactggagtgcsgttgcacaatctccactcactgcaacctctgcctcccgcgttcaaatgattttcctgcctcagcctccccagtagctgggattacaggcacatgctacca

SEQ ID NO: 524138 - DNA, 201 bp, Homo sapiens
ttttaaaattattctgtagagacagggtcttaccctgctgcccaggctggccttgaactcctgggttcaagtgatcttactaccttggcctcccaaagtgstggcatgagccactgttccctgacggttaaatcttaatctttccttcccgtggctggagagagactggggatgggcaagggcagcctgccttgctcttgg

SEQ ID NO: 524139 - DNA, 201 bp, Homo sapiens
cctcctcccaggctccgcccccggctcccacggggcaccgcggcttccggctatgggtaccgcgggccggaagtgtagcgttgccatggcgagggccgggygcggggcccgcccccgcagcgcctcagggagcgcggggcccactgacccgcggaagccagcggacccacttgtgcggcggtcggcgcggggcgcgaggtg

SEQ ID NO: 524140 - DNA, 201 bp, Homo sapiens
ctgtggctctaatttgcattttacgaatggcgggtgatgttgagcatcttgtcacggacgcatttgccatctgtgtatcctcttcagtgaggtgtgtcttygcatcctctgcccattttctaattggatcgtttcatttttactgctgattttttgagactcgtgtgttcttgacagcagtcctttgttctgtgtgtggtc

SEQ ID NO: 524141 - DNA, 201 bp, Homo sapiens
tcatagggaaggctgcttgtggccctggcttctagaaaggtgtgatttgcaggggctgctaggagccctccctgccctctcttccctttcttttggtctasggctggcttttatcttcagttctcgttgagtctcttttcaaatgcagatgcctcaggctgccagcttctttcatttaggcatctgggcctttgacacctt

SEQ ID NO: 524142 - DNA, 201 bp, Homo sapiens
tgagcctcctcccttcccctttgctccaggcatctgtagtgggagagaggtcagggctgcggtcattctcgagtgcccctgtgaggccgggtggggtgtgsatggcggtcgcgtcacacacaggcgctgcggggcaggcggggatgtggggtgtccacaggtaggcctgctcctccactgcacacagacacccccttctgt

SEQ ID NO: 524143 - DNA, 201 bp, Homo sapiens
atttgccatctgtgtatcctcttcagtgaggtgtgtcttcgcatcctctgcccattttctaattggatcgtttcatttttactgctgattttttgagactygtgtgttcttgacagcagtcctttgttctgtgtgtggtctgtggatatttactcactcagtagctgtcttttcatcctcctctcagggtttttagcaagg

SEQ ID NO: 524144 - DNA, 201 bp, Homo sapiens
agtggggctcccagataaattgggggcccctgagcaggaaggacctgactggcttaatttgacctggcccaggacagttccctttctgaaagaagggggcrttctatgaaacacctgggtagaagtccagcagtgaagagttgggtcagtgtgtagatggccatgaggcctggctgggtggagaataggactcctggcagg

SEQ ID NO: 524145 - DNA, 201 bp, Homo sapiens
gtggcgcacggggccgacctgaacgcaaagtccctgatggacgagacgccccttggtgagcttgcggggcccacctccacctgggggagaggacaggcggrgagggcgcccctgacgcctgcgcccacttctcagatgtgtgcggggacgaggaggtgcgggccaagctgctggagctgaagcacaagcacgacgccctcc

SEQ ID NO: 524146 - DNA, 201 bp, Homo sapiens
tcaggtgatccacccgccttggcctcccaaagtgctgggattacaggcatgagccactgcgcccggtctcttttttttttttgagacagagtcttgctctrttgcccaggctggagagcagtggtgtgattagagatcactgcagcctcaaactcctgggttcaagcaatcctcctgctttggcctcccatatgttgggat

SEQ ID NO: 524147 - DNA, 201 bp, Homo sapiens
tggttctctctccgcttggaccccctcctgcctgtgtcaggaatggtgccctgcaggggccagcttttgccccatctctcctgtctgtcccttcatgaccrtacagcctgaacccaaggccagggaggggggaggagcctcctgatggctctgggaccttcactgcccgcaggaggacaaccccgaagtggtcaggccgca

SEQ ID NO: 524148 - DNA, 201 bp, Homo sapiens
ccggggctcccgtgctgaccgcccagatgccacccgctgcactgtggcactcgggctttcaccctgcgatgtgcggccagagggcaggcaggctcacttcyctctggctccccagcactgtgagtccctctagctgacctgctctgggggttttagtagggtggcgtcctagaaatggggctgtcaaaaggtgtacttttt

SEQ ID NO: 524149 - DNA, 201 bp, Homo sapiens
gtgcctgccctaggctctgcttgtgactctcttctcctcacctgtgccccacgcttgcagccccagctgtgtgggttccacttctggtgctctggagtctkgggggaagaggcactgtggtggcccttgagactccttcctgcctccctccggagcagagagtaaagaggagccggcagtgtctggcctgcatctttccat

SEQ ID NO: 524150 - DNA, 201 bp, Homo sapiens
tgccgtccacaggtgcccctggtggagctgctcgtggcgcacggggccgacctgaacgcaaagtccctgatggacgagacgccccttggtgagcttgcggrgcccacctccacctgggggagaggacaggcggggagggcgcccctgacgcctgcgcccacttctcagatgtgtgcggggacgaggaggtgcgggccaagc

SEQ ID NO: 524151 - DNA, 201 bp, Homo sapiens
tcctcctgtttcatgcatcatcagtctccttcatcacgtgaattttttgaactttgtcatcctatgtgttgtgtcgttctgttttctttatttctttttayttattcatttatttttgagacgaagtcttgctctgtcgcccaggctggagtgcagtggcaccatcttggctcactgcaacctctgcctcctggattcaag

SEQ ID NO: 524152 - DNA, 201 bp, Homo sapiens; identical to SEQ ID NO: 309773

SEQ ID NO: 524153 - DNA, 201 bp, Homo sapiens
gtttatttctctatgcctaagccagtaacttaggtcttacttaccaaactgtatataataagtcttgacatctaatagtgtaagtacttcaaatttgttckctttcaggcttatccctagtgttcttggccttttgtgtttccatataagtggagaattagcttgtgagtctcacactgttggggttttgattgggactac

SEQ ID NO: 524154 - DNA, 201 bp, Homo sapiens
cagcattttgggaggccaaggcataaggattgcttaagaccaggaattccagacaccagcctgggcaacatagggaaacactgtctctacaaaacaaattwaaaaattagctgggtgtaggccgggcatgctggctcacacctgtaatcccagcactttgggaggctgacatgagcggatcacgaggtcaggagatcgaga

SEQ ID NO: 524155 - DNA, 201 bp, Homo sapiens; identical to SEQ ID NO: 309779

SEQ ID NO: 524156 - DNA, 201 bp, Homo sapiens; identical to SEQ ID NO: 309781

SEQ ID NO: 524157 - DNA, 201 bp, Homo sapiens
ttgccatggcgagggccgggcgcggggcccgcccccgcagcgcctcagggagcgcggggcccactgacccgcggaagccagcggacccacttgtgcggcgrtcggcgcggggcgcgaggtgaggcgcggactcccgggtcctgcggcgggagcggagcgagggagaggggccccggccagggacagcagtggcgggcccgg

SEQ ID NO: 524158 - DNA, 201 bp, Homo sapiens
tgggcgttgctggctgaggcccagggcagcaggtgccaacggtcaggaaaggcagggagccgaaggctgccggtgggcgcttcgcgttttgttccaaggcraaggtgtgtggattctccgcagcccgtcggtcaggtagacagctccggaattgtcttcattttcagatgaggaaatcgaggccgcagagaagggacttac

SEQ ID NO: 524159 - DNA, 201 bp, Homo sapiens; identical to SEQ ID NO: 309764

SEQ ID NO: 524160 - DNA, 201 bp, Homo sapiens
gttgctcagcatgcaggggccctgtcgcgggcacagcccaaggctgcctccccacggtgcgtgccctggtgctgcgggtgcagcacggaaaccccggcttytactgtacaggacactggcccctctcaggtcagaagacatgcctggagggatgtctggctgcaaagactatttttatcctgcaactcttgataaagggct

SEQ ID NO: 524161 - DNA, 201 bp, Homo sapiens
gacccacttgtgcggcggtcggcgcggggcgcgaggtgaggcgcggactcccgggtcctgcggcgggagcggagcgagggagaggggccccggccagggasagcagtggcgggcccgggaaggaggggcactgggtcgacaccgagagaggaggccgggccggggaaggatgaggcagaggagagggaggaggccgggaag

SEQ ID NO: 524162 - DNA, 201 bp, Homo sapiens
agtggctggcagggagggagggctctggcatgccaggtgtggtctgcctcctctgtcctcatggatgcggacctggcagcatgcctgcaagactggctctyctgcctctctggtacccatgctgtgtctctagagggcaaggggaggacttgggagcctgggcagggtgtctggccagtgtgtgcttgccctggcctctgc

SEQ ID NO: 524163 - DNA, 201 bp, Homo sapiens
ccgggcgcggggcccgcccccgcagcgcctcagggagcgcggggcccactgacccgcggaagccagcggacccacttgtgcggcggtcggcgcggggcgcraggtgaggcgcggactcccgggtcctgcggcgggagcggagcgagggagaggggccccggccagggacagcagtggcgggcccgggaaggaggggcactg

SEQ ID NO: 524164 - DNA, 201 bp, Homo sapiens
tcgagctggatttcctccctgttggctggggccatccctcgtgtctctgattggcctgtcctggcctcatccctcacctgcttgggatgcacttggactcygctttgccccgagggttgcctgggctggcacctagcaagggggctcctcctgtatgactgtactttggggtctgtgttctagggattcttgaacctctgg

SEQ ID NO: 524165 - DNA, 201 bp, Homo sapiens
aggtttgtggagtagagggagccgccctgcccagccccctcagcctgggtgtgtccatttggtgggactacgagctggccaccaggctctcatggctcagycaaggggcaagtcttctcagctctggtgggctgttcctggtccatcttgtggctgggaggagtagacaaagcttccactagaagttctgctagggcagcc

SEQ ID NO: 524166 - DNA, 201 bp, Homo sapiens
aacaaaacagtcagagacagagtctttctctgtcccccaggctggagtgcagtgttgatttcggctcactgcaacctctgcctcccaggctcaagtgatcwtcccacctcagcctcccaagtagctggaactgcaggggtgcaccaccatgcctggctaattttttaaattttgtagagatgagagtctccctgttttgcc

SEQ ID NO: 524167 - DNA, 201 bp, Homo sapiens
aacagagcaacactccatctcgggaaaaaaaaaaacaatagataaagaaaaataaataaaaaaagaaaagagatggctcagagatcccttgtagacttccygggtacccatgtggtaacgttgcacctgtcaatggagtacagcagttcaaggggatgttgacaccaatgtgctccattgaccttattcagatttcacagc

SEQ ID NO: 524168 - DNA, 201 bp, Homo sapiens
gaatagtttcaatttcatatggttctgctgctgggtgttatgcagggggaatctgaggagcactgagatcactgggaaagaggccgggtgcgtggctcacrcctgtcatcccagcacttcgggaggccgaggcagaatgaagaatctcatgccaggggccagaaaggaggctgagaccagagtgtgagtaggagtcagccc

SEQ ID NO: 524169 - DNA, 201 bp, Homo sapiens
ccctagcacttgtgccacatctatccattggccaaaatgagaactgggtggcagttccaggcccttctttcatgccgaggctctcctggcactggtgcacrcacacctaaagggaggccttttcatcagacttgctcagccaggagctcagagccttccatgtcacatcctgtgctgggacccctgtgccagaggctcagc

SEQ ID NO: 524170 - DNA, 201 bp, Homo sapiens
ggcatctgggcctttgacaccttgctgtgagttagtttattcgatttattttgaagccaggtggcaaggggaaaggaaattgaagagggagatgcaacgcktcccctggtttctggggagaggcttccccaattctccagcccctgacagacattgcgtgagagctcatggttagcgggccagtccctggtgtggtccacg

SEQ ID NO: 524171 - DNA, 201 bp, Homo sapiens
gagcagcctagcagggaacgcctcgctggggtgggcggccctttctggaaagggtgggtgggaggagcctgacatgcctttcccccgcccctctctgaacstggggcagaatgggggcagagtagctccccgtacccccaggactgttgacctgcagtgctctctgtggacaaagggtgggcctcacacagggcaggacct

SEQ ID NO: 524172 - DNA, 201 bp, Homo sapiens
ttctcgttgagtctcttttcaaatgcagatgcctcaggctgccagcttctttcatttaggcatctgggcctttgacaccttgctgtgagttagtttattcratttattttgaagccaggtggcaaggggaaaggaaattgaagagggagatgcaacgcttcccctggtttctggggagaggcttccccaattctccagccc

SEQ ID NO: 524173 - DNA, 201 bp, Homo sapiens
tgggggtcggggacagtgcccagtatcctccatggggctcctcccgcctgggtcccacactcaggcagctggcctgggctttgaggagtggaatgaacccmccgggttatctgtttagaactggaatgaaccgacccgggaatctgtttgacattccaaggaggtttgggggaaggtttgtggagtagagggagccgccct

SEQ ID NO: 524174 - DNA, 201 bp, Homo sapiens
tggtctcgaactcttgacctcaggtgatccacccgccttggcctcccaaagtgctgggattacaggcatgagccactgcgcccggtctcttttttttttttgagacagagtcttgctctgttgcccaggctggagagcagtggtgtgattagagatcactgcagcctcaaactcctgggttcaagcaatcctcctgctttg

SEQ ID NO: 524175 - DNA, 201 bp, Homo sapiens
atgccgccacgaccggcttttgtatttttagtagaaatggggttttaccctgttggtcaggctggtctcgaactcttgacctcaggtgatccacccgcctyggcctcccaaagtgctgggattacaggcatgagccactgcgcccggtctcttttttttttttgagacagagtcttgctctgttgcccaggctggagagca

SEQ ID NO: 524176 - DNA, 201 bp, Homo sapiens
ggccctggcttctagaaaggtgtgatttgcaggggctgctaggagccctccctgccctctcttccctttcttttggtctagggctggcttttatcttcagytctcgttgagtctcttttcaaatgcagatgcctcaggctgccagcttctttcatttaggcatctgggcctttgacaccttgctgtgagttagtttattcg

SEQ ID NO: 524177 - DNA, 201 bp, Homo sapiens
gccaacatcaatgcctgtgacagtgagtgctggacgcctctgcatgctgcggccacctgcggccacctgcacctggtggagctgctcatcgccaggtaggrcctgttgggcgtccttggcagggagaggcttcctctcagatggccgctcaggaggctcctcttgggcagtatctgtggctctcggcctcctgtgttcccg

SEQ ID NO: 524178 - DNA, 201 bp, Homo sapiens; identical to SEQ ID NO: 309780

SEQ ID NO: 524179 - DNA, 201 bp, Homo sapiens
taataagtcttgacatctaatagtgtaagtacttcaaatttgttctctttcaggcttatccctagtgttcttggccttttgtgtttccatataagtggagmattagcttgtgagtctcacactgttggggttttgattgggactacgtcaaatcttggatgaatttggggagaaatgacatcttttcagttctgggttttg

SEQ ID NO: 524180 - DNA, 201 bp, Homo sapiens
ggccctcaacatccttctcagcataacactgcagccatggaaattatcatgagacgtgaatcctctttgctccaacaattgtccggctgtgacaattctakgaaagtaacacaggcattgactgcctgctcaccaatggttgttccagcagcctccagggagcaatgatttggtttgaaatctgggatcctgggcacaaga

SEQ ID NO: 524181 - DNA, 201 bp, Homo sapiens
taagccatcgacataagttgtcatttcattgttcagtgaaatcacccagaataagtttttcgactctcctagactccacccacccagccaactcacagttstgtatgtctagccctgagcactctctgctctgtatccatactgcaggtcacctgtgtcccctctccaaatctactcttccttcctccctagctcagcatt

SEQ ID NO: 524182 - DNA, 201 bp, Homo sapiens
gaagttgccctaagtctctgattccttcagttcaaaacaattgtgctaaagagccaaaaaatgagtcctgaatggtgggagtcctggaagccgtaagaggygcagggagggtgtggctgtgtccagcacaccaaaccacctggaacaaaggagctttgctcaggcaaaggagctctccccgagagcccaggactcccttag

SEQ ID NO: 524183 - DNA, 201 bp, Homo sapiens
tcattgttcagtgaaatcacccagaataagtttttcgactctcctagactccacccacccagccaactcacagttctgtatgtctagccctgagcactctstgctctgtatccatactgcaggtcacctgtgtcccctctccaaatctactcttccttcctccctagctcagcattcagttgtccaagccaaaggcctggg

SEQ ID NO: 524184 - DNA, 201 bp, Homo sapiens
ggccctgcccaagccaagctaatgagtaggattttgtttgatatattataaggagtcataggtgagttttgtttttagcacttaacagttttcaaggcacrtctgttattgatcctcacagcagctacaagagggaagcagggcaggtattatccatccattggacataaattgaagcttgagaagtaaagccctggccca

SEQ ID NO: 524185 - DNA, 201 bp, Homo sapiens
gtacagccttggcctcaaaggagccattgtgaccttatccaggctgggatctgttgattgaggacagtggcatcccctcgagttgcatggcgccattacaytcacggaggacgtgaacggtatgggggaagcaatttgagatctagccaggctgggttgggtgcctcatttgtactccaaaacatagccactgtttccttt

SEQ ID NO: 524186 - DNA, 201 bp, Homo sapiens
cggcctcccaaaatgctgggactgcaggcctgagccaccacgcttggccttgttttgtttttttttgagacagggtctcactttgtcacctgtgctggagygcagtgacgcgatctcggcttactgcagcctcccaggttcaagcgattctcctgcctcagcctcccgagtagctgggattacaggtgtacaccatcacgc

SEQ ID NO: 524187 - DNA, 201 bp, Homo sapiens
atatttctggctatcacagcttatgaaggaggttgctactggcatctagcaggcagagtgagtgctgctgttaaacccaccacaggacacagaacagtctmctgcaacaaagaattacccaaggcctggcgcggtggctcacacctgtaatcccagcactttgggaagccaaggcaagcggatcacttgagcccaggagtt

SEQ ID NO: 524188 - DNA, 201 bp, Homo sapiens
gttttccaggacatgccccagccacggcttgctctcaactgtgttggtgggaaaagctccacagagctgctgcggcagttagcgtaagtcccttgggcctkcaggtccagctcgccagagctctccaggtctttagctgggaggaccatcaagtgactgagtcccatcgccagttcgagccaagtccaggtcagcacaatg

SEQ ID NO: 524189 - DNA, 201 bp, Homo sapiens
gagtgacagactgaagagtctgggggctgagcatgtcatcacagaagaggagctaagaaggcccgaaatgaaaaacttctttaaggtacctaggaagaggracattgcccctccagtccacgcacatctccctgaagaaagttgacatgcattagagaaactggggactggccccattgttcctctctggaaacctccctt

SEQ ID NO: 524190 - DNA, 201 bp, Homo sapiens
ctgcatgaaattaggtggctggtccctgctcaagcctggcttaaacctaatcccagcttcctgcaaaaagaagcacgggttctcccagctgtggcagagargtcctggggggctttggtggaaaaagctggcagatgtgaccagggacctatgtttggtttccagacctgatatccagaagctgagtgacagactgaagag

SEQ ID NO: 524191 - DNA, 201 bp, Homo sapiens
aatcccagcattttgggaggcccaggcgggtggatcatgaggtcaggagtttgagaccagcctgaccaacatgataaaaccctgtctctactaaaaatacaaaaaaaaaattagccaggcgtggtggcacgcacctgtaatcccagctactcaggaggctgaggcaggagaattccttgaacccgggaggcggagcttgca

SEQ ID NO: 524192 - DNA, 201 bp, Homo sapiens
gttgggaggatgacgaaggctataaaatattttacatagcagggcagggtctaaattatatccagtgtagatgctgagttgccaagtcctgggaggcatcrtgagtgttgtggaagtttaggaggcattaggagaacagtgagaaacagtggaaggtctgagaagactcagcagccaggtcctgggtccctgttgagcctg

SEQ ID NO: 524193 - DNA, 201 bp, Homo sapiens
tcccacagctgacccacataggaccaggacaccattagaatcccagcaactggatagtgagcaggcatgcccaagagctttggaagcataggccaagggcsccgagctgccactgtgaccagatgctgagccaacaaggctccaagcaatttccctaaggtgacacagtgaggacactgtggaaccaaggctggagtctct

SEQ ID NO: 524194 - DNA, 201 bp, Homo sapiens
ctgggcagataacctgggtctgaccccaggcttcacctttccctgactgtgaatttgcctctcaaatcatcagatttttcttctgtaaaatggagaataargaacgtggagggtgaaacactacagcataatacttcacacagtgctgggcatacagtgcagagactgtccgctgcttatattcttcttccctttcataaa

SEQ ID NO: 524195 - DNA, 201 bp, Homo sapiens
ggtgtgggtgtgaaatgcctgtgattagcagcagctgttctccagatgagccgtctgcaggctgtgtcagccctgtctggcctcccttttctggaatgtgwggctttttgagaagattgcagtggggagtaaactaagcattgtgaagtgcctgcgacatgctggtttcatttcatatgttacctgattttcatgataacc

SEQ ID NO: 524196 - DNA, 201 bp, Homo sapiens
gaggttttgagggggtgatggacctctcacctgggtgaatgttgttgctttcacttagaaagatgttagcttggttcctaggaaacatgctgaaacctcaygaggagtacactctcgaaaactgctgcagggtcacattctctagagcttgggattgaattctgtcattcagcaaaaatgtgttgagctggggctaagctc

SEQ ID NO: 524197 - DNA, 201 bp, Homo sapiens
cctctagttcaaaacatgatacttccaaccgggcgcgatggctcatgcctgtaatccctgcactttgggaggctaacatgggcagatcatggcgaaacccygtctctactaaaaatacaaaaattagctgggcatgggggtgcaagcctgtagttccagctactcgggaggctgaggcaggagaattgcctgaactgggag

SEQ ID NO: 524198 - DNA, 201 bp, Homo sapiens
caccctgggtgtcaatccctgcacagcctacaggatgttgatggacttcgagcaactgcagccaggtaggaacccacaggttgggggagcaggccagggtytcgcaactagggtgccactcacatcctgaccccaaggccaggagaacttgcaaggtggaggttttgagggggtgatggacctctcacctgggtgaatgtt

SEQ ID NO: 524199 - DNA, 201 bp, Homo sapiens
caaagcattatattcaactttggcttcacagcacagtcaccatttgtagtgcttttattttttgtatttgcccacataaaatatcagacagcttttattttatatatatatttatttatttatttatttattttgagatgagatcatgccatgttgcccaggctggtcttgaactcctgggctcaagggatcctcccacct

SEQ ID NO: 524200 - DNA, 201 bp, Homo sapiens
ttctctagagcttgggattgaattctgtcattcagcaaaaatgtgttgagctggggctaagctctgggatacaaaggcagacaagatagacacagtccctwtgttttcaataaaatgctgaacttagtgttaataattccactcagcgtttacatagcactttccagttcacagaagtgcgttgacaggcattatccccgt

SEQ ID NO: 524201 - DNA, 201 bp, Homo sapiens
aaagcattatattcaactttggcttcacagcacagtcaccatttgtagtgcttttattttttgtatttgcccacataaaatatcagacagcttttattttatatatatatttatttatttatttatttattttgagatgagatcatgccatgttgcccaggctggtcttgaactcctgggctcaagggatcctcccacctc

SEQ ID NO: 524202 - DNA, 201 bp, Homo sapiens
aaaattcagcacacacagcgtagtgaatgctggtgtagggttcaacagcctgcattttggagtctagcttaagatcaagactcttgagtaaattatttctstgagcctcagtttcctttccattaaatttgggtgataccaccctccacataggcattttgaggactgaacggcagtcagtcctcatgtatataaaatgtt

SEQ ID NO: 524203 - DNA, 201 bp, Homo sapiens
atggggtttcactaggttgaccaggctggtctcgacctcctgacctcgtgatccatccacctcagcctcccaaagtgctgggattacaggcgtgagccacygtgcccagctattataaaacatttcttcaaaatcacacttttaccacaagatcaagcctccagtataattaaaaggtcagatttctgcaggaagtaggtg

SEQ ID NO: 524204 - DNA, 201 bp, Homo sapiens
tattcaactttggcttcacagcacagtcaccatttgtagtgcttttattttttgtatttgcccacataaaatatcagacagcttttattttatatatatatttatttatttatttatttattttgagatgagatcatgccatgttgcccaggctggtcttgaactcctgggctcaagggatcctcccacctcagcctcctg

SEQ ID NO: 524205 - DNA, 201 bp, Homo sapiens
attcaactttggcttcacagcacagtcaccatttgtagtgcttttattttttgtatttgcccacataaaatatcagacagcttttattttatatatatatttatttatttatttatttattttgagatgagatcatgccatgttgcccaggctggtcttgaactcctgggctcaagggatcctcccacctcagcctcctga

SEQ ID NO: 524206 - DNA, 201 bp, Homo sapiens
ctgggctcaagggatcctcccacctcagcctcctgagtagcagggattgcaggtgtgtaccaccacacccagcttgacctgtagtgcttttagaaactacsgtatgtattcctaggccccactcctgaggtacttagtaggtctaggatggcttggagcttctgtttttttcaaagctctccaggtgactctgctgcccag

SEQ ID NO: 524207 - DNA, 201 bp, Homo sapiens
ttgacctgtagtgcttttagaaactacggtatgtattcctaggccccactcctgaggtacttagtaggtctaggatggcttggagcttctgtttttttcaragctctccaggtgactctgctgcccaggccaggcttgagaaccactgccttgtggatacagattgtcagacaagcagtaattctctccgtgctccagaag

SEQ ID NO: 524208 - DNA, 201 bp, Homo sapiens
gcaaatgtggggccagcccccgacaccatccacctgtgtttgcagcttcaacttaacttcccatctcctaaaccctcacccctgcttggccctcttcactytccttctctcccacttcagtgaatctcaaatggcagagctgctgggcttcccagaagacaaagaagagaacgaggggcccagagcatcgtttctcaaact

SEQ ID NO: 524209 - DNA, 201 bp, Homo sapiens
ttgcccaagatgatctcaaacacctcagctcaagcgatccttctgcctcaacctcccaaagtctcaaatgatttttgagaatgagatggactataaaattkggaaaaaggtcagaagagaaggtgaaattgtaggtcattcaggtaaccccaaatttctacgctgtagaaagggcagccccaatcctgggaaagtttagaa

SEQ ID NO: 524210 - DNA, 201 bp, Homo sapiens
agacatttgctcaacagtgagttaagactaaaacttctctgccctctgggagctcacagtctaacaaggagatagcacatatacacatattctgactgcaraactaggtgataagtaaaaagagctctgaactcagagtctgaaagacctgaatccaagtttaaatttgtatctgcagttccaaaatcctgaaagcgctgg

SEQ ID NO: 524211 - DNA, 201 bp, Homo sapiens
gttcagtgaaatcacccagaataagtttttcgactctcctagactccacccacccagccaactcacagttctgtatgtctagccctgagcactctctgctstgtatccatactgcaggtcacctgtgtcccctctccaaatctactcttccttcctccctagctcagcattcagttgtccaagccaaaggcctgggagcca

SEQ ID NO: 524212 - DNA, 201 bp, Homo sapiens
aagtttttcgactctcctagactccacccacccagccaactcacagttctgtatgtctagccctgagcactctctgctctgtatccatactgcaggtcacstgtgtcccctctccaaatctactcttccttcctccctagctcagcattcagttgtccaagccaaaggcctgggagccatcaaagacttctcttccctccc

SEQ ID NO: 524213 - DNA, 201 bp, Homo sapiens
tcctgccaagacaagacgggccctcaacatccttctcagcataacactgcagccatggaaattatcatgagacgtgaatcctctttgctccaacaattgtmcggctgtgacaattctatgaaagtaacacaggcattgactgcctgctcaccaatggttgttccagcagcctccagggagcaatgatttggtttgaaatct

SEQ ID NO: 524214 - DNA, 201 bp, Homo sapiens
cccgggaggcggagcttgcagtgagccaagattgtgccacagcactccagcctgggcgacaaagcgagactctgtctcaaaaaaaagaaaagaaatacctmacagtatctccaagaaaaattcagcacacacagcgtagtgaatgctggtgtagggttcaacagcctgcattttggagtctagcttaagatcaagactctt

SEQ ID NO: 524215 - DNA, 201 bp, Homo sapiens
tgagcatgtcatcacagaagaggagctaagaaggcccgaaatgaaaaacttctttaaggtacctaggaagagggacattgcccctccagtccacgcacatstccctgaagaaagttgacatgcattagagaaactggggactggccccattgttcctctctggaaacctccctttgcctcttggttggttaaagcccattc

SEQ ID NO: 524216 - DNA, 201 bp, Homo sapiens
ccagtgaggagacagccaagagctattgaagctgcatgaaattaggtggctggtccctgctcaagcctggcttaaacctaatcccagcttcctgcaaaaaraagcacgggttctcccagctgtggcagagaggtcctggggggctttggtggaaaaagctggcagatgtgaccagggacctatgtttggtttccagacctg

SEQ ID NO: 524217 - DNA, 201 bp, Homo sapiens
gttgtcccagtggaagaaggatcacagtccaggtgagtgcatggcccagtgccaagagtcacagatgagggcagtgcctaaaaatggcagcagaaatgacyagctattctgagccctggaggggtgattgggtccccagccccacagaaggatcaaagagaatagccttagtccagctacagtcagcaaacagttattgga

SEQ ID NO: 524218 - DNA, 201 bp, Homo sapiens
gacctattgcagatctatacagggcttgatttggttctcttcctggctccacaggggattctgtcatccagaatgcatccaacagcggagtggggcaagcrgtcatccagatcgccgcagccctgggcctaagaaccatcaatgtggtccgagacaggtgcgtggggaaggaggcttcatcccagaccatgtcttgggtct

SEQ ID NO: 524219 - DNA, 201 bp, Homo sapiens
gtccgagacaggtgcgtggggaaggaggcttcatcccagaccatgtcttgggtctttcccacctcccatccctgcggtgcccagttgtccaccagagggckcccttgcataagcataaactggctttaggcatcgctaacagttggcggctgaaacagatgagtcagtcctaagaaatgaagtccagctggcttttggcga

SEQ ID NO: 524220 - DNA, 201 bp, Homo sapiens
ccagcaaatgctggtttaggtgagtttctccaggtgtcagctgcctattcgttcttccagatcctatttcacccactctgtcggcatccactgattggccsagtgtacctgggtaatgcagggtttattttttttatttatttatttattttgagacggagttttgctcttattgcccaggctggagtgcaatggcgcgat

SEQ ID NO: 524221 - DNA, 201 bp, Homo sapiens
  misc_feature (1)...(201): n = A,T,C or G
gatcaggcctaggatggcgtggactcaagtccatgctctttcactgcccaaacatcactggttgaccctttaatgctcttctccctcaggaaactacggantccttcctgaactgcctgctgttggagggaacgaaggtgttgcacaggtggtagcggtgggcagcaatgtgaccgggctgaagccaggagactgggtgat

SEQ ID NO: 524222 - DNA, 201 bp, Homo sapiens
aaaacaaacaaatgagcatatcctccacaatcatgtccagcacaaccatatccatcccccagaagggccctgaatgggccttgcccatccctgaaccagtsccctggggcggggtagggccactccggttgctctgattgagtctctcaccctcctctgtgatacaggtggggccttgtggttgacagccccagagattag

SEQ ID NO: 524223 - DNA, 201 bp, Homo sapiens
agtccaaagcagagcccagatcaggcctaggatggcgtggactcaagtccatgctctttcactgcccaaacatcactggttgaccctttaatgctcttctycctcaggaaactacggactccttcctgaactgcctgctgttggagggaacgaaggtgttgcacaggtggtagcggtgggcagcaatgtgaccgggctgaa

SEQ ID NO: 524224 - DNA, 201 bp, Homo sapiens
ctcagaggttggttaggcagacagtccaaagcagagcccagatcaggcctaggatggcgtggactcaagtccatgctctttcactgcccaaacatcactgrttgaccctttaatgctcttctccctcaggaaactacggactccttcctgaactgcctgctgttggagggaacgaaggtgttgcacaggtggtagcggtgg

SEQ ID NO: 524225 - DNA, 201 bp, Homo sapiens
agcaagacttcatcttaaaaaaaaaaaacatgtgagtcaacctgctctggatgagaagaatgaggactgtgtaggaaaaagggggctttctcagcttctcytgccctggtggtaatgttactactgtcttacccttagattgcagcagtttgaggtcattaactacctgcacggtgacattaactaaatctaatggtaact

SEQ ID NO: 524226 - DNA, 201 bp, Homo sapiens
tggcagagaggtcctggggggctttggtggaaaaagctggcagatgtgaccagggacctatgtttggtttccagacctgatatccagaagctgagtgacaractgaagagtctgggggctgagcatgtcatcacagaagaggagctaagaaggcccgaaatgaaaaacttctttaaggtacctaggaagagggacattgcc

SEQ ID NO: 524227 - DNA, 201 bp, Homo sapiens
tttgagcgaaacacccattctagcctggatgacatgaacatctccgtttggctttgtgcttagactcaagaacctggagctagctgctgtgagaggatcasatgtccgtgtgaagatgctggcggcccctatcaatccatctgacataaatatgatccaaggtaaccttggtttctgtggcttatgttaattggctttttt

SEQ ID NO: 524228 - DNA, 201 bp, Homo sapiens
tagagaagtcattcaacttctcgttacttttatgactttgtcctcctcctaaaattctgttggatcttaattcatgctttttgcacgtggttgataaaaayagtatgtcagttgccaaccattgtaaatctgcacataaatagccattcagaagggctattggggccactgaagtggagctaaagcaaaagcacaggtctg

SEQ ID NO: 524229 - DNA, 201 bp, Homo sapiens
ttacaggcgtgagccaccacgcccagcctcctgtgttgatttcttatggtacctctcttttataacagaaccgtaattcctgggcacacatggcagctcaraaatgttgcctgacctactttgaggagatgatttgagcgaaacacccattctagcctggatgacatgaacatctccgtttggctttgtgcttagactcaa

SEQ ID NO: 524230 - DNA, 201 bp, Homo sapiens
tatctcagcagagctagctaatgcccaccttacacagcaagtataactgtgccagtccccagggtactggcctcttttcccccctctcaaaaggctctttmttctgcctgcttttgtctcccttgtacttcatatggcatcacaggtgtacagccttggcctcaaaggagccattgtgaccttatccaggctgggatctgt

SEQ ID NO: 524231 - DNA, 201 bp, Homo sapiens
ccaacaattgtccggctgtgacaattctatgaaagtaacacaggcattgactgcctgctcaccaatggttgttccagcagcctccagggagcaatgatttkgtttgaaatctgggatcctgggcacaagatgttaccaaggaccccctcttggcccttggttcattacacaatcaatagccctcccagcctccagccagac

SEQ ID NO: 524232 - DNA, 201 bp, Homo sapiens
tcctgggctgcctctgcacaccatgcacatccatgcacatccgtgagccgcagtggctgtagaactcacccaagccacctctcataccagcgaagaaactraggcccacagttgttggagtgtgatgaaacatggtgcccagccactgtccaaggcctggctgaaagccgatgccagttcccacaagagaaatataggttt

SEQ ID NO: 524233 - DNA, 201 bp, Homo sapiens
tttgggaggccgaggcaagtggatcacctgaggtcaaaaattcgagaccatcctggccaacatggtgaaacctcgtctctactaaaaatacaaaaattagycaggcatggtggtgggtgcctgtaatcccagctacttgggaggctaaggcaggagaattgcttgaacccaggaggtagaggttgcagtgagccaagatcg

SEQ ID NO: 524234 - DNA, 201 bp, Homo sapiens
gaactggcctttcccaccctgggtgaggtgggaggggtcctcattttagagaaggaaaagcaaagatgacacaaggtgaacctgtgacttgggatgtttcytgcctgtgttccagtcccacctctgccactaattatggcagtgaggaaatcacgttagtctccaattatcttcagttactccttgataaaatgaagagag

SEQ ID NO: 524235 - DNA, 201 bp, Homo sapiens
ctgtgatgacacaaacattcttggttctgtactaagtagacgagaaagtctctggccagtgacaatttctccctacctcttcttcctgctcaaaatgataktgaccgtttgatgtgattgagtaaaagatgaaagataagtacaaatgattgctaattaaatgtggaacgcaggaaagatatctcagcagagctagctaat

SEQ ID NO: 524236 - DNA, 201 bp, Homo sapiens
cctcctactccgcatccgccgagcctgcccgggtccgggcgcttgtctatgggcaccacggggatccagccaaggtcgtcgagtaagagacggcgccgaarccggggaaggggactggggtttctggaaggctttaacacgagctgcggactgggaagagagggacagggtccgaggaagggggcagagaatagcaaaccg

SEQ ID NO: 524237 - DNA, 201 bp, Homo sapiens
gacaaaaaatgtatgaaatggcttcacaaactaaacattagtaaactcatatgagatagtcttaaatagcatgatgtataattctgtacaatgggaatacygagcaagtgattttttttttttctggactaggaagagggtcaaaagatatcttaagggaagtaaactttgaactgggccttgaagggtgagttgaattcc

SEQ ID NO: 524238 - DNA, 201 bp, Homo sapiens
ccaggcatggtggtgggtgcctgtaatcccagctacttgggaggctaaggcaggagaattgcttgaacccaggaggtagaggttgcagtgagccaagatcrtgccattgcactccagcctgggcttcagagaaacagtgtgtctcaaaaacaaacaaacaaaaaaaaacaaggcccaaagaggtcaagtacctgtcccaaa

SEQ ID NO: 524239 - DNA, 201 bp, Homo sapiens
gttgccaagtcctgggaggcatcgtgagtgttgtggaagtttaggaggcattaggagaacagtgagaaacagtggaaggtctgagaagactcagcagccasgtcctgggtccctgttgagcctgaggactcccttgcctacagaaggatccccggctgggagcctttgacctattgcagatctatacagggcttgatttgg

SEQ ID NO: 524240 - DNA, 201 bp, Homo sapiens
tttaggcatcgctaacagttggcggctgaaacagatgagtcagtcctaagaaatgaagtccagctggcttttggcgataggatgagtgaatctgacatgtraagagagggcaggaaggaggtggagactgcccttactgaatagctaagactttctgagactcttggcttgtgataacctcatgttttcaaaaccccagtt

SEQ ID NO: 524241 - DNA, 201 bp, Homo sapiens
tgaggcaggagaatggcgggagccttggaggcagagcttgcagtgagctgagatcgtgccactgcactccagcctgagcgacaaagcaagactccatctcaaaaaaaaaaaaaaaagtgttcctgcctcctgtccccagttcttggtccctaaagcccacattgacatccccgtttcctatagcacagttagtgattaccc

SEQ ID NO: 524242 - DNA, 201 bp, Homo sapiens
agccatgtatggtagtgcatgcctgtaatcccagctactcagggggctgcagcataagaatcacgaacccaggaggcggaagttgcagtgagccaagatcrcgccattgcactccagcctgggctacagagcaagactctgtctccaaaaaaaaaattaaaaagaataacaatctattgtgcataattatcatgaggactc

SEQ ID NO: 524243 - DNA, 201 bp, Homo sapiens
tttaaaggtaacattatgcttattacaaaacattttgaaaacatgtaaaagtgcaaaggaaaacttaagcataaaagtttcctgttggctgggcactgtgrctcatgcctataatcccagtaatttgggaggccaaggaggaagcatcacttgaggccaggagttcgagaccagcctgggtaacatagtgagaccccatca

SEQ ID NO: 524244 - DNA, 201 bp, Homo sapiens
gcatttggcaagttactgaggttctctgagcctcggtttcatcatcttaaaaaatggagacagtacagacaaagttcatagtggtaatcacctaagatctrtgtagtgctctccaccaaaaaacacctgcatactcttgtgcagtaccttctttttaactctttgattcccagcaaatagtttgattattttccaaaggat

SEQ ID NO: 524245 - DNA, 201 bp, Homo sapiens
gatcagctgtggtcaggagttcgagaccagcctggccaacatggtgaaacccatctctactaaaaatacaaaaattagccgggcgtggtggcaggtgcctstaatcccagctattcgggaggctgaggcaggtgaatcgcttgaacccaggaggcagaggttgcagtgagccgagatcatgccattgcactccagcctggg

SEQ ID NO: 524246 - DNA, 201 bp, Homo sapiens
cattttctgaccaccctgaaagcaaagcctgggtgggtactggcagtgcaaaggccagtaggccaccatccctggccccaagctgcacaagcccacagacragggtcctgtagaacaaacgctttgatgtgcttctcaggtagcctgcggcccagtccagggcttggggaggatcagctgcatggaagagtgaatgccagg

SEQ ID NO: 524247 - DNA, 201 bp, Homo sapiens
tagcggtgggcagcaatgtgaccgggctgaagccaggagactgggtgattccagcaaatgctggtttaggtgagtttctccaggtgtcagctgcctattcrttcttccagatcctatttcacccactctgtcggcatccactgattggcccagtgtacctgggtaatgcagggtttattttttttatttatttatttattt

SEQ ID NO: 524248 - DNA, 201 bp, Homo sapiens
ccaccactacacctggctaatttttgtacttttagtagagatggggtttcgtcttgttggccaggctggtcttgaactcctgacctcaggtgatctgcccrcctcggcctcccaaaatgttgggattacaggcattgagccactgcgcctggccagcaggtgagtcttttaagcaaggtgccagccagagaggatgaggat

SEQ ID NO: 524249 - DNA, 201 bp, Homo sapiens
ccttttaacacagcacttgggcaagcttcagaccccatatgtagagcggggatgctccctcactgcacttttgttgttttccaggacatgccccagccackgcttgctctcaactgtgttggtgggaaaagctccacagagctgctgcggcagttagcgtaagtcccttgggcctgcaggtccagctcgccagagctctcc

SEQ ID NO: 524250 - DNA, 201 bp, Homo sapiens
tgaggcaggagaaccgcttgaacccaggaggcggaggttgcagtgagtcgagattgcgccactgcactccagcctgggcaacagagcgagactctgtctcaaaaaaaaaaaaaaatcaagctagatgttttgacaggtggtgaggataagcctcagataaattcaaggtcatccaatcagcctagccacatcccgcattat

SEQ ID NO: 524251 - DNA, 201 bp, Homo sapiens
acacacatatacataagtacgtgcacgcaaacaaaggcataaacatctcatttactccctccttttaacacagcacttgggcaagcttcagaccccatatrtagagcggggatgctccctcactgcacttttgttgttttccaggacatgccccagccacggcttgctctcaactgtgttggtgggaaaagctccacagag

SEQ ID NO: 524252 - DNA, 201 bp, Homo sapiens
aaaaaaaaaacagtaataggagtctactacaagctctttgcttctctgagatcaggaaggctgccaagaatggctccaccgtctcctacacccacctggcrgtgaaggagctcagccatttgagcaaattgagagctgcaaggattcactggatcctgatgccagtgcttcgggccagcccccgtgctaagtgaaggtcct

SEQ ID NO: 524253 - DNA, 201 bp, Homo sapiens
ctgaggcaggagaattgcctgaactgggaggcagaggttgcagtgagccgagatcgcgccattgaactttagcctgggtaacagagcaagacttcctctcaaaaaaaaaaaaaaaagatacttccacaaagcattatattcaactttggcttcacagcacagtcaccatttgtagtgcttttattttttgtatttgcccac

SEQ ID NO: 524254 - DNA, 201 bp, Homo sapiens
agatcgcgccattgcactccagcctgggctacagagcaagactctgtctccaaaaaaaaaattaaaaagaataacaatctattgtgcataattatcatgargactcagacattcagaggaacgtccagattttcttctttttctaaacatcctggatgctatcctggatgcttccagtggatgctacccactatcctggat

SEQ ID NO: 524255 - DNA, 201 bp, Homo sapiens
attttcttctttttctaaacatcctggatgctatcctggatgcttccagtggatgctacccactatcctggatgcttcttggccaaggagggtgagctggkgttgaatgtgcacagggctccttccttatgatcctggcttcatcttctgactcaggaacctggcggaccgaggctgtgttcagcgaggaagcactgatcc

SEQ ID NO: 524256 - DNA, 201 bp, Homo sapiens
gctacttgggaggctgaggtgggaggattgcttgagcccaggagggtaaggtagcagtgagccatgattgcaccactgcactccagcctgggtaacagagygagaccctgtcttagaaagaaaaagaaaaaagaaagaaaagacacttcctaagcagagaaaaaggtgagttcaaaggcataaacacacacacatatacat

SEQ ID NO: 524257 - DNA, 201 bp, Homo sapiens
gggtgtcaatccctgcacagcctacaggatgttgatggacttcgagcaactgcagccaggtaggaacccacaggttgggggagcaggccagggtctcgcarctagggtgccactcacatcctgaccccaaggccaggagaacttgcaaggtggaggttttgagggggtgatggacctctcacctgggtgaatgttgttgct

SEQ ID NO: 524258 - DNA, 201 bp, Homo sapiens
tgcctataatcccagtaatttgggaggccaaggaggaagcatcacttgaggccaggagttcgagaccagcctgggtaacatagtgagaccccatcactacaaaaaaaaaaattaattttttttttaagttacctggccaggcatagtggttcatgcttgtaatcccaacaagacaggcagatcacttgaggccaggagttt

SEQ ID NO: 524259 - DNA, 201 bp, Homo sapiens
ggaaggaaggcagcccagatacccaggttccagctccaactctgcctagataagccagggggctctgggcaagtcacttcctcatttcctcccctgttgcrtgaggggttcaaagtcgatgttcgataagggccttctcagtactgacattctagaattcttttgtctggaactggaatgtgggctgggagttgatgctca

SEQ ID NO: 524260 - DNA, 201 bp, Homo sapiens
taatttgggaggccaaggaggaagcatcacttgaggccaggagttcgagaccagcctgggtaacatagtgagaccccatcactacaaaaaaaaaaattaattttttttttaagttacctggccaggcatagtggttcatgcttgtaatcccaacaagacaggcagatcacttgaggccaggagtttaagaccagcctggcc

SEQ ID NO: 524261 - DNA, 201 bp, Homo sapiens
atggcagatggttcctgggagcctttggtggagaaagccagtggctgtgaccagggacctttgctggagtcctagtgcagcagacactttgtttgcttgcrtcccatgccctaaagccacctcccatttaggctgcagctgtagtaacagatctaggcatttcgacgctgcccaccctaagtacccactgcacacctctcc

SEQ ID NO: 524262 - DNA, 201 bp, Homo sapiens
ggaagtgagcgtctgtggtgtctgcacacatttggcagggtttgacgtgtgccgtgtgtctgagtgtgggtccgcctgtgtgtgtggtacccacacgtgtrttggggccattgtggtgtggtatctgcacacctgtgtggcaggggctcgtatgtttagctgcatgcacacacacctctgtggtgtctgcataagtgtatg

SEQ ID NO: 524263 - DNA, 201 bp, Homo sapiens
ggaggttggtctctgcctgacctttgagaaacctggctctgtacactactgcttcagagaagggtttgccatccttaaggtcctctgagcatggcagagtygtggagtcttctgcttcctgacacccatggagatgccactcttgaacagtgtctgtgccaagatgttggtttaagctacctccctcgctcccttttccta

SEQ ID NO: 524264 - DNA, 201 bp, Homo sapiens
ctccaggccttatcgtaaatgctggaaatgtatactatggggcaaagatgttcttacctcctggccttcacagcctggtgaggagacaaagaaagaaacargtggttatgatcagtgcgatgagctctctggggctggggaagtacaggaggggcccctgaccctgcctgtgagagtggtgggggagagggcaatgggtca

SEQ ID NO: 524265 - DNA, 201 bp, Homo sapiens
ccttgaggccctccaacattcaatggatgtgtagaggatgaaactgccaaggatagtgacaactggagagaggcaggaagaagaaaagaggctacttgaaraagaagtggtagggtatcatgtcaaaagacacacaggaagaactcaacaaatgtttgatgaatgaaataaaaaatgaattaatgaataaatgagacttgc

SEQ ID NO: 524266 - DNA, 201 bp, Homo sapiens
ggtttttatgtttgaggatgttacccagttggatggcttccctttcctctgtgaatcaggaggggagatcagcctctgagacgggtggccaatggagagtwatgtcctagtctcaggcaggcctttgctgatgtcttggctgtagtaagccccaggttcctgtaatgccctcctcttcctccttcatgatattcagtcaac

SEQ ID NO: 524267 - DNA, 201 bp, Homo sapiens
ctgcccacaagcaggctggggaagggggatattggcccatcctaagtggcagccctgtgggatggatgagcgaccccaggccaggaccttgggagatagtsgcctaacaacggtggagtcaatgtgagagatgacacgtgacctccactagagtgaggcctgcagggcgggcggtctgacaccaaagcaggggccccagag

SEQ ID NO: 524268 - DNA, 201 bp, Homo sapiens
aggtgctgaagtttggttaggtttttatgtttgaggatgttacccagttggatggcttccctttcctctgtgaatcaggaggggagatcagcctctgagasgggtggccaatggagagttatgtcctagtctcaggcaggcctttgctgatgtcttggctgtagtaagccccaggttcctgtaatgccctcctcttcctcc

SEQ ID NO: 524269 - DNA, 201 bp, Homo sapiens
ctgtgtctgttggattgaatgacacaggggtcatgttgaccttggtaggagctgttactgagtcgtgttgggagtggaagcaggtttggaaagggttgagsagtgagtgggaggtgaggaagtggcaacagtgagtggagacaactctctcaggaagtttgcctgtatgggggaggaaagagagcagtgagtggatctgga

SEQ ID NO: 524270 - DNA, 201 bp, Homo sapiens
ccatctctactaaaagtacacaaaaattagccgggcatggtggtgtgtgcctgtaatcccagctactcaggaggctgaggcagaagaatcgcttgaacccrggaggcagaggttgcagtaagccgagatcttgccactgcactgtagcctgggtgacacagcaggactccatcgcaaaaaaaaaaaaaagggaattttgtc

SEQ ID NO: 524271 - DNA, 201 bp, Homo sapiens
ggggcggctgtgtccccagctcagccaggaggcctagcactggcaagaacactgattagaagcagttttcccactgccaattcctaacctgttttgtatcrgcctgtgtatctcttgcattctgagcccctctagctatagtcccagctctctccgcccttcagagtcaacgcttgctgtcttcatttccttacttcccat

SEQ ID NO: 524272 - DNA, 201 bp, Homo sapiens
aggccctggatctgtcaagccgcattctgttgccctcagcgaccgaggggtgtgccctggggcggctgtgtccccagctcagccaggaggcctagcactgscaagaacactgattagaagcagttttcccactgccaattcctaacctgttttgtatcggcctgtgtatctcttgcattctgagcccctctagctatagtc

SEQ ID NO: 524273 - DNA, 201 bp, Homo sapiens
gccccttccccaacagggactttgcctacgtagctcgtgataagctgacccagatgctcaagtgccacgtgtttcgctgtgaggcacctgccaagaacatygccaccagcctgcatgagatctgctctaaggcacggccccctccactccctggactagttgccacctttgctctacaagggtgtgggtggggtcactgag

SEQ ID NO: 524274 - DNA, 201 bp, Homo sapiens
ctcttctgtgtctggcagtgtttcgccgtgcgctccctaggctgggtagagatgaccgaggaggagctggcccctggacgcagcagtgtggcagtcaacarttgcatccgtcagctctcttaccacaaaaacaacctgcatgaccccatgtctgggggctggggggaagtaaggacctgagccgggggtagggggtggtac

SEQ ID NO: 524275 - DNA, 201 bp, Homo sapiens
ccactctagtggtgttcctggcacagtaagccccgggtggatgagctggggggtggggaggcacagagagccattgtgtggaggccttgctggtgggaccragggcaggcgccagctgtgccatcccagaaagctcagggcaggggatatagggatggggtgggcctcagacctgggcctggactgtgatggggatgatag

SEQ ID NO: 524276 - DNA, 201 bp, Homo sapiens
gcttgtgttgggccccagggaactaaagggtgtgggtcagggaggggtctagaggctattcctaggcctcaggcctcccaaatatgcccctccccagtagstacggttccctgcctaggagctggggagggagagatctaatcccttcaaggaagtgataacactggagtggtaacaagaggagcaggaagcaaggccagc

SEQ ID NO: 524277 - DNA, 201 bp, Homo sapiens
ggactgtccgcaggggtgttcagtcgctgtggggctccctgaagcccaaacggctgggggcccataccccatgaagaagcccccaccttccctccacctgmttgtgttgggccccagggaactaaagggtgtgggtcagggaggggtctagaggctattcctaggcctcaggcctcccaaatatgcccctccccagtagct

SEQ ID NO: 524278 - DNA, 201 bp, Homo sapiens
catagtgatccaggacagggcattatgagggctggcagagggaccagtgcccaaggggagctacttcatggaaattgtcaccaagatgtagcttcatctgsccagagaagccatgaattgcagccgagcgccctccctctgtgacctgccttccagtgccatgccctgtagggctggttctgcagcttatttgctcctgtc

SEQ ID NO: 524279 - DNA, 201 bp, Homo sapiens
acaaagatctgaaaggctgaggggcccaggggaaaggctcccatagtgatccaggacagggcattatgagggctggcagagggaccagtgcccaaggggasctacttcatggaaattgtcaccaagatgtagcttcatctggccagagaagccatgaattgcagccgagcgccctccctctgtgacctgccttccagtgcc

SEQ ID NO: 524280 - DNA, 201 bp, Homo sapiens
tcccaacagggaccacccagtgggaaccccccggccgggcctccccctcacaggggagcagcccccaagaggagtcccaggtgaggctcacaggcctgttrattttgggccaggggtggagggagtgtgtgctgctggagtaggataggacactcactcactactcccatccctcctcctagctcacctggacaggttttg

SEQ ID NO: 524281 - DNA, 201 bp, Homo sapiens
ggaataggaacacagccggaggagcttacagtgatggggcttgggatggaagtgcggccggagaggggcagtcagtgatcagtgtccaaaacacacgagcyggtcccactctagtggtgttcctggcacagtaagccccgggtggatgagctggggggtggggaggcacagagagccattgtgtggaggccttgctggtgg

SEQ ID NO: 524282 - DNA, 201 bp, Homo sapiens
tgaccttggcggaggaggccagccaggagcctgagatggcacccttgggccccaaaggcctgatacacctgtactctgagctggagctctcagctcacaaygcagccaaccgaggcctacgaggacctggcctgatcatcagcactcaagagcaggggccagatgagggagaggagaaggcggccggggaggccgaggagg

SEQ ID NO: 524283 - DNA, 201 bp, Homo sapiens
taagccccaggttcctgtaatgccctcctcttcctccttcatgatattcagtcaacaaatagggaatgctatgggtgccaggcactgttctagatgttggygttacactgcattgtaacaagttgttcaatgactgtttcccgctgaactgagaactcctccagaggaagaaccatttcttttgtcttcatcactctcccc

SEQ ID NO: 524284 - DNA, 201 bp, Homo sapiens
gccgagggtgggtccctgggtggcgggctggaaggatagttgggactcaaatggttgcggagaaactgacccacgaagggctgtgaggaggcagagggagsggtctggagggggagctgtccttgcggaacaggacgtcctcttacctgagaggcaggtggagtttgtttggggcaccatgaggcatagtaacgtaaccaa

SEQ ID NO: 524285 - DNA, 201 bp, Homo sapiens
tgaacacatgaagactgaatactccaatacgtggagggactccggttaaagggaggcaggggacgagatgaaagtagggcctcggctgggcaagtgtccarcttatgccctgctggtggggctgcgggtgagcaaggtctgccaccatgatcaaccttctcttctttcccatagtggaattcccagcgcctaagaatgagt

SEQ ID NO: 524286 - DNA, 201 bp, Homo sapiens
cgtggagggactccggttaaagggaggcaggggacgagatgaaagtagggcctcggctgggcaagtgtccagcttatgccctgctggtggggctgcgggtragcaaggtctgccaccatgatcaaccttctcttctttcccatagtggaattcccagcgcctaagaatgagttggtccagaagttccaagtctattacctg

SEQ ID NO: 524287 - DNA, 201 bp, Homo sapiens
cccccaccttccctccacctgcttgtgttgggccccagggaactaaagggtgtgggtcagggaggggtctagaggctattcctaggcctcaggcctcccaratatgcccctccccagtagctacggttccctgcctaggagctggggagggagagatctaatcccttcaaggaagtgataacactggagtggtaacaagag

SEQ ID NO: 524288 - DNA, 201 bp, Homo sapiens
ggctggaaggatagttgggactcaaatggttgcggagaaactgacccacgaagggctgtgaggaggcagagggaggggtctggagggggagctgtccttgyggaacaggacgtcctcttacctgagaggcaggtggagtttgtttggggcaccatgaggcatagtaacgtaaccaaagtgttttctgacactggcagagga

SEQ ID NO: 524289 - DNA, 201 bp, Homo sapiens
tggaaatcacatgcaaacaccttgtagaaggaaaacacatgtcttcgaggaatcagaagaaggctactgaggctgcagagcagtgtgaccaaagccagggrcagggaggaggaaggcaggcgccagactgagcaggaaatttaggccatgttaagaatttggtcttaagggccaggcgtgatggctcacgcctgtaatccc

SEQ ID NO: 524290 - DNA, 201 bp, Homo sapiens
gatgagtagaagttaattcagcttagagagtaggagaagaggtcccaggaagcatggaaatcacatgcaaacaccttgtagaaggaaaacacatgtcttcsaggaatcagaagaaggctactgaggctgcagagcagtgtgaccaaagccaggggcagggaggaggaaggcaggcgccagactgagcaggaaatttaggcc

SEQ ID NO: 524291 - DNA, 201 bp, Homo sapiens
ttccctgtgaaagtgacatttgaactgaaatccaaaaaataagtagaagtgaatgcggtcaagtggaatggaggtgggggtgggatgggggaagatcaggktctacagtgggaggcactttggcatttccaaggtactgaaagaaggccaatgcaagatgaggccgacagctgggcagtggtcaggctgccaggtcaggga

SEQ ID NO: 524292 - DNA, 201 bp, Homo sapiens
cacgagccggtcccactctagtggtgttcctggcacagtaagccccgggtggatgagctggggggtggggaggcacagagagccattgtgtggaggccttkctggtgggaccgagggcaggcgccagctgtgccatcccagaaagctcagggcaggggatatagggatggggtgggcctcagacctgggcctggactgtga

SEQ ID NO: 524293 - DNA, 201 bp, Homo sapiens
tccagttttgactcagatcctctacctcctgcccctcttctgtgtctggcagtgtttcgccgtgcgctccctaggctgggtagagatgaccgaggaggagytggcccctggacgcagcagtgtggcagtcaacaattgcatccgtcagctctcttaccacaaaaacaacctgcatgaccccatgtctgggggctgggggga

SEQ ID NO: 524294 - DNA, 201 bp, Homo sapiens
ctgtgaggaggcagagggaggggtctggagggggagctgtccttgcggaacaggacgtcctcttacctgagaggcaggtggagtttgtttggggcaccatraggcatagtaacgtaaccaaagtgttttctgacactggcagaggagatgccaaagcgaagcctggaggaaatggggactgattcatacattcattcagca

SEQ ID NO: 524295 - DNA, 201 bp, Homo sapiens
aggggacctgctttaccacgggatagctggaggaggggcatcattttgatactgattcctcaatccccttcccaaggatgaacccagtgatgaggccccartggagctgggactgaaggaacctgaggaggggacgttgaccttcccagctcagagcctcaggtgagctgccagatgcagtgagctggcagtgggatggat

SEQ ID NO: 524296 - DNA, 201 bp, Homo sapiens
ccaatgctgccagcctctcagaggctgtgcaggctgcgtgcatggtaagctactagtagggtggtgtggtggtggcgtggccccatgggaggtaggctggrgagtgactgccctgcttgcctccgcagcttcgctaccagaagtgtctggatgcccgttcccaggcctccacctcctgcctcccagcaccccctgctgagt

SEQ ID NO: 524297 - DNA, 201 bp, Homo sapiens
acctgagccatgtcccctactggtggccccacatgtggtgactccagactataggctctaggcagaagcaggaactgtgttgtggtatagctcttccaccmccccttctcaaccatggggtctcagaggggaccgggcataggcaccagctgtctgctctttgggtaggctgaccctcaccaagcctcccacctggcagat

SEQ ID NO: 524298 - DNA, 201 bp, Homo sapiens
tacactgtaatgacttagcacaatgtgatacagagtaatcactcctcagatagatatcttaaaaaataattgggtcttgggagaggactggcctgtagggyctgatttgggagttattgtggtgtgaagcaatgtgatgtctgagtgtgatgagcgctgagagagcatgatttggggaaatcagaactttgagaggtcagt

SEQ ID NO: 524299 - DNA, 201 bp, Homo sapiens
ttcctcagatcatggccgaacggcgtaatgcccgctgcttggtaaatggactctccctggaccactctaaacttgtggatgtccctttccaaggtcagtgkcaaaacccctccaggtccagctcagctttgttggcaaaggtgggtgacccaaggaaaggcatgagctcctggacagcgctgatagaaaaatgaacacatg

SEQ ID NO: 524300 - DNA, 201 bp, Homo sapiens
cccctccactccctggactagttgccacctttgctctacaagggtgtgggtggggtcactgagtgctgtaggggggccccagggcaatgaggctctaatarattctccctggctcctcgcctcccttccttcctcagatcatggccgaacggcgtaatgcccgctgcttggtaaatggactctccctggaccactctaaac

SEQ ID NO: 524301 - DNA, 201 bp, Homo sapiens
tggagggagatgtgccaagctccagaagggcctcccagatggccaaggggggagaaactgcccttccaggacagatcggaaggatgaagctctttgaagcwggaaggtacaggctgacagggatggcagatggattggtgtgtgtgactcagtcaggagatggtgaactggtccccagattccagaagtgtccagccagcc

SEQ ID NO: 524302 - DNA, 201 bp, Homo sapiens
ttagccaccaacagggcccaggaggagacctgagccatgtcccctactggtggccccacatgtggtgactccagactataggctctaggcagaagcaggarctgtgttgtggtatagctcttccaccaccccttctcaaccatggggtctcagaggggaccgggcataggcaccagctgtctgctctttgggtaggctgac

SEQ ID NO: 524303 - DNA, 201 bp, Homo sapiens
agaaagaaacaagtggttatgatcagtgcgatgagctctctggggctggggaagtacaggaggggcccctgaccctgcctgtgagagtggtgggggagagkgcaatgggtcagttttaagaagggacctgtatactgatgtctgaaggagaggtaggtgatagccaggtgaaaatcgagagtaagggaggtgggctgggag

SEQ ID NO: 524304 - DNA, 201 bp, Homo sapiens
tggaagcacccaagctcccctcttctgccctgccccttcccacccgctatgctccaccattaccctccacctcagcatgcttgcctgtctacccctccccyccaagaaggcagcacctatgggggaccagctgtgggcagaagccctggaggagctgtgatgggcagggaggacgtgggtggggtggggaccaggctcagc

SEQ ID NO: 524305 - DNA, 201 bp, Homo sapiens
acagcctggtgaggagacaaagaaagaaacaagtggttatgatcagtgcgatgagctctctggggctggggaagtacaggaggggcccctgaccctgcctrtgagagtggtgggggagagggcaatgggtcagttttaagaagggacctgtatactgatgtctgaaggagaggtaggtgatagccaggtgaaaatcgagag

SEQ ID NO: 524306 - DNA, 201 bp, Homo sapiens
attagccaccaacagggcccaggaggagacctgagccatgtcccctactggtggccccacatgtggtgactccagactataggctctaggcagaagcaggractgtgttgtggtatagctcttccaccaccccttctcaaccatggggtctcagaggggaccgggcataggcaccagctgtctgctctttgggtaggctga

SEQ ID NO: 524307 - DNA, 201 bp, Homo sapiens
gagacctgagccatgtcccctactggtggccccacatgtggtgactccagactataggctctaggcagaagcaggaactgtgttgtggtatagctcttccmccaccccttctcaaccatggggtctcagaggggaccgggcataggcaccagctgtctgctctttgggtaggctgaccctcaccaagcctcccacctggca

SEQ ID NO: 524308 - DNA, 201 bp, Homo sapiens
aaaacaacctgcatgaccccatgtctgggggctggggggaagtaaggacctgagccgggggtagggggtggtactgtgagagtgtgaagggaattatgagmgatgggaggtctgacctgcccacaagcaggctggggaagggggatattggcccatcctaagtggcagccctgtgggatggatgagcgaccccaggccagg

SEQ ID NO: 524309 - DNA, 201 bp, Homo sapiens
gtgggtggggtcactgagtgctgtaggggggccccagggcaatgaggctctaatagattctccctggctcctcgcctcccttccttcctcagatcatggcygaacggcgtaatgcccgctgcttggtaaatggactctccctggaccactctaaacttgtggatgtccctttccaaggtcagtgtcaaaacccctccaggt

SEQ ID NO: 524310 - DNA, 201 bp, Homo sapiens
caggctttatccttacaataaagctgtgaggtaaatattatgatgattcccatattacagataacaaaaaagagatccagagaggtttagtagctttctcsagaccacagacaggctgagattacaatagagctgaaatctaaaccaggtctcagtccaggcctgagctcttggccccgtgttatgctgccgccaatgcat

SEQ ID NO: 524311 - DNA, 201 bp, Homo sapiens
cttccctttcctctgtgaatcaggaggggagatcagcctctgagacgggtggccaatggagagttatgtcctagtctcaggcaggcctttgctgatgtctkggctgtagtaagccccaggttcctgtaatgccctcctcttcctccttcatgatattcagtcaacaaatagggaatgctatgggtgccaggcactgttcta

SEQ ID NO: 524312 - DNA, 201 bp, Homo sapiens
cactttgggaggccgaagtgggcggatcacgaggtcaggagtttgagatcagcctgaccaacatggtgaagccccgtctctactaaaaatacaaaaattayctgggcgtggtggtgggcacctgtaatcacagctactcaggaggctgaggcaggagaatcacttgaacccgagaggcagaggttgcagtgagccaagatt

SEQ ID NO: 524313 - DNA, 201 bp, Homo sapiens
tcccagctactcgggaggctgaggcaggagaatggcgtgaacccgggaagcggagcttgcagtgagccgagattgcgccactgcagtccgcagtccggccygggcgacagagcgagactccgtctcaaaaaaaaaaaaaaaaaaatacttctactaaaggcaaagtctgattgcctctcttttttgtgatgttagtggcct

SEQ ID NO: 524314 - DNA, 201 bp, Homo sapiens
aatgtattttatatgtaagtgtcgcatgaatcgatgcaggagtgaaggtgtgcgttctggaataaatgcatgtgtgtgaaagcaaaggccggggtgggctrcgcttggagggagatgtgccaagctccagaagggcctcccagatggccaaggggggagaaactgcccttccaggacagatcggaaggatgaagctctttg

SEQ ID NO: 524315 - DNA, 201 bp, Homo sapiens
gtgagcataattgtcacatacttcattgttgcaaagaattttttttttttttttttttaaagacaagtctcgctctgtccgccaggctggagtgcggtggygtgatcttagctcactgcaacctccgcctcctgggttcaagcaattctcctgccttagcctcctgaatagctgggattacaggctcccgccaccacgcct

SEQ ID NO: 524316 - DNA, 201 bp, Homo sapiens
tggctaatagaggaagatgagccagcagaggagtctaggaacccagcaaacagtaacaagaagtgtaaaagatgagatgagatgaggagtgtggagatgasagtgtggaggccccggatagaggctggatgagagattcacggggtcagatgctgctgggaggacaaccaagacgagcactgtgtctgttggattgaatga

SEQ ID NO: 524317 - DNA, 201 bp, Homo sapiens
atcctcagcatcacagagtggctcctttgtggaagaagtacataggagacacttctttcggatctcagtattcagaacaactgtgcttctgcgaataagcrgactacttcggatactgtaacccttctgagagctgagctgctgggatacgcagagccagttttggagccccgtctggcaagcaggcaggcccgtggacag

SEQ ID NO: 524318 - DNA, 201 bp, Homo sapiens
cagaacaactgtgcttctgcgaataagcagactacttcggatactgtaacccttctgagagctgagctgctgggatacgcagagccagttttggagccccrtctggcaagcaggcaggcccgtggacaggatagtctagggtcagtcttaccccaggcttggtttttgcaacttccctcctctttattttccattttcccc

SEQ ID NO: 524319 - DNA, 201 bp, Homo sapiens
agaaggggtgatatgattttagctgattctgaaaatgtgagcaagacctgtctaggcaagagtatgggaaattcaggtaatggaattctcatatatcggaktggctggaactcaagggatgacagatatgacaaatgagactagaaatggccacaagggctagttcatagtggccttctatgtatactgaggagctgactt

SEQ ID NO: 524320 - DNA, 201 bp, Homo sapiens
acaaaacctaaacataaggctaatatacttaatatacaaaaagctcatagtaaccagtgagaaaaagacaaacaattcagtaggaaaaccagcaaaggacragaacagacagtttacagaagaagtcacttcagtgtccaatatatacatgaaaaaagttatttgtccacattaataaggaaatgcaaaaataaaacaatt

SEQ ID NO: 524321 - DNA, 201 bp, Homo sapiens
aacagcgcctgcttttctttccttggtccaaatggactgtggactgtgtctgcctgggctgatctctgggcacagcatgctgcaggaaggcctgtctgtgyacctccagagccagctcactccaactgatttctcagggctcaggcatgggtaagtgtgccctgaggtcttggaaatgatgaactctccactgcttcctga

SEQ ID NO: 524322 - DNA, 201 bp, Homo sapiens
atgaaaaaagttatttgtccacattaataaggaaatgcaaaaataaaacaattcaacatctttttttggcttatgagattgcgcaagggtttttcttcttracgcaaaccaattctgacacctattgagtgtcctataatgcagttcaattttgacaatacctaaatttagcatcagactccacaggtgtaaagactcagt

SEQ ID NO: 524323 - DNA, 201 bp, Homo sapiens
ctctgactttgctaccaagtctggggttccaacaaatcccctccttgggtttgattatttgctagaatgactcacagcactcagaacactggccactagcrgtttcttacaaaggatacaaatgaacagccagatgaagaggtacatacagagaggtctggaagggtcctgagtgcagaggttctgtccctacggagttaa

SEQ ID NO: 524324 - DNA, 201 bp, Homo sapiens
caaatcttccagcactgactggtttcaccgaactgcataacttctacctgcttacacataacacaagcttctttgaccattttttggaactcacaatttakactagacctcatggttgccctgtcctttggatacctcctgactgggaagctgtctaggcctttatcttactgcagctgttaggcagtcatagaggttgac

SEQ ID NO: 524325 - DNA, 201 bp, Homo sapiens
ggatacctcctgactgggaagctgtctaggcctttatcttactgcagctgttaggcagtcatagaggttgacaggcaggccacctgtctgacgagatagcrcaggtcaggtgggctcactctaagcccctgtattctcatgacctgtaagagtgctgtgatttactagtgtaaattattggcatgaagtgtgcagggggag

SEQ ID NO: 524326 - DNA, 201 bp, Homo sapiens
cagctgaatggttttaataaactatgttctctggctctagttgtcattttgacctaagagaccagtactttcaaaatgttataattagccaggtatggtgrttcacacctgtaatcccagcactttgggaggccaaggtgggaggatcactttagcccagcagttcaaaaccagcctgggcaacatggcaaaaccctgtct

SEQ ID NO: 524327 - DNA, 201 bp, Homo sapiens
aaagacaggcataggaaatcacaagggtgttgattggggaagtgataagtgtccatgaaatcttcacaatttatgttcagagattgcagtaaagacaggcrtaagaaattataaaagtattaatttggggaactaataaatgtccatgaaatcttcacaatccacattcttctgccatggcttcagccagtccctcctttc

SEQ ID NO: 524328 - DNA, 201 bp, Homo sapiens
tgaggggtatccctgggacagtagacaccagttcccatcatctctagggtgataatatattctaggtggctcagtaccatcccaatttgtccctattgtcrcagtgtcattattaataatactcctttaatagaagtctaacgattcttcttgcctcaaaagtccgaatctggttaggtgactctgattgctttttaagag

SEQ ID NO: 524329 - DNA, 201 bp, Homo sapiens
caacattgggagtgtctaacacttctgcccttcagggctgtgctggggtgtttatcggtatttatcagctaggtggcctgattcctatctgtgaaacttakagtctagttgtagggatctacctatgtggatgacagcaatcataaaatagatatgagatatatagttatggacaaataagaatatagttcagtgttaaaa

SEQ ID NO: 524330 - DNA, 201 bp, Homo sapiens
ctcagtcaatttaaatggataaaacaacaacaacaacaacaacaacaacattgggagtgtctaacacttctgcccttcagggctgtgctggggtgtttatyggtatttatcagctaggtggcctgattcctatctgtgaaacttagagtctagttgtagggatctacctatgtggatgacagcaatcataaaatagatatg

SEQ ID NO: 524331 - DNA, 201 bp, Homo sapiens
agaggtgggagggtcccttgagcctgggagttcaagattacagtgagctatatgatcatgccactgcactccagcccagatagaatgagatgctgtctcaraaaaaaagttataatcaatctgattaaggtatgattctatcagagagaaagagagagagagagagagaataacaatataaagcctctgatgggctgtaca

SEQ ID NO: 524332 - DNA, 201 bp, Homo sapiens
gaatcgcttgaaccagggtggtggatgttgcagtgagccgaaatcgcgccactacactccagtctgcgtgacagagcgagactccgtctccaaaaaaaaaacacatcaagataaaatccagacagttaaaaaatttaggcctaaaaatgtaaaatcataaatataccaggaggaaacaaacatttttataaccttagagaa

SEQ ID NO: 524333 - DNA, 201 bp, Homo sapiens
cttgctattgtctctaggacaggactattctcgaggacattatcctcagcatcacagagtggctcctttgtggaagaagtacataggagacacttctttcrgatctcagtattcagaacaactgtgcttctgcgaataagcagactacttcggatactgtaacccttctgagagctgagctgctgggatacgcagagccag

SEQ ID NO: 524334 - DNA, 201 bp, Homo sapiens
ttgggggtacaagcgatgaaaagaggctcaacatcactaatcactagggaaatgcaaatgaaaatcataaggaggtaccactttgtacccttaaaaatagytactacaaaaagaaaaaaaaaacacccagaaatccactttgggaggccgaggcaggaggattgctagggggcaggagttcaagacagcactgggcaacat

SEQ ID NO: 524335 - DNA, 201 bp, Homo sapiens
aaaaaattagctgggtgcagtggtgagcgcctgtagtcccagctacttaggaggcagaggtgggagggtcccttgagcctgggagttcaagattacagtgmgctatatgatcatgccactgcactccagcccagatagaatgagatgctgtctcaaaaaaaaagttataatcaatctgattaaggtatgattctatcagag

SEQ ID NO: 524336 - DNA, 201 bp, Homo sapiens
ctcttgttgcccagtctggagtgcagtggcatgatctcggctcactgcaacctctgcctcctgggttcaagcgattatcctgtctcagcctcccgaatagstgggattacaggtgcctgccaccatgcctggctaatttttgtattcttagtagagacaggtttcatcatattggtcaggctggtctcaaactcctgacct

SEQ ID NO: 524337 - DNA, 201 bp, Homo sapiens
ggagctaaatcccctgaagcagcagaaagctttcattctggacctgttcaggactcggaatattgccataatgaccattatgtctttgctgctatggtaartaataagtgacctggaaatgcagatatccagcacataagtatgcaactgattttcttaactcagaggaacattatgacaacgactgggttttcctgagga

SEQ ID NO: 524338 - DNA, 201 bp, Homo sapiens
atatagttcagtgttaaaacacatggttctggcagtgcctttatatatatatatatacacacacacacacacacacacacacacacgcatatataaatgtrtatatatatgtgtgttgtgtatatatatatatatatatacacactttaaaaaaattttgagtctcactgttttgctcaggctagagtgcagtggtacaat

SEQ ID NO: 524339 - DNA, 201 bp, Homo sapiens
gggaaaatgtaaatccacttctgaaagggggataaggtgggtggatcacctgaggtcaggagttcaagaccagcctggccaacatggcaaaaccccgtctytactaaaaatacaaaaattagccgggcatggtggcaagcgcctgtagtcctagctacttgggaggctgaggcaggaaaatcgcttgaacccaggaggaag

SEQ ID NO: 524340 - DNA, 201 bp, Homo sapiens
caaaagccaaacaggcctccccaaaacggaggactctgaccagcaggcccatatcccaggaggacctgaaggaccatctggaacagaagggtagagagtcrcggtgaagccagagaagctctctccgtgggaatgggaacaaggtgggacttgtgccaggtggtggcatccccggttctatagaatgggcagcactgagat

SEQ ID NO: 524341 - DNA, 201 bp, Homo sapiens
ttccatgtgacgatcctccctaagcctgaaaaacccaacatgtggctctgcttgggccagacacataccaaaagccaaacaggcctccccaaaacggaggwctctgaccagcaggcccatatcccaggaggacctgaaggaccatctggaacagaagggtagagagtcacggtgaagccagagaagctctctccgtgggaa

SEQ ID NO: 524342 - DNA, 201 bp, Homo sapiens
agaacacaaggcaaagcctattgtcttcatgttcaaagtccccagaatccatcttccatgtgacgatcctccctaagcctgaaaaacccaacatgtggctstgcttgggccagacacataccaaaagccaaacaggcctccccaaaacggaggactctgaccagcaggcccatatcccaggaggacctgaaggaccatctg

SEQ ID NO: 524343 - DNA, 201 bp, Homo sapiens
ggagcctccaagcctcccctgtgtgagcgggtgaggcagggagagcataccccaggcttcctacaggaaagggctgccctcccccgccggctctgacactrtcatctactctcctcccagttcccatgcagcatgtggtcccacatgcagggtgaagaagggtaagagggccaaggggaaagtaaggccatggaagatcag

SEQ ID NO: 524344 - DNA, 201 bp, Homo sapiens
caagtgctttaagaatacagattctcaggcctctgtttaaaagagtcgaagtaggcaagcccagggaggaacctggcaacctgcatttaagaagggccccrtggaaccaccaagtattagcacaggactggtccacaggtcctgtctgtgtgcaccaccctggaaccctccaagaggatgtctggttcccactagtttatg

SEQ ID NO: 524345 - DNA, 201 bp, Homo sapiens
tgaatcaatgattaagcaatttttttttttttttttttttttttttttttttttttaccaattcactaggagaacttgggctggttgctttattgctctgkgccttcatttcctcatttgtaaaacaaggataagagtacccatctcacatgccaaccctgagatcccctgagataatacacggcactcagtgagcactcc

SEQ ID NO: 524346 - DNA, 201 bp, Homo sapiens
cctgacctcaggtgatctgcctgccttggcctccctagtgctgggattacaggcataagccaccgtgcctggcctggaatattagtttttatataactggkgtgaagggtcaaagagataatatatgtaaacacttagcctggaacctgtctcaaagtacctactcaaaaaaatgctagctgtgaagatggtgatcctgtt

SEQ ID NO: 524347 - DNA, 201 bp, Homo sapiens
atgtcagttgaatcaatgattaagcaatttttttttttttttttttttttttttttttttttttaccaattcactaggagaacttgggctggttgctttaktgctctgtgccttcatttcctcatttgtaaaacaaggataagagtacccatctcacatgccaaccctgagatcccctgagataatacacggcactcagtg

SEQ ID NO: 524348 - DNA, 201 bp, Homo sapiens
cctggagcaggtaggtgctgaatgtcagttgaatcaatgattaagcaatttttttttttttttttttttttttttttttttttttaccaattcactaggaraacttgggctggttgctttattgctctgtgccttcatttcctcatttgtaaaacaaggataagagtacccatctcacatgccaaccctgagatcccctga

SEQ ID NO: 524349 - DNA, 201 bp, Homo sapiens
ctcaagcatgtcctcttctcccatggagcatcattagggtcttgaccttcccatcagtccatgggctgggaaaactgaggcagtcacctctaagctggatrccacttctgccaggtcttgtgctccagaggccctgggggaaccttgtgtgttaaggaccagccttctttgcaggccaccagtgatctaagacagggctgc

SEQ ID NO: 524350 - DNA, 201 bp, Homo sapiens
aataatttatctgccaagaaaaaaggaaaaaagaaaattcctactctatgatggcagcacacacacacacacacacacacacacacacacacacgatgatmgtcagaactggtagatttaggctgcagctaatctaagtttatttttaagggccatcctacttggcaattagaagagatcaatgacagagcttatgcgtct

SEQ ID NO: 524351 - DNA, 201 bp, Homo sapiens
gagcttatgcgtctgaattaagcaagtgtgtcctaggtacatgggcttcttagttcttacatttcagcctatatccctgatgcaaatgttcttgggtagtsgtgctactaagctaataaaaaattagtcactagttctatctaagctactcctattactaaatgggaaaatcactaagatcccttgagcatacttatttgt

SEQ ID NO: 524352 - DNA, 201 bp, Homo sapiens
ttttgaagcggaaagcaggcacttctaaaaggcaggggaggacgcgagcaggtgagggatcagagggctagcttgctgccttatctactgggcagttgagktggtgccttcatgggcagaaacaggttgtataggtggccaaaaactctagcaggcatactttgagttggaaattgactgatatcgcttgaggaaatctgg

SEQ ID NO: 524353 - DNA, 201 bp, Homo sapiens
gtgccttcatgggcagaaacaggttgtataggtggccaaaaactctagcaggcatactttgagttggaaattgactgatatcgcttgaggaaatctgggcrgtgagagttccactctggagcttctaagcacatagttagatgaatttgccctgcagggagtgtccagtgaagaggaggttaaaaggctataattgcactt

SEQ ID NO: 524354 - DNA, 201 bp, Homo sapiens
tggatgctcctaatttacatggagatgcctacctgaactgtttcctctctgccttgattgaaattccagcttacattacagcctggctgctattgcgaacsctgcccaggcgttatatcatagctgcagtactgttctggggaggaggtgtgcttctcttcattcaactggtacctgtgggtaagaagttaaccaagatga

SEQ ID NO: 524355 - DNA, 201 bp, Homo sapiens
acctccgccgcctgggttcaatcaattctcctgcctcaacctcctgagttgctgggactacaggcgcatgccaccatgtccggctaattttttttttttttgtatttttagtagagatggggtttcatcatattggtcaggctggtctcaaacccctgacctcaggtgatccacctgccttggcctcccaaagtgctggga

SEQ ID NO: 524356 - DNA, 201 bp, Homo sapiens
acaacctcccaactcagttttaacacaacagttataggaataacaaagtttgaagattctggcctcagtcttgcccaatatgactatctgggggatttcargtgaaagaataaattaaaaatcatagaacaaggtgtcagacataccctctttttggagatttcctgttcctttgctttttcatatttaagcaagagaaaa

SEQ ID NO: 524357 - DNA, 201 bp, Homo sapiens
agaaatattaaaggaggcacttcagaaataaatttaaccaaaaatttgcaaaatgtatactttaaaaactataaaatgtcattgaaagaaattccagaagsccttaacaagtggaaaagcttcccatgttctgttcatggagcagaagacttattgttagtatggcagtgctctccaaattgatcaatagattcaatgcaa

SEQ ID NO: 524358 - DNA, 201 bp, Homo sapiens
ttctataagttgccaagtcttggatcacgtcccaccttcctctaccctgaccatgcctgctctgggccatgaggcaaatgcctttccccttttctaagtgstgatagtttgaactctaactgccacataatgatataaaaagcaaatattaaagtgagttaatatgctaatactcctcccttgttttgaacaggaacagaa

SEQ ID NO: 524359 - DNA, 201 bp, Homo sapiens
tgcactgtcttaattgatggtgtgtacaccttctgtcaagttgccaggatggaaatattccaactctactcctttaattatttgcgaagagccccgtgccmtgggctcagcctcagtgtctgcagaggggagaagggaggagacaaggtgggaagaacatgctggagccacatggtcccagcaggtagcacactcttcagc

SEQ ID NO: 524360 - DNA, 201 bp, Homo sapiens
tgcaacacaccttggcaacctacacatctcatgttttgtgttatactgcattctctaggtttggcaggaagaacgttctcttcgcaaccatggctgtacasactggcttcagcttcctgcagattttctccatcagctgggagatgttcactgtgttatttgtcatcgtgggcatgggccagatctccaactatgtggtag

SEQ ID NO: 524361 - DNA, 201 bp, Homo sapiens
gatatctcctgagcagatggatgcctgagacctcaccaaggaggaagatgggaggatgtgacagagaaaaaagtctgccagagccctgaaaaaacactaartctgcattgatgcctgactcagggcttgcaacacaccttggcaacctacacatctcatgttttgtgttatactgcattctctaggtttggcaggaagaac

SEQ ID NO: 524362 - DNA, 201 bp, Homo sapiens
gcctcatgctcccagggctttggccagtggtggggaggggccactgaccccactggaaagtggggtcctcataccacagactccttgacaaaacatgacgytgccatcaccactgccctccctgctccaccaccacctcaggggtaggggtggatggcacaggatctgtctgcaaacagccagcagccagacagtgagccc

SEQ ID NO: 524363 - DNA, 201 bp, Homo sapiens
ttgaggtctgcctcagggttgggctcacgcttcatgctgtcttccttggcagtggaatctggtgtgtgaggacaactggaaggtgcccctcaccacctccstgttcttcgtaggcgtgctcctcggctccttcgtgtccgggcagctgtcagacaggtaagcacatgggaggggaggaaggtgggatggtgccccttgtca

SEQ ID NO: 524364 - DNA, 201 bp, Homo sapiens
ttgattatttgctagaatgactcacagcactcagaacactggccactagcagtttcttacaaaggatacaaatgaacagccagatgaagaggtacatacasagaggtctggaagggtcctgagtgcagaggttctgtccctacggagttaaggtgcactgccctcctggcatgtggatgtggtcaccaactcggaagttct

SEQ ID NO: 524365 - DNA, 201 bp, Homo sapiens
ctttccaaagaggatcctgagtttcagggagggcagtgacctgccccaggttactctccccagtcccggcacaggccagtcaaacccagggctgcaaggcmtatgccctttgtacaaaggcaatatcctggcccaggggaggagagtctgcccgccagccgtgctaatattccctcagagctgggctggggttgaggtctg

SEQ ID NO: 524366 - DNA, 201 bp, Homo sapiens
gcactaggctggcttctgaagatgcagtgccacctttactttggactgcctcacagctgaggggtcaccagtcacagccatggccttggctggcttcttgmtatgtaatgcgagcggagtaggagcatcaccctccctttccaaagaggatcctgagtttcagggagggcagtgacctgccccaggttactctccccagtc

SEQ ID NO: 524367 - DNA, 201 bp, Homo sapiens
ccctcctctttattttccattttccccaattcccttagctttttgttttacatttttctcttgtgtgtgtctttataaacacctctgtctgctgcagaatraggtgtgatataaatatgtgagtttgtgcttaaatccaccacactttcaagggagttgtgaggattcagaaggaattgtttggcgaatgcagtaaaagca

SEQ ID NO: 524368 - DNA, 201 bp, Homo sapiens
agggcctaagttcatctgcagggccacagggcaagcagcagaggcaatcctggctcgtggccaggggctaagcatgggctggcctttgcctcaagcatgtsctcttctcccatggagcatcattagggtcttgaccttcccatcagtccatgggctgggaaaactgaggcagtcacctctaagctggataccacttctgcc

SEQ ID NO: 524369 - DNA, 201 bp, Homo sapiens
aaggagcaggaagggcaacaaatgctctgctctggagagggcctaagttcatctgcagggccacagggcaagcagcagaggcaatcctggctcgtggccasgggctaagcatgggctggcctttgcctcaagcatgtcctcttctcccatggagcatcattagggtcttgaccttcccatcagtccatgggctgggaaaac

SEQ ID NO: 524370 - DNA, 201 bp, Homo sapiens
agtagcattaacttggataggaaaagatatagagtagagtattgtcttagaaagcgatctcaagcatccttggcttcagaagaagcaccttcaacctgctyctggtacctgatccaaagacattttggtggctccacccaggccagggacaaccactggatacaagcatattcttgttctgaggtttccaatcctggctgc

SEQ ID NO: 524371 - DNA, 201 bp, Homo sapiens
gctttgacaggactggtcagggggagctgcaggtaccttgggcctctagaaggactgtaattcctcccttatggcaggctgcattcaatttaggtgtaagrctaatacaggtgtgccttgttttctaaagctgtgttgtggttttatgcatgtctctggagtccaaaagaaaggcaaggatccccatttggaatgaagaag

SEQ ID NO: 524372 - DNA, 201 bp, Homo sapiens
atggactacaaacattttaaagtgtcagagtaagtgtcatatatgtagatgccctattgcctccaatcaccagacttctaagcatagtcaaggtgaagtgrgagttgcatgcataagttttccccatgcatcatagccaaagatacttccttactacctcttaatctcatggttatttgcattattttggttacaggagct

SEQ ID NO: 524373 - DNA, 201 bp, Homo sapiens
aactgttttcaaaatagtcagctgcgtatttttgatcttttcaccaaggcacaactttttacttttctttatatcttactttaatgttaccattattttaytgtatttaaatttgaagttgcctcaaaatctccaagggatgagctggcatataaatacgtaaacatgatgcagaaatttgctggcataccttatttgcat

SEQ ID NO: 524374 - DNA, 201 bp, Homo sapiens
gtggttagtgggtgctgtcttagtacagatacagaacatttcagaagtttctatcggacagcacagttctaattactgagagtcagtgacctaacattatygtagttcctatagggacccactaaaggcatattctgaaaaatgcaaactaggctcatttttcaactcatgtgctattaagctggagaggggacctgctgg

SEQ ID NO: 524375 - DNA, 201 bp, Homo sapiens
gagtcctcctatctgattgatgttcttatgtcccgggctttacaggtgcttacaacagaatgctgccctacatcgtcatgggtagtctgactgtcctgatyggaatcctcaccctttttttccctgaaagtttgggaatgactcttccagaaaccttagagcagatgcagaaagtgaaatggtaagtaggacttttaacaa

SEQ ID NO: 524376 - DNA, 201 bp, Homo sapiens
ccagcaaagggcctggacctctggtggcactagccttgtgctttcctgggaactggggtcagggcctgaacagcagtaggacttactgattccccacccayaacccagaggcgagccaggttatgtggcgaaggataaggcctcttcccctgctaacagggaacttctgggaggcactgagagcagcaagcaagggaataa

SEQ ID NO: 524377 - DNA, 201 bp, Homo sapiens
ttgcctagtgatgattttgcattttctgattccttcaacatttattaattggaattcttctgagaagaagagcttcccctccacatctatttattaatgtrtgcaattgttaacttatatcagtacaggttcatacatacttattttatttcatcagttataaactaatgctatccatctttattttgttgctccagttat

SEQ ID NO: 524378 - DNA, 201 bp, Homo sapiens
agattgcgttatgcactttttggtaatgataccttagaagtgatgcattctctgggcatcataccagtgggtacatgatgctgatgtgtcttattactggkgatgttaaccttgatcatttgtcaagttggtgtctgtggaatttctctgctgtaaaggtactattttttcctctgtcactaataaatatcttaagggagg

SEQ ID NO: 524379 - DNA, 201 bp, Homo sapiens
tgtacatgtgtataaggtagtttccttcttcaggggttgattgtgaggtccaagtttttcaacctgtgcagttactaagagtcaaattatttttcgttttwttttattttattttattttattttatttttttgagatggagtttctttcttcgttcttgttgcccagggtggaggagtgcaatggtgccatctcggctca

SEQ ID NO: 524380 - DNA, 201 bp, Homo sapiens
gagagaattgtttctagcagtgatgtcttacaagaaatattaaaggaggcacttcagaaataaatttaaccaaaaatttgcaaaatgtatactttaaaaamtataaaatgtcattgaaagaaattccagaagcccttaacaagtggaaaagcttcccatgttctgttcatggagcagaagacttattgttagtatggcagt

SEQ ID NO: 524381 - DNA, 201 bp, Homo sapiens
ccctccacctgtcaatagccttctgggtagaatgccatcagtatcctctcttatcccccataactagctgcttaaacacaaaaagtgtttctgtatttaawaacacagaaaaaactcttgactgattcattaattcagtatttttcagtacttctaacatcaacctccatgtgacatttctttgggcatgctgaaccattt

SEQ ID NO: 524382 - DNA, 201 bp, Homo sapiens
gcttgatcaggataaagaataactattactgagcacctgccacatgccagacaccctcctaggcactttgcatacatgatctcagtcttcataataatatmtccatgaaagacggcttatcacagtcactctagtagcaactcagcatcaaggaacccaggttctccccgtgccagatggaggacactcctagcccatggt

SEQ ID NO: 524383 - DNA, 201 bp, Homo sapiens
gcttatcacagtcactctagtagcaactcagcatcaaggaacccaggttctccccgtgccagatggaggacactcctagcccatggttcctgggtctcgcytcatatcctggcagctgcactacagtcttgtttcttgagctggggtctactgagagcctatgttggtcatttatgaaggtgcatgtcctgcctctgtgtg

SEQ ID NO: 524384 - DNA, 201 bp, Homo sapiens
caacatagtaattttgctgcttctctggaattagctcttaatcccttagcctgtgcctagggcatataaacatgactgagaaaatctctcttaaaaggcargcatgaatgacctttgaattatctgttttgtatcttccaggccacttctctatagcatgggcagatccccaacaaaaggcagagccattgccattggtca

SEQ ID NO: 524385 - DNA, 201 bp, Homo sapiens
gggtccctaacttcctgcaacaggtgtattcatctttttctttttgacttgtgcaaactcttcgcaatggaagaaattagccccttgtatatatgttgtawatatttttcctagtttaccatttgtattttcactttatgatatctttgtaatgaagacaattttagtttttatatactcaaaggtgtcaatctgaaatga

SEQ ID NO: 524386 - DNA, 201 bp, Homo sapiens
ctggggttccaacaaatcccctccttgggtttgattatttgctagaatgactcacagcactcagaacactggccactagcagtttcttacaaaggatacamatgaacagccagatgaagaggtacatacagagaggtctggaagggtcctgagtgcagaggttctgtccctacggagttaaggtgcactgccctcctggca

SEQ ID NO: 524387 - DNA, 201 bp, Homo sapiens
tttttttttttttttttttgagtctcatagccctgtggacctaactttccactgcagcctactagtttgggcaaaagcagagtcatgccagacctatcatrgccaaaacctatccctgaaacatcctggttaacctccttctccttgatgtcctcccatcccccatttccaattacctccaccttaagaggagaactctgg

SEQ ID NO: 524388 - DNA, 201 bp, Homo sapiens
caaatcccctccttgggtttgattatttgctagaatgactcacagcactcagaacactggccactagcagtttcttacaaaggatacaaatgaacagccasatgaagaggtacatacagagaggtctggaagggtcctgagtgcagaggttctgtccctacggagttaaggtgcactgccctcctggcatgtggatgtggt

SEQ ID NO: 524389 - DNA, 201 bp, Homo sapiens
gtggatgttgcagtgagccgaaatcgcgccactacactccagtctgcgtgacagagcgagactccgtctccaaaaaaaaaacacatcaagataaaatccasacagttaaaaaatttaggcctaaaaatgtaaaatcataaatataccaggaggaaacaaacatttttataaccttagagaagatcttactgagcataacat

SEQ ID NO: 524390 - DNA, 201 bp, Homo sapiens
ccctccttgggtttgattatttgctagaatgactcacagcactcagaacactggccactagcagtttcttacaaaggatacaaatgaacagccagatgaaraggtacatacagagaggtctggaagggtcctgagtgcagaggttctgtccctacggagttaaggtgcactgccctcctggcatgtggatgtggtcaccaa

SEQ ID NO: 524391 - DNA, 201 bp, Homo sapiens
cgaaatcgcgccactacactccagtctgcgtgacagagcgagactccgtctccaaaaaaaaaacacatcaagataaaatccagacagttaaaaaatttagscctaaaaatgtaaaatcataaatataccaggaggaaacaaacatttttataaccttagagaagatcttactgagcataacataaaatcaaagaaccataa

SEQ ID NO: 524392 - DNA, 201 bp, Homo sapiens
cactcagaacactggccactagcagtttcttacaaaggatacaaatgaacagccagatgaagaggtacatacagagaggtctggaagggtcctgagtgcasaggttctgtccctacggagttaaggtgcactgccctcctggcatgtggatgtggtcaccaactcggaagttctccaaaccccatcatttagaggttttca

SEQ ID NO: 524393 - DNA, 201 bp, Homo sapiens
attaggacatttgaagagaaaatgctattttgggaatatatttatgttaataaaagtactcccactgaagcaaaaaggacaataaaaataactgatataaraaagtatcacttctaaaagcaccattgtttataccgggtctcttttccagattattacttcttatccattggtctggtcatgctgggaaaatttgggatc

SEQ ID NO: 524394 - DNA, 201 bp, Homo sapiens
gcctcctctaggaaccctagtggagctgctggtagcccactggtagtggagttgatggagcctccagcaaagggcctggacctctggtggcactagccttrtgctttcctgggaactggggtcagggcctgaacagcagtaggacttactgattccccacccataacccagaggcgagccaggttatgtggcgaaggataa

SEQ ID NO: 524395 - DNA, 201 bp, Homo sapiens
tatgtggcgaaggataaggcctcttcccctgctaacagggaacttctgggaggcactgagagcagcaagcaagggaataatgaaacagactaaccctcacrtgcggctgccactatgtgggacttcacatagcggctctcaaggatgcacctcccctggggtctgggtaggccccgacaaaaggggaaaaccttccgtgat

SEQ ID NO: 524396 - DNA, 201 bp, Homo sapiens
gtggcatccccggttctatagaatgggcagcactgagatctgcctttttagtggcacagggtgattctggagcctccaagcctcccctgtgtgagcgggtraggcagggagagcataccccaggcttcctacaggaaagggctgccctcccccgccggctctgacactatcatctactctcctcccagttcccatgcagca

SEQ ID NO: 524397 - DNA, 201 bp, Homo sapiens
ctggaacagaagggtagagagtcacggtgaagccagagaagctctctccgtgggaatgggaacaaggtgggacttgtgccaggtggtggcatccccggttmtatagaatgggcagcactgagatctgcctttttagtggcacagggtgattctggagcctccaagcctcccctgtgtgagcgggtgaggcagggagagcat

SEQ ID NO: 524398 - DNA, 201 bp, Homo sapiens
agccattgccattggtcacatctccgccccaggtgtagtgaaccaagggcagactctgtggaaagggcccagagctccgtgacaagagaaggagctttgtycttggactcccatctggtgccatctctgctcactgtggcactgagcagagcagaggccaatagtcgcctgcatgtcctttcccaaaaagcagtgcccgca

SEQ ID NO: 524399 - DNA, 201 bp, Homo sapiens
gaaagggcccagagctccgtgacaagagaaggagctttgttcttggactcccatctggtgccatctctgctcactgtggcactgagcagagcagaggccartagtcgcctgcatgtcctttcccaaaaagcagtgcccgcaccaagcagtcatgggcctttctgctgttcagggaaagcactgtgagttcaatgggtgtgt

SEQ ID NO: 524400 - DNA, 201 bp, Homo sapiens
cctctgctttctccatgctgtatgtcttcactgctgagctctacccaaccctggtcaggaacatggcggtgggggtcacatccacggcctccagagtgggsagcatcattgccccctactttgtttacctcggtgagctgcatcttgtgcatttgttcttcctttaaattagttttcaatgtaaaagtaagattttcattg

SEQ ID NO: 524401 - DNA, 201 bp, Homo sapiens
ggagagcatcctcatggagctgttgcctgctattggtcaggcaggtaggatttccctgctgctagtccctcctctgcctcatgctcctcccaagaaaaacytgagtggcctctgctagtcccttatccctttccctcagcacggtatagcggtcatcagacattgtgtctggccttgtgctgagcactaaggtgtggacat

SEQ ID NO: 524402 - DNA, 201 bp, Homo sapiens
tgcgtcagccccccttgagactccctgcgcagtgcccgggtcagcgctcccctccccctcaaacctgctgttcatacttccagcagcgggtgtgcaccccmagaaagaataggactcacgcgaggcgcattcctgggtcgtttctgtccaataaggaggtgatggagaaaggagtttgtcaccaactgtcttttcatttcc

SEQ ID NO: 524403 - DNA, 201 bp, Homo sapiens
ctgagtgcagaggttctgtccctacggagttaaggtgcactgccctcctggcatgtggatgtggtcaccaactcggaagttctccaaaccccatcatttaraggttttcatggaggtttagtcatgttggcatgatggattattaagtctatccccagcctctctcctctccccagaggttccaggcttctaatccaggct

SEQ ID NO: 524404 - DNA, 201 bp, Homo sapiens
acaaacaacaacaacaacaaaaaactgggctctggtggttgggaggaggagggaaggaagcaagtaccagggtaagcaggatggatggatggctctccccyagaggggcggcagcacacagagttctggagtcagactcagtagagggccagttttgactccactgccaaccacctggctgactccaggcaggttacatca

SEQ ID NO: 524405 - DNA, 201 bp, Homo sapiens
actagccttgtgctttcctgggaactggggtcagggcctgaacagcagtaggacttactgattccccacccataacccagaggcgagccaggttatgtggygaaggataaggcctcttcccctgctaacagggaacttctgggaggcactgagagcagcaagcaagggaataatgaaacagactaaccctcacatgcggct

SEQ ID NO: 524406 - DNA, 201 bp, Homo sapiens
attgccccctactttgtttacctcggtgagctgcatcttgtgcatttgttcttcctttaaattagttttcaatgtaaaagtaagattttcattgtgaaaaygtcaaatagcatagaatgtactggaaaaaagtacaagttcacctctcctctcccaggaggagctctagaaagccaatcacaaactggtgagtagcgctac

SEQ ID NO: 524407 - DNA, 201 bp, Homo sapiens
aaaaatatgacctatacatggggggaaaacgtgggcaacagtaactgcctgagagggtccacatgtcagattttaacagactttaaggcataaggcagccrttataaatatgttcaaagaatgaaaggaagtcatgcttttaaaagtatgatgacaatattgcatcaaatagagaatagcaataaagagagaaaaattaca

SEQ ID NO: 524408 - DNA, 201 bp, Homo sapiens
acattaacaaaaagacaacattggggctcatctcccaaaagctggtttgggcactcgctgatctgggaatctgttgaaagccatgggggccccacacaggygggtgtcagtgccctcactttctcttttgactaaaggaaacgatcaagaacacaggtgccctggccatccttttcccaataaactgtgaacatcaccagc

SEQ ID NO: 524409 - DNA, 201 bp, Homo sapiens
ctctgggtacagtctgagatttatccttggattgtgcctgagcagcagagcgctaacttcctggcccgagttgtttttcttctgcagagctgtgttgggcrttgcctgtggccagcatttgagcactgtgacaggcggcctcatgaatcttgctattgtctctaggacaggactattctcgaggacattatcctcagcatc

SEQ ID NO: 524410 - DNA, 201 bp, Homo sapiens
tatcccaaaatcttgggaggtggggtgctggcatcagtattttttccaagctctccgggtgattccaagtgcagccaaggttaaaaaccacttgcagagtkactcttagttctggatttacagaattttcatgttgctgattcaagaaatatctgcaatctgtgctgtacccactttccagaaatgtgctggtagcatcta

SEQ ID NO: 524411 - DNA, 201 bp, Homo sapiens
gactacaaacattttaaagtgtcagagtaagtgtcatatatgtagatgccctattgcctccaatcaccagacttctaagcatagtcaaggtgaagtgagakttgcatgcataagttttccccatgcatcatagccaaagatacttccttactacctcttaatctcatggttatttgcattattttggttacaggagctaaa

SEQ ID NO: 524412 - DNA, 201 bp, Homo sapiens
cctgagagggtccacatgtcagattttaacagactttaaggcataaggcagccattataaatatgttcaaagaatgaaaggaagtcatgcttttaaaagtrtgatgacaatattgcatcaaatagagaatagcaataaagagagaaaaattacatttatatttttaaaagctgagccagacatgatggcatgtgcctatag

SEQ ID NO: 524413 - DNA, 201 bp, Homo sapiens
ggattgcttaagcccaggagttcaaccccagcctgggcaacagaaagagaccttgtctcttaaacaaacaaaacaactgaatagaacttctggagtaaaartatacaataattgaaatttaaaagtaactcaagggccttaacagaagatttgaacaggcaaaagaaagaatcagcaaacttgaagatagaggattggaaa

SEQ ID NO: 524414 - DNA, 201 bp, Homo sapiens
ttaatctacacctttcagaagctcaacaaactccaaatagaatgatcacaaagagatccacaccctgatatatcatggtaaaactgcttaaataaaaaaaragacaaaaacgaagggaaaattttgaaagcagcaaatatatgactaggtacatacaagagaactccaataagatcaacgtttgacttctcattagaaacc

SEQ ID NO: 524415 - DNA, 201 bp, Homo sapiens
accacttgcacttttcaacaagggaaaagaaattttacgcctggaccaagtggccatgccctctgccctgccctttgggcttttcaaacacctcccctccrcactaggctggcttctgaagatgcagtgccacctttactttggactgcctcacagctgaggggtcaccagtcacagccatggccttggctggcttcttgc

SEQ ID NO: 524416 - DNA, 201 bp, Homo sapiens
ttaagcacccactgtgtgcctagcactgtgcaaacactagtcatctaaaatatgattatacggattattcaggttttagaactctgtccttctgctggagratggtgaggagggggtgcctctttcctctctagccaaagagcaagggtgaagtggcccagaacagcgcccaccccacccagggctgctggcctcatgcat

SEQ ID NO: 524417 - DNA, 201 bp, Homo sapiens
tatagggtgctctgggagcctcttcatggtagttttactccattgtgctctgcaggaaattactggcttttgtatcctggtatgagactcgttgtgttggrttctcaggtctgaaagtttaagtgtccctgaaaaccagcctgctctggaatggctggacgccccagtcagcacctggggttgggggacacagtacaaagg

SEQ ID NO: 524418 - DNA, 201 bp, Homo sapiens
acatggtgtctccacaggaagctgagaatctcaaaagatatctcctgagcagatggatgcctgagacctcaccaaggaggaagatgggaggatgtgacagrgaaaaaagtctgccagagccctgaaaaaacactaagtctgcattgatgcctgactcagggcttgcaacacaccttggcaacctacacatctcatgttttg

SEQ ID NO: 524419 - DNA, 201 bp, Homo sapiens
atgtgtatgtatgtgtgtgtgcatgtatgtacaaacatgtgcagggacccacagggacaggtctgtcccatcaaggaaaacactgtctcccactgggcccrccatgtcactgttaaccacagggaggttttgtggccctggctagcggagacccaagacatatccctcaaacctgaagggcccaggggcaggcagggccgg

SEQ ID NO: 524420 - DNA, 201 bp, Homo sapiens
cctgaaaaaacactaagtctgcattgatgcctgactcagggcttgcaacacaccttggcaacctacacatctcatgttttgtgttatactgcattctctakgtttggcaggaagaacgttctcttcgcaaccatggctgtacagactggcttcagcttcctgcagattttctccatcagctgggagatgttcactgtgtta

SEQ ID NO: 524421 - DNA, 201 bp, Homo sapiens
cacagggaggttttgtggccctggctagcggagacccaagacatatccctcaaacctgaagggcccaggggcaggcagggccggtttcctaagaaaagccytttctaaaggacccctcttaggactggcagctgatttactggactctagcccttcgctccaggtagaacttcatctgccaatcctgtgtcctaataccag

SEQ ID NO: 524422 - DNA, 201 bp, Homo sapiens
caacctacacatctcatgttttgtgttatactgcattctctaggtttggcaggaagaacgttctcttcgcaaccatggctgtacagactggcttcagcttyctgcagattttctccatcagctgggagatgttcactgtgttatttgtcatcgtgggcatgggccagatctccaactatgtggtagccttcatactaggta

SEQ ID NO: 524423 - DNA, 201 bp, Homo sapiens
gctgatttactggactctagcccttcgctccaggtagaacttcatctgccaatcctgtgtcctaataccaggcccctcacagctttccaaaaagacacttkcggcaccataactccccaaaggagagcccagccctagaatcaaccatgggcagccatgcagtctagctgccttcccctgctggttgtaagcagggtctcc

SEQ ID NO: 524424 - DNA, 201 bp, Homo sapiens
gtcaaagtagtgcagaaatgagtccttgttttgtgctgcttttaaaaaatgatcaaggctgccacagtcgtagcagactagaaaagagaaagaaagaacastgctaccctacacagcataaagcagacatgcctggaagtgatggtgttgccggaatgatgctggtttaggaggaaatgaccactcgggaccaaggacact

SEQ ID NO: 524425 - DNA, 201 bp, Homo sapiens
atgggcagccatgcagtctagctgccttcccctgctggttgtaagcagggtctccaaaggcagatggcacccctcatgggcttggggcaaacggccactgygtgtgcatggctcttcctgtgctgcatgatgctgacagggcttcttgggcccctcttcagggagggaatgggaccgaaagccatcgatgcagagcctaca

SEQ ID NO: 524426 - DNA, 201 bp, Homo sapiens
atctaaaatgtccagtttttaaccagaaattacgagatatgcagagaaacagaaaaatatgacctatacatggggggaaaacgtgggcaacagtaactgcytgagagggtccacatgtcagattttaacagactttaaggcataaggcagccattataaatatgttcaaagaatgaaaggaagtcatgcttttaaaagtat

SEQ ID NO: 524427 - DNA, 201 bp, Homo sapiens
cctgtcaatagccttctgggtagaatgccatcagtatcctctcttatcccccataactagctgcttaaacacaaaaagtgtttctgtatttaataacacasaaaaaactcttgactgattcattaattcagtatttttcagtacttctaacatcaacctccatgtgacatttctttgggcatgctgaaccatttaaagctt

SEQ ID NO: 524428 - DNA, 201 bp, Homo sapiens
aagaaatatctgcaatctgtgctgtacccactttccagaaatgtgctggtagcatctatctgtggctccttctaaagagcatatttccacaaggtccttgmgtacactgctccatgcttttgagacatggtgtctccacaggaagctgagaatctcaaaagatatctcctgagcagatggatgcctgagacctcaccaagg

SEQ ID NO: 524429 - DNA, 201 bp, Homo sapiens
agaggggaagccctgagcaggggaacatctgttaagccctgaagaggagttctgtcttccactgggcctttttggatcaaaagcattgtactttccatcaytcccctgacatgtagcacatttcaactgcttgatcaggataaagaataactattactgagcacctgccacatgccagacaccctcctaggcactttgcat

SEQ ID NO: 524430 - DNA, 201 bp, Homo sapiens
ttgtgccaggtggtggcatccccggttctatagaatgggcagcactgagatctgcctttttagtggcacagggtgattctggagcctccaagcctcccctrtgtgagcgggtgaggcagggagagcataccccaggcttcctacaggaaagggctgccctcccccgccggctctgacactatcatctactctcctcccagt

SEQ ID NO: 524431 - DNA, 201 bp, Homo sapiens
gagactggcggatgctgctgctggcgctgacggtgccgggagtgctgtgtgtcccgctgtggtggtgagtgtgactcgtccccagacaggccctctgctgygggtcagcacacctggaacacacctggagcctgatgctgacctagcctgggcttgcatgacctccacggaactcgcggaggccagcttccaagccgggag

SEQ ID NO: 524432 - DNA, 201 bp, Homo sapiens
gtcacagcgaggaacgaacagctctgatccattagccctccagagtcagcctccagagtttccagcagagaaggtccatcccacagggagcctgctcactstgccctaaggagagctttttcttctattccccaggagctggtccatgaatgctcctggctgtgggcatactgtaccagggacaggacttgccccagacag

SEQ ID NO: 524433 - DNA, 201 bp, Homo sapiens
cccgtcaggtccttgggggcgggcgggcgcgcgaagcacagggcggagacagccgggagcccagcctcccgggctgggccgccctccccttccccgcgccsggccggggatgggggtgtggtcccaagtgtacagtggcatcaagctcagcgcgagctcccgggaacgctccaacgccttcagcctgtttcccaggaacgg

SEQ ID NO: 524434 - DNA, 201 bp, Homo sapiens
agttataaactaatgctatccatctttattttgttgctccagttattctagctcaaaccaagttatttttcactttaaggatagagaatgtagatatccasggtaagggcctttatctgtctctgcagtcagggctagaggagtctgtgtttacccctgcgggaggagtgccagtcacagctcgttgctaagttttccatc

SEQ ID NO: 524435 - DNA, 201 bp, Homo sapiens
gtttctgggataaaatagctgaattccaggttgtatttgactaaaataaaccaaagggtgtggtctgggctgaggagtttggtaggtgccttcgcttccaycctctggccctaaggaagggttggcaaagctctgcatgataatttcacattaacttgggaagccaaattactcccactgtcaaagtagtgcagaaatgag

SEQ ID NO: 524436 - DNA, 201 bp, Homo sapiens
tgtctctgcagtcagggctagaggagtctgtgtttacccctgcgggaggagtgccagtcacagctcgttgctaagttttccatcaggcagcagttgagcasgaacgcaagcagggactggtgggacctgggttgggactgaagcttctgttggggaaggaagtgccccaagcaacccagagtgtctgatgctggggtcctc

SEQ ID NO: 524437 - DNA, 201 bp, Homo sapiens
tcctataggctgggtggtttaaacaaccaaaatttattttccacagttgtggagggtagaagtccaagatcaaagtgccagcagggttggtgtctggtgakggttctcccattgggttgcagatggctgccttctccctaagtcctcacatggtctttcctctgcgcaagtgctcagaaagagggaaagcaagaaagagag

SEQ ID NO: 524438 - DNA, 201 bp, Homo sapiens
cagggctagaggagtctgtgtttacccctgcgggaggagtgccagtcacagctcgttgctaagttttccatcaggcagcagttgagcaggaacgcaagcasggactggtgggacctgggttgggactgaagcttctgttggggaaggaagtgccccaagcaacccagagtgtctgatgctggggtcctcatccctgagacc

SEQ ID NO: 524439 - DNA, 201 bp, Homo sapiens
ctaaaaatacaaaaattagctgggcatggtggcacacacctgtagtcccagctactcaggaggctgaggtaggagaattgcttgaacccgggaggtggagkttgcagtgagccaacatcatgccactgcactccagactgggcaacagagctagactctgtctcaaaaataataataatagtaataaagcatattgttgag

SEQ ID NO: 524440 - DNA, 201 bp, Homo sapiens
tgcaggtgggtcttcccaaagggatgctcatcagtctagtggttggggtatggagggatgcttagagctgacatggaccctgccgcctgctcagtatgagwcaagctctccagcaacacctcactgctgtttagtctgaattcaatctacagagagattatagtgtgctacctcatttggcactccattgacttttgaaat

SEQ ID NO: 524441 - DNA, 201 bp, Homo sapiens
tccatcaggcagcagttgagcaggaacgcaagcagggactggtgggacctgggttgggactgaagcttctgttggggaaggaagtgccccaagcaacccasagtgtctgatgctggggtcctcatccctgagacctactgcaggggtcagatctcagtctccatgggcatggcccttcatatatagccctcagggccaaga

SEQ ID NO: 524442 - DNA, 201 bp, Homo sapiens
cctgctggttggtcatttgttttgctctgagctaattcctagtgtgggtttggggccaattaactacacaggactctgtgtctgctacttataatttgttktctaggctaagtaagtacagatgctctttgacttataatggggttacatcccaataagcccattgtaaattgagaatattctaggtcaatacacctaacc

SEQ ID NO: 524443 - DNA, 201 bp, Homo sapiens
cagtctccatgggcatggcccttcatatatagccctcagggccaagacctcagagagaagaggccctgcgtgtgaggaaacccggcagcctcctgccctgwggctaaaggagcaggaagggcaacaaatgctctgctctggagagggcctaagttcatctgcagggccacagggcaagcagcagaggcaatcctggctcgt

SEQ ID NO: 524444 - DNA, 201 bp, Homo sapiens
gcttcttagttcttacatttcagcctatatccctgatgcaaatgttcttgggtagtggtgctactaagctaataaaaaattagtcactagttctatctaarctactcctattactaaatgggaaaatcactaagatcccttgagcatacttatttgttgtgtttatgaattagtccttgtattatctaatttgggtctagt

SEQ ID NO: 524445 - DNA, 201 bp, Homo sapiens
aggcaggagaatcgcttgaaccagggtggtggatgttgcagtgagccgaaatcgcgccactacactccagtctgcgtgacagagcgagactccgtctccaraaaaaaaacacatcaagataaaatccagacagttaaaaaatttaggcctaaaaatgtaaaatcataaatataccaggaggaaacaaacatttttataacc

SEQ ID NO: 524446 - DNA, 201 bp, Homo sapiens
tattctaggtcaatacacctaacctactgaggtaggaggccagacacgactccagaggcagggcttggacactggaccaaattgaggaccagctaaaacasagccagggcagaagacgctttccataagacacgcccacccgtgtgccatgtcagtttactgttgccatgacaacactcaggctttattgcccctttccat

SEQ ID NO: 524447 - DNA, 201 bp, Homo sapiens
aattataggttcattcctgaatctccccgatggctgatatcccagagaagatttagagaggctgaagatatcatccaaaaagctgcaaaaatgaacaacayagctgtaccagcagtgatatttgattctgtggaggtaagcatttgcagatgtttcctcttgagatcagctatgcattcttgattttatggaatttaactt

SEQ ID NO: 524448 - DNA, 201 bp, Homo sapiens
atggcccttcatatatagccctcagggccaagacctcagagagaagaggccctgcgtgtgaggaaacccggcagcctcctgccctgaggctaaaggagcasgaagggcaacaaatgctctgctctggagagggcctaagttcatctgcagggccacagggcaagcagcagaggcaatcctggctcgtggccaggggctaag

SEQ ID NO: 524449 - DNA, 201 bp, Homo sapiens
tggtggcacacacctgtagtcccagctactcaggaggctgaggtaggagaattgcttgaacccgggaggtggaggttgcagtgagccaacatcatgccacygcactccagactgggcaacagagctagactctgtctcaaaaataataataatagtaataaagcatattgttgagcaatagtaattaaaacaatgtgataa

SEQ ID NO: 524450 - DNA, 201 bp, Homo sapiens
gtacatgctcttaacaactgtgatttttcacttcatgttacaggcagtagcattaacttggataggaaaagatatagagtagagtattgtcttagaaagcratctcaagcatccttggcttcagaagaagcaccttcaacctgctcctggtacctgatccaaagacattttggtggctccacccaggccagggacaaccac

SEQ ID NO: 524451 - DNA, 201 bp, Homo sapiens
cccttcatatatagccctcagggccaagacctcagagagaagaggccctgcgtgtgaggaaacccggcagcctcctgccctgaggctaaaggagcaggaarggcaacaaatgctctgctctggagagggcctaagttcatctgcagggccacagggcaagcagcagaggcaatcctggctcgtggccaggggctaagcatg

SEQ ID NO: 524452 - DNA, 201 bp, Homo sapiens
cacctgaggtcaggaatttgagaccagcctggccaacatagtgaaacctcatctttactaaaaatacaaaaaattagctgggtgtggtggcagtcacatgkaatcccagctactcaggaggctgaggcaggagaactgcttgaacccaggaggcagaggttgcagtgagctgagatcacaccactgcactccagcctgggc

SEQ ID NO: 524453 - DNA, 201 bp, Homo sapiens
gcaacctgcatttaagaagggccccgtggaaccaccaagtattagcacaggactggtccacaggtcctgtctgtgtgcaccaccctggaaccctccaagargatgtctggttcccactagtttatgcagtggctttgctttgttataataccagggttattctgctgggggcatgttctggggctctacaatccaaatagt

SEQ ID NO: 524454 - DNA, 201 bp, Homo sapiens
ggaagctgagaatctcaaaagatatctcctgagcagatggatgcctgagacctcaccaaggaggaagatgggaggatgtgacagagaaaaaagtctgccasagccctgaaaaaacactaagtctgcattgatgcctgactcagggcttgcaacacaccttggcaacctacacatctcatgttttgtgttatactgcattct

SEQ ID NO: 524455 - DNA, 201 bp, Homo sapiens
taaggactctactggtgagaaatgcagacacacctcatcaattgggcaattggttacctactggtacacacgtacacacacacacacacacacacacacamacacacacacctgaaaacatgtatgaattctcaggaaaggtataatccaaacccttacagagaaagagaaacattttcctaacaaacatattctgcacag

SEQ ID NO: 524456 - DNA, 201 bp, Homo sapiens
agtggctttgctttgttataataccagggttattctgctgggggcatgttctggggctctacaatccaaatagtgcaagagagaaaaggcaatgtggctgygagctgtgtaagtgtctgatcattcctagaaaaaaggacactcacatttggagaggacctgctgtgaaggcaggcctggcactcccacttcttcataata

SEQ ID NO: 524457 - DNA, 201 bp, Homo sapiens
gcctgagacctcaccaaggaggaagatgggaggatgtgacagagaaaaaagtctgccagagccctgaaaaaacactaagtctgcattgatgcctgactcakggcttgcaacacaccttggcaacctacacatctcatgttttgtgttatactgcattctctaggtttggcaggaagaacgttctcttcgcaaccatggctg

SEQ ID NO: 524458 - DNA, 201 bp, Homo sapiens
aggagtgagagagtgtgttctcttgagcccagcgaatgggcaaatgagagaagcagaggtgaggggtatccctgggacagtagacaccagttcccatcatytctagggtgataatatattctaggtggctcagtaccatcccaatttgtccctattgtcacagtgtcattattaataatactcctttaatagaagtctaac

SEQ ID NO: 524459 - DNA, 201 bp, Homo sapiens
aacttaagatagaaattgcaacctcctagtccccagtggctccaagaacacaaggcaaagcctattgtcttcatgttcaaagtccccagaatccatcttcyatgtgacgatcctccctaagcctgaaaaacccaacatgtggctctgcttgggccagacacataccaaaagccaaacaggcctccccaaaacggaggactc

SEQ ID NO: 524460 - DNA, 201 bp, Homo sapiens
acttaagatagaaattgcaacctcctagtccccagtggctccaagaacacaaggcaaagcctattgtcttcatgttcaaagtccccagaatccatcttccrtgtgacgatcctccctaagcctgaaaaacccaacatgtggctctgcttgggccagacacataccaaaagccaaacaggcctccccaaaacggaggactct

SEQ ID NO: 524461 - DNA, 201 bp, Homo sapiens
acacaaggcaaagcctattgtcttcatgttcaaagtccccagaatccatcttccatgtgacgatcctccctaagcctgaaaaacccaacatgtggctctgyttgggccagacacataccaaaagccaaacaggcctccccaaaacggaggactctgaccagcaggcccatatcccaggaggacctgaaggaccatctggaa

SEQ ID NO: 524462 - DNA, 201 bp, Homo sapiens
aggagaatcgcttgaacctgggaggtggaggttgcagtgagctgagatcacaccactgcactccagcctgggccacagagctagactccatctaaaaaaaacaaacaaataaacagagaagtgtaaaaagcagacgtggcctcaaggaagggactacatggccctacccttcaataggcagtcctgaggatcacagatcag

SEQ ID NO: 524463 - DNA, 201 bp, Homo sapiens
gtcagggcctgaacagcagtaggacttactgattccccacccataacccagaggcgagccaggttatgtggcgaaggataaggcctcttcccctgctaacrgggaacttctgggaggcactgagagcagcaagcaagggaataatgaaacagactaaccctcacatgcggctgccactatgtgggacttcacatagcggct

SEQ ID NO: 524464 - DNA, 201 bp, Homo sapiens
aacagggaacttctgggaggcactgagagcagcaagcaagggaataatgaaacagactaaccctcacatgcggctgccactatgtgggacttcacatagcrgctctcaaggatgcacctcccctggggtctgggtaggccccgacaaaaggggaaaaccttccgtgataggcaggtttgtggagtttctatcaggcctgca

SEQ ID NO: 524465 - DNA, 201 bp, Homo sapiens
ccacaaaatgggagaaaatattgacaaatcatatatctgataaaggatttgtatctagaatataaaaataactctgataactcagcaataaaaagacaacytgatttaaaaatggataaaatcatttgcccattttggagaatagatgttttgccaaagaaatacaaatcaattagcacatgaaaagattctgagacttcg

SEQ ID NO: 524466 - DNA, 201 bp, Homo sapiens
atcaactagctgagaaaagttattgttgaatattggtatatctagactagcactgtccaatagaactttctgcagtgacggaaatgtttcatatctatgtygttcaatatagtagccactagctacacgtggctattgagcacttgaagtgtggctagtgtaactaaggaactgaatttgtaatcttatttaattttaatt

SEQ ID NO: 524467 - DNA, 201 bp, Homo sapiens
ggagtgtagtggtgcgatcctagattcccagctcactgcagcctcaatcccccaggctcaagagatcctcccacctcagactcccaactagctggaactayaggcatgcacaccgtcaagcccagctaatttttttttttttctggtagagacgggattttgccagtttgcccaggctggtttcgaactcctgggctcaag

SEQ ID NO: 524468 - DNA, 201 bp, Homo sapiens
cattcttctgccatggcttcagccagtccctcctttcggggtccctaacttcctgcaacaggtgtattcatctttttctttttgacttgtgcaaactcttygcaatggaagaaattagccccttgtatatatgttgtaaatatttttcctagtttaccatttgtattttcactttatgatatctttgtaatgaagacaatt

SEQ ID NO: 524469 - DNA, 201 bp, Homo sapiens
ttttttttttttttttttttttaccaattcactaggagaacttgggctggttgctttattgctctgtgccttcatttcctcatttgtaaaacaaggataaragtacccatctcacatgccaaccctgagatcccctgagataatacacggcactcagtgagcactccacacactgttactgtctttcccattactcccttt

SEQ ID NO: 524470 - DNA, 201 bp, Homo sapiens
atttgtattttcactttatgatatctttgtaatgaagacaattttagtttttatatactcaaaggtgtcaatctgaaatgaaactacagaggtgtttcagyggcatgttcaatctgatgtaggatctgacaccccatgcctggtcctcattaaggactctactggtgagaaatgcagacacacctcatcaattgggcaatt

SEQ ID NO: 524471 - DNA, 201 bp, Homo sapiens
tcactaggagaacttgggctggttgctttattgctctgtgccttcatttcctcatttgtaaaacaaggataagagtacccatctcacatgccaaccctgaratcccctgagataatacacggcactcagtgagcactccacacactgttactgtctttcccattactccctttactatagggagccatgggaagcggcaca

SEQ ID NO: 524472 - DNA, 201 bp, Homo sapiens
atgcagacacacctcatcaattgggcaattggttacctactggtacacacgtacacacacacacacacacacacacacacacacacacacctgaaaacatrtatgaattctcaggaaaggtataatccaaacccttacagagaaagagaaacattttcctaacaaacatattctgcacagttgccctgtgccacacctgag

SEQ ID NO: 524473 - DNA, 201 bp, Homo sapiens
atagcagattatacagagtggtgttatttttccctttgtccttccctgtactttcaaactatttcaaactatgctcagatggtccagtggtcagacactgrtacataagacagggagtccaagagtctcctactccacacagctactcctgttagtgacacagaggcctcagagaagctgcaataacaatattttccttat

SEQ ID NO: 524474 - DNA, 201 bp, Homo sapiens
cggaggactctgaccagcaggcccatatcccaggaggacctgaaggaccatctggaacagaagggtagagagtcacggtgaagccagagaagctctctccrtgggaatgggaacaaggtgggacttgtgccaggtggtggcatccccggttctatagaatgggcagcactgagatctgcctttttagtggcacagggtgat

SEQ ID NO: 524475 - DNA, 201 bp, Homo sapiens
gctttaaatcccaaatctactgcaaaaatttgggcatatcacttaatattcactaagcttcagtattcccatctgctatatgggatatttcatacggctaytttgaggttataaaagataaagtgttcccagtgcctggccttgataaaggtaactctgcatatgaattaattctgatccctgacagaacatttatagcaa

SEQ ID NO: 524476 - DNA, 201 bp, Homo sapiens
gaaacatcctggttaacctccttctccttgatgtcctcccatcccccatttccaattacctccaccttaagaggagaactctggtaggcaaagaactctaycaaaggaacatctgtcacacatgactgagtagtagcttagaggataccagttgacaggaaagaatgaaaagccttatgataatgcaaaaggattatagac

SEQ ID NO: 524477 - DNA, 201 bp, Homo sapiens
cctatctgattgatgttcttatgtcccgggctttacaggtgcttacaacagaatgctgccctacatcgtcatgggtagtctgactgtcctgattggaatcytcaccctttttttccctgaaagtttgggaatgactcttccagaaaccttagagcagatgcagaaagtgaaatggtaagtaggacttttaacaaaatgata

SEQ ID NO: 524478 - DNA, 201 bp, Homo sapiens
cttgttccctgaacattgctgttatcctgttcttttttcaaggtgcccagatttcgtattgttcaaacacacatgctctacaaacaatttgtgcagttaaygcaatcatcacagggtcctgaggcgacatacatcctcctcagcttatgaagatgacgggattaagagattaaagacaggcataggaaatcacaagggtgt

SEQ ID NO: 524479 - DNA, 201 bp, Homo sapiens
atccctacagctgcaaccgtaaaagacagctgcccccaaagtggccattttagaggcctaccctcagggacgaattgtctttctcagggatgttccttgcygagaaaaagaattcagcgatatttctcccatttacttttgaaagaagagaaatatggctctgttctgcccgactcaccagcggtcagagtttaaggttat

SEQ ID NO: 524480 - DNA, 201 bp, Homo sapiens
agacaaccggtctgaccaaaatttattaggtgggaatttcctcatcctaacaagcctgggagtgctacgggagactggggcttatttcatccctacagctrcaaccgtaaaagacagctgcccccaaagtggccattttagaggcctaccctcagggacgaattgtctttctcagggatgttccttgctgagaaaaagaat

SEQ ID NO: 524481 - DNA, 201 bp, Homo sapiens
ttcccaaattgaactctacatattgtgccaattataatctaattattaataggtaagagtggttttcaataatctcaccaacaataaagattacctatttyttttttttttttttttttctgagacagggtctcactctggagtgtagtggtgcgatcctagattcccagctcactgcagcctcaatcccccaggctcaag

SEQ ID NO: 524482 - DNA, 201 bp, Homo sapiens
atattcccaaattgaactctacatattgtgccaattataatctaattattaataggtaagagtggttttcaataatctcaccaacaataaagattacctawtttttttttttttttttttttctgagacagggtctcactctggagtgtagtggtgcgatcctagattcccagctcactgcagcctcaatcccccaggctc

SEQ ID NO: 524483 - DNA, 201 bp, Homo sapiens
aaaacttcccaaatttggtggaaaacattaatctacacctttcagaagctcaacaaactccaaatagaatgatcacaaagagatccacaccctgatatatyatggtaaaactgcttaaataaaaaaagagacaaaaacgaagggaaaattttgaaagcagcaaatatatgactaggtacatacaagagaactccaataaga

SEQ ID NO: 524484 - DNA, 201 bp, Homo sapiens
gatattcccaaattgaactctacatattgtgccaattataatctaattattaataggtaagagtggttttcaataatctcaccaacaataaagattacctattttttttttttttttttttttctgagacagggtctcactctggagtgtagtggtgcgatcctagattcccagctcactgcagcctcaatcccccaggct

SEQ ID NO: 524485 - DNA, 201 bp, Homo sapiens
gggtaggggtggatggcacaggatctgtctgcaaacagccagcagccagacagtgagccccaactgtgcacacactgctgctgtggcttggaccctgggcyaggcactggggccacagagctgatgctggctctgaccctcatagagcttacaggcctgaggaggcagcatcacagcaccaggagacagtattccacaggc

SEQ ID NO: 524486 - DNA, 201 bp, Homo sapiens
ctgggttcaagcaattctcctgtctcagcctcccaagtagctgggattataggcacatgccaccaccatgcctggctaatttttgtcttttaagtagagayggggtttcaccatgttggccaggctggtctcaaactcctgacctcaggtgatttgcctgcctcggtctcccaaagtgctgggatttcaggcatgagccac

SEQ ID NO: 524487 - DNA, 201 bp, Homo sapiens
tcaaccatgggcagccatgcagtctagctgccttcccctgctggttgtaagcagggtctccaaaggcagatggcacccctcatgggcttggggcaaacggycactgcgtgtgcatggctcttcctgtgctgcatgatgctgacagggcttcttgggcccctcttcagggagggaatgggaccgaaagccatcgatgcagag

SEQ ID NO: 524488 - DNA, 201 bp, Homo sapiens
ggagtgtccagtgaagaggaggttaaaaggctataattgcacttctaaagagctaagtagaaagtgcagaaaaggaggaaagagaaaagaagagagagagaaaataaactatctcttagaaaaatgggggtactcagttacatagttatttttccacagagaagcttcttttttttatttatgtttttatttttttgagat

SEQ ID NO: 524489 - DNA, 201 bp, Homo sapiens
ctgggggcatgttctggggctctacaatccaaatagtgcaagagagaaaaggcaatgtggctgtgagctgtgtaagtgtctgatcattcctagaaaaaagracactcacatttggagaggacctgctgtgaaggcaggcctggcactcccacttcttcataataaaaactcctccatcagtctcttactgcgcatgcactg

SEQ ID NO: 524490 - DNA, 201 bp, Homo sapiens
gggagtgtccagtgaagaggaggttaaaaggctataattgcacttctaaagagctaagtagaaagtgcagaaaaggaggaaagagaaaagaagagagagagaaaataaactatctcttagaaaaatgggggtactcagttacatagttatttttccacagagaagcttcttttttttatttatgtttttatttttttgaga

SEQ ID NO: 524491 - DNA, 201 bp, Homo sapiens
gttttcctgaggaaaaattaagattataaaattctaaattattttgaaatgcctctattcagttcatgggactagatattgaaaaatgtcactgggcgcartggcttacgcctgtaattccagcactttgggaggccaaggtgggcagatcacctgaggtcaggagttcgagacgaatctagccaacatggtgaaaccccg

SEQ ID NO: 524492 - DNA, 201 bp, Homo sapiens
taataatactcctttaatagaagtctaacgattcttcttgcctcaaaagtccgaatctggttaggtgactctgattgctttttaagagtctgaaggactckttggctttggagatgctgcactgtcttaattgatggtgtgtacaccttctgtcaagttgccaggatggaaatattccaactctactcctttaattatttg

SEQ ID NO: 524493 - DNA, 201 bp, Homo sapiens
ggtgactctgattgctttttaagagtctgaaggactcgttggctttggagatgctgcactgtcttaattgatggtgtgtacaccttctgtcaagttgccasgatggaaatattccaactctactcctttaattatttgcgaagagccccgtgccatgggctcagcctcagtgtctgcagaggggagaagggaggagacaag

SEQ ID NO: 524494 - DNA, 201 bp, Homo sapiens
gtcaagttgccaggatggaaatattccaactctactcctttaattatttgcgaagagccccgtgccatgggctcagcctcagtgtctgcagaggggagaarggaggagacaaggtgggaagaacatgctggagccacatggtcccagcaggtagcacactcttcagcaggccccagcgggaggaggctgctccccttcctg

SEQ ID NO: 524495 - DNA, 201 bp, Homo sapiens
acggaggactctgaccagcaggcccatatcccaggaggacctgaaggaccatctggaacagaagggtagagagtcacggtgaagccagagaagctctctcygtgggaatgggaacaaggtgggacttgtgccaggtggtggcatccccggttctatagaatgggcagcactgagatctgcctttttagtggcacagggtga

SEQ ID NO: 524496 - DNA, 201 bp, Homo sapiens
tctcagagcagagatttgtagagaggtgtatttggctgagttgatgtgtactatgcaggtatttttgctcatatttttagattatacaaatcattgctatrtggtgatacggagtttggaattgcttgaaatatgcttagcttatgtcaaggtgcctacttgtggtttctgaatggggctcttttcctttcttttcttttc

SEQ ID NO: 524497 - DNA, 201 bp, Homo sapiens
acaggtgtgcaccaccacacctggctaatttttgtatttttagtagagatggggtttcaccatgttggccaggctggtcttgaactcctaacctcgtgatycgcccgcctcagcctcccaaagtgctgggataacaggcatgagtcacagtgtccggccccggcaatttactggtttatactagtttattttctgttgctt

SEQ ID NO: 524498 - DNA, 201 bp, Homo sapiens
tatgttcaacataactagccatcaggaaatcaaattcaaagcacaattatgtgacactacatacctactagagtggcttaaacacaaaatactgacaatastaagtgcttacaaggatggagaacagctggatctctaatttattcccgccagaaaagctggtggggatgtaaaatggtacacatactctggaaaaacact

SEQ ID NO: 524499 - DNA, 201 bp, Homo sapiens
agaggcgggcggacaggcgagagccatccccgaacaccttgcggtaggaggaggaggagcacaggtagtgctccgagccgaagctcatggtgccgggatcrgggccggacgtgcggcttcaacgcgagctacagaagaaaggagaggtgcggcaggcagggcgcggcggggcggtgcgcccggcttttaaggcgccggggc

SEQ ID NO: 524500 - DNA, 201 bp, Homo sapiens
aaggtgtactgattggcttctgctacagccattggctttacccactgttctggcttggacaccatcatgtgcatgtcaaagaaagggtcctggcctagctrctttcgaaggctttctaccacagggtgaccaaaggtgatgttgggaacaaaatgcccatccattacatccagatgcagataatcggccccagagtctagc

SEQ ID NO: 524501 - DNA, 201 bp, Homo sapiens
tgcagggccgggcatggtggctcatgcctgtaatcccagcactttgggaggctgaggcgggtggatcacctgaggtcaggagttcaggtcaatcaagagaytgagactatgctggccaacatggtgaaactatggtctctactaaaaatacaaaaattagctgggcgtggtggcgtgtgcctgtaatcccagctactctgg

SEQ ID NO: 524502 - DNA, 201 bp, Homo sapiens
ttaaaagtctgattagatagcatttgccatctactgcttctaagggcaaccacctatgaaacttcatctacataataagaacctttgtctgcacgacactatatatatatatatatatatatatatatactttttttttttttttgagacggagtcttgctctgtcgcccaggctggagtgcagtggcgctatcttggctc

SEQ ID NO: 524503 - DNA, 201 bp, Homo sapiens
ctaatgaaatccaaataaggtctctagtgaattaaggtgttgtatcaatgtcattttcctggttttgataatgtactatagttatataagatggtatcatrggggggagctgggtaaattgtacatgggaactttctgtactatttttgcaatttttttatgtcttaaactatttcaaagtaagacatatataaaaatagg

SEQ ID NO: 524504 - DNA, 201 bp, Homo sapiens
tcagggggtacaaacttccaaatcaagagaatttgcagaattaaaattcataccacctacctgttctataaatattgacaggaatactgcaaagaggagtytcaattgactgatgggtacagaacaaggaatgacagtcagtaggaaaaatacgtattatactggaccgtgatgcatatatttcaaagtgtgttaagagat

SEQ ID NO: 524505 - DNA, 201 bp, Homo sapiens
ccgccagcccgtcgcgctccagcagggcctgcgagcgagccgagctggcctcctccagctgcgcgcgcaggtcgcgcagctcgcgctggaagagctcgccracgcgcgacggctcagcgtggcgctgtcgcagcgcggccagctcggcctccaacgcgcggttctgcgtctccagctgatgcaccttctcgatgaacacgg

SEQ ID NO: 524506 - DNA, 201 bp, Homo sapiens
tcggcctccaacgcgcggttctgcgtctccagctgatgcaccttctcgatgaacacggcgaagcggtcgttgaggccctgcagctgctccttctcgttggwgcggatgatcttgtactcgttggtgcgcgccgccgcctggctcaggtccagcccgtcggacgccggcggccggcgataggccaggccgaggccgagcgac

SEQ ID NO: 524507 - DNA, 201 bp, Homo sapiens
gctccttctcgttggtgcggatgatcttgtactcgttggtgcgcgccgccgcctggctcaggtccagcccgtcggacgccggcggccggcgataggccagkccgaggccgagcgacgaggccgaggagcaggcggccgaggaggccacattgctgcgggacagcgactgcgagcggaagccgcccgcgccgccggccccag

SEQ ID NO: 524508 - DNA, 201 bp, Homo sapiens
tctcaattagccaaatgtgattaattcaggccatccaggggttagggtacataatgaaaagttcaagttatggattttgaggcagaaatggaagtacttayttgaatgataatgcaataccaaactaacctaaacagtccaagcaggcttttttcctttatcaaaggaagttattgtaacaaacagcaaatacctgcacat

SEQ ID NO: 524509 - DNA, 201 bp, Homo sapiens
tggttttgataatgtactatagttatataagatggtatcataggggggagctgggtaaattgtacatgggaactttctgtactatttttgcaatttttttrtgtcttaaactatttcaaagtaagacatatataaaaataggcaaatgttcttaggagatacatactgaagttttagggttgcggtatcataatttatgta

SEQ ID NO: 524510 - DNA, 201 bp, Homo sapiens
aaagcactcagttgaatgcagccaccctgctctcagctcttaccattatatgaaattatcttcttctttttttttttttccgagatggagtcttgctctgktacccaggctggagtgcagtggcgcaatctcagctcactgcaacctccaccacctgggttcaagtaattctcctgcctcagcctcctgagtagctgggat

SEQ ID NO: 524511 - DNA, 201 bp, Homo sapiens
taaaagtctgattagatagcatttgccatctactgcttctaagggcaaccacctatgaaacttcatctacataataagaacctttgtctgcacgacactatatatatatatatatatatatatatatactttttttttttttttgagacggagtcttgctctgtcgcccaggctggagtgcagtggcgctatcttggctca

SEQ ID NO: 524512 - DNA, 201 bp, Homo sapiens
gaaaagtaacatatccaaaatagttaggccaaaccagctgaaattcctcaagatttccagaaggcaaggattcccagccctgactacacattaaaatcatstaatgaacttataacttgcttatatccaggtctgtccctgagtccagatccagattcactggttctggggtggggtcccagcatttgcatttttttcata

SEQ ID NO: 524513 - DNA, 201 bp, Homo sapiens
aaaagtctgattagatagcatttgccatctactgcttctaagggcaaccacctatgaaacttcatctacataataagaacctttgtctgcacgacactatatatatatatatatatatatatatatactttttttttttttttgagacggagtcttgctctgtcgcccaggctggagtgcagtggcgctatcttggctcac

SEQ ID NO: 524514 - DNA, 201 bp, Homo sapiens
ggctgagtatggtgaggtgtgtctttaaaagaccattagttctttctacctttcctgaggattgagggcaataaggagcatgaagtttccattgaatgccyagggactgggagactgcatgagtgacttgactaataaaggctggtccgttatcagactgtatagaggtaggaaggccaaattgaggaattctgtctgata

SEQ ID NO: 524515 - DNA, 201 bp, Homo sapiens
gaggttttcttagaggctaccttagatgcctcctcctcctcctcctctttcttaagtgatagcccagtggatgagactttggaggttgtagcactgaggaktctaggtgggagcaggtaacttggattgggaagtggattcagccccgaaatgcttaacccactggtgctaaaacgtgtctcctcgccttccagcagtttc

SEQ ID NO: 524516 - DNA, 201 bp, Homo sapiens
gaggagcagaagggtgtcctgttgggaagttttgtaggaggggctataaagtagaaagttgtcaaaatatttaataaggtgagaagcagatggatggaaaraaagtaaatcatgagaaaggactttactgaagtaatgggggctgtcggtgaagccttgcagcagtacagcccgggtaagttgctgagactgatgggtgtc

SEQ ID NO: 524517 - DNA, 201 bp, Homo sapiens
ttcgactttagcttgggtaatatagtgagactccatctcaaatttaaaaaaagaaagcagctgggcatggtggcctgtaatccagcagcagtttgggagaytgaggcaagaggatcacctgaggggccaggaggtcaagatcaacctgagatacatagtgagatcctgtctctccaaaaaaaaaaaaaaaaaaagccagac

SEQ ID NO: 524518 - DNA, 201 bp, Homo sapiens
aacaggcatgagtcacagtgtccggccccggcaatttactggtttatactagtttattttctgttgctttcctctataacagagttttacaactttggcartgttgatgttttaggctggctaattatttgttattgtgaaatgcgggatatttagtaacatccctggctagatgccagaagcacatacttccctctccca

SEQ ID NO: 524519 - DNA, 201 bp, Homo sapiens
ggtggatcacctgaggtcaggagttcaggtcaatcaagagactgagactatgctggccaacatggtgaaactatggtctctactaaaaatacaaaaattarctgggcgtggtggcgtgtgcctgtaatcccagctactctggaggctgaggtaggagaatcacttgaacctgggaggcagaggttgcagtgagctgagatc

SEQ ID NO: 524520 - DNA, 201 bp, Homo sapiens
tcaagcgattctcctgcctcagcctcccaagtagctgggattacaggtgcccaccaccacgcccagctaatttttgtagttttagtagaggtggggttttrccatgttggccaggctggtcttgaactccagagcctcctaaagtgctgggattacaggcatgagccaccgctcccagtctttttttggtgttttagtaga

SEQ ID NO: 524521 - DNA, 201 bp, Homo sapiens
aatcccagcactttgggaggccaaggcgggcagatcacgaggtcaagacatcgagaccatcctggccaacatggtgaaacccagtctctactaaaaatacraaaataaactgggcatggtggtgcacgcctgtagtcccagctactcaggcggctgaggcagggaattgcttgaacctgggaggcagaggttgtggtgagc

SEQ ID NO: 524522 - DNA, 201 bp, Homo sapiens
gagctccacacagttcacaccagtgtgccctgagcacacagtcaaagatatgcctcacactttcccaaaatgagaatacagaggtctcccactgtctcctyttccaaactaattttttttcttttctttctttttcttttcttttcttttcttttttttttttttcttgagacagggtcccgctatgtcaaccaggctgga

SEQ ID NO: 524523 - DNA, 201 bp, Homo sapiens
tttttcttgagacagggtcccgctatgtcaaccaggctggaatgcagtggtgcaaacatggctcagtgaagcctcaacctcctgggctcaagcgatccttytgcctcagcctctcaaggcagcctgagactgtaggcacatgccaccatgaccaaataattttttttttttttttttttttttttttttttttgtagagat

SEQ ID NO: 524524 - DNA, 201 bp, Homo sapiens
ggccttaaagagatttttaccaagaaattttacctgatagttcctatttgaggttataatcaattctgctactgacatagaatcactgacatagaccctctagctactgacaagagaatcaatattactgtggtaagagggaaaagagtctagagtgagggaaaaaggagaaagaagaaaatatgattatgcaaagaagga

SEQ ID NO: 524525 - DNA, 201 bp, Homo sapiens
attttcgggtatcttttcagtagcaccccactctcggtaccaatttactgtattagtccattttcacactgctgataaagacatacccgagactggacaakttactaaagaaagaggtttattggacttacagtttcacatgggtggggaggcctcacaatcatggcggaaggtaaaaggcatgtctcacatggcagcaga

SEQ ID NO: 524526 - DNA, 201 bp, Homo sapiens
gtgagcagagatcgcgccattgcactccagcctgggcaataagagcgaaactctgtctcaaaataataataataataataataataataataataataataatataataataataaacaactctctttttacgatattagatctcccagaagcagggaggcttataaagttttctccctgagaaatctagttttgcatcta

SEQ ID NO: 524527 - DNA, 201 bp, Homo sapiens
gtggaggctgaggtgagcagaggtcatgccactgcactctagcctgggtgacagagtgagactttgtctccaaaaaaaaaaaaaaaaaaaaaaaaaaaaawgggaatgaaggaaacagaaaattagaacaccacagtaataattgctgcagataaagtccactgatgaagctaatattagtgggcaaaactctaaggagga

SEQ ID NO: 524528 - DNA, 201 bp, Homo sapiens
agcagagatcgcgccattgcactccagcctgggcaataagagcgaaactctgtctcaaaataataataataataataataataataataataataataatataataataataaacaactctctttttacgatattagatctcccagaagcagggaggcttataaagttttctccctgagaaatctagttttgcatctagcc

SEQ ID NO: 524529 - DNA, 201 bp, Homo sapiens
tggccaacatggtgaaaccctgtctctactaaaaatacaaaaattagccacgcatggtggcacatgcctctagtcccagctgctcgggagactgaggcagragaatcacttgaacctgagaggcagaggttgcagtgagcccagatcgtgccactgcactccagcctggcgacagagcgagactccatctaaacaaacaaa

SEQ ID NO: 524530 - DNA, 201 bp, Homo sapiens
actttttggagcgcgaaagtcaagaaaatgggataggactcttcccagttcaggatcgcattcttccttcagccctgaagcagaccatactccataaatawcttctagggcgcacagaaagcttttcaaagtcaaccaaacaagccagatagccgagacagcaccgcccacgtaacctgccccgttgggctcagtcttact

SEQ ID NO: 524531 - DNA, 201 bp, Homo sapiens
agcttgggtaatatagtgagactccatctcaaatttaaaaaaagaaagcagctgggcatggtggcctgtaatccagcagcagtttgggagactgaggcaaraggatcacctgaggggccaggaggtcaagatcaacctgagatacatagtgagatcctgtctctccaaaaaaaaaaaaaaaaaaagccagactcagtggca

SEQ ID NO: 524532 - DNA, 201 bp, Homo sapiens
ttaaaaaaagaaagcagctgggcatggtggcctgtaatccagcagcagtttgggagactgaggcaagaggatcacctgaggggccaggaggtcaagatcamcctgagatacatagtgagatcctgtctctccaaaaaaaaaaaaaaaaaaagccagactcagtggcatgtgcctgtagtcctagctacttgggaggctgag

SEQ ID NO: 524533 - DNA, 201 bp, Homo sapiens
ggatcgcattcttccttcagccctgaagcagaccatactccataaataacttctagggcgcacagaaagcttttcaaagtcaaccaaacaagccagatagycgagacagcaccgcccacgtaacctgccccgttgggctcagtcttactttgggtggggcactgttctccgggtcgccggtgtgtgtaggcccgcttgctg

SEQ ID NO: 524534 - DNA, 201 bp, Homo sapiens
tggtgatacggagtttggaattgcttgaaatatgcttagcttatgtcaaggtgcctacttgtggtttctgaatggggctcttttcctttcttttcttttcttttttttttttttttttgagacagtcttgctctgtcacccaggttggaatgcatgatcttggttcactgcaacctctgcctccccagttcaagtgatttt

SEQ ID NO: 524535 - DNA, 201 bp, Homo sapiens
tgatgaagtttgctagtagaacactgtattggtccattttcacactgcagataaagacatacctgagactgggcaatttacaaaagaaagaagtttattargcttacagtgccacatgccaccacagtcatggtggaaggcaaaaggcatgtctcacatgacagcaaacaagagaagagagcttgtgcagggaaactccca

SEQ ID NO: 524536 - DNA, 201 bp, Homo sapiens
aataatatgaaacattttttagatatactggacaaaaacagaactaagtactccaactctactgcagcattaccaaaaaaaatcatcctttcaccacagtktaagatttaagggcaacctgcccaaggatacatgttatataaaacacagcaagattgctgctgccctgccaagtaattccagtccctacctaggtcctac

SEQ ID NO: 524537 - DNA, 201 bp, Homo sapiens
aattatcctgaggatttgttgacaacatatatgtaaaagtagccagcactgtacctggaagagacaaggccatgaaaagtgtatagcctttgaggagcccrtcaatcccttcagctcgtgctctggaaactgttagggaacactttttttttttttttaaatggggacaaaaatatctgctttattattaccacttactta

SEQ ID NO: 524538 - DNA, 201 bp, Homo sapiens
atactggtggtcccaattagcttttttttttttttttgagacaaagtcttgctctgttgcgcaggctggagtgcagtggtgcaatctcagctcactgcaarcgtcgcctcccgggttcatgccattctcctgcctcagcctcccgagtagctgggactacaggcacccgccactatgccaggctaatttttttgtattttt

SEQ ID NO: 524539 - DNA, 201 bp, Homo sapiens
cagcactgtacctggaagagacaaggccatgaaaagtgtatagcctttgaggagcccgtcaatcccttcagctcgtgctctggaaactgttagggaacactttttttttttttttaaatggggacaaaaatatctgctttattattaccacttacttatagaggtgatttacagatttaatgagaatatatcaaagtactt

SEQ ID NO: 524540 - DNA, 201 bp, Homo sapiens
agtttgataagatgaaaaaattctggagatggatggtggtgatggttgcacaacaatatgaatacatttaatatcgctgaactgtatatttaaaagtggtyaaaatggcaattttttttttttgagagaagtctcactcttgtcccccagttttgagtgcaatggctttatgttggtttactgcaacctctgcctcccgga

SEQ ID NO: 524541 - DNA, 201 bp, Homo sapiens
tgtgcaccaccacacctggctaatttttgtatttttagtagagatggggtttcaccatgttggccaggctggtcttgaactcctaacctcgtgatccgccygcctcagcctcccaaagtgctgggataacaggcatgagtcacagtgtccggccccggcaatttactggtttatactagtttattttctgttgctttcctc

SEQ ID NO: 524542 - DNA, 201 bp, Homo sapiens
tttctgaattatagtcattctattcaaaggagcttttattgtaccttgaaaccgaaccacactattccaattcttttctacaccttccatttaccctgtcycctgcctctgtgccatttgcggtcataatcccagaatttcttatatagtaaaactgaagacacagtggcctttgttgggaagaaatagccaatcaatacc

SEQ ID NO: 524543 - DNA, 201 bp, Homo sapiens
atgaaaaaattctggagatggatggtggtgatggttgcacaacaatatgaatacatttaatatcgctgaactgtatatttaaaagtggtcaaaatggcaattttttttttttgagagaagtctcactcttgtcccccagttttgagtgcaatggctttatgttggtttactgcaacctctgcctcccggattcaaacgatt

SEQ ID NO: 524544 - DNA, 201 bp, Homo sapiens
  misc_feature (1)...(201): n = A,T,C or G
aaacgaatctgagaaaccatttggcctacctcctcctaccttttgctgtttcccagagaaaggatcctagtcggcaaatagtccaggattattaactgccnggctggggggagatacaaaggacctggagggcgccttcacccagcgtttcctgcactcaaatctgctaatgcttggaaaaatccttcagttcaactcagc

SEQ ID NO: 524545 - DNA, 201 bp, Homo sapiens
gccctgagcacacagtcaaagatatgcctcacactttcccaaaatgagaatacagaggtctcccactgtctcctcttccaaactaattttttttcttttcyttctttttcttttcttttcttttcttttttttttttttcttgagacagggtcccgctatgtcaaccaggctggaatgcagtggtgcaaacatggctcagt

SEQ ID NO: 524546 - DNA, 201 bp, Homo sapiens
ctcagtggcatgtgcctgtagtcctagctacttgggaggctgaggcagaagaattgattgagcccaggagtttgaggctgcagcaaggcatgatcatgccmctgtactgaagcctgggtagcagagtgggaccttgcttctttaaaaaaaaaaaaaaaaaaaaaaagtaggctgggcgtggtgattcatgcctgtaattcc

SEQ ID NO: 524547 - DNA, 201 bp, Homo sapiens
tggatgctcgataagattaacatcctatttctcatcagaaaccataaaggccaaaaggcagtaagatgacatatattaagagtgctgaaagaaaaaaacamcccctgtcaccccagaattctctatctaacgaaactattcttcaaaaatgaaggagggaaagaagacattaaaacattctaagataaagactggaagatt

SEQ ID NO: 524548 - DNA, 201 bp, Homo sapiens
cagtaattataaacctgcattgataatgcacacaatgtattaagatgtattttgtgtgacaataatagcacaaagaaggagaaagggaaccaaagctatakaggagcacattttttgtgtaataatgaaattaagttggcatttatctaaactaagttgttattaaataagatgttaattgtaattcccaggacaatgact

SEQ ID NO: 524549 - DNA, 201 bp, Homo sapiens
tcgattaggaaatgctctcactgacaaatagtagaaacttacctgtatataccagaagaattggctctttaaatagacaagtaaatgcactttttcactcygacatgagttcacctgaggctttggtgttttttttgctttgttttattttgttttgtttgtttgttttgagacagagtctcacttgctctgttgcccagg

SEQ ID NO: 524550 - DNA, 201 bp, Homo sapiens
gtggcctgtaatccagcagcagtttgggagactgaggcaagaggatcacctgaggggccaggaggtcaagatcaacctgagatacatagtgagatcctgtytctccaaaaaaaaaaaaaaaaaaagccagactcagtggcatgtgcctgtagtcctagctacttgggaggctgaggcagaagaattgattgagcccaggag

SEQ ID NO: 524551 - DNA, 201 bp, Homo sapiens
ggcctgtaatccagcagcagtttgggagactgaggcaagaggatcacctgaggggccaggaggtcaagatcaacctgagatacatagtgagatcctgtctytccaaaaaaaaaaaaaaaaaaagccagactcagtggcatgtgcctgtagtcctagctacttgggaggctgaggcagaagaattgattgagcccaggagtt

SEQ ID NO: 524552 - DNA, 201 bp, Homo sapiens
attctttcttaaaaccatgttcagaatcaagttgagtagcctcctgtagaactatctggcatggggtaatgggaaaatggcaaataccaggcttgtacatmaccactcaccattcctcactcatggcagccacaactaatcaaacctggcactttaccctcttaattcaataattaagaattcaaaacctaggaattcttt

SEQ ID NO: 524553 - DNA, 201 bp, Homo sapiens
atacatagtgagatcctgtctctccaaaaaaaaaaaaaaaaaaagccagactcagtggcatgtgcctgtagtcctagctacttgggaggctgaggcagaaraattgattgagcccaggagtttgaggctgcagcaaggcatgatcatgccactgtactgaagcctgggtagcagagtgggaccttgcttctttaaaaaaaa

SEQ ID NO: 524554 - DNA, 201 bp, Homo sapiens
caggcgtgagccactgcgcccggtcggtttttaggcagggtctcactctgtcccccaggctggagtgcagtggtggaatcttggcttactgcagcctcaamatcctgggctcaagcgatcctcccacctcagccccccaaagtagctgggatcacaggcatgccaccacacccagctatttttctggagagatgggatttt

SEQ ID NO: 524555 - DNA, 201 bp, Homo sapiens
ggttctgagccacatcctggaaggccaccataacttctggatcctgcatggctgcaagaacctctggatcactaagaatttcattgagtccaggcattccrgccgttccaggcatgccccctcccattccaggcattcctcagggaaaattaccaggcattcccccaggaaagccacctggaaaagagccatactgagctc

SEQ ID NO: 524556 - DNA, 201 bp, Homo sapiens
cacttgtgtcccaggcagtggcgtgatctcagctcactgcaagctctgcctcccaggttcccgccattctcctgcctcagcctcccgagtagctgggactrcaggggcctgccaccatgcctggctaattttttttgtattttttagtagagacagggtttcaccatgttagccaggatgtcctgacctcgtgatccgccc

SEQ ID NO: 524557 - DNA, 201 bp, Homo sapiens
ctgaagcaggagaatcacttgaacccgggaggcagaagttgcagtgagctgagattgcaacactgcactccaacctgggtgacagagtaagactcatctcaaaaaaaaaaaaaaaaaattgaaaagaaaacaataaataaatagatgggtatgtcccgaggggatccgaaatacctcctggccctcgtgagggtgggatgt

SEQ ID NO: 524558 - DNA, 201 bp, Homo sapiens
agggattctttgcattattttatatgttgggggaaacccttaaaattcatcactgccatttttttaacctacagaattgaaagaatatgaaatgggcaggsataagtaattacacgaatcatagacatggtcaacatgcatctaattttacccactgagcagagcgcgaatgggggtaagttcttttgagaagaaccaaaa

SEQ ID NO: 524559 - DNA, 201 bp, Homo sapiens
tcaataccatcacaggagcttagaggacagggaaatatggaaaaaatacatacactagaacaaagaaaaaccatctctgtgacttatcacatgcacttacratgaaaaaaatactaacaaaacaggaattttcaagtgggacctcacagctgctgagcaaattaagtgttttttgtttagtgctaagccatccatgaaagc

SEQ ID NO: 524560 - DNA, 201 bp, Homo sapiens
tcaggtgtgagctgaagaggttttaagttcttgagaacacaggctaagggagaagagggaggaatggagggtggaaggttgcccatagtgaaggaggcaarcccagagaaaagagagagtagacacatggagagaaggggtgggagggtacttgccccccaggggaggtggtgcttgccacccagtgaaagtggtactggc

SEQ ID NO: 524561 - DNA, 201 bp, Homo sapiens
gagtagctgggactacaggcgtgtgccaccatacccagctagtttttgtgtttttagtagagatggggtttcacaatgttggccaggatggtcttgatctmctgacctcgtgatcagcccgccttagcctcccaaagtgctaggattacaggcatgagccaccatgcccggctgccagctaactttttaaaaaaatttttt

SEQ ID NO: 524562 - DNA, 201 bp, Homo sapiens
gatcttatgttttaggtatctagagtaagattatttagctgggtaatggctgggtagcatgaatagttttaatttcagttcacagcaaatgacgatgatckcagatttagcaccttagtttgtacttcctctgcacctgaatcatcgatcactgtgaagcgtgagctgaaggtcagaaagctgtattcttagataactcat

SEQ ID NO: 524563 - DNA, 201 bp, Homo sapiens
tccagctccaggatctgcctctccaaggactcgttggccccgcgcaggccctcgatctcgatggtgcgcgcctgcagctggcgccgatactcgtggatctsctcgcggctggcccggatggcctcggtgctgcgcgccgcctgctcgttcaggttggcaaacttggacttgtaccattcttccgcggactgcaggttctta

SEQ ID NO: 524564 - DNA, 201 bp, Homo sapiens
aaaaattagccaggcgtggtggtgcacgcccgtagtcccaactacttgggaggctgaggcaggagaatcgctggaatccgggaggtggaggttgcagtgasctgagattacgctactgcactctagcctgggcgacagagcaagactctgtctcaaaaaataaaaataaaaataattttcttcttcatcccaatcccctct

SEQ ID NO: 524565 - DNA, 201 bp, Homo sapiens
ggtccccaggagatttggactcatggtgaggactgggaacttttacccagagggcaagtgaacacctgcccttttcaggatagccacacggcatatagttytgaactgaacatggagatgatttttttttttttttacacttaccatccctcccttgcttgttgtgttgctgctaaataactctgttgtagcatgtgcttt

SEQ ID NO: 524566 - DNA, 201 bp, Homo sapiens
cttcttcagaatcattcaggacatgattcctgggcacgagacctactgaatggaaaatgcaaattcctgtgctccagaactactgagccagctgttgctgrtacctcggaacctgcattttaatgataccggggctgatttttgtgtagaatacagtttaagaactactgctctgccaaaccagattgttgagtttcctga

SEQ ID NO: 524567 - DNA, 201 bp, Homo sapiens
ggtaaaatagacataacaaaatttattatttaatcattttaaagtgtacacttcagttcacattgttgtgcaaccattatcaccatctatctacagatcctttttttttttttttttgagatggagtcttgctctgtcacccaggctggagtgcgtagcgcaatctcggctcactgcaagctccacctcccaggttcacgc

SEQ ID NO: 524568 - DNA, 201 bp, Homo sapiens
ttaatcattttaaagtgtacacttcagttcacattgttgtgcaaccattatcaccatctatctacagatcctttttttttttttttttgagatggagtctygctctgtcacccaggctggagtgcgtagcgcaatctcggctcactgcaagctccacctcccaggttcacgccattctcctgcctccgcctctcaagtagc

SEQ ID NO: 524569 - DNA, 201 bp, Homo sapiens
ttaaagtgtacacttcagttcacattgttgtgcaaccattatcaccatctatctacagatcctttttttttttttttttgagatggagtcttgctctgtcrcccaggctggagtgcgtagcgcaatctcggctcactgcaagctccacctcccaggttcacgccattctcctgcctccgcctctcaagtagctgggacaac

SEQ ID NO: 524570 - DNA, 201 bp, Homo sapiens
gtaatcccagcactttgggaggccgaggcgggcggatcacgaggtcaggagatagagaccatcctggctaacatggtgaagccctgtctctactaaaaatmcaaaaaaaaaaaaaaaaaaaaaattagccgggcatggtggcaggcgcctgtagtcccagctactcgggaggctgaggcaggagaatggcgggaacccggg

SEQ ID NO: 524571 - DNA, 201 bp, Homo sapiens
ccagctccaggatctgcctctccaaggactcgttggccccgcgcaggccctcgatctcgatggtgcgcgcctgcagctggcgccgatactcgtggatctcstcgcggctggcccggatggcctcggtgctgcgcgccgcctgctcgttcaggttggcaaacttggacttgtaccattcttccgcggactgcaggttcttag

SEQ ID NO: 524572 - DNA, 201 bp, Homo sapiens
aatcccagcactttgggaggccgaggcgggcggatcacgaggtcaggagatagagaccatcctggctaacatggtgaagccctgtctctactaaaaatacaaaaaaaaaaaaaaaaaaaaaattagccgggcatggtggcaggcgcctgtagtcccagctactcgggaggctgaggcaggagaatggcgggaacccgggag

SEQ ID NO: 524573 - DNA, 201 bp, Homo sapiens
tcgttcaggttggcaaacttggacttgtaccattcttccgcggactgcaggttcttagcggccagggactcatactgggcgcggatctccctcagagccgmggtcaggtctggtttagccacagtcacgtccacctcggccgcggcctgcgacgacgcctgcagcgtggccagcagctcggctacctcctcgtcgtgcacc

SEQ ID NO: 524574 - DNA, 201 bp, Homo sapiens
tcagcctcatgagtagctgggattacaggcacccaccactacatccagctaatttttgtatatttagtagagacagggtttcaccatgttgaccagtctgktcttgaacttctgacctcaggttatctacctgccttggcctcccaaagtgctggattacaggcatgagtcaccgcgcccagcccaagcttctttcaaaat

SEQ ID NO: 524575 - DNA, 201 bp, Homo sapiens
aaaacatatcacacaaatatttctttcattgcaactgtggtaagttagagaagggaaaggaaggtacagggcagcatgaaagaaaataacaggagggaatktcaggtagattggcttggagattagcgaatgcctctgagaaacatttgagttaaggccttcaagatgagtatgagttagaaaggtgaaaagaggctttca

SEQ ID NO: 524576 - DNA, 201 bp, Homo sapiens
catggctcagtgaagcctcaacctcctgggctcaagcgatccttctgcctcagcctctcaaggcagcctgagactgtaggcacatgccaccatgaccaaawaattttttttttttttttttttttttttttttttttgtagagatgtggtttcatcacagcacctaggctggtctcaaactcctgagctcaagccatccac

SEQ ID NO: 524577 - DNA, 201 bp, Homo sapiens
aatatatataacataaaataggccattttaaccatttttaagagtactattcagtggcgttaattacattctcaatgtggtgcaaccctcaccactgtctrtgtccagaatgttttcatcaccccaaacagaaactctgtcaccattaagcaataattctccactcctttcttcccccaacccctggtgactgctaatctg

SEQ ID NO: 524578 - DNA, 201 bp, Homo sapiens
ttcatggggaaaggggaatatgcttgggacaggccactaaaggaagggtgaaaagggatcttatgggactttggagcatatctcttggctttgtgcttgawgtcatggaagatggtcaggccctgccacagcctgcccctctggttcctcatcacagaccaaagccttgagttggagggactcaattctgaggtctttggg

SEQ ID NO: 524579 - DNA, 201 bp, Homo sapiens
gtaaaagcatcatgtccttatcaccagagctcttaaaggagacatggaacagagacggggcaactcttcagctctggccgaagtgactgctggacagagamcaaatcctgcatcagccttggcacacatgaaagactgggcaatgcagatgctacacagttgggcagatgaagagctgactgtccagaatctacttctagc

SEQ ID NO: 524580 - DNA, 201 bp, Homo sapiens
tgattaaaaaaatacagtgcatccctgttacaaatccctatataaacccatctcaccagagccattttcttgcttacaaggccttacaatctttaaaagaygcagtaaatgtgctgatctaggaatttatactgataaatgcccaagttttttgagtgctaaatgtttaagtaggtctttcaagttttcagcaagcatgga

SEQ ID NO: 524581 - DNA, 201 bp, Homo sapiens
tagccagctctagggcccctcccagaaaaacagcaggttaccaccaagtcctctccagcctcagggctgctctgagaggtgctcacctctgtcccttttcygcaggatcagccaagatgatcatgaaaccgggagatcagcagtttattgtagcttctagggcagggggtacggggagagaaggaaagggaggggccctgg

SEQ ID NO: 524582 - DNA, 201 bp, Homo sapiens
cagcgcgcccgcagccgctgcacctcctccgccagcccgtcgcgctccagcagggcctgcgagcgagccgagctggcctcctccagctgcgcgcgcaggtsgcgcagctcgcgctggaagagctcgccgacgcgcgacggctcagcgtggcgctgtcgcagcgcggccagctcggcctccaacgcgcggttctgcgtctcc

SEQ ID NO: 524583 - DNA, 201 bp, Homo sapiens
ctacacaaatttgcttaagtaaagaggagccaaatgctgatagccaagacaatgggaaaaaggcctcaaaggcatctcagaaacctttgcggcagcccctstcatcacaggccttggggcctaggagggaagaatggctttgtgggccaggcccagggctttgtcaccctgtacagcctcaggacactgctccctgcatcc

SEQ ID NO: 524584 - DNA, 201 bp, Homo sapiens
catgctggtttgtaattgaaagaacattggactcagagtcagaggcaatgggtttgaattgtggcttctgccacttactaagcatgtagggataacaacayctacctcccaagagtcatgaaagcttgagctgatgcatgtgaaggtgcttttaagctgtaggtataaagagttatggtcatcatcatcctctttcaaatg

SEQ ID NO: 524585 - DNA, 201 bp, Homo sapiens
atttgggtggtggttacatagacgtgtttattttgtgaaaataatatatgcatttttcttctttctttctttgtctttttctttcctctttttttcttccttttttttttttttttctttcagagtcctgctctgtcacccaggttggaaatgcagtggcatgatcatggctcactgcagtcttgacctccaggcctcaag

SEQ ID NO: 524586 - DNA, 201 bp, Homo sapiens
aatgccctcccgccaccccaacccatgccaaatgggttcaaaatgttgggagattatagctaccctttcagagattcactcagaattagagctcttgttayaattaaagaactaagtctaagactaagttttcattcagccttgtcaaaagaacaaaggtaaatttttttctcctggttgttttgctgtaattttctattc

SEQ ID NO: 524587 - DNA, 201 bp, Homo sapiens
agtgatcttggctgagcctcaatccataactccttccagctggccaggcctcctgagggagttccctgtgtgtgccagggctgtgtcttcatcttcctctratggcacactcagacaccacagacacgttgtcagtcatccccagttctccctaaggccacattctccagtctctctgtggcatttggcagtgctgaccac

SEQ ID NO: 524588 - DNA, 201 bp, Homo sapiens
gcttcccaagtagttgagactataggcctgtaccaccacaccaggctaattttttgtaacatttttctgtgtgtgtgtgtgtgtgtgtgtgtgtgtgtgtrtatatatatatatctataatatacatacacacataatatatatatattctaaatatatatagaatatatatattctaaatatatatagaatatatataga

SEQ ID NO: 524589 - DNA, 201 bp, Homo sapiens
gtgcgcctgtaatctcagctactcgggaggctgaggtgggagaatcacatgaatctaggaggcagaggttgcagtgagctgggatcgcaccactgcactcragcctgggcagcagaccgagactctgcctccaaaataaataaattaatgaattaattaaataaattaatatatatttaccatgtgactcagcaatttcac

SEQ ID NO: 524590 - DNA, 201 bp, Homo sapiens
atctataatatacatacacacataatatatatatattctaaatatatatagaatatatatattctaaatatatatagaatatatatagaatatatatataktatatatatatatatattctatatatatagaatatatatatattctatatatatagaatatatatgtgtatatatatattctatatatatagaatatata

SEQ ID NO: 524591 - DNA, 201 bp, Homo sapiens
gtactgattggcttctgctacagccattggctttacccactgttctggcttggacaccatcatgtgcatgtcaaagaaagggtcctggcctagctgctttygaaggctttctaccacagggtgaccaaaggtgatgttgggaacaaaatgcccatccattacatccagatgcagataatcggccccagagtctagcatctg

SEQ ID NO: 524592 - DNA, 201 bp, Homo sapiens
taatatacatacacacataatatatatatattctaaatatatatagaatatatatattctaaatatatatagaatatatatagaatatatatatagtatatatatatatatattctatatatatagaatatatatatattctatatatatagaatatatatgtgtatatatatattctatatatatagaatatatatgtgt

SEQ ID NO: 524593 - DNA, 201 bp, Homo sapiens
tatacatacacacataatatatatatattctaaatatatatagaatatatatattctaaatatatatagaatatatatagaatatatatatagtatatatrtatatatattctatatatatagaatatatatatattctatatatatagaatatatatgtgtatatatatattctatatatatagaatatatatgtgtata

SEQ ID NO: 524594 - DNA, 201 bp, Homo sapiens
atattctaaatatatatagaatatatatattctaaatatatatagaatatatatagaatatatatatagtatatatatatatatattctatatatatagaatatatatatattctatatatatagaatatatatgtgtatatatatattctatatatatagaatatatatgtgtatatatatattctatatatatagaata

SEQ ID NO: 524595 - DNA, 201 bp, Homo sapiens
tattctaaatatatatagaatatatatattctaaatatatatagaatatatatagaatatatatatagtatatatatatatatattctatatatatagaatatatatatattctatatatatagaatatatatgtgtatatatatattctatatatatagaatatatatgtgtatatatatattctatatatatagaatat

SEQ ID NO: 524596 - DNA, 201 bp, Homo sapiens
ctttcatcacactttatcgctaattgggtctttttatgtgtggtaaaatgcatataacaggaagtttactattttaatcattttaagtgtatagttcagtrgtgttacattgacaatgttgtacagccatctctattatttctaaaaccttttcaccatcccaaaagaaactctgtactcattaagcaataactccacatt

SEQ ID NO: 524597 - DNA, 201 bp, Homo sapiens
tatatatatattctatatatatagaatatatatgtgtatatatatattctatatatatagaatatatatgtgtatatatatattctatatatatatagaawatatatatgtgtatatatatattctaaaccaaaaataaatttctaagcctctcatctgactgagtgggcccctcctcttggtcatggtgattccaaagta

SEQ ID NO: 524598 - DNA, 201 bp, Homo sapiens
taccatgtcctgttgacttttcctgggtggagtttccatttacttctttccattcttactgccactgaggtatatactttctcacttgagcctcctgatcrgccacatgcatctgtctttccacttccttatatagatcatgttcccttcttactcaacagccttcactggctactcactgcctgctgaaaaaagcccatt

SEQ ID NO: 524599 - DNA, 201 bp, Homo sapiens
tttaaaagtctgattagatagcatttgccatctactgcttctaagggcaaccacctatgaaacttcatctacataataagaacctttgtctgcacgacactatatatatatatatatatatatatatatactttttttttttttttgagacggagtcttgctctgtcgcccaggctggagtgcagtggcgctatcttggct

SEQ ID NO: 524600 - DNA, 201 bp, Homo sapiens
taaataaataaataaacaaaaactgtgtgatatcaggcctttgaggtccttgataatctgtgtttggttatttctgcagaattctctctcatccactgtaytgtaggcttctcaaggcccagtatcacatttgattcagttcatagcctcccacacagttactgcctattgaagtgaaaagtcaaatatctccaaactagg

SEQ ID NO: 524601 - DNA, 201 bp, Homo sapiens
gattacaggcttgagccaccatgcccagtggttcatgcaatttatatgtaaaatgtaaaaaagtaaaagcagagagaagacaatggcttgtggtctgagasaatcaatggtatgtgggctaaaatgtgtttaggtaaaagctgttgtgagcgaactgtgtcttcttcctgagttgtcacgttttttcagtttccacaagtg

SEQ ID NO: 524602 - DNA, 201 bp, Homo sapiens
atgcagaaggatcacttgagcccaggtgtttgagaccagcctaggcaacataataggaacccgtttttacaaagtaaaaaatttgcctgtgtgatggcacrtgcctgtggtcccaggtactcgggaggctgaggcaggagaattgcttgagccggggaggctgagacttcagtgagccatgattgcgccactgcactccag

SEQ ID NO: 524603 - DNA, 201 bp, Homo sapiens
gaaatacctcctggccctcgtgagggtgggatgttggaggaaagcagcacccagcagagaatgtttagccccaatcagctgagctcatggaatgataggaygaggtgcggttcttggagtccaacttcatcatcttacagaggaggaaatcgaaacccaagaaagggaatagtgttatgcagtcacccctttgtgccagtc

SEQ ID NO: 524604 - DNA, 201 bp, Homo sapiens
taaaaatacaaaaattagcttggtgtggtggctcatgactataatcccagcactttgggaggacaaggcaagcggatcacaaagtcaggagtttgagaccrgcctgaccaatatagtgaaacgaaaatacaaaaatacaaaaactacgaaaaattcaaaaaattatccgagtatggtggtgggcgcctgtagtcccagcta

SEQ ID NO: 524605 - DNA, 201 bp, Homo sapiens
ctctcccagttgcgataacaagaaaacatctctagggcatcccagcactttgggtagctgaggcaggcgaatcacttgaggctgagctgagagaattgctygagcccggtaggcggaggttgaagtgagctatgatggcgccactgtgctccagcctgggcgacacagcaagaccccgtcttaaaaaaaaaaaaaaagaca

SEQ ID NO: 524606 - DNA, 201 bp, Homo sapiens
ccggcctgtttgtttttttgtttgtttgttttgtttttgttttttaattggcatggtgggacatacctaaaatggaaatttaggggaacatgccataatgrtaataaaaggcataaggtttgactgcaagggtgagtgtgtgtagtaagtggtattcttgagaattagacaagttggttaaggaagtaaaaaatagcacag

SEQ ID NO: 524607 - DNA, 201 bp, Homo sapiens
atcagtccatgaatatggtatatttttccatttacttaggtcttttaaatgttttcttaatactatttaaattttttgtgtagaggtcttgtacattttamaatttattctttagtatataatgcttttatgattttattaattttttttttttttgagatgagttttgttcttgttgcccaggctggagtataatggcaa

SEQ ID NO: 524608 - DNA, 201 bp, Homo sapiens
tcttttcctttatcaatataggttaaacaaagggtgggggaggcaaaaaaaaaaaaaaaaaaaagctttttctactttaaaaaaatgtgcctgcaagagcyggtgagtgcctgtaatcccagctacacaggaggccaaagtagaatgatggcttgaggccagaagttcaagtctacgtagtgagaccctatctcttaaaaa

SEQ ID NO: 524609 - DNA, 201 bp, Homo sapiens
aaccacagcaacccaccaaactctcagtgtcctgattgatgatataattgcataattttgtttagagttttaccatctaggccaggcatggtggctcacgyctgtaatcccagcactttgggaggccaaggtgggcagatcacttgaagtcaggagttcgagaccaacctggccaacatggtaaaacctgatctctactaa

SEQ ID NO: 524610 - DNA, 201 bp, Homo sapiens
ctgtaaagttacatattcaagtcttttatcattttcctattggattcttttccttactgatttctaagggtatttgtgtgttctgaatgctttatcatttsttaatatcacaaatatctcctctgaatttgagacttctcatttttcccctacaaacagaagttcttaaatttaatgtagttaaatgattcagtcttttcc

SEQ ID NO: 524611 - DNA, 201 bp, Homo sapiens
cctagatcgcgccactgcactccaacctgggcaacagagcaagactctatctcaaaaaaatgtatagatagagagttttaccgtctaagtttgcattttaraaatatatagtttatagtaataatatatatatatatatatatagtttggttggttggttttgttttgttttttgagacggagccctgcactgtagcccag

SEQ ID NO: 524612 - DNA, 201 bp, Homo sapiens
caaaaactgagcatgttctttaatattttttctcttagtgaacaattttatgctagctcatttgttaccttagaaatctttttctgttgcacatcttaacrcttttccatgtgcctctaagacaaaattacatgtgttacatctctaaataaacactgtggacactcaacacagtttaggtggaattaagagtgaggctca

SEQ ID NO: 524613 - DNA, 201 bp, Homo sapiens
tgtatagatagagagttttaccgtctaagtttgcattttaaaaatatatagtttatagtaataatatatatatatatatatatagtttggttggttggttktgttttgttttttgagacggagccctgcactgtagcccaggtaggctggagtgcagtggcacgatcttggctcactgcaacctctgcctcctaggttcaa

SEQ ID NO: 524614 - DNA, 201 bp, Homo sapiens
tatatgtatatatgtgtatgacatgttttgaaaaaaatgacaaatttttaagtaattttcttaggttcttttttttatttttcatgcagtgcctttattacttaagtcagaatttactattattatgttgttcttttggcttacttatggttttaatcagaattttagttgaatcattcaatctatatagatggattaatt

SEQ ID NO: 524615 - DNA, 201 bp, Homo sapiens
aagagaaaataggctaggcacagtggcttacacctgcaatctcagcactttgggaggctgaggcagaagaatcatttgaggccaggagtttgagaccagcstggaaaacaaagcaagaccccatctctacgaaaaaaatttaaaaattagccaagtgtaggttgtgcgcctgtagtgccagctactcgggaggctgagaca

SEQ ID NO: 524616 - DNA, 201 bp, Homo sapiens
attttaaaaaggcaaacctctttctaaaattatcaaaccatcctttgctggcattaaatcatccagctttagatcctttaccttccctttgccttgtcgtktaatgacttcactttttctcaaatcattaatctacagatacacttttcttacagcaatcctatacccacataaaagctgcatttttgatatgagataaaa

SEQ ID NO: 524617 - DNA, 201 bp, Homo sapiens
aaagcttcttgcagatcatttttaataagcaatgctatttatagtaacatgtaatgggttattttatagtaacttaagatgttcttagttttaatttctgrtatgataaacatccatatatagcccacataaaagattcctggggttctcaataatttttaagagtgtaaaagggacctgagacaaagtttgagaactggt

SEQ ID NO: 524618 - DNA, 201 bp, Homo sapiens
gtgtaaaagggacctgagacaaagtttgagaactggtttaagacttaaaatttaataaacacctgccttttgccgtgtaaaaaaccccaaatcttttcctraaatctctcccattatcccttaagtccttgtcttgtttattacaatatctgcagcatcagtcagacaaacgaatacaaaagaccagtaagtggtgactgt

SEQ ID NO: 524619 - DNA, 201 bp, Homo sapiens
ttcatctcaaaaaaaaaaaaccttgatgtgttgtggtccagcatcccatatgaggtatgtccatcttaatagtatgaccataactcatttgggtgataatsgcttaaaattttttttttgtagtaggaataatccaagtttataatgcagtttagcctcatgcaagaacgaaaagagatactttaaataggtttttacaag

SEQ ID NO: 524620 - DNA, 201 bp, Homo sapiens
tttagcttcacatattttcacctttttatgaatatatactatatgtacttctatgacttgatttttttgtatatgtttgtaagagtcatttatgttgatakgtatagttgtagtctgtaatgtcatagcagtccgttagaaaatataattatgtattcattctcttctcaaaggaagtttgggttgtttgtagtttcgggc

SEQ ID NO: 524621 - DNA, 201 bp, Homo sapiens
taattcttacttgtcttgtaattcttatttacatttctacatttaagctaggtcaataatagacattggcttattaggtctactaatagacattgttttckttttcttaactttcagttctaagacattattaactattgagagtttcgtgggaaaaaatgtaaatgatagaatattatagttaattttgctaactatctt

SEQ ID NO: 524622 - DNA, 201 bp, Homo sapiens
gtgtgcatatcatgtgtacgtatgtatgtatgtatgtatattaatacagacttagaatataaatgtacattgagcagttttaaattttaattgtccctaartaaaaagaaatacaagtttaagtatcttggcttgatattttacaattacatgtcacagcctttgaagaattccattttttcatttgtcttttattatatg

SEQ ID NO: 524623 - DNA, 201 bp, Homo sapiens
ttagccaggatggtctcgatctcctgacctcgtgatccgcctgcctcggcctcccaaagtgctgggattacaggagtgagccaccgcgcctggctgctagyctttttgtttcaaagttttggctggctccagtggctcacacgtgtaatcccaacactttgggtggccgaggaaggaagattgcttgaggccaggagtttg

SEQ ID NO: 524624 - DNA, 201 bp, Homo sapiens
gaagataaggtaggagattttcaaggtgaaagtaatttaaatatacaaagatgtaaagtagaatattgaccaaaaaatattggatttgacaattgatataytatcaccaataatctcttcagagtgatttcatggtagaaaatggtggagcagaaatgaatttacactaaaaaaaggaagaatgtaagttataaactgtta

SEQ ID NO: 524625 - DNA, 201 bp, Homo sapiens
tcgtgatccgcctgcctcggcctcccaaagtgctgggattacaggagtgagccaccgcgcctggctgctagcctttttgtttcaaagttttggctggctcyagtggctcacacgtgtaatcccaacactttgggtggccgaggaaggaagattgcttgaggccaggagtttgaggccagcctgagtgacatagtaaaaccc

SEQ ID NO: 524626 - DNA, 201 bp, Homo sapiens
tgctcaagggatccttccactcagcctcccaagtagctgggactacacgcatgtaccactacatctagctaattaaaaaaaaaaaatttcgtagacatgcyggtctcaaactttgggcctcagtgaacctcctgtcttggcctcccaaactgctgggattacagatgtgagccaccatgcccagcccccttttttttttaa

SEQ ID NO: 524627 - DNA, 201 bp, Homo sapiens
aacaaaaaacaaaatgtatgcgaaattgggcttataaaactggagaatagatgactgtgatagggagacttttaatcaattgcttgatctcagtcatatgrcaagaggttgcttccattggctgccttgtggatattgtttatgtttggttctcagtgcattcgtgtgtgacttgggctttgaaaattaagcccaagaaaa

SEQ ID NO: 524628 - DNA, 201 bp, Homo sapiens
tggatagagctttttaggtaaagataatgacacatacataattagaaagggatggagatgaaagaaggaaatgggcaaacacaaagacagttttttagcastttttttaaattttgggagatgaggtcttactctgttgcccagactaaagagcagtggcacagctttgaactcctttgctcaagggatccttccactcag

SEQ ID NO: 524629 - DNA, 201 bp, Homo sapiens
gtgttttggctgggattttgctattgcaggcacatcttgcctaactgcctaaactttctggatgatccatctctgtccaattttaccagatttttagctcwttttttttttttcagaacagttttacaacttcaagatgggtttcttgtgtatttatttatttattttttagagacagggtcttgctctgttacccaggct

SEQ ID NO: 524630 - DNA, 201 bp, Homo sapiens
agttttttagggctgtaattatcttttatttagctaaatattgtcctcatcaaggttcttaggagtaatattctccaagtgtttttttgtttgttttagtmgagacaggaactcactttgttgcccagtctggtcttgaactcgtaggctcaggcagtcctccctgcacggccttccaaagtgctgggactgcaggtatga

SEQ ID NO: 524631 - DNA, 201 bp, Homo sapiens
taaactaataacatatttgtagattctttttttctacacacaatcatataatttgtgaataataacaatgtagtttcttcctgtcagtttttttatatatrtaatttattgtactggctagtacctccagtacagtgttgaatagaagtggtgatgtttgtatctttaaaggtaaaactttcaacatttcattcttaaaca

SEQ ID NO: 524632 - DNA, 201 bp, Homo sapiens
tttaaagtgatgatgtattttcaagataggaaaggcatatttgaagaaagaagggaagaacctaatgaggggagacattgaagctgttgaaaaaagacagsgttcattgaacatatgaagaaattattttctgtgagaaggtacactttttctgagacaaaaaggaaagactctttgtgagctataaagatggaattgtgt

SEQ ID NO: 524633 - DNA, 201 bp, Homo sapiens
tcttaattttctttcatacaactttttattaagagaaaagttatctagcaatggtgttttcattttattatcatcttcaaaatacagaaagtttttagagrtttatcttttacctttatatcactctcctttttttaacctaacctgatagttacagttcatcttcagttatttcttcttatacatttttatgctagaaaa

SEQ ID NO: 524634 - DNA, 201 bp, Homo sapiens
aatgagtaattccatctagtctcactgaagagttaaattatcatctgagcatatttatataaaaaaaattgggggaaaattagatgaaaccttagacaaawtaagtacatttatcctgaatacagacattggaaatatttgaaatagtaagatgaatactaaatatttgaatgttgttttccatgaagcagtcctaaatac

SEQ ID NO: 524635 - DNA, 201 bp, Homo sapiens
taccttttcttgtctttatcagtcttaccagacagtcgaaatgtattgttagtctttataaagaaccagtatggtggcactgttgaccctcactttttaawgtttattatttactatcttctgctttctttgggtttacattcatgttctttttctaacttcttgagatagatgcttaactcactaattttcatcctttct

SEQ ID NO: 524636 - DNA, 201 bp, Homo sapiens
gagctagtcgtttctgagaaacttttagccatttgtgtcgttggcatttgagcagagttgcagtttgtattttaatttatcctggatacttggtgaagtgyagctcaccttagttagagatcttacttaaacatgtaaatggaacaagctgctggctctctttccctaaaatttgtactttcacttaaagtttttaaaagg

SEQ ID NO: 524637 - DNA, 201 bp, Homo sapiens
tacaggcatgagccaccacatccagccagttttgtctatatttctaaacaatattttatttagcttcacatattttcacctttttatgaatatatactatrtgtacttctatgacttgatttttttgtatatgtttgtaagagtcatttatgttgataggtatagttgtagtctgtaatgtcatagcagtccgttagaaaa

SEQ ID NO: 524638 - DNA, 201 bp, Homo sapiens
ttctaaaaagtttctaagtacagttgaccttgaacaacacagaggttggggtgctgtcccttgtacagctgaaaacccatgaaaacttttgaccctccccrccccagaaacttaactaatagcctgctattgactggaagccttactgataatacagtcattaggtacatagtttttatgttatatgtattatatactgtc

SEQ ID NO: 524639 - DNA, 201 bp, Homo sapiens
caacccatttttaatcatgtcatttgctgaaaataaaaaaagtcaacaatatctgaatgaatatctagtagccagaacttatttccttctatcaagcaaayagtgaaagttcactgaaataatttttaagaaattaatttttaattcctttcttttgctgaataaatagcagttttgaatggtttaaaaaattgattacat

SEQ ID NO: 524640 - DNA, 201 bp, Homo sapiens
gctggagaatgagatctgagataggttcactagatgtggttcttgacaatgtttaaatgtatactttccacccaccgaccctccctatacccactagtcartaaaagggaaacattattgaggccccagggccatggggcttgggcaggaggccacccagtgggagaaggaggagccaggggaggtgtcttatttgacctt

SEQ ID NO: 524641 - DNA, 201 bp, Homo sapiens
gggtcctctgccagtcaagtcacacaggacttgcttaattcctccagcaatgagttgtgacagcaggtgtgaaatgttgtagggaacctcattggagactyagtgccaaaagtttttatcaggagctggtcatgtaggcactctctctctgagatgtaccaaaattctagactctcagaaggaaagcaagtatttagcagg

SEQ ID NO: 524642 - DNA, 201 bp, Homo sapiens
ttagatgtgcctctcatatacaacataagagttgagttttgctttgtgatccaacctctaattgaattaaacctttcatacttgttattatattacatacrtcctggaattctattattttgttatgcctttccctcttgcctcccctttaaaaaaaattgtgttggttgttttcatcttacactatatggtctgtttacc

SEQ ID NO: 524643 - DNA, 201 bp, Homo sapiens
cccaggctggagtgcaatggcacaatctcggctcactgcaagctctgcctcccaggttcacaccattctactgcctcagcctcctgagtagctgggactayaggcacccgccaccatgcctggctaattttttgtattttagtagagatggggtttcaccatgttagtcaggatggtctcgatctcctgacctcgtgatct

SEQ ID NO: 524644 - DNA, 201 bp, Homo sapiens
gaaaattctctgtattcataatgaaatataacttctgctgatagttattaaatcagtttttgggagagcatggagttttttgtatatttttagtctaatcrtaggctatcttgatatttctcattctgtgtatatcttacaaaaatccaaatctccaattgtgtgcatatcatgtgtacgtatgtatgtatgtatgtatat

SEQ ID NO: 524645 - DNA, 201 bp, Homo sapiens
aagactttttctcatattttgtcacctctgaatttgggatttgtcttaaaattggtggcgtatcataattcatttagtagtgttctttttcttcttaatartatataaaataaattatgcatattagtagatagattttttgatgtaaagtaaatgcttgtcatttgaggaaaatggtcttttatttgattccttgtcagg

SEQ ID NO: 524646 - DNA, 201 bp, Homo sapiens
tgcataaatgtgtaaactactgccttttttcttattctcttgtaattttttatcaggcaaatattgaaaatggtttgaaattttttatttctatgcatccytaagtcttttcagaattgtagttttcaaaaagataaatataatttcttacaatattttgtattagatcaagagcagagattgaacacgaagcactgattg

SEQ ID NO: 524647 - DNA, 201 bp, Homo sapiens
atttacttttgtttggggatgagacgtgaaatttataacttgacatttctaaattttgttaaaaaaaaaaaacatgatttctatttgctatatataaggastatatttgatttggggtggaagatgttatttacttgtttataatgccagaaaataacttttattttgtttttataaaatgtgttctataggcatatactg

SEQ ID NO: 524648 - DNA, 201 bp, Homo sapiens
gctgggtgtggtggcatgcttctgtagtcctagctactcaggagactgaggtggaaggatcgcttgagcccaggagacagaagctgtagtgagctgtggtygcaccactgtattccagtctgggtaatggagtgagaccctgtctcaaaaaaactaaaaactaaaaataaataaaaaacaaaaagtaggaatgtatatgta

SEQ ID NO: 524649 - DNA, 201 bp, Homo sapiens
agggccacaatattgaagaattggaatattgttttaaactggaaacctctgagaggaggacagccagagtagcagcatattaatattacaggtcacacctrtaatctcagcactttgggaggctgaggcagctagatcacttgagcccaggaattcaagaccagcctgggcagcgtggcaaaaccccatctctacaaaaag

SEQ ID NO: 524650 - DNA, 201 bp, Homo sapiens
tttgtaagaattctcaagaaaacaccagagaagtggatgatagttcaggggttatgctaatgtcctggtgtttataccagtatatatagaatatggggaayataaagcttaattaagagcttgaggccgagcgtggtggctcatgtctgtaatcccagcactttgggaggctgaggcaggtgaatcacctaagcctgacca

SEQ ID NO: 524651 - DNA, 201 bp, Homo sapiens
tgaaagctaaaacataaacatttatgcttttagtggcattacacttctgtaatggggtgagaaagtgtgtattgttgtggttaacaaaaaagctgcataartgtgtaaactactgccttttttcttattctcttgtaattttttatcaggcaaatattgaaaatggtttgaaattttttatttctatgcatccctaagtct

SEQ ID NO: 524652 - DNA, 201 bp, Homo sapiens
ggagtatgagtatggtagctgctgagagataaggcatacctttggcaaacattagtgctgatacagaaagtcaaagaggagaacgtgaaaagcaattggcsagaatctaagccttgagaataatgatgaggaatctggggaaggtgggaactactggagaaaatcctgagaagagaatatataaggtgacaaagtgtcaag

SEQ ID NO: 524653 - DNA, 201 bp, Homo sapiens
aggatattacagatcttgtattaatatatatttaataacaatgggattgagcaatgtaagcatatgaaaaggctttatgaagacaagtggatagagtttakatagattggagtatgagtatggtagctgctgagagataaggcatacctttggcaaacattagtgctgatacagaaagtcaaagaggagaacgtgaaaagc

SEQ ID NO: 524654 - DNA, 201 bp, Homo sapiens
agactttggagtatagagagggcaaactaaatgggtgaaactctgggccttccacccctgcttggcgccacttttgtattttgccatttgacaaatgactrtgatgtcattaaaaaaaaataaataaaggaatctgttatttggggaaaaaacactctaaaaacaacttacctaaacatactagctttttaaaataactgg

SEQ ID NO: 524655 - DNA, 201 bp, Homo sapiens
tttggcaggacttgtgttaacagagctggctgtcattttagaccctgatgctgaagggtgagtacactagtttttaccttgtagaatatgagtttgatttkgaacagtggacagaagtattccactcacatttcctgaggattaggagaataatctttcacactctttttctacttccctcttcactaagtttctcactta

SEQ ID NO: 524656 - DNA, 201 bp, Homo sapiens
tgatctctttgtacttggccttttcctttcctggagatattaagcctcatggcttaaccttaatggcacgaaggataagtaaaagaaaccaactgataatrgaaaatatgttaagagtattccaggagtatcgttcccttcactcttttttagaatttaagtttaaaattcttctttagcatttgaatttttaattttgct

SEQ ID NO: 524657 - DNA, 201 bp, Homo sapiens
ggtgcctgtgatttattgcactgaaagaataccaagtaaagtcagcaaaggaaaaaggtgcgtggagtgaaatctggaggaaaccaggagcaagcttcaamgggtcctctgccagtcaagtcacacaggacttgcttaattcctccagcaatgagttgtgacagcaggtgtgaaatgttgtagggaacctcattggagact

SEQ ID NO: 524658 - DNA, 201 bp, Homo sapiens
tgacaacttttacatccaggatacattaaagaatgtgaaaaatacaaagcaaaatacattaatgaacatagtagtcagtccttgagttcctattctgtttytttgaagaataaactcataagaagttaattccactagataagaatgtagaatgaaattagaaaatactgaaatagtctgtggagttttaatataggcata

SEQ ID NO: 524659 - DNA, 201 bp, Homo sapiens
tgagactattgaagttttttgtttcttcttacattgattgtatttatttatttttattttattttattttattttttgagatgatatctcgctgtatcacmcaggctggagtgcagtggcatgatctcggcccactgcaacctccgcctcctggcttcaagccattctcctgccttggcctcctgaatagctggaattaca

SEQ ID NO: 524660 - DNA, 201 bp, Homo sapiens
gctgtggtggttcataaaatgtcatctttagtttgtattctctctgatgattagactttcagatccagatctaatcatttagtaagccagatcttgccaartaaactactccgttagagaataaggacttttaatagttacaataatactctttcaaatcttttatggcagcaataaaatagtaatattgtctattttttg

SEQ ID NO: 524661 - DNA, 201 bp, Homo sapiens
ttcagcctatgcatttttctttgattgtttagttaaatgctatttatatgtaacatttttttccctttttttaaattatactttaagttctgggatacatrtgcagaatgtgcaggtttgttacataggtatacacatgccgtggtggtttgctgcacccctcaacccatcaattacattaggtatttctcctaatgctgt

SEQ ID NO: 524662 - DNA, 201 bp, Homo sapiens
atacaggtgcatgtgtctttatagtagaatgatttataatcctttgggtatatacccagtaatggaattgctgggtcaaatggtatttctagttctagatmcttcaggaatcagcacactgtcttccacaatggttgaactaatttacactcccaccaacagtgtaaaagcgttcctatttctccacatcctttccagcat

SEQ ID NO: 524663 - DNA, 201 bp, Homo sapiens
gatgatgagctttttttcatgtttgttggcctcataaatgtcttcttttgagaagtgtctgttcatatcctttgcccactttttggtggggttgttttttycttgtaaatttgtttgagttctttgtagattctggatattagccctttgtcagttggatagattgcaaaatttttctcccattctataggttgcctgttc

SEQ ID NO: 524664 - DNA, 201 bp, Homo sapiens
agcgaaaagaaaatgttattaagaaaattataaggaagttaaaatatatttgcttttcattaattggaagtggatcatcataaatgtctccatcctcattrtcttcacattgaataggctgaagaggaggggttggttttgctgtctcaggagtggcagaggtgggagaaaacctacatataagtggactcatgcagttca

SEQ ID NO: 524665 - DNA, 201 bp, Homo sapiens
cttgacttcaacagctagtaggttctctgtagatgaaaaagtgttattgtagcagttaatatgtatgtcctcttttataaattgagattaagagattttgyggttttagtatcagagaagcctatattttcctttgtccagtgaaatactcgttctactgtattattcctgaggcaaggaggctactttttttaagctctt

SEQ ID NO: 524666 - DNA, 201 bp, Homo sapiens
gtattctaaaagaatgaatattctttcattgttagttacagcattctatgtcctgtactcttgttgtttaaatctttttggtctttactaaattttgcatrcttattctaatatcccactacaattgtggttttgtaatttctccttgtcattctgtcagatttttgtttcttttgaggcctgattatgaaacatttaaca

SEQ ID NO: 524667 - DNA, 201 bp, Homo sapiens
cagtgggtggcacttgacttcaacagctagtaggttctctgtagatgaaaaagtgttattgtagcagttaatatgtatgtcctcttttataaattgagatkaagagattttgcggttttagtatcagagaagcctatattttcctttgtccagtgaaatactcgttctactgtattattcctgaggcaaggaggctacttt

SEQ ID NO: 524668 - DNA, 201 bp, Homo sapiens
gattacaggtgactgccactgcgcctggctaatttttttttttttttttgagatggagtctcactctgtcacccaggctggagtgcagtggcgcaatctcrgctcactgcaagctctgcctcctgggttcacgccattctcctgcctctgcctcctgagtagctgggactacaggcgcccgccaccacgcctggctaactt

SEQ ID NO: 524669 - DNA, 201 bp, Homo sapiens
actaaggcacagagaagttaagtaacttgtcttagaatgcacagcttgtaggtagcaggactgtaattaaaactcaggcatttcagcacttgggaccgtcktcttcaccttcactgaaactttttcttccaaaaaagaagtatgtaaaaaaatataaaacaaaacaacaaaaaagagaaaaggatcttccagagtatgtca

SEQ ID NO: 524670 - DNA, 201 bp, Homo sapiens
acaggtgactgccactgcgcctggctaatttttttttttttttttgagatggagtctcactctgtcacccaggctggagtgcagtggcgcaatctcggctmactgcaagctctgcctcctgggttcacgccattctcctgcctctgcctcctgagtagctgggactacaggcgcccgccaccacgcctggctaactttttt

SEQ ID NO: 524671 - DNA, 201 bp, Homo sapiens
gatcctaacaaggtatagttgattcgactataatgacatatagacatctctttgaaatcctctgtgcaattttgtttgagaaagactaaatgatgacttamcagtgaggaaatgaaggacttttttctttcctaggcatatattcagattacctatgtggagccatactttgacacatatgagatgaaggacagaatcacc

SEQ ID NO: 524672 - DNA, 201 bp, Homo sapiens
ctgccactgcgcctggctaatttttttttttttttttgagatggagtctcactctgtcacccaggctggagtgcagtggcgcaatctcggctcactgcaasctctgcctcctgggttcacgccattctcctgcctctgcctcctgagtagctgggactacaggcgcccgccaccacgcctggctaacttttttgtattttt

SEQ ID NO: 524673 - DNA, 201 bp, Homo sapiens
tttcaccatgttagccaggatagtctcaatctcctgacctcgtgatccacccacctcaacctcccaaagtgctgggattacaggcgtgagccaccacgccsgaccaatttttttgtatttttagtagagatgagttgcactatgttggccaggctgatcttgaactcctggcctcaagtgatttacctgactcagcctccc

SEQ ID NO: 524674 - DNA, 201 bp, Homo sapiens
ccagctactcgggaggctgaggcatgagaatcacttgaagctgggaggcggaggttacagtgagccaacatcacgccacagcctagacaacagagcaagactctgtctcataaataacagccatgttgtccttgtcacaatcattctcagccatgtaaccctgttttagtttctacaaggcacttatctgaaatttgcttg

SEQ ID NO: 524675 - DNA, 201 bp, Homo sapiens
tctctttcccctctagttcagtatatatagattaatcttcctaaatgaccattttatctgattattctacttttgggaaaacttaattggcctcattatcycttcataatttcctgtcttggttaaataaattatagaatctaagatcctattgctcaaagtggctgttcagtttacccatttatgcagtgtgcaatttat

SEQ ID NO: 524676 - DNA, 201 bp, Homo sapiens
tgttctctaggaaagttctgatctcttcgtggtcagtgaaataatataacctttctgagtactggagactcgacttgttattgtcttttgtgtaccactgktgatagtggaggtaacggtgggagatgtcttagtgtgaataatcctttggttgttcatttaactaactaatgattatgttgtgcgtatcatttaacctac

SEQ ID NO: 524677 - DNA, 201 bp, Homo sapiens
gaattaccttttaaaggagctttaaaaatatacatatttctgagtcccatcccagaattattgagaagttcaaacttatggtggtggggatgaggagcacwcagtgcttgtgaagcacctcacaactggtctacagattagttttagggaactaatagtccagaattctatttggcagtctaatatttagaattttgaata

SEQ ID NO: 524678 - DNA, 201 bp, Homo sapiens
atgatttcagcctgctgtaacctctgcctcccaggctcaagcaattcttctgcctcagccttctgagtagttgggactacaggcgcgtgccaccactcccggctaatttttgtaattttagtagaaatggggttttgccatgttggccaggctggtctcccaactcctggcctcgagtgatcagcccgcctcggcctccca

SEQ ID NO: 524679 - DNA, 201 bp, Homo sapiens
ctaagaggagatactttctggtagttagtgactccctgatgactggtatagacccataactgagcacctgataatatatcccataccactgattttttttytgccccttacgctacttttgagaagaaaaagaaagatatgaaagcccagcatggtggctgacacctgtaatcccaacattatgggaggccaaggcgcgat

SEQ ID NO: 524680 - DNA, 201 bp, Homo sapiens
gtgctcagttttatttatgaaaatattaaagttcccagaatattaactgtcttctcccaaacagttttaaaaaatgattacctcaaggtttatgggaaaargccccgtattctgtcattcagaatttggaaaattgcctcattatagatagttcatttctttttttttttttttttatactttaagttttagggtacatgt

SEQ ID NO: 524681 - DNA, 201 bp, Homo sapiens
cagctactcgggaggctgaggcatgagaatcacttgaagctgggaggcggaggttacagtgagccaacatcacgccacagcctagacaacagagcaagactctgtctcataaataacagccatgttgtccttgtcacaatcattctcagccatgtaaccctgttttagtttctacaaggcacttatctgaaatttgcttgt

SEQ ID NO: 524682 - DNA, 201 bp, Homo sapiens
tttctaaattttgttaaaaaaaaaaaacatgatttctatttgctatatataaggactatatttgatttggggtggaagatgttatttacttgtttataatsccagaaaataacttttattttgtttttataaaatgtgttctataggcatatactgaaattatagaaacaaatttatttatttatttaccaaatatttatt

SEQ ID NO: 524683 - DNA, 201 bp, Homo sapiens
gtttaaaccatcttatgtttctttataaaatgtcactggaaattttaagtttgaacattaaatattttattttccagtttaattttgataattgtattcttttttttttttttttttttgagacaagatctcactctgtcactcaggccaaagtgcagtggcacaatcatgactcactgcagccttgacctcctgggctta

SEQ ID NO: 524684 - DNA, 201 bp, Homo sapiens
aatttttgcattagtgcttctggagggtcttgacatttacattgcctgctctatgccaggtgctatctttgactcttaacttttacaatctcatttaataygtgaagaggttatataaaggctaatgctaatttaaaaatatgtaagtgttgttttaaaatttaacttgacctagtatgctctagtatcagtacaattaag

SEQ ID NO: 524685 - DNA, 201 bp, Homo sapiens
ttattgctaaaacaaaaatctcaactatattcataaatcatgtgtaattattcttacatttttatttgcattaaatgatacttttacaaatattagtatttaagtaaaccactttattgcatcaaactgttttgttcttttttctttattatttttctagctttattgagttataattgacaaaattgtatatatttacag

SEQ ID NO: 524686 - DNA, 201 bp, Homo sapiens
attggcacagggctgctaattgtagaatttttgcattagtgcttctggagggtcttgacatttacattgcctgctctatgccaggtgctatctttgactcytaacttttacaatctcatttaatatgtgaagaggttatataaaggctaatgctaatttaaaaatatgtaagtgttgttttaaaatttaacttgacctagt

SEQ ID NO: 524687 - DNA, 201 bp, Homo sapiens
tattgctaaaacaaaaatctcaactatattcataaatcatgtgtaattattcttacatttttatttgcattaaatgatacttttacaaatattagtatttaagtaaaccactttattgcatcaaactgttttgttcttttttctttattatttttctagctttattgagttataattgacaaaattgtatatatttacaga

SEQ ID NO: 524688 - DNA, 201 bp, Homo sapiens
cccattaattatttttccttgaaccgaatgtcatgagaaaatataataaaaagaggtaggttagttttaagctaccttaataaaattcagtgttcagattsaaggtgacattgagcccagcaacacaccttcattggtcagatcacatcaacagtattatggttatatctgggatatcacactttaaaggatggcattgta

SEQ ID NO: 524689 - DNA, 201 bp, Homo sapiens
tagaataattgcattacattcgggtattggtccctaggatgtttagtagaagttagtgttttctttgtagatagatttgtgacagttgtttcaacctattkgattattttaggattattgccatttttttcttcattgagtctgttttgctaaattatattaatctagattaacagattattaataatttagcaaaaaatc

SEQ ID NO: 524690 - DNA, 201 bp, Homo sapiens
attgctaaaacaaaaatctcaactatattcataaatcatgtgtaattattcttacatttttatttgcattaaatgatacttttacaaatattagtatttaagtaaaccactttattgcatcaaactgttttgttcttttttctttattatttttctagctttattgagttataattgacaaaattgtatatatttacagaa

SEQ ID NO: 524691 - DNA, 201 bp, Homo sapiens
ttgctaaaacaaaaatctcaactatattcataaatcatgtgtaattattcttacatttttatttgcattaaatgatacttttacaaatattagtatttaagtaaaccactttattgcatcaaactgttttgttcttttttctttattatttttctagctttattgagttataattgacaaaattgtatatatttacagaat

SEQ ID NO: 524692 - DNA, 201 bp, Homo sapiens
actctactctattttatttatttatttatttatttatttatttatttatttatttttgaggtggagtttcgctcttgttgcccaggctggagtgcagtggygcaatctcagctcaccacaacctccgcctcccgggttcaagtgattctcctgcctcagcctcccaagtagctgggattacaggcatgcgccaccacgccc

SEQ ID NO: 524693 - DNA, 201 bp, Homo sapiens
ccaacctctaattgaattaaacctttcatacttgttattatattacatacatcctggaattctattattttgttatgcctttccctcttgcctcccctttaaaaaaaattgtgttggttgttttcatcttacactatatggtctgtttaccttgttttggggatgtagtgtttatcatatttagcaaaatttctggttttg

SEQ ID NO: 524694 - DNA, 201 bp, Homo sapiens
atagagcaagacttcatctcaaaaaaaaaaaaccttgatgtgttgtggtccagcatcccatatgaggtatgtccatcttaatagtatgaccataactcatstgggtgataatcgcttaaaattttttttttgtagtaggaataatccaagtttataatgcagtttagcctcatgcaagaacgaaaagagatactttaaata

SEQ ID NO: 524695 - DNA, 201 bp, Homo sapiens
gtcttgctctgttacccaggctggagtgcagtggtgcagtcatagctcattgcagcctcaaaactcctgggctaaagggatcctcccacctcagcctcccragtagctggggctataggcacacaccaccatgtcatgcctggctaatttttttttttcttgtagaaacaggatctgtctctgttgcctaggctggtcttg

SEQ ID NO: 524696 - DNA, 201 bp, Homo sapiens
cttacaaaagattatcttctttaacacaatgtccggaatacctttggaatactgagggaacctgttttagcaaaatcaactctgataatcagcggattggyagatgtagtagcttgacaacttttacatccaggatacattaaagaatgtgaaaaatacaaagcaaaatacattaatgaacatagtagtcagtccttgagt

SEQ ID NO: 524697 - DNA, 201 bp, Homo sapiens
ttctgtctgaaatacctagtgacccaaagctcttcagacatcataataaactgcgactctgctttaaagattttactaaaaggtattcaaggctttctgcrtaaagatcttcaaattgagactgtccaataccacagtatgacataagggccttaaggaaccattgaaaagagaaaataggctaggcacagtggcttacac

SEQ ID NO: 524698 - DNA, 201 bp, Homo sapiens
ttcaccatgttagtcaggatggtctcgatctcctgacctcgtgatctgcccatctcgacctctcaaagtgctggcattacaggcgtgagccactgtgcccrgcctagaatgcctgattttaatatacttaaatttagtcttgcagctaatattttctatatcttatttaaggaatttttttctgtttcagaattttgaagg

SEQ ID NO: 524699 - DNA, 201 bp, Homo sapiens
tagattcatatgaagacaattcatagagggggaaaataatttcaccaattaaatagatgtaagatttctttacataaccagtatgagatacttacagtaaytgcattgtgcttaaaaatatatctgaacaagcattgcttgtctgatgccttttggggcatatcttgtcaatgtatacttttttacattatgataatgttt

SEQ ID NO: 524700 - DNA, 201 bp, Homo sapiens
atctcagcactttagaaggccgaggcaggaggatcacttgagatcaggagtttgagaccagcctgggcaacatagcaagagcccatatctaccaaaaaaawttttttttaaattagctaaacctggtggcacaaacctgtagttccatctacttggaaggctgaggagggaggcttgcttgagcccagaagttcaaggctg

SEQ ID NO: 524701 - DNA, 201 bp, Homo sapiens
ctaatactgcatgatatctcaaaatatacttctcatctgtgttgactttggagggaaatcctgttcctaaataaaatttttaattccatttctaatattgyaaatgatttatatttgatttagtatatgacaaacctgaatagtagtttttgataataatgaaaaagtgaaagaaattattctaaactttttcttttcttt

SEQ ID NO: 524702 - DNA, 201 bp, Homo sapiens
tttgttataccttagctgaattaggttttgcttacttaagactagttgcttgatagctaatactgcatgatatctcaaaatatacttctcatctgtgttgrctttggagggaaatcctgttcctaaataaaatttttaattccatttctaatattgcaaatgatttatatttgatttagtatatgacaaacctgaatagta

SEQ ID NO: 524703 - DNA, 201 bp, Homo sapiens
cagtgtaagttgggagtccaggttcatttatttatttatttatattgcatattatgccagattatttcagcaccgtttattaaaagaatattttccctacrtctctgaaatactgcctgtatatggtctaccatgtagagaaagtcatacatttttaaaatttttcttggctactttttggccctttgtatatctacataa

SEQ ID NO: 524704 - DNA, 201 bp, Homo sapiens
cccaggacagctttgagtgcagctcagcacaaatttgtaaactttcttaaaacattatgagtttgttcagggatttttttttttttttgtaagttcatcarctgtcattaatgttagtgtattttatgtgtggcccaagacaattcttcttccagtatggcccagggaagccaaaagattggacacccctgcaatcttgtc

SEQ ID NO: 524705 - DNA, 201 bp, Homo sapiens
ctgatacgtttctttctcatatatcatctttttttaatttctcaaacactgagagcttactgtgtgctaggcactatgctgaggacttgtggatatgaagyaaaatctttgtaatataacacaagtgttgatgtcacatcaaatacagtatgggccttgctcaaggatcttatctatatgtaagggaagaaatcaatagtg

SEQ ID NO: 524706 - DNA, 201 bp, Homo sapiens
tcattttaatcatcctagaggatggaatgcagagatgttgatgaaaataacttacgtattattttgtaataaatatagaattcatatatgttgattactargtgttttatgcacattctgatagaagcttcacaacaatcccttgtagatatattattaggcctattttgtggatgagaaaacttgtccaaggtcccacta

SEQ ID NO: 524707 - DNA, 201 bp, Homo sapiens
tgctgaggacttgtggatatgaagcaaaatctttgtaatataacacaagtgttgatgtcacatcaaatacagtatgggccttgctcaaggatcttatctayatgtaagggaagaaatcaatagtgttactgggatttggcaaaaaaaacctcacacttacatacacgtgggcacacatttggttaatctgttccatgtttg

SEQ ID NO: 524708 - DNA, 201 bp, Homo sapiens
gcctggccaacatggtgaaaccttgtctctactaaaaatataaaaattagccaagcatggtggcgggcgcctgtaatcccagctacttgggaggctgaggsaggagaattgcttgaacccagaaggcagagattgtggtgaaccaagatcacgccacttcactccagcctgggtgacagagtaagactctgtctcaaaaaa

SEQ ID NO: 524709 - DNA, 201 bp, Homo sapiens
gtattatgtctgtatattgtacaacatagtaaaatatggaactgtgtcttggctgctttggtaggcattgggcagacatagataaaaggacagttttttgtttttttttttcaagtagcttggcacctagtgggagaagaggattagaaagtgatgttcatttaataacagatgaatctagttcagatggttttgtaagtg

SEQ ID NO: 524710 - DNA, 201 bp, Homo sapiens
agcagtggcacagctttgaactcctttgctcaagggatccttccactcagcctcccaagtagctgggactacacgcatgtaccactacatctagctaattaaaaaaaaaaaatttcgtagacatgctggtctcaaactttgggcctcagtgaacctcctgtcttggcctcccaaactgctgggattacagatgtgagccac

SEQ ID NO: 524711 - DNA, 201 bp, Homo sapiens
cctgttgtaaaacctgtgaagtcatgcataacctctggacacagttttctccagcaggaattgattgtcttgggcctgatggctttctctgtaaacagtgrtgacattttcaatggtataatccttccagacttgtgatgttctccttaacagagttctcttccatagtgctgacactcctttctatgaatataaagtaca

SEQ ID NO: 524712 - DNA, 201 bp, Homo sapiens
tcacaactcactgcagcctcaaactcctgggttcaagggatcctcctgtctcagccttatggtgtgcaccaccatgcctggttatgtttggttggctgggwgtttttggtagagatgaagtctcgctatgttgccctggctggtctcgaactcttggcctcaagctatcctcccacctcagcctcccaaagtactaggatt

SEQ ID NO: 524713 - DNA, 201 bp, Homo sapiens
gaggtgggaggattgcttgagccgggaaggtagagtttgcagtgcgctgagaccatgctactatgctccagcctgggcaacaaaacgagaccctgtctcaaaaaaaaaaaaaaagaaatcagaacattgtaggtataaaacatccatgagcctttacctcagaaaggtaaagttagatatgaagaaagttaaggaaaacat

SEQ ID NO: 524714 - DNA, 201 bp, Homo sapiens
attatattaatctagattaacagattattaataatttagcaaaaaatctacattaatctattaatatcaatgaatataaattcagagggtttttttgtatkaaattgtacagttttgtaaattgtacaatcccaacactttcgatggctgaggtaggcagatcacttgaggccagaagttcaagaccagcctggccaacat

SEQ ID NO: 524715 - DNA, 201 bp, Homo sapiens
attttgttgttcttgttttttgtgttgttcttgttttttgtttttttttgtttttgtttttgtttttttgagacagaatctcgctgtcacccaggcttgaktgcaatggcgcgatctcggcccactgcaatcgcctcccgggttcaagtgattctcgtgcctcagcctcctgagtagctgggattataggtgcccaccacc

SEQ ID NO: 524716 - DNA, 201 bp, Homo sapiens
tgcttggggtgatggataccccactcatcctgatgtgattagtacacatgatacatctttatcaaaatatttcatgtaaaccataaatacatatgtctacwatgtacccacaaaattaaataaaaataaaaattatagtaattattctctagtatttcaactgctaccttacttgctatttctgtgctacctttcatagta

SEQ ID NO: 524717 - DNA, 201 bp, Homo sapiens
tttttctgccccttacgctacttttgagaagaaaaagaaagatatgaaagcccagcatggtggctgacacctgtaatcccaacattatgggaggccaaggsgcgatcctcgcttgaggcctgaagtttgaaaccagtctgggcaacactgagatctcatctctacccccaaaaaaaaaaaaaaaaaaaaaaaaaaaaaaaa

SEQ ID NO: 524718 - DNA, 201 bp, Homo sapiens
taatcccaacattatgggaggccaaggcgcgatcctcgcttgaggcctgaagtttgaaaccagtctgggcaacactgagatctcatctctacccccaaaamaaaaaaaaaaaaaaaaaaaaaaaaaaaaaaattagctgggcatggtggtgtgtacctgtggtcctagctacttgggagactgaagcaggaagatcactta

SEQ ID NO: 524719 - DNA, 201 bp, Homo sapiens
tcccttttgttcacagatttttttttttttttttttttttttgagacggagtctcgctctgtcgcccaggctggagtgcagtgacgcgatctcggctcackgcaagctccgcctcccgggttcacgccattctcgtgcctcagcctcccgagcagctgggactgcgggcacccgccacggcgccaggcttatgttttgtat

SEQ ID NO: 524720 - DNA, 201 bp, Homo sapiens
ggaatgtatatgtatatatgtgtatgacatgttttgaaaaaaatgacaaatttttaagtaattttcttaggttcttttttttatttttcatgcagtgcctttattacttaagtcagaatttactattattatgttgttcttttggcttacttatggttttaatcagaattttagttgaatcattcaatctatatagatgga

SEQ ID NO: 524721 - DNA, 201 bp, Homo sapiens
gaatgtatatgtatatatgtgtatgacatgttttgaaaaaaatgacaaatttttaagtaattttcttaggttcttttttttatttttcatgcagtgcctttattacttaagtcagaatttactattattatgttgttcttttggcttacttatggttttaatcagaattttagttgaatcattcaatctatatagatggat

SEQ ID NO: 524722 - DNA, 201 bp, Homo sapiens
atgttcatcaatacttagagaattgtcagatttttaaatttttgccaatctggtcatttatagttgaatctcattttagcttgtatttccccgaagacttrtgcggtgtgcacttttccataagtatgattgaccatttggattctctcttttgaagtgtctagagttctttgcttgttttccatttggttgtttgctttt

SEQ ID NO: 524723 - DNA, 201 bp, Homo sapiens
atctaaactccctcccagcttgggaagcacatactaatggagaagaatttctgttctaattagaattgccaagggttaccagacctctccagatctgcgaytgacctggttgcagaacatggcaggcaagcactcagaacgaagcaatcatgctgaagctgcacagtgtctagtccactcagcagcacttgttgctgaata

SEQ ID NO: 524724 - DNA, 201 bp, Homo sapiens
aatgtatatgtatatatgtgtatgacatgttttgaaaaaaatgacaaatttttaagtaattttcttaggttcttttttttatttttcatgcagtgcctttattacttaagtcagaatttactattattatgttgttcttttggcttacttatggttttaatcagaattttagttgaatcattcaatctatatagatggatt

SEQ ID NO: 524725 - DNA, 201 bp, Homo sapiens
acctcccaaagtgctgggattacaggcgtgagccaccacgcccgaccaatttttttgtatttttagtagagatgagttgcactatgttggccaggctgatmttgaactcctggcctcaagtgatttacctgactcagcctcccaaagtgctgggattacaggcatgagccaccacatccagccagttttgtctatatttct

SEQ ID NO: 524726 - DNA, 201 bp, Homo sapiens
taaccgggacaccacacaaagtcttgtcattaacttggaattttctacaacgaaatcctagttctattatttaagcagataatttttttagatttctcctytgtataatgagatagaacttaaagaggtttttgtggagattaaatgacattacagatgtgaagttcttaggacagtgcctgacatttcactttatagtac

SEQ ID NO: 524727 - DNA, 201 bp, Homo sapiens
atactttctggtagttagtgactccctgatgactggtatagacccataactgagcacctgataatatatcccataccactgattttttttctgccccttaygctacttttgagaagaaaaagaaagatatgaaagcccagcatggtggctgacacctgtaatcccaacattatgggaggccaaggcgcgatcctcgcttga

SEQ ID NO: 524728 - DNA, 201 bp, Homo sapiens
taaagctgagtgacataaagtaacacatccaagcagttaaaagatagaacaggattagaaacagcaaattataatgagcagggcgatcaactctgaaagarggaaatgaaataaaaattcaagaatagagcatagtgaaaacaagtacttttgggtagtcaagtgggtaaatgtgacactctaaaggagaaagtaaaacag

SEQ ID NO: 524729 - DNA, 201 bp, Homo sapiens
aggcaaaattttagccactgggttttgaccaagcaatttatgaaattattgcaggtcttaagtaaatgaatatgctgtttaaaatatcctgctgtcttctrtttgtggagaagaatttatggtatatggtgcctttggccttttttgttctttcaaacagtttttttatgacttgcccttttttactttttattatacaga

SEQ ID NO: 524730 - DNA, 201 bp, Homo sapiens
aagagtattcctttacataaagaaaaattacctttaaatactatacttaatggtcttggtgattttttttaaaattgtgttatataataagataattttgrtgaactaatactctataggtgcctacaaattttggttgctttaacagtactaattaaaaacatgtttgcattagaagatctgaatttctttaagaataat

SEQ ID NO: 524731 - DNA, 201 bp, Homo sapiens
gttctatcagtaaacactgttttatttttctgttaaatatgcttgctcttacaaactactccactaaaaattctaaaatttgtctggaatcactagttgcrtataacttattgttgtcagtctgatactccatcatgtgaaaaatggctagattgatttcatatagaattaaaataaatctgtgactgatatgtagaagag

SEQ ID NO: 524732 - DNA, 201 bp, Homo sapiens
acttcttgagatagatgcttaactcactaattttcatcctttcttttttgatatgtattttcagcctatgcatttttctttgattgtttagttaaatgctrtttatatgtaacatttttttccctttttttaaattatactttaagttctgggatacatgtgcagaatgtgcaggtttgttacataggtatacacatgccg

SEQ ID NO: 524733 - DNA, 201 bp, Homo sapiens
caggtgtgaaccactgcacctggtcttcttaacaactgatttttgtaaattttattctagtagaaatgtattcaaatttcttgacttataaagttattcaraaataccttgtataattttttaaatgtctgtatcatctgtagtagatgtaaacttttttctacggctagatttttgtaccttttcttgtctttatcagtc

SEQ ID NO: 524734 - DNA, 201 bp, Homo sapiens
atttctttcctttcaaactgctttctattatatgcttagggtttagatcgctccaattcctgggttaacactggtggtccaaaagctgccccatggggatycaaccccagtccaagtgcagaatcaacacaggtggtgtttatattagaggtttctttattggctgctgatgtttccctttagaacattactttttagtat

SEQ ID NO: 524735 - DNA, 201 bp, Homo sapiens
gcatccacaccagtatccattttttttttttttgagtttttgattatggccattcttgcaggaataaggtggcaggtattgcattgtggttttgatttgcrtttccctgatcattagtgatgttgagcattttttcatatgttggccatttgtatgtcttcttttgggaattgtctgttcatgtccttagcccactttttg

SEQ ID NO: 524736 - DNA, 201 bp, Homo sapiens
ttggccatttgtatgtcttcttttgggaattgtctgttcatgtccttagcccactttttgacgaaattatttgtttttttcttgctaatttgtttgagttyattgtagattctggatattagtcctttgtcagaggcatagattgtgaagattttctcccactctgtgggttgtctgtttactctgctgactgttcctttt

SEQ ID NO: 524737 - DNA, 201 bp, Homo sapiens
gtaagcctaaatcattacttttaattattgatatgattgtacagaactcactaattctcctaattttgctcaggagtcaccctcaggccttctctatttcrcagtctttttaacttcatataaaatgtttctttttctttattgtagggattttacggagaaagatttggagaggatgtggttgaagtaatcaaagactct

SEQ ID NO: 524738 - DNA, 201 bp, Homo sapiens
ggatccagtttcattctcctgtatatggcttgccaattatcccagtatcatttgttgaatagggtgtcctttcctcactttatgtttttgtttgctttgtsgaagatcagttggctgtaagtatttgggtttatttctggcttctctattctgttccattggtctatgtgcctatttttataccagtatcatgctgttttg

SEQ ID NO: 524739 - DNA, 201 bp, Homo sapiens
gtaagtatttgggtttatttctggcttctctattctgttccattggtctatgtgcctatttttataccagtatcatgctgttttggtgactatggccttayagtatagtttaaaatcaggtaatgtgatgcctccagatttgttctttttgcttagtctcgctttggctatgtgggctctttttggttccatgtgaatttt

SEQ ID NO: 524740 - DNA, 201 bp, Homo sapiens
acaactataatcccagcactttgggaggccaagatgggaggactgcctgaagctaggagttccagaccagcctggtcaacatagcaagaccccatctcttaaaaaaaaaaaaaaaagaaaagaaaaagaaaaacatgagaactttcatgctttatacatttcttctgtgaggtagaaggcaagatttgctaaggaggaatt

SEQ ID NO: 524741 - DNA, 201 bp, Homo sapiens
tacattaattttgtatcctgaaactttgctgaatgtatttatcagttctagaagctttttggaggagtctttagggttttctaggtatacagtgatatcaycagcaaacagtgacagcttgacttcatctttaccgatttggatttgctttatttctttctcttgtctgattgctctggctaggacttccagtactatgtt

SEQ ID NO: 524742 - DNA, 201 bp, Homo sapiens
caactataatcccagcactttgggaggccaagatgggaggactgcctgaagctaggagttccagaccagcctggtcaacatagcaagaccccatctcttaaaaaaaaaaaaaaaagaaaagaaaaagaaaaacatgagaactttcatgctttatacatttcttctgtgaggtagaaggcaagatttgctaaggaggaatta

SEQ ID NO: 524743 - DNA, 201 bp, Homo sapiens
tttattagagacagggtttcaccatgctggccaggctggtctcgaactcccgacctcaggcgatctgcccacctcggcctcccaaagtgctggaattacargcgtgagccaccgtgcccggccttgatgcttttaatcatcaaggggtgctggattttgtcatttgctttttctgcatctgtggagataatcatgtgattt

SEQ ID NO: 524744 - DNA, 201 bp, Homo sapiens
gataggtgaatcgcttgaacctgggaggcggaggttgcagggagccgagatctcaccattgcactccagcctgtgagacaagagtgaaactctatttcagaaaaaaaaaaaaaaattactcccattataatcaaacctcagttcccttatctttcccaaaccttgaaaccatagttaaacccaattgactgcctgtgccat

SEQ ID NO: 524745 - DNA, 201 bp, Homo sapiens
ggtttcaccatgctggccaggctggtctcgaactcccgacctcaggcgatctgcccacctcggcctcccaaagtgctggaattacaggcgtgagccaccgygcccggccttgatgcttttaatcatcaaggggtgctggattttgtcatttgctttttctgcatctgtggagataatcatgtgatttttgtttttaattct

SEQ ID NO: 524746 - DNA, 201 bp, Homo sapiens
ttattactccagtggctgtaatgtaaatgtgaaaatatttgtgagacttcttcatacttatattgccaaaactagctgtgctttcttaattctagtaatcrtcttttaacattcagttatgtaaatacatggttacatcaggtctgaactttattgctttttatcaaatgccagtggaattttgcactgatacgtttcttt

SEQ ID NO: 524747 - DNA, 201 bp, Homo sapiens
gggaggccgaggtgggtggatcacctgaggtcaggagttcgagaccagcctggccaacatggcaaaaccccatctctactaaaaatacaagaaattagccrggcatggtggcatgtgcctgtaatcctagctactcgggaggctgaggcaggagactcccttggacccaggaggcaaacgttgcagcaagccgagatcgca

SEQ ID NO: 524748 - DNA, 201 bp, Homo sapiens
caatgatcacaccactgtattccagcctgggtgacagagtgagaccctgtctcaagaaaattaaataaataaataggcctggcatggtggctcacacctayaatctcagcactttgggaggctgagatgggtggatcacttgaggtcaggagtttgagaccagcctggccaacatagtaaaaccccatctctactaaaaat

SEQ ID NO: 524749 - DNA, 201 bp, Homo sapiens
attttgtatgttattcatattatatactgtgttcttagaataagctagcgaaaagaaaatgttattaagaaaattataaggaagttaaaatatatttgctyttcattaattggaagtggatcatcataaatgtctccatcctcattgtcttcacattgaataggctgaagaggaggggttggttttgctgtctcaggagtg

SEQ ID NO: 524750 - DNA, 201 bp, Homo sapiens
gaatgttacctatattatgggtaagaaaacatttcttctagagatttaataatctacagaaaaaataaatcagggactatatataagtgacaattcatttwtttcctagaaaataaaccttaaattcgtaattcatgtacatctctgcttctcctgtaaggtaaaaattgtaattttcaccgttttttagtagtcttacat

SEQ ID NO: 524751 - DNA, 201 bp, Homo sapiens
gccgggcatggtggcatgtgcctgtaatcctagctactcgggaggctgaggcaggagactcccttggacccaggaggcaaacgttgcagcaagccgagatsgcaccactgtgctccagactgggtgacagagcgagactccggctcaaaaaaaaagaaaatggcttttattactaaaaacagtaagcacttttccatgtgt

SEQ ID NO: 524752 - DNA, 201 bp, Homo sapiens
tctaaactgaatgcacttgttttattcatctgcaaagagccatgtattcaacatcgagtgtgaaaagatctattggaaaacaacatggaatggaattctgkaaattattattcattgaagaatgcagtggccaagaaaatatcaaatgtagattgttaacgcttgagaatcatggctatggtttctaatgttctggtaaca

SEQ ID NO: 524753 - DNA, 201 bp, Homo sapiens
aggctggagtataatggcaagatctcggctcactgcaacctccgcctcctgggttcaagcgattctcctacctcagcctcccaagtagctgggattacagrcatgtgccaccacgcctggcaaattttgtatttttagtagagatgctgtttctccatcttggtcaggctggtctcgaactcctgacctcaggtgatccgc

SEQ ID NO: 524754 - DNA, 201 bp, Homo sapiens
cctcctgccccccccaccaactgatattatccattccataggccacagttatttctctaggcctgcatagcgacattttcatactactttaaaactaagtrggttgtgcacagtatcaaaaacctttctaggtaaactctgagcgagctatctaaactccctcccagcttgggaagcacatactaatggagaagaatttct

SEQ ID NO: 524755 - DNA, 201 bp, Homo sapiens
aatgatatttctaagggcacattttgaaaactccataaatcgtattgtattaacaccttaatagatacaatagtaaaacttaagaatttttctctgtcatrtgaccctctgttcctgcagttttggggttcattaaaagcacaaataaaacaatttaatctctttgaaataaagtaataaaagtaccttttagaagttttc

SEQ ID NO: 524756 - DNA, 201 bp, Homo sapiens
gggtttctccattttggtccggctgatctcgaactcctgacttcaggtgatccacccgcctcagcctcctgaagtgctgggatacaggcgtgagccactgygcccggcctgtttgtttttttgtttgtttgttttgtttttgttttttaattggcatggtgggacatacctaaaatggaaatttaggggaacatgccataa

SEQ ID NO: 524757 - DNA, 201 bp, Homo sapiens
gaaaccagcccgctcaatgtaacaagagcgtcatctctacaaaaaatgaaaaaattagctgggcatggtggtgagcacctgtagtcctagctacttaggargctggggtgggaggattgcttgagaccaggagttcaaggctgtagtgagctatgatcacaccactgcactccaacctaaacaatagaacaagaccctgtc

SEQ ID NO: 524758 - DNA, 201 bp, Homo sapiens
attgtttaaatatactcctacgaacttactgggaaattcaaggaccatatgtttttctttgggaaaatatgtttgctgatctgtgaaccgatgaggactcrgtggcttttggaaaacatctctctcttctcttactacagcaccaatccattattaaagataaaggctgggtcaagcccagtgcctcacacctgtcattcc

SEQ ID NO: 524759 - DNA, 201 bp, Homo sapiens
tgggtattgttttaaagaaaagatactgcatatagcaagtacatttcttctgaaattattgtgaaaatttttaataaaaagcaccattgtcaggtttttcmacttgtactgaggataaaatggcttgtacaaattattgttgtatatttcttacatgattgcaagtatacatatatgtggtccaactgaaataacatttga

SEQ ID NO: 524760 - DNA, 201 bp, Homo sapiens
aacctacagatgttgaacatctttttgtgtgcttattggcacattgttttgtatatctcctttggagaaaagtctattcaaatcttttgtcattggtcagrcacagtggcacacacctgtaattccagaaatttaggagactgaggtgggaggattgcttgagctcaggagtttgagaccagcctgggggacatgacaaaa

SEQ ID NO: 524761 - DNA, 201 bp, Homo sapiens
atattaactgtcttctcccaaacagttttaaaaaatgattacctcaaggtttatgggaaaaggccccgtattctgtcattcagaatttggaaaattgcctyattatagatagttcatttctttttttttttttttttatactttaagttttagggtacatgtgcacaacatgcaggttagttacatatgtatacatgtgcc

SEQ ID NO: 524762 - DNA, 201 bp, Homo sapiens
tatacttaatggtcttggtgattttttttaaaattgtgttatataataagataattttgatgaactaatactctataggtgcctacaaattttggttgctwtaacagtactaattaaaaacatgtttgcattagaagatctgaatttctttaagaataatttatagcatgcaacatgtaatatttctttcctttcaaactg

SEQ ID NO: 524763 - DNA, 201 bp, Homo sapiens
ctgggggtttgggaggatcagtgcattatgccacaatggctagatctgcggtgagacctgcaagccttaatttaaatcgttctcgaagccttagtaatagyaatccagatatatctgggactcccacgtcaccagatgatgaagttcgatcaatcatcgggagtaaggtaaactgaagacatgcatctgtaaatttggttt

SEQ ID NO: 524764 - DNA, 201 bp, Homo sapiens
atttactatcttgttattttcttcctaatcaccgaatagaaagactggcaataagttgaaattgaatgtgaacagtatatgatccccgtgctataagactsaataccagaagcaaaaatccattttaatttgtactgtgttgcaaagtatgaaatttgttataccttagctgaattaggttttgcttacttaagactagtt

SEQ ID NO: 524765 - DNA, 201 bp, Homo sapiens
ttttttcttatagtctccattaggttttggtatcccagccttgaaatatgagttgggaactcccctcaagaatagttcttttcccctatactctggaatcytttttttttttttttttttttttgagacgagtcttgctctgtcacccaggctggagtgtagtggcgaaatctctgctcactgcaagctccgcctcccagg

SEQ ID NO: 524766 - DNA, 201 bp, Homo sapiens
tgtataatgagatagaacttaaagaggtttttgtggagattaaatgacattacagatgtgaagttcttaggacagtgcctgacatttcactttatagtacyggaattctggaaaggacacaataactgcagaaagtaaactttcttgcattttgaaatcgaatttacatacaagtattgaagatggtttcctctcaaaatt

SEQ ID NO: 524767 - DNA, 201 bp, Homo sapiens
aataaactaccctgggaaaaagtatttcatttcttatattgctctgtctgtaggatgctttgttgcactgctgttatagtcttgttctgcctcactttccracagagttctggattttctacgaatgtacaagaccaaaagattgcaaatatgtttgaattatccgtgcctttccgccaacagcattatttggcaggactt

SEQ ID NO: 524768 - DNA, 201 bp, Homo sapiens
ttggaggactaaatcaaataatgtatgtaaaatgtttagtatgatgactgaaacagagtgtatgtccaataagtggtactgtaaatgtgtttttatttttycatttctgttttacatactatatactaatatagattgatgattgaaaatagcatttcaaccttatatgctataagtagaaatagctttttacttctatat

SEQ ID NO: 524769 - DNA, 201 bp, Homo sapiens
gggcctgaaattaatagccaatcttaaatatggggcttctcttgttttctcttcacttggttctgtttttataaaaaactcaatttataaagaattcaatrtataagcaattcaacccactgaaattattttatgatgaatggaaaagaaggtatgtgtttgttcaactgctttaaatgtttacttcttatatttgttttc

SEQ ID NO: 524770 - DNA, 201 bp, Homo sapiens
atggcaagtgccttttatcagcttttggcaatgttgacattgataacggtgactaataattgtgacgttcgttatgaacactagacataatagtaacctgwttttaaattttagcccaatttatttctttacttaattgcaaaaagaaaagcaattgacatttatattctggtttataatttcctatgttaatttttaaaa

SEQ ID NO: 524771 - DNA, 201 bp, Homo sapiens
tgttttggctgggattttgctattgcaggcacatcttgcctaactgcctaaactttctggatgatccatctctgtccaattttaccagatttttagctcattttttttttttcagaacagttttacaacttcaagatgggtttcttgtgtatttatttatttattttttagagacagggtcttgctctgttacccaggctg

SEQ ID NO: 524772 - DNA, 201 bp, Homo sapiens
gaagttcttagcatgccctttctcaaccacagcaacccaccaaactctcagtgtcctgattgatgatataattgcataattttgtttagagttttaccatmtaggccaggcatggtggctcacgcctgtaatcccagcactttgggaggccaaggtgggcagatcacttgaagtcaggagttcgagaccaacctggccaac

SEQ ID NO: 524773 - DNA, 201 bp, Homo sapiens
tttctcaaccacagcaacccaccaaactctcagtgtcctgattgatgatataattgcataattttgtttagagttttaccatctaggccaggcatggtggytcacgcctgtaatcccagcactttgggaggccaaggtgggcagatcacttgaagtcaggagttcgagaccaacctggccaacatggtaaaacctgatctc

SEQ ID NO: 524774 - DNA, 201 bp, Homo sapiens
agtttctacaaactaccttttagtaaaatcagaaatataggagagaattttccttttgtattcttgtatttcccatatccctctgttttatttctacttayagttctgcttgtttccaggtgaaagaacaaaaataaacatagtctgctgaggaatttatataaagtttactacccttcacttaccatatccccacatacc

SEQ ID NO: 524775 - DNA, 201 bp, Homo sapiens
ttctgtaatgaacacataaatttccatactttttcccttaactggttattttcttaaaagtcagaatttaatatggcgtatttcttttttgcccctcctgccccccccaccaactgatattatccattccataggccacagttatttctctaggcctgcatagcgacattttcatactactttaaaactaagtgggttgtg

SEQ ID NO: 524776 - DNA, 201 bp, Homo sapiens
ctatgtacatcctcctgtatactttaaatcattttagactacttaaaatacctaatatataatgtaaatagttgttaatattgtattgtttaggaaataawgacaagaaaaaagtctgtacatgttcaacacagtttttttaattattatttcaatccatggttggtctaattcatgcatgcagaacccacagatagggag

SEQ ID NO: 524777 - DNA, 201 bp, Homo sapiens
ccccagtgttccagtggtttggctcactgcggcctcaaactcctgggctcaagatatcttcccacctcagcctcctgggtagctgggaatacaggggcacrggggcacaccatcacacctggctaattgttgtattttttgtagggatggggtttcactttgttgcccaagatagtctcaaactcctgacctcaagttata

SEQ ID NO: 524778 - DNA, 201 bp, Homo sapiens
tcgcaaaatggatctctaaactgaatgcacttgttttattcatctgcaaagagccatgtattcaacatcgagtgtgaaaagatctattggaaaacaacatkgaatggaattctggaaattattattcattgaagaatgcagtggccaagaaaatatcaaatgtagattgttaacgcttgagaatcatggctatggtttcta

SEQ ID NO: 524779 - DNA, 201 bp, Homo sapiens
attaggtagttattggaggcctgggccttactctttagttttatgaactgcatcctgaatcctttacctgactatgctgtcatgctataaccccaatcttsttcccttccatccgtatgtgaagaattaaagcagtcagatgaaacccagatgggatgtttattggagaaagaaaagatagttagctgaattcatgcttac

SEQ ID NO: 524780 - DNA, 201 bp, Homo sapiens
cattttcagagctatgtacatatttgcgaacctctactatgttagattctccctgatgttaccttccccagatctcctttacaataagttgtgaggattamataagtgatatggaatcatttttttaatttgaaaaatatattgacacaagaaattattgttcttttgtcatatgcagattagaagccatccccattagtc

SEQ ID NO: 524781 - DNA, 201 bp, Homo sapiens
ctcagctcactgcacactccgcctcccatgttcacgccattctcctgcctcagcctcctgagtagctgggactacaggcacccgccaccacgcccggccartgttttgtatttttagtagagacggggtttcaccgtgctagccagggtggtctcgatctcctgacattgtgatccacccgcctcggcctcccaaagtgct

SEQ ID NO: 524782 - DNA, 201 bp, Homo sapiens
tatcaaaaacgaggatttttttaagtattcataacacacatttaacaccttggtgtcctgggccccagagttcctttgaaggcccataccaatattttcartgtaaaactcagtcttttcagaagaaaatacagtatatgaatgttttacgataacattaattacctgattttcaatacagttatgactgaagaatgatat

SEQ ID NO: 524783 - DNA, 201 bp, Homo sapiens
catgttgctcaggttgatctcaaactcctggccccaagcaatccacctgcctcagcctcccaaagtgctaggattataggaataagccaccatgcccagcytaaaagcatgttttgaactcttctttttttatgattcatatttaattatttttagcagaaagagaaatgttaaatttctgtatgaaaatttttataacca

SEQ ID NO: 524784 - DNA, 201 bp, Homo sapiens
aacaacatttcctgatcaggtcagaaatgctgctttctagatcattaattgaaataggcttgttaaataggcactttccaaattgttaaatcaaaagttgrtttttgctggaggatcatttatttcattttcaatccacacatcatgtgccatagataggactgaatctctttgttttattaagctacccttctttttgga

SEQ ID NO: 524785 - DNA, 201 bp, Homo sapiens
atctaccatttaagaattttataatgtcagtcaagctatttaacctcatctgtaaaatgttatattaataacatatgcccataataaataaatgtaaagasataagcagaatttctaattcaacccttaacacatgacttcttaaaatcctgttttgtagcacattattcacaacaaaattctaagttttacaacctttct

SEQ ID NO: 524786 - DNA, 201 bp, Homo sapiens
cattaaacccacaaactatgccagaagtaatatcttgataacatcctgtttttcctaggtgtgaagatgccttaagaaaaaataagagcttaattgggccrgatcaaaaggagtatcaaagggaactggagagaaactatcatcgccttaaagaggccctacagccactgatcaacagaaagatccctcagttatacaagg

SEQ ID NO: 524787 - DNA, 201 bp, Homo sapiens
cgtggaatttacagtctaaaaaaagttaaagcaaaggtaaatacttcttctttcttaaaagttaacctaggtcaagcatcttttgaagccatggcatcaaytataaatcgacttcacaaaaacttggaaggaaatcatgaccagcatggcagaaacagccttcttgcatcatatattcattatgttttccgcctaccaaat

SEQ ID NO: 524788 - DNA, 201 bp, Homo sapiens
gagagtttcgtgggaaaaaatgtaaatgatagaatattatagttaattttgctaactatcttaatataggcatatctttttgtttttttccataaatttcytaaagacatggatttcagaatttaaaaaagagaaagagataaggaaagaaaggaaagaaaagggaaagaaattagaagaaatagagccatgtcctttatt

SEQ ID NO: 524789 - DNA, 201 bp, Homo sapiens
cgtttctgagaaacttttagccatttgtgtcgttggcatttgagcagagttgcagtttgtattttaatttatcctggatacttggtgaagtgcagctcacyttagttagagatcttacttaaacatgtaaatggaacaagctgctggctctctttccctaaaatttgtactttcacttaaagtttttaaaaggcaaaattt

SEQ ID NO: 524790 - DNA, 201 bp, Homo sapiens
cagggtttcaccatgttggccaggctggtcttgaactcctgacctcaggtgatccacccatctcagcctcccaaagtgccatgattacaggcgtgagccaycgcactcggctgccaacaagtattcttaaacctcagccacaagttatttgttatttatttacttcttacctaattgggctgaattttttttttggagacg

SEQ ID NO: 524791 - DNA, 201 bp, Homo sapiens
  misc_feature (1)...(201): n = A,T,C or G
tttctcccccgatgagtccaatccatgactgcctttaactctgtggcttccttcccctagaggaaagccagaaattgtgggaagcaatttagacacactgntgagcatagggctggatgagaagtttccacaggactacaggctggcccagcaggtgtgccatgccattgccaacatctcggacaggagaaaggtatgtgg

SEQ ID NO: 524792 - DNA, 201 bp, Homo sapiens
gaaggagctaaatggacgctaaataaagagagtgtttcaaaaacaaaagagaggtcaactgcagattaactactggatttattgatgtcatagtcactggyaaccttgacaaagctgtttcaggagatggtgggggcaaaagcctgctaggaataggtttttaagaaaatggaatgacagagattagagatgatgaattta

SEQ ID NO: 524793 - DNA, 201 bp, Homo sapiens
tatcccgccactcccaggagcttccagctatcctggatgatacaactttgagtggatcagatagaaacgcccatctaaatgccctcaaaatgaactgttaygctctgatacgtctcctggaatcctttgagaccatggccagccagacaaaccttgtggacctggaccttggtgggaaggtaatttggagttttgggctca

SEQ ID NO: 524794 - DNA, 201 bp, Homo sapiens
taaatatccaggaatgttgacagctgttggattcccctgtatccccttgaacgaaaccatcctgtacttctctaactccttaggcccagcagcttccacayaagaaaagaatccccgggagtctacaggaaacatggtcacaggacagactgtctgtaaaaataaacccaatatgtcggatcctgaggaatccaggggaaa

SEQ ID NO: 524795 - DNA, 201 bp, Homo sapiens
agaaggggctctgcaggctccttcctgtctcacccccacactttctttccctcatagtcactttcgaagtatagatcctggcctcaaagaagatactctgsaattcctgataaaaggtgtttatgggtcagggggtaggggatggaaggtgtttgttatcgtttgtttgtttgtctgtttgtttgtttttcctacattttg

SEQ ID NO: 524796 - DNA, 201 bp, Homo sapiens
gtttatgggtcagggggtaggggatggaaggtgtttgttatcgtttgtttgtttgtctgtttgtttgtttttcctacattttgtcagccacatgatgataycaaggctgttgtgattcagttggtttggctaagcccagggacctttggcctgttaaaggtctgtaatcttggtgggcgatacagagttatgtgtgttcac

SEQ ID NO: 524797 - DNA, 201 bp, Homo sapiens
tgaagcaatttggcttttcttgtaatgtcatgactcttttctgcttcttgggaacacttccagcatcactagtggcacttcattatgggtcccatggtgtyatgtaaggtttatgatactgctttagacacatgaaaaatacctgaggaaccacaggagatcacttcttgctgccatatgcaatttttgttttgagacaga

SEQ ID NO: 524798 - DNA, 201 bp, Homo sapiens
tccccttccggcaatctctgctcctctgctattacatgaagcgaagagtttctgcctctctgtggctactaccgtaggaaaggttcgtgtgaacaatgacraaactgtcagtgatcacccaggaaggaaagatttaggtaaatgcagagtgtggagttagagacctcagcataaaacagaggctttgtgtctgaggcaggg

SEQ ID NO: 524799 - DNA, 201 bp, Homo sapiens
gtgagcatagggctggatgagaagtttccacaggactacaggctggcccagcaggtgtgccatgccattgccaacatctcggacaggagaaaggtatgtgrgggtggttccaaactaaggagagtggagattctcgtgtccaccctgtacacacacccacgttgtcttgctctccacagccttctctgggcaaacgtcacc

SEQ ID NO: 524800 - DNA, 201 bp, Homo sapiens; identical to SEQ ID NO: 239771

SEQ ID NO: 524801 - DNA, 201 bp, Homo sapiens
gcttaggaatcagacacacctgtatttgaattccacctcggctactctttagctgtacagccttcggcaataacttagcctctctttgtgcctatttcctyttcttttgaggctgatgatacttaacccttagttcttgaaaatattaaatacgataaagttcctaacatggtggcagacatacagtagcactcactccct

SEQ ID NO: 524802 - DNA, 201 bp, Homo sapiens; identical to SEQ ID NO: 239773

SEQ ID NO: 524803 - DNA, 201 bp, Homo sapiens
tcacttgaacctgggagccggaggttgtagtgagccgagatcgtgccactgcacttcagcctgggtgacagagcgagactccatctattttttttttttttaaaaaaagatggtgaaaccccgtctctactaaaaaatagaaaaattagctaggtgtggtggcaggcacctgtaatcccagctactcgggaggctgaggca

SEQ ID NO: 524804 - DNA, 201 bp, Homo sapiens; identical to SEQ ID NO: 239775

SEQ ID NO: 524805 - DNA, 201 bp, Homo sapiens
agtagagcttttacaggaatgctgatggattggattggattatagggttagtaaaggaatctgagatgagaatgattacaaggctttttttttttttttttgacagtcttgctctgttggctctgtcacccaggttggcgtgcagtggcgtgatcttggctcgctgcaacctctgcctcccaggttcaagcaattctcatg

SEQ ID NO: 524806 - DNA, 201 bp, Homo sapiens
cgtggcagagaacatcagagaagacgagtgctgggggagggtccagggttggtcttagtggatggcagagctggccctgggccatcgaacatcctcatctycccttcctgcagacagctcctctcctacatcaccaaggacaagcagacagagagcctggtggaaaagctgtgtcagcggttccgcacatcccggtatgct

SEQ ID NO: 524807 - DNA, 201 bp, Homo sapiens; identical to SEQ ID NO: 239776

SEQ ID NO: 524808 - DNA, 201 bp, Homo sapiens
agcttcactcttgtcgcccaggctggagcgcagtggttcaatctcggctcactgcagcctctacctcctgggttcaagcaattttcctgcctcagcctccygagtagctgggattacaggtgcccgccaccacaagctgatttttgtatttttaatagagacgggttttgccatgttggccaggctggtcttgaactccta

SEQ ID NO: 524809 - DNA, 201 bp, Homo sapiens
agagacgggttttgccatgttggccaggctggtcttgaactcctaacctcaggtgatctccctgctttggccccccaaagtgctgggattacaggtgtgarccaccacgcccagccagaagtctatttttaaaataagtaaaataagtttgatggaagaaggttgtgattttaaatcagctactctaggcccggtgcggtg

SEQ ID NO: 524810 - DNA, 201 bp, Homo sapiens
cacaagctgatttttgtatttttaatagagacgggttttgccatgttggccaggctggtcttgaactcctaacctcaggtgatctccctgctttggccccscaaagtgctgggattacaggtgtgagccaccacgcccagccagaagtctatttttaaaataagtaaaataagtttgatggaagaaggttgtgattttaaa

SEQ ID NO: 524811 - DNA, 201 bp, Homo sapiens
ccccacactttctttccctcatagtcactttcgaagtatagatcctggcctcaaagaagatactctggaattcctgataaaaggtgtttatgggtcagggrgtaggggatggaaggtgtttgttatcgtttgtttgtttgtctgtttgtttgtttttcctacattttgtcagccacatgatgatatcaaggctgttgtgat

SEQ ID NO: 524812 - DNA, 201 bp, Homo sapiens
aaagcaaagcaacttgttatagaaagtaatggctagaataaagaaaaccctgactttgggagcagtagggatagaatgaatgaggcagggctctgatacarttggatccagacagctgctttcatcatctcaaactcttcctttctcagtttggttactggctgttgctaccgccttctggagaatcccaccattaatcac

SEQ ID NO: 524813 - DNA, 201 bp, Homo sapiens
ctaccaggctcaagcagtcctcccacctcagcctcccaagtagctgggaccacagacatgtaccaaagtgctgggattgtaggcatgaggcaccatgctcrgccagacttttttgttaaaaactaaaacacctacacacattagcctaggcctacacagggtcaaggtcaccaagaagtcactagacgatgggaatttttc

SEQ ID NO: 524814 - DNA, 201 bp, Homo sapiens
tgtatatactatggttttttccctctacctgcctacctatggtaatgtttaatttacaaattagatacagtaagagattaacaacaattctttttttttttgagacggagtcttgctctgtcaccgggctggagtgcagtgctgtgatctcagctcactgcaacctccgcctcccaggttcaagagattcccctgcctcag

SEQ ID NO: 524815 - DNA, 201 bp, Homo sapiens
agccgcctgtcagaccccgagctgggggtggaggaagagcctttccacaccatcatgaagtattgctccccgggccctggggcacattttccacatagcaygggcttaggaatcagacacacctgtatttgaattccacctcggctactctttagctgtacagccttcggcaataacttagcctctctttgtgcctatttc

SEQ ID NO: 524816 - DNA, 201 bp, Homo sapiens
cagctactcagaaggctggggcaggaggatcgcttgaacccagaagtttgaggctgcagtaagctatgatcctgcactgcacttcggcctgcgcaacacarcaaaccctgtctcaaaaaaaattgtttacaaaggtgtttttgttgttgttgttgttgttgttgctttttttttgagacggagtctcactctgtcacccag

SEQ ID NO: 524817 - DNA, 201 bp, Homo sapiens
tttttttttgtggggggacagagcttcactcttgtcgcccaggctggagcgcagtggttcaatctcggctcactgcagcctctacctcctgggttcaagcrattttcctgcctcagcctcccgagtagctgggattacaggtgcccgccaccacaagctgatttttgtatttttaatagagacgggttttgccatgttggc

SEQ ID NO: 524818 - DNA, 201 bp, Homo sapiens
acgttgaatatatagatctggagttcaggagagaggtctgagctagagataacacatttgggaatataatagtattcagagccgtgagactgaatgaaatyaccaaatcagtaagtgtagctaaaagagcaggaatccaaggactggtaccctagggcactccagcattaagagtgaggatgccgggtgcatggctcacgc

SEQ ID NO: 524819 - DNA, 201 bp, Homo sapiens
taggaagtctgttcctgtcctccctgtgcagggtatcctgtagggtgacctggaattcgaattctgtttcccttgtaaaatatttgtctgtctcttttttwaaaaaaaaaaaaaggccgggcactgtggctcacgcctgtaatcccagcactttgcgataccaaggcgggtggataacctgaggtagggagttcgagacca

SEQ ID NO: 524820 - DNA, 201 bp, Homo sapiens
aggaagtctgttcctgtcctccctgtgcagggtatcctgtagggtgacctggaattcgaattctgtttcccttgtaaaatatttgtctgtctctttttttwaaaaaaaaaaaaggccgggcactgtggctcacgcctgtaatcccagcactttgcgataccaaggcgggtggataacctgaggtagggagttcgagaccag

SEQ ID NO: 524821 - DNA, 201 bp, Homo sapiens
tgcctctggatattgatatctctgatgagcatgtacccagcttgccaccgtatttattcagttgaacaatttcacgtgtatttttaaacattcgattccaygggttagatctgatctgttagaaggggctctgcaggctccttcctgtctcacccccacactttctttccctcatagtcactttcgaagtatagatcctgg

SEQ ID NO: 524822 - DNA, 201 bp, Homo sapiens
catagtctctaaaattaattatacaaagcttaaaaataaataatataaagaagaagatagtaggacctgtcatttcatgttggatcatcagagaaggcttkctgttacgtcacgtttgagcagagaccttaagaaagtaaggaaataaactatgcagattgttagggaagagcattccaagcaaacagaaaagcctatgca

SEQ ID NO: 524823 - DNA, 201 bp, Homo sapiens
ttgcagtaagtgaaacacccaactggtactttaaaaagaactggtgactgtttgtcctaactgtgcatgttagtcctgaaattccaagttataggttcacygataaatgcctctggatattgatatctctgatgagcatgtacccagcttgccaccgtatttattcagttgaacaatttcacgtgtatttttaaacattcg

SEQ ID NO: 524824 - DNA, 201 bp, Homo sapiens
gtaagtagacttggtccaccaaaagagaaggaattaaatggaaacagggatgaaattatgtcatttactgaccctgctattcattttacctgatagcttastgatgctgaccttgccggaccactgcagaaggagacccagaaattacaagagatgagggcccagaggcgaactgcagcagcttgtaagtagttactgcct

SEQ ID NO: 524825 - DNA, 201 bp, Homo sapiens
gtctagtaagagcaactcagctttgattttttttttttcttggaggtaggatctggctctgtcacccatgctggagcatgatcatagctcattgcagcctygatctcctgggctcaagcaatcctcccacctcagcctcccaagtagctgggacttcaggcacatactaccatgcctggctaatttttttagtttttgtag

SEQ ID NO: 524826 - DNA, 201 bp, Homo sapiens
gaaaagtggaggggtgaatcagtatgttgtgcaagaggtactgtccatcaaacatcttccaccacagcttagaggtaagagtccatagctgtcactgtacytagctctttcaaaggaccatctcacatggaattgctacattgtcatttctgttccactacaccaggaagcatcataagagcaagaaacatgtttttccta

SEQ ID NO: 524827 - DNA, 201 bp, Homo sapiens
aaatatctgccccaaagaggtctagaattcacatttttattatcagtagtaaaagtcttcctctaccaaggacgaggatatctggctccctttaaggactstaatgtgtcttaccactacaaggagtactcctaatctatattctgtagaaagggtttttagagtgagtgggtagctcagtttagagtatacttaaagatc

SEQ ID NO: 524828 - DNA, 201 bp, Homo sapiens
gttgaaaagtggaggggtgaatcagtatgttgtgcaagaggtactgtccatcaaacatcttccaccacagcttagaggtaagagtccatagctgtcactgkacttagctctttcaaaggaccatctcacatggaattgctacattgtcatttctgttccactacaccaggaagcatcataagagcaagaaacatgtttttc

SEQ ID NO: 524829 - DNA, 201 bp, Homo sapiens; identical to SEQ ID NO: 239774

SEQ ID NO: 524830 - DNA, 201 bp, Homo sapiens; identical to SEQ ID NO: 239772

SEQ ID NO: 524831 - DNA, 201 bp, Homo sapiens
aacctcctcagttcaagcaattctcctgcctcagcctcctgagcagctgggattacaggcgcatgccaccacacctggcttttttttttttttttttttgkatttttattagagacggggtttcaccatgttggtcaggctggtctcgaactcctgacctgatgatccacctgcctcagcctacaaagtgttgggattaca

SEQ ID NO: 524832 - DNA, 201 bp, Homo sapiens
cacttgaacctgggagccggaggttgtagtgagccgagatcgtgccactgcacttcagcctgggtgacagagcgagactccatctattttttttttttttwaaaaaagatggtgaaaccccgtctctactaaaaaatagaaaaattagctaggtgtggtggcaggcacctgtaatcccagctactcgggaggctgaggcac

SEQ ID NO: 524833 - DNA, 201 bp, Homo sapiens
aatccaggggaaatgatgaactagtgaagcaggagatgctggtacagtatctgcaggatgcctacagcttctcccggaagattacagaggccattggcatmatcagcaagatgatgtatgaaaacacaactacaggtatgccagagtccctttctataaggacagccttggggttcttttggattttttaattttttaaat

SEQ ID NO: 524834 - DNA, 201 bp, Homo sapiens
tctactaaaaaatagaaaaattagctaggtgtggtggcaggcacctgtaatcccagctactcgggaggctgaggcactgaattgcttgaacccaggaggcrgaggttgcagtgagctaacatcatgccactgcactccagcctgggcgacagagcgagactccgtctcaaaaatatgtatatatatttgtgagggtggagc

SEQ ID NO: 524835 - DNA, 201 bp, Homo sapiens
aaagaaaaaattccagtatatttactgaaaaaaattagcatattagtggacctacacaattcaaatcgtattgttcgaagattaattgtagacatacatakgtgccttacttttctccagtgagagggcctaaaggcagtaatactctaatagaaatgagtgcaagtaatgcctagaatttggcttctacataccattatt

SEQ ID NO: 524836 - DNA, 201 bp, Homo sapiens
acgtcacccccccttccggctgcctcaggaacacaggttgtttgagcgactgcgggagacagtcacaaaaggtgagctctcagggaaggccttgggcagawttgggccctttgttgcagtaaacaacttctccctcctcctctgcaggctttgtccacccagacccactctggatcccattcaaagaggtggcagtgaccc

SEQ ID NO: 524837 - DNA, 201 bp, Homo sapiens
gccttacttttctccagtgagagggcctaaaggcagtaatactctaatagaaatgagtgcaagtaatgcctagaatttggcttctacataccattattccrtaatagccaggattccaccaagaatggttgattacaggactgggccagggaaaatacaagatgagcccagaacatcttttattttatttatttatttatt

SEQ ID NO: 524838 - DNA, 201 bp, Homo sapiens; identical to SEQ ID NO: 239778

SEQ ID NO: 524839 - DNA, 201 bp, Homo sapiens
tttgagaccatggccagccagacaaaccttgtggacctggaccttggtgggaaggtaatttggagttttgggctcacgttatatggggtctggggagatasgggaatagatggaaaagaagggaatccaatgatccacaaatcctttctgtcctcattgagaatttaggagaaagaactcaaaagtgtcacacgttttctt

SEQ ID NO: 524840 - DNA, 201 bp, Homo sapiens
caggagaatcgcctgaacccagaggcggaggttgtagtgagccgaaatcacaccattgcactccagcttgggcaacaatagcgaacctccatctcaaattwaaaaaaaaatgcctacacgctctttaaaatgcaaggctttctcttaaattagcctaactgaactgcgttgagctgcttcaactttggaatatatgtttgc

SEQ ID NO: 524841 - DNA, 201 bp, Homo sapiens
aggccagagagctgacagctgagagcaggtacgagggttaggccgtgaggccatgggagcagtggggagccagaccgcaggttcttgtgggccatcatggkgactttggcatttcctcagaatgaagtggagccactggggagccacaagcagggaggtgaggtgacctgacttgtacttcaacagggccatcctagctgt

SEQ ID NO: 524842 - DNA, 201 bp, Homo sapiens
tacgagcaatagcaaggaggccagagagctgacagctgagagcaggtacgagggttaggccgtgaggccatgggagcagtggggagccagaccgcaggttyttgtgggccatcatggtgactttggcatttcctcagaatgaagtggagccactggggagccacaagcagggaggtgaggtgacctgacttgtacttcaac

SEQ ID NO: 524843 - DNA, 201 bp, Homo sapiens
ttttccttaaggtagagcttacaggatttgctaacagactgggtgtgaggtgggagggagagttcagtcaaggatgactctcccgggttttggtctgagcrtttggaagactggagttaatggtaactgagatagggagaaggctgtgaataggtgttttgggaggaagatcagatgttctgttttggacatacaaagttt

SEQ ID NO: 524844 - DNA, 201 bp, Homo sapiens; identical to SEQ ID NO: 239783

SEQ ID NO: 524845 - DNA, 201 bp, Homo sapiens
ggagtcttgctctgtcaccgggctggagtgcagtgctgtgatctcagctcactgcaacctccgcctcccaggttcaagagattcccctgcctcagcctccygagtagccggaactacaggcgtgagccaccgcacccagctaattttttgtattttagtagagacgggtttcaccatgttggccaggatggtctcgatctc

SEQ ID NO: 524846 - DNA, 201 bp, Homo sapiens
tacagcgtgctaagtgttgttctgactggtttgcatggactatctcattcagttttgacatatatatatacatatatatatatatatatatatatacacayatatatataccattggtccttgaacaacgtgggggttagggatgacaacccctgtgcagtcaaaaatctgcatatgtaagttttgactgccccaaaactt

SEQ ID NO: 524847 - DNA, 201 bp, Homo sapiens
tctgtttgcttcctctagccacttacagcttatacattttaatgcatatagtatttcatgataaggcatcataggaggagtcgacattctcagggaaaatrcggaaggcctccatttgcatcttgctacattcagaaaggttctgtcgttaggtattgggggagttttgtgaagtagataggtgacatttgtacatgttct

SEQ ID NO: 524848 - DNA, 201 bp, Homo sapiens
catacagcgtgctaagtgttgttctgactggtttgcatggactatctcattcagttttgacatatatatatacatatatatatatatatatatatatacayacatatatataccattggtccttgaacaacgtgggggttagggatgacaacccctgtgcagtcaaaaatctgcatatgtaagttttgactgccccaaaac

SEQ ID NO: 524849 - DNA, 201 bp, Homo sapiens
accatacagcgtgctaagtgttgttctgactggtttgcatggactatctcattcagttttgacatatatatatacatatatatatatatatatatatatayacacatatatataccattggtccttgaacaacgtgggggttagggatgacaacccctgtgcagtcaaaaatctgcatatgtaagttttgactgccccaaa

SEQ ID NO: 524850 - DNA, 201 bp, Homo sapiens
gcacattcaaaccatacagcgtgctaagtgttgttctgactggtttgcatggactatctcattcagttttgacatatatatatacatatatatatatatakatatatatacacacatatatataccattggtccttgaacaacgtgggggttagggatgacaacccctgtgcagtcaaaaatctgcatatgtaagttttga

SEQ ID NO: 524851 - DNA, 201 bp, Homo sapiens
acctaaacacctcccattagactccaccttccaacactgtcatgttggggattatatttccaacacatgaattatgaggggcacattcaaaccatacagcrtgctaagtgttgttctgactggtttgcatggactatctcattcagttttgacatatatatatacatatatatatatatatatatatatacacacatatat

SEQ ID NO: 524852 - DNA, 201 bp, Homo sapiens
aaaaattagccgggtgtggtgacgcgtgcctgtaatcccagctactcaggaggctgaggcgggagaatcacttgaacctgggagccggaggttgtagtgasccgagatcgtgccactgcacttcagcctgggtgacagagcgagactccatctattttttttttttttaaaaaaagatggtgaaaccccgtctctactaaa

SEQ ID NO: 524853 - DNA, 201 bp, Homo sapiens
gtagtcatgagtttaacgtaagactagtcagcttgtttctgtgtttttctcaggccatttttatttgtgtggtcacatgaatggagtaaccagaaagttgrtttaacctagatttgccaggggagtatgtgttgttgttgttgttaattagtggaataagttacaagtatcacagtatctaacaataggggaatagtaaat

SEQ ID NO: 524854 - DNA, 201 bp, Homo sapiens
tatgttgggggtggggaactaacaaaaccagatgatgttactagcttgctataaaactaaaagccattatatatgttggggatgggaaagtaatagaaccrgatacgaagacaggtcttgaatatagaccctgactttttcactgtttggtttctagccctgtgagcctgtaggagtagaatggctccccaaatgtatgag

SEQ ID NO: 524855 - DNA, 201 bp, Homo sapiens
agcaacttgttatagaaagtaatggctagaataaagaaaaccctgactttgggagcagtagggatagaatgaatgaggcagggctctgatacagttggatycagacagctgctttcatcatctcaaactcttcctttctcagtttggttactggctgttgctaccgccttctggagaatcccaccattaatcaccagaaga

SEQ ID NO: 524856 - DNA, 201 bp, Homo sapiens
tcaagaccaagtgccaaagtcactactagaattagtttctagtccagggtcaatctcagatcccgtaagataatgttactagcttgctataaaactaaaarccattatatatgttgggggtggggaactaacaaaaccagatgatgttactagcttgctataaaactaaaagccattatatatgttggggatgggaaagta

SEQ ID NO: 524857 - DNA, 201 bp, Homo sapiens
agtgtgacccagtcttgggcaaaatacaataggcctagtaggtatatccctggggcgcgatgtgtgagaaactgtaagtctgacagatccgcaacggaagwtgttaagcaaatcgcttaacagatccgcaacggaagatgttaagcaaatcgcttaactttcttacttcaatttccgctctgtaaactcatttgtattatt

SEQ ID NO: 524858 - DNA, 201 bp, Homo sapiens
agcggggccctgcaggggagaaaggcccatccctcaccccttcaatgcccccactgtggcatccctgggactggggaggctgatggggaaggttgagcctytactagctggatctcccagttcctcacaaagcccttcctatctgcagaactgagcggcagcagcgagacctggcctactgtgtgtcacagctgcccctca

SEQ ID NO: 524859 - DNA, 201 bp, Homo sapiens
catccaaacacccagcagcgagcttccaaaaagaaacccaaagttgtcttctcaagtgatgagtccagtgaggaaggtatgatgctcccgcctgttcccgrccgagaaggcacacagctagggtgcagagggctggtttccataggacctgctgcgggggcctgagtgtagatgctctgccccactgccgcagaagggcct

SEQ ID NO: 524860 - DNA, 201 bp, Homo sapiens
caattctcgtgcctcagcctcccaagtagctgggaccacaggcgcgcaccaccacaccgcactaatttttttatttttagtagagacagggtttcaccatrttggccaggctggtcttgaactcctgacctcaggtgatccacccatctcagcctcccaaagtgccatgattacaggcgtgagccaccgcactcggctgcc

SEQ ID NO: 524861 - DNA, 201 bp, Homo sapiens
tagagcattccatgcctgagctcccagagccaagtgcccactcagctaatcctcagagacaccgtgttccttctcactgtcttgtcctcctccgccctgcrtgccaccaaccaactgctgccacctgtttgctgctgaggagcctcagtcatggacccagcacccaccccaggggacagggatggtggccactgcagcttc

SEQ ID NO: 524862 - DNA, 201 bp, Homo sapiens
agggtgttctctttggacacattctctcatccgaaaactggggataacaacctttccctgccttccttcccctggtggttctgaggctctgcataagtackgaagtatctagaactgcagtgggcagagctcagacctgggcattgcacctgagggagggaggcctggtgaggaagaggatgctgctccccctccccactc

SEQ ID NO: 524863 - DNA, 201 bp, Homo sapiens
agctctcttctgaccatgtctcccagcccaagatcatctggatgaaaaacaagatggagatccagggcaaccccaaataccgcgccctctctgagcaaggygtctgcaccctagagatccggaaacccagcccctttgattctggggtctacacctgcaaggccataaatgtgctgggggaggcatctgtggactgccggc

SEQ ID NO: 524864 - DNA, 201 bp, Homo sapiens
gaagggaaggtggtggtcagctctgtggacacaaacttgtggacacaggcaactagcacgcatgtccagagactcacagtgatgttgcagggccaggcgaygccggtgtctcctggaaggggggtgattccgtggaccgccacacaaccagagtctactcccagctctgagtgatcttcagcaagggtgttctctttggac

SEQ ID NO: 524865 - DNA, 201 bp, Homo sapiens
gtcatggacccagcacccaccccaggggacagggatggtggccactgcagcttcccttagaatgcccaggggcttcagtggttgcccctgaccagatgagrgtcagaatgtcattccttagcatagcaggcagctgaaataggacttcaagaaggacttcccggctctgagactaacagattttgggagggtgacagagga

SEQ ID NO: 524866 - DNA, 201 bp, Homo sapiens
aaacctttcaatagggcctggagacagaggaatggacaaacagggtttcacaaaggcttctctgaaagtcctgggcttgtggagagctggggatattagarcaggaagacggcagtggcctccccttcctagaagtgcagcctgacaggtgcagcacctgctccccagcagggggagacagagagtcagctggggcccatc

SEQ ID NO: 524867 - DNA, 201 bp, Homo sapiens
tacatccgccaggtgggagagacggtcaacctgcaaatccccttccaggtgggtattacccccaccaagggtaacagcctgggtgggaaccagggcccccrtttaaggggagcctgggagatggcagggtctccaagggtccagctgagacccagcgagacggcttcatccttccgcaatcatgcacatgactcattggtg

SEQ ID NO: 524868 - DNA, 201 bp, Homo sapiens
ctgaggccagcaggtagagggaaccaggcagtcatttcccccgtcccacgctcacatgcacaagccacacgctatcaccatcttgccttaagaaagttccrggttcctcagcagtaaggggcctctggaggtctaagaagccatttccctgagtggtccagcccccacgccttgagaaaggggctcagaaacaaaaggtca

SEQ ID NO: 524869 - DNA, 201 bp, Homo sapiens
ctgggtagtgtgctaaaacaagcctcccaaccctaatacataccacatagatggacaagagagataggagtatttactgtctccacacaggcacctgaccytcttgcgtcaaatgttaaaccccgggcccttttccctgtcccttgtgtgccccaaggccctctccgacccacagtctgtgtgggttccagaaggcaaact

SEQ ID NO: 524870 - DNA, 201 bp, Homo sapiens
aagagccaaattttgggtgtgggggctctgtggccagcctggccctcacactcacttcctctcacactctgggcctacagagaaacctggaccccccagcwgcatcaggctcctggacgtctggggctgcaatgctgctcttcagtggacgccaccccaggacacaggcaacacagagctcctgggctacatggtgcagaa

SEQ ID NO: 524871 - DNA, 201 bp, Homo sapiens
cagggggagacagagagtcagctggggcccatctggtgcttgggaatgcctgggctgcaggacaaatcccatcctggcagagtcgaggcgccaagggagtkcccaggatgcttaccagttcacaccatggaggcgctgacctcctgaaacctcctgctcccttaagggatttgggcccctagacctcaggagtgagagctt

SEQ ID NO: 524872 - DNA, 201 bp, Homo sapiens
ggcaagagccaaattttgggtgtgggggctctgtggccagcctggccctcacactcacttcctctcacactctgggcctacagagaaacctggaccccccwgcagcatcaggctcctggacgtctggggctgcaatgctgctcttcagtggacgccaccccaggacacaggcaacacagagctcctgggctacatggtgca

SEQ ID NO: 524873 - DNA, 201 bp, Homo sapiens
agagaacattggtaaagcccatcctggccttcagctacccagcccttcccaaacaccttatctaatggagaaactgaggccagcaggtagagggaaccagscagtcatttcccccgtcccacgctcacatgcacaagccacacgctatcaccatcttgccttaagaaagttccaggttcctcagcagtaaggggcctctgg

SEQ ID NO: 524874 - DNA, 201 bp, Homo sapiens
attggtaaagcccatcctggccttcagctacccagcccttcccaaacaccttatctaatggagaaactgaggccagcaggtagagggaaccaggcagtcayttcccccgtcccacgctcacatgcacaagccacacgctatcaccatcttgccttaagaaagttccaggttcctcagcagtaaggggcctctggaggtcta

SEQ ID NO: 524875 - DNA, 201 bp, Homo sapiens
aggtcaagttccctgggtcacctgctcaatgctaagagtccatctgttctatctcccatctaatctcaatctctccagtggccataaatgctcattttctrcccatttcctgtggcctgggttccagattctctcaaaggtcttgaaacagagagaaggcgctgcttgccccttgttccaccatggccctagtggaaagaa

SEQ ID NO: 524876 - DNA, 201 bp, Homo sapiens
tctaacatcaggtgtctttgatgccatttgacaagaagtcagggaaggcaaacaaggggaaaatgaggcccagagagggaggctgatttccccagatcacmagcaggaaaagaagccccatggagaggggcgcctgtggccacattgcaaagacctcacactctctccatcccctcagcctcggagtgggtgcctgtgagt

SEQ ID NO: 524877 - DNA, 201 bp, Homo sapiens
ctctctggaactggactagaggcagcagacagcttaaaatcaaggccgaagagaaggggtggtaagactggggtcaggctgtgctgattactttccaagcrgcagggtggacaggtgtagaagagggtgtataaccgtgaactttccagttccccgccacttcccccaagctctaactgcagcatctcttccagcctcagc

SEQ ID NO: 524878 - DNA, 201 bp, Homo sapiens
acctgtggctccagcctctgctgcccctcctgagaagggccagtgggacaggcttccccgagaacagctccagagactcctggagttaaggaggtgtgggractctggcacctccctacactcaccctgggggctcctccctgccaggggaagcctaagcctcaggccacatggacccacaacggccatgccctggacagc

SEQ ID NO: 524879 - DNA, 201 bp, Homo sapiens
acccaagcctcccaaccctaattcccagcctttggctctaggtgagatgtggccccaccaggcagctgcattatggctgtgtcgaccctagtcctggaggygccaggaaggcttcttggttgggacggtgctgggccttccccagggaaccagggagctcagactctgagaggcccctgaggcccagcattgatggaccca

SEQ ID NO: 524880 - DNA, 201 bp, Homo sapiens; identical to SEQ ID NO: 310962

SEQ ID NO: 524881 - DNA, 201 bp, Homo sapiens
aggacttcccggctctgagactaacagattttgggagggtgacagaggaagaaggggggatacccgccctggcttcacttgggaagagaaagatcctaaamctttcaatagggcctggagacagaggaatggacaaacagggtttcacaaaggcttctctgaaagtcctgggcttgtggagagctggggatattagagcag

SEQ ID NO: 524882 - DNA, 201 bp, Homo sapiens
ctcaggagtgagagcttcacccttcctgcaaggagggaccccatggcagccaggcacacccaggaccctcctcccagccagcatccctcaccagctgtccmctgccccatctcagaaaccccaatcagccaccccactgcactgctaagcccagactcttgctttgatccagaggcccccaagatccgtgtcccccgccac

SEQ ID NO: 524883 - DNA, 201 bp, Homo sapiens
gagttaaggaggtgtggggactctggcacctccctacactcaccctgggggctcctccctgccaggggaagcctaagcctcaggccacatggacccacaayggccatgccctggacagccagcgggtgagcatgcgcaccggggaccaggactccatcctcttcattcgctcggcccagcgctccgactctggccgctacg

SEQ ID NO: 524884 - DNA, 201 bp, Homo sapiens; identical to SEQ ID NO: 310970

SEQ ID NO: 524885 - DNA, 201 bp, Homo sapiens; identical to SEQ ID NO: 310971

SEQ ID NO: 524886 - DNA, 201 bp, Homo sapiens
gctggctgtgctaactctctccctgtctctgcttcttcctccgcgtctctgcacccctctctctgggtttctcctgggcgtctgcccctggaacacttgcygtctcctcactccacggctatgcatacacacacatggagtggctgcaaagtagtgaatgtggttggctgattttaacaaacacatcagagcaaatccaca

SEQ ID NO: 524887 - DNA, 201 bp, Homo sapiens
tctagccacaatttcagggctctaacatcaggtgtctttgatgccatttgacaagaagtcagggaaggcaaacaaggggaaaatgaggcccagagagggargctgatttccccagatcaccagcaggaaaagaagccccatggagaggggcgcctgtggccacattgcaaagacctcacactctctccatcccctcagcct

SEQ ID NO: 524888 - DNA, 201 bp, Homo sapiens
gagggaaccaggcagtcatttcccccgtcccacgctcacatgcacaagccacacgctatcaccatcttgccttaagaaagttccaggttcctcagcagtarggggcctctggaggtctaagaagccatttccctgagtggtccagcccccacgccttgagaaaggggctcagaaacaaaaggtcaagttccctgggtcacc

SEQ ID NO: 524889 - DNA, 201 bp, Homo sapiens
gtcttgaaacagagagaaggcgctgcttgccccttgttccaccatggccctagtggaaagaaaaagaaggtctgcaaaaggcccatgaagacttctccatygcagagggcatacctcactggggccccgcaggccagctgccatccccattgctaatatttctatttgcaaggtgcattagcctcaatcctcccctcgctc

SEQ ID NO: 524890 - DNA, 201 bp, Homo sapiens
gtgaggaaaggtctccagggtaagcagggagggtgaggacaggggtgagaaatgagggtgacacccggggccctgcagcaatggttcacagtgctggagcrctaccacccaaccacctgcaccatctctgacctcatcatcggcaactcgtactccttccgggtcttctcagaaaacctgtgtggactcagcacctcggcc

SEQ ID NO: 524891 - DNA, 201 bp, Homo sapiens
ggtcttgaaacagagagaaggcgctgcttgccccttgttccaccatggccctagtggaaagaaaaagaaggtctgcaaaaggcccatgaagacttctccaytgcagagggcatacctcactggggccccgcaggccagctgccatccccattgctaatatttctatttgcaaggtgcattagcctcaatcctcccctcgct

SEQ ID NO: 524892 - DNA, 201 bp, Homo sapiens
cagcacccagttgttctgcagtgtccgagcttcacccaaggtgaggggccaggccctgttgtgccctgggctggtgggggcaggtggggacagcagggctraggaatcctccgggcgtccacacctaagcctggggatagctgttgagagccccgccccagtccatacctccccagctctcttctgaccatgtctcccagc

SEQ ID NO: 524893 - DNA, 201 bp, Homo sapiens
aggagaccgcatctgaatctgccaaggtgcccacagcagagcctcccggagaagtggcagtatcagagtccaccagagaagagcaggtgcccaagccgcasgcccctgccccacaggcccctacagcctccacagccactaagcctgcacccccaagtgaaggtgactgaaggtggggcagggggaggagggaggcaggca

SEQ ID NO: 524894 - DNA, 201 bp, Homo sapiens
gagagcttcacccttcctgcaaggagggaccccatggcagccaggcacacccaggaccctcctcccagccagcatccctcaccagctgtcccctgccccayctcagaaaccccaatcagccaccccactgcactgctaagcccagactcttgctttgatccagaggcccccaagatccgtgtcccccgccacctccgtcag

SEQ ID NO: 524895 - DNA, 201 bp, Homo sapiens
tcctggcagagtcgaggcgccaagggagtgcccaggatgcttaccagttcacaccatggaggcgctgacctcctgaaacctcctgctcccttaagggattkgggcccctagacctcaggagtgagagcttcacccttcctgcaaggagggaccccatggcagccaggcacacccaggaccctcctcccagccagcatccct

SEQ ID NO: 524896 - DNA, 201 bp, Homo sapiens; identical to SEQ ID NO: 310982

SEQ ID NO: 524897 - DNA, 201 bp, Homo sapiens
gagaccgcatctgaatctgccaaggtgcccacagcagagcctcccggagaagtggcagtatcagagtccaccagagaagagcaggtgcccaagccgcaggsccctgccccacaggcccctacagcctccacagccactaagcctgcacccccaagtgaaggtgactgaaggtggggcagggggaggagggaggcaggcatg

SEQ ID NO: 524898 - DNA, 201 bp, Homo sapiens
tgcagtgtccgagcttcacccaaggtgaggggccaggccctgttgtgccctgggctggtgggggcaggtggggacagcagggctgaggaatcctccgggcrtccacacctaagcctggggatagctgttgagagccccgccccagtccatacctccccagctctcttctgaccatgtctcccagcccaagatcatctggat

SEQ ID NO: 524899 - DNA, 201 bp, Homo sapiens
tccagaactcaggaatgggcctggtaggccccaggccagactaactgggctcaaggggtgctggaaggcgcagagattggagtgccctgcggagttgcacwctgggtgggaagcactcaaataaagatgcgtggtgttaacagtgcggggcctctgtgccagtgagcgacatcatctgggggaggcgctgtgtcacgagga

SEQ ID NO: 524900 - DNA, 201 bp, Homo sapiens; identical to SEQ ID NO: 310986

SEQ ID NO: 524901 - DNA, 201 bp, Homo sapiens
aataatagcaataaaccctgtaagaaatgtacagtcaagtaaattaagatggtgaagcaaaatggtatcatgaggataattacattgtctatgtatgtgtkttagcacatcacgtgtgttagaattaagggaatagtgttggtgctccacacctaggcaataaaagaggataataaatgttcagaagtttatgtctaaaat

SEQ ID NO: 524902 - DNA, 201 bp, Homo sapiens
cacaaaactggctttcaatccctaccctccaacctgcttttcctgcagtctttctttatctcaggaaatggaacttcattcttccaatttcttggcccacraaccttggagtcatccttcactcctcttttcctctcatactccacacccttcttcacctcctcactcacctcttcttcttccacttgccctactttgtgc

SEQ ID NO: 524903 - DNA, 201 bp, Homo sapiens
atgaataggcagaacacagagaacttttagacagtgaaactgttctacatgatactataatagttacatgtacatatatatatatatatatatatatatawctccacaggatatacaaccccaagagtgaaccatagtaaaaactatggactttggtaataataatgtatcaatgtagattcatcattgttaaaaaaaaaa

SEQ ID NO: 524904 - DNA, 201 bp, Homo sapiens
tttgtgttgaaatgaacataagattggcaaagtgaatctgaagtggaatcttctaatttgaataaggtaatgactcttggattattaaggctaaaagataraatatgtaaatatttgagcctgtgaaataatttttaacacatttattaatggagaataatcaatattttgtgattaaatatatatgtattaatcagatat

SEQ ID NO: 524905 - DNA, 201 bp, Homo sapiens
gatgaataggcagaacacagagaacttttagacagtgaaactgttctacatgatactataatagttacatgtacatatatatatatatatatatatatatatctccacaggatatacaaccccaagagtgaaccatagtaaaaactatggactttggtaataataatgtatcaatgtagattcatcattgttaaaaaaaaa

SEQ ID NO: 524906 - DNA, 201 bp, Homo sapiens
gggcatggtggtgcatgcttataatcccagctacttgggaggctgaggcaggaggattgcttgaacccaggaggtggaggttgcaatgagtcaagatcacrccactgcactccagcctgggcaacagagcaagactccatctaaaaatatatataataaaagaaaaataaaaagtttatatggaaaggcaaaagatccaga

SEQ ID NO: 524907 - DNA, 201 bp, Homo sapiens
gtctatgtagaaaattttaaaggaatagacaaaaaactcccagatcagataagcaattacggaaagattacaggatacaggtcaatcactttcctatataycaacaatgaacaagtggaacaaatgttgaaatttaaaacattctaccatttatgttagcacaagatgaaatatttagccacaaatctaacaatatgtgcg

SEQ ID NO: 524908 - DNA, 201 bp, Homo sapiens
caataaaattgacaagcctttagccaggccaagaaaaagaagatgcaaattactaacagcagaaatgacagaggggatagatatcacgacagagcccatgracattgaaaggataataaaggaatactatatgggcaaatatttcagcccacaaattttagaacctagatgaaataaacaaattccctgaaagacacaatc

SEQ ID NO: 524909 - DNA, 201 bp, Homo sapiens
aggtagaaaatcagtaaggacatagttcaactcaatagcaccataaataaactagatataattgacatctataggctacttcatccaatgacagcaaaatrcacattttttcttcttcagcttacacagaacattcataagatagaccacgttctaggtcataaaaaacacctcaaaaatttaacagaatacaaatcatag

SEQ ID NO: 524910 - DNA, 201 bp, Homo sapiens
tctttctttctttctttctttctttctttctttctttctttctttctttctttctttctttctttctttctttctttcttctctttgagatggagtctcaytctgttgcctaggctgcagtgcaatggcgtgatctcagctcactgcagcctccgcctcctgggttcaagcaattctcatgcctcaacctcccgggtagct

SEQ ID NO: 524911 - DNA, 201 bp, Homo sapiens
agttgtaaattcatatttttttgcaaactccagggcaagtactaaacgaagtaaaaaaagaagtaaaatcgatataataaaaaaggagagaaaatagaatsaaataaaatgctcaggtaaaaccaaaaaaggtagaaaaaagtaaaagacaaaaaatagaaacaaagaagaaaggcaatgaatagaaaacataacaaatat

SEQ ID NO: 524912 - DNA, 201 bp, Homo sapiens
cctgaaggaagacagtggcatcgcattgcagtgatccttctaagccagacagagacctgaaaattttcattcatgttactacagtgataaacacaataaaygcaccaattaaattctccctattggtaaatcaaagagaacaataacctctgtagatacctgggattttctaaagctcccttgaattgtctgcagagtttt

SEQ ID NO: 524913 - DNA, 201 bp, Homo sapiens
gtgctgcaataaacctgggagggcagatagttcttcaatacactgattttctttcttttgggtatatacctagcagtaaaattgctggattttatagtaaytctgctttgaggttttttttgagaaaactccaaactcctctcaatagtggttgtactaatttacattcccaccaagagtgtatgagggttcccttttctc

SEQ ID NO: 524914 - DNA, 201 bp, Homo sapiens
atgtatcaagacttgtgccagttatttcaaagtgagaatataacagatgatgatagtttcagaaagtatgtataaagatatttcaggggttttttttaggyggtttaactacctaaaatatcttatgagggagactggtgttacatttttatttcttctctcctaccccccctctctcttctctttcttgagacccaaagt

SEQ ID NO: 524915 - DNA, 201 bp, Homo sapiens
ataaagatatttcaggggttttttttaggcggtttaactacctaaaatatcttatgagggagactggtgttacatttttatttcttctctcctaccccccytctctcttctctttcttgagacccaaagtattattattatccagataaatgctagaaaaatcaaaagcaaaataaagaagaggccaattgataagtcgcc

SEQ ID NO: 524916 - DNA, 201 bp, Homo sapiens
actcacatgatgtcatataagtttgtttcagaatacttcattttagatgtctttcttgtaatatttggtattaggtcggtcacttctgagattaaaaaggrttcatagataggtttagtttccaggtacagaaatgaccactggctgggcacggtggctcacacctgtaatcccagcactttgggaggccaaggctggcag

SEQ ID NO: 524917 - DNA, 201 bp, Homo sapiens
ttaattgtgatgaaaagtctcaaaagtgatgtgctcaactaagattataatttctttttagtttttatgattacagatttaatgatatggcaagaaaaaarttaaaagcagaaatttaaaatctattaaattagaaaatattcagttccctgaaatatgttgagatggataagtcatgactgtatttaaaattatttagaa

SEQ ID NO: 524918 - DNA, 201 bp, Homo sapiens
ctagatgtttcaaattattaacaattattcattccttctttctatgctaataaaaaccaaactcctaagggcaatcatagagactatgaattgttctgggraaactcgttgtcttttttgcagtcatgacactcagaggtaaagtaaaataggatgtgggtgaaatgttttctgtgtgcaggatcatttttaatggtaagg

SEQ ID NO: 524919 - DNA, 201 bp, Homo sapiens
atcagatatgtgttcttgcacattctttaaagttaagcgaatatgagtaacttgaagaagttagaaacaaaccaaataaaactaatagtaaaatgttaaaygcttgtcaattgagttctacttctagacctacagtgtcaatgatggtaagataaattcctctttgtatcacacactttaaaatgctgaaatatatataac

SEQ ID NO: 524920 - DNA, 201 bp, Homo sapiens
aaattatacatctctcacagtgaaattgaagtgtaacttttaatgcctcattccattttgaaactcatatttttcttacagtatactatattttggttcayttggaactatctcctaaataatcatccccccacccttcaccaaaaaaggctcaatttattatttttgtttagtatgaacgaaatcaaaagcaaatccacc

SEQ ID NO: 524921 - DNA, 201 bp, Homo sapiens
aaaactggatttttctcctagtaaggtcataaacaaggcaaggatatcccctctttccacttctatacaacatttcaccagaagacctaactagtgtaatmagacaggaaaaggaaataaagatacgcagattgggaaggaagaaatgcaactgtctttgttcacaaatgatatgattttctatgtagaaaatccccccaa

SEQ ID NO: 524922 - DNA, 201 bp, Homo sapiens
tggcataaatcaacataactaactgctgctgttactgtgctggctaagtgtccatactaaagtgttgaaattcgcaaaaaaaaaaaaagctaaatcagtamaaagattaaccacatgcaatatccctttgagcaccaactcctctttgactacataaaatatgcttctagttattaaactactagtgagtgcagattttaa

SEQ ID NO: 524923 - DNA, 201 bp, Homo sapiens
tatactagcaatgaacagatggaatttgacattaaaaacactgtaccatttaaaacagcacaaagaaaattaaatgcttatgtataaatctaacaaaataygtaccagatctatgcgagaagcattataaaactctgatctaataaagaagatctaaataaatggagagatactgcatgttcacagattggaagactcaat

SEQ ID NO: 524924 - DNA, 201 bp, Homo sapiens
gcttaatagtaaggttctgttattattgatcttcatccattttttccccttatgttccttaacatttgtctttggagaagcagcatggtgaattctctggstgtccgctactgaaggccagatgaatacactcagtccagcagttggctgtttgtgttcctccatggactgcctagcagggaggaatgtgacagcatatcc

SEQ ID NO: 524925 - DNA, 201 bp, Homo sapiens
taaatgtaaaatgcaaaactgtaaggtttctagattatagtataggagaaaatctaggtaagcttcagtttcatgaagaccttttagaagtgacagcaaawgaaagatccatgaaaataaaaaaaggttgataattggactttattaaaatttaaaacttctgttacgttaaagacactgtgaatagaatgaaaagatgag

SEQ ID NO: 524926 - DNA, 201 bp, Homo sapiens
aatatcaatgatctaaatacatcaattaaaagagactgtcagatgcatccaatataaaatatattttaaatataaagacacatatagattaaaagtaaagsgatagacaaatgtgataatgtcaataaaaagaaaactggaatagctatattaatatcagacagaacaaacttcagagaaaggaaaattataatggattaa

SEQ ID NO: 524927 - DNA, 201 bp, Homo sapiens
ggagcaaaggcaagtaaatgtagaaagaatagctttttaaaaacaaatttatgttgtaaaaagcaagcgcccacaggcaaaaaaaaaaaaaaaaaaaaaaagtctagacacaggtgaacaactttcacaaaaattaatcaaaatggatcatatacctaaatgtaaaatgcaaaactgtaaggtttctagattatagtatag

SEQ ID NO: 524928 - DNA, 201 bp, Homo sapiens
ggtagcagagctgccctacaagaaatgttaaaaaaattattcatggagaaaaaaacattacataggccagaaactcagatttacataaaaagggaaaaaaygatagagaaagaataaataacgtaaaataaaatcttttgtttcttattttttaaatgatttaattataactgttattcaaatgataatagtaatgatgta

SEQ ID NO: 524929 - DNA, 201 bp, Homo sapiens
tagcatttgaaagttttgcctgaatctctcttgaatatgactcttaaataaggaatagcatgtgtgttagtttacatttaccttgaagagttcatttcttrctgaagctgatttattgtacagatcatacctaattaattttcattttaaaatattattctgaaactaaatctggcactcctgatgcctgcttcttgataa

SEQ ID NO: 524930 - DNA, 201 bp, Homo sapiens
cccaggaggcggaggttgcagtgagccgagacggcgccactgcagtccagcctgggtgacagagctagactctgtctcaaaaaaaaaaaaaaaaaaaaaamaaaaaaaaaaaacagagttaaaggactgcaaatgaatttaatgaaactattgcccaaatgattgatgttcatgtacagaccaaaatttcagtgctaaata

SEQ ID NO: 524931 - DNA, 201 bp, Homo sapiens
gttcacaaattatgtgatcgtctatgtagaaaattttaaaggaatagacaaaaaactcccagatcagataagcaattacggaaagattacaggatacaggycaatcactttcctatataccaacaatgaacaagtggaacaaatgttgaaatttaaaacattctaccatttatgttagcacaagatgaaatatttagccac

SEQ ID NO: 524932 - DNA, 201 bp, Homo sapiens
gtagcatttgaaagttttgcctgaatctctcttgaatatgactcttaaataaggaatagcatgtgtgttagtttacatttaccttgaagagttcatttctyactgaagctgatttattgtacagatcatacctaattaattttcattttaaaatattattctgaaactaaatctggcactcctgatgcctgcttcttgata

SEQ ID NO: 524933 - DNA, 201 bp, Homo sapiens
ctaccctcattttcctgtggaaacacagctcagaaggactatgctggagggttgatcagcttggttatgtatttgctttgcggaaaccttaagttgtcctyttatgtgtcactttctctcatttcatttttttaatcctttattttccaacaggcaggttctggtcacacctacccaggtggcaccaggtgtgtgcatgtt

SEQ ID NO: 524934 - DNA, 201 bp, Homo sapiens
ttactaggattatagacaaaaattcaaaaggcattcatgatgtgaaggttatgagtaatattccttgaagcacttttaattggagcagaaattcttttccyaaccaaaaaaaaatctgtcctggccattttaaacacttttagttacatttttccaatgcaatcaactcaccacagtcccataaatacataatactttttc

SEQ ID NO: 524935 - DNA, 201 bp, Homo sapiens
accccatagtgggacatgtcctcacactttcagtagcttatgattgttctgagcctctgcagattccaagggggttgggggataaaggataaataactggyatgattaaaacatgggattggtgccctgtgggtagggcaaaaataaacagctggtatacccctagtcaattccctggtaggaaactttcctcagcaggac

SEQ ID NO: 524936 - DNA, 201 bp, Homo sapiens
acatattaataaagaatgtaattactatatcacctatttattttaaaaaatgtttttctaacagtatatcaatatttataaatatatatatatatttttttattatactttaagttttagggtacatgtgcactttgtgcaggttagttacatatgtatacatgtgccatatttcatcatagttgattttatttgtaatga

SEQ ID NO: 524937 - DNA, 201 bp, Homo sapiens
gggatgctcaatgacaaataatttactttatatggaatagaaagaaaaattcaagcaattgttctctagactctattccattggaaaagtaatagccattyagtttgttgtccatatctcacatgttacaatttttatagcatatgaactgtagattatctgtattaagctcttggaagaaaatgaccaggaagcattttg

SEQ ID NO: 524938 - DNA, 201 bp, Homo sapiens
agtatagatattgaaacacttaaatgtaaggaggcaaaatgtttccaacttattctcaggtacagaaaaatatgaatgtgtgtatatatatttatttatamataaatatttatgtatagagagaagggagagtgaatgataaaacaaatgggaaaaatgtaaacagtttgtggatctggataaacagaatatgagagttat

SEQ ID NO: 524939 - DNA, 201 bp, Homo sapiens
caattctgtcctccagggacaacctctaatgtagttgagtgtgtttagtcctggcttccactactgaaatagcctacaaggctgtcagcagtttcagtatkagataattgtatttatgggggatgctcaatgacaaataatttactttatatggaatagaaagaaaaattcaagcaattgttctctagactctattccatt

SEQ ID NO: 524940 - DNA, 201 bp, Homo sapiens
cattgcttctcaacacatggtcctaagagcagcagcaccagcaccgtcttagaaatgcagttacccatgccccaccctagaccgactgaatcagaaacccyggggccggggtccagcaatctgggtgttaacaagcccctccccaggtgattctgctgatgctgaactttgagaaccacttctccagaagaggcaggcatt

SEQ ID NO: 524941 - DNA, 201 bp, Homo sapiens
gggatggtccatatgtacagattatactgtgtgacacagtggcctactttattactttatttgtactagatagagcaaaacactaagtgatgcccctgtttctttctttctttctttctttctttctttctttctttctttctttctttctttctttctttctttctttctttctttcttctctttgagatggagtctcac

SEQ ID NO: 524942 - DNA, 201 bp, Homo sapiens
tgatggtttctcccaaacattgcttctcaacacatggtcctaagagcagcagcaccagcaccgtcttagaaatgcagttacccatgccccaccctagaccsactgaatcagaaaccccggggccggggtccagcaatctgggtgttaacaagcccctccccaggtgattctgctgatgctgaactttgagaaccacttctc

SEQ ID NO: 524943 - DNA, 201 bp, Homo sapiens
tgggatggtccatatgtacagattatactgtgtgacacagtggcctactttattactttatttgtactagatagagcaaaacactaagtgatgcccctgtttctttctttctttctttctttctttctttctttctttctttctttctttctttctttctttctttctttctttctttcttctctttgagatggagtctca

SEQ ID NO: 524944 - DNA, 201 bp, Homo sapiens
gagctcaaggatatgtcaatagaaactggtaaaactgaaaagcaaagagaaaagacactgaaaaatataggacagaatatccaagaactgtggtacaactrtggtacaaatgtatgttattttccatgcaacatacatggagaggcaataccagaaggagaggaaataggaaataagagaagtatttgaaaaaataatggc

SEQ ID NO: 524945 - DNA, 201 bp, Homo sapiens
acagctcatcctgttgagacagtttttgatttggcaggtggaacctgagcacactaattattcaccttcctgaggcaagactctttttgagtcctctaacmaatgcactggtatttatgaagttttccaggctggctggtggaaactagcactgttcccagtcctgtatgagcactggctgttgttctctctaatcctttc

SEQ ID NO: 524946 - DNA, 201 bp, Homo sapiens
tcttatatgcaaaataagtggcctcttctgttttcccctgtcttcttgaactgtctgtctcttttcaaaaactgtgtattcttcaaaattcctgcaatgcmgaatgaaaaacggaggccatccactacagtggaaaatgtagagcaactccaagaaaagaggctggaagaaaagacaggcttagagatgtctgacagactt

SEQ ID NO: 524947 - DNA, 201 bp, Homo sapiens
ttgggatggtccatatgtacagattatactgtgtgacacagtggcctactttattactttatttgtactagatagagcaaaacactaagtgatgcccctgtttctttctttctttctttctttctttctttctttctttctttctttctttctttctttctttctttctttctttctttcttctctttgagatggagtctc

SEQ ID NO: 524948 - DNA, 201 bp, Homo sapiens
gaaaaaccacagtccaaaagacaagcaaattaagaatggagcttaaccatgcctccattgggaagtctagactttgagccaggtacagtaagaaaaattakcctctgattcattaagtttgccacatgacttattttgatattttggatacattaactcacttaggagaattcagaaaagaatgggtgattaaagttcatt

SEQ ID NO: 524949 - DNA, 201 bp, Homo sapiens
agtgtctaattttaaacttgtcctgtcaggtttgaaatgtatgattttggcaacctttgcaactgtgcaaagcatgtatttcaagatactgtggtctttargcttctacttcctcagtactagattgttcccaaaagaatgtatgaaggatgaatggatcagaaaagacattacgctggagatgagaatcaaaatcctgac

SEQ ID NO: 524950 - DNA, 201 bp, Homo sapiens
gggcagtggtggcgggcgagggggtggctacagagtgagattcctctgcctttggaaaggggtggaaagagtgggaagtacttcttcttgtggtttgagtrccagttcagccacaatacaatagaacactatgtagacttctaaggtttttgactctactccctgacttccagacacctctggacccacctggggcctggg

SEQ ID NO: 524951 - DNA, 201 bp, Homo sapiens
accttgtacctccaaaatatctacaattatcaggtgtcaatgaaaaaaagcaatcaaacataaactaaaaagttactaaaattaaacataaaaatcacatratgacagcatggcttaagaagatgcaagttgaggaggagcaagatggcagaataaaaggctccaatgatcatcaccccctgcaaggacactgagttagca

SEQ ID NO: 524952 - DNA, 201 bp, Homo sapiens
ctaccaccaaacctaccatgtcttatatcagtcatggtcccagcaggacactcaaaaagaaaatcccagagaatgaaatgaagggatggactagccaaagsgatcaaggtttggagcagaaataatgtattaagcatggagaaaacatacttagggtctagaagcagggagaagctattgctctcaagggataaagacaga

SEQ ID NO: 524953 - DNA, 201 bp, Homo sapiens
gaaacctataaatattcccatagaggagctaagttatcataaaatatgcaatgtaatgtcatttagtgaatgatacattctctgaagaaaaagaagcttargtaagagtggtaaaatattagagtgatagggatgattttagataggctgttcagaaagaagtgctgaataaaaatgtttcttgagcagagattggaataa

SEQ ID NO: 524954 - DNA, 201 bp, Homo sapiens
tatataccaacaatgaacaagtggaacaaatgttgaaatttaaaacattctaccatttatgttagcacaagatgaaatatttagccacaaatctaacaatmtgtgcgagacctatgtgcaagacctctatggggaaaactacaaaattctgataagagaaattagagaaaaactaagtaaatggtgaaatatttcatgttc

SEQ ID NO: 524955 - DNA, 201 bp, Homo sapiens
tgtatcgtggatatcaacaaattgattctaaagtttatatggaggctgggcatggtgactcatgcctgtaatcccagcattttgggcagctgaggtgggcrgatcacttgagatcaggagtttcaaaccatcctggccaacatggtgaaactccatctctaccaaaatacaaaaattagggcatggtggtgcatgcttata

SEQ ID NO: 524956 - DNA, 201 bp, Homo sapiens
ctacacagttacctgcatgcacatctttattgccaaaacataattgccaaaaactgggagcaaccatgatgttcttcatttagttactgggtaagcaaackgtggtatatctatacaatagaatattcagcaataaaaggaaataagtgatcaatccaggcaatggcatggatgaaccttaaatgtgcattgcaaagtaaa

SEQ ID NO: 524957 - DNA, 201 bp, Homo sapiens
tcttcctaaaatagtgagcttcaatcttctaagactcagcttatggcttagctttaatataaagtcatttctaatatcatgcctaggcatcctctcagtcktgctttctttggtgctttgcacagtggtcaataaatatttattgactaaatgaatgtgtgtgaaagtcacatgtgtggagaaagagagatagatttgata

SEQ ID NO: 524958 - DNA, 201 bp, Homo sapiens
tgtgaaagcgaagcttcaactagctgtcatggtccccatgtggctttctaggccgggactcactcggtcctgggatctcatacttcacatctccttctgargcacaatgacccatatttcttggaggagaccagaacggtcacagaaaagagagtaaggactgctgtaaaaaagaacatgaacttgagggttggtgataga

SEQ ID NO: 524959 - DNA, 201 bp, Homo sapiens
cttgggatggtccatatgtacagattatactgtgtgacacagtggcctactttattactttatttgtactagatagagcaaaacactaagtgatgcccctstttctttctttctttctttctttctttctttctttctttctttctttctttctttctttctttctttctttctttctttcttctctttgagatggagtct

SEQ ID NO: 524960 - DNA, 201 bp, Homo sapiens
ccttcaagaaatcccagtagtgtttttatttaagatacagctaaaacttacctaatggcattttctaaaagcatatacactttaatccaacaactaatatrattaataaatggatatttagttccacaaaattaattcattcagtaataaactatctccacaaatctagggtagagtcttctctatttttgtgaataatgc

SEQ ID NO: 524961 - DNA, 201 bp, Homo sapiens
agccttttgcctcaatttgagcaaaaaaccaattaaaactgttcacttttaatagccagagatgggaaaaatgactcatccaaaaaagtatgatttttttktctttattagaaatgttaaacagggaagtctatgcaaaaaaaggaatgctttatttggatgtaatttatataactagattatctatttttaaagttaaca

SEQ ID NO: 524962 - DNA, 201 bp, Homo sapiens
agaacgtgttttattttcttaccttgggattcccttgatttacaacctttcatctccagagtcattaaaacagaaaaacaaaacaaaacaacaacaacaamaaaaaacctttagtgtatcagcagaccatacccttgagttgcctatgtacttatttctttaaatctggttttccagaagaaaaggttctgctcctcacta

SEQ ID NO: 524963 - DNA, 201 bp, Homo sapiens
tgaatagtgttttctttcaaagtttcttgaatatctacatctacaatctacaacaaatgccactggattgtggtttgtaaggaatatctaaggtgaattcyagcaaagtgaatatcagtttctaccacttattactttcaaagtcattaaattgctaatatgggtgcaatttggctgttgcgtggaaacacttggcttggg

SEQ ID NO: 524964 - DNA, 201 bp, Homo sapiens
attggaatgtgagaatagaggaaagaaagaagcagaatgattacttgaaaaaattatggcccaaaactgcctaagtttgattttaaatatatatatatacwcacacacacacacacacactcaacaaactccaagtagaataaattcaaggagatccatacctatacattattatagtcaaattttcaacagacaaaggca

SEQ ID NO: 524965 - DNA, 201 bp, Homo sapiens
aattggaatgtgagaatagaggaaagaaagaagcagaatgattacttgaaaaaattatggcccaaaactgcctaagtttgattttaaatatatatatatayacacacacacacacacacactcaacaaactccaagtagaataaattcaaggagatccatacctatacattattatagtcaaattttcaacagacaaaggc

SEQ ID NO: 524966 - DNA, 201 bp, Homo sapiens
aaacagaaaggaaaaataaacagagattcaaagatctgtgggaccatcaagtatacaaatgtatatgtgtaattggaatgtgagaatagaggaaagaaagaagcagaatgattacttgaaaaaattatggcccaaaactgcctaagtttgattttaaatatatatatatacacacacacacacacacacactcaacaaact

SEQ ID NO: 524967 - DNA, 201 bp, Homo sapiens
cccgtctctactaaaaatacaaaaattagcttggtgtggtggcacgcgcctgcaatcccagctactcgggaggctgtggcaggagaattgcttgaacccgraaggtggagattgcagtgagccgagatcataccactgcactccagcctgggcaacagagggagagtgtcaaaaaaacgaaaacaaaaaacaaaaaaaaaa

SEQ ID NO: 524968 - DNA, 201 bp, Homo sapiens
gaaacagaaaggaaaaataaacagagattcaaagatctgtgggaccatcaagtatacaaatgtatatgtgtaattggaatgtgagaatagaggaaagaaagaagcagaatgattacttgaaaaaattatggcccaaaactgcctaagtttgattttaaatatatatatatacacacacacacacacacacactcaacaaac

SEQ ID NO: 524969 - DNA, 201 bp, Homo sapiens
aaaaacaaaatagaaattctggtattgaaaagtattaagctaaaatgaaaaatgcaccagagaggcccaagagcagattttagctgacagaagaaaaaaaatggtgaactttaatgtagatcaattgatattatccattgtgagaaacagaaaggaaaaataaacagagattcaaagatctgtgggaccatcaagtataca

SEQ ID NO: 524970 - DNA, 201 bp, Homo sapiens
gtgcctctggttaacaccacaaatagaaaagtataatatccttgttataaatggcaacaattatctaataagtcatacagctaaaaaaaaaaaaaaaaaaacaaacagagggagccagagagatatcaattttagtttttcatgttttctcttgcttctttgttcctcacattcttcttagactctgtcaaaacaatgttt

SEQ ID NO: 524971 - DNA, 201 bp, Homo sapiens
caggctggctggtggaaactagcactgttcccagtcctgtatgagcactggctgttgttctctctaatcctttcaggtggttcttccctggaactgggtartttcctcacatacatgcactaatgagcattctacttatcgcttgaggatgtatcctctgcaggtctttggggtcctctcactttgtagctttctcttttc

SEQ ID NO: 524972 - DNA, 201 bp, Homo sapiens
tcaccaaatagagaatatcaataaagagataaaattataaaaaacaaaatagaaattctggtattgaaaagtattaagctaaaatgaaaaatgcaccagaraggcccaagagcagattttagctgacagaagaaaaaaaatggtgaactttaatgtagatcaattgatattatccattgtgagaaacagaaaggaaaaata

SEQ ID NO: 524973 - DNA, 201 bp, Homo sapiens
ggaaggacttgtacacagtaggttgcaaacagaaagcaggtttatattttctccaactggtccttttaattcctttctgttgagttgctctttcgctcccratgaatggcaaaatggcatggcttttaagatagtatcaggcaacataaaaatccattgtagtttccaaactataaaaatttcagatcctcatccaatttg

SEQ ID NO: 524974 - DNA, 201 bp, Homo sapiens
gtttagtatcttctctaggacgtaagatacttgcctcgtattgtgttgctctcagcctttgtggcctctgctcaagacaggaaagctcacagatatcatartgttatataaacataggattcatctggacagagatagcattcgaactataggtctgcctaagaacattgaggaagagagagagagaagaaaaggaatctc

SEQ ID NO: 524975 - DNA, 201 bp, Homo sapiens
ttaaaagttgacatttgagctgagacaaccgtttctaagctgaagtagaattaagcatattgtatactgacatttttcactgtccaaataagcttaaaacraataatcttagaaatgtttgtttggcatcagtgaatatataaatgaattaaggaatgtatgtaatatgtccatacctcaaacaacatgaaatatttgaga

SEQ ID NO: 524976 - DNA, 201 bp, Homo sapiens
gagtacctcacgttgccaatttgagcttcacccatgcctgatttatataaggtagatgatgagatataggatttttgagctgatgagattttggactttgrgtagacactattatgggttgagaatattgaggaccttgagatgaatatattttgcatgtgaaacagatgtgaatctttagggaccagagagaagactgtg

SEQ ID NO: 524977 - DNA, 201 bp, Homo sapiens
attagccatgaaatgttaagtggcttctagaaggtgaaggaggcaggaaaatggaacctgtttcagagcctccagagagaccttcatgacctgtgtcatayttctaatctacagaactctatgatagtaaatttgattgttgtaggccactaagtttgtgataacttggattcttatacataaaaattgaatgtggctccc

SEQ ID NO: 524978 - DNA, 201 bp, Homo sapiens
ctcattcatgtgtttgagttgaccccaagcatatttttggtgcaaggtctacagtcttgggagctgaggacctgattgaccttcataccagggcttagacsttgaacacggttgttaatatgaagccctagcttgaggttgcatctgtttgagaaatacttcctcaggggaaaagaatgattaagacaaggtgtcaatttc

SEQ ID NO: 524979 - DNA, 201 bp, Homo sapiens
gggaaataatcttaaattcttgcacagagttcatgagtcattgttttgattgttcttgtaaaggtacttacttttttttcctgctgtcaatgtgaaatctsacattcaaatccttttggagggagggatgggaaagtaagaataaaaagaagcaagcctcttttcaccaatttgctcctttctataggattaataataacc

SEQ ID NO: 524980 - DNA, 201 bp, Homo sapiens
tcacagtgttctcagacacagatataaattctccaatagaaggcagatggagtttttggagaagtgattagattcaaggttggggcatgggatgaagattrgtatggaacatcttgtggtgtctgaaagtaaggaagtgctgaaaaatgaaagggtggaggcatgtctaccaacctcaaataaaaacagttccccatggca

SEQ ID NO: 524981 - DNA, 201 bp, Homo sapiens
aacacctcccaccaggctccacctctaacactggggattacaattcaacatgagatttgggtgaggacacagatccaaactatattaggcatccaggacartgacaagatagtgcttaccatgatacttggcatttgttcattcaacagcagctcagcaatcactaggtcaggtcaccattagccttagggatttgtggct

SEQ ID NO: 524982 - DNA, 201 bp, Homo sapiens
acacctcccaccaggctccacctctaacactggggattacaattcaacatgagatttgggtgaggacacagatccaaactatattaggcatccaggacaawgacaagatagtgcttaccatgatacttggcatttgttcattcaacagcagctcagcaatcactaggtcaggtcaccattagccttagggatttgtggcta

SEQ ID NO: 524983 - DNA, 201 bp, Homo sapiens
atgctacaaccagaagtagttaatctcaagaccaaaccaaatcaacaaaacaacaaaactgttgtctgaaggtggaatggctactttacagctgttggtartgtcaccatttatgattaattagcagtgatattagagacaatatctaagcatcagcttaaattttgaactagatggtctttgaaaaaatatggctttatg

SEQ ID NO: 524984 - DNA, 201 bp, Homo sapiens
aggtatacacactgtatggatgatgctgggaatacagaagtcacacatggtacattcctggcttctgggagctcacagattaatggagaggactaaggggmagaaatgagtacaacacaaacacaatgataagatcacagggtcctgtgagatacagagggaggcatctaatccagatgtatgtggtgtggagggaggggt

SEQ ID NO: 524985 - DNA, 201 bp, Homo sapiens
aacactaatcatttggttgttgtttgtatgtgtcttaaggaagctttagattgaatatgtttacataagtgtgaatatgtatatatacacatgtgtacatrtacacatatgtgtacatgtacatatgtgtacacacatgtgtgtgcatgtacatatgtgtacacatatgtgtgtgcatgtacatatgtgtgtacacatatg

SEQ ID NO: 524986 - DNA, 201 bp, Homo sapiens
ctcagatatgggcaactcactgtcttctccctttcctaaacaaagtgggctgtcattccagcaatcctgcccaccatagggtatggccaggtgagtaggargattcagagtgaggatctgcagaagagacacagaatattgactacagcttacttttctctaagcgtgctcatttctagtattcctgttgtcatgctcaga

SEQ ID NO: 524987 - DNA, 201 bp, Homo sapiens
cagtgaatatataaatgaattaaggaatgtatgtaatatgtccatacctcaaacaacatgaaatatttgagaatgtatgaaaggtcaaatttatgtttttycccctgcattccaaataacagcatcatgttctagttaagaaatatagtataacttagtttaatgtattttatgccctaaaatgctttcattataaatttt

SEQ ID NO: 524988 - DNA, 201 bp, Homo sapiens
tgtcaggttgcttctatgccaccattttggaacaggaagtcagtatttatagttttactgtaatatattttaaaacacttaaattattaaataaaatacastttttcttaacttgtagaattccagatacattctacattttctatggttttgttttaacaaaatatttaaccaagtgaaatatttataagaacccaatat

SEQ ID NO: 524989 - DNA, 201 bp, Homo sapiens
atttgaacagtaatttcccagttgttgtttcctttgaaactatccatgagacggaagcaatgatttcccatttcaaaattaggaaattgaaactcaatacyattatgcaactatcagatgccagagctggaaacagaatccagttctgacgtccagtccaagccattctagattgcacaatggagacgtaacccacaatga

SEQ ID NO: 524990 - DNA, 201 bp, Homo sapiens
atagattacaatagaaaccattaacttaccatgtttacctttaaatatttaccacctcatttaaagtgggcaagaactttacaatcatatactttcaagtytttcccccttcttctttacatgattgttgtcatgcaatttattctgaacaggattattggatgaaaaacttagttttatatgttttaaacctatgatttt

SEQ ID NO: 524991 - DNA, 201 bp, Homo sapiens
tgtgagaatctcttctgtgcctcttgccttgctcctggtggtttgttggaaatcttttgtgcttcttggtttacagatgcaccagcccaatctctgccatratgtccacacggcaatctccctgttggtgtgtctctgtccatatttcctctttttataaggcaatgatcatattgagttaggagctcagcttacttcagt

SEQ ID NO: 524992 - DNA, 201 bp, Homo sapiens
ttcgctcatgtaaaaaattaagctcattttttcatcatggcagataattaagttttctaggttgcagcctttagtgttaaaactacatagtctggccgggygcggtggctcacgcctgtaattccagcactttgggaggccgaggtgggcagatcacgaggtcaggagattgagaccaccctggccaacatggtgaaatcc

SEQ ID NO: 524993 - DNA, 201 bp, Homo sapiens
ttgtagtgagatttctgaccaaacggttcatctgggaatatgatcccaccctcggtaggtcaaattttgtttccttctcctcttcaataaaaacttatggycccaaagaaagaataatattttctgttgcaacatttttaagctccttttagctgatgtggaagtgcttttcaaatcatgcaaagaagccctctatgaggc

SEQ ID NO: 524994 - DNA, 201 bp, Homo sapiens
ttcattaagtaaattttatatgagttttatataatctgagagaacatatataaaagttttaactttcaatgtggagcaatatcaataatgtataccacatytgctttcatctctttaatagaggcaatattagtcttaagtggctgagttaggaggaagatagagagctattcttttcattgacttatttgcatttatctg

SEQ ID NO: 524995 - DNA, 201 bp, Homo sapiens
tatgttataggactctaaggtctagagcaatattgtaaggaggtctaggttccatttttcacagtggcaggaattagctgtgtgatgataggcaagtttayctttctgagataattttcacatttgtgaaataagggaattggactaggtcatctttaagagcccagaaaaataaagctgaaaccacaccgtaaatttatt

SEQ ID NO: 524996 - DNA, 201 bp, Homo sapiens
ccagatcccactagaactcactattgtgatgacagcaccacgaaggaaggtgttaaaccatgagaaaccacctcatgctccaatcccctcccaccaggccycacctctaacatttgggatgacaaatgaacatgagatttgggtggagacacagatccaaactatatcagctactttgactaaaagtttcaaaaccaccac

SEQ ID NO: 524997 - DNA, 201 bp, Homo sapiens
tcctaaacttttcggtttcagactcacttttttaaatttgatttttatggagaaagcctatcctaataattcaattagggatgcaggcaagggaaggaaaygggggagggggaactaaacctacgctccacttgcacttcataaaagaaagaaattgctttaacatccgagtgtttcgaaggatacaatgtaaaaaaaatc

SEQ ID NO: 524998 - DNA, 201 bp, Homo sapiens
cgcatttcacaatggaagaagaaatcttttgttaatctactttaaataaattttataaaatagttttaaagaataacaaaataaaataacaagtaaatttstgtgctttggtattttgctagcttttttgggtattttcagatctcactggacccaagtccccaaagtccaaaagagaaaaaccaacctgttcagcattta

SEQ ID NO: 524999 - DNA, 201 bp, Homo sapiens
tgatcctaagagacagaggctgcagtgagccaagatcgcgccattgcactccagcctgggcaacaacagcgaaactccatctcaaaaaaaaaaaaaaaaaagttaaaagttaattagtttagtgttactttctgcttctgagataggattgtctggtgaacagtaatttaattcttcaaagtacaagagagagaaaatgac

SEQ ID NO: 525000 - DNA, 201 bp, Homo sapiens
tgttgaaattcgcaaaaaaaaaaaaagctaaatcagtaaaaagattaaccacatgcaatatccctttgagcaccaactcctctttgactacataaaatatrcttctagttattaaactactagtgagtgcagattttaaattatacatctctcacagtgaaattgaagtgtaacttttaatgcctcattccattttgaaac

SEQ ID NO: 525001 - DNA, 201 bp, Homo sapiens
cagcaacttcattgtgaccccagtgctctggcaagctgggcctgtgtcagcaggccacaggggtggatgagagccaagacttttgtgattgcctctacccwcattttcctgtggaaacacagctcagaaggactatgctggagggttgatcagcttggttatgtatttgctttgcggaaaccttaagttgtccttttatgt

SEQ ID NO: 525002 - DNA, 201 bp, Homo sapiens
aaagatgaacagtttatatcactttactttgatgtcattctagaatcaacatgaatatgtagaaagcatatgttttgcaatttaacaattgctattgcatyacaattggctcatcttttttagaattatagaaatgtttaattgttttagatgagaaaaaataagatctgtactttataatgtgatattatatctttgagt

SEQ ID NO: 525003 - DNA, 201 bp, Homo sapiens
aaaaagctaaatcagtaaaaagattaaccacatgcaatatccctttgagcaccaactcctctttgactacataaaatatgcttctagttattaaactactrgtgagtgcagattttaaattatacatctctcacagtgaaattgaagtgtaacttttaatgcctcattccattttgaaactcatatttttcttacagtata

SEQ ID NO: 525004 - DNA, 201 bp, Homo sapiens
aagcagaatacatccacttgagcataaaaaagtccttcttccctgcaagactgctctcatatacaaaggaatatttttccctcttgtttaaactaggttcrtttggaattactacctgtcactactgtattaatatattattcacattatgagaaatataaaatgtagacattttggaagaatgagattaacataatagaa

SEQ ID NO: 525005 - DNA, 201 bp, Homo sapiens
catgttttcaaattgcaggtatatgcctacgtatatgtataaaaggcagacctctgtgcaatttttaagtcatcactgacctttcttgtatgcccaggaaraaaaaagagaaatggtgcttaagagggcataggaaaataaaagtaaacaaaaatctagaaaaaaaaatgaaagtgaattgttactggtaggtggctaagt

SEQ ID NO: 525006 - DNA, 201 bp, Homo sapiens
atcatagtcacgaaacgaggatggtggagatctgtaggctggtcctagacaccatttatgaacagaaacaacttttctttaaagtattttattttctaccrtttctaaatccagtatccatgtgaattggcatgttggcataatcatgctgttggctatttagtacaaataggctaaatattaacctaagaatcatctatg

SEQ ID NO: 525007 - DNA, 201 bp, Homo sapiens
ttgcttgaataaggcaggaaaatgttgcagtgagccaagattgcgccgttgccctacagcctgggtgacaacagcaaaactccatctcaaaaaaaaaaaaaggttctcagagcatttatttttgctattaagaatagctaaatgactaagaaaatgtagtaaatatgtttggccttaattcatgtttgtagctgacattgt

SEQ ID NO: 525008 - DNA, 201 bp, Homo sapiens
tccatgtggttagaaattatagaattttctgcctttttaaggccgaatagcattccatagtgtgtgtgtgtgtgtgtgtgtgtgtgtgtgtgtgtgtgtgtataaaatgacattctaaaatccatttatccattgatgggcattaagttgttttcatgtcttggctattgtgaaaaattctgcagtgaacatgggagtgtg

SEQ ID NO: 525009 - DNA, 201 bp, Homo sapiens
aatgaaatgtccagcataagaaaatctatagacacagaaagattaagttacctagggctggggatggatgggcgtggagtgagaattgactgctaatgcakatggggtttctttttgttgatgaaaatattctaaaattagactgtgttgatggttgtacaactctgcaaatttactaaaaccattgaattgtacacttaa

SEQ ID NO: 525010 - DNA, 201 bp, Homo sapiens
acaaaagttttctaaaaagccatgtttcagcggcacctgagatgctttgcacctgctgcaatccctgtgtgcctcatttcagcttgtcaagtggtcggtayccgcgcatggttactgtgctgcccagcgagggtcacagtgctttgtacttagaattcgtgaaatatacacaatctaacactactgttttcagtacaatat

SEQ ID NO: 525011 - DNA, 201 bp, Homo sapiens
agctttaaaaacaaaatttgcattctaaagggaaagagacataataagaaaattaatacttcaatacacagtgtgtcagtaatagctataatggggaaaamtgatgagactaaaaataatattaagagttgcaatttttaacagaataaccagaatatttcagcgagaagattgcatttaagcaaagatctgaaaagagtg

SEQ ID NO: 525012 - DNA, 201 bp, Homo sapiens
atccatgtggttagaaattatagaattttctgcctttttaaggccgaatagcattccatagtgtgtgtgtgtgtgtgtgtgtgtgtgtgtgtgtgtgtgtgtataaaatgacattctaaaatccatttatccattgatgggcattaagttgttttcatgtcttggctattgtgaaaaattctgcagtgaacatgggagtgt

SEQ ID NO: 525013 - DNA, 201 bp, Homo sapiens
aactttttatattgaaataatattagataattatacagagttgcaaaaataatagagagttcctgtgtaccctacacctaattcccctcaatgatgatatyttacatgaccacaatgcattagcaaaacaaggaaattgatgtagatacacaattaagctacagatcctagaattattgttttttaactcaattcaggccc

SEQ ID NO: 525014 - DNA, 201 bp, Homo sapiens
caagtgagtattttggttttcactaagtcagacagcttataaggtaaaaactccacacacgcgcacacacacacacacacacacacacacacacacacacatactttctctgtttttctctttcttgaacctaaaatctggttaatgtcaattatagcttgaccacagatgatcataacaatacttcgtatggcttatatt

SEQ ID NO: 525015 - DNA, 201 bp, Homo sapiens
ttccatagagctgcatccatactgttaaacagggatgggcaatgtgctcactcctacgtatctatagatattacctgactgctttctcatttgacttaacrtgaatccagttcaacaaattgttgaccaggcagagcttacccatggaaacttgaagaggaatagaaatgcctttctcagattttaaatggcctgaaagag

SEQ ID NO: 525016 - DNA, 201 bp, Homo sapiens
tcaagtgagtattttggttttcactaagtcagacagcttataaggtaaaaactccacacacgcgcacacacacacacacacacacacacacacacacacacatactttctctgtttttctctttcttgaacctaaaatctggttaatgtcaattatagcttgaccacagatgatcataacaatacttcgtatggcttatat

SEQ ID NO: 525017 - DNA, 201 bp, Homo sapiens
acaagagaatcacttgaaacccgggtttcagtgagctgatattgcaccactgcactccagcctgtgcaacagagctagaccctgtcaaaaaaaaaaaaaaaaggaaagtatagggtagcaaagatgcaaagagattccccctattctacattctgaaagtcggtgacacccatgttagaacttggtatgtccaggagctaa

SEQ ID NO: 525018 - DNA, 201 bp, Homo sapiens
ttgcacacatcatagcaaagaacttagtaacaatctccattagaccttttttctcccagagagtaattcttcagctgccagcctagagatgtttttctttmttgatattttccccataaatctctaagttatactctattgtcccaacaaattcagattccacttaaaaaataatctcacttgaagaacttctgaggtcaa

SEQ ID NO: 525019 - DNA, 201 bp, Homo sapiens
atatgctgtattctggagaatgttctaggtgctgagaaaaaacatgtattctgaagtagttgggtgaaatgttctgtaaatgttagttaggcctattcaawctcctgtatggtttaactctgctgtttctttgttgattttctgtctggatgatctgtccattgcttagagtggggtgttaaagtcccctactattactgt

SEQ ID NO: 525020 - DNA, 201 bp, Homo sapiens
gtgccttcctcagatggctttccaaaacatctgtgggcaatattcccttcactgaacagcaatggtactttaagtgcaaaacaaaacagcatttacctttkgcaatttatagttcctgggttatttcatgtgccttgtggttatctcaggagccctttattaatctccgaactgtaggcaagaaggtggtcttgttgtcat

SEQ ID NO: 525021 - DNA, 201 bp, Homo sapiens
gtacttttaaattaaaaatagcatctacaggatgatgacacttagcatatctgtgccatttcacatacctgtccatcaggatgtctgttttctacaatatmtggaatgatgatggtccccttatgttaacaatggttattatttctggatagtgtgattctggggatgattttctacatctttgtatttttctactgtttg

SEQ ID NO: 525022 - DNA, 201 bp, Homo sapiens
tagttccaatatggtatctacactcctttctcaaggctgaactttgtaacatgttaaggtacaaagccagaggactgtgctattcaaggactactgtaagkttttcgtttctcaaaagacaatgagaaaaaaagaagagaatttgtatttcttgctgttttgtcataggtgagctcctttgtgcattttaagcacatgtaa

SEQ ID NO: 525023 - DNA, 201 bp, Homo sapiens
ctgcctattctatttgtacaaccttctgtgccttcctcagatggctttccaaaacatctgtgggcaatattcccttcactgaacagcaatggtactttaartgcaaaacaaaacagcatttaccttttgcaatttatagttcctgggttatttcatgtgccttgtggttatctcaggagccctttattaatctccgaactg

SEQ ID NO: 525024 - DNA, 201 bp, Homo sapiens
tcaaacatatcctatcacaacttcttctttatcttaattcattcaattcagtaggtattctttaactacctactatatgccaggctgtaggtatacacackgtatggatgatgctgggaatacagaagtcacacatggtacattcctggcttctgggagctcacagattaatggagaggactaaggggcagaaatgagtac

SEQ ID NO: 525025 - DNA, 201 bp, Homo sapiens
tttgatggctactttcatgaaacattaatcagacagataattacttgcattttatatccatgtatatgaacagttttgcatgaaacaaaattattgtttayactagctgcagacacttgcgtgttcaatgtttcaaagaaatacttgccagcacctcttctcatttataatttaaatagttaatatatctccacatattat

SEQ ID NO: 525026 - DNA, 201 bp, Homo sapiens
agtgagagagtgaatcatgtggatatatggacaaatgtattttaggaaaaggaaacagcaagtgaaagggcctatttctgcaaaaagaaggccagtttagrtggagtagagtggaatggaagagaagaaagaggtcagagagattcttggggaggtgaaactatgtagcttcttgcaggtcactataaagactttgactat

SEQ ID NO: 525027 - DNA, 201 bp, Homo sapiens
aatgggccaagttggaattgactgaggagagaggggataaatgatagggatgtctttagagtggaagaaatagcatagcagaagtggagacaagggaaaayaaggaacctttgtaaaatgaagaaacagttaacttggctggatcatggagttcaaggggaggctggagagagatgaagctggaaagttaagtagagtgca

SEQ ID NO: 525028 - DNA, 201 bp, Homo sapiens
acacagaagtccatgctaccatgtatggcagcagcctgtgactgaaatatgattgtctgaagatctatgatccttgtgtgggtgtgacaggcacccctaaygagtcctgtcctctctccttgagtgtgggtagaatccgtaactgtcttctaacctataggaaatggcaagggtgataggatgccacttacataattaaaa

SEQ ID NO: 525029 - DNA, 201 bp, Homo sapiens
taagtatcatagtctaacttaatggagcaatccgaatacgtaaatgtaagtaagaatccaacataaaaatttctatgtgtatatatgatttattaaacatkttgtcaatagtatttcagtcttatttggtttagtgtttcttttatcattacataatctttggttacgcaaagactctcactgaatcatttattcttttat

SEQ ID NO: 525030 - DNA, 201 bp, Homo sapiens
aaattcttattttcccattctttttgcataacacctacataggattaaggaatttgattcaattggatgaattgtgtgaatattatgttctagttctaaaraatcttgcaagcccatgaggttggctatttattttcaatacctttcaatctagaagaaaccctgggcttactctctaggcctccttgctactctgccctt

SEQ ID NO: 525031 - DNA, 201 bp, Homo sapiens
aagtccatgctaccatgtatggcagcagcctgtgactgaaatatgattgtctgaagatctatgatccttgtgtgggtgtgacaggcacccctaatgagtcmtgtcctctctccttgagtgtgggtagaatccgtaactgtcttctaacctataggaaatggcaagggtgataggatgccacttacataattaaaagttaca

SEQ ID NO: 525032 - DNA, 201 bp, Homo sapiens
gtagatgctcaataaatattaattcattttccagtcacttatgaattcccaaatttcttttgtttaaggattgtggactcttccaagattcacaatgatayggtgaatccaaagactggaaccaaaaagatttactcagtgctttagttttaacaacagtaaattgtctaccaacacccatcatggctaaaagtgcggagg

SEQ ID NO: 525033 - DNA, 201 bp, Homo sapiens
tggtccttattgttcctccttaatcaaaggggatttggtgagatctctcatggccctgacaggctgtgaaggagaagttccccttgttccaacttcttcamagctaaccagggattgctctgtctctctcttcttctttaattccaggtcactggctcagcctaagagggagggggtataagtccacaccaaaatttatct

SEQ ID NO: 525034 - DNA, 201 bp, Homo sapiens
tgtgcacagcatatagcccaggacagctttgaatgcagcccaaaacaaattcttaaactttcttaaaatgttatgagattcttttgtgatttttttaaagyttatcagctatcattaatgttagtgtattctgtgtgtggcccaagacaattcttcttccaatgtggtgcagggaagccaaaagattggacacccctggaa

SEQ ID NO: 525035 - DNA, 201 bp, Homo sapiens
ctgtacccttctctcttatcttactgttactgagaagtgtaacattgtaaactactacctagaaatggatagagaattatgaaaatagcatatttgggaaygtgtagagtttaagaaatcatgcaggtttcttaacgtcaagctccctggtttgtaaccttgctgacataagtgataaccaggaggctgtggccttctgcc

SEQ ID NO: 525036 - DNA, 201 bp, Homo sapiens
atggcactgaaggtactttgaaaaattacaagtctgatacaaatgtcggcttaatagtaaggttctgttattattgatcttcatccattttttccccttaygttccttaacatttgtctttggagaagcagcatggtgaattctctggctgtccgctactgaaggccagatgaatacactcagtccagcagttggctgttt

SEQ ID NO: 525037 - DNA, 201 bp, Homo sapiens
tctttatagctctgccctctttttatatcttttcaaacaccatgctttggttttgttttctttttcatgatgttttttcttttatttcttttcttatattrtcttgaatttattctgtttcttctcttctaatttattgagttgaatacctagttcactttttctagatttttaagagttataacatcttctggaatcaga

SEQ ID NO: 525038 - DNA, 201 bp, Homo sapiens
tgggaccaatcacaggcacacaccaccatgcccagctaatgttttaattttttttgtagaaacaaggtctccctattctgcccatgctggtttcaaactcytggcctcaagcgatccacctgcctcagcctccccaagtgctgggattatagtcttaagccaccacacaaggcttaataccttcttagttagataatgtct

SEQ ID NO: 525039 - DNA, 201 bp, Homo sapiens
atccactgttaaaatacatagcagagtgccacacacacatacaaaaaacaaaacaaagcaagctttgaaaaacctaataaagtttttaaaaacatttttcytggagataactacagatttatacgaagttgcaaggaaatatacaggaaagttccaggtacttttgatcctgcctcccccaatgttgatatcttacatatt

SEQ ID NO: 525040 - DNA, 201 bp, Homo sapiens
acccacctggggcctggggtaccttgccacactgaagggaaggacacaggcctgcctggctttgcacttgctaattgtagagtccaagggtcttcagtgarcataggaagtagccagggagtggttttggcaggctttaggtgagacctagctatgtgctgacttcagatctgaccgagcacagtcattgtggaggaggct

SEQ ID NO: 525041 - DNA, 201 bp, Homo sapiens
gtcattatcagtctctccaagggcctccactatccagggctggttgaggactttctttggactactgcaatgttatgtgctgtgcttactagagtctcagyggcagaaggtgaaccaaaaacagagttttaaagctattgatgtctgtgtttggtttcttagtggctaaatgacatttccccagcgaggggagggggtggg

SEQ ID NO: 525042 - DNA, 201 bp, Homo sapiens
tgtttgttattttcacttgtattacagacttcttagcaaaataactttgttttgtactcttaaaatgaggaacacagtgccttccttacatgtttaccttmatacatgtttgatgattgactggtggaaatatctgaacatgtattcatcttcacattaatacttcatccattcttttcctctactccgctcctgttttac

SEQ ID NO: 525043 - DNA, 201 bp, Homo sapiens
ggctttccaggtattcaaaaggacttgggtgttggaatttaagtttttgttcactacagttgtatctgcattagggggtactccaagtccagtaatgctgyggttcttaccaattggcagaggtatcaccctggtgatcttggataagatctggaagaattctctggattaccaggaagagacttttgcactcttccttta

SEQ ID NO: 525044 - DNA, 201 bp, Homo sapiens
tcatatgtgtgaattttatatctcttcttcgtctttcttctgaaaacttctaaacttgttgtaatgcttttcattacaactttggcctggcccctgacccrgatgatgtgggacccagcttgtgatgtcctgtaacatgtgcttcatggaaagtccagctgtgatcttttgaagctcccattgtgcagtgtgcaagctgtg

SEQ ID NO: 525045 - DNA, 201 bp, Homo sapiens
tgtctggtggtatctttcttggagggaaaggccaatctgaggtgtaaaagtctcataaagccagcaagtcacaaaatctcatacaggcttctaaagccagrgcataagtctgccatggtgcttctaacgttgaccataaaagctccagatttaaaagaatttaaaacaccagttctccccatcagcacgtaacattacatt

SEQ ID NO: 525046 - DNA, 201 bp, Homo sapiens
cactgggcactgagcaacacctgtgagggctcttcataggaaaaaggctgatattgggtgtgtactggttgagccaactgcactgtaattggagttattaytataaatatgtaatcacttttacctacagataagtgaaatccaaggagacactgaatgattagcacagtatttggcacacaattgatgctctataaatgt

SEQ ID NO: 525047 - DNA, 201 bp, Homo sapiens
gatgtccctggggcttttcaagagctctaagatattcctggggatctagatggctgcacttacatgcaaggttgtgtgtatgcccagtaaagacctgagayggccccagtctctagtctttggctgatcttgaagccctgtgcaagcaggaaatgaagtctagggtagagtttgtaaactggctgcctgaacatggaaagc

SEQ ID NO: 525048 - DNA, 201 bp, Homo sapiens
ttgttaaggccttggtaaatttgtgcattctgatattagtaccacactgtttggagtaatgttatatagtattatataattttaaataagtttcttgagcrtctcaaaaagtccagctggacatttcatttgaattgcattaaattctagattgattttgtggaaaactgacatgtttttaaagatgttgtttctccattt

SEQ ID NO: 525049 - DNA, 201 bp, Homo sapiens
tatttttgtactattgccaatctgatcggcgtgcagaaatagattattattattttgatttttctaattactagcttggtcacattttcttaggttaattraccataaattagtttgcttgggctgctgtaacaaagaccacaaactgggtggcttaaacagacacttattgtctcacagttctggaggctggaagtctgg

SEQ ID NO: 525050 - DNA, 201 bp, Homo sapiens
cttgcagtgagccaagatcacgacactgcactccagcctgagtgacagagcgagactccgtctcaaaaaaaaaaaaatatatatatatatatattttttttatatatataactagttatatatatagtagttatatattactatataaaattactagttatatgtaatatatacatatattttatatatatgcgtttatat

SEQ ID NO: 525051 - DNA, 201 bp, Homo sapiens
acaatttccattgtggcataaatcaacataactaactgctgctgttactgtgctggctaagtgtccatactaaagtgttgaaattcgcaaaaaaaaaaaaagctaaatcagtaaaaagattaaccacatgcaatatccctttgagcaccaactcctctttgactacataaaatatgcttctagttattaaactactagtga

SEQ ID NO: 525052 - DNA, 201 bp, Homo sapiens
caaattctttttcaaacaacaccattttatgtatttaataaaattgccttggatatgttaaactacaatgacaactttaatacatctgtattatctcaaaygtttaattgactaagatatatacagattttattttaaacactcaaatacagatctaacaacatcttgctaagtactgaaattgtagaaattgtaaatcaa

SEQ ID NO: 525053 - DNA, 201 bp, Homo sapiens
aggcggagcttgcagtgagccaagatcacgacactgcactccagcctgagtgacagagcgagactccgtctcaaaaaaaaaaaaatatatatatatatatattttttttatatatataactagttatatatatagtagttatatattactatataaaattactagttatatgtaatatatacatatattttatatatatgc

SEQ ID NO: 525054 - DNA, 201 bp, Homo sapiens
atatgccaaatgtgtgtatgtatattttttcaggaaaaggatccaatgctttcattccattttttaagtgcctgtgacatcccgctccaatttttttttttaatttaaaaccactgttttcaactatactacaagtgtaagaaaatgtttggcatatgtcttatcaatttataaggacaatagagtccacatatttccatg

SEQ ID NO: 525055 - DNA, 201 bp, Homo sapiens
ctcatttggtgggattgctggctcatatggtagttctattttcagctttttgagaaactttcatactgttctccataatgactgtactaatgtatgttctyaccaacagtgtacaagggttcctctgactccccatcctttccagcatccattatgcccagtctttttgatacaagccattttaactgaaatgagggaata

SEQ ID NO: 525056 - DNA, 201 bp, Homo sapiens
tgattaaataaaaatttgtagcattgaattcatgtattaaaagggaataaagatctaaaatcaataaaataagcttccacctatttctaggaaactagaartagaagagtgaattaaacacaaaataaacagaagataagaaataataaaaactagaacagaaatcaatgtaactgaaaatagaatatctatagaaaaatt

SEQ ID NO: 525057 - DNA, 201 bp, Homo sapiens
atagtaagttttcattattatatgaatgttgtactgttgtagagtatatattaaatatcaagggtctttatagggtatgttactaggattatagacaaaaattcaaaaggcattcatgatgtgaaggttatgagtaatattccttgaagcacttttaattggagcagaaattcttttcctaaccaaaaaaaaatctgtcct

SEQ ID NO: 525058 - DNA, 201 bp, Homo sapiens
agctggaatggaaattgagtctttaggctcagtgcagaactctctcgctgttgtgttgctctcctgctaataaggcagactgcaacgaagaagctaaatgrtgcttatatttcacctcttatttgtggtgagtgattaaagctgcaggggaccacatccaaatcattaatactgaacttgaaaacagcacataaatctcaa

SEQ ID NO: 525059 - DNA, 201 bp, Homo sapiens
aacccgggaggcagagcttgcagtgagccgagattgcgccactccagcctgggcgacagagcgagactctgtctcaaaaaaaaaaaaaaaaaaaagaaagagaaaaagaaatgctatctggatatgagttagtacattttaaatatgtgtttcttttcccctttctttgacttagttccattctgggttaccagcttaaaa

SEQ ID NO: 525060 - DNA, 201 bp, Homo sapiens
accttttattaaattttacttttacatgttcctttgttttacttacttacacttactgacacttctgggagagttcctcaacctaactctcatcaggtcartcattcattcattcggttctttatttctgttgttctagttttcatacagagaagcaccagttggcacttatttttgacccgtggtttccattttatgtga

SEQ ID NO: 525061 - DNA, 201 bp, Homo sapiens
ctggaaccagtaagcgtttgagctggaatggaaattgagtctttaggctcagtgcagaactctctcgctgttgtgttgctctcctgctaataaggcagacygcaacgaagaagctaaatgatgcttatatttcacctcttatttgtggtgagtgattaaagctgcaggggaccacatccaaatcattaatactgaacttga

SEQ ID NO: 525062 - DNA, 201 bp, Homo sapiens
acaccaatacacctattagaatgactaaaatccaaagccaaaaacctgacaaagctatattctaatgctgagaaggatgtagaacaacaggagctctcacwcgttactgatgggaatgcaaaatggtacagccagtttggaaaacagtttggcagtttcttacaaagctaaacaaagtcttaccataatccagccatcaca

SEQ ID NO: 525063 - DNA, 201 bp, Homo sapiens
tggaccactccaggcaggttagcacagaagaaggagagaagctggccacagaattggcttgtgctttttacgagtgctctgcctgcactggagaagggaayatcacagagatattctatgaattgtgtcgagaggtgcgtcgccggaggatggtgcagggcaagacgaggcgacgcagctccaccacgcatgtcaagcaag

SEQ ID NO: 525064 - DNA, 201 bp, Homo sapiens
tggcccctgacccagatgatgtgggacccagcttgtgatgtcctgtaacatgtgcttcatggaaagtccagctgtgatcttttgaagctcccattgtgcartgtgcaagctgtgataatgaatgactataactagagctgcccacactatatccctcagtgtctcctttttttttctctgttgattggtagttttctccat

SEQ ID NO: 525065 - DNA, 201 bp, Homo sapiens
caaaaattatacatttgattgcagcactgtggggtgggagattgccttccagcaggtacagatcttttatcctgggtttgaacagtgattgatggcaacarccttaatgcacttctgcacttcaatttagaaagagacaagcagtgcagagccctgggtttcagactttctccaaactgcattggcttttgatatcctttg

SEQ ID NO: 525066 - DNA, 201 bp, Homo sapiens
catgacttattttgatattttggatacattaactcacttaggagaattcagaaaagaatgggtgattaaagttcattacagctgaataaatgtgtctaaarcagactcttgtattctgaaagtacagtctacaactgataaaaccttatgattcttttctcccccattatgcccctatatatatcaagatttgggtacttt

SEQ ID NO: 525067 - DNA, 201 bp, Homo sapiens
cttacacagtttgggaaggcttttttaagaaaaagaatacaaaactgaaaatacaatattacatgtaaaagcaaatatttcttttgaatgaggaaaaaaaatcacaataaattaaacaaatgttaataaataccacaaacaatataaaaaatccagaaaaataacctatatttgtatctgacatatctttattgtaatttt

SEQ ID NO: 525068 - DNA, 201 bp, Homo sapiens
catttgattgcagcactgtggggtgggagattgccttccagcaggtacagatcttttatcctgggtttgaacagtgattgatggcaacagccttaatgcasttctgcacttcaatttagaaagagacaagcagtgcagagccctgggtttcagactttctccaaactgcattggcttttgatatcctttggttttgaactg

SEQ ID NO: 525069 - DNA, 201 bp, Homo sapiens
tttcaatctatttgagaaagaagctaaaaagtagagatctagggattataaaatttaaatatgtaaatatatgcatccagctccccatttctgtgtgctcygtgcctctggttaacaccacaaatagaaaagtataatatccttgttataaatggcaacaattatctaataagtcatacagctaaaaaaaaaaaaaaaaaa

SEQ ID NO: 525070 - DNA, 201 bp, Homo sapiens
tagacaaagattttaaatcagcttttatgaagtgtttaaagaactaatagaaaacatgaaaataaatcaaggaaagtatgacaacaatatctcaccaaatrgagaatatcaataaagagataaaattataaaaaacaaaatagaaattctggtattgaaaagtattaagctaaaatgaaaaatgcaccagagaggcccaag

SEQ ID NO: 525071 - DNA, 201 bp, Homo sapiens
ttgactaatatgaatgtatgttattcaacccaaagagacatgaagaggcccaaaagtgactctctccattgccccactgcatgtgtttgtacactgaatgyttacagatagatggtaaatgtgtgtattcacttttactttcagttactatcaagaatcaataccttcataagaaaatttcttgaggaagtactttagaaa

SEQ ID NO: 525072 - DNA, 201 bp, Homo sapiens
ggaaccaaaaagagtgaaaatgggacactctggtaagttatctctaccactttaggggacaggaagcagctgacaagctttagcactacattttcatggtygtttcccaagaatggccataaattacatccttcaagtcagtcccaactagtgggaattcatatgaaaaattacttgctggttctcaagcttcttgcacgt

SEQ ID NO: 525073 - DNA, 201 bp, Homo sapiens
caggtgaattggtgcatttgaagcattccaagtcagtaggacagccagaaatatgaaatgaaaagcactagttttccttagcaatgaaattttgactcctrtgactttgctaatgctgtgttctgctttcctttctgcctattctatttgtacaaccttctgtgccttcctcagatggctttccaaaacatctgtgggcaa

SEQ ID NO: 525074 - DNA, 201 bp, Homo sapiens
ccaaacggttcatctgggaatatgatcccaccctcggtaggtcaaattttgtttccttctcctcttcaataaaaacttatggccccaaagaaagaataatrttttctgttgcaacatttttaagctccttttagctgatgtggaagtgcttttcaaatcatgcaaagaagccctctatgaggctagatgtgtgtttcatgc

SEQ ID NO: 525075 - DNA, 201 bp, Homo sapiens
caaaggaagtaaaagaaaaactcactgaatggaagaaaacactttcaaatcaaatatatgagaagggatttgtagccagaatttataaagaaccctcataytcataatgaaaagatgaataaccaaattaaaaatggacaagggatttgaatagatatttatccacagaagatatacaatgaataataagcacataaaaag

SEQ ID NO: 525076 - DNA, 201 bp, Homo sapiens
ttcagtcagaagagatggtaaagtgaaatgatttttctttccttttccatagagctgcatccatactgttaaacagggatgggcaatgtgctcactcctaygtatctatagatattacctgactgctttctcatttgacttaacatgaatccagttcaacaaattgttgaccaggcagagcttacccatggaaacttgaag

SEQ ID NO: 525077 - DNA, 201 bp, Homo sapiens
acagctcttgtagtgagatttctgaccaaacggttcatctgggaatatgatcccaccctcggtaggtcaaattttgtttccttctcctcttcaataaaaayttatggccccaaagaaagaataatattttctgttgcaacatttttaagctccttttagctgatgtggaagtgcttttcaaatcatgcaaagaagccctct

SEQ ID NO: 525078 - DNA, 201 bp, Homo sapiens
atattgctcattaatgttcttttctttcagtttgaagaactccctttagcatttctcataggagaggtctggtgttgatgaaatctctcagcttttgtttrtctgggaaagtctttatttctccttcatgtttggaggatatttttgccagatgtactattccagagtaaagttttattttttttccttcagcactttaaa

SEQ ID NO: 525079 - DNA, 201 bp, Homo sapiens
aaggttgtgtgtatgcccagtaaagacctgagacggccccagtctctagtctttggctgatcttgaagccctgtgcaagcaggaaatgaagtctagggtakagtttgtaaactggctgcctgaacatggaaagcatgccccaacacacacacacacacacacacacacacacacacacacacacacacacacacacagagc

SEQ ID NO: 525080 - DNA, 201 bp, Homo sapiens
aaaaaaatgaaagtgaattgttactggtaggtggctaagtactttgcaggttgacaatgatcatttcttagttaaggcttttctcttaagaaaaatatgaytgggggggaaacaatactggaaaacaaaacaaaacaaaattaagaattatttctcaaagccaaaaggacatatctctgttcttgcttttttattggaata

SEQ ID NO: 525081 - DNA, 201 bp, Homo sapiens
agacccaagctcgcaagcctgggaggcagcgcggcgggaggagcctgcccctgcccccagtagggggcgccgaagcgccgcactgcagcatcctggccgcygagcgcagcggccttggccgggctcagctcgcgtcctgccgcagtccctccgccgctagtcggagcgagcgcgagtgaggagacccccgccgggccactg

SEQ ID NO: 525082 - DNA, 201 bp, Homo sapiens
tccatccttttctcaccctgttgctaggttcttttttttctctctgtctttttctgtccacaaagatcttctccttttcctctccacatcgtggaagcatrtaataatttctttaatgagtctaggcttttataagacacaaacgattggcttcatacagtttctaccatacatcagttcaattacaaactaccagcttgg

SEQ ID NO: 525083 - DNA, 201 bp, Homo sapiens
cttgcacttcataaaagaaagaaattgctttaacatccgagtgtttcgaaggatacaatgtaaaaaaaatcagttccttacattgaacaattttagttttrttttaattttccttattatactgtggatcggtgaaatctttgtgggtggccagcacacagatgtctatgaaccacatttgaaaaccaccactgaagctca

SEQ ID NO: 525084 - DNA, 201 bp, Homo sapiens
agttttatgcaaagcaaatattttaggaggcacttccagtgtgggattcatgctggtccctttcagatgcctgttgtttctaagtcctcataatcctttgrtgttcaggatgcctggagctctggtgctcctttgcagactggtctttgttggtgctaaaagtcagctgcccaaactctctccttcacccccagggcactg

SEQ ID NO: 525085 - DNA, 201 bp, Homo sapiens
tccacttgcacttcataaaagaaagaaattgctttaacatccgagtgtttcgaaggatacaatgtaaaaaaaatcagttccttacattgaacaattttagytttattttaattttccttattatactgtggatcggtgaaatctttgtgggtggccagcacacagatgtctatgaaccacatttgaaaaccaccactgaag

SEQ ID NO: 525086 - DNA, 201 bp, Homo sapiens
ttactccacgagaagctgaagactatgaacatcattctacatattaactcaattagaatatttactgctttgaaataattcaacgaagaaaatgcttgctrctatagtagcaagtgactcctaaacttttcggtttcagactcacttttttaaatttgatttttatggagaaagcctatcctaataattcaattagggatg

SEQ ID NO: 525087 - DNA, 201 bp, Homo sapiens
ttttggaaaaccgtttggcagctcctaaaaatgtaaaacatggagttaccagatgaccaagcaattctgcttctagatacatatccaatagaaagaaaaartatgcctacataaaatcttgtgcatggaagttcctaggagaattattcataatagcccaaaataaaaacaacccaaatgtccataaatgaatgtatggat

SEQ ID NO: 525088 - DNA, 201 bp, Homo sapiens
aagaaaatctatagacacagaaagattaagttacctagggctggggatggatgggcgtggagtgagaattgactgctaatgcatatggggtttctttttgktgatgaaaatattctaaaattagactgtgttgatggttgtacaactctgcaaatttactaaaaccattgaattgtacacttaaatggctgagttttgtga

SEQ ID NO: 525089 - DNA, 201 bp, Homo sapiens
tagtcagagtatgtcaatgttcttttccttggaaatacatcacttatgaaatattcttttgcatgagctctgggaaatggaatgttttaattttattgaartttcaagaccttttcaggttaacttaaaacccacttaaaaataattcattaacaacatgaaaaataagaagagaaaattgttttttaggtatgtctctca

SEQ ID NO: 525090 - DNA, 201 bp, Homo sapiens
cactggcctctgcatgtttgtaaaatgcaattgctagcagtaatcctgaagatcacaactccagaaaatgtgcttttaaaaaaataatttttctttttttwaaaaaagcactctatttttaggacagttttaggttcagggctaaactgggcagaaagtacagagttcctatatgccctctgtcctcccactcccttcccc

SEQ ID NO: 525091 - DNA, 201 bp, Homo sapiens
ctgaaatctagtttttgtgtacacatctttgctctgagccccccttttttaaagatctgacatttcaaatcacataattttctgagggtttttttttttttgacatcttatttccaatccagctcatttccattcccttccagaacagctcttcagtacagaaatagtttttcatctcctttgactaagggctccaatatt

SEQ ID NO: 525092 - DNA, 201 bp, Homo sapiens
atggtatatcttttcctatccttttacttttaacctactctgtctttatttttgaagtgtttctcacagaaaacatacagataggttttgcttttttttttatcaaacctgtcaatcttcacattttaatgggtatttacataaatccaatttaataagattattaatatggttgggtttaaatgtatgatcttattttat

SEQ ID NO: 525093 - DNA, 201 bp, Homo sapiens
ttgggaaggccaagtcagattaaccctcagtaatttttatacatgccctatacttggtaagaaaatgtaccctctgcaccaaggcttgcctatgcattgtyggcttaataagacctgccttgcttgtaagacattatattttcattgatgttttgaccttagaacatgagaaagcacatgaacatatagcaaaactgaatc

SEQ ID NO: 525094 - DNA, 201 bp, Homo sapiens
gttccttaatatacattgataggttgtttatttcaagtttttcttttttagatgcaggcacttgtagctataaacctctcttattacagtttttgctctgycccataggttttggtatgttctgtttccttatcatttgtttcaataaatttttcaatttccttcctcatctcttcattgacttactagacattcaggaga

SEQ ID NO: 525095 - DNA, 201 bp, Homo sapiens
agccctatccccagggaatttttcaaaaacaattagtggtaattacttaacatgagagataaacaagagcctggccagaaacttaaaacgtagataagggraatgagatgtccctggggcttttcaagagctctaagatattcctggggatctagatggctgcacttacatgcaaggttgtgtgtatgcccagtaaagacc

SEQ ID NO: 525096 - DNA, 201 bp, Homo sapiens
caggagtggggctgtaccttgaaaagccacaggggtggaggtgcccaaggctggggatgggccaccttttgcatcagcatgacctggatgtgagacatggrgtcaaaagaattttaaggtttaataactgccttattaaatctcacacttgctgccttattaaattgtgctacttgcctgtagcccctttattttggccca

SEQ ID NO: 525097 - DNA, 201 bp, Homo sapiens
tttagaaaacttgcagcctgacaatgcagtagaaaacaaaaatcccattttctggggagaaattcaagctggctgcagaaatttggataagtaagaggagycaaataccaatcaccaagacagtggggaaaatgtcttcagagcatgtcagagaccttcacagcagcccctcccgttacaggcctggaggcctaggaggga

SEQ ID NO: 525098 - DNA, 201 bp, Homo sapiens
ctgcgtctttctgtttttctcttagtcatacatcacaatttgttcagctctttctgtctttgtgcatatatatatatatgtatatatatatatatatatakatattatgtggaccactttggaggaacaataacagtaaacagtaagtagtaaagcattagtaattggcattgttgttattttattagtaacattgtggtt

SEQ ID NO: 525099 - DNA, 201 bp, Homo sapiens
aaataatcatattctgctgcgtctttctgtttttctcttagtcatacatcacaatttgttcagctctttctgtctttgtgcatatatatatatatgtatakatatatatatatatatatattatgtggaccactttggaggaacaataacagtaaacagtaagtagtaaagcattagtaattggcattgttgttattttat

SEQ ID NO: 525100 - DNA, 201 bp, Homo sapiens
gtgtgtgcatgtacatatgtgtacacatatgtgtgtgcatgtacatatgtgtgtacacatatgtgtatgtgtgtacatagatacatatgtgtatgcatacrtatatgtatatgtacgcatatgtatatgcatggtacatatatgtatatatgtaccaaatttcatatgcatgaaatatgtaccaaaattcatatgcatgaa

SEQ ID NO: 525101 - DNA, 201 bp, Homo sapiens
cctcagaccctgggcgccgaggttgctcctggcgagcgcatgctgcctttccagtccccctgcgcctgctccctttcctcctctgcgcccggggtcctccragaacgtgccaggcgctgctgttctttaatgactaaggatggagagggtggggattggagtgggcgaggctctgccgccgccaccaccgcggctgccaga

SEQ ID NO: 525102 - DNA, 201 bp, Homo sapiens
atatataactgtactagtttgctagcactgcctcaacaaagtaccacaagctggggggcttaaacaacagaaatttactgcctcatgcttctggaggctaraactccaaaatcaaggcgtcagaaggattggttccttccaaagtctgtaagggaggatctgttccctgcctctgtcctagcttctggtaacctcaggccg

SEQ ID NO: 525103 - DNA, 201 bp, Homo sapiens
ttaaccaataacctctattattttaggtagcatgtagtcagagtatgtcaatgttcttttccttggaaatacatcacttatgaaatattcttttgcatgarctctgggaaatggaatgttttaattttattgaaatttcaagaccttttcaggttaacttaaaacccacttaaaaataattcattaacaacatgaaaaata

SEQ ID NO: 525104 - DNA, 201 bp, Homo sapiens
gtagcagagctgccctacaagaaatgttaaaaaaattattcatggagaaaaaaacattacataggccagaaactcagatttacataaaaagggaaaaaacratagagaaagaataaataacgtaaaataaaatcttttgtttcttattttttaaatgatttaattataactgttattcaaatgataatagtaatgatgtat

SEQ ID NO: 525105 - DNA, 201 bp, Homo sapiens
cttcaacttcttaaattccttatttgcctgaaattaacaatcggtgcctctcaagacccccttccggcccactgcccttcactccctttctctctgctagkggatcccattcacatctccaggccttccatctcctctacccttcagactcatatcaagtacctgtttttgtttatttatttgttttcaactgcttcaaac

SEQ ID NO: 525106 - DNA, 201 bp, Homo sapiens
tggtggtgaaggaagacttagaaaagaattgccatagggtgaagaagacttcagcaaattctgcatcactcctaatgctctgtggagtgaatttcctttgkgtagagtgtagaaaaatgctaccatcagcttccaggttggaaaggggaaaagatggggttcatctggagatggccagcatctgagttacaggtacaggta

SEQ ID NO: 525107 - DNA, 201 bp, Homo sapiens
tccacattgaaatactctttgtgagggtcatgcggtttaactcattgctacaacttggaggaaaatgtgcaatgtcaagcattcctgtatggtccaaaacytgccataatggctgccaatggctcttccttttctgaaaggagtatctgagtttcatgatgtcagataatcatccttgcaataggaaattcaagtttctgg

SEQ ID NO: 525108 - DNA, 201 bp, Homo sapiens
ccatttactagccttgcgttaccttctccttcagtttcctcttgggtatcatggagataattaaagatacttcaaagagatattgcgaggatcatttgaartaaggaatagaaaacaccacgtagtgatgctttcttaggcaaggttttgaccgaggaaagccgcccttcggtgggagcctggaggcttggaaataaccag

SEQ ID NO: 525109 - DNA, 201 bp, Homo sapiens
ctttattgaatgctagtagaagatgtagaattagagacatctgatttgtttatcaccttagcagaaaaaccacagtccaaaagacaagcaaattaagaatkgagcttaaccatgcctccattgggaagtctagactttgagccaggtacagtaagaaaaattagcctctgattcattaagtttgccacatgacttattttg

SEQ ID NO: 525110 - DNA, 201 bp, Homo sapiens
actttattgaatgctagtagaagatgtagaattagagacatctgatttgtttatcaccttagcagaaaaaccacagtccaaaagacaagcaaattaagaakggagcttaaccatgcctccattgggaagtctagactttgagccaggtacagtaagaaaaattagcctctgattcattaagtttgccacatgacttatttt

SEQ ID NO: 525111 - DNA, 201 bp, Homo sapiens
tgcaaataaggcattcttagtctatgttttgaaaaataatcaatattattgtagcatattacattagaatagtgatagattagaaaatatattattctgtrtaatatctaacacatttaattcttggccaatcctttggaataaatttcttctggagcagtattattaattatgtccgtatcagtcatttgtgctgcttag

SEQ ID NO: 525112 - DNA, 201 bp, Homo sapiens
aattccttgtttgtttttcctagcatctctcagttcccaatccagtctggatttcattccagccatttactagccttgcgttaccttctccttcagtttcstcttgggtatcatggagataattaaagatacttcaaagagatattgcgaggatcatttgaaataaggaatagaaaacaccacgtagtgatgctttcttag

SEQ ID NO: 525113 - DNA, 201 bp, Homo sapiens
agaaaccacctcatgctccaatcccctcccaccaggccccacctctaacatttgggatgacaaatgaacatgagatttgggtggagacacagatccaaacyatatcagctactttgactaaaagtttcaaaaccaccaccaaaagagataactacattaaaaagccaagtagcttatatacaagaagcagtcttgaattct

SEQ ID NO: 525114 - DNA, 201 bp, Homo sapiens
aacctggaacagaattgttactccacgagaagctgaagactatgaacatcattctacatattaactcaattagaatatttactgctttgaaataattcaaygaagaaaatgcttgctactatagtagcaagtgactcctaaacttttcggtttcagactcacttttttaaatttgatttttatggagaaagcctatcctaa

SEQ ID NO: 525115 - DNA, 201 bp, Homo sapiens
tgtcgaatcttagttcttttgggtcattgttcctttgctttcaaatctgtatattcattggaaaattaacaagggcaacgtttgaaatatgatccaggaaraatgactctgagtcacaaaatgatgttatcaattttaatcttcatctcttcttcttccctgctccctgagtcatccaatttttctagcatattatttatt

SEQ ID NO: 525116 - DNA, 201 bp, Homo sapiens
aaaatgtaaatgggaagaaggaggaaggaaggtccagagtgtttggtgaacaggtctgtgcactgtacaaggggctttcaggaactagcttattattcctsagactggagaggacctaaggagaagataaacattctccaaagaatacacttgttgactgatgttttccttgggatggtccatatgtacagattatactgt

SEQ ID NO: 525117 - DNA, 201 bp, Homo sapiens
catctccgtctccactatgctgccatccaagctgtggggctgcgttaattcttgacttccagcattctgtgtaatgccttcaaatgtctttggacaaagcrtgatcataattaatataattatttttcatatgcaaagtattttattgtggcagtatctcttttgatcactaaaattatcctgtgggataaataatttaaa

SEQ ID NO: 525118 - DNA, 201 bp, Homo sapiens
atacacatgtgtacatatacacatatgtgtacatgtacatatgtgtacacacatgtgtgtgcatgtacatatgtgtacacatatgtgtgtgcatgtacatrtgtgtgtacacatatgtgtatgtgtgtacatagatacatatgtgtatgcatacgtatatgtatatgtacgcatatgtatatgcatggtacatatatgtat

SEQ ID NO: 525119 - DNA, 201 bp, Homo sapiens
taatttaaatattactgtgatttctattttagacatgaagaaactgagattgaaaggttaacaaatctaaggctacactccaaattctgcataccttttgyggtgtgatttcttcttgtttcctttatagatggagcccttaacaaaagttttgaaaagcccttaacaaaagttttctaaaaagccatgtttcagcggcac

SEQ ID NO: 525120 - DNA, 201 bp, Homo sapiens
agtaatttatgtttcaccaattgcttctacatattggtccagatttcattatgacaaccacattgttaggtaaagaaggctgagatcattatcaccaactrttttcccctaatgctacttttcctggagaaaaaataaacacagaaaaataataatatctctgacatgccataaaacaagcattgaaaaataagttctcac

SEQ ID NO: 525121 - DNA, 201 bp, Homo sapiens
tacactgtgtgcccaatttaccattttttttgaacaactcttgtcaactgcagcaaaataggattaaatgaaataacgtatgtaaaatgcctaaaaaaccrgcacatagaaggtatttaatatatacagttttttcttctttcctctgatatagtttatattcaggtgacaaaaatattacattcacataaaataaaggaa

SEQ ID NO: 525122 - DNA, 201 bp, Homo sapiens
tgcatatgcaaatgcattcatctcagtgggttgtaactctcaggaaggaaggattctaaggccatagagcgcaaaggaaagtatgacatgatcgattagtratgtctatcatagtcacgaaacgaggatggtggagatctgtaggctggtcctagacaccatttatgaacagaaacaacttttctttaaagtattttattt

SEQ ID NO: 525123 - DNA, 201 bp, Homo sapiens
ggagagaagaagcagcaaaatatgatgtctgtggatcttaaaaatagtaataatgttgatgtataaaatgtaggcaaacactcttcctggtttttttttttaatttctttgttttgttttatttttgtcactccaagattttcagtttaaaagggataaagacttctttcattgtttttattcattcattctacaaatgtt

SEQ ID NO: 525124 - DNA, 201 bp, Homo sapiens
aatggtatcctgagaagagtaacagaaaaataaaactactgaatatggattttagggaaaaataaaatatgtttctctcttttcttctctccaatacatcygactaaagcctgttacagagagagaaggagagaagaagcagcaaaatatgatgtctgtggatcttaaaaatagtaataatgttgatgtataaaatgtagg

SEQ ID NO: 525125 - DNA, 201 bp, Homo sapiens
atggttcacacttgtaatcccagcactttgggaggccgaggtaggtggatcgcttgagcccaggagtttgatcccagcctgggcaacacagtgagaccccrtctcttaaaaaaatgcaaaaattagccaggtgtggtgatgtgtgcctgtaatcctagctacttgggaagctgaagtgggaagatcacatgagcccaggag

SEQ ID NO: 525126 - DNA, 201 bp, Homo sapiens
ttgaacccgaaaggtggagattgcagtgagccgagatcataccactgcactccagcctgggcaacagagggagagtgtcaaaaaaacgaaaacaaaaaacraaaaaaaaaacaactacgtagtctaacaaaagatggaactctttaaatcgtgcaagctgttaggtgtttattaatgttgctaattgtacaaaagaaaaaa

SEQ ID NO: 525127 - DNA, 201 bp, Homo sapiens
gctgatgtggtatttgtggtaaacttccgtattaggatgggtaagcctgtatggcagggttcttaacctgaactccagatccagcaaagggtccacaggtrgatttcagggggtctgtgaacttgtatgggaaaacatttcatctacattttcatgcacccttaaatgacatttggcactgccttccatgatgaatgtaga

SEQ ID NO: 525128 - DNA, 201 bp, Homo sapiens
atcctttaaaagtaaagaagaaatgaagatttttctcaggcaaacaaaaattgacagaattcatcggtagcagagctgccctacaagaaatgttaaaaaaattattcatggagaaaaaaacattacataggccagaaactcagatttacataaaaagggaaaaaacgatagagaaagaataaataacgtaaaataaaatct

SEQ ID NO: 525129 - DNA, 201 bp, Homo sapiens
agaattgcttgaacccgaaaggtggagattgcagtgagccgagatcataccactgcactccagcctgggcaacagagggagagtgtcaaaaaaacgaaaamaaaaaacaaaaaaaaaaacaactacgtagtctaacaaaagatggaactctttaaatcgtgcaagctgttaggtgtttattaatgttgctaattgtacaaa

SEQ ID NO: 525130 - DNA, 201 bp, Homo sapiens
ccaaggttcttaactgacatccaggcatttacaaatgattcaattatgttcagtatacttggttttgaaagctgatggactgtctaatacattttttaaakattttgagaaatgattcaaatttaaatggttttggaattgaagaactgtaaacttcgctcatgtaaaaaattaagctcattttttcatcatggcagataa

SEQ ID NO: 525131 - DNA, 201 bp, Homo sapiens
tgtgaaatctaagatacaagggcttacgcctagcactggaagtcttcatcatttggtcaggcacagctgcccctctgtgctgccatccactgaggcacctgagcacacctgctgttgaaatccccttgtcagattgcagcacgtgcacaggtcccgtgactgatggcacacctgcgacactctcagagccagggagctagc

SEQ ID NO: 525132 - DNA, 201 bp, Homo sapiens
ttattatataaatttaataaattatacaactgggataaaattttattatttaaatttaataaattaactattttgaatatatatttatttaaatttaatamattaaacaactgttttgaatatatatatatttatataataatatatataacttttttgagtttttgagcattcatacacatatatatgctcaaaaactct

SEQ ID NO: 525133 - DNA, 201 bp, Homo sapiens
tattttatgaattcctaatatttttagattgtttaatgctattgtaagtgatacttttttcctagttatttgtttctgttaatagaaatacaattgatatrtgtatatttaggttgtatccagatactctactaaatccttttgttaatttaaaaatctatttagattattctagatttctatgtttacaatcacattacc

SEQ ID NO: 525134 - DNA, 201 bp, Homo sapiens
taatgtattaataatgtaataaatttattaaaaattaataagttttaatatttattatataaatttaataaattatacaactgggataaaattttattatttaaatttaataaattaactattttgaatatatatttatttaaatttaataaattaaacaactgttttgaatatatatatatttatataataatatatata

SEQ ID NO: 525135 - DNA, 201 bp, Homo sapiens
caagcaaattctattatctgatagatgacttttttgtctaatatgtcttcttcaagaggatcttgcctgttcttatctcttctcatttttatgagaatctyatgaaatttatagattaattttgataaaatttacatctgaaaaatattttttcccataaacatggcatatcttccttttacttttggtctttttaatatt

SEQ ID NO: 525136 - DNA, 201 bp, Homo sapiens
ttaatgtattaataatgtaataaatttattaaaaattaataagttttaatatttattatataaatttaataaattatacaactgggataaaattttattatttaaatttaataaattaactattttgaatatatatttatttaaatttaataaattaaacaactgttttgaatatatatatatttatataataatatatat

SEQ ID NO: 525137 - DNA, 201 bp, Homo sapiens
attaatgtattaataatgtaataaatttattaaaaattaataagttttaatatttattatataaatttaataaattatacaactgggataaaattttattatttaaatttaataaattaactattttgaatatatatttatttaaatttaataaattaaacaactgttttgaatatatatatatttatataataatatata

SEQ ID NO: 525138 - DNA, 201 bp, Homo sapiens
attaggtcaatctttatagtacccattttcattaattatagttaaattagattattaatgtattaataatgtaataaatttattaaaaattaataagtttyaatatttattatataaatttaataaattatacaactgggataaaattttattatttaaatttaataaattaactattttgaatatatatttatttaaatt

SEQ ID NO: 525139 - DNA, 201 bp, Homo sapiens
gtccaggcctcagctgtgatccaatcagggctgtcccatatccttccccatcaccatgtgttttagggaagcaagagatgaggggccctccctggacaggrgcaggttgtcaggggttgggagcgaggtgggtctgtcagattcatactctggtcatggctggcaggatgggaaagggagtgttggggacaaagcttttct

SEQ ID NO: 525140 - DNA, 201 bp, Homo sapiens
tcagggctgtcccatatccttccccatcaccatgtgttttagggaagcaagagatgaggggccctccctggacaggggcaggttgtcaggggttgggagcraggtgggtctgtcagattcatactctggtcatggctggcaggatgggaaagggagtgttggggacaaagcttttcttttcacatgttcatcctgagacca

SEQ ID NO: 525141 - DNA, 201 bp, Homo sapiens
atataaaaacattggaagtcttttcaccaaaccctgactttattgaatgctagtagaagatgtagaattagagacatctgatttgtttatcaccttagcasaaaaaccacagtccaaaagacaagcaaattaagaatggagcttaaccatgcctccattgggaagtctagactttgagccaggtacagtaagaaaaattag

SEQ ID NO: 525142 - DNA, 201 bp, Homo sapiens
gattatctgtattaagctcttggaagaaaatgaccaggaagcattttgattttctatttatttgagcatttgttttaattttttctcttgatgagcactgrtttctcacctaaatgatgtgttgacaattcataagttttgtgtctttcaaaatgagaacgattgacagccctcaggtgaatggcatgttccaactgccaa

SEQ ID NO: 525143 - DNA, 201 bp, Homo sapiens
aactgttttcccctaatgctacttttcctggagaaaaaataaacacagaaaaataataatatctctgacatgccataaaacaagcattgaaaaataagttytcacaaattgaaataaagctctctacttcctttgaaaattataaaaaggtggttaatgatcatgaaactggaaggtctttttaaaatctataggaggctt

SEQ ID NO: 525144 - DNA, 201 bp, Homo sapiens
ttgtggcataaatcaacataactaactgctgctgttactgtgctggctaagtgtccatactaaagtgttgaaattcgcaaaaaaaaaaaaagctaaatcartaaaaagattaaccacatgcaatatccctttgagcaccaactcctctttgactacataaaatatgcttctagttattaaactactagtgagtgcagattt

SEQ ID NO: 525145 - DNA, 201 bp, Homo sapiens
ctttccaaaacatctgtgggcaatattcccttcactgaacagcaatggtactttaagtgcaaaacaaaacagcatttaccttttgcaatttatagttcctrggttatttcatgtgccttgtggttatctcaggagccctttattaatctccgaactgtaggcaagaaggtggtcttgttgtcatggtaataacttcagtac

SEQ ID NO: 525146 - DNA, 201 bp, Homo sapiens
ccctttgcctcctggagaacagcagttcagcccacactcaattcttccctataacctcccacatctctgccaggatttattcttgtaatagtaataactgytgtttaacaggtcctcattacacaagagaatgcagcgattaatatgcagcctgtttgaattccaattctggcttttccacctaatagctgagagatcttg

SEQ ID NO: 525147 - DNA, 201 bp, Homo sapiens
aagatacattttactattaatattttaaaatatgttaagaattaagtatcagaattcagtctatataaggaaagcctgagatgaagtgataaaaaatagaygaaaaagtcttgatttttcagaaagaacaaataagcaaataaacacagccctgtttttctcagtcactattagatattgaacattaagagttaaaggact

SEQ ID NO: 525148 - DNA, 201 bp, Homo sapiens
ttttggttcaacatctaaatacataaatttcttataatctaccttttagtttgctcagctctgatccttaattgaacattctgggttaatattgtgtttgwtgttgaatgttcctaaacaagttgtcacgttttgaaacaagtgttctagattagtgggcataatttcagatacatgttctctatgtatatgtattttaaa

SEQ ID NO: 525149 - DNA, 201 bp, Homo sapiens
tcttataatctaccttttagtttgctcagctctgatccttaattgaacattctgggttaatattgtgtttgttgttgaatgttcctaaacaagttgtcacrttttgaaacaagtgttctagattagtgggcataatttcagatacatgttctctatgtatatgtattttaaaacaaagtttcaatttccttgctgccctcg

SEQ ID NO: 525150 - DNA, 201 bp, Homo sapiens
tgaattaagtaaaaatttttcccccaaatacccatctcatttggcttgtaaagactgttttagtgaaagaatgttacaaaatgtttttttgctgaaagcarattttacaacagaaatgatgttcatttgcaaacctggattttaatcatttagatttctaatattaatgtaaggtcatataattctgcaaaccaaggccaa

SEQ ID NO: 525151 - DNA, 201 bp, Homo sapiens
gtcaggaattattttgagtaaccagcatagattggttaatttttagaaataacgtgactattttaatgtagtggttttaccttttagctcttacttatgartggaatatcatgccactgaatgattacattaagtgacttttaaaaatattttattggattaaatgtttctttaccaaattttccattttgttagaaacca

SEQ ID NO: 525152 - DNA, 201 bp, Homo sapiens
ttcttactgaagctgatttattgtacagatcatacctaattaattttcattttaaaatattattctgaaactaaatctggcactcctgatgcctgcttctygataatgatgtcaggaattattttgagtaaccagcatagattggttaatttttagaaataacgtgactattttaatgtagtggttttaccttttagctct

SEQ ID NO: 525153 - DNA, 201 bp, Homo sapiens
gggaagggggttattgtggaggaaatgggcatcagaggggatatgagaggagaagcacggagccaggagattggggccttcaaaggcaagtttttagtggraaaaaaaaatagttaccaaatgaaaaaattggactcttgtgagacagacaaagcacaagtctagaacagttggcttagttagcagcagagtagttcccct

SEQ ID NO: 525154 - DNA, 201 bp, Homo sapiens
tttcataggtttatactacagatttaccctgtgacagtcaagaatctaagctggcagagttcactgctctgccacctccctgccaacaaaacaaaagatarcactggttgattggttgaactattgtgtccaacacaaaaggacagccataattattgttgaagaaaaattatttgaagatgctttaattcttcacattgg

SEQ ID NO: 525155 - DNA, 201 bp, Homo sapiens
gtcaaggctagctcataatgtttggctgcttatttagatggaagagaattgatgagccaagggatattatttctttgtttctcttttttttttttttttttggttccattaaaattgctctcatttggctttacttccaaattatttttcttcctcttgccaataatagtgacattgaaactcaaaactagaactgatttt

SEQ ID NO: 525156 - DNA, 201 bp, Homo sapiens
acaattgttatatctgtttgcaatgaatcgagaaaatgtagaacataagcctcagatttactgatgagaagatcaagacctatatgttagataaatggacrtgccaatggtcatactgttagaaggtggcaaatcttgtcctatacctaatccctctctcgctctctttctctttctctctctttctcttttcaacattga

SEQ ID NO: 525157 - DNA, 201 bp, Homo sapiens
ctttaatgtctaggtaaatttgtgtctctttttatgaaacaattgttatatctgtttgcaatgaatcgagaaaatgtagaacataagcctcagatttactratgagaagatcaagacctatatgttagataaatggacatgccaatggtcatactgttagaaggtggcaaatcttgtcctatacctaatccctctctcgct

SEQ ID NO: 525158 - DNA, 201 bp, Homo sapiens
tcctccggggatcaccagggttctgggtacgcccctgtctcatctgattagtcttatctggcttgctcttcatttgccccttaatgaatgtcattaaattwcccacaacctacaacatctacacgctgcctccttcatttttttccaaccagttcattcactttccctgagtgttgtttggaatacgaattgcattagtca

SEQ ID NO: 525159 - DNA, 201 bp, Homo sapiens
aatctagggtgaaattgtacatctctcctttccaatatttcacacaaaactttgtaaatagcatatagttcatgaatatatattgaaaagtggacaaacargtgaatcaaccaataggaaaagaaaatgggacagggcctcagctctaattgctcaaggattatataaatccaggaagtgtgatctttgctaaagaactgg

SEQ ID NO: 525160 - DNA, 201 bp, Homo sapiens
atattgtgtcaggcctgaaatacgttcagcacacctacaggactggggtgaaaggtaagggaacccacatttccacactgtcccaaactgcttctcattgrtactttaacttctggttattagcaacttttagctatagactcagatgagaatacaataaaagctgtggatgccggctctaggaaaaggcacaaatacacc

SEQ ID NO: 525161 - DNA, 201 bp, Homo sapiens
tttgtaaagtttaaatcttttctttaatcagtgactacatttcttgcatgatcatgttgaggtactttttgtttgtttctcccctagtacccccaagctargtctggaatgtcctcttcccagccctgagggctacctgttgagacccacgtttgcctcctgtcttttcctagccaggacttcttaaactcttcattatct

SEQ ID NO: 525162 - DNA, 201 bp, Homo sapiens
aacagcagccccactaacatcttttatattcatgacttgttgactaacgggctgtcattctgtctcccagaaatagatcagaatgactgaaaaagccccasagccacatgtggaggaggatgacgatgatgagctggacagcaagctcaattataagcctccaccacagaagtccctgaaagagctgcaggaaatggacaa

SEQ ID NO: 525163 - DNA, 201 bp, Homo sapiens
tggatggtgggttgtgctggggtggagatatgtggtttcctgtttttaagcagacaatgtaaaaagactggttgaaagagaaaaaaaaatggttcaaagcygtcaaatattaaactgtcttccactaaataattttctggtgatataagagaaatgcataatgaaatcctcccttagagtgcaggggctttatccctcaaa

SEQ ID NO: 525164 - DNA, 201 bp, Homo sapiens
tttaatatttccctgtcttacccctattcaagcaactagaggccagaaaatgggcaaattatcactaacaggtctttgactcaggttccagtagttcattytaatgcctagattcttttgtggttgttgctggcccaatgagtccctagtcacatcccctgccagagggagttcttcttttgtgagagacactgtaaacga

SEQ ID NO: 525165 - DNA, 201 bp, Homo sapiens; identical to SEQ ID NO: 311373

SEQ ID NO: 525166 - DNA, 201 bp, Homo sapiens
tagattattatttcatagaatttaatgagattgaattaggaaaacaatcaggaaagtgactgatgatcagagaagtccatgagggtaaggaggctgctaayagcagccccactaacatcttttatattcatgacttgttgactaacgggctgtcattctgtctcccagaaatagatcagaatgactgaaaaagccccagag

SEQ ID NO: 525167 - DNA, 201 bp, Homo sapiens
ttttgtaaagtttaaatcttttctttaatcagtgactacatttcttgcatgatcatgttgaggtactttttgtttgtttctcccctagtacccccaagctrggtctggaatgtcctcttcccagccctgagggctacctgttgagacccacgtttgcctcctgtcttttcctagccaggacttcttaaactcttcattatc

SEQ ID NO: 525168 - DNA, 201 bp, Homo sapiens
atatgagtgatttctttcttgtcagttttgttcagtgaatagaagatactacaatggtacagagaaattcaggcaggtcagagaaattactagaatacatkagattattatttcatagaatttaatgagattgaattaggaaaacaatcaggaaagtgactgatgatcagagaagtccatgagggtaaggaggctgctaac

SEQ ID NO: 525169 - DNA, 201 bp, Homo sapiens
tatgcatgaagaaaagcatagagagtgattacctccttaatcagggtacaggaatttgggacagatcctggttttatggaacctgaagcttttataacttyagtgatattccttaagaaaaatagtatgaaattgcaaatgaaaatacaagagtaaacacaaaggtgaacattttcttaaagtgataaaatgaataaaaac

SEQ ID NO: 525170 - DNA, 201 bp, Homo sapiens
ggtgctgtttcttctgctaaagcaagagttgccataggaacaggcctacatgttttcttcctgtacaggaagtgaacctgggcattgcaatgctgttttcwgagttggtcaaggctagctcataatgtttggctgcttatttagatggaagagaattgatgagccaagggatattatttctttgtttctcttttttttttt

SEQ ID NO: 525171 - DNA, 201 bp, Homo sapiens; identical to SEQ ID NO: 311448

SEQ ID NO: 525172 - DNA, 201 bp, Homo sapiens
acaagagcaaaactccatcttaaaaaaaaaaaaagacgcctcaggtaaatctaatgtttatttaggcttggaaaccattgctcttgactttaatcactgtrggctgtagtccagattctccagtttgcagtgtgtgtttttcctctatcaggctcttaccctaatgaactcttctttcttcttagtggataaagcaacatt

SEQ ID NO: 525173 - DNA, 201 bp, Homo sapiens
tgttcaataatttgactaaaattacatactgatacaaaaaggatcaatagccacaatgcctctgaattgcaattcacagggcatggtggtgcgtgcctgtrgtcctacctactcaggaggctcacgtgatcctcccgcctcaacctcccgagtagctgggactataggcgcgcatcaccacgctggctaattttaccattt

SEQ ID NO: 525174 - DNA, 201 bp, Homo sapiens
gggtacaggaatttgggacagatcctggttttatggaacctgaagcttttataacttcagtgatattccttaagaaaaatagtatgaaattgcaaatgaaratacaagagtaaacacaaaggtgaacattttcttaaagtgataaaatgaataaaaacaagtagaattttaaaagctagaaaatgccacaaacatcaccaa

SEQ ID NO: 525175 - DNA, 201 bp, Homo sapiens
ggggctgggatgtcttcctctatgaaccgttgttccgatgctcggtcagcaggtttgttatgtggcccccatcctccggggatcaccagggttctgggtaygcccctgtctcatctgattagtcttatctggcttgctcttcatttgccccttaatgaatgtcattaaatttcccacaacctacaacatctacacgctgcc

SEQ ID NO: 525176 - DNA, 201 bp, Homo sapiens
aatctgtatgcgcatctgtgaagcagaaaatacagaaaactagagtagcaagcctgtgtgaaaaaatgatatgtgctttggggcctaataaatggggtccrcattaacctggttaaacatataactgttcattctccatttcatttttcctgtgcaaaggaccaaagtcaaaaataagcaaaactcagctctgccctttgt

SEQ ID NO: 525177 - DNA, 201 bp, Homo sapiens
tataatttttcatgtgttttctccaatctttcaaccccgtaaaaaagaatatccccattttagtggtgataaaactgaggctcagtgaaattagcaacttrattgagtcctgtcataatgcagagcctggttttgaatccctggtccatctgactcaatctatgttctatgagacatgaaagtcacctttctctgaattac

SEQ ID NO: 525178 - DNA, 201 bp, Homo sapiens
gtgaagctttgcaacaaagcagaccacactggggcagggaaggaagaagaggaagggaacaaatattcacggaacatctattcttgaccagtatagtcctrtaatttttcatgtgttttctccaatctttcaaccccgtaaaaaagaatatccccattttagtggtgataaaactgaggctcagtgaaattagcaacttga

SEQ ID NO: 525179 - DNA, 201 bp, Homo sapiens
gtgaatatattgagatactgaaggcaatggcttccttaatgcacagttttctttgagaattatttaaaataatatttgtgaaggtacttggtggcatgacktcacacgttgggcactcagcaaagctcacgggatctctttgagttctctctctttgtgcatatgaatgtgggttagaaaaacacactaaaaaatgcacag

SEQ ID NO: 525180 - DNA, 201 bp, Homo sapiens
atgctgtcactgaacagaaactggcaagcatttttcaggcctcgactggaatttggtccttccttgctttggagagcatgagtttgtcccctagggaagtwagctctgagcaacattaaggttctgttttcagtagacactcagcaccacaaagtcattctgagggaaagatacgggtctgagctgatttgggagagcaca

SEQ ID NO: 525181 - DNA, 201 bp, Homo sapiens
gagatcaagaggaccatggcacctgttggtccggagagacagggggcagaggtccagtccctagcaggcatcgtgaatcttgccattggctttgtgttttyttaatttgtaagaatatattccctcccaaagcagatatagcacaagcttagtaacaagagcatcttactcttttgtgagatgtgtgaaattctaagagac

SEQ ID NO: 525182 - DNA, 201 bp, Homo sapiens; identical to SEQ ID NO: 311394

SEQ ID NO: 525183 - DNA, 201 bp, Homo sapiens
agcctgggcaaaatggggaaaccctatctcaaccataactacaaaaaattagccaggcaggtggcatgtgcccgtagtcccagctactcagaaggctgagrcaagacaattgcttgagtccaggaggcagaggttgtagtgagccaagatagagccactgtactccagcctgggtgacagagtaaaactatgcctcaaaaa

SEQ ID NO: 525184 - DNA, 201 bp, Homo sapiens
gggatggtcaggcacaggagatcaagaggaccatggcacctgttggtccggagagacagggggcagaggtccagtccctagcaggcatcgtgaatcttgcyattggctttgtgtttttttaatttgtaagaatatattccctcccaaagcagatatagcacaagcttagtaacaagagcatcttactcttttgtgagatgt

SEQ ID NO: 525185 - DNA, 201 bp, Homo sapiens
aacctgctccctctgatcctccatcagggccagatcttccacgtctccatctcagtacacaatcatttaatatttccctgtcttacccctattcaagcaaytagaggccagaaaatgggcaaattatcactaacaggtctttgactcaggttccagtagttcattctaatgcctagattcttttgtggttgttgctggccc

SEQ ID NO: 525186 - DNA, 201 bp, Homo sapiens
ctggccatcttcactgcagggatggtcaggcacaggagatcaagaggaccatggcacctgttggtccggagagacagggggcagaggtccagtccctagcmggcatcgtgaatcttgccattggctttgtgtttttttaatttgtaagaatatattccctcccaaagcagatatagcacaagcttagtaacaagagcatct

SEQ ID NO: 525187 - DNA, 201 bp, Homo sapiens; identical to SEQ ID NO: 311471

SEQ ID NO: 525188 - DNA, 201 bp, Homo sapiens
ttatattcatgacttgttgactaacgggctgtcattctgtctcccagaaatagatcagaatgactgaaaaagccccagagccacatgtggaggaggatgaygatgatgagctggacagcaagctcaattataagcctccaccacagaagtccctgaaagagctgcaggaaatggacaaagatgatgagagtctaattaagt

SEQ ID NO: 525189 - DNA, 201 bp, Homo sapiens
aggaaactcagatccgcagtggttgcaacattcagttaacaggggaaaagctagttagtaggaaagccagaacccaaacccaggcatgcataacaaggccyagttcaatgaagagatcattatccaaaatcaaacggaatgaccacggaattctcctaagggtctacttcctgcacccatgtgcacctgggcttctctgcc

SEQ ID NO: 525190 - DNA, 201 bp, Homo sapiens
agggctggtcttgaattcctgggctcaagcaatccgcctgccttggcctcccaaagtcctgggattaaaggcgtgagccaccatgcatggcctattattayttttttgagacaagtctcactctgtcacccgagctgaagtgcaggggcgtgaacgcagctcactgcagcctcgacctcctgaggctcaggtgatctccca

SEQ ID NO: 525191 - DNA, 201 bp, Homo sapiens
tgttatatgacttaggccattgcaggactgagatcagaactgaggtctcaatttgtctgagttttttaaaatggtgtaatctgctatatctccataaaaamaacaacaacaacaaaaaaaaaaaaaaaacaggcttaatccccattgatttaggccactggttccccaactttacctcagaatcaactttgtagtttttta

SEQ ID NO: 525192 - DNA, 201 bp, Homo sapiens
ttcctaacaaagaaatagaaaaaaaaatattttctaggattgaaaaagcctgtctaattaaaataacacaacaacattacttaatctgcaattcttcttgwcatgccttgggaccctgccttcaattttctttcattaatataggcagggagaaatgagaggcgggaaggtgatggaggcactttacagttcctttctacc

SEQ ID NO: 525193 - DNA, 201 bp, Homo sapiens
aggttattggtgaagcggtgacgccaccctcctggtgtgaggataacaataactgtagcaaacagtcgctgagcgcttacccgcagtatttccaagtgcgrtaactgagacaccgaggcatacgaaagctaagaaaatttgctggagttcatggtgttcacaaagcctcaaagcaagagcataacactgtgcctggcacat

SEQ ID NO: 525194 - DNA, 201 bp, Homo sapiens
ggaaacactgccacaggctaggtgataaggacattgccacaggtgatgccagtcagaattggccatttttatttcaatgcctagctttcaggtgtttaagwaaaggccttttgcatttcttttaacaacactctaaaagcgctttacatggtaatttaaataaaagcattttcaaagagggaacattgtaattattctggc

SEQ ID NO: 525195 - DNA, 201 bp, Homo sapiens
gtggctcacgcctgtaattccagcacactggtagggcgaggcaggtggatcacctgaggtcaagagttcgagaccagcctggccaacatggtgaaaccccrtctctactaaaaatacaaaaaattagccaggcatggtggcagccgcctgtaatcccagctactcaggaggctgaggcaggagaattgcttgaacctgggt

SEQ ID NO: 525196 - DNA, 201 bp, Homo sapiens
ggtgggggagaaagggtattgaggtaagtgctaatggatatggctttcttttgtgtgataaaaatgttctaaaattgtagtgattcttatgagactctgtraatataactaaaaaccattggctaggcaaaatggctcattcctgtaatctcagcactatgggaggcccaagcgggaggatcgcttgagcccaggagtttg

SEQ ID NO: 525197 - DNA, 201 bp, Homo sapiens
tggatcacctgaggtcaagagttcgagaccagcctggccaacatggtgaaaccccgtctctactaaaaatacaaaaaattagccaggcatggtggcagccrcctgtaatcccagctactcaggaggctgaggcaggagaattgcttgaacctgggtcagggaagttgcagtgagccaagatcatgccactgcactccagcc

SEQ ID NO: 525198 - DNA, 201 bp, Homo sapiens
gcttaccctcagggacacattctctttctcagggatgttccttgctgagaaaaagaattcagcgatatttctgtcatttgcttttgaaagaagagaaatayggctctgttctgcccggctcaccggcagtcagagtttaaggttatctctcttgttccttgaaccaattgctgttatcctgttcttttttcaaggtgccca

SEQ ID NO: 525199 - DNA, 201 bp, Homo sapiens
cacattctctttctcagggatgttccttgctgagaaaaagaattcagcgatatttctgtcatttgcttttgaaagaagagaaatatggctctgttctgccyggctcaccggcagtcagagtttaaggttatctctcttgttccttgaaccaattgctgttatcctgttcttttttcaaggtgcccagatttcatattgttc

SEQ ID NO: 525200 - DNA, 201 bp, Homo sapiens
tcgcagcacattaggggggctagcatgggaggattgcctgagcccaggacttcaagactagcctgagcaatgtagtgagaccccatctctacaaaaaaaawttttttaattttctgggtgtggtggcacattcctgtagtaccagctactcaggaggctgaggttgggggattacttgagcccaggagggcaaggctttaa

SEQ ID NO: 525201 - DNA, 201 bp, Homo sapiens; identical to SEQ ID NO: 312011

SEQ ID NO: 525202 - DNA, 201 bp, Homo sapiens
aaataatattatgaagtatttgccattatcatttctgtttcataagtgaggaacataggtgaaatagcttacagtgtcacagctagtaagtggcagagctrggattcaaattttagcagttattgccacctatttgaaaaaaagatattggcttgtattgatagtgtgattttgtttataagtttcacctgggccgggcct

SEQ ID NO: 525203 - DNA, 201 bp, Homo sapiens
agctcactgtagcctcaaacttgggggctcacatgatcctcctgccttggccccctaacagtagctaggactacaggtatgtgccaccatgtctggctaattttttttttttttgtaggggcaggtttctccacctcagactcctaaagtactggtattacaggcatgaatcaccatgccagccaggaattttaaatagtt

SEQ ID NO: 525204 - DNA, 201 bp, Homo sapiens
aaatatgaattgttttgacaatcacaaaaagcaagtcaccagcaatgagcaaaataaggaaagaactcattaatattcattgaatttttttattttttttwtttttattttttttttttgaggcagagtctcgcgctgtcgcccaggctggatggagtgcagggcgcgatctcggctcactgcaagctccgcctcctgcgt

SEQ ID NO: 525205 - DNA, 201 bp, Homo sapiens
attgttttgacaatcacaaaaagcaagtcaccagcaatgagcaaaataaggaaagaactcattaatattcattgaatttttttattttttttatttttatwttttttttttgaggcagagtctcgcgctgtcgcccaggctggatggagtgcagggcgcgatctcggctcactgcaagctccgcctcctgcgttcacgcca

SEQ ID NO: 525206 - DNA, 201 bp, Homo sapiens
gcagggcgcgatctcggctcactgcaagctccgcctcctgcgttcacgccattctcccgcctcagcctcacgcgtagctgggactacaagtgctcgccacyatgcccagctaattttttgtatttttagtagagacagggttttaccgtgtattgcatgttttttatgtgctagatgctttacatataattacttcatgta

SEQ ID NO: 525207 - DNA, 201 bp, Homo sapiens
agaaggacaccagtcatattggattgtggtccaccctaatgacttcattgtaattacacctgcaaagaccctgtttccaaataatgtcacatccacaggtrctgagaattagggcttcgtatcttttgcctgcatttatagtcccagttacttgggaggctgaggcaggagtatcatttgagatcaggaattcaagaccag

SEQ ID NO: 525208 - DNA, 201 bp, Homo sapiens
gtagatatgaatggatctaataggaaaataaaggtacagaaaatttgggtgatttgctgcaataagttgcagttgaaacaagatcatgaatttgacatgtrtatacttattccagtctctatttcagttaaaaaaatgccagtatcttatgatgataaaaaccattgcacagatttgacatctgtttctatttcacaggta

SEQ ID NO: 525209 - DNA, 201 bp, Homo sapiens
cagaatgtaagtgccatgcattcataattctgaaaaataacgtattctgtaatagtgaaagggttgtatgattcgtgccttttacactttaaaaaaatgawataggtaagttttttaggtgttaaaaaacacagtttgtattacagtggaacatgtaaaaaggatgttttaaattgttcccaagtaggcctgctttcaaga

SEQ ID NO: 525210 - DNA, 201 bp, Homo sapiens
gtattttctctctaagctgacatggtctcagaattctgtacgcattaatctgtgcatctattctcagtcatttgcaattggcatttaatatgaaatctatytgacatccctgtgttaacactgatgttactgttcagtcatttctttgattattcattcattacaatatatagtgagtaccagttaatgccaaccattgtt

SEQ ID NO: 525211 - DNA, 201 bp, Homo sapiens
tatgaaatctatttgacatccctgtgttaacactgatgttactgttcagtcatttctttgattattcattcattacaatatatagtgagtaccagttaatrccaaccattgttctaggtgctagctgctgaggttagagcagtgcctgaatcagacaaaaagccctatcgtcatgggtcctacattctagtgggaggaaaa

SEQ ID NO: 525212 - DNA, 201 bp, Homo sapiens
ttgtaaatataaaatagatttcttagtaaatgtgaacatgtaataatacttaatgaatagtgttcattcagatgtgttttatgtaaatttatggcacagtktatcttgccatgagttaagtttttcatttttaaatgtagcgcctttcaaaatccttttttttttcaagtatggaaaaaaacatataatatgaacatgtat

SEQ ID NO: 525213 - DNA, 201 bp, Homo sapiens
aactcctgaactggtcctgtgatgtgactgcagccgccaggcgcgtgcgcagtgtacactgcgtgcgcatacgcgagcccgttgcgcctgcgcgcggtgcsgccgtcgcccctcttttcgcggcgttctccacctgcgcgggcctgaatggccttcaggagcacagtcggcctgaggagttgatggttactcaccgccgtg

SEQ ID NO: 525214 - DNA, 201 bp, Homo sapiens
caggtgattttgatgcacaatgagaattgggacccaatgacgtagacttactcttttcttcctacgtaggaatttatttaggcaatatctcaaatgagaayctagtttgggcttgcatatctccaatatggagaattaacttatgtcactaagtaaaacatcctattcaaggttggggtagttttagttttaagaaagctg

SEQ ID NO: 525215 - DNA, 201 bp, Homo sapiens
gcgcctgcgcgcggtgccgccgtcgcccctcttttcgcggcgttctccacctgcgcgggcctgaatggccttcaggagcacagtcggcctgaggagttgayggttactcaccgccgtgagcccaagtaactcgccctccttcggctagaaaccctccgcctgggcccgcgcgacaggagcgcggtctctgaggggagcggc

SEQ ID NO: 525216 - DNA, 201 bp, Homo sapiens
ggcggcttcttccgtgggacaatatgttcaagagaatggccgaatttgggcctgactccggcgggagagtaaaggtcagtgcccggaccgcccctcttccrgggtggctctcccgccccggttcctccctgcgcggcgcggggagggcccactgggtttcctttcgcgccttttctcctcgggtttgaaccgtggtttcag

SEQ ID NO: 525217 - DNA, 201 bp, Homo sapiens
catctttatcccatctttgacctcttttccaagaaaactgctttttaacagttacctgttctcaattcctctagaaattactcactcctgtgcatctcatrtatttaaatccctaatactggatttctcagcttcagatagtatctttcagtgcctaatgattgattataggtgatcctttttcgtcctctttccaagttt

SEQ ID NO: 525218 - DNA, 201 bp, Homo sapiens
gacaatatgttcaagagaatggccgaatttgggcctgactccggcgggagagtaaaggtcagtgcccggaccgcccctcttccagggtggctctcccgccycggttcctccctgcgcggcgcggggagggcccactgggtttcctttcgcgccttttctcctcgggtttgaaccgtggtttcaggttggagagcgagtcag

SEQ ID NO: 525219 - DNA, 201 bp, Homo sapiens
ctttccaagtttctttttttcattttgccaaaggaattttttcagaaaggatgcctgagaaataaactttcagagatattgcccatctgaaatgtccttaktttttcttcatagttcattgttggggagaaaaattctaggcactaaaggtagatatgctttcttgtctatgaatggagagagaagagaaagtcaagaggc

SEQ ID NO: 525220 - DNA, 201 bp, Homo sapiens
gtttgaaccgtggtttcaggttggagagcgagtcagagccattgagcgaaaaaccggcgttcattgggccccaacttcctcgcgtcactgccaactcccayccccgccaaaaaacaaacagataaatggtggcttggggaaacccggacgtggctgccaaggaaacgggcgactccgagggctgggaaagctcagcttggt

SEQ ID NO: 525221 - DNA, 201 bp, Homo sapiens
ctaaagagtattcatgttaggtagatatgaatggatctaataggaaaataaaggtacagaaaatttgggtgatttgctgcaataagttgcagttgaaacargatcatgaatttgacatgtatatacttattccagtctctatttcagttaaaaaaatgccagtatcttatgatgataaaaaccattgcacagatttgacat

SEQ ID NO: 525222 - DNA, 201 bp, Homo sapiens
tttcagattaatgctcaagtgttgactacctgaatgccacattgataatcggtcatgttgtattttctctctaagctgacatggtctcagaattctgtackcattaatctgtgcatctattctcagtcatttgcaattggcatttaatatgaaatctatttgacatccctgtgttaacactgatgttactgttcagtcatt

SEQ ID NO: 525223 - DNA, 201 bp, Homo sapiens
agggctgggaaagctcagcttggtgcacattcgctgccaatctaggttattggtgaagcggtgacgccaccctcctggtgtgaggataacaataactgtarcaaacagtcgctgagcgcttacccgcagtatttccaagtgcggtaactgagacaccgaggcatacgaaagctaagaaaatttgctggagttcatggtgtt

SEQ ID NO: 525224 - DNA, 201 bp, Homo sapiens
tagcgcttcattttatatcttatttatgagtctttatttttatagccactggctttttcatcttttgatctcttcttatcagattgttgcttgataatgtaaaaaaaaaatccctccaggcttttgctttgatccttcagcaactttgttaggttgtgataccctcattttagagatcaggataccaaggctcagaggtca

SEQ ID NO: 525225 - DNA, 201 bp, Homo sapiens
ccatgaggtcaggagaagaatgtgtattctgtagccatttgatgaaatgttctgtaaatacctattaggtccatttggcctattttgcagattaagtccartggtatttttttgttgattttctgtctggatgatctgttcagtgctgaaagttggatgttggcgatgccaggtattgttgtattggggtctatctctctt

SEQ ID NO: 525226 - DNA, 201 bp, Homo sapiens
cctcccaggttcaagcaattctcctgcttcagcctcccaagtagctgggattacagatgcacaccaccaagcccagctaatttttgtatttttagtagagrtggggtttcaccatcttggccaggctggtcttgaacctctgacctcaggtgatccacccaccttggtgaaattgtaggttttaatttctagttacagtta

SEQ ID NO: 525227 - DNA, 201 bp, Homo sapiens
ctcaggtgatccacccaccttggtgaaattgtaggttttaatttctagttacagttattactattttttaatactgattaaacacgtaagtaaaaaagtgaaaaatgtttgacctttattctacctctcacaaattactcctaatatttatactatactttgggaaacactgccacaggctaggtgataaggacattgcca

SEQ ID NO: 525228 - DNA, 201 bp, Homo sapiens
tcttggcacctttgtcaaaaatgagttccctgtaagtgtgtggatttgtttctgggttctctagtctgttccgttggtttatgtgtctctttttctgcaartaccatgctgttgtggttactatagctctgtagtataatttgaagtcaggtgattcctccagttttgttctttttgcggaggataacttaggctattctg

SEQ ID NO: 525229 - DNA, 201 bp, Homo sapiens
tgttctttttgcggaggataacttaggctattctggatcttttgtggttccacataaaattttaggttttgttttttttttttctatttctgtgaagaatrtcatttgtattttgatagggattgcagtgaatctgtagattgctttgggaagtatgggcattttaacaatattgattttccagttcatgaacatggaata

SEQ ID NO: 525230 - DNA, 201 bp, Homo sapiens
ttgcccaaaattacccagtagagcctgcattttaaacccaaaatctgtccacttaactaataagttgtaaaaagcctgatagtctgtctcctaaccagtaygctcaactgactttataaaagtagtaattctttggatttgttttctcgaaattgagcttcattgggaaattaaaaacagaaacttttctttttttgtata

SEQ ID NO: 525231 - DNA, 201 bp, Homo sapiens
tatgattacctcataacattagtgcatttttttcttacctgtttcctgcctctgtaccccagcatctaacaaagcgcatatcattcagtgtgttttttaarttgatgtggggagagagggtataggggaatacaaatttctgcatagtaaaaagcactgggaacaaagtctaaagactgacaggccatagaaaaatgtact

SEQ ID NO: 525232 - DNA, 201 bp, Homo sapiens
tgcagtagggaaacagacacaatgctaatgggattataaattggtagatccttttgagttgcttgatgttcttccagaattacaagtacatatatattctrtaacagttccatttccaggaatttatcctacaaatatactaaaatgattatttacagcatacacattattgcattgtttgtaaaagaaaaaaatggagat

SEQ ID NO: 525233 - DNA, 201 bp, Homo sapiens
gaaggacaccagtcatattggattgtggtccaccctaatgacttcattgtaattacacctgcaaagaccctgtttccaaataatgtcacatccacaggtgmtgagaattagggcttcgtatcttttgcctgcatttatagtcccagttacttgggaggctgaggcaggagtatcatttgagatcaggaattcaagaccagc

SEQ ID NO: 525234 - DNA, 201 bp, Homo sapiens
tttctgtttccatagttgggtttttttcccaccaaaccatctggcttccaattagtgaccatcttttattagtgaaagtaagtataagtgtactttaatartgagcagcagttaccaaaaatgtccacaagatggaaatgttagacacaagcagatatttttctttgtaaaacatcatgctacatatccaagtggcatatt

SEQ ID NO: 525235 - DNA, 201 bp, Homo sapiens
gagcagcagttaccaaaaatgtccacaagatggaaatgttagacacaagcagatatttttctttgtaaaacatcatgctacatatccaagtggcatatttwaatagatgtgtcctgttttgcagtaacatttctttagtactttgttatagatagatagtttcagatatcacttaatgtttctcttttctcataacaatag

SEQ ID NO: 525236 - DNA, 201 bp, Homo sapiens
tagtttcagatatcacttaatgtttctcttttctcataacaatagttgatagggctttttctgtaccaggcagtattctgggtactttacataaattaatwcattaagtcttctcaacaggctgggtgtggtggctcacacctgtaatcccagctgcttgggaagctgaggtgggataatcacttgaacccgggagtgaga

SEQ ID NO: 525237 - DNA, 201 bp, Homo sapiens
tggtcctgtgatgtgactgcagccgccaggcgcgtgcgcagtgtacactgcgtgcgcatacgcgagcccgttgcgcctgcgcgcggtgccgccgtcgcccytcttttcgcggcgttctccacctgcgcgggcctgaatggccttcaggagcacagtcggcctgaggagttgatggttactcaccgccgtgagcccaagtaa

SEQ ID NO: 525238 - DNA, 201 bp, Homo sapiens
ttgtcgtcaggaaatgccatatttattaccctgtcatatatcttaaacatgtgagaaaaatactttagtaaaagtatttgttttctttagttgcagagctygaagtgaaaaccagagaaaaattagaagctgctaagaaaaaaacaagctttgagattgcagagcttaaggagagattaaaagcaagtcgtgaaactataa

SEQ ID NO: 525239 - DNA, 201 bp, Homo sapiens
ggacgaggagtgggagatgagatcagagaagttaataggggactaggtcatatagggacttgtgggtaactatgagggcttcagattattaaactgagatwtgaagtcatttgtgagttttgagcaaaggaatgacatcagatttaacttctttaaaatgtttaattttgtgggtatattgtaggtatatatatttactgg

SEQ ID NO: 525240 - DNA, 201 bp, Homo sapiens
cgttggtttatgtgtctctttttctgcaagtaccatgctgttgtggttactatagctctgtagtataatttgaagtcaggtgattcctccagttttgttcyttttgcggaggataacttaggctattctggatcttttgtggttccacataaaattttaggttttgttttttttttttctatttctgtgaagaatgtcatt

SEQ ID NO: 525241 - DNA, 201 bp, Homo sapiens
ggatgacacaagcacccctttagccaccaccactgggactgccttaggtcagacttgaagccagcacattactgggtcttgcccaaggcccactgtaaccrctgcctggctgccacctatgtttgtgtgaggccctaaggctctataatcagcaggtgatgaagtcagccagtatcaggggaaattcagccagatatcggg

SEQ ID NO: 525242 - DNA, 201 bp, Homo sapiens
tttccctaagtgccggccagtctgagaaataaagggacagagtacgaaagagagaaattttaaagctgggtgtccaggggagacatcacatgtcggcaggktccatgatgccccacaagccacaaaaccagcaagtttttattagtgattttcaaaaggggagggagtgtatgaatagggtctgggtcacagagatcacat

SEQ ID NO: 525243 - DNA, 201 bp, Homo sapiens
tcagcctcctgagtagctgggacccacaggcacatgccaccactatgcccagctataattttttttttttttttttttttttttttttttggtggagatgrggttttgccatgttgcccaggctagtctcgaactcctgggctcaagcagtcctccctccttggcctcccaaagtgctgggatcataggtgtgagctgctg

SEQ ID NO: 525244 - DNA, 201 bp, Homo sapiens
aacattttttgtgttttcatgtgatgaagtttttagatctcctaccatctgtgttgcccttcaggaaaacacactcatgttatattttgtttggcaataattttttttttcttttgagacagagttacactctgctgcccaggctggagtacagtggcataaacacaactcactgcagcctccacctcctggcctcaaaca

SEQ ID NO: 525245 - DNA, 201 bp, Homo sapiens
gggtgcatatatgtttacaattgttatatcctcttgctgaattgactcctttattattatataatgaccctgtctctttttatagtttttgttgtgcaatmtgtttgtctgatgtcagtattgctactcctgctcttttttgattttgcatgcaatatctttttttttcatttgcatgcaatatctttttccatcccttta

SEQ ID NO: 525246 - DNA, 201 bp, Homo sapiens
tattaggtccatttggcctattttgcagattaagtccaatggtatttttttgttgattttctgtctggatgatctgttcagtgctgaaagttggatgttgrcgatgccaggtattgttgtattggggtctatctctcttaaactctaataatatttgctttatgtatctgactgctccactgttgggtgcatatatgttta

SEQ ID NO: 525247 - DNA, 201 bp, Homo sapiens
ttaaactgatgacagcttaacactgattgcataaacaagcaagcaaaaagaaagcaataaacactttatattttaacttcatctccccacttttaactttktgttgtttctatttatatcttattgctatctatgtcttgaaaaattgtagttattatttttgatcggttcatcttttcatatttctacctaagacttgtg

SEQ ID NO: 525248 - DNA, 201 bp, Homo sapiens
catatttctacctaagacttgtgtagtttacaaactgcaattacaatgtaataatattctttgtttttctgtttacttgccagtgagttttgtatcttcaratgatttcacattacttattaacatgcttttctttcagattgaagaactcttcagcatttcttgtagggcagctctggtgttgatgaaatctctcagctt

SEQ ID NO: 525249 - DNA, 201 bp, Homo sapiens
cctgtagggtcaaaactcagtaatggctctcacattccacatatgtggctggggtttaactccagtttcaaggctttcacattcatcaccattttatcttgttagaatcacatcagtcttttagcaccaaacatttacattttaattatcagattatattttttaaactgtgtatgtatttttaaaggagctgaatatcac

SEQ ID NO: 525250 - DNA, 201 bp, Homo sapiens
ccatgttgcccaggctgatctcaaactcctgggctcaagcattcctctcgccttgccctcccaaggtgctgggattacaggcatgagccaccatgaccggycaagaaattattaaatattatatctgctatttgtaagatattgtttaagggattgagaaggatacaaaaatgagacactgaccttaatgagaatagttta

SEQ ID NO: 525251 - DNA, 201 bp, Homo sapiens
gaggcatacgaaagctaagaaaatttgctggagttcatggtgttcacaaagcctcaaagcaagagcataacactgtgcctggcacatggggaacattcagyaaatgtcaacttcttttgtttttgatgaaattaccatagaccctagcgtaatgtttgacattgtaatatttatttccctcacacagcccctggcacgtta

SEQ ID NO: 525252 - DNA, 201 bp, Homo sapiens
tctctggttttcctaggcagagggccctgctgccttcccgcagtgtttgtgtccctgggtacttgagattagggagtatgctgccttcaagcatctgtttracaaagcacatcttgcgccgcccttaatccatttaacccttacacatgtttcagagagcacggggttgggggtaaggttatggattaacagcatcccaag

SEQ ID NO: 525253 - DNA, 201 bp, Homo sapiens
gcccgttctcaatgagctgttaggtacacctcccagacggggtggcggccgggcagaggggctcctcacttcccagacagggtggccgggcaggggcgccmcccacctcccagacagggcggcggccgggcgggggctgccccccacctcccggacggggcagctggccgggcgggggctgccccccacctcccggagggg

SEQ ID NO: 525254 - DNA, 201 bp, Homo sapiens
gggtggcggccgggcagaggggctcctcacttcccagacagggtggccgggcaggggcgccccccacctcccagacagggcggcggccgggcgggggctgccccccacctcccggacggggcagctggccgggcgggggctgccccccacctcccggagggggcggctgccgggcggagacgctcctcacttccctgacgg

SEQ ID NO: 525255 - DNA, 201 bp, Homo sapiens
ccagacagggtggccgggcaggggcgccccccacctcccagacagggcggcggccgggcgggggctgccccccacctcccggacggggcagctggccgggygggggctgccccccacctcccggagggggcggctgccgggcggagacgctcctcacttccctgacggggtggctgctgggcggaggggctcctcacttcc

SEQ ID NO: 525256 - DNA, 201 bp, Homo sapiens
atcttttttcctctactaactttgggtttggtttgctcttgcttttctcattttttacaatacatcgttagatattttatttgaagtttttcctctatttkgctacagacatttaaagctacacatttccctctgagtactgcttttgctgtgttgtttccattatctgtttcaataaatttttcagtttccatctgtcct

SEQ ID NO: 525257 - DNA, 201 bp, Homo sapiens
acggggtggctgctgggcggaggggctcctcacttcccagacggggaggctgccgggcgtaggggctcctcacttctcagacggggcggccggtcagagaygctcctcacctcccagacggggtggcggcggggcagagacactcctcagtttccagatggggtcgcggccgggcagaggcgctcttcacatctcagatgg

SEQ ID NO: 525258 - DNA, 201 bp, Homo sapiens
aggataacttaggctattctggatcttttgtggttccacataaaattttaggttttgttttttttttttctatttctgtgaagaatgtcatttgtattttsatagggattgcagtgaatctgtagattgctttgggaagtatgggcattttaacaatattgattttccagttcatgaacatggaatatctttccttttctg

SEQ ID NO: 525259 - DNA, 201 bp, Homo sapiens
gtttccagatggggtcgcggccgggcagaggcgctcttcacatctcagatggggcggcggggcagaggcgctccccacatcccagaggatgggcggccggrcagagacgctcctcacttcctagacgggatgacggccgggaagaggcgctcctcacttcccagactgggcggctgggcagaggggctcctcacatcccag

SEQ ID NO: 525260 - DNA, 201 bp, Homo sapiens
catcccagaggatgggcggccgggcagagacgctcctcacttcctagacgggatgacggccgggaagaggcgctcctcacttcccagactgggcggctggkcagaggggctcctcacatcccagacgatgggcggccaggcagagacgctcctcacttcctagacggggtggcggccgggcagaggctgtaatctcggcac

SEQ ID NO: 525261 - DNA, 201 bp, Homo sapiens
aagaggcgctcctcacttcccagactgggcggctgggcagaggggctcctcacatcccagacgatgggcggccaggcagagacgctcctcacttcctagayggggtggcggccgggcagaggctgtaatctcggcactttgggaggccaaggcaggcggctgggagatggaggttgtagcgagcagagatcacgccactgc

SEQ ID NO: 525262 - DNA, 201 bp, Homo sapiens
acaggtgtgtaccaccacacctggctaattttttttatatttttagtagagacagggtttcaccatgttggccaagctggtctcgaactcctgacctcagktaatccacccaccttggcctcccaaagtgctaggattataggcatgagccaccacacccagcctagttgttttaatttttagctcccacaaataagtgag

SEQ ID NO: 525263 - DNA, 201 bp, Homo sapiens
gctgggcagaggggctcctcacatcccagacgatgggcggccaggcagagacgctcctcacttcctagacggggtggcggccgggcagaggctgtaatctyggcactttgggaggccaaggcaggcggctgggagatggaggttgtagcgagcagagatcacgccactgcactccagcctgggcaacattgagcactgagt

SEQ ID NO: 525264 - DNA, 201 bp, Homo sapiens
ccttcccattcttccctcccctttttccaggcagatgattctttccccgtgtccaccactaccacaggcccacaaggagttctgtcagggtaccacaaatrtttacttaaggcccaagggctcttcagtcagcttgtgttgaatactgccaggcctgggactttcccttcagggcagtgggctcctcttggcctaggtagg

SEQ ID NO: 525265 - DNA, 201 bp, Homo sapiens
ttcccttcagggcagtgggctcctcttggcctaggtaggtccagagatgccatccaagggccaaggcgtggaattggggagttggtaccaaagcttaagasaaagtcccctttactctttcctgtgtgtggaggctgtcccagtaattcagatttggtagaatggtggcttggaccagagtgatagcaatgggagaagaca

SEQ ID NO: 525266 - DNA, 201 bp, Homo sapiens
tacacaggtgggaggtcttggaggaacaggtttttgcaattcagagtacagctttggcggccaggtgtgatggctcatgcctataatcgcagcacattagrggggctagcatgggaggattgcctgagcccaggacttcaagactagcctgagcaatgtagtgagaccccatctctacaaaaaaaatttttttaattttct

SEQ ID NO: 525267 - DNA, 201 bp, Homo sapiens
tgtaagacatgtaagttgagatgttgagaaggatgttgcaccatggcattcaaagagaggagaagtgtaggctggagacataaatttgaaagttaatacarttataaattatgagaccaaatggtatcatcaaaggagtaagtgaagatagaaaagaggtccaaagactgagagacctgggcactccaaaatttaaagatt

SEQ ID NO: 525268 - DNA, 201 bp, Homo sapiens
tgtaagaatttcttaattgtaaaagtcagttgtgcacatggttttaagagaagatttttgaaataagtgtaagtcttctgtgttagttttctggtaccatraactgggtggattaaaacaacagaaatttattcccacagatctgaaggctagaagtctgaaatcaaggtgttggccatgttttttccaaagcctttaggg

SEQ ID NO: 525269 - DNA, 201 bp, Homo sapiens
aaccgtggtttcaggttggagagcgagtcagagccattgagcgaaaaaccggcgttcattgggccccaacttcctcgcgtcactgccaactcccatccccrccaaaaaacaaacagataaatggtggcttggggaaacccggacgtggctgccaaggaaacgggcgactccgagggctgggaaagctcagcttggtgcaca

SEQ ID NO: 525270 - DNA, 201 bp, Homo sapiens
gtactgttgttttaatggaaaaaaatcaaaattgatttagaatattatctatagaggtgtattaaaacaagatttgccaaaaaaaaagttaatttgggacrtgtatttctatacattacaaatcataaaagaattcaacacaggcttcctttttgtttttttaaaaaaagcaaaataggccaggtgcggtggctcacgcct

SEQ ID NO: 525271 - DNA, 201 bp, Homo sapiens
cgggaggccaaggctggcagatcactcgcggtcaggagctggagaccagcccagccaacacggcgaaaccccgtctccaccaaaaaatacaaaaactggtsaggcgtggtggtgcgcgcctgcaatcccaggcactcggcaggctgaggcaggagaatcaggcagggaggttgcagtgagccgagatggcggcagtacagt

SEQ ID NO: 525272 - DNA, 201 bp, Homo sapiens
aatggaaaaaaatcaaaattgatttagaatattatctatagaggtgtattaaaacaagatttgccaaaaaaaaagttaatttgggacgtgtatttctatayattacaaatcataaaagaattcaacacaggcttcctttttgtttttttaaaaaaagcaaaataggccaggtgcggtggctcacgcctgtaattccagcac

SEQ ID NO: 525273 - DNA, 201 bp, Homo sapiens
ctcgcggtcaggagctggagaccagcccagccaacacggcgaaaccccgtctccaccaaaaaatacaaaaactggtgaggcgtggtggtgcgcgcctgcartcccaggcactcggcaggctgaggcaggagaatcaggcagggaggttgcagtgagccgagatggcggcagtacagtccagcctgggctcggcatcagagg

SEQ ID NO: 525274 - DNA, 201 bp, Homo sapiens
gaggcaggagaattgcttgaacctgggaggcggaggttgcaatgagccgagattgtgtcactgcactccagcctaggcaacagagtgagactctctctcaraataaataaataaataaataatgataatatcatctacaaacaaggctaatttgacttctgctgaattttatcagatcctttttcagcatcaattgaaatg

SEQ ID NO: 525275 - DNA, 201 bp, Homo sapiens
aagctgtacttcgttacgcttccctgaactttttactgattactattcctaccttagttttcttttctcatgagtaagcatccatagctcatttaaacatwttttgtgttttcatgtgatgaagtttttagatctcctaccatctgtgttgcccttcaggaaaacacactcatgttatattttgtttggcaataatttttt

SEQ ID NO: 525276 - DNA, 201 bp, Homo sapiens
attccatgtgtttgtatagtttccagaattcctcttgttattgatttctaattttattccattgtagtcagagaagatacttcacattacttgcttttttaaaaaaaaatgttttatgacttgttttgtggcctaacatatggtctttatccttgagaatgatccatgaggtcaggagaagaatgtgtattctgtagccat

SEQ ID NO: 525277 - DNA, 201 bp, Homo sapiens
aagaaatcattgtaccctgtaacctcattatgagacagctcttgaagtcactcttagaaaggtatataacctattgcactgctatagtgattaatctgttkaatagattcccatatagatttacataggcctgaattttattctctaaaaaatattatagggttttttagtattattaaactattgtactttttcaatagt

SEQ ID NO: 525278 - DNA, 201 bp, Homo sapiens
caggttctcgctctgtcactcaggctgggttgcagtgtcatgatcgtagctcactgtagcctcaaacttgggggctcacatgatcctcctgccttggcccyctaacagtagctaggactacaggtatgtgccaccatgtctggctaattttttttttttttgtaggggcaggtttctccacctcagactcctaaagtactg

SEQ ID NO: 525279 - DNA, 201 bp, Homo sapiens
gtcttgttttttcatccattcagccactctgtgtcttttgattggagactttagtccatttacattcactgatattgatatttacattcattagtattgataagtaaggacttccaccattttatttttctgattgtttgatggtcttctctttcttctttccttccttcctgttttccttttagtgaaggtgattttttc

SEQ ID NO: 525280 - DNA, 201 bp, Homo sapiens
tagggttttttagtattattaaactattgtactttttcaatagttagctcttacagaaaatgtccagtgaaggtttatttaaaatatctaagaaagacaasttggttggaagacaacttgtgatttacttctgctacccagtaacctattatacagatcaagccactataaaaagaatggttgtttctaaaagcaaaatgt

SEQ ID NO: 525281 - DNA, 201 bp, Homo sapiens
tcttgttttttcatccattcagccactctgtgtcttttgattggagactttagtccatttacattcactgatattgatatttacattcattagtattgataagtaaggacttccaccattttatttttctgattgtttgatggtcttctctttcttctttccttccttcctgttttccttttagtgaaggtgattttttct

SEQ ID NO: 525282 - DNA, 201 bp, Homo sapiens
ataaatttagctctttaggaaagctatctgggaatattaatcaaaggtctaaaaaatatgtatagttttaataatctgagggcatatgatagtcaatattkagtaataataaaatgccagacttattcagtgcttactatttgtattcttctgagtctgtacatgtataaactcacttaattctataacagctttattagg

SEQ ID NO: 525283 - DNA, 201 bp, Homo sapiens
cttgttttttcatccattcagccactctgtgtcttttgattggagactttagtccatttacattcactgatattgatatttacattcattagtattgataagtaaggacttccaccattttatttttctgattgtttgatggtcttctctttcttctttccttccttcctgttttccttttagtgaaggtgattttttctg

SEQ ID NO: 525284 - DNA, 201 bp, Homo sapiens
ccaaaattacccagtagagcctgcattttaaacccaaaatctgtccacttaactaataagttgtaaaaagcctgatagtctgtctcctaaccagtatgctsaactgactttataaaagtagtaattctttggatttgttttctcgaaattgagcttcattgggaaattaaaaacagaaacttttctttttttgtataagca

SEQ ID NO: 525285 - DNA, 201 bp, Homo sapiens
ttgttttttcatccattcagccactctgtgtcttttgattggagactttagtccatttacattcactgatattgatatttacattcattagtattgataagtaaggacttccaccattttatttttctgattgtttgatggtcttctctttcttctttccttccttcctgttttccttttagtgaaggtgattttttctgg

SEQ ID NO: 525286 - DNA, 201 bp, Homo sapiens
ctttttactcacctattttcagaccgctattgacagtggctaactgtaagcatggaaaatgaaaccatggatgaggggggactactgtataaagctgtatrtagctcttacaaatcaataagaaaggccaataacccaataggaaaatgagcaaaaggaaaacagatcatttgtagaaagggagaaatgtctcaaacatta

SEQ ID NO: 525287 - DNA, 201 bp, Homo sapiens
caagccacaaaaccagcaagtttttattagtgattttcaaaaggggagggagtgtatgaatagggtctgggtcacagagatcacatgcttcacaaggtaayaagatatcacaaggcaaatggaggcagggtgagatcacaggaccggggcaaaactaaaattgctaatgaagttttgggcacatattgtcattgataacat

SEQ ID NO: 525288 - DNA, 201 bp, Homo sapiens
cggggcaaaactaaaattgctaatgaagttttgggcacatattgtcattgataacatcttatcaggagacagggtttgagagcaggcaaccggtctgaccraaatttattaggcaggaatttcctagtcctaataagcctgggagtgctacgggagactggggctaatttcatccctacagctgcgaccgtaaaagacagc

SEQ ID NO: 525289 - DNA, 201 bp, Homo sapiens
ctggtgctctgttttactgtggctgagctggcacccaggctacaagacagcatccttcccattcttccctcccctttttccaggcagatgattctttcccygtgtccaccactaccacaggcccacaaggagttctgtcagggtaccacaaatgtttacttaaggcccaagggctcttcagtcagcttgtgttgaatactg

SEQ ID NO: 525290 - DNA, 201 bp, Homo sapiens
cgggtaggtccagagattctgtccaggagccagggcctggagttggaaaccttaggaataatcctggtgctctgttttactgtggctgagctggcacccargctacaagacagcatccttcccattcttccctcccctttttccaggcagatgattctttccccgtgtccaccactaccacaggcccacaaggagttctgt

SEQ ID NO: 525291 - DNA, 201 bp, Homo sapiens
cattctcccgcctcagcctcacgcgtagctgggactacaagtgctcgccaccatgcccagctaattttttgtatttttagtagagacagggttttaccgtstattgcatgttttttatgtgctagatgctttacatataattacttcatgtaatcttcgtaaatcctctgagaaatacctagttttagctgtatcgtacaa

SEQ ID NO: 525292 - DNA, 201 bp, Homo sapiens
cagtcccagagagctcctctctaactcagagcaactgaactgagacagaggaggaaaacagagcatcagaagcctgcagtggtggttgtgacgggtaggasgataggaagacagggggccccaacctgggattgctgagcagggaagctttgcatgttgctctaaggtacatttttaaagagttgttttttggccgggcgc

SEQ ID NO: 525293 - DNA, 201 bp, Homo sapiens
tcttgcaatttatccagctaaataaggcaagtgatctcctttagtatcttccaactacaaaacaaaaatgagtccattttgtttgtttgttgcaacaaattcattctgtctgggaatctggcctgtgtggtggggagactacttcagtcagactcaagctgagcctccgtgggtctgtttgtaagtggtggaaaagatgaa

SEQ ID NO: 525294 - DNA, 201 bp, Homo sapiens
gtttgcttagagatgaaatatgcatttatctaattcaagcataaatctgccttaccaattcatgcatttttatttctgtagctctttgtgatgtatagagwtaggcagccaaaggacacagggaaatgggagctgggagctgggaagggacggggcatattgagagatcctagagagcccatgctcagatgctttcaggta

SEQ ID NO: 525295 - DNA, 201 bp, Homo sapiens
agtctgaagacactgctgtgcaacatggtttagagggtttgtccataagcaaaaaatcaactgacaaggaagagatcaaagaccaaccacagaatgtatcygaaaatctgcttccacaaaatgcaccaaattattggtatcttcaaggattaattcataagcagaatggagatctgctgcaagcagccaaatgttatgaga

SEQ ID NO: 525296 - DNA, 201 bp, Homo sapiens
ctcctaacaaaactgaaagcacctggcgggcagagaaggttgggataatctctatttttcttagtatccataatatctaataaagtgacaaaaagaggtascccaataaagagtcatgggatagctaaacaaaccttacccagaatgtacaaggaatgagaactgacttggtattttttaatttttattcttacttttatt

SEQ ID NO: 525297 - DNA, 201 bp, Homo sapiens
aggtggtttccggtttcgttgaggcaaatacatccaacaatacatccaacatcacctgtcatcctgcaggtccactggatactctctattaattactagagtgttcagctatttttttcaggcacccatatgtacctacaaatctgcagatacattctattgatctgagactcacactttctccttttaaccttcctaatt

SEQ ID NO: 525298 - DNA, 201 bp, Homo sapiens
cagaaaaagaccaatgtcctagctcaagcagtcggtcagagggagaattctcccttcctctgcctttttgttctattaaggccctcaacagaatggataaygcccacccatactggggagagcaatctgctctactcagtccaccaattcacatgttcatgtcttccagaaacaacctcacatacatacccagaaataatg

SEQ ID NO: 525299 - DNA, 201 bp, Homo sapiens
aaggtggtttccggtttcgttgaggcaaatacatccaacaatacatccaacatcacctgtcatcctgcaggtccactggatactctctattaattactagagtgttcagctatttttttcaggcacccatatgtacctacaaatctgcagatacattctattgatctgagactcacactttctccttttaaccttcctaat

SEQ ID NO: 525300 - DNA, 201 bp, Homo sapiens
gaacatctatatataaagagatttattatgaggaattggctcacctgattatggagactggcaagtcccataatctgttgtctgcaagctggagaccaagraaagttgatggtgtagtcccagtccaagtctaaaagtctgagaaccaggtaagccaatggtgaaagttctagtccaagtctagtctaagggcagaaaaag

SEQ ID NO: 525301 - DNA, 201 bp, Homo sapiens
acatttaccaaaactcatcagactatacactgaaaatgggtgcatcttattgtatataaagcataatctcagtaaacttgatttttaaatttatatattgwcctcctggagttcttcaggggatagcatgttagggagaactaagagaaaaggatgcctttcccaccaagcatctctaggaaaggagtgaggaggtgattg

SEQ ID NO: 525302 - DNA, 201 bp, Homo sapiens
agctgaagagttaatccagcaagaacatgctgaccaagcagaaatcagaagtctagtcacttggggaaactacgcctgggtctactatcacttgggcagaytctcagatgctcagatttatgtagataaggtgaaacaaacctgcaagaaattttcaaatccatacagtattgagtattctgaacttgactgtgaggaagg

SEQ ID NO: 525303 - DNA, 201 bp, Homo sapiens
aagcactaaagcaatatgctatggactattcgaataaagctcttgagaagggactgaatcctctgaatgcatactccgatctcgctgagttcctggagacrgaatgttatcagacaccattcaataaggaagtccctgatgctgaaaagcaacaatcccatcagcgctactgcaaccttcagaaatataatgggaagtctg

SEQ ID NO: 525304 - DNA, 201 bp, Homo sapiens
catcagcgctactgcaaccttcagaaatataatgggaagtctgaagacactgctgtgcaacatggtttagagggtttgtccataagcaaaaaatcaactgrcaaggaagagatcaaagaccaaccacagaatgtatctgaaaatctgcttccacaaaatgcaccaaattattggtatcttcaaggattaattcataagcag

SEQ ID NO: 525305 - DNA, 201 bp, Homo sapiens
gtttagagggtttgtccataagcaaaaaatcaactgacaaggaagagatcaaagaccaaccacagaatgtatctgaaaatctgcttccacaaaatgcaccraattattggtatcttcaaggattaattcataagcagaatggagatctgctgcaagcagccaaatgttatgagaaggaactgggccgcctgctaagggatg

SEQ ID NO: 525306 - DNA, 201 bp, Homo sapiens
tgccctactctcccacccctttatatagttccttcagtatttacttgaggcagacaggaagacttctgaagaacaaatcagcctggtcaccagcttttcgsaacagcagagacacagagggcagtcatgaggtcagtgaaataagaatgcataatcatgcttgtttttgagtgcaaattgtaagttgagtttcttactgtg

SEQ ID NO: 525307 - DNA, 201 bp, Homo sapiens
gaactaagcaaagaggtcactgaaatccaggtgtcctgtggttttcttcccttcactcaagatgcctgataatgctgcttaattcaccacattagctccayaaataaaggggaaaactgctttttaaaatacctctatgacagcacttctcaaaatgtggtacaggaactcctgcactgaatttccaaggcacttgtgaaa

SEQ ID NO: 525308 - DNA, 201 bp, Homo sapiens
ccctggaatgcttacggcaagctgaagagttaatccagcaagaacatgctgaccaagcagaaatcagaagtctagtcacttggggaaactacgcctgggtytactatcacttgggcagactctcagatgctcagatttatgtagataaggtgaaacaaacctgcaagaaattttcaaatccatacagtattgagtattctg

SEQ ID NO: 525309 - DNA, 201 bp, Homo sapiens
ggtacaggaactcctgcactgaatttccaaggcacttgtgaaaacacaggtttctaagctcacatcagattcactgcaccagaatctctgggagtaggacygcatagtcagtactgtcaatatacaataatcagaaggctcaggatccagttaaaagagtttattcaacaaaaagttgagggcagcagtcccaggagtaga

SEQ ID NO: 525310 - DNA, 201 bp, Homo sapiens
atgtatagagttaggcagccaaaggacacagggaaatgggagctgggagctgggaagggacggggcatattgagagatcctagagagcccatgctcagatsctttcaggtaaaatcgggccagtgaaagctggggcctggagggaagttactggaggttctggttcgtcttttgtttcttatatttagaaagcctaagtca

SEQ ID NO: 525311 - DNA, 201 bp, Homo sapiens
gacggggcatattgagagatcctagagagcccatgctcagatgctttcaggtaaaatcgggccagtgaaagctggggcctggagggaagttactggaggtyctggttcgtcttttgtttcttatatttagaaagcctaagtcagaggtttgtggttttgttgtgactgtggttatttttaaaccatgcttgcttctcagca

SEQ ID NO: 525312 - DNA, 201 bp, Homo sapiens
tgtttttgagacagagtctcactctgtcacccaggctggagtgcagtggcccgatcatggctcactgcagcctcagactcctgggctcaagggattctccyacccagcctcccaagtagctgggactataggagcacgccactatgcctggttaatttttttgtattttagtagcaatggggttttgccatgttggtcagg

SEQ ID NO: 525313 - DNA, 201 bp, Homo sapiens
aaacctgcaagaaattttcaaatccatacagtattgagtattctgaacttgactgtgaggaagggtggacacaactgaagtgtggaagaaatgaaagggcraaggtgtgttttgagaaggctctggaagaaaagcccaacaacccagaattctcctctggactggcaattgcgatgtaccatctggataatcacccagaga

SEQ ID NO: 525314 - DNA, 201 bp, Homo sapiens
caaatccatacagtattgagtattctgaacttgactgtgaggaagggtggacacaactgaagtgtggaagaaatgaaagggcgaaggtgtgttttgagaargctctggaagaaaagcccaacaacccagaattctcctctggactggcaattgcgatgtaccatctggataatcacccagagaaacagttctctactgatg

SEQ ID NO: 525315 - DNA, 201 bp, Homo sapiens
caaacaggctttgtgtgagcaacaaggctgtttatttcacctgggtgcaggtgggctgagtccgaaaagaaagtcagggaagggagataggggtggggccrttttataagatttgggtaggtaaaggaaaattactgtcaaaggggggttgttctctggtgggcaggtgtgggggtcacaaggtgctcagtaggggagctt

SEQ ID NO: 525316 - DNA, 201 bp, Homo sapiens
agagggagaatcttgagctataagtgcttaaaatttagtttggtaagatccctggtgcattgatatgtcaaagccttctgccctccaaaaaaaaaaaaaaragagagagagatagtgtcatcagacttgcaaggtggtttccggtttcgttgaggcaaatacatccaacaatacatccaacatcacctgtcatcctgcagg

SEQ ID NO: 525317 - DNA, 201 bp, Homo sapiens
aggtttgtggttttgttgtgactgtggttatttttaaaccatgcttgcttctcagcaaatgtgtcaataattaattcagcactgcaaaattccaatttatrttgaggtcacttttaccttgaaatgcactttttcataattgggggatatgtctacttgagttgtcctctagcaggtctagtgacctgctaagcctcccac

SEQ ID NO: 525318 - DNA, 201 bp, Homo sapiens
ttttccaaatctgtctggaacatgttcctggcgtgagtgagctcagttctcacagattctgtttcagtttcccctcaagagggatcttgatagggttccawcagtttcactttcctttcccctttcataaaagcacagacctaacagcaccctgggtggaaacctcttcagcatttgcttggaatcagtaagctaaaaaca

SEQ ID NO: 525319 - DNA, 201 bp, Homo sapiens
attttctttttacagtgcctttttacaactttcaaaccacagttttccaaatctgtctggaacatgttcctggcgtgagtgagctcagttctcacagattstgtttcagtttcccctcaagagggatcttgatagggttccatcagtttcactttcctttcccctttcataaaagcacagacctaacagcaccctgggtgg

SEQ ID NO: 525320 - DNA, 201 bp, Homo sapiens
tgtttatagattcaatatgtctttatcagtctgagcatttgtaagatgtttgaggggtttttccctgtggctttttttggtgtacacacaggcttcttaartttctggaatggttccctacggaactacatggggggaggcagggtggggaatgcatcagctcatgtttcctccctgtgtgcagctatttcctgcaatgag

SEQ ID NO: 525321 - DNA, 201 bp, Homo sapiens
tagtttcactttccagtttcctcttccttcccctaaaagcaattactcaaaaacggagaaaacatcagctgatgcgtgccctactctcccacccctttatrtagttccttcagtatttacttgaggcagacaggaagacttctgaagaacaaatcagcctggtcaccagcttttcggaacagcagagacacagagggcagt

SEQ ID NO: 525322 - DNA, 201 bp, Homo sapiens
ctcaggagttggagaccagcctgggcaacatagtgagaccccgtctgtactaaaaatacaaaaatcagccaggcgtggtggcacgtgcctatagtctcatygactggagaggctgagatgggaggatcgcttgagcctgggaggcagaggttgcagtaagctgagatcgtgctactgcactccagcctggatgacagagtg

SEQ ID NO: 525323 - DNA, 201 bp, Homo sapiens
gagggcagatgcttgagctcaggagttggagaccagcctgggcaacatagtgagaccccgtctgtactaaaaatacaaaaatcagccaggcgtggtggcaygtgcctatagtctcattgactggagaggctgagatgggaggatcgcttgagcctgggaggcagaggttgcagtaagctgagatcgtgctactgcactcca

SEQ ID NO: 525324 - DNA, 201 bp, Homo sapiens
tcttttgtaaagaggtaacatggctggccgcagtggctcacacccataagcccaacactttgggaggccgaggagggcagatgcttgagctcaggagttgragaccagcctgggcaacatagtgagaccccgtctgtactaaaaatacaaaaatcagccaggcgtggtggcacgtgcctatagtctcattgactggagagg

SEQ ID NO: 525325 - DNA, 201 bp, Homo sapiens
agcatttgtaagatgtttgaggggtttttccctgtggctttttttggtgtacacacaggcttcttaagtttctggaatggttccctacggaactacatggsgggaggcagggtggggaatgcatcagctcatgtttcctccctgtgtgcagctatttcctgcaatgagaggaaggcttggcaggagcggtgtatttcactc

SEQ ID NO: 525326 - DNA, 201 bp, Homo sapiens
ccttaccaattcatgcatttttatttctgtagctctttgtgatgtatagagttaggcagccaaaggacacagggaaatgggagctgggagctgggaagggwcggggcatattgagagatcctagagagcccatgctcagatgctttcaggtaaaatcgggccagtgaaagctggggcctggagggaagttactggaggttc

SEQ ID NO: 525327 - DNA, 201 bp, Homo sapiens
tttatgtagataaggtgaaacaaacctgcaagaaattttcaaatccatacagtattgagtattctgaacttgactgtgaggaagggtggacacaactgaartgtggaagaaatgaaagggcgaaggtgtgttttgagaaggctctggaagaaaagcccaacaacccagaattctcctctggactggcaattgcgatgtacc

SEQ ID NO: 525328 - DNA, 201 bp, Homo sapiens
tctcacagattctgtttcagtttcccctcaagagggatcttgatagggttccatcagtttcactttcctttcccctttcataaaagcacagacctaacagyaccctgggtggaaacctcttcagcatttgcttggaatcagtaagctaaaaacaaaatcaaccgggaccccagcttttcagaactgcagggaaacagccat

SEQ ID NO: 525329 - DNA, 201 bp, Homo sapiens
catgaggtaaatagtccctgcttctctgataggaaacagaatttcttatgtacaacttcctgacttatgctatttcagtgtttgcttagagatgaaatatrcatttatctaattcaagcataaatctgccttaccaattcatgcatttttatttctgtagctctttgtgatgtatagagttaggcagccaaaggacacagg

SEQ ID NO: 525330 - DNA, 201 bp, Homo sapiens; identical to SEQ ID NO: 172873

SEQ ID NO: 525331 - DNA, 201 bp, Homo sapiens
cagtgccctccgttaagtcactataacaccacacggtcccttccgttaagtcactatagcaccatccggtgccctccgttaagtcactataacaccacacrgtcccctccgttaagtcactttagcacacacagtgccctccgttaagtcactatagcaccgtacggtgccctccgttaagtcactataacacacacggtg

SEQ ID NO: 525332 - DNA, 201 bp, Homo sapiens
gtgccctccgttaagtcactataacacacacggtgccctccgttaagtcactatagcaccacacagtgccctccgttaagtcactatagcaccatacggtsccctccgttaagttactataacacacacggtgccctccgttaagtcactataacacacacagtgccctctgttaagtcactgtagcaccgcgcaatgcac

SEQ ID NO: 525333 - DNA, 201 bp, Homo sapiens
gctttcttcaaacagcagcccgccctctggtgccaggcgcgattccactggcaagtatgccgtgggtgccatggcgcctcttcgagggtttgggccgcgcrgtgcgaggcccgcgcacgttgagctggtttgcggaggcaccgggtgttgtgtggggccaacagcagcacgtgtgctttggccacggcagggggaagtgca

SEQ ID NO: 525334 - DNA, 201 bp, Homo sapiens
cgtgtcacaggctgtcagggtcctcgaccgtgcccccccgcggggctcattccttctgtagctgtgagcagttaacctgaggtcacgcacaaagctagtcrgacccctcaggacaggccgctggcattgttggcaggaagttgcttgtcatttgtagacatggggttcagtgtcagtattttcaagaccgcgacttgttga

SEQ ID NO: 525335 - DNA, 201 bp, Homo sapiens
ccctcaggacaggccgctggcattgttggcaggaagttgcttgtcatttgtagacatggggttcagtgtcagtattttcaagaccgcgacttgttgagttytggcttctcaggagggcgcctcccttttgtgtgggtcctgcagttcacaccaggccacggcctcgcacagacgcaccacactggccgcagccctggtctg

SEQ ID NO: 525336 - DNA, 201 bp, Homo sapiens
agtaacttggggccttgccttgtgctggggccatgcctggacgttctctgcaacagcgaatgcagttgcggtcggggtccaggcacctcccctgctcaagkctctgtcagctgggcttcgggggcggggagaacttgcttcctggagagacgaacacctgaagacgcgtctccctgacccctgacctggagcaccgggcta

SEQ ID NO: 525337 - DNA, 201 bp, Homo sapiens
gcccacccagaggctgcttctccagccccaggggttgccagcaggggtgccccagtggagaagggcagagggccagcatgtgacctgtggggtagccaccrgagggtgggaagaggcggtcagctacacagttcccctcatagcccctctggtcccagagcagcggctgctgcggtgagcgtgcagagagccgagtactga

SEQ ID NO: 525338 - DNA, 201 bp, Homo sapiens
gcagagggccagcatgtgacctgtggggtagccaccggagggtgggaagaggcggtcagctacacagttcccctcatagcccctctggtcccagagcagcrgctgctgcggtgagcgtgcagagagccgagtactgatgtgtgcgtcggctcagttcagttcacttcctcccggcataaggtagaaaaagccagcagggcc

SEQ ID NO: 525339 - DNA, 201 bp, Homo sapiens
cccatttgtcaggatagaaggagcctgcgacctggcaaggcagcaccaggcgatcccggctgtggtccgtggtagttaaggtggggctcctgccgccttcygcactggctttgggaagtcactggctttttccacgtggagcttctgcccggcatgggcttcccacctggaaggcgtcccctttgctctggaggtccctgc

SEQ ID NO: 525340 - DNA, 201 bp, Homo sapiens
cccagtgtcaaaccagggggtaagtcaaggtatccggctcaggccgccgggcagctgagggggcccagtgggggtctcgtctgtggcccagagacgtggcrgaagaaggcagtacatctcccttcttagagagagagtggaagcttctgagtgtggcttgggtcgttctgaaccatggtgacgtttccaccctgccactgc

SEQ ID NO: 525341 - DNA, 201 bp, Homo sapiens
tcttcactcaggcctggcatctggcactctccacaggtgaagcagcgggagaatggcgtggcgctgaggtgcttccccggggtcgtgcgctccctggacgygctgggctgggaggaacggcagctggcgctggtgaaaggcctcctggcggggaatgtcttcgactggggggccaaagccgtgtctgcgtaggtgtctgcg

SEQ ID NO: 525342 - DNA, 201 bp, Homo sapiens
ttgacgagctcctgcacctggcctcgaggggccagcacagcaatgtggacatgctggtgcgggacgtctacggcggcgcccaccagactctcgggctgagygggaacctcatcgccagcagcttcgggaagtcggccaccgccgaccaaggtgctcaccccggcctctgccgccagagagcaggatggtggggacacttgg

SEQ ID NO: 525343 - DNA, 201 bp, Homo sapiens
acctttgatcacaggcggcatcctggaagccacagggcttctcgagagcatcagagagactttggcctgtggggaaacggactttggtggcctctgacttytggctacttttggggctggggctgcattttctgcctggagcctctcaagagtagccagcggcaccgtttgcctctccagggtaggggagctgctcaggcc

SEQ ID NO: 525344 - DNA, 201 bp, Homo sapiens
cgcagcctgctggacaccagggagcactgtctgaacgagttcaacttcccggatccctactccaaagtaagtgcagtgtgccctggccttccgctcgctcytgtccccgtcccgctggcaccgcgtgtcctgtctctgtcccgctggctcggggcatcctgtcctgtctgaggccatgcaggtttggtagcggccccaact

SEQ ID NO: 525345 - DNA, 201 bp, Homo sapiens
tgcagaagtttgacgagctcctgcacctggcctcgaggggccagcacagcaatgtggacatgctggtgcgggacgtctacggcggcgcccaccagactctygggctgagcgggaacctcatcgccagcagcttcgggaagtcggccaccgccgaccaaggtgctcaccccggcctctgccgccagagagcaggatggtggg

SEQ ID NO: 525346 - DNA, 201 bp, Homo sapiens
aggagtcccagccctgcccaggacccggagtgagctctgagtgcccagagcccctcgtccccggcacaggatgggggctcgagtctgaggacgtgggtctyggcctcgggtttcctggggggtgagggaccaaggtcactcctgctcctgcctcccagggcaactgggaggggcgaatggcaaagggaagcctcgggtgac

SEQ ID NO: 525347 - DNA, 201 bp, Homo sapiens
tgaggtgtgactgaggtgcgggaggcattgtgggaccctgactctgggggtggggtgagactcagccccagcaagctcccggcgaggccaccttgggactyctgcgtcccaccttctccaaggctgggctggtcccgtggagcaaatgccaggccctgggccacgctgcccctcaggagctcagctcggggccagggagcc

SEQ ID NO: 525348 - DNA, 201 bp, Homo sapiens
tgcccctctgggacacaggcccctcccgcagcctgtcaggagcattggaggagggtcctgacccatgggattggccttgtggctgggggctccccacaccrcctgcatgggtgccaagcacagggaccatactgcggctgccagtcaccgagaggcttccctggccccgtggctccgagtccaccttgagaaacagcctgt

SEQ ID NO: 525349 - DNA, 201 bp, Homo sapiens
acctctgtcccaaccccagtacatcctgtttgggcatgtatttaacacaaagaacccagggcctgaaactggatttctgtgacctgagagtttgtttatastgacttttgatgagtctcttaaaatagatcttcatcctcttgcatcatctgtcgttttagaaaacgatttatttactgaggtgagtcggcggcatggtgc

SEQ ID NO: 525350 - DNA, 201 bp, Homo sapiens
aaagaagctgcttccagtctctgggcctccccaggcggccgcaccacctctcgtggtccctgctttttttcatgtggggctggagggaaatgcctgggttytcagccctccctgggtcccactcgtgtctcgagacatagatgagaacgccgcctccaaccatggctgcccctctgggacacaggcccctcccgcagcctg

SEQ ID NO: 525351 - DNA, 201 bp, Homo sapiens
tggtatttatttcccctcttcaaagtttctccctgcgtctgggtcctgtgtctctggttcttaagaggacctgttgactgatactgagagaccttttgttkgttactcctgaccgagctgctgggaggccacgctcagggtggggtgtcttcaacccaggaaccctcaaagccaaagtgcttgtcaacagtgttgtttaaa

SEQ ID NO: 525352 - DNA, 201 bp, Homo sapiens
gccatcgacataggtagccgcaggccgggcgccgggcgcgggctgcgggggcgggcggggcgccggcggtgggccggcgagcgggggcggcgggaaggacsaagggcgggggcgcgggcctcgcgcacagcctcacgggccttgtagtccgcgggcccgcgcacagcctcacgggccttgtagtccgcagggtcgctgatg

SEQ ID NO: 525353 - DNA, 201 bp, Homo sapiens
gggaggggcaccagctgggcagagtgggccatggggattgtcactgaactgggagctcctgggggcactgaccaccttgtatctggcagctctgcgctccrggaagagaggctgctgctggtgcagacgggctccagctccccgtgcctcgacctcaggtaaccccgcaccctgcacctgttctctccctcctgggctctg

SEQ ID NO: 525354 - DNA, 201 bp, Homo sapiens
ggtcagtgaggacgtggcgtctgcgaggcacgttgcttctaagggcagctgatagttctgctagctagcacattccttcaaaaagcaatttaggagacgtytctgctcttttgaggtgtgactgaggtgcgggaggcattgtgggaccctgactctgggggtggggtgagactcagccccagcaagctcccggcgaggcca

SEQ ID NO: 525355 - DNA, 201 bp, Homo sapiens
cgctgggctgggaggaacggcagctggcgctggtgaaaggcctcctggcggggaatgtcttcgactggggggccaaagccgtgtctgcgtaggtgtctgcrggctcggagcaggctctgcagcctgtgggtgcctgtcctgccccaggcttgcgggcaaggaggtggagcgggtcccttgggggtcacgtggcgcttggtg

SEQ ID NO: 525356 - DNA, 201 bp, Homo sapiens
atgggggctcgagtctgaggacgtgggtcttggcctcgggtttcctggggggtgagggaccaaggtcactcctgctcctgcctcccagggcaactgggagrggcgaatggcaaagggaagcctcgggtgaccgtgaactgtcaccgtcagcctttcctgttccagtagaaactgccctgaccacagcccaggcagccccca

SEQ ID NO: 525357 - DNA, 201 bp, Homo sapiens
ccgtgtcctccactcttgtcctgcccttcacccactgctcagtcacatgggggctgaagttgtcctgggcctcgtcctcagagccccgtgcagctgtgcgstggccactgtcccggaccgataggcttgtgcctggtggggtcccagttgggcctgagtcttcgatcctgaggggcgtggtatggaacaggctgcgcctgg

SEQ ID NO: 525358 - DNA, 201 bp, Homo sapiens
cctggagaaaccccccttgaatagccgctgcggcttcacatacctctccctcttagcactcatctcggtcgtaggctgagtctgcttgtgtgtgaatcccrcaagagcagcggtgtgtcttgtagccccagcccccgaaaaggatgcccaacctgtctttgccgcccagtaaatactgggatgaatgggcctgccgctgac

SEQ ID NO: 525359 - DNA, 201 bp, Homo sapiens
gccctggcggcacagcccccttggaccccgcctcaagcagcgtttgcactgccgggctcctgaggacgtccgtggcacagccgaggatggcagacgggcgrgtgttcggcctgccctgctcagcgccctctgccgtgtctgtccccagcgcctatgggaccctgaccgtgcgcagcctgctggacaccagggagcactgtc

SEQ ID NO: 525360 - DNA, 201 bp, Homo sapiens
ctgcctgggagtgatttggggtcttcacgttgagcagctgcccctgtcccacctgggagggatttgggatctttacattgagcagctgcctctgtcccgcytgggagggatttggggtcttcacattgagcactgtggctgaaggtttttgttctgttgtcttaattttcttttctcctcctccatgcagtgtccttgaat

SEQ ID NO: 525361 - DNA, 201 bp, Homo sapiens
ctgaagtgagtggggatctcaagggcgagaaaggaacatgtgtctgcccccgagtccctgggtgtcccagagccgcgtccctggcgctcgtgtgtcagatygcgcatggggcatggctgccccttcggaccaggcaggcttgcatggttgcacctgtctgtggcccagactctttaaggggttggcgcttccttttcagag

SEQ ID NO: 525362 - DNA, 201 bp, Homo sapiens
gcgtggtatggaacaggctgcgcctggcaggtgtccagggtgggctgaggccacgtcttcactcaggcctggcatctggcactctccacaggtgaagcagygggagaatggcgtggcgctgaggtgcttccccggggtcgtgcgctccctggacgcgctgggctgggaggaacggcagctggcgctggtgaaaggcctcct

SEQ ID NO: 525363 - DNA, 201 bp, Homo sapiens
ttcccagccttctgagaccttgaggcccggtagagcgtgtgctctgcaaggttctgctgcccttacactgggggattctgttactggaagcaagtcgggaytaaatgtttctgaaatgcaattgcagttgacctgcataagtcacttggggaatggccaggagaacagggctcaccgtggatgttctgtgtggccccgaga

SEQ ID NO: 525364 - DNA, 201 bp, Homo sapiens
taattttcgcagataacagtggaatagacatcattttgggagtcttcccctttgtcagggagctactccttagagggacagaggtgagtgttgaggtggtgggtggggcccttcccctgggcttctctgctctcggtggggttggcgccgctgtgggcctctggcggtggtcggggctcctccggacgcagcaggtaggtg

SEQ ID NO: 525365 - DNA, 201 bp, Homo sapiens
caccgatgacgctctggcccgaaaatactggctcacctgctttgaggaggccctggacggggtgagggctccgggtgccgtctagacgattccaaggccgyagccgggttaaccttccaaggctccgggggcaaagccaaggtggcgaagggggacaggccagtgttgtccagaaaccccttgatctgcgtctgagtgagg

SEQ ID NO: 525366 - DNA, 201 bp, Homo sapiens
ttttaacaatttagttaataagcgattttataccctttcctcctccactctcctgcttttgaatcaagggcaaggttaacacaagtgacctggcttcttgytttccagatcctaaccagtacagctggggagagaactatgcaggcagctccgggctgatgagtgcatcacccgagctcggcccggcgcagcgggcgcgga

SEQ ID NO: 525367 - DNA, 201 bp, Homo sapiens
tcgtgtgtcagattgcgcatggggcatggctgccccttcggaccaggcaggcttgcatggttgcacctgtctgtggcccagactctttaaggggttggcgyttccttttcagagtcgacaaggaggacgtgatgacgtgcctgattaaggggtgcaacttcgtgctcaagaacatcccccatgaggccttcgtgtaccaga

SEQ ID NO: 525368 - DNA, 201 bp, Homo sapiens
agggtgtgaaccccagtttggatgtgttcctgacagacacaggctgcctgcctgcaggagccaagggcctcccagcttctgtgagggtgggcgattgtggytggggactgctttcccctcatggggaggggctggaaccctggaccaccctggctccctcctaggaggctggacagtgaccagaggcctcctatcccggca

SEQ ID NO: 525369 - DNA, 201 bp, Homo sapiens
gggacgtctacggcggcgcccaccagactctcgggctgagcgggaacctcatcgccagcagcttcgggaagtcggccaccgccgaccaaggtgctcacccyggcctctgccgccagagagcaggatggtggggacacttggggtctcacggacaggagcttcccccaccattgctttcccacaactgctccctggagagtc

SEQ ID NO: 525370 - DNA, 201 bp, Homo sapiens
cccagggaggcctggagggtgggggccaagaagcccagcacccctcccttctgactgattctgggcagcctacattttgtggcaccgtggccacctgagtytgagtacatcaccagtgatgagcattctagagagctccaggcaggcctgctgatctgcgctggggtcagggtgcccctgcccccgcagaggcacgcccac

SEQ ID NO: 525371 - DNA, 201 bp, Homo sapiens
caaggagggcgtgaaaatgacaaggaatccatccctagagttcacaggagatctagggcagagtttccaagctgcagctgctctggccctgtgtgagctgytgctctgaggaagccccaggctgaggcagctaccaggcggaggctgggtttggaggcctccacatcagggaattgagcggtaggggtttcagccttcacg

SEQ ID NO: 525372 - DNA, 201 bp, Homo sapiens
gcgctgtttctgaggcacgaaggctacctgggagccatcggagcgttcctgaaaggagctgagcaggacagtgagtcgcggtgctggcgcccctgagcagygtggggcctcagctgtggcctgggcctgtgctccaggccagggcggcccagggtggaggtggggtggggagcgtgagtcctcagaaagtgacagcagcag

SEQ ID NO: 525373 - DNA, 201 bp, Homo sapiens
gtaggtgtctgcgggctcggagcaggctctgcagcctgtgggtgcctgtcctgccccaggcttgcgggcaaggaggtggagcgggtcccttgggggtcacrtggcgcttggtggcttggtggctcagggctttggggcccagggagtgcacatggcagcagcgccaggggctgggcagggcgcagcgcccttgtctgtccc

SEQ ID NO: 525374 - DNA, 201 bp, Homo sapiens
gcccggccagcactgggggcaggggaggggataaggaggcttaaagccacaggctaggggatcagattgagcctgtgacgcgtccaccagactgtacgccrgccgtcggggagcctgccctcaccaccaggcaggaggtgccctgggatggctgttgtggggcctggacacggtgggttttgctacatgaacagcattggc

SEQ ID NO: 525375 - DNA, 201 bp, Homo sapiens
atacctacatcgaagcctgcctggacttcatcaaagaccatctcgtcaacacagagaccaaggtcatccaggcgaccgggggcggggcctacaagttcaargacctcatcgaagagaagctgcggctgaagtgagtggggatctcaagggcgagaaaggaacatgtgtctgcccccgagtccctgggtgtcccagagccgc

SEQ ID NO: 525376 - DNA, 201 bp, Homo sapiens
aatgcctgggttctcagccctccctgggtcccactcgtgtctcgagacatagatgagaacgccgcctccaaccatggctgcccctctgggacacaggcccytcccgcagcctgtcaggagcattggaggagggtcctgacccatgggattggccttgtggctgggggctccccacaccgcctgcatgggtgccaagcacag

SEQ ID NO: 525377 - DNA, 201 bp, Homo sapiens
ctagacgattccaaggccgcagccgggttaaccttccaaggctccgggggcaaagccaaggtggcgaagggggacaggccagtgttgtccagaaacccctygatctgcgtctgagtgagggggcgattttggtttctcaggcaaaaataccgctcctggccacctggtgggtcagtgaggacgtggcgtctgcgaggcacg

SEQ ID NO: 525378 - DNA, 201 bp, Homo sapiens
gtgacctgtggggtagccaccggagggtgggaagaggcggtcagctacacagttcccctcatagcccctctggtcccagagcagcggctgctgcggtgagygtgcagagagccgagtactgatgtgtgcgtcggctcagttcagttcacttcctcccggcataaggtagaaaaagccagcagggcccgtgagcgcgcctgt

SEQ ID NO: 525379 - DNA, 201 bp, Homo sapiens
accgatgacgctctggcccgaaaatactggctcacctgctttgaggaggccctggacggggtgagggctccgggtgccgtctagacgattccaaggccgcrgccgggttaaccttccaaggctccgggggcaaagccaaggtggcgaagggggacaggccagtgttgtccagaaaccccttgatctgcgtctgagtgaggg

SEQ ID NO: 525380 - DNA, 201 bp, Homo sapiens
tactgcagcttcgatctgattttaggtttctgcgggctgtggggagggttcctcagaggcaggtgagacaggaaggggccacggggcggtggtgtctgctkggctgtcctgccctccattggtgcccaaagaggaaacacaggaccagagagaatggcagaggggatggggcctgtgggacagggagaactagaaggccat

SEQ ID NO: 525381 - DNA, 201 bp, Homo sapiens
agtgttggcgggcagtgctgggggggccttgatggggaggggcaccagctgggcagagtgggccatggggattgtcactgaactgggagctcctgggggcrctgaccaccttgtatctggcagctctgcgctccaggaagagaggctgctgctggtgcagacgggctccagctccccgtgcctcgacctcaggtaaccccg

SEQ ID NO: 525382 - DNA, 201 bp, Homo sapiens
cctctttttgtcaggccctgtaagaaatgcactgtgttaagtcactatagcaccatccagtgccctccgttaagtcactataacaccacacggtcccctcygttaagtcactatagcaccatacggtgccctctgttaagtcactatagcacacacagtgctctccgttaagtcactatagcaccacacggtcccctccgt

SEQ ID NO: 525383 - DNA, 201 bp, Homo sapiens
ctttggaggcttctttatccggggccaccccgtgaccatgcgcaccatcacctatagcatcaacttcttctccaaggtaacggatgcgccgccctccccarcctctaacgcagaccccccaggatcttcccaatcagtcatgctggttagacaccgcagcacccccagggaggcctggagggtgggggccaagaagcccag

SEQ ID NO: 525384 - DNA, 201 bp, Homo sapiens
catttttcttatgttggttttatgctaaacatactctacattattgtagtagtatgtcatgttaattcacagtaacataataagctcttgttttatattastacattattatttaatgtaagtgccttcaagcttggtgtcattcaattcatgagtaagtcatgaatagaagttgcctggagtccagctcctaatatggaa

SEQ ID NO: 525385 - DNA, 201 bp, Homo sapiens
cagagaatatatttatctatacaaaattaatgtgaaatttaattagaagtaactgagtccttttctgttttaaatgctagcatatataaatagatctttgkattctattcttcctatgtttatatacaagggaccaaataaaagattcaggaaggagctttatcatattgaccttttattgctggctgatttaagccatca

SEQ ID NO: 525386 - DNA, 201 bp, Homo sapiens
tggggactatttggatgggggcccacgcaggtggaggaggaataacagaatgacaggtgtacttcaatgtgcgtaggctgcttataaattatgtttgtaartcaggcactgaacagaactgcgcttgaatagaaaagtatagaatatctccttgtccctttttaagaaaacaagtgagtgaatccacatatgggaggggga

SEQ ID NO: 525387 - DNA, 201 bp, Homo sapiens
ctaatacctccctaaacctctgggggcagaggttggaatgcctttgtaaaagtgattggctattaacccaaataaatttctactcagtagaatttcaactraagtggtaaagaagaaaaatggaacatacttctttgaggagaggagcataagaggtggggaaggaatagaggtagagccatgtaagcctgctaaccttga

SEQ ID NO: 525388 - DNA, 201 bp, Homo sapiens
tgcaaaaacgaggtgtttggtagatagaacttacctttgaaatatgcagtcttccaaatcttacttaacaggtcactgctattcaatatatgccaatgaaratgttatctcacctttttcatgggtgcaaggccagcccaaagcattttaaagagccaagttcatcccccaaattactacactcttcttccacaccttatt

SEQ ID NO: 525389 - DNA, 201 bp, Homo sapiens
aaaaaaaggtggtgctaccccaggtgtctgatctcagccttttcttcccccttgcccatcaaccaccctctccttacttctagaagtatcattctaaaagrttttaacaacagtgagataagatttaatgtggggcacgggggcagtgaggcacagcatattatcctggtgtagaggagctgaacacttgaatgaattttc

SEQ ID NO: 525390 - DNA, 201 bp, Homo sapiens
agtttgaggaggattggcattagttctttaaatgtttggtaggagtcagcagtgaagccattgggtcccaggcttttctttgctgggagactttttatgayggctttgatctcattacttcatattggtctgttcaggttttggatctctttatggttcaatcttggtaggttgtatgtgtctgggaatttatttattcta

SEQ ID NO: 525391 - DNA, 201 bp, Homo sapiens
acaggcaggcaccaccaggctcggctaattttttttttttttttttttttttgtatttttagtagagacagggtttctccatgttggtcaggctagtatcraattcccaacctcaggtcatccgcctgtctcggcctcccaaagtgctgggattacaaaatgtgtagttgaatttggtttggtagtattttgttgagaatt

SEQ ID NO: 525392 - DNA, 201 bp, Homo sapiens
tccaaggtactaccttctctgctacaagtcgagcgaggagccccgcatgagccctgacacctgtgccaccattttggaaaaagctggtctcgataactggrctcttggaaaaacaaaagtaatgttttcatgtaattttcaggaaaataaataattatgctgggttcactgagaattgtaacattttacaatgtttgaaag

SEQ ID NO: 525393 - DNA, 201 bp, Homo sapiens
ttggggaaccaccaagctacagagatgttggcactttatgcaatactaaccagcccttttttccattccaaggtactaccttctctgctacaagtcgagcraggagccccgcatgagccctgacacctgtgccaccattttggaaaaagctggtctcgataactgggctcttggaaaaacaaaagtaatgttttcatgtaa

SEQ ID NO: 525394 - DNA, 201 bp, Homo sapiens
caacaagaacgaaactctgtctcaaaaaaaaaaaaaaaaaaaccctcaaggtgactctgatgcatgacatggcttgaggactgatgccctaaatcgtaatrtaatggtggaaattaatgatcttgagttttactttaccatgtataattctattccaaatctgcatatattagctatgtaaaattttctttgttcactgca

SEQ ID NO: 525395 - DNA, 201 bp, Homo sapiens
aacaagaacgaaactctgtctcaaaaaaaaaaaaaaaaaaaccctcaaggtgactctgatgcatgacatggcttgaggactgatgccctaaatcgtaatgwaatggtggaaattaatgatcttgagttttactttaccatgtataattctattccaaatctgcatatattagctatgtaaaattttctttgttcactgcac

SEQ ID NO: 525396 - DNA, 201 bp, Homo sapiens
atgttgctgttaaaaaataattgactggttttagtatcttctatcagatgtgttgacctagtggcttaatataacctctccttaccagatttgtgaccctytcgggagtggaagagccaggagagacctaaaaaaaaaaggtggtgctaccccaggtgtctgatctcagccttttcttcccccttgcccatcaaccaccct

SEQ ID NO: 525397 - DNA, 201 bp, Homo sapiens
caagaacgaaactctgtctcaaaaaaaaaaaaaaaaaaaccctcaaggtgactctgatgcatgacatggcttgaggactgatgccctaaatcgtaatgtawtggtggaaattaatgatcttgagttttactttaccatgtataattctattccaaatctgcatatattagctatgtaaaattttctttgttcactgcacat

SEQ ID NO: 525398 - DNA, 201 bp, Homo sapiens
ataaagaaaagaagtgtaattgactcacagctccacatggctgggaaggcctcaaaaaaacttacaatcgtgggcagaaggtgaagggcaagcaagcacarcaaagcaggagagagagaaagaggcagcaaagggggaaatgccactgttaaaccatcaggtctcatgagaactcagtcattatcacaagaacagtgaggg

SEQ ID NO: 525399 - DNA, 201 bp, Homo sapiens
aagaaaagatgttgtggtatgttaaatggtcttctataactcatatatatgatgtagattattctgtggttgaaaaatattaaaaaatgtgtcttctcaasgtaaagaaacttattaccactttgcttaatattgcttttctattgcctaagaaaaatttatataattgtaggtagctcctgtattctttgggaatgaaaa

SEQ ID NO: 525400 - DNA, 201 bp, Homo sapiens
tttcaaaccctatatatactattttttcctaaacatccctatgataaagtttaaattataaattaggcacaataagagattaacaataactaaaaataaartataacactatactgtaataaaggttatatgaatatggtctctttctctctctctctttttctctctctctctctctctctcagaataccttagtttcac

SEQ ID NO: 525401 - DNA, 201 bp, Homo sapiens
ggtagctgtgtccatccaagatggacaactcaggaagaaacagataaagctggggaatatagcaaggatccctctaggaccaggaaatttggaaaagaaayaataacttaccctttcctgtcttaaatatttccttatgtcagtcttcagtacttcctcttccagaaaagctcccagaataaaaactaaatggctttttaa

SEQ ID NO: 525402 - DNA, 201 bp, Homo sapiens
ctgcagttccgtatcttttaagtggagcctttaggacatttacattcaatgttagtattgagatgtgatatacggttgcattcatcatgctgtttgttgcycgtgtacttttgattttgtttttttgtttctgcttttaatttatatttttgtttcataggtcctgtgtgatttatgctttaaagatgttctgttttgatg

SEQ ID NO: 525403 - DNA, 201 bp, Homo sapiens
aaaagtaaaggaaatgtccctgtcagtgctagaaggaaaggtctcgtaaaggaatatactggtagctgtgtccatccaagatggacaactcaggaagaaamagataaagctggggaatatagcaaggatccctctaggaccaggaaatttggaaaagaaataataacttaccctttcctgtcttaaatatttccttatgtc

SEQ ID NO: 525404 - DNA, 201 bp, Homo sapiens
atagttgattgttgagttcttatccattctgcagttccgtatcttttaagtggagcctttaggacatttacattcaatgttagtattgagatgtgatatayggttgcattcatcatgctgtttgttgctcgtgtacttttgattttgtttttttgtttctgcttttaatttatatttttgtttcataggtcctgtgtgatt

SEQ ID NO: 525405 - DNA, 201 bp, Homo sapiens
tgtgtgtgtgtgcgcacacatcatttgtgcttatattctaagtaagattttattttagaaaattcccatcttatcttggctaaaataaaaagtaaaggaawtgtccctgtcagtgctagaaggaaaggtctcgtaaaggaatatactggtagctgtgtccatccaagatggacaactcaggaagaaacagataaagctggg

SEQ ID NO: 525406 - DNA, 201 bp, Homo sapiens
accatgtataattctattccaaatctgcatatattagctatgtaaaattttctttgttcactgcacattgtcctttttatggtaaataattttcgcagtaytttttgaggatctcatacatgcttgatatttgagttcagtatttttctacagaaaaatttgaaggtaacctgaaatcacaatacttctggagacccaaaa

SEQ ID NO: 525407 - DNA, 201 bp, Homo sapiens
ctataattgtgttgctgtctatctcatttcttaggtctattagtaattgctttataaatctgggatctccagtgttaggtgcacatatgtttaggattgcratattttcctcttggacaaggccttttaccattatataatgtccctctttgtctcttttaaagtttgttttgtctgatataataatagctacccctgctt

SEQ ID NO: 525408 - DNA, 201 bp, Homo sapiens
taatattttacttgatgctctcaatatgccagtggcaattacctttgatatttatagattgttatattttgcatataatttcatagaaataaaaaggattyagtaactcctttttcttactaattttggtttcttagaccaaacatactggctgtatttgtggtgctgttgcaactagtccacttgtcccagcatctatgg

SEQ ID NO: 525409 - DNA, 201 bp, Homo sapiens
tgtaattaggcaactagtcaaccaccctctgaccaaaacaggtaagacaattttccttacctggaagttttctgaagcccaatcaaatagtttctatctckgcgcttttcactaatttcatccttaatttttcatgtgagtttgttttcggctcactaaatattcatttgttaatatcctctgccccagatcatctgaaga

SEQ ID NO: 525410 - DNA, 201 bp, Homo sapiens
caagccaccacatctacctcctgtatggaatatttaacacttcctacagttctttattttatatatcttgaacatttgcctaaaaaattatttaagctatkattgtcattcctcataaataaagaaaatatctaatccagcatctacttaaataacaaattccaaattaaaacttcctttttttgaaagtcatattattaa

SEQ ID NO: 525411 - DNA, 201 bp, Homo sapiens
gtatttttgagctgctgaagcaacaggtggatagccattatatggaatattttttattctatttcattttattttagagacagggtctcactgttgctcargctggcctcaaaattctgggctcaagtgatcctcctgcatcagcctcctgagtagctgagcttacttgcacaagccaccacatctacctcctgtatggaa

SEQ ID NO: 525412 - DNA, 201 bp, Homo sapiens
ggagacattttaattatcactatgcaataatccttactgggagacgacagaagtggtatttagttgaaagttggtatcactgcagcttaatcactcacagwtgtgtgcactttcacaaacatttgtttcatcatattgcagttagctatttttgagagattaaaaattgcaattaatatattttaagcttgggctgagcat

SEQ ID NO: 525413 - DNA, 201 bp, Homo sapiens
gaaatggcgctactcaagccaaggcatgagtttcatctttttatgctttttttcttttttttttaatatccccaaatgacagcccagttttctcataatcrtagactctgtgaattgcagggttaaaggggtcttggaaagttgtacagcccaagtttatatccagaggttaaatccttctcaaacatgtgcactcagtgg

SEQ ID NO: 525414 - DNA, 201 bp, Homo sapiens
gaatgtgccttacttgtcactgtaactccagtgtctagcagagtaactccagtgtctagcagagtgcctagtacacattaaagatttgataaagttttgcrtgaataaaataatttcatatgtgcctcttctgaatacatagatacaattactacagatgtcagaaattaatgcattctgttaaattaatggaaaactaag

SEQ ID NO: 525415 - DNA, 201 bp, Homo sapiens
cagattcctagaggattttcagtatcatatgtatctaaaacttttttccactatgagcagtaatcaattcttaaatcagaaagcgtttttctccacagacrtgaacgtattcacacgaagaaagggaacttcaaccgacctctaatatccaatctgaaggatgtagatgatttagcaaccctagaaattttggatgaggta

SEQ ID NO: 525416 - DNA, 201 bp, Homo sapiens
aagatggaatccttgattacaactggcagaacctaggattgcattagtctatctggctctgcctctcattttacactgactgaccaatatacagaatccarcattgattcttatttttctaggaatccacccccaaaactaaggcagcctgagctatggtcagcagaattcaatgacttcataagcaagtgagtaaaaaca

SEQ ID NO: 525417 - DNA, 201 bp, Homo sapiens
tatcacggccattgagctgggtgatggagatcctccactagctgaccttcatcccatgagagcactcttcaaaataccaaggtcagatgactaacattggrtccagtatctgcagcccgatttacttcctccagccaccaagtgttcatcatgctcttcatggagacgttcagatatattccaacaagttgggagcagaag

SEQ ID NO: 525418 - DNA, 201 bp, Homo sapiens
cttttgatggtgtggttttctactaggtgattgcatgtgaacagcaattggataccacttatgacgccagatgtgacacttggtccctgggtatcacggcyattgagctgggtgatggagatcctccactagctgaccttcatcccatgagagcactcttcaaaataccaaggtcagatgactaacattgggtccagtatc

SEQ ID NO: 525419 - DNA, 201 bp, Homo sapiens
gtatttctataagtactgggaatacaaagaaaaataagataagtcatctaccttcagaaactttatcctgagtcatgaagacaaggggtgtttaataatgyttaatgatgaagggtcagagacaacagggacagataaaggacctttggatttgttggtgaaatgcacccttcaccttctatttgacattaattttaatgt

SEQ ID NO: 525420 - DNA, 201 bp, Homo sapiens
tttgagaaacaggtatcatatccaaaaagtgactaaattggaattttcatcttagcatgcattagtatatatatttttttctgaataaggaagctgctgtrgggagaaatattctaaaactcatctcttcaaattttagtaaaatggatgtaaaataaaacatgaatattttattaggaattatccaaaatactttctcat

SEQ ID NO: 525421 - DNA, 201 bp, Homo sapiens
ccttgcagcagctctgggctgtggacctgttgctcttctctccctctggcttcgcagacggcctctcaggctctgtgttcctcatccctgctaggcagctrcgtagcacacttagtctgtttctctttcattggtgaagtttggtcgacacccttaatgtgatgtggggatttgtggtacttattttgatgatttaatgat

SEQ ID NO: 525422 - DNA, 201 bp, Homo sapiens
aagaacgaaactctgtctcaaaaaaaaaaaaaaaaaaaccctcaaggtgactctgatgcatgacatggcttgaggactgatgccctaaatcgtaatgtaayggtggaaattaatgatcttgagttttactttaccatgtataattctattccaaatctgcatatattagctatgtaaaattttctttgttcactgcacatt

SEQ ID NO: 525423 - DNA, 201 bp, Homo sapiens
ttattctaattatctcagaagtatttcaaacatttttgtgaaggtagagatccaagctattaaattctagtctcagcctactttcccctcacccttctttrttccacgtagtcagatcattagagaaataaatgccctctttttagcagaaggtcaggacttctgtcctgcctgatgaacacctttttattttttttacac

SEQ ID NO: 525424 - DNA, 201 bp, Homo sapiens
cttggaactccttattctaattatctcagaagtatttcaaacatttttgtgaaggtagagatccaagctattaaattctagtctcagcctactttcccctyacccttctttgttccacgtagtcagatcattagagaaataaatgccctctttttagcagaaggtcaggacttctgtcctgcctgatgaacacctttttat

SEQ ID NO: 525425 - DNA, 201 bp, Homo sapiens
gttggaaaaatcaggtcatatgttaagtgcttacagagaaacaaagaccgtgtcattttgtataaagaaagatgagtaatgatttatctgtcttggaattrggaaaagatggaatccttgattacaactggcagaacctaggattgcattagtctatctggctctgcctctcattttacactgactgaccaatatacagaa

SEQ ID NO: 525426 - DNA, 201 bp, Homo sapiens
taaactgaaaggaattaataaaattgttaaagttgtattcacagctttatcgctaatagtatttttcagttccttgacactttgtaacatgtttcctgccrtgtgtccagtaacaacagaacaacaactcataagggcattctactgtgcgactccctggcacaccttcctccatattccaaacaggccacttctgtgttc

SEQ ID NO: 525427 - DNA, 201 bp, Homo sapiens
cccttgtttcacacagcttatctttcgggggtattgaattctgcttggaactccttattctaattatctcagaagtatttcaaacatttttgtgaaggtasagatccaagctattaaattctagtctcagcctactttcccctcacccttctttgttccacgtagtcagatcattagagaaataaatgccctctttttagc

SEQ ID NO: 525428 - DNA, 201 bp, Homo sapiens
aatatatttgttcagcttaaactgaaaggaattaataaaattgttaaagttgtattcacagctttatcgctaatagtatttttcagttccttgacactttstaacatgtttcctgccgtgtgtccagtaacaacagaacaacaactcataagggcattctactgtgcgactccctggcacaccttcctccatattccaaac

SEQ ID NO: 525429 - DNA, 201 bp, Homo sapiens
gatgttcctttgtattcaacgaatgtgccaaaaaatatatttgttcagcttaaactgaaaggaattaataaaattgttaaagttgtattcacagctttatygctaatagtatttttcagttccttgacactttgtaacatgtttcctgccgtgtgtccagtaacaacagaacaacaactcataagggcattctactgtgcg

SEQ ID NO: 525430 - DNA, 201 bp, Homo sapiens
tcagatgactaacattgggtccagtatctgcagcccgatttacttcctccagccaccaagtgttcatcatgctcttcatggagacgttcagatatattccmacaagttgggagcagaagatcctggaatattattctgcttcttctgagacattgtatttgttcagtagttgcatttccctggtctaagtaaaagagcttt

SEQ ID NO: 525431 - DNA, 201 bp, Homo sapiens
ttattctatttatttatttatttatttatttatttatttattttttcctgagacggagtctcgctctgtcccccaggctggagtgcagtggcgcaatctcrgctcactgcaagctccgcttcctgggttcacgccattctcctgcctcagcctcccgagtagctgggactacaggcgcctgccaacacgcctggctaattt

SEQ ID NO: 525432 - DNA, 201 bp, Homo sapiens
tatggcaggttcctgtgttgagtcactctgcctgggggctatgctcagctttaataaattctttacatcattacctttgggaggttgcagataaactgctmaaatagttgagggaaaaagttttcaagagtcatcttctccccccatcactattaatgattttaatcttttaaattatgtttatcacttatgaaggaccct

SEQ ID NO: 525433 - DNA, 201 bp, Homo sapiens
attttattacatgcttgttaaagtcacaaatttcaccttttgatggtgtggttttctactaggtgattgcatgtgaacagcaattggataccacttatgaygccagatgtgacacttggtccctgggtatcacggccattgagctgggtgatggagatcctccactagctgaccttcatcccatgagagcactcttcaaaa

SEQ ID NO: 525434 - DNA, 201 bp, Homo sapiens
tgccttcgtctttacttatagctatcaaacttcaccagtttaaatacttaatgctttgttctaagtattttattacatgcttgttaaagtcacaaatttcrccttttgatggtgtggttttctactaggtgattgcatgtgaacagcaattggataccacttatgacgccagatgtgacacttggtccctgggtatcacgg

SEQ ID NO: 525435 - DNA, 201 bp, Homo sapiens
ctgccttcgtctttacttatagctatcaaacttcaccagtttaaatacttaatgctttgttctaagtattttattacatgcttgttaaagtcacaaatttyaccttttgatggtgtggttttctactaggtgattgcatgtgaacagcaattggataccacttatgacgccagatgtgacacttggtccctgggtatcacg

SEQ ID NO: 525436 - DNA, 201 bp, Homo sapiens
ggaaagtctttatttctccttcatgtttaaagggtatttttgccagatatactattctagggtaaaatattttctccatcagcactttacatatgtcatgycactctctactggcctgtaaggtttccactaaaaattcagttgccaaatgtattggagctcccttttatgtaatttacttcttttgtctcactactttta

SEQ ID NO: 525437 - DNA, 201 bp, Homo sapiens
atgctgtatatgtaccacattttcttaatccagtctatcattggtggacatttgggttggttccaagtctttgctattgtgaatagtgccacaataaacayatgtgtgcatgtgtcttttttgcatgtgtgcatgcaaacatatgtgtgcatgtgcatgtgtgataatcctttgggtatatacccagttaatggaatggct

SEQ ID NO: 525438 - DNA, 201 bp, Homo sapiens
acgactgctatctaaaatgagctaggaagtctcctgcggaggggtaaataattaatgagtaactccagggtccagtggagggaaaattctaatctttcatktgtgagttctgtgaccagaaatctgcaacactggagctgaagagaagtcaatggctggctggatctagtagtcagtgtcctggcaggaaaatgacacagt

SEQ ID NO: 525439 - DNA, 201 bp, Homo sapiens
aattttctcccattctgtaggttgcctattcactctgatggtgtttcttttgctgtgcagaagctctttagtttaattagatcccatttgtcaattttggsttttgttgccattgcttttggtgttttagacatgaagtccttgcccatgcctatgtcctgaatggtattgcctaggttttcttcaagagtttttatgggt

SEQ ID NO: 525440 - DNA, 201 bp, Homo sapiens
cccctctgctcctcagcttagaggagtttttaaaacctgttgagaattatcgcagatacgtttggccattatccagtcgtttcgattgtgcctttcctaartgtccgcggttggcagaacgtgggaggaagaggacccgcctaactcggggtaggtggggacgcgctgctcactgtggtgaggttgacacttgggccctgg

SEQ ID NO: 525441 - DNA, 201 bp, Homo sapiens
ttcagtatgatattggctgtgggtttgtcataaataactcttattattttgagatatgaaccatcaatacctagtttattgagagtttttagcctgaaggrctgttgaattttgttgaaggccttttctgcatctattgagataatcatgtggtttttgtctttagttctgtttatatgctggattacatatattgatttg

SEQ ID NO: 525442 - DNA, 201 bp, Homo sapiens
gattacatatattgatttgcatatgttgaaccagccttgcatcccagggatgaagcccacttgatcatggtggataagctttttgatgtgctgctggattyggtttgccagtattttattgaggatttttgcatcgatgtttatcagggatattgatctaaaattctccttttttgttgtgtctctcccaggctttggtgt

SEQ ID NO: 525443 - DNA, 201 bp, Homo sapiens
tttcttgccttctgctagcttttgaatgtgtttgctcttgcttctctagttcttttaattgtgatgttagggtgtcaattttagatctttcctgctttctkttgtgggcatttagtgctataaatttccctctacacactgctttaagtgtgtcccagagattctggtatgttgtgtcttcattctcattgctttcattta

SEQ ID NO: 525444 - DNA, 201 bp, Homo sapiens
tttgcatattttctaattgggttattgtctttttattattgagttgtagaaattttttataatctaggtatactagccccttatcagatgtctgatttgcaaaaaaaaaaaaaattatagtatttgttatattttccctttcttgatggtgtcctttgaagcacagaagtttttaaattgtatgaagttcagtttatctgt

SEQ ID NO: 525445 - DNA, 201 bp, Homo sapiens
ttgcatattttctaattgggttattgtctttttattattgagttgtagaaattttttataatctaggtatactagccccttatcagatgtctgatttgcaaaaaaaaaaaaaattatagtatttgttatattttccctttcttgatggtgtcctttgaagcacagaagtttttaaattgtatgaagttcagtttatctgtt

SEQ ID NO: 525446 - DNA, 201 bp, Homo sapiens
aatctacatctgctctctttctcctcccctagttaatggatgtatacatagtccaatattccatatttatttacctagtcccagagtcttgtttatagatmcacacacacacacacacacacacacacacccatgcagatgttgacacatgcatatatatggtgagatgatcattgttttattaatatgggattatattac

SEQ ID NO: 525447 - DNA, 201 bp, Homo sapiens
attttcttcgtagcccttgtaattttttttctgaacatatcatgttatttatttgcttattttcctactgtctgcctccccacggcctgaacaccccaagraaaccaggatctttagcctatctgctactgaattacctgtgactagaacagtgcctggcataaaatatgtttttattagatcaatgaatagatatcccac

SEQ ID NO: 525448 - DNA, 201 bp, Homo sapiens
atcccagcactttcagaggccaaggtgggcagatcgcttgagcccaggagttcgagaccagcctgggcaacatggcgagatcctgtctctataaaataccaaaaaaaaaaaaaaaaaattagctgggcatggtggcatgcaactgtacatctacacaggagtcgcaggtgggtggatcacttcagcccaggaggcagaggc

SEQ ID NO: 525449 - DNA, 201 bp, Homo sapiens
ggtggcaggcgcctgtagtcccagctactcgggaggctgaggcaggagaatgtggtgaacctgggaggtggagcttgcagtgagccgagatcgcaccactkcactccagcctgggcaacggagcgagactccgtctcaaaaaaaaaaaaaaagcaaaaaaccccacataatgcttataaaatctcttccaggcaaaacaaa

SEQ ID NO: 525450 - DNA, 201 bp, Homo sapiens
aactgtgagtctgcttgctttctcaatggggaggctcgtagtctggggcaagctctcagccctggttaccagctgcctggaaatagactgggtgctgttgrtggggcacggtgggagtgagactggcctttaggactgcaggctgtgtgggagctgggtgaggcttgtgcatgccagcttacccccactttgctggtgacc

SEQ ID NO: 525451 - DNA, 201 bp, Homo sapiens
tgaaagtctcagcaacagaattgcacaagcagaagaaagaacttcagagcttgaaaacaaggctttttaattaatcaaagacaaagaaaaatgatttttgttttttttttttgagacaaattcccactctgtcacccaggctggagtgcagtggtgcgatctcggctcactgcaagctccgcctcccgggttcatgccatt

SEQ ID NO: 525452 - DNA, 201 bp, Homo sapiens
tcagtcaccacccctacatacaaacactcttcctcaggttactggaatcctacttctacttaaagaccaagattaaatgctaaatctgctaagaactgtayccactgttccaaaatggaattaattttccctccttgctatttccactttatatattactttaattttggcatttgccgtatactttgtgttttttaaaaa

SEQ ID NO: 525453 - DNA, 201 bp, Homo sapiens
ataacctctaagttacagtacattaataaatattcatgataataatcctaagtcatcaaagtaagattaaatgtattcattttttgtgtttgagaaagcaragaaatgtataatacattttaaaagatcaccattcaagctggttaaaatgaaaatgtcttactccttaaattaaaaaagaaaaaaaaactagatttttca

SEQ ID NO: 525454 - DNA, 201 bp, Homo sapiens
taacctcatcaacaaaataataatgttagatggtataatacaatttatgacccctttatgttgacaaaattctatatttttatagtttcagttctcattcmtacagtattttgttattaacaatgacaaaaactatgcttttctctctgctctattgagatgtcaagggttatagcaaattgagttcccagaagttgtctg

SEQ ID NO: 525455 - DNA, 201 bp, Homo sapiens
gtttttatcatgaaaagaggttgaattttgtcagatgctttctctgcatctattgatatgatcatgtcatttttactttttagcctattgatgtgatgaawtatattaatttatttcacccatcagtcaccacccctacatacaaacactcttcctcaggttactggaatcctacttctacttaaagaccaagattaaatg

SEQ ID NO: 525456 - DNA, 201 bp, Homo sapiens
tgtttgacttatgcaataggaaatggggtggctgtacagtcatggaacagtctaggaagcattgttggatgacctaaaatagccatggccctcccaagttkacacataaaattaactatcacagtgtcttaacctcatcaacaaaataataatgttagatggtataatacaatttatgacccctttatgttgacaaaattc

SEQ ID NO: 525457 - DNA, 201 bp, Homo sapiens
tcccttctgtggctcatttactgggagtttttatcatgaaaagaggttgaattttgtcagatgctttctctgcatctattgatatgatcatgtcatttttmctttttagcctattgatgtgatgaaatatattaatttatttcacccatcagtcaccacccctacatacaaacactcttcctcaggttactggaatcctac

SEQ ID NO: 525458 - DNA, 201 bp, Homo sapiens
agagtgagcgggagtggggctagggataaaaaaactacctcttaggtacagcatacgccactagggtaatgggtgcactaaagtctcagaatctaccactrtataattcattcatgtaacaaataaacacatgtacatcaaaagttattgaaataaaaaaataaataaaaactattttaagcgaagagttgtctaaccaat

SEQ ID NO: 525459 - DNA, 201 bp, Homo sapiens
ctcccttctgtggctcatttactgggagtttttatcatgaaaagaggttgaattttgtcagatgctttctctgcatctattgatatgatcatgtcattttyactttttagcctattgatgtgatgaaatatattaatttatttcacccatcagtcaccacccctacatacaaacactcttcctcaggttactggaatccta

SEQ ID NO: 525460 - DNA, 201 bp, Homo sapiens
tagattaggtctctgctgtcagaattaacaatgaacaaataaacatttgcccatttagtcaatatttattgattgcctaccatgtactaggcattgttttsggaattgtggatacagtcataaaataacaaagcccataccctcatgtagcttacattctaatgaaagaataacaggataagtggagaaggctaacttcat

SEQ ID NO: 525461 - DNA, 201 bp, Homo sapiens
taaaataatgtcttttgtaacaacttggatggagctggaggccattatgctaagtgaaatatcacaggagtagagaaccaaaaaccatatattatcacttrtaagtgggagctaagctgtgagtatgtattacatacatgtgtgatgtaatggactttagagactcagaagagagtgagcgggagtggggctagggataaa

SEQ ID NO: 525462 - DNA, 201 bp, Homo sapiens
tcccaccggtatctagcatataactattgccaatagaagtaataagctccagtttaatactgtatattcaaagataatatattttacacagggaatctttygtgaagaaacaagcagaaaatgcaatctctgctaatgaaagattcatttcagctccaaataataaaggaagtgtatctgtagtgaagacttccactttca

SEQ ID NO: 525463 - DNA, 201 bp, Homo sapiens
ttcaaagatgtgggaccaacctaagtgcccatcaactaatgaatgtataaagaaaatgttgcatgtatacaccatggaatactactcagccattaaaaggrataaaataatgtcttttgtaacaacttggatggagctggaggccattatgctaagtgaaatatcacaggagtagagaaccaaaaaccatatattatcact

SEQ ID NO: 525464 - DNA, 201 bp, Homo sapiens
ctttccatttacttagttcttgttttattttatcagagttttgtaattttcttgtatgtattttgttagatttatacttaagtatttcattggggggtgcwaatgtaagtggtattgtgtttttaatttccattttcacttattcatttctggtatataggaaagcagtgacttttttatattaatcttgtgtctgaaaac

SEQ ID NO: 525465 - DNA, 201 bp, Homo sapiens
ttatagcagcactattcacaatttcaaagatgtgggaccaacctaagtgcccatcaactaatgaatgtataaagaaaatgttgcatgtatacaccatggartactactcagccattaaaagggataaaataatgtcttttgtaacaacttggatggagctggaggccattatgctaagtgaaatatcacaggagtagagaa

SEQ ID NO: 525466 - DNA, 201 bp, Homo sapiens
tccttaaagagctattaataaaagtagatctaccatttgatccagcaattccactgctggatatctacccaaaggaaaagaagtcattatatgaaaaagayacttgtacttgtttgtttatagcagcactattcacaatttcaaagatgtgggaccaacctaagtgcccatcaactaatgaatgtataaagaaaatgttgc

SEQ ID NO: 525467 - DNA, 201 bp, Homo sapiens
gaacatagaatatctttccatttacttagttcttgttttattttatcagagttttgtaattttcttgtatgtattttgttagatttatacttaagtatttyattggggggtgcaaatgtaagtggtattgtgtttttaatttccattttcacttattcatttctggtatataggaaagcagtgacttttttatattaatct

SEQ ID NO: 525468 - DNA, 201 bp, Homo sapiens
gaaaatgtaaattagtacaacctttatggaaaatagtatggagactccttaaagagctattaataaaagtagatctaccatttgatccagcaattccactrctggatatctacccaaaggaaaagaagtcattatatgaaaaagacacttgtacttgtttgtttatagcagcactattcacaatttcaaagatgtgggacc

SEQ ID NO: 525469 - DNA, 201 bp, Homo sapiens
ttctctatgatgtgataacttcaggtaaaccaagaggactttacttatatttttaagaatgacttctttgcttctcagtccttctcattgtaaaacaagtrttttggactagaactaaaatatcttagtctgcagctctaaaattttaatctctgaagaactttaagttaatagaaattgtggtgggcaggagagaggaca

SEQ ID NO: 525470 - DNA, 201 bp, Homo sapiens
gcagagcaacctctggagtttttatgttgctatcaagttcactcaaaaacagaagccttaacctcccttgtctgacctcaacacagctgtagaaattttawtaagagctaccaagtgtgcttctctatgatgtgataacttcaggtaaaccaagaggactttacttatatttttaagaatgacttctttgcttctcagtcc

SEQ ID NO: 525471 - DNA, 201 bp, Homo sapiens
tcttggctctgtaattcattgtatgtatgatttgaaacagtttacttaacctctctgcacctctgtttttcatctttaaaatgaaatagcattagtacctrcctatcaattaagacaaggtacctacagtatatagcacaatgaatggcatatattaagaaccccataagtttaagccattagtagtaatagtagtgttaa

SEQ ID NO: 525472 - DNA, 201 bp, Homo sapiens
tattactgattacctctttgcattttggatcaaagacatgaatttcataaggattaagtgttctaagaactattcagaagtgtgtttttatatagtaatayaatttttagcatgtattcatagccatttactcgataatgtgcccgtaagtataatgaatcagaatatgctctttattgtgttttggattttcacgttctt

SEQ ID NO: 525473 - DNA, 201 bp, Homo sapiens
ggcactttccagaaagtatcagctgtggtagtatggggtggaaccggcggtgggtggggccctagaattcccaagattatatgcccttccccccccccccscccccgctaccagggtgggtagggaaggaccgtcaggcgggggcagggccaggtgtgtctgagttcagactctccttgggcgggtcttgctgtggctgct

SEQ ID NO: 525474 - DNA, 201 bp, Homo sapiens
ctttagctgtgcatttgatcccatccctttccatttgggacacgatttctttcctctttttgttccatattttcaaaaatatttttcataggcttcttccyttatattttaaacctcctaaggtattatctgttcccagaacaaaaatactactaccaataataatttgatcttttattctcctcctaagttactgccttc

SEQ ID NO: 525475 - DNA, 201 bp, Homo sapiens
tctttagctgtgcatttgatcccatccctttccatttgggacacgatttctttcctctttttgttccatattttcaaaaatatttttcataggcttcttcycttatattttaaacctcctaaggtattatctgttcccagaacaaaaatactactaccaataataatttgatcttttattctcctcctaagttactgcctt

SEQ ID NO: 525476 - DNA, 201 bp, Homo sapiens
aaaaaagattatagcaattgaaagctctttatatgagtaattaatgcaaaaaagtacatcttgtctcttcctctaggtgtgtctgcacagctcaccagtayccggcaccgtcggaacacatccgtaggaacaccgttttggatggctcctgaggtcagatagagttttgaggcagacaaacgtaatagctgatcctgtttg

SEQ ID NO: 525477 - DNA, 201 bp, Homo sapiens
caggaaaatgtgttcccacagctaatgttctgttcaaggtaagatatgaaggtttttcttttttacttatgggatacactgtttttcccacatttcaagamcttccatttctattgacatgtgtatgttactctaaattatagtaaatacttttaaagaaaaaaaagtatcctgtaagtttaagtgagtagaaaattagat

SEQ ID NO: 525478 - DNA, 201 bp, Homo sapiens
tgaagtaggaggatctcttgagcccaggagtttgaggctgcagtgagccataattgtgctgtagcacaccagcttggatgacagagcgagactttgtctcaaaaaaaaaaaaaaaaaaaaaacttttacatatttacgtattttgaaaaattgctgaatttaggcaacctatgctaagaaaatagtacaaaatataaacac

SEQ ID NO: 525479 - DNA, 201 bp, Homo sapiens
gaaaagctcctagaactggtaaatgagttcagcaaagtttcaggaaacaaaattgatgtacacaaatcagtggctctgctatatgccaacagcagctaagyggagaatcaaatcaagaactcaaactctttcacaacagctgcaaaaataaataaataaactatttaggaatatatccaaccaaggatgtgaaagacctct

SEQ ID NO: 525480 - DNA, 201 bp, Homo sapiens
aagaacccaaaagcaaatgcaacaaaaacaaagataaatagatggaacttaattaaactaaaaagcttctgcgcagcaaaagaaataatcagtagagttarcagacaatccacagagtgagagaacatcttcaaaatctatatatctgacgaagaactaatatccaggatctacaaagaactcaaacaaatcagcaagaaa

SEQ ID NO: 525481 - DNA, 201 bp, Homo sapiens
acaaagagaagcttttgtactttctttttataattcacatcaaaataactctacaatgtatatatttctttggggaggagtaaaccttttgaccaatagtaaaaaaaaaaaaaagtatttgaaatacttaattgtaaaataaaatttaattatattttaaagtatttaaatgtaaaaataaatccctatgtatttgtattt

SEQ ID NO: 525482 - DNA, 201 bp, Homo sapiens
acaagtaaaaaatttttggtttgaactttttgatatgatctatcagaattgctaactttatgggaccaggtgtatccccatgcattgctcatgtgatgaawtagtgacttgcattggtagatctctgttgttcttttggtggttgggtagactctggttttagccttaaccaaggtacagatatttcaataattattgctt

SEQ ID NO: 525483 - DNA, 201 bp, Homo sapiens
cagctcgggtgatgggtgcaccaaaatctcagaaatcaccactaaagaacttattcttgtgaccaaacactacctgttccctaaaaacctattgaaatttwaaaaaaatttaaataaaaataaaataaaaaaatagaatggctttaatgaaacacctcacaatgtcaagtgctgatgaagatatggaacaactagaactct

SEQ ID NO: 525484 - DNA, 201 bp, Homo sapiens
ctccaaattatcttctaaaaattaattcatgtgaaaattgtgttctaggaattaattttacacaagtctaagtttatatattcattttatttatgaaagcmtaaagataatggcattaatcatttgaaagagaacattggaacacttttaaaaatgtcttggaagaacttttctagaaagaacataaaatgtcacatgttt

SEQ ID NO: 525485 - DNA, 201 bp, Homo sapiens
gctggagtgcattgacgtgatctcagctcactgcaagctcttcctcccgggttcacaccattctcctgcctcagcctcctgagtagctgagactacaggcrcctgccaccacacccggctaattttttgtatttttagtagagatggtgtttcaccgtgttagccaggatggtctcgatctcctgacctcgtgatctgccc

SEQ ID NO: 525486 - DNA, 201 bp, Homo sapiens
cttgcattggtagatctctgttgttcttttggtggttgggtagactctggttttagccttaaccaaggtacagatatttcaataattattgcttttcactrtttataaaatgttagtttacaaattgcttttttttttttgaaacagagtctcactctgtcacccaggctgtagtgcagtggggtggtgttggctgactgc

SEQ ID NO: 525487 - DNA, 201 bp, Homo sapiens
agctcgggtgatgggtgcaccaaaatctcagaaatcaccactaaagaacttattcttgtgaccaaacactacctgttccctaaaaacctattgaaatttaaaaaaaatttaaataaaaataaaataaaaaaatagaatggctttaatgaaacacctcacaatgtcaagtgctgatgaagatatggaacaactagaactctc

SEQ ID NO: 525488 - DNA, 201 bp, Homo sapiens
agtcttatgaaccagacattggcagttgagtatgatcagattgctgaatgtgttatccagaagatacagaattagtcaatgactctcttgattttaacacstgagtgtacttgttttttctttctaactcccaggtgaatgctgaaaatgtaactgagaaaagctaactaattgtatgtagctatcacagacaaagagcac

SEQ ID NO: 525489 - DNA, 201 bp, Homo sapiens
agtggtctattgatgattttgttgattttttcaaaaaaccagctcctggattcattgactttttgaagggttttttgtgtctctatctccttcagttctgstctgatcttagttatttcttgccttctgctagcttttgaatgtgtttgctcttgcttctctagttctgttaattgtgatgttagggtgtcaattttagat

SEQ ID NO: 525490 - DNA, 201 bp, Homo sapiens
ttgtgtatagaagcattatttttctatgtgtaaaatatgtagctcctaaaattttcctggagtttgatattttatagtatttgaagcttttacagtttccyggcactgggagaataattttatgtatatttattttaatgaaatctaaagatactatttgtatctcaatagtttgaaaattagatggtaatctatgtcccc

SEQ ID NO: 525491 - DNA, 201 bp, Homo sapiens
gtttgttattatttctgttcttttacatttgctgaggagtgctttacttccaactatgtggtcagttttggcataggtgcggtgtggttctgagaagaacrtatattctgttgatttggggtagagagttctgtagatgtctattaggtcctcttggtgcagagctgaattcaattcctggatatccttgttaactttctg

SEQ ID NO: 525492 - DNA, 201 bp, Homo sapiens
ctgaaaattcactccacttatttatgtgtgcctatttgtattttggataagctttcttcatccattagagcagcacatctgactattaactgaactaaagtttttttttttaaatgagctattactatttatttctgtagaaggatgagcttttacagacatcatttagacatgcatctatgggtttggaactgaatgtca

SEQ ID NO: 525493 - DNA, 201 bp, Homo sapiens
gtctctttgtaggtctctaaggacttgctttatgaatctgggtgctcctgtattgggtgcgtatatatttaggatagttagctcttcttgttgaattgatccctttaccattatgtaatggccttctttgtctcttttgatctttgttggtttaaagtctgttttatcagagactaggattgcaacccctgcatttttttg

SEQ ID NO: 525494 - DNA, 201 bp, Homo sapiens
ggaagctttgttcatttctttttattcttttttctctaaacttttcgcttcatttcattcatttgatcttcaatcgctgataccctttcttccagttgatygaatcagttgctgaagcttgtgcattcatcatgtagttctcgtgccgtggttttcagctccatcaggtcctttaaggacttctctgcattggttattcta

SEQ ID NO: 525495 - DNA, 201 bp, Homo sapiens
acttcttccgcttgcagcttctggccaagggtagtgaaagttgctgtagagggatcttcactagctcttgtttgtttcctttatcagtgcccacaccttcrtaaagacaggctctttatccagtttctgctccagcatttaaggaggttagaagttgtcactccatcctaacaaccagtgaaaactgaacaaaatgaaaaa

SEQ ID NO: 525496 - DNA, 201 bp, Homo sapiens
tagatggagagcacaatattgtttaatgaagaaatcccaccttttcacccatgtattcaatcagcagttcatggaaaactctccaaactgtttttacatayggtccaggttttcttagcttcctgccaatatttctgtattctgtacattttccatttgcctttctagattttggtaggctgagtaacgaccctctgagac

SEQ ID NO: 525497 - DNA, 201 bp, Homo sapiens
atggagagaagttttcagggatacaccacagggtttttttttataagacggggtcattgtggaaagatcaaacagggtgaagcagggcagtgagatgagcttttttttttttgaaacagagtttccctctgtcacccaggctggagtgtaggagatgagcttttaaaaagataatgagggcaggaaggagctcttaccttc

SEQ ID NO: 525498 - DNA, 201 bp, Homo sapiens
cctctaatcccagctactcaggaggctgaggcaggagaatcgcttgaaccagggaggcggaggttgcagtgagcccagatcatgccattgcactccagccygggcgacagtgtgagactccatctcaaaaaacaaaaaaacaaaaaaaaaaccaacaaaaaaaacacacagcccaagctgtcaattccttattaggcgtgg

SEQ ID NO: 525499 - DNA, 201 bp, Homo sapiens
tactttgagtgagtgacatgggagggtactgaccagatgggtgacatttttgagttatgttttaaaaagatcattctcactatatgcaataaccaaggtcrgaaacaatggtggcttaaagatcagtgtagtagcaatggaagttttgctttagaaatagacatttatgattttattaaatactctaggatttagatggag

SEQ ID NO: 525500 - DNA, 201 bp, Homo sapiens
gttgtgtaaggggaatatccttgtttgtggcaattacaaacaaatatataggagtgaaggggcattatgtagcccaccttactctcagatggttcaggaawaaaagtactttgtagttttcttgccaacttttctctaaggttgaaattatgtgtatatgtgtatatatatgtatatatgtaatacatattagttgaatgt

SEQ ID NO: 525501 - DNA, 201 bp, Homo sapiens
aagcaatggggtgggtgtgggatcagattataagagaccttactttgagtgagtgacatgggagggtactgaccagatgggtgacatttttgagttatgtyttaaaaagatcattctcactatatgcaataaccaaggtcggaaacaatggtggcttaaagatcagtgtagtagcaatggaagttttgctttagaaataga

SEQ ID NO: 525502 - DNA, 201 bp, Homo sapiens
ctggaactgggacaggtaagtgaaaggcaagagctgagactgcttgctgcctcctactctctcattggagaaacagtctcttctccctactcctcaggtgygggtgtgcagagcaacctctggagtttttatgttgctatcaagttcactcaaaaacagaagccttaacctcccttgtctgacctcaacacagctgtagaa

SEQ ID NO: 525503 - DNA, 201 bp, Homo sapiens
agatacggtgggagaagcaatggggtgggtgtgggatcagattataagagaccttactttgagtgagtgacatgggagggtactgaccagatgggtgacawttttgagttatgttttaaaaagatcattctcactatatgcaataaccaaggtcggaaacaatggtggcttaaagatcagtgtagtagcaatggaagtttt

SEQ ID NO: 525504 - DNA, 201 bp, Homo sapiens
caatgtgttatcctgaattttaagtgaaactagtcaacatggttgtatggttttctcagttatgggcacagatgtgaagaagatgtagtatttaaccagarttgttttcaccctccaggagaatatgatggaaaaagggaggaacaagagtgtttagggcctttgtaaagacgtcacaataatacaaggcttagagtctat

SEQ ID NO: 525505 - DNA, 201 bp, Homo sapiens
aaagtaaaagcaaataaagctgtttcattacaacagtacaactaaatagtaaggataaaaatttaacatcaggcaacaatagttgtttttttttcaatttktagagcagaaatacaaataaagctatattaaccacccctaagggtatttgtgacctttgacaacactgaaagaaaatatttatagtctgaaactatgtct

SEQ ID NO: 525506 - DNA, 201 bp, Homo sapiens
gtactcccgtcggtactaccaatgctggtagacaacgttggttgttcatgttactggaatttaaagatggataaggaaatgaatacaaaaccattgcttgkatttatgtttaacaaaagattgctattctaccccagtggctccttaatcaccttaggtgatacagcttgatatttacaagagtattttaaagcaaagtaa

SEQ ID NO: 525507 - DNA, 201 bp, Homo sapiens
agaacagcaaggggaaatctgcccccatgaaccaatcacctcccaccaggtccctcccccaaattacaatttgatatgacatttgggtggggacacagaascaaatgatgtcaccctcacacttcctaccactctcactcgccattcctgaggaagccactcagaatctgcggcattcctgtctgcggtgagccacatcat

SEQ ID NO: 525508 - DNA, 201 bp, Homo sapiens
aatatttatctgatcctttacataaaatgtgccctggagtaagaaatcttcattatggtaatgaatgagcaagaagcattagagaaaagaaaactcaagarctgattttaaatgtgcaataacattataaggtatagagtatcacataggaatatgcaaactatgtataaaatctcttggatttcagttatttcatatgct

SEQ ID NO: 525509 - DNA, 201 bp, Homo sapiens
gaaacagagtttccctctgtcacccaggctggagtgtaggagatgagcttttaaaaagataatgagggcaggaaggagctcttaccttctgtattagcccrttctcacactgctataaagaactacctgagactgggtaacttataaagaaaagagatttgattgactcacagttccacaggctgtgcatgaggcatggct

SEQ ID NO: 525510 - DNA, 201 bp, Homo sapiens
cacctatttttgtgaatgaagttttattagaacacagctatgcttatccatttatgtgttgactgtagctgttttcatgccataatgacagggttgagtayttgtaacacaggttgtgtgggctgcaaagctgaaaatatttatctgatcctttacataaaatgtgccctggagtaagaaatcttcattatggtaatgaat

SEQ ID NO: 525511 - DNA, 201 bp, Homo sapiens
taacttctttatatctcttggtgctaatcaggtaccctctcttcctattacctattagccaggtccacatctttcactaccttaaatgtgccataatcttwcccagtcagagctcttacacttgtaacttggaaaatacttcgaaatttattgacgtgctttttctttttttcctgcctgataacatgatcttcaccccag

SEQ ID NO: 525512 - DNA, 201 bp, Homo sapiens
tcctttctaggtattggaaatagaggaaaaatcagtagtatcttattgaggtaagaagtgcagagataatttggcaaatgagagattcccagaagaaaggrtaacttctttcaagtcagctagtttgtgctcatataacaccagtgtagtaacatgcgtagttgatcctctaaaacagacagcatctcaaatgattactgt

SEQ ID NO: 525513 - DNA, 201 bp, Homo sapiens
tgtcaatgtgttatcctgaattttaagtgaaactagtcaacatggttgtatggttttctcagttatgggcacagatgtgaagaagatgtagtatttaaccrgagttgttttcaccctccaggagaatatgatggaaaaagggaggaacaagagtgtttagggcctttgtaaagacgtcacaataatacaaggcttagagtc

SEQ ID NO: 525514 - DNA, 201 bp, Homo sapiens
cagagatgtgaaaggcaataacattctattgaccacggaaggtggagtgaaactagtagattttggtaagttttgtttaaaatgcatgagttttaactccwtaatgaactagtatgatatgatttgatctttttcgaatggccttcctttctaggtattggaaatagaggaaaaatcagtagtatcttattgaggtaagaa

SEQ ID NO: 525515 - DNA, 201 bp, Homo sapiens
taattcttatccttgcatttgaaaatcaagctcatgcttctccaaattatcttctaaaaattaattcatgtgaaaattgtgttctaggaattaattttacrcaagtctaagtttatatattcattttatttatgaaagcataaagataatggcattaatcatttgaaagagaacattggaacacttttaaaaatgtcttgg

SEQ ID NO: 525516 - DNA, 201 bp, Homo sapiens
gcccttgtaacaaagttaataatacaaaaaagcaaaatcatctggagtagctctccatagatgtttacttataattgcaaataaaaataacattttatttrtccattttaaaatttgatgaaattaatataacttgagattcacttgattagcatgaaaatcacaatctctccccttaaattatgtaatgagaaattacaa

SEQ ID NO: 525517 - DNA, 201 bp, Homo sapiens
ctgcagaactctctgtattcttttccttgatttaacctgacacatgaccttctttttagatatcaaagttatctgaagaatatttcattctgcagaaaaarttgaatgaaatgattttgtcacagcaactgaagtcactttatctgggtgtctcgcaccataagccaattaatagacgagtttcttctcagcagtgcctct

SEQ ID NO: 525518 - DNA, 201 bp, Homo sapiens
aaacatgaatattttattaggaattatccaaaatactttctcattaggttatttgtcatattctgaattaatgacttgtgtcatctcaagttaatgatggccagcattctctgtgacttgctattaacattaacataaaaactaacaggatcatcaatatcagcttcaaatagaaaatacaggaagaaatagatttcaaat

SEQ ID NO: 525519 - DNA, 201 bp, Homo sapiens
attgcttgaacccaggaggcagagtttgcagtgagcagagttcgtgccactgcactccagcctgggccacggagcaagactctgtctcaaaaaacaaaacaaaaaaaaaagacccagtaagtacaggttgattggtctggtgtgtactaatgtaggtgatgagactatataaaaaataaaattattgttgattcttaaaga

SEQ ID NO: 525520 - DNA, 201 bp, Homo sapiens
ggaggtctataatcggctgctctgggaatgtctgtcctatgtggttgagataaggactgagatatgccctggtctcctgcagtaccctcaggcttactggrgtggggaaaaaccccaccctggtaaatttgaggtcagactggttctctgctctcaaaccctgttttctgttgtttaagatgtttatcaagacaatatgtg

SEQ ID NO: 525521 - DNA, 201 bp, Homo sapiens
caccttactctcagatggttcaggaataaaagtactttgtagttttcttgccaacttttctctaaggttgaaattatgtgtatatgtgtatatatatgtayatatgtaatacatattagttgaatgttatgaatcttgaaaatttgagagctagtgctttatagagtgaaataatacactgaaaaagaaactagggggaaa

SEQ ID NO: 525522 - DNA, 201 bp, Homo sapiens
tgttcttgcactgcctccccttttgaaatccttaataaaacttgctggctttaaggctcaggtgggcatcacggtcctactgatatgtgaggtcacccccrgtggcccagctgtaaaattcctctccttgtactgtttatctttatttatcagccagctgacacttatggaaaatagaaagaacctacgttgaaatattgg

SEQ ID NO: 525523 - DNA, 201 bp, Homo sapiens
ggatagctttaggagatatacctaatgctaaatgatgagttaatgggtgcagcacaccagcaccagcatggcacatgtatacatatgtaactaacctgcayattgtgcacatgtaccctaaaacttaaagtataataataataaaataaattttttaaaaaaggccaaatacaaaaagcagtctcacaaatgagagagcag

SEQ ID NO: 525524 - DNA, 201 bp, Homo sapiens
aatccttaataaaacttgctggctttaaggctcaggtgggcatcacggtcctactgatatgtgaggtcacccccagtggcccagctgtaaaattcctctcyttgtactgtttatctttatttatcagccagctgacacttatggaaaatagaaagaacctacgttgaaatattgggggcaggttcccccgatagttcacca

SEQ ID NO: 525525 - DNA, 201 bp, Homo sapiens
accagcaccagcatggcacatgtatacatatgtaactaacctgcacattgtgcacatgtaccctaaaacttaaagtataataataataaaataaatttttwaaaaaaggccaaatacaaaaagcagtctcacaaatgagagagcaggcccaaggggactggaactgggacaggtaagtgaaaggcaagagctgagactgct

SEQ ID NO: 525526 - DNA, 201 bp, Homo sapiens
actttatttcccccaaaatctatcctcttaagtaaatacataatcaaagaaatgcaaatacaataggctacaatttcccccatcaaaaatagattaaaaawatatatattttttgagatggagtttcattcttgttgcccaggctggagtgcaatgaatggcatgatctcggctcaccacaacctccacctcctgggttca

SEQ ID NO: 525527 - DNA, 201 bp, Homo sapiens
agacaagtaggcccactttcaccacccctattcaacatagttctggaagtacagagcaattaagcaagagaagaaataaaggacatccaaattggaaaagrggaagtcaaacctggctgtttgcaaatgatatgattgtatacctagaaaatcctaaagactcctccaaaaaactcttagatttgataaactaattcagtc

SEQ ID NO: 525528 - DNA, 201 bp, Homo sapiens
tctctactaaaagtacaaaaattagctgggcatgatggcaggtgcctgtaatcccagctactcgggaggctgaagcaggtagaattactcgaacccgggargtggaagttgcagtgagccgagatgacaccactgtactccagcctgggtgacagagcgagactctgtctcaaaaaaaaaaaaaaagaagaagaaaaacaa

SEQ ID NO: 525529 - DNA, 201 bp, Homo sapiens
ggccattactaaaaagtgtgaatacaatagatgttggcagggatatggggaaaagggaatacttacacgctgctggtgaaaatgtaaattagtacaacctytatggaaaatagtatggagactccttaaagagctattaataaaagtagatctaccatttgatccagcaattccactgctggatatctacccaaaggaaaa

SEQ ID NO: 525530 - DNA, 201 bp, Homo sapiens
  misc_feature (1)...(201): n = A,T,C or G
gctgctccatccctccaaacagagaaaagaaacataccaaattcctaatgtaataaatgagaggaatcaaacctctttggtcatttcaacccaaataaaancagtgagacacagatgataaggagctaccttaagatgataaggggctaccttagtaaatgcttgtatcactgttgctgaacatagagtaagctcataatg

SEQ ID NO: 525531 - DNA, 201 bp, Homo sapiens
aaaatatggacagagaatgaagtattttaagaaacttaaaaaaatccacaatggattaaaaaaatttttttaccatggagcatatcttagagtaaaaatataaagtatagtcatagaagcaaaaacaaaaattgaataggagaatctcaaaggagagtttctttagagtttgttctgatatattactagtgtttttaaaac

SEQ ID NO: 525532 - DNA, 201 bp, Homo sapiens
ccatccctccaaacagagaaaagaaacataccaaattcctaatgtaataaatgagaggaatcaaacctctttggtcatttcaacccaaataaaatcagtgwgacacagatgataaggagctaccttaagatgataaggggctaccttagtaaatgcttgtatcactgttgctgaacatagagtaagctcataatgagtatc

SEQ ID NO: 525533 - DNA, 201 bp, Homo sapiens
aaatatggacagagaatgaagtattttaagaaacttaaaaaaatccacaatggattaaaaaaatttttttaccatggagcatatcttagagtaaaaatataaagtatagtcatagaagcaaaaacaaaaattgaataggagaatctcaaaggagagtttctttagagtttgttctgatatattactagtgtttttaaaact

SEQ ID NO: 525534 - DNA, 201 bp, Homo sapiens
catccctccaaacagagaaaagaaacataccaaattcctaatgtaataaatgagaggaatcaaacctctttggtcatttcaacccaaataaaatcagtgagacacagatgataaggagctaccttaagatgataaggggctaccttagtaaatgcttgtatcactgttgctgaacatagagtaagctcataatgagtatct

SEQ ID NO: 525535 - DNA, 201 bp, Homo sapiens
aatatggacagagaatgaagtattttaagaaacttaaaaaaatccacaatggattaaaaaaatttttttaccatggagcatatcttagagtaaaaatataaagtatagtcatagaagcaaaaacaaaaattgaataggagaatctcaaaggagagtttctttagagtttgttctgatatattactagtgtttttaaaactt

SEQ ID NO: 525536 - DNA, 201 bp, Homo sapiens
atatggacagagaatgaagtattttaagaaacttaaaaaaatccacaatggattaaaaaaatttttttaccatggagcatatcttagagtaaaaatataaagtatagtcatagaagcaaaaacaaaaattgaataggagaatctcaaaggagagtttctttagagtttgttctgatatattactagtgtttttaaaactta

SEQ ID NO: 525537 - DNA, 201 bp, Homo sapiens
tatggacagagaatgaagtattttaagaaacttaaaaaaatccacaatggattaaaaaaatttttttaccatggagcatatcttagagtaaaaatataaagtatagtcatagaagcaaaaacaaaaattgaataggagaatctcaaaggagagtttctttagagtttgttctgatatattactagtgtttttaaaacttac

SEQ ID NO: 525538 - DNA, 201 bp, Homo sapiens
cacctggatgcaattatttttaaagggaaacaatatcatttttattttttattatctgttgcctaattatacggtatttacttttcatttaagatattttmattcttcatatttatttttaaaaactcatatttcagtttgaatattatcttgttacttttctttatgtaagaaggacattttatgctggttgaagaaaag

SEQ ID NO: 525539 - DNA, 201 bp, Homo sapiens
aaatctcatgtcccctcctaaagacagaatacattcagagaacttaacaaaggctgtctttggaagttagctgcaatgatctgtttatataatattatacyttttgatttagttttgttttgtaatgtttgactacagctagggtagagaattcattttcagtgctgctctgttatttaattagtgtagctctagcttagg

SEQ ID NO: 525540 - DNA, 201 bp, Homo sapiens
acttgtaggcatttgctaaagattagtgtttccaaaagactcaagcatgaatattgatagcacttttataatgagcaaagtgaaaacgggaatgaatattrgaaaatcacagtttctgcttttgtagcctcacacagaatatagtcagactaagctaatggccttaaaacattattagaataaacaaaaaacaattgaaaa

SEQ ID NO: 525541 - DNA, 201 bp, Homo sapiens
tcctgtttctttgcatgtcttatttttttgttgttgttgaaaactgtacatttcagaaaatttgcttaaattattataagaagtcttcgtactaagttccytgggtggggaacttgttgtttgcctgtttgtttagtgacttggctggactattttagtaaaatctattttccccatctatgaagcctttgatgtcactct

SEQ ID NO: 525542 - DNA, 201 bp, Homo sapiens
tcttacatttaggtcattgttccattttgagttaatttttgtgcatattgtgaagtagggatccagcttcattcctttgcttctggacattcagtgtaccrgcaccattgttggaaagattatcctttccccattgttcttggtcaaatatcaattaaccacaaatatataggtttatttctggactctcaattctatctc

SEQ ID NO: 525543 - DNA, 201 bp, Homo sapiens
attatgaacaactttatattgataagtttggtaatttagtgtcttgggtctttctggaaagacatgagttgtataactgatatgagaagaaatagaaaatrcaaatagtttatattaataaaagaaacttaataattaaaaccctttccacaaagaaaataccaagcccaatgacttcactggtgaattctgtcaaatatt

SEQ ID NO: 525544 - DNA, 201 bp, Homo sapiens
taaacaattcacattttcagttgtgtgcctttctgattagcatgatgaaatatcatgtggtcctgctccatcccacccaggatgtgaattatcttcttgtrcagcatatctatgttgtatatgctacctgcctattagtgacttagtatccatctgggttatcagattgtcatagtattgcagtgctcatgttcaagtaac

SEQ ID NO: 525545 - DNA, 201 bp, Homo sapiens
ggatgtatacatagtccaatattccatatttatttacctagtcccagagtcttgtttatagatacacacacacacacacacacacacacacacccatgcaratgttgacacatgcatatatatggtgagatgatcattgttttattaatatgggattatattacacacacttttctatatctgatttttctcactcagcaa

SEQ ID NO: 525546 - DNA, 201 bp, Homo sapiens
atccaaaattcagagttaggacatctttctgttaaaagaccctttccctcataatccaatcttagctataattgctcctttcacagtggtgctacagactrcattctattattcatttgaattggtcctgatttgttcattcataatagtgacattgctttttctcattgctccccaattatagcaatttttctctttgaa

SEQ ID NO: 525547 - DNA, 201 bp, Homo sapiens
agataattgatttgcatatgtaaattagactaatcacatatacacataagtggctagatgtacaattacctgatttataaacatgaatggtgcaggtgctrctttagaggcactttcagaaaattggcttgtggcatcaatgctttgtagtacaacatgactgctaattatacctttcattgtaataaagtccatttaaat

SEQ ID NO: 525548 - DNA, 201 bp, Homo sapiens
gatgtgcattgataaggtttggctgtgtccccacccaaacctcatcttgaattcccatgtgttgtggaagggacccagtgggaagtaactgaatcgtgggrgcaggtctttcctatggtattctcatgatagtgaataagtctgatgagatctgatggttttataaggggaaaatttccctgcataagctctctccttgcc

SEQ ID NO: 525549 - DNA, 201 bp, Homo sapiens
tatgtgggctctgttttggttgcatatgaattttagaattgttttttcctaattctgtgaagaatgatggtggtattttaatggggatttcattgaagttrtagattgcttttggcagtattgtcattttcacaatactgattctacccatccaggagcatgggatgtgtttccattcatgtcatctatgatttatttcag

SEQ ID NO: 525550 - DNA, 201 bp, Homo sapiens
gtgggaatggtgatgagctgagcattggcattcttgatatatttggctttgaaaatttcaaaaaaaattccttcgagcagctgtgcattaacattgcaaaygaacaaattcagtattattataatcaacatgtgtttgcatgggaacaggtaagtctaagtacttactataaatatgcatgcatgcatgtattataggcag

SEQ ID NO: 525551 - DNA, 201 bp, Homo sapiens
cctccaaacagagaaaagaaacataccaaattcctaatgtaataaatgagaggaatcaaacctctttggtcatttcaacccaaataaaatcagtgagacacagatgataaggagctaccttaagatgataaggggctaccttagtaaatgcttgtatcactgttgctgaacatagagtaagctcataatgagtatctgttg

SEQ ID NO: 525552 - DNA, 201 bp, Homo sapiens
ctccaaacagagaaaagaaacataccaaattcctaatgtaataaatgagaggaatcaaacctctttggtcatttcaacccaaataaaatcagtgagacacwgatgataaggagctaccttaagatgataaggggctaccttagtaaatgcttgtatcactgttgctgaacatagagtaagctcataatgagtatctgttgt

SEQ ID NO: 525553 - DNA, 201 bp, Homo sapiens
cttaagatgataaggggctaccttagtaaatgcttgtatcactgttgctgaacatagagtaagctcataatgagtatctgttgttgattatgatgatggtgaggaggaggaggatgacaatgacattgattgtgataattatagcatactgtatcaacaggtcctctataatgcaagtggattcttagccaaaaacagaga

SEQ ID NO: 525554 - DNA, 201 bp, Homo sapiens
catatcttagagtaaaaatataaagtatagtcatagaagcaaaaacaaaaattgaataggagaatctcaaaggagagtttctttagagtttgttctgatakattactagtgtttttaaaacttaccaaaaaattacaaaaatgagaagttaataagaacctagttataataccaaatattgcattttgtttgcatatatta

SEQ ID NO: 525555 - DNA, 201 bp, Homo sapiens
ttaagatgataaggggctaccttagtaaatgcttgtatcactgttgctgaacatagagtaagctcataatgagtatctgttgttgattatgatgatggtgaggaggaggaggatgacaatgacattgattgtgataattatagcatactgtatcaacaggtcctctataatgcaagtggattcttagccaaaaacagagac

SEQ ID NO: 525556 - DNA, 201 bp, Homo sapiens
taagatgataaggggctaccttagtaaatgcttgtatcactgttgctgaacatagagtaagctcataatgagtatctgttgttgattatgatgatggtgaggaggaggaggatgacaatgacattgattgtgataattatagcatactgtatcaacaggtcctctataatgcaagtggattcttagccaaaaacagagaca

SEQ ID NO: 525557 - DNA, 201 bp, Homo sapiens
tacaggcaacactttctttttttttgaaacagagtcttgctctgttgcccaggctggagtgcagaggcacgatctcggctcactgcaacctccacctcccrggttcaagcgattctcctgcctcagcctccctagtagctgggattacaggcccatgccaccatgcctggctaattttttgtatttttagtagagacaggg

SEQ ID NO: 525558 - DNA, 201 bp, Homo sapiens
actgtagattttttcatagaagccctttatcaggggagaagttacttttttttttaattcctaatttcctgaatggttttttttgttgttggttgtttttygtttgtttgtttttgtttttcatgttttttttgagacagagtctcacactgttgcccaggctagagtgcagtggcacaatttcggctcactgcaacatct

SEQ ID NO: 525559 - DNA, 201 bp, Homo sapiens
ccaggcatgagccactgtgcctggcctatttctgctaatttttatatgttcagcaaatttgtggtagttcttgatttagtttttcttttttttctttttctttttttttttttttagacagagtctcgctctgtcacccaggctggagtgcagtggcgcaatcttggctcactgcaagctccgcttcacagtgagcttgca

SEQ ID NO: 525560 - DNA, 201 bp, Homo sapiens
gataatttaggaactaggtttaatgacatattgatatgggtgttgaaatcatcaacatagtgatgttttcatttcttttggaaagagtctctcatgcctawgacgagttttggagtttgcctatgttattagtagccaagctctcagcaggggccaacaaaactgcattcagtgaaaaaaaggcctggaccattttctcta

SEQ ID NO: 525561 - DNA, 201 bp, Homo sapiens
aaaccaaaacaaactcccatatttgcaaagaaatttataatatttgtgtcttgggtgtaggagatgtgggagagaattttaataatgtttggatgagaaaytatccctgtaacaatttaagagatttaaaaaaaaagccaccttaaactgagtgtcctgtgtattcagtaatccatatttactttagtaaggggatatttt

SEQ ID NO: 525562 - DNA, 201 bp, Homo sapiens
ccattcctttattttcagtctatgtgtgtctttttagatgaagtgtgtttcttgtaagcaacagatcatttggttttagtttgggtttttgttgttgttgytgttgttgttgtttttatccattcagccactgtatgtcttttgattggagagtttagtccacttactttcaatattattattgataagtaaggaagtact

SEQ ID NO: 525563 - DNA, 201 bp, Homo sapiens
aaaatctcaagcaatttagaatgtgttctgttcttcaaagcacagcacataactgcttcacatctgtgtgccatggttctttgtattatattttaattttycaggtgttccttaagtattatcacgtggagcagttaaatctaatgcgaaaggaagctattgacaagcttattttgattcaagcttgtgtcagagcattct

SEQ ID NO: 525564 - DNA, 201 bp, Homo sapiens
gaggtgttagcatatcaaggtgtcatggtatgacattttcattccatcttaacttttttcttggctgtattgctcttgtaagggttttgcctttggctagaaaaaaaaaaaaagatgcagagaaaaccttatcttcaagtgaaggggaaatcattttggaaggatattagcaaagtagcaactgtgaaattttggccaccg

SEQ ID NO: 525565 - DNA, 201 bp, Homo sapiens
ccagtcttggaactagaaattgaaatggaatattattatttcatgtctattcccacaaggggaacttgtgctatagattatatacatacatatatacatakgtgtgtgtgtgtgtgtggtctgtgtatataaagcctgacagcacctgggcagcccagactaaagtatagatgttgttccctgtccatgaatgatagtgta

SEQ ID NO: 525566 - DNA, 201 bp, Homo sapiens
cgagaaagctagcgaggagtaattggggacacactgttaggagatacggtgggagaagcaatggggtgggtgtgggatcagattataagagaccttactttgagtgagtgacatgggagggtactgaccagatgggtgacatttttgagttatgttttaaaaagatcattctcactatatgcaataaccaaggtcggaaac

SEQ ID NO: 525567 - DNA, 201 bp, Homo sapiens
taatgttccacagtgtgtactaccataatttattcagccattcagccatgactgggcatataactataaatgtttccagatctttgctaccatgagcaaarctgaagtatgtccttattgactggttcatttctttctgtggaataggttccgttcctagtagtggaatttctgggttaaaaggtgtatattttttaaatt

SEQ ID NO: 525568 - DNA, 201 bp, Homo sapiens
gagaaagctagcgaggagtaattggggacacactgttaggagatacggtgggagaagcaatggggtgggtgtgggatcagattataagagaccttactttgagtgagtgacatgggagggtactgaccagatgggtgacatttttgagttatgttttaaaaagatcattctcactatatgcaataaccaaggtcggaaaca

SEQ ID NO: 525569 - DNA, 201 bp, Homo sapiens
ttcttttccatattttccttagctattgtttagcattgcttgtccatacaaactgtaagatcaatatattcaattccaacaaccccacttggacttttaaytagaattatattgaatttatatattaatttttggagcactgtgattttcatgatatgtatgtcttctcatcccaaattatgaagcgacttatgtactttt

SEQ ID NO: 525570 - DNA, 201 bp, Homo sapiens
agaaagctagcgaggagtaattggggacacactgttaggagatacggtgggagaagcaatggggtgggtgtgggatcagattataagagaccttactttgagtgagtgacatgggagggtactgaccagatgggtgacatttttgagttatgttttaaaaagatcattctcactatatgcaataaccaaggtcggaaacaa

SEQ ID NO: 525571 - DNA, 201 bp, Homo sapiens
ttccttatgtcccataggttgtattttttaatttttgtaacaaagtatcgtgtttaatagggacgcctaaggcttttagagaagctttcagactttgctcrtaacagtttattgtttgctacattgattcagagtgtgtgataaaagaagattttactctaaatgtgaatcaggcttttagatgaactctttctggaattt

SEQ ID NO: 525572 - DNA, 201 bp, Homo sapiens
taaacagaaaattctagaaataaacagttttaaatagcatgctgtgctgagtagcatgatgaaatcccactccttccatgctggtaaatgaatcttctctwtgtctggcatgcccatgctgtataggctacctgccccttagccaattagtaaccctgttggttatcagttcaaaaatacatagtacatatatagagagtt

SEQ ID NO: 525573 - DNA, 201 bp, Homo sapiens
ttgattagcatgaaaatcacaatctctccccttaaattatgtaatgagaaattacaatacataatactaagcacagtaaaaactattatgaccttgacatmatgaaattctgtatttggtattctataatctgtttctttgacattactcatggttttctcacagttctattcttatgactttttgaaactaggatattga

SEQ ID NO: 525574 - DNA, 201 bp, Homo sapiens
tttagaatctctcattgaattctgaataaacattgctactctgtttctagaggaattaattgcttgtagggaaactggtgaaagagtttgaggagccagargggaatctggaaggctatttccagcaccaatcaagaattattaacaattcctcttgggaccagagcgggagttattgcaatgagttcccccaaagagttc

SEQ ID NO: 525575 - DNA, 201 bp, Homo sapiens
tcatctggagtagctctccatagatgtttacttataattgcaaataaaaataacattttatttatccattttaaaatttgatgaaattaatataacttgakattcacttgattagcatgaaaatcacaatctctccccttaaattatgtaatgagaaattacaatacataatactaagcacagtaaaaactattatgacct

SEQ ID NO: 525576 - DNA, 201 bp, Homo sapiens
gcaatagagcaagactacgtctcaaaaaaacaaaaaaaaaaacaaaaaaaaactgattttgaccagaatggaaagggtgtgtgtattccatttggtttgtygtttgtaataacttaaaaataacaatttgataccaagttatttttttcaatcaaaaaacataaaacaagttacaattccagaatgccatgatttggccaa

SEQ ID NO: 525577 - DNA, 201 bp, Homo sapiens
taccagaagtgctaagaacactttcctttcttttattattctcacccttttttgtagttttatagaaatgatataatatagggagaatatagaaaagagcwttacttggaagaaaacataaaatgtcctttataaagtcacttgatctcactgacctattcttttaattaattgacaaatcaattaattatttcagcagtg

SEQ ID NO: 525578 - DNA, 201 bp, Homo sapiens
tggcctgaaatcttaaaaaaaaatgttaagttcatgaaattcaagaaaagattgaggaactcctccagattgaaggagattagaaacttgacaactaaaarcaccacataatcccggattagatcattttgttttaaaggacatatttaggacagttgatgaaatttgaatgggctctgtagagtagatgatagaagtgta

SEQ ID NO: 525579 - DNA, 201 bp, Homo sapiens
ttaccagtaaaaggaggggaaagggataattaatttctgaatcacttcgaactctatgattccatgactaaaattgaggggcatttaatttccttctagtytctgcagattgctcatgctgttttattgctttaagtgtctgcagaattgaacctaagaatagagaacatattaatatctcacataccaacagctgcaaat

SEQ ID NO: 525580 - DNA, 201 bp, Homo sapiens
caaaccacacagcacctgagaggatgcaatgagaagacctcagcatcacttctgtgatgttcctgccaaaaataaaatcgtgagggaatatacaacaaacycaaattcaggaacagtctatagaacaactggcctgaaatcttaaaaaaaaatgttaagttcatgaaattcaagaaaagattgaggaactcctccagattg

SEQ ID NO: 525581 - DNA, 201 bp, Homo sapiens
atcaacactatggccttccaaggattagactggatggtgccagatctgccagggatgggccactttgtcctggtccatgatgacccccacctactttgagrtctggtcattgttctctctcccagtcctctctcacatgggcatcagttaggcatcaggtataggttgaggccctaagaaaggacttagcacatgttgcca

SEQ ID NO: 525582 - DNA, 201 bp, Homo sapiens
tgtaattttaaaattcatcatttggtaaccatctatgtaataattaattcatccaaaaatttcaatggctgctaaaactagtgagttaagttttgattagmaatagggtagcttaattgtttcgaaatatctctccacaaaatactaattaattacaaaagaaagagggaaagattacaggggagaagactggcagacaca

SEQ ID NO: 525583 - DNA, 201 bp, Homo sapiens
ctcccagtcctctctcacatgggcatcagttaggcatcaggtataggttgaggccctaagaaaggacttagcacatgttgccaaaacaactctgtgcaccraactcagtctaccctgcatggactgttgcttccattcccaaaacaaaatcactgaaaaggaaatcatatatttcccaaccacagggctctgccactgaga

SEQ ID NO: 525584 - DNA, 201 bp, Homo sapiens
caggtacagtgctaacattttgaaagtacttaatgaatgaatgaaggagggggaagacttgccatataattatgtgacaatgagaaagtcacacagaatckgcaagggcatcaacctgcacatctacaagtgtgaaaaagtctctgcctcctaagattggttgctgtgaagaataaatgggatgccagaggcaaactactt

SEQ ID NO: 525585 - DNA, 201 bp, Homo sapiens
acaaataagaaagattctgttttgaaagtgaaggaaattgtactgtcacttgattgaaacaaaagaaaacagtttgacaagcatttattgagtactacctstgtaccaggccctgtgctaaaagttagagatgtgaattagtcacagtctttgtcctcagtaagtttataatctgatagaagaaatatacactaggcatca

SEQ ID NO: 525586 - DNA, 201 bp, Homo sapiens
tactttaccatgtataattctattccaaatctgcatatattagctatgtaaaattttctttgttcactgcacattgtcctttttatggtaaataattttcrcagtattttttgaggatctcatacatgcttgatatttgagttcagtatttttctacagaaaaatttgaaggtaacctgaaatcacaatacttctggagac

SEQ ID NO: 525587 - DNA, 201 bp, Homo sapiens
aaggatcttagtttgtggcttcctctgcactgctaaatcagttactgcttgcttatctgctttccatattgcaaaatttattgaatttttttgctcagtgytctccttttttctgtcctctttttctttgtggttataattgtttattcctttactagtgttttaatggagattcatgagtaagaggaaataaatttatat

SEQ ID NO: 525588 - DNA, 201 bp, Homo sapiens
  misc_feature (1)...(201): n = A,T,C or G
gattgacacttttaatatttggataaacgttttgtcttaaataatttaatttttaacttttctgtcaagaattaatggaacacaattgacctattgtggangatatagcaaataattaattatagatctcaagaatcatattattatagctcattggacaataagaattttttctactttattccaaaggttacacttgcc

SEQ ID NO: 525589 - DNA, 201 bp, Homo sapiens
ctgggaggaagtagaggtcgccaccaagattttcacttttgaacatctcaggtcaggagttcaagaccagcctgaccaatatggtgaaaccccttctctamtaaaaatacaaaaattagctgggcctggtggcaggtgcccgtaataccagctactctggaggctgaggcaagtagaattacttgaacctgggaggtggaa

SEQ ID NO: 525590 - DNA, 201 bp, Homo sapiens
ggattgtaggactattagcagacaacattaaaaatgcaatgattgatgctaggaatagaattcagtaaggatgtatagttatatagatagatattctttcytataaaaatttctaatagaaaaagagcccattggaaataatagcaaaaaaaaaaaatcaataccttgaaataaagctagcaaccaaacctgaaagagaca

SEQ ID NO: 525591 - DNA, 201 bp, Homo sapiens
atgctaggaatagaattcagtaaggatgtatagttatatagatagatattctttcctataaaaatttctaatagaaaaagagcccattggaaataatagcaaaaaaaaaaaatcaataccttgaaataaagctagcaaccaaacctgaaagagacaaaaaagaagagatgcataatggaatgatacattgtgtttctgaat

SEQ ID NO: 525592 - DNA, 201 bp, Homo sapiens
gaaagctagcgaggagtaattggggacacactgttaggagatacggtgggagaagcaatggggtgggtgtgggatcagattataagagaccttactttgagtgagtgacatgggagggtactgaccagatgggtgacatttttgagttatgttttaaaaagatcattctcactatatgcaataaccaaggtcggaaacaat

SEQ ID NO: 525593 - DNA, 201 bp, Homo sapiens
tgtatagttatatagatagatattctttcctataaaaatttctaatagaaaaagagcccattggaaataatagcaaaaaaaaaaaatcaataccttgaaataaagctagcaaccaaacctgaaagagacaaaaaagaagagatgcataatggaatgatacattgtgtttctgaattgaaagataaaatacggtaaacatga

SEQ ID NO: 525594 - DNA, 201 bp, Homo sapiens
aactgtaggagattccagtcacaggtggcctccgtacttttatgggttttacctccagattagtcaggttctcacagtaaatttcagagaaaaatcccttygtgtttacatcagggagagaggaaaaagtgccatttaaaaatatggcagagcattctgttccttttaacatggtttaccctcctcttgtccttcctaagg

SEQ ID NO: 525595 - DNA, 201 bp, Homo sapiens
ataacaaagtgctaatgtaattattcccaaacatatggtaagatggcagtgtcaacattttgaaaagtgacttggcaatatgtccaaaaaaaaaaaaaaamcccactgaattagtttatatcattgacccagtaaactcacttatgagagcatagcctaaggaaacaatcagagctgaaaaaaaaattgtgtatatggtaa

SEQ ID NO: 525596 - DNA, 201 bp, Homo sapiens
caacattttgctgttttacatatttgaatgcataaactaagatagcctgaaggaaaatgccacatgctgtctgtagataataaagtacaatagataccaargcatcactgtcttccttggtctccttagggcgacactggagaagccacacgtcatgccagagagacaaccaacatgaaaacacaaacggttgcatcatat

SEQ ID NO: 525597 - DNA, 201 bp, Homo sapiens
ttttacctccagattagtcaggttctcacagtaaatttcagagaaaaatccctttgtgtttacatcagggagagaggaaaaagtgccatttaaaaatatgscagagcattctgttccttttaacatggtttaccctcctcttgtccttcctaaggaataggaggggagtagagaaggaggagactgaggcacttgtgaaga

SEQ ID NO: 525598 - DNA, 201 bp, Homo sapiens
gaaaattcaatgcattttgatttttagatctccatgatacactaacatgcatatttatgattttacatcaatgctaccataccatacattccaggattcttttttttttttttttttttttttttttgagatggagtcttgctctggtacccagatgggagtgcagtggcacaatctcaggtcactgcaacctctgccccc

SEQ ID NO: 525599 - DNA, 201 bp, Homo sapiens
ctgtactgtcatagtgacatctagggcaaagaagcaaaagacagtgatttccaaaatctcaagcaatttagaatgtgttctgttcttcaaagcacagcacrtaactgcttcacatctgtgtgccatggttctttgtattatattttaatttttcaggtgttccttaagtattatcacgtggagcagttaaatctaatgcga

SEQ ID NO: 525600 - DNA, 201 bp, Homo sapiens
agattagtcaggttctcacagtaaatttcagagaaaaatccctttgtgtttacatcagggagagaggaaaaagtgccatttaaaaatatggcagagcattstgttccttttaacatggtttaccctcctcttgtccttcctaaggaataggaggggagtagagaaggaggagactgaggcacttgtgaagatcacagttga

SEQ ID NO: 525601 - DNA, 201 bp, Homo sapiens
gcagatgtgcatacatgtaggtgtatatatataacagagattttcatcattgttttatataaataggatcataatatgatcataatataaacacttaagcaacttgcttttctcaatacctttgcaggaatccctgcatatcaactagtatagctgtaatttattcttttcaatggctgcataatcctctatttgtgaatc

SEQ ID NO: 525602 - DNA, 201 bp, Homo sapiens
cagcctgtagttaccaatttctgtcttttcactggtgagtgtagtccagttataattattgtggttactggtatattataatgatttccacttgttatttyatgctgtctatttctactgctttttctatgtttcctttattctcctttcttgaattttttaattgaatgacttttgtaaagtcaggttttttttttctgc

SEQ ID NO: 525603 - DNA, 201 bp, Homo sapiens
aatagattggtttcctaaaaggctctagaaattaacatttccttcaacaatttgggagcatacacttgtcctgacatcctgtccatcagtgatatccttctttttttttttttttttttagatggagtcttgctgtgtcacccaggctggagtgcattgacgtgatctcagctcactgcaagctcttcctcccgggttcac

SEQ ID NO: 525604 - DNA, 201 bp, Homo sapiens
tgatattaaaatattgcttggttttgagtaaagccatctgctgtcttcttagcatgttctatatcaatgaggcaatttatattttcattaaaaagtcctgytttctgcatgtattttggaaagttaatgattaaatttattgatatttgcattatattagaaaagaaaacatgcccgtgttcacttatgaagcagttatta

SEQ ID NO: 525605 - DNA, 201 bp, Homo sapiens
gtatttcttccatgtttttttcatggcttgatagctcattgccttttagcactgaaaatacactattgtctgaatgtactagaatgtatttacctatttcytcctgaaggacatctttgttgcttccagttttggcaattatgaaaaaagctgctataaatatcgatgtacaggtttttgtgtggttttctactcatttgg

SEQ ID NO: 525606 - DNA, 201 bp, Homo sapiens
caaggtgtcagcaaggttgttttcctctgaggcctttttccttgcctttagatggtcatcttctcatggtcttctatttgtgtgtgtctgtcttttttttattattattatactctaaattttagggtacatgtgcacaacgtgcaggtttgttacatatatatacatgtgccatgttggtgtgctgcacccattaacttg

SEQ ID NO: 525607 - DNA, 201 bp, Homo sapiens
gaatcttcatttctggttgtttctagttttcttggtgaattaactaattgtacaggtgcacttaaaccttcttaagcatttttataattcagacggatctsgtagcttgagagttgtttaatgccagcatatgaaatgaggggctttaagttccttgttcattgtgtaaaagtgcgaaaacttagttactgaggaataaac

SEQ ID NO: 525608 - DNA, 201 bp, Homo sapiens
atttgccgtatactttgtgttttttaaaaatatttgtgttcacatctcccactagtttgaaactcattgattgtacaacctggatttttttccacattcartaaccccacaacacttgggaaaatgcttgcacgtggcagggtctcaataaatatgagttggattgaactgcatacttagatttttattaaaacaacaatg

SEQ ID NO: 525609 - DNA, 201 bp, Homo sapiens
gcagtgtttggttttttgtccttgcaatagttcactgagaatgatggtttccaccttcatccatgtccctacaaaggatatgaactcatcattttttgtgkctgcatagtattccatggtgtatatgtgccacattttcttagtccagtctatcattgttggacatttgggttggttccaagtctttgctattgtgaatag

SEQ ID NO: 525610 - DNA, 201 bp, Homo sapiens
cccgtccctgagggaactgcgttccgggtgatttctcagaacaagcaggtcggtggagctgggctccctgcaaccccaaatgcatccgtaaaggagttttmattttaaggagaaagagcagacaagaaaagtatgatcattattgagaaatagagaaacctaccaggaaaggatgtcctttcaagtctgctcaccaacagc

SEQ ID NO: 525611 - DNA, 201 bp, Homo sapiens
aagtgtgtatgggggtgagggaatatgaggagaagatagatgaaaatatactaacattttgagataaaagggaaggaacttgagtgagtttgtattagctyccattgaagaagagggaaaatagatattggaagcttgaaaggtagacatttttggacgactgctatctaaaatgagctaggaagtctcctgcggaggggt

SEQ ID NO: 525612 - DNA, 201 bp, Homo sapiens
taatatccaaagaaggcatgcttgtgctcagaaaggacaatttacagttgcttatatttaattaattcagtgtatgtattaatgattttgaaaccatgtayctatatctagattttttcttaagcttttaagttctgctcactcatcattttattcaatttatgaatccaacagttttttgtataagaatagaaaaaaatc

SEQ ID NO: 525613 - DNA, 201 bp, Homo sapiens
atgggatcacaaaacccttgtttcacacagcttatctttcgggggtattgaattctgcttggaactccttattctaattatctcagaagtatttcaaacatttttgtgaaggtagagatccaagctattaaattctagtctcagcctactttcccctcacccttctttgttccacgtagtcagatcattagagaaataaat

SEQ ID NO: 525614 - DNA, 201 bp, Homo sapiens
gaatttccatgaaatactcacttcatttttaaaaattggttttaggccaggcttggtggctcacgcctgtaatcctagcactttgggagactgaggcgggyggattgcctgagctcaggagtttgagaccggcctgggcaaacagtgaaaccccgtctcttttaaaatacaaaaaattagccagttgtggcagcgtgcacc

SEQ ID NO: 525615 - DNA, 201 bp, Homo sapiens
ttttattcaatttatgaatccaacagttttttgtataagaatagaaaaaaatcttagtcagtttttctttattcatttaactcataaacataactttacaytgccctaaacaaacataactaaattctcttaaacacttgaacttatataaaaatttagtacatctcagtcttttgaatgctccaaatgatggacagggca

SEQ ID NO: 525616 - DNA, 201 bp, Homo sapiens
gggcaacaagaacgaaactctgtctcaaaaaaaaaaaaaaaaaaaccctcaaggtgactctgatgcatgacatggcttgaggactgatgccctaaatcgtmatgtaatggtggaaattaatgatcttgagttttactttaccatgtataattctattccaaatctgcatatattagctatgtaaaattttctttgttcact

SEQ ID NO: 525617 - DNA, 201 bp, Homo sapiens
aatatcacaaacatgttttatgaatatgaatatataattatcaattatttaaccactggtggcttacatatagaatactattctggaattaaacaaggttstttttcatttttaattggactcattctcttctggctatttgtgtactccagaaacttatttaatactgttcctaatagttgtttttgtgtgtgaaaagta

SEQ ID NO: 525618 - DNA, 201 bp, Homo sapiens
ttattttgctggattcaaccaatcccttaaactttatgatggaattctgcatcattttatatacttccaagttcatagaccagttttatactcattatatyggtaacatccttatcgagggtaaaaaaacacatttaaaaaaactgttatttaagttcagggtacatgtgcaggtttattaatatagggaaacgtgtgtca

SEQ ID NO: 525619 - DNA, 201 bp, Homo sapiens
tgtattgttacacttctgaaatacaccctacatccatttacttctttccatctctaccatttactgttatatccaagccactgttatctctcacctagacsattgcagtagctcctgagtttttccatcttgccccagtccactcagtttcacaggataactagactcatccatttaaaacacaaaaataatgttgcttcc

SEQ ID NO: 525620 - DNA, 201 bp, Homo sapiens
ggcaacaagaacgaaactctgtctcaaaaaaaaaaaaaaaaaaaccctcaaggtgactctgatgcatgacatggcttgaggactgatgccctaaatcgtamtgtaatggtggaaattaatgatcttgagttttactttaccatgtataattctattccaaatctgcatatattagctatgtaaaattttctttgttcactg

SEQ ID NO: 525621 - DNA, 201 bp, Homo sapiens
gttttattaccttctattcaaaactgaaatctttcaaatcttatgacataccataagtatcacataaggaccatttcaagcaattgtgctaacctagaatmcttaaaagaatactcagatttaatgtgtgtaaaattaaaattttaaagtccactacttaaaacatcttcatgcttacaaattaactgattactgtagaac

SEQ ID NO: 525622 - DNA, 201 bp, Homo sapiens
gctttgttctaagtattttattacatgcttgttaaagtcacaaatttcaccttttgatggtgtggttttctactaggtgattgcatgtgaacagcaattgrataccacttatgacgccagatgtgacacttggtccctgggtatcacggccattgagctgggtgatggagatcctccactagctgaccttcatcccatgag

SEQ ID NO: 525623 - DNA, 201 bp, Homo sapiens
atgctttcataattgcatatttgctgtttcattaataataacaaatggagaatcactcctcgtccaaaagctcacacctctaatcccagtactttgggagsccgaagctggtggatcacctgaggtcaggagtttgagaccagcttggccaacatggtgaaaccctgtctctactaaaaatacaaaacttagccaagcatg

SEQ ID NO: 525624 - DNA, 201 bp, Homo sapiens
ttatcagaagtagaaagaataaccctacaactccattgataagatgtaaatctcacatctgatcatattcagaagagctagcagcagccaatggaatgagytgcaatagagataggttgtagataagagtatacctagaaacaaccatactaaaaaatgattttgatgattgagaacctatttctgcataacagaagacag

SEQ ID NO: 525625 - DNA, 201 bp, Homo sapiens
ttgaagtttatgtgtagaaaatcaaaagcacaaattattttctttaaaaagtggatatttgactacataaaaattaaaacttttatactaaaaaaagaaarcataaataaaattgcagtacaaatgaaactgagggaaaatatttgcaacatatatatcaaagcatttctttaagctatgaagaggctcatataaattgat

SEQ ID NO: 525626 - DNA, 201 bp, Homo sapiens
aaagaaagatgagtaatgatttatctgtcttggaattgggaaaagatggaatccttgattacaactggcagaacctaggattgcattagtctatctggctstgcctctcattttacactgactgaccaatatacagaatccaacattgattcttatttttctaggaatccacccccaaaactaaggcagcctgagctatgg

SEQ ID NO: 525627 - DNA, 201 bp, Homo sapiens
ttgaattaattttagtataaggtgtaatgaagggatccagtttcagctttctacatatggctagccagttttcccagcaccatttattaaatagggaatcmtttcccccatttcttgtttttgtcaggtttgtcaaagatcagatagttgtagataagtggcattatttctgagggctctgttctgttccattggtctata

SEQ ID NO: 525628 - DNA, 201 bp, Homo sapiens
cactccgagttgaatctggttttctcattatttgagtagttatcacagttgtcaccagagagaacattctggaaagcacttgattaatgtgacttgatacwttttaattttgagctttctttgttccttttgcctttctcccaccggtatctagcatataactattgccaatagaagtaataagctccagtttaatactgt

SEQ ID NO: 525629 - DNA, 201 bp, Homo sapiens
taccatacccaactcacacttgtatcctgatctatctgtcgagcagacattcttgcgcaaacagagtcggtggatggggtggtcaagaatcatgaaaaaartagaaatatgtaatgaggtctattagctctgtaaatacaaagccacttgtaatgaacatgaacatccaagtgtacagatcaccagaggctctgacggtgt

SEQ ID NO: 525630 - DNA, 201 bp, Homo sapiens
ttctttgttaggaacatctcaattccactgttttagttattttgaaatatacaatagagtactgtgaacttttattgtagcactattcaaaatgtttgttyttgattcttgttactgaaacaccaggggtttggttgaggtcccgctgcgcaccacacagaaagccaatcactgaaccgagtattaccaaggaagaaggcc

SEQ ID NO: 525631 - DNA, 201 bp, Homo sapiens
tcaaatccatctcccttacagattcaggccagggatttatatagcagggaggaaatgtaacaatgtttaagaaaacaagaactagggaggggcaaggaagyagtcatggtgaatgagtgcagtgttgtggtgagtttcagtcctttttttgaggggcctgaaggttatttcctgaggaaggaactcagataaaacaaaagt

SEQ ID NO: 525632 - DNA, 201 bp, Homo sapiens
gtcacttcaccaaagatgatatgtatggtacgtaaacaaatgaaaagttgctcaacatcagtatcatttgggaatgcaagttaaaaccacaagaaaacackattacaaaactattaaaatggctaaaatggctagtgttttttaatctaacaataccaagtactgaaaaagatatgtgtattactccattctcacactgct

SEQ ID NO: 525633 - DNA, 201 bp, Homo sapiens
gcagggaggaaatgtaacaatgtttaagaaaacaagaactagggaggggcaaggaagtagtcatggtgaatgagtgcagtgttgtggtgagtttcagtcctttttttgaggggcctgaaggttatttcctgaggaaggaactcagataaaacaaaagtttcaaactttaagaccagaagggttagtttctatgtttatcaa

SEQ ID NO: 525634 - DNA, 201 bp, Homo sapiens
tgatctagtgagtttcagttctttgatactttttttgagaggcctgaaggtggttcatcaggagggaactcagataaaacaaattgtaaagttcaagctcyaagaccagaagggtcaattttctatgtttataaaaaaaaaaaatctgtgggactattgggtttcatatggagcaactggaatgctcatatatttctggtg

SEQ ID NO: 525635 - DNA, 201 bp, Homo sapiens
actcctgttatttaataaaagtacttcagtttggatgataaattattatatggtcatctgattgtaagcaatatatcatatccaaaatctatattcaagctcaatcaaagtaattttaattactcattggtttcttaattatgcttgttaatttctcagaatcaatgatgtcagacccaaaaacatttgagagaaagattc

SEQ ID NO: 525636 - DNA, 201 bp, Homo sapiens
ttttgagaggcctgaaggtggttcatcaggagggaactcagataaaacaaattgtaaagttcaagctccaagaccagaagggtcaattttctatgtttataaaaaaaaaaaatctgtgggactattgggtttcatatggagcaactggaatgctcatatatttctggtgagaatgcaaagtggtacagccactttggaaaa

SEQ ID NO: 525637 - DNA, 201 bp, Homo sapiens
aaacaatgatggaaggcatgtatacagtgatgggaagtttcactggaattaagctccatcacccaatttgaagatcagcttccagagttttgttaacactmaatgtgaaaaataattccttctgcttcctgccactgcagtcctgcactttttagtgtccagagaaaggtagcgaaaaaacaaaaacaaaactgctaattt

SEQ ID NO: 525638 - DNA, 201 bp, Homo sapiens
aagttcaagctccaagaccagaagggtcaattttctatgtttataaaaaaaaaaaatctgtgggactattgggtttcatatggagcaactggaatgctcawatatttctggtgagaatgcaaagtggtacagccactttggaaaacagtttggatgtttcttataagctccacttaccatacaacctagcagttttactgc

SEQ ID NO: 525639 - DNA, 201 bp, Homo sapiens
ctcctgttatttaataaaagtacttcagtttggatgataaattattatatggtcatctgattgtaagcaatatatcatatccaaaatctatattcaagctcaatcaaagtaattttaattactcattggtttcttaattatgcttgttaatttctcagaatcaatgatgtcagacccaaaaacatttgagagaaagattca

SEQ ID NO: 525640 - DNA, 201 bp, Homo sapiens
tgtctgttcatgcaccagtgtcacactttttattgctgaagttttatatacttcatttttttcttttatatatatataaaatatataatatatattatatktaattatatatacaataatgttatatataatataacatgtaatatatcgtttgcaaatactttttcctaatccacaggctgccatttcattttggtgatt

SEQ ID NO: 525641 - DNA, 201 bp, Homo sapiens
agagtcattatatatttcttatcttctagggacttcaacatttgcataacaacaaaactatccacagagatgtgaaaggcaataacattctattgaccackgaaggtggagtgaaactagtagattttggtaagttttgtttaaaatgcatgagttttaactccataatgaactagtatgatatgatttgatctttttcga

SEQ ID NO: 525642 - DNA, 201 bp, Homo sapiens
taacctgaggacctgctttcagttctttcctgcattagcccttcctctttccttccctcgattatggatagattaaccaatagagcaaaactctagcaggmgacatagtgtccctcaaggaaaaacaatgatggaaggcatgtatacagtgatgggaagtttcactggaattaagctccatcacccaatttgaagatcagc

SEQ ID NO: 525643 - DNA, 201 bp, Homo sapiens
tcctgttatttaataaaagtacttcagtttggatgataaattattatatggtcatctgattgtaagcaatatatcatatccaaaatctatattcaagctcaatcaaagtaattttaattactcattggtttcttaattatgcttgttaatttctcagaatcaatgatgtcagacccaaaaacatttgagagaaagattcat

SEQ ID NO: 525644 - DNA, 201 bp, Homo sapiens
atttccaggttctctattttgttccattggtctatgtgtctatttttatacgagtaccatgctgttttggtgactatggccttatactgtagtttgaaatcaagtagtgtgatgcctcaagattcgttccttttgcttagtcttgctttggctatgtgggctctgttttggttgcatatgaattttagaattgttttttcc

SEQ ID NO: 525645 - DNA, 201 bp, Homo sapiens
cctgttatttaataaaagtacttcagtttggatgataaattattatatggtcatctgattgtaagcaatatatcatatccaaaatctatattcaagctcaatcaaagtaattttaattactcattggtttcttaattatgcttgttaatttctcagaatcaatgatgtcagacccaaaaacatttgagagaaagattcata

SEQ ID NO: 525646 - DNA, 201 bp, Homo sapiens
tttcctggttttggtattagggtgatgctggttttatagaatgaattagggacagttccttctttctctatcttgtggaatagtgtcaaaaaggttagtamcaattcttctttaatgtctggtagaattctgctgtgaatccatctggtcctggactttttttttttttttggtaattttaaaattacaatttcaatcttg

SEQ ID NO: 525647 - DNA, 201 bp, Homo sapiens
tccctgctttcttctttttgctcaagatagctttgactatttggggtcttctgtggttctatacaaattttaggatttttttcctatatttgtgaagatgycattggaattttgatagagattccattgaatctgtagattgctgtgggtagtatgagcattttaccaatattaattattctgatccatgaacacggaata

SEQ ID NO: 525648 - DNA, 201 bp, Homo sapiens
agaattctgctgtgaatccatctggtcctggactttttttttttttttggtaattttaaaattacaatttcaatcttgctgcttgttattggtctgttcaragtatttgattcttcctgatttaagctacaagggttgtatttttccaggaatttattcatctcttctaggttttctagtttatgtgtgtaaaggtgttca

SEQ ID NO: 525649 - DNA, 201 bp, Homo sapiens
ctatatgcccacgaaaatattgcacgcttatgattccattcctcttgaaagccattaatagatcttactttaagaatctctgaactagattatttgtaagrtccctcctgcttctaacacttttttatgcaatgagttaaatatttatctctgtgggatcctgtggggcaaagagattgtaaaaggataataatcttgact

SEQ ID NO: 525650 - DNA, 201 bp, Homo sapiens
ttctggtctgagagagtgcttggtataatataacttcaattttcttaaatttattgaagctcgttttatagcctatcatatggtctatcttggagaaagtyccatgcactgttgaatagaatgtatattctgcggttgttggatgaaatgttctgtatatatctgttaagtccatttgttccaaggtatagtttaaatcca

SEQ ID NO: 525651 - DNA, 201 bp, Homo sapiens
ctacttgttcaattattttgctgagactttccacagcatttcacatctctaaaagtgtatccaaagtttcctgaattttttattgctttttctttaagctrtctatttccttgaatatttctcccttcacttcttgtatcatttttcagatttccttgtattgagcttcacctttctctgttccctccctgattagcttaa

SEQ ID NO: 525652 - DNA, 201 bp, Homo sapiens
gtattattataatcaacatgtgtttgcatgggaacaggtaagtctaagtacttactataaatatgcatgcatgcatgtattataggcagacttgtacaaakgaagcaggaccttaaccatagatttaatgccttaaacattttagaaagacaaaagatttttattatctccacgtccatagtaaaaacaaacaaaaacaaa

SEQ ID NO: 525653 - DNA, 201 bp, Homo sapiens
caatgctttatacttttcaatgtatagatcttttacctccttgattaaatttattcctaagtattttttgtagctactgtaagtgagattgttttcttgattttttttttgatagttcattgttctcatggactttaaatgaatgaaagctggtgacaggcaatcagtgattagagaatggcactagaggaaaagaggaca

SEQ ID NO: 525654 - DNA, 201 bp, Homo sapiens
tctgcatggctcactgtcttccttcaggtctctccttatatatcaccttgtcagagaggcctttccaaccaccctgtatcaaattgcctgtacacacatgmacacacacacacacacaccactctttccccattacccagctttacttttctgtgtagcctctcaccccctggtgttttcaagttgtctgtgggtctcctg

SEQ ID NO: 525655 - DNA, 201 bp, Homo sapiens
aataactaacctcttgaattctttctcaggtaaatctgggttttttttttttttcagttcagatccattgctggtgaactagtgtaatttttttggggggrggcggggcgggggtgggtgttgaagagccttgttttgtcatattaccagggttggttttctggttcctttttatttgggtaggctctatcagagggaaag

SEQ ID NO: 525656 - DNA, 201 bp, Homo sapiens
aactaacctcttgaattctttctcaggtaaatctgggttttttttttttttcagttcagatccattgctggtgaactagtgtaatttttttggggggaggyggggcgggggtgggtgttgaagagccttgttttgtcatattaccagggttggttttctggttcctttttatttgggtaggctctatcagagggaaagtct

SEQ ID NO: 525657 - DNA, 201 bp, Homo sapiens
aagtgaatgagtagttgcagagctgatgttacatgttttttactatcagtgtgtctgtttttctaatccttcgtccagattccagatgttctgtttattaytgtttactttttaaattgtagttgaccacaaataatttttaagaaggagaaattattttattttattgcagaatacagtctcagagcaacttgagaagtg

SEQ ID NO: 525658 - DNA, 201 bp, Homo sapiens
tttggtggtttaatgctctatttttgtgctggttggcctcctgccaggaggtggcactttccagaaagtatcagctgtggtagtatggggtggaaccggcrgtgggtggggccctagaattcccaagattatatgcccttccccccccccccgcccccgctaccagggtgggtagggaaggaccgtcaggcgggggcaggg

SEQ ID NO: 525659 - DNA, 201 bp, Homo sapiens
ctgatacacctgttgtaatttctctactttcattttttattttacttatcttagtcatctctcttattttcttagactagttaagggtttgtcaatcttattttttcaaaaatgaaactcattttattgattctttttatagtttttcctttctctatttgatttatttttgctcagattttgattttttttcctttcttc

SEQ ID NO: 525660 - DNA, 201 bp, Homo sapiens
tgataaattaattgtgtgtgaatgtggttctgtagatgtcagcaaacttcttaatctaatctctttgtcttgttttagattaatgttaattggggataggwatatatatattttcagattcctacccttatcacatcttatcttgtttttacttatgtccttgataaggatttaccagatgcaaaaacgaggtgtttggta

SEQ ID NO: 525661 - DNA, 201 bp, Homo sapiens
agcactttgggaggccaaggcgggtggatcacgcggtcaggagattgagaccatcctggctaacatggtgaaaccccatctctactaaaaatacaaaaaaktagccgggcgtggtggtgggtgcttgtagccccagctactcgggaggctgagggaggagaatggcgtgaacccaggaggcggagctggcagtgaaccgag

SEQ ID NO: 525662 - DNA, 201 bp, Homo sapiens
tgagggaggagaatggcgtgaacccaggaggcggagctggcagtgaaccgagatcatgccacttcactccagctggggtgacagagcgagactccatctcaaaaaaaaaaaaatggaaggaatgattattaaacacatatggctttcaactgtggtaccacaccgttttaatccactttgggtaagatatttaaaccttaa

SEQ ID NO: 525663 - DNA, 201 bp, Homo sapiens
ccgccacaaaaacagtcagtggattttgacacaggcaaatagaaatgacaaatgcattagtttagaccttaacctcgtgtactttctgtataaaacagacraaagttgttttcaactttgcagttgccatttaaattgtaatatgctgtgagcatgatgtgtctaacagtaaaataattctaggtctactcacttctccca

SEQ ID NO: 525664 - DNA, 201 bp, Homo sapiens
tgaggcaggagaatggcatgaacctgggaggcagagcttgcagtgagccaagatcgtgccactgcactccagcctgggcaacacagcaagactctgtctcaaaaaaaaaaaaatgcaaaccttcattattagctttctaagtctgattgttggccacttcgttgaagattcaaaggtttcacaggtgagttaagctatacc

SEQ ID NO: 525665 - DNA, 201 bp, Homo sapiens
catatggaaaagaattcaaaggctcctctgttctactaaaaataagcttaataataataattccttttctgaaagtatttcattggccccctaagtttgcwgataaaggctgtggagggggtgaaggaaaggagcagggcaagaggggatgcaggctgctccggaagtttgggtgtgatgagttgaggacccagagcacag

SEQ ID NO: 525666 - DNA, 201 bp, Homo sapiens
gtggatagatatgaaagggcctgagggttctcttccagtctgtccccagccatagtcactggttggctgtactcaaggaaagaatgatgccaatgtttctktggtgtgtttcagcaacttggtagtatatacagcatactcgctgcaatcttgaatgttggcaacattgaattttcttctgtggcaactgaacaccagatt

SEQ ID NO: 525667 - DNA, 201 bp, Homo sapiens
aggccactgccaaaagtggcaggaaggggagtatccacaacaatttagtgtctcctgccccaacccctatggtggcatccaaagctttgtggtgggatgasagttttataccaatggaaagagaagtaacaatagaaaaaagtgaagacagcaagtccttctggttgagacataattaatttaaccactgtaaaaggaatc

SEQ ID NO: 525668 - DNA, 201 bp, Homo sapiens
ttcctgttgcaaacgttctgtccacagtcttaaccacatttattcattgagttttataacatatccaagcagttgtgcattctgaaatattagaagaaacytaaataggttatctatatttcattgattaaaatgactccctctcctcaactgtgatttgcccaaggttataggacagtgaaatgaaaccaggaccagagt

SEQ ID NO: 525669 - DNA, 201 bp, Homo sapiens
gtaatttgaaaagtgtgttttcctggaagcattgtaacacctggagatttcccagacctacctgtttatctcttaggaagtcccagagcaccataggaacyagactgtgccctgagtagaaccaagaattaacatgggcaaggatgcacccttatgtgtatgtcatgtgtgggtgttaaaatctagcacagaaattaatcc

SEQ ID NO: 525670 - DNA, 201 bp, Homo sapiens
atgtagatgatttagcaaccctagaaattttggatgaggtaagaatttcagtttaattaaacttagacattccagatgttttgttaatttatagaagacaygggtattggtagaaggggaaggaatatatagattatgatggttattaagaatcttaacactcactctgcccatgtctcccatctgtaagtctcatgcttt

SEQ ID NO: 525671 - DNA, 201 bp, Homo sapiens
acattcatgtttctaaaaatattaagaatatctaataacttataccatatttttatgtttcttgccattcagattcaaatgagtaatataaatggatatgwcaaatgcattttgaaatgataaaagtttgcaagagccaatagaagctatttaataatcagcactgggagagaggataatgagaaggaaaaaaataaaaga

SEQ ID NO: 525672 - DNA, 201 bp, Homo sapiens
atttagcataatttagtgaaactatatttgacatcacataaacaaccactcgcttatgcagctgtattactctgccagccagtgtgatttgggttatgttwtaatatgcagtaacctaagtttaaccagctgagaaaagttgagaaaaatgatcaagaagagacataggactcatgttggatagtatcatatttttacatt

SEQ ID NO: 525673 - DNA, 201 bp, Homo sapiens
acactggaaagacagattgtgtaatgttatggaaggccttgaatgagtttcctataattagtcattgaacaactatttattgagtgcctactgcatgccakgcactgttaacagctgctggggacacagcagtgaacaatacaggtactctgtcttactagtaccataaaatctagattggcattatattaattacaatct

SEQ ID NO: 525674 - DNA, 201 bp, Homo sapiens
tcatatcagtgaaaatattcgctaatttcccatgggtttgtgtgtgccatttgatatcctcaatcaactgtagatgaaactgtacttcttatctccaggtwtttaaacctttgagatgtttccattaattggaaaaacaatcatctttgataactttcctgatccttctgatacatgggaaatcactgagacaattggcaa

SEQ ID NO: 525675 - DNA, 201 bp, Homo sapiens
tgaattgtatggcaagagcatgtttcattttataagaaactgtcaaactgtcttccaaactggctgtaccatttttcattcccaccagcaatgaatgattrctgtagctttataggaagtcttgaaattgcacagtgtcagtcctccagctttttctccttcaatattggttgcctattctggatcttttgactttccata

SEQ ID NO: 525676 - DNA, 201 bp, Homo sapiens
cttgcttgatgcattgagaaaaaactacacacatctggccacagaagtcttctgtgttaattgtggtgtgagagcagaggaaaaactgtattttcaacacwggtggcccatgttgtacaactccaggaggctctattcatatcatattccacatcagtgccctcaccctggagcacataaacggaacattaatggtgcctc

SEQ ID NO: 525677 - DNA, 201 bp, Homo sapiens
gctataaatatcgatgtacaggtttttgtgtggttttctactcatttgggtagaaagaagcacagtagctgaattgtatggcaagagcatgtttcattttrtaagaaactgtcaaactgtcttccaaactggctgtaccatttttcattcccaccagcaatgaatgattgctgtagctttataggaagtcttgaaattgca

SEQ ID NO: 525678 - DNA, 201 bp, Homo sapiens
tctgtaaataccaattccacttcctcctttctctttctaggcatttaaccttcataaaatcactttatgtgttagcactgttattttctccagtgtgaaaygaagagttttaactggatgatctctaaaatacatgaatttccagggtaatcaatggtgtatgaagtaataaaagaaatatcataatgggttagttccaag

SEQ ID NO: 525679 - DNA, 201 bp, Homo sapiens
gaaggtggacattgaacaagcttaagatttcagtgaggctatgaaaagcttttctatgagaaggtgagaaaaagcaaagttacacctataaacatcgtctmtcagggcttcagtgagataactggactgacaagaggagaaagtccatttggggggaaatgggagataaaactgaaattgctaagattgtaaataacctgg

SEQ ID NO: 525680 - DNA, 201 bp, Homo sapiens
ccccactgccacagtgacacagcagcactcccctatgccctggagaacccagaggatgtgttgaaacccagagaatcagttagaaataagtttcccacctygcaggcagaaaatgaagctcacacttgacctccaagttagccagtcttctctagttcattcccttctgtctagtgatttcttttcagtttccaaagaggg

SEQ ID NO: 525681 - DNA, 201 bp, Homo sapiens
agaagttcaagatcaaggtgtcagcaaggttgttttcctctgaggcctttttccttgcctttagatggtcatcttctcatggtcttctatttgtgtgtgtstgtcttttttttattattattatactctaaattttagggtacatgtgcacaacgtgcaggtttgttacatatatatacatgtgccatgttggtgtgctgc

SEQ ID NO: 525682 - DNA, 201 bp, Homo sapiens
tatggaaatttttcagttgttcttttaaatattgatcctctctcattcttttcactttttatttctgagacataaatgttggaacctcgtattttacctcrcatgtcttgcaatttctctgtcatgtttgtcacccatttatcaatctctgctatattctgaatgaattcttcaaaattgtttcccaattcactaattttc

SEQ ID NO: 525683 - DNA, 201 bp, Homo sapiens
ttatgggacaaatccccagtgatgaagttactgagttacaagatgtttttggttttaatagattggtttcctaaaaggctctagaaattaacatttccttyaacaatttgggagcatacacttgtcctgacatcctgtccatcagtgatatccttctttttttttttttttttttagatggagtcttgctgtgtcacccag

SEQ ID NO: 525684 - DNA, 201 bp, Homo sapiens
gccccgagaaggaggaggagagagagccagcagccaacccctacgacttcaggaggctcctgcgcaaaacctcccagcgccggcgcctcgtccagcagtcstaaccgttcaacgaggcagtcaccgccgtcggaaggcgctggagcctgcggggcagcaggggccaagcaggcactctggggctggcaccagcaggcactg

SEQ ID NO: 525685 - DNA, 201 bp, Homo sapiens
agagattgtcttttccccactgtatggtcttggcacctgtattagaccattctcacactgctctaaagaactacctgagactgggtaatttatgaagtaargaggtttaattgactcactgttcctcaggctgtccaggaagcatgactggggagacctcaggagacttaccatcatggtggaagggcgaaagggaagcaa

SEQ ID NO: 525686 - DNA, 201 bp, Homo sapiens
tgtaccatagaagatagggagccatctgaggttgttttaatcatcacaatgaccaaatcttttctaagtttttgacggctaataccaaaaacatcatagargatgaattcacaagagtggaagagtgagggcaccaaccagccaagtattgatccctctgctcctcaccatccactccctatcgttctccagtaacagtct

SEQ ID NO: 525687 - DNA, 201 bp, Homo sapiens
gggctgtgcaatcatcatcacaatcatcacaaacgtttttgctccccctcaaagaaacctagtactcattaacattcactcctcatctttgcctaaactcycctactctaagcaaccattaatctattttctgtctctgtggactggccttttctggttattctatttatttatttatttatttatttatttatttatttt

SEQ ID NO: 525688 - DNA, 201 bp, Homo sapiens
aatgctgagcctggccagcaaggactccatatgctcaggagcagcaagaacacccagagtgactaacagggtgccagccaccatctgcccagcaaagtggraaggagaccaatgtccagctaagtgaggactgagtaccagtggtgtctggctgaagcagacttgtccatgagcacttgtgagacatacttagggggactt

SEQ ID NO: 525689 - DNA, 201 bp, Homo sapiens
gcgtgatctcggctcaccacaacctccgcctcctgggttcaagcgattctcctgcctcagcctcctgaacagctgggattacaggcaggcaccaccaggcycggctaattttttttttttttttttttttttgtatttttagtagagacagggtttctccatgttggtcaggctagtatcgaattcccaacctcaggtcat

SEQ ID NO: 525690 - DNA, 201 bp, Homo sapiens
cttttcagttctccctaaaccttatttcgcttcctaacttaaaaaaagtatttttcgaagaaccctattcatttatttattcaacagctatatatttaacrtttaccgtattttctaggtacagagtaaggccaaatctattattagatttggaagtgaacaaaatagattaggtctctgctgtcagaattaacaatgaac

SEQ ID NO: 525691 - DNA, 201 bp, Homo sapiens
tgaaaagtacatatctctgtcatcttttgccatcctaaaatttacagaaataacagtaaatttatgagccttgacctatgtttcaggagatacgggttttrgtgcaatcctgctatcaattcactgtgtgatcttggacaaatcaaatgagagaatgtatgttaaatgatgtgaaaggaaaaaagtggtcatcatgtgtga

SEQ ID NO: 525692 - DNA, 201 bp, Homo sapiens
atttcgcttcctaacttaaaaaaagtatttttcgaagaaccctattcatttatttattcaacagctatatatttaacatttaccgtattttctaggtacaragtaaggccaaatctattattagatttggaagtgaacaaaatagattaggtctctgctgtcagaattaacaatgaacaaataaacatttgcccatttagt

SEQ ID NO: 525693 - DNA, 201 bp, Homo sapiens
catatctctgtcatcttttgccatcctaaaatttacagaaataacagtaaatttatgagccttgacctatgtttcaggagatacgggttttagtgcaatcytgctatcaattcactgtgtgatcttggacaaatcaaatgagagaatgtatgttaaatgatgtgaaaggaaaaaagtggtcatcatgtgtgagacattatt

SEQ ID NO: 525694 - DNA, 201 bp, Homo sapiens
cttgacctatgtttcaggagatacgggttttagtgcaatcctgctatcaattcactgtgtgatcttggacaaatcaaatgagagaatgtatgttaaatgaygtgaaaggaaaaaagtggtcatcatgtgtgagacattattatgtccaaggagcagttaacaaagtgaaacccgatcgtcttatttttaatgtatgctttc

SEQ ID NO: 525695 - DNA, 201 bp, Homo sapiens
tcatatagaagtcgtatgcgatagtttcaagcctgaaattggcctttagaaatgtttctttgggtcagctcagtactttaaaataattgatttacttaccrgtattttcaaattagtaaattttgtgtaagttcctggagtcctggcttctcctgaaaaaaatggaggaccaggcaagacagctcttgcaactgctcatgg

SEQ ID NO: 525696 - DNA, 201 bp, Homo sapiens
catccctctcatacatgttgtagtatgtgtcaagtttcctttctttttaaggctgaataatatttcttttcttttcttttctttcttactttcttttttcttttttttttttttagatggagtctctctctgtcgcacaggctgtaatgcagtggcatgagttcagatcactgcaatctctgcctcctgggttcaagtgat

SEQ ID NO: 525697 - DNA, 201 bp, Homo sapiens
ttagtgtacagaaaaacaacagatttttgcatgttgattttgtatcctgcagctttgctgaattcattaattagttctaacatttgtgtgtgtgtgtgtgtgtgtgtgtgtgtgtgtgtgtgtgtgtgtgtgattctttaggatttggtacatataagatcaaatagtctgtgaacagagataatttcaattctttctttc

SEQ ID NO: 525698 - DNA, 201 bp, Homo sapiens
tagtgtacagaaaaacaacagatttttgcatgttgattttgtatcctgcagctttgctgaattcattaattagttctaacatttgtgtgtgtgtgtgtgtgtgtgtgtgtgtgtgtgtgtgtgtgtgtgtgattctttaggatttggtacatataagatcaaatagtctgtgaacagagataatttcaattctttctttcc

SEQ ID NO: 525699 - DNA, 201 bp, Homo sapiens
agctttaatacagctaataactctgcttgccttctgctttaaatgtttatttatttatttatttatttatttttgagacagagtcttgctctgtcacccakgctgtagtgcagtggcgcgatctcgactcactgcaagctccgcctcccaggttctcaccattctcctgcctcagcctccctagtagctggggctccaggc

SEQ ID NO: 525700 - DNA, 201 bp, Homo sapiens
gtgtacagaaaaacaacagatttttgcatgttgattttgtatcctgcagctttgctgaattcattaattagttctaacatttgtgtgtgtgtgtgtgtgtgtgtgtgtgtgtgtgtgtgtgtgtgtgtgattctttaggatttggtacatataagatcaaatagtctgtgaacagagataatttcaattctttctttccag

SEQ ID NO: 525701 - DNA, 201 bp, Homo sapiens
acaggtgaattgtcctgattattgagttcatttgtttatttaatatttggtttccttagtctagggttcagaattttagtttgccttctcatcttgagtgrgaggttttttattttggtttttctttccttctgcattctatttggagggttttgcctttgccattatctggtttcaagattccccagggcccattgtgat

SEQ ID NO: 525702 - DNA, 201 bp, Homo sapiens
ccttctagcttgcaagatttctgctgggaaattcactgataatcttgagagtcccttgtatgtgataaattgcttttctcttgctgcttttaagtttccctttttttttttttgtctttgtcttttcacagcttgattataatgtcttggcatgggtttctttagatttgccttgcaggccagttgtggtggctcacaccg

SEQ ID NO: 525703 - DNA, 201 bp, Homo sapiens
caatctttttcccaggcaagggaccccacactcagccccattcttcccaccacacctcggtcaaggccttcattgtgaatgtgtgtttcagttcctttacyctccaggcctctttttcccgtttttggtgccagactttgaatcagcctatagtttctgccctcttacctggtgcttttgtttgccctgttaggtcgtctc

SEQ ID NO: 525704 - DNA, 201 bp, Homo sapiens
gtaagatgtgacttgctccccattgccttccaccatgattgtgaggcctccccagccgtgtggaaccataagtcctttaaacctttcttttgtaaattgtscagtctcgtgtatgtctttatcagcagtgtgaaaatggactaatacaggcatgtaggttgatttcatgtttttgctattgtgaatagtgttgcaatgaac

SEQ ID NO: 525705 - DNA, 201 bp, Homo sapiens
ttggacaaatcaaatgagagaatgtatgttaaatgatgtgaaaggaaaaaagtggtcatcatgtgtgagacattattatgtccaaggagcagttaacaaastgaaacccgatcgtcttatttttaatgtatgctttcatttaaatacataatggaattttgaaaccttacattctgctttggaagtggaatgcagaatctt

SEQ ID NO: 525706 - DNA, 201 bp, Homo sapiens
tgctttggaagtggaatgcagaatcttttaaattactttatgtcatatcatatttctgggctgttttgtgtcaggctcttattttacatagttatacattyagatatatgtgcaatatgtgtgtaacatgtatgtaataatattttggtggaatgaaatggtgtttttatttatactttgctttaaaaattggagctatat

SEQ ID NO: 525707 - DNA, 201 bp, Homo sapiens
gtcatatcatatttctgggctgttttgtgtcaggctcttattttacatagttatacattcagatatatgtgcaatatgtgtgtaacatgtatgtaataatrttttggtggaatgaaatggtgtttttatttatactttgctttaaaaattggagctatatttgtaaataattcaggacttaaataaaaacaaaaagcccta

SEQ ID NO: 525708 - DNA, 201 bp, Homo sapiens
ctcctcacatttttgcaatggctgacttaggatatcaatctatgataacatataattcagatcaggtaagaagagtctcccattcttagaaatttacctcktagttacttaaatgtcacttaattttgaggataaggtcttctcacagttttcttttctatgtatagtgcattgttatttctggagaaagtggtgctggaa

SEQ ID NO: 525709 - DNA, 201 bp, Homo sapiens
gctatttccattgcagtttcctcctgttactacagtttagttcagcaagcattgattgcatttctctgatgtccccagcacttaacaggactctataggakacataaataagtggctgacatggtcctctccattgtggagaaagggaaatgtatttatggagcaattactctatgtcaggcactgcactaagcaccttac

SEQ ID NO: 525710 - DNA, 201 bp, Homo sapiens
tactgttattggaaagctggaaagaatgtgtgtccagttcatgtggtctgtaattaagctagaccagatttctgtgaccagttaagctagacccattcctstgttttaatgttctgtaagaaaggagacacccgaaacttgtttggcgattcagactagtgttttacagggcaaatttaattttttgtaggtttctttgaa

SEQ ID NO: 525711 - DNA, 201 bp, Homo sapiens
ttcgccctcctgcagcacccagagaaactctgggcaccacccattggctaccggggtagggaaggggtggtataggtgattcagaactgtttttttttttytctctctctctctctctcttcagtgcctccttcagcaatatgaagttaaaaccagatactatgggtgctcaccagattttcggttcttaagaaggtgttt

SEQ ID NO: 525712 - DNA, 201 bp, Homo sapiens
aattttggtacatatatgtgtataattgttatgtctacttggcaaattgaccattttatcattttcccattttcttctttgtctcttgtaaaagtttatgrcttgaagtcttttgtagatagtatatagttgcatcagatgtgttcctttataaaattcattctgccaatctgttttttgattggagagtttaatccattt

SEQ ID NO: 525713 - DNA, 201 bp, Homo sapiens
cgccctcctgcagcacccagagaaactctgggcaccacccattggctaccggggtagggaaggggtggtataggtgattcagaactgtttttttttttctctctctctctctctctcttcagtgcctccttcagcaatatgaagttaaaaccagatactatgggtgctcaccagattttcggttcttaagaaggtgttttt

SEQ ID NO: 525714 - DNA, 201 bp, Homo sapiens
attatcaggaaatgggggtggagagaggggttcactgcaaagagtcatgagacaatttggggtggtgaaggaattatcctatatgtagactgcgatggggrttacatgatggcacatgtaaaaactctcagagctgtacagtataaagggtgactcttactgtatgtaaattataccttaattgttttcaaaaaaggaagc

SEQ ID NO: 525715 - DNA, 201 bp, Homo sapiens
ggcgaggctggaagccggatctcagaaacctgggaaggagtcgatcagaacagaattctgcatgtagcatgacgtgcttggcagttttaaagaaaaatgtragatggcaagtattcagagcacaaggggggaaggttgtcaggtgagaactttatcagaccttggtgcaagggacagggtgggccctggagaggaacatga

SEQ ID NO: 525716 - DNA, 201 bp, Homo sapiens
aaatgacttgttatactatttatgtaacattgatatcataaaaacagttctgataagttcctgaccagccatgaatgttgtgcctagttttggccttgccwtcttaagaaacatcaaaaaattgaaggaaagccacaaagactagtaaatattaaaaagaaatgactccacaataaaagaccaaataaactgagattattt

SEQ ID NO: 525717 - DNA, 201 bp, Homo sapiens
gcaagagaaaaaagacacattacatttaggggtcatagataagaatggccactggtttgtcatcaaatgcaatggaatgacatctttgaaggactgaaagraaagtcccttcaattttgaattctgtattcagtgaaaatgttattcataaataaagacaaaattaaaacagacatttatgtcaaatgaaaaaatgaagaa

SEQ ID NO: 525718 - DNA, 201 bp, Homo sapiens
ccaggatgcggacacgatagaggcggggggcagaatggaaagagaaaccagaatagagcagccctgaaatcagggtaaaagactggaaagaaggccgggcrcggtggctcaagcctgtaatcccagaactttggtaggctgaggcgggcggatcacgaggtcaggagatcgagaccatcctggctaacgtggtgaaaccct

SEQ ID NO: 525719 - DNA, 201 bp, Homo sapiens
caatggttgaactagtttacagtcccaccaacagtgtaaaagtgttcctatttctccacatcctctccagcacctgttgtttcctgactttttaatgatcrccattctaactggtgtgagatggtatctcattgtggttttgatttgcatttctctgatggccagtgatgatgagcattttttcttgtgactgctggctgc

SEQ ID NO: 525720 - DNA, 201 bp, Homo sapiens
gcataaattcattactcaaattgagggcaaagatgtgatgctacaaaaacaactaacggaattcattggcatccatcaatgcatgggaggcacagaaaagsccaggtaatcaaataatatcttgattccaaaatccagagattattgaaagattttgaacagtttaacaatgtattagtttttaaggtgaataaaatttgg

SEQ ID NO: 525721 - DNA, 201 bp, Homo sapiens
gaagaatatcaacattttgctgttttacatatttgaatgcataaactaagatagcctgaaggaaaatgccacatgctgtctgtagataataaagtacaatrgataccaaagcatcactgtcttccttggtctccttagggcgacactggagaagccacacgtcatgccagagagacaaccaacatgaaaacacaaacggtt

SEQ ID NO: 525722 - DNA, 201 bp, Homo sapiens
aagaaaaatggccaaaaagcagcagtcaaaattcttgatccaattcacgtaagtcatattttttccttctaattagctttatttttatctgtatgaaacayttaaaaagactgtattttatcttgatttattcatcacaatagcagtctaaaacaggttacaatttgaagataaatgtaaaagagaagtctacttatttgc

SEQ ID NO: 525723 - DNA, 201 bp, Homo sapiens
ttgaattctgcttggaactccttattctaattatctcagaagtatttcaaacatttttgtgaaggtagagatccaagctattaaattctagtctcagcctmctttcccctcacccttctttgttccacgtagtcagatcattagagaaataaatgccctctttttagcagaaggtcaggacttctgtcctgcctgatgaac

SEQ ID NO: 525724 - DNA, 201 bp, Homo sapiens
aggaaattatgtactcttgatcatccatgaagtaaattctgtaatttgcatttttccaatggaaaggagtaaacaaacagtaaagatcaaatatattaggmtattttctggtatcttatcattgaatttaataaacagattcctagaggattttcagtatcatatgtatctaaaacttttttccactatgagcagtaatca

SEQ ID NO: 525725 - DNA, 201 bp, Homo sapiens
ttgttatactatttatgtaacattgatatcataaaaacagttctgataagttcctgaccagccatgaatgttgtgcctagttttggccttgccttcttaakaaacatcaaaaaattgaaggaaagccacaaagactagtaaatattaaaaagaaatgactccacaataaaagaccaaataaactgagattatttttcccac

SEQ ID NO: 525726 - DNA, 201 bp, Homo sapiens
ttcctgaccagccatgaatgttgtgcctagttttggccttgccttcttaagaaacatcaaaaaattgaaggaaagccacaaagactagtaaatattaaaargaaatgactccacaataaaagaccaaataaactgagattatttttcccacagaaaaattaaaagggatttcattatatttatttattcatctgtattttg

SEQ ID NO: 525727 - DNA, 201 bp, Homo sapiens
ttttctccacagacgtgaacgtattcacacgaagaaagggaacttcaaccgacctctaatatccaatctgaaggatgtagatgatttagcaaccctagaarttttggatgaggtaagaatttcagtttaattaaacttagacattccagatgttttgttaatttatagaagacacgggtattggtagaaggggaaggaata

SEQ ID NO: 525728 - DNA, 201 bp, Homo sapiens
tcataatagtccctatgatcctttttatttctgatacacctgttgtaatttctctactttcattttttattttacttatcttagtcatctctcttattttyttagactagttaagggtttgtcaatcttattttttcaaaaatgaaactcattttattgattctttttatagtttttcctttctctatttgatttattttt

SEQ ID NO: 525729 - DNA, 201 bp, Homo sapiens
aaactgagagggctactaagtcgggtaacaggtgggtagcatatacaacatggatacattgggcaaaggaaggattcactttccaggtgggacagagtggsgtggcacagatttaatcacactactcagagtggcatgcaatttaaaacttagaaattatttatttctggaatttttcatttaatagttttagaccatggt

SEQ ID NO: 525730 - DNA, 201 bp, Homo sapiens
gaaatttatttttgttgtgtattatagtattccctgatggatttgttgtctaaaatggtggtgggccaacctcattttgtccgttgcatcaaaccaaatartgagcgtcaggcaagaaaatatgacaaagagaaagttctgctacagcttcggtacacaggaattctggaaacagcaagaattcgaagactaggattctcc

SEQ ID NO: 525731 - DNA, 201 bp, Homo sapiens
actgagtcagaaactctgcgattagggcccacaacctgtgttataaaccctcagccaggtgcagtggcccacacctgtaatcccagcactttgggaggccracacaggtggatcacctgaggtcaggagttcgagaccagcctggccaacatggcaaaaccctgtctctactttaaaaatataaaaaattagccaggcatg

SEQ ID NO: 525732 - DNA, 201 bp, Homo sapiens
tgaaaaatacataaaaataaaattacacagaacttaaagttatctaaagttatctaaagaaacaatctattagtctgctcgggctgccataacaaaaataycacaggctgcatgacttaaacaacagaaatttatttttttgacagttttggaggcttacagatcaaagtgctctaagtggggttagcatctgggaggcct

SEQ ID NO: 525733 - DNA, 201 bp, Homo sapiens
tacaaactacatcaaaaataattttatctgttaattaaagttgccttaatggtttataagcaaacttttaatagctaaatttctagttactgcctctacawttttataagtaaatctgtattttttagaactatactataaataaaatgttcattaaaacagattttcctccatttactgtgactaatgggagcatttata

SEQ ID NO: 525734 - DNA, 201 bp, Homo sapiens
atgcagaaaaagcatttgacaaaatccagcatccctttatgattaaagccctcaggaaaattggcatagaaaggaaataccttaaggtaataaaaaccatytacaacaaacccacagccaacattatactgaacagggaaaagttgaaagcattccccctgagaactgaaacaagacagggatgcccactttcaccacttc

SEQ ID NO: 525735 - DNA, 201 bp, Homo sapiens
acagggtccctccccccaacattaggaattataattcaacatgagatttgggtcggggcacagagccatatcagcacctttgtgaaaaaagagctcactgyggatttatggacttatcgctgggttctctattctgtcccattggtccatgtgtctgtttttatgctagtaccctgctgtttgggttactatgcctctgta

SEQ ID NO: 525736 - DNA, 201 bp, Homo sapiens
atagatattggaagcttgaaaggtagacatttttggacgactgctatctaaaatgagctaggaagtctcctgcggaggggtaaataattaatgagtaactycagggtccagtggagggaaaattctaatctttcatgtgtgagttctgtgaccagaaatctgcaacactggagctgaagagaagtcaatggctggctggat

SEQ ID NO: 525737 - DNA, 201 bp, Homo sapiens
gaagctttaaaacaaattatataaagatagttcttgaaggaaattatgtactcttgatcatccatgaagtaaattctgtaatttgcatttttccaatggaraggagtaaacaaacagtaaagatcaaatatattaggctattttctggtatcttatcattgaatttaataaacagattcctagaggattttcagtatcata

SEQ ID NO: 525738 - DNA, 201 bp, Homo sapiens
cagaaatttagaggaagctttaaaacaaattatataaagatagttcttgaaggaaattatgtactcttgatcatccatgaagtaaattctgtaatttgcayttttccaatggaaaggagtaaacaaacagtaaagatcaaatatattaggctattttctggtatcttatcattgaatttaataaacagattcctagaggat

SEQ ID NO: 525739 - DNA, 201 bp, Homo sapiens
caaacccttcagcctcatcaccttgtaacagattcaatcacacagaaatttagaggaagctttaaaacaaattatataaagatagttcttgaaggaaattrtgtactcttgatcatccatgaagtaaattctgtaatttgcatttttccaatggaaaggagtaaacaaacagtaaagatcaaatatattaggctattttct

SEQ ID NO: 525740 - DNA, 201 bp, Homo sapiens
gaaacagtctggctgatgcagagacagttaaatatataacccataggattcagcagtttcctctctttgtacttacccaagagaaatgaaaacttatattyacatcaaaatctgtacgtgaatgttcatagcagttctacttataattgccaaaaacaattaaaatgcctttcagttttataaatgaataaacagtggttc

SEQ ID NO: 525741 - DNA, 201 bp, Homo sapiens
ttgtattcctgttaaattttgctgaatagtaattaaaaatgaccataccttgatcaccaatgacctaacactatctccaacaaaattaggaatgtaatgarttcaaacccttcagcctcatcaccttgtaacagattcaatcacacagaaatttagaggaagctttaaaacaaattatataaagatagttcttgaaggaaa

SEQ ID NO: 525742 - DNA, 201 bp, Homo sapiens
ttgaccattggatttagcaatgtaaaggtcaatagagtccttaacaaaagctgcttccacagagtgtcaagatgaaagcctgaagaaactaagtatatgcygagcatggtggctcacgcctataatccaagcacactgggaggccaaagtgggcagatcacttgaggtcagaagttcgagaccagcctggcccacatggtg

SEQ ID NO: 525743 - DNA, 201 bp, Homo sapiens
ttaaatgcgcctggtagattaggtaaaatgaggacttaaaattgaccattggatttagcaatgtaaaggtcaatagagtccttaacaaaagctgcttccayagagtgtcaagatgaaagcctgaagaaactaagtatatgccgagcatggtggctcacgcctataatccaagcacactgggaggccaaagtgggcagatca

SEQ ID NO: 525744 - DNA, 201 bp, Homo sapiens
aagatactcagacagagataccagtgagttaaggaagagaatcaagagagacttacaggaaaccaaggcaaaggtattcaagaacgcctttgttaaatgckcctggtagattaggtaaaatgaggacttaaaattgaccattggatttagcaatgtaaaggtcaatagagtccttaacaaaagctgcttccacagagtgtc

SEQ ID NO: 525745 - DNA, 201 bp, Homo sapiens
ttcacacgaagaaagggaacttcaaccgacctctaatatccaatctgaaggatgtagatgatttagcaaccctagaaattttggatgaggtaagaatttcrgtttaattaaacttagacattccagatgttttgttaatttatagaagacacgggtattggtagaaggggaaggaatatatagattatgatggttattaag

SEQ ID NO: 525746 - DNA, 201 bp, Homo sapiens
agagcccgtgtaggaatggtgcgaggagaagagtcatcaggaagatgcggtaacgtgcttaagagagtgtgcttagcataggatcaaggcgaccttccttycttgggcaatgtaggataaaagaaaaaaaccaagtacttttttttcctctgtgctctagataaccctcccattattggttccagttcttgtttacctatt

SEQ ID NO: 525747 - DNA, 201 bp, Homo sapiens
ccttttttttaattgtattttaagttcaggggtaaatgtgcagtttggttatataggtgaagctgtgtcatggaggtttgttgaacagattatttcatcaygcaggtattaagcccagtacccgttagttatgtttcctgatcgtctccctcctcgtactctccaccctccaataagctccagtgtctgttgtaaagtatt

SEQ ID NO: 525748 - DNA, 201 bp, Homo sapiens
tcaatgtccttacactgcttgacgcacaatgtatgaaacctgtttttcattttgtatgtctttttagttgtttgaggtgcgaaggttaatctagtcggtgktactttatctgacccagaagcaaaagtcattaattttgactttaacaattgccatcccttttcatatacaccaacagcatctatccatctaattccatgt

SEQ ID NO: 525749 - DNA, 201 bp, Homo sapiens
ataaggagctaccttaagatgataaggggctaccttagtaaatgcttgtatcactgttgctgaacatagagtaagctcataatgagtatctgttgttgatkatgatgatggtgaggaggaggaggatgacaatgacattgattgtgataattatagcatactgtatcaacaggtcctctataatgcaagtggattcttagc

SEQ ID NO: 525750 - DNA, 201 bp, Homo sapiens
agaaaagagagcaaaaacgccagatttttaggctcatggcttgacatcaaactgtgttttacaaacctctttggtcagtctcaagtagtttacttcctccrtaccagtggttctcaaaatgtggtcccctgcccaggaacatcagcatcacctgagaacttattagaaatgaaaattcttggatcccaccccaaacctact

SEQ ID NO: 525751 - DNA, 201 bp, Homo sapiens
catctttctgtcatttactttgggtgacatgtagagcctctttcttaccattaggtctgtgatgttccttctttctgactcactgattggcttaatttctyctcaaattggacaatactagatggaaaataaactgaccccaaagtggtggggaaaatcatttcatagcagtcagttgatttttagatcaaatgatccttc

SEQ ID NO: 525752 - DNA, 201 bp, Homo sapiens
gttgttcagtcaatttttcattgaattcttatgtctgtgtattgaaaaactaacagttaactcctgagagttaatatatcagaaatgaagactgtgttcartaacattactgcttgaaaggcagtattccatgtaatgaatgtttctgttggttgacaactcctatttcagacctttaacaagatttaatttggttttttg

SEQ ID NO: 525753 - DNA, 201 bp, Homo sapiens
taaggctatgatataaggaagtgaatgtagagaagaagataacttcaagaactgaaacttgggagacccccaaaatgtaacagaaagataaggaaaaaacmgaaaaagatactcagacagagataccagtgagttaaggaagagaatcaagagagacttacaggaaaccaaggcaaaggtattcaagaacgcctttgttaa

SEQ ID NO: 525754 - DNA, 201 bp, Homo sapiens
gactgagatgaagaatcataggaaggagtaggtttggagacagagtatttaggagtgtggtttgggatgtgtctgtctctccaagtgaaatatcaaataascatttagatgcagaagtctggagtagtagttatcagtgaatgagtggtgtgtaaggctatgatataaggaagtgaatgtagagaagaagataacttcaag

SEQ ID NO: 525755 - DNA, 201 bp, Homo sapiens
aatttgtatacagattgcatgagggctgtgagaaacagaaaagccaaggatgtctctaacatcctgaacaatcagaagaaaggagtcaccgttgactgagrtgaagaatcataggaaggagtaggtttggagacagagtatttaggagtgtggtttgggatgtgtctgtctctccaagtgaaatatcaaataagcatttag

SEQ ID NO: 525756 - DNA, 201 bp, Homo sapiens
tgagaagaaatatagtggggggatggtggggagaaatgtctagccctagatagaatttgatgatagagctgatggaatttgtatacagattgcatgagggstgtgagaaacagaaaagccaaggatgtctctaacatcctgaacaatcagaagaaaggagtcaccgttgactgagatgaagaatcataggaaggagtaggt

SEQ ID NO: 525757 - DNA, 201 bp, Homo sapiens
tcctaaaggatgtgtagaattgtgctgaggagtgtaaaaggtgacatttaaggtggattgtgaaaagtgaataaagttttatcatacagattgggctgagraggaaacaacaagaacaaaatgacaggtgaagaaagcacagggatgtatagtttaagaaacagaaacaagtccagttaagctaaagtgtaaaagcgtatt

SEQ ID NO: 525758 - DNA, 201 bp, Homo sapiens
aattagccaggcacgcctgtaatcccagctactctagaggccaaggcaggacaatcacttgaacccaggaggcagaggttgcagggagctgagatcatgcygctgcacaccagcctgggcaacagattgtctaaaaaaaaaaagtcaatctacaaacacgtttcaggtgcctgtaaaatgttcataccatgtgatcatcta

SEQ ID NO: 525759 - DNA, 201 bp, Homo sapiens
agtgcaatgaatggcatgatctcggctcaccacaacctccacctcctgggttcaagtgattttcttgtctcagcctcccaagtagctgggattacaggtawgagccaccacactcagctgattttgtatttttagtagagatggggtttctccatgttggtcaggctggtcttgaactcctgacctcaggtgatctgcccg

SEQ ID NO: 525760 - DNA, 201 bp, Homo sapiens
ctatctggattggtgctaagaaataaaaacacactaagtacagattggctgggcatggcagctcacacctgtaatgccagcactttgggaggccaaggtcrgcaggatcacttgaggcccgggagtttgagaccagcctggccaacatggtgaaactccatctgtaataaaaatacaaaaattagtggggcatggtggcat

SEQ ID NO: 525761 - DNA, 201 bp, Homo sapiens
tgaggatgtagtcagcctacttaagcagtgttcatctactgctatctggattggtgctaagaaataaaaacacactaagtacagattggctgggcatggcrgctcacacctgtaatgccagcactttgggaggccaaggtcagcaggatcacttgaggcccgggagtttgagaccagcctggccaacatggtgaaactcca

SEQ ID NO: 525762 - DNA, 201 bp, Homo sapiens
ttgaggatgtagtcagcctacttaagcagtgttcatctactgctatctggattggtgctaagaaataaaaacacactaagtacagattggctgggcatggyagctcacacctgtaatgccagcactttgggaggccaaggtcagcaggatcacttgaggcccgggagtttgagaccagcctggccaacatggtgaaactcc

SEQ ID NO: 525763 - DNA, 201 bp, Homo sapiens
atatcagcttcaaatagaaaatacaggaagaaatagatttcaaatcataaatcttatttcataacaagagttcacgtttttacaggacaagtattatcactgttttttagaatttaaaaaagttatttcattaaagtattattaaaatatgtgtatatagaaagagagaatgaaaaatcaaacatgatgaagcttaacaat

SEQ ID NO: 525764 - DNA, 201 bp, Homo sapiens
cccatttagtcaatatttattgattgcctaccatgtactaggcattgttttcggaattgtggatacagtcataaaataacaaagcccataccctcatgtarcttacattctaatgaaagaataacaggataagtggagaaggctaacttcataaaggttggtcagggagggcctttctaagaaattgacatttgaactgag

SEQ ID NO: 525765 - DNA, 201 bp, Homo sapiens
ttctccttctcctccttctccttttctcttcctgcttaaatttcttactggtttcccattcttgctggataaagataatcaagactagtgctttgttttakaaagtattgtgcttagcaatttatccccaggtaaaatgcctagcatgtagtagacaataaatgtatgtcaaataaataaacaatgtaggaacagaaatag

SEQ ID NO: 525766 - DNA, 201 bp, Homo sapiens
attttcatttttggggagtgacctcattgccataatttcttctaacaatgcatctgtttgtttttcaggtgcttctttgctttgcattcgggcagatgagstacaagaagctctcacctcccactgtgtggtcactagaggagaaacaattatacgacccaatactgtagaaaaagctaccgatgtcagggatgccatggc

SEQ ID NO: 525767 - DNA, 201 bp, Homo sapiens
ctgtagctttataggaagtcttgaaattgcacagtgtcagtcctccagctttttctccttcaatattggttgcctattctggatcttttgactttccatakaaactttagaatcagtttgccaatatccacaaaataatttgtttggattttgcttgggattgcattgaatctgtaaagcaggttgaaaagacctgacatc

SEQ ID NO: 525768 - DNA, 201 bp, Homo sapiens
ttatacttaagtatttcattggggggtgcaaatgtaagtggtattgtgtttttaatttccattttcacttattcatttctggtatataggaaagcagtgacttttttatattaatcttgtgtctgaaaaccttgctgtaattgcttattcattccaggaggtttttatgctgactctttcagattttcaacataaacaatt

SEQ ID NO: 525769 - DNA, 201 bp, Homo sapiens
ataataataataaaataaattttttaaaaaaggccaaatacaaaaagcagtctcacaaatgagagagcaggcccaaggggactggaactgggacaggtaaktgaaaggcaagagctgagactgcttgctgcctcctactctctcattggagaaacagtctcttctccctactcctcaggtgcgggtgtgcagagcaacctc

SEQ ID NO: 525770 - DNA, 201 bp, Homo sapiens
ctgtaccatttttcattcccaccagcaatgaatgattgctgtagctttataggaagtcttgaaattgcacagtgtcagtcctccagctttttctccttcartattggttgcctattctggatcttttgactttccatataaactttagaatcagtttgccaatatccacaaaataatttgtttggattttgcttgggattg

SEQ ID NO: 525771 - DNA, 201 bp, Homo sapiens
aactggctgtaccatttttcattcccaccagcaatgaatgattgctgtagctttataggaagtcttgaaattgcacagtgtcagtcctccagctttttctycttcaatattggttgcctattctggatcttttgactttccatataaactttagaatcagtttgccaatatccacaaaataatttgtttggattttgcttg

SEQ ID NO: 525772 - DNA, 201 bp, Homo sapiens
aatccaaaagctcaatatataataaatctattcaaaaagatgagtattcatttcaaaaatgtagctttgctagtaccttttcagaattatggtaaatgcayatatcaaattatgttaaatatatatgttgaaaataattatttggcttacatgatcatataactaagaacttatttatatgttttaattttataggctaga

SEQ ID NO: 525773 - DNA, 201 bp, Homo sapiens
ggaacagaccacaagctccctggaggcagactacggcctgggagcccagtagggcacctagcggctaggcagacaaaagcatatggccccttaaactagaragccaccatgcccaaggaccctctcttttctcctgacacaaggtcttaaaagaaggaggaggggcaggcatggtggttcatgcctataatcccagcactt

SEQ ID NO: 525774 - DNA, 201 bp, Homo sapiens
tttactgcagcacaatttgagtgactctccaatacagtctctttttctcactgtctctcctgctctctctctctctcattggtgttgacagcaccccaagygtatgtgtccctttaaatactctcagagtttacagttcacgtgtgcatttgtgattcagcacaatccaaaggaatgacaggcaaatcaaattcagatatt

SEQ ID NO: 525775 - DNA, 201 bp, Homo sapiens
ttggtcataagatcaatgttgctagtggtagatgctccttgtgaactgtgcctggctctgttggatgcctggttaggggaaaacgggagcagctaatagamgctcagggcatccttctaactggaagatgtacaataaacaagacagtgcctgcttgtgaccaggggctgggcctcttcatagctcttttccctgcctttt

SEQ ID NO: 525776 - DNA, 201 bp, Homo sapiens
agtcagtgtcctggctcttaaagcagagccaatttatttgggattcagtcaataaagaaaaaagcagcagtcattcttttcctcaatccttggtcataagrtcaatgttgctagtggtagatgctccttgtgaactgtgcctggctctgttggatgcctggttaggggaaaacgggagcagctaatagaagctcagggcat

SEQ ID NO: 525777 - DNA, 201 bp, Homo sapiens
gtgagtaggagttgaacaattgagagatcactaagcatttagaacttatcatggatacctcgtgtaaaggatagagtgtgcatacccttgtacatgccatsaggtctgcgtggtaggcatcctatcatgctgaaatttgtgccattgaccttacctgattgtcttttggaaacaaggtctgaactgtaggacctggagtca

SEQ ID NO: 525778 - DNA, 201 bp, Homo sapiens
tttatccagtattttgaataaacagttacataatttttgttaaaacatagaactaggaaaaatagaagatagagtcaatctgggtgcagtttgtggtcttsctttctccaaatgcgtgtgccagagtgttaattacattcagttattggtaacggctctacattaaatattgtatcactaaacagatgcctttaaaagcat

SEQ ID NO: 525779 - DNA, 201 bp, Homo sapiens
gccagatatactattctagggtaaaatattttctccatcagcactttacatatgtcatgccactctctactggcctgtaaggtttccactaaaaattcagytgccaaatgtattggagctcccttttatgtaatttacttcttttgtctcactacttttaggatcctttctttatctttaacctttgggagtttgattatt

SEQ ID NO: 525780 - DNA, 201 bp, Homo sapiens
tgaagataaatgtaaaagagaagtctacttatttgcttttccaaatttctgtgcttagtatatgtaataaggcacaataagtacttgatgaataaatgcakaagcacgcaaaaatgcagctctcaaccgacgatattattaaagttgactgaatgttattttagacatgaaaaattgtaaagatacaaactcaggggtcta

SEQ ID NO: 525781 - DNA, 201 bp, Homo sapiens
aaaatgatttttgttttttttttttgagacaaattcccactctgtcacccaggctggagtgcagtggtgcgatctcggctcactgcaagctccgcctcccrggttcatgccattctcctgtctcagcctccctagtagctgggactacaggcgcccgccaccacgcccagctaattttttttgtatttttaatagagacgg

SEQ ID NO: 525782 - DNA, 201 bp, Homo sapiens
ttaaaaaaccccattcctagtgaaatggagagaacaccatatcaagggagcaccctgtgggacaaaaaaatctgaacagcagcccctaaatccctgatctyccctctgacatagtctacccaaatgagaaggaaccagaaaaacaattctagtaatacgacaaaacaagattctttaacaccgccaaaagatcataccagc

SEQ ID NO: 525783 - DNA, 201 bp, Homo sapiens
tgctactgccctggaggataacatgtacacagaagggaatataaagcctttgcggacttgtatatttgtgaggggtcaggagaaacagggcaggagtgagraactgggctgctgagttacttagatggcacagaattgttccttcttccctttggcagttcacaattgcagtggagtagcagactcacagtgtgattcctt

SEQ ID NO: 525784 - DNA, 201 bp, Homo sapiens
tttctttccttctgcattctatttggagggttttgcctttgccattatctggtttcaagattccccagggcccattgtgatttgaaggaaattgcagatcyagttgctgagccagtgggaagtagatcttatgtctctccatcctgccatctcaagcacctggctccatataaaaggaagaagcggcagttttttcaatct

SEQ ID NO: 525785 - DNA, 201 bp, Homo sapiens
atatgagaactttctattttaagtcaagacctgaatataaaacacatcacttttctaacttattcaactattctgaagaattaagaccatgttataatacrctcctcaaaaaacgggaaagcatttttcacacgagttaaaattgacaatgttagaaggcagactaaattgggagaaactctagttataaaatattttgaa

SEQ ID NO: 525786 - DNA, 201 bp, Homo sapiens
  misc_feature (1)...(201): n = A,T,C or G
tgagaaaaaaattggagaaccaattaacatggaagattttttgagataaaggttttgaaattttgttctaaattttttaatagatacttccaaatctattntaatatatggtgagagatagggatctagtttcattcctttgcatatgtatacccagttttcccaacaccatttattgaagagattgtcttttccccactg

SEQ ID NO: 525787 - DNA, 201 bp, Homo sapiens
agctcttgcaactgctcatggcagaagccaggatgagttgcccactttgggtggggtatacattctccactttgccacattgctgccatcctctgcctttmtttcatcaagtcctgcttcactcatatattttacctccctcactcctgcagacatttgagtttgtgatttcagactctggaaatatcccttactaacttg

SEQ ID NO: 525788 - DNA, 201 bp, Homo sapiens
gcctaagatttgagccctatagacctgggtttgaatctgcactccacttcttactagccatggcaactaggatcagtctgttttctcatctgcaaattgaraataacaagaatctaaggctttgcagtgttgtccttagaattagaaataatgtttgtgatatacctggcagatagttgatatttaatattcttaaaacag

SEQ ID NO: 525789 - DNA, 201 bp, Homo sapiens
tgagtgaggctctgtgggcatggaaccctccgggccatgtgtgggatataatctcctggtgtgccgtttgctaagaccattggaaaagcacagtattaggrtgggagtgtcccgattttccaggtaccatctgtcacggcttcccttggcttgaaagggaattccccgaccccttgtgcttcccaggtgaggcgatgccct

SEQ ID NO: 525790 - DNA, 201 bp, Homo sapiens
ctcaagcctcagcaatggctgcagccttgctgccaccttgcagttcaatctcagactgctgtgctagcagtgagtgaggctctgtgggcatggaaccctcygggccatgtgtgggatataatctcctggtgtgccgtttgctaagaccattggaaaagcacagtattagggtgggagtgtcccgattttccaggtaccatc

SEQ ID NO: 525791 - DNA, 201 bp, Homo sapiens
gtcagtcggcccctactgggaggtgtctcctggttaggctactcaggggtcagggacccacttgaggaggcagtctatccattctcagatctcaaactccrtgctgggagaaccactactctcttcaaagctgtcagacagggacgtttaagtctgtagaagtttctgctgtcttttgttcagctatgcccttcccccaga

SEQ ID NO: 525792 - DNA, 201 bp, Homo sapiens
ttctccactttgccacattgctgccatcctctgcctttatttcatcaagtcctgcttcactcatatattttacctccctcactcctgcagacatttgagtytgtgatttcagactctggaaatatcccttactaacttgaacggttaattatatggctcacacaatagcttaactgtcatcctttgaaaaggagaataatc

SEQ ID NO: 525793 - DNA, 201 bp, Homo sapiens
ttatattttaacttctagggtacatgtgcacaatgtgcaggtttgttacatatgtatacatgtgccatgttggtgtgctgcacacattaactcgtcatttwcattaggtatatctcctaatgctatccctcccccctgcccccaccccatgacaggccccagtgtgtgatgttccccaccctgtgtccaagtcttctcatt

SEQ ID NO: 525794 - DNA, 201 bp, Homo sapiens
tgcttcactcatatattttacctccctcactcctgcagacatttgagtttgtgatttcagactctggaaatatcccttactaacttgaacggttaattatrtggctcacacaatagcttaactgtcatcctttgaaaaggagaataatcctgtattgcaatttacgaaacagttcctcataaaactcaggtgatgcttata

SEQ ID NO: 525795 - DNA, 201 bp, Homo sapiens
gtttcaccgtgttagccaggatggtctcgatctcctgaccttgtgatccgcccacctcggcctcccgaagtgctgggattccaggcgtgagccaccgcacrcggcaagaatgaataatttctaaagagagcaatagtaaatttccatctacactgagattatactgcataatatacagggggagaagaccctggaatgttt

SEQ ID NO: 525796 - DNA, 201 bp, Homo sapiens
atactaaaacttaaagtaatgatctggtgacttaaagttttttggaggctcactaacaccaccttttaaagatggagattttttttaaaggaaattatagyctttcttttggttctagcatttattttaagaagtacttttatcctcataaagggagaaaatgaatggtggagaacggaatacaaatacaaaagtatttaa

SEQ ID NO: 525797 - DNA, 201 bp, Homo sapiens
ctgaattatatgctgtgccagtcgtagagaagtttttattattttgtggtgagaaaagacaagaactaaaggaaactttcagttttgttctaacttcactygtatgcaatgttggtgttacttgcattatcactggtgaccacaacaagtaacagaataggatgggttctgaaggaaaggacccagcctctggaccacccc

SEQ ID NO: 525798 - DNA, 201 bp, Homo sapiens
acatgagctagcccctgtattttcttctagttttgcagtttcatgtctaatgtttaagtctctaatccatttggaattgatttttgtatgtgagattgctwtttgtaagtgagataacaatctaatttcattcttctgcatgtggacatgtggtttttgcagcaccacttattgaagagactgtcctttccccattgtgtg

SEQ ID NO: 525799 - DNA, 201 bp, Homo sapiens
tgccctctctccttcaattatattcaactggcaaactccaatgctgagtaaaatcaaaacaatttaatcccacttaaaattatggccactccttaggcagscccttagttactttgcaatattacatttccctaaaaattccttatgccactttccctgtccactctttcaaacttcctcctctctcctcaaaccctccaa

SEQ ID NO: 525800 - DNA, 201 bp, Homo sapiens
tctttgcattttggatcaaagacatgaatttcataaggattaagtgttctaagaactattcagaagtgtgtttttatatagtaatacaatttttagcatgyattcatagccatttactcgataatgtgcccgtaagtataatgaatcagaatatgctctttattgtgttttggattttcacgttcttttcagttctcccta

SEQ ID NO: 525801 - DNA, 201 bp, Homo sapiens
gtaatacaatttttagcatgtattcatagccatttactcgataatgtgcccgtaagtataatgaatcagaatatgctctttattgtgttttggattttcaygttcttttcagttctccctaaaccttatttcgcttcctaacttaaaaaaagtatttttcgaagaaccctattcatttatttattcaacagctatatattt

SEQ ID NO: 525802 - DNA, 201 bp, Homo sapiens
aattatggccactccttaggcagccccttagttactttgcaatattacatttccctaaaaattccttatgccactttccctgtccactctttcaaacttcytcctctctcctcaaaccctccaaacttcctggctctcagctgacaaccttcttttataacagtagcagataacagacacatgctgaatatatcagtcgtc

SEQ ID NO: 525803 - DNA, 201 bp, Homo sapiens
ttttctttttctcttttttttctgtttgctcccctctgttccttttctcaacccacattactcacccccaaccaagggaactagtattatagaaaatgtartttttcatattttttgcagatgtgcatacatgtaggtgtatatatataacagagattttcatcattgttttatataaataggatcataatatgatcataa

SEQ ID NO: 525804 - DNA, 201 bp, Homo sapiens
ttgaacctgggaggtggaagttgcagtgagccgaaatcgtgccactgcactccagcctgggtgacagagcgagactctgtctcaaaaaaaaaaaaagcaaraagaagaaaaagaacaacaacaacaagggacaactttacccaggtgtgggatttcataacatctaaatcttctgattttcctgaagaaaatatacataaa

SEQ ID NO: 525805 - DNA, 201 bp, Homo sapiens
aagcaacttcagaaagagaagcatgtggtttggcaattttttcaaaacaggtatgtgaataaataaatttatttactaataaaagtccctgggaactatayaataactgaattaaacacataattaataactggtagattgttttatctgcgttgatgggcccgcaaacatttttaataaaatgtctcagggattgtgcta

SEQ ID NO: 525806 - DNA, 201 bp, Homo sapiens
ttcctttaaaaaaactttggaacctacacttagccaaaggtcaatttatcaaaatgcaaacagcatggaaaaagaaaagaagacatctgtagttacccagmgtgcaccgatatgcagccaggaggaaggcagaggccgtctgaggcatgagacagtcaaagagaggcaagttgaaccagtgacacaggcccaggaggaaga

SEQ ID NO: 525807 - DNA, 201 bp, Homo sapiens
ctcctgggtgaatggagctgcagaagggcatggcatgcctggtgtgcaggctgtccagcacagcagcagtgtatccacccagagcctcagcagcagaggarcaaaatccctggcagagcaaatggagacactgcttctctggctgagcaatgctgagcctggccagcaaggactccatatgctcaggagcagcaagaacac

SEQ ID NO: 525808 - DNA, 201 bp, Homo sapiens
acaactccaggaggctctattcatatcatattccacatcagtgccctcaccctggagcacataaacggaacattaatggtgcctccctggagttgtgcaaygtggacacgtggatcaggagcctgagaaaattctgaatacatttgctttacaacccaaaatagattaccatctgtgatattagctatgtacacaaataga

SEQ ID NO: 525809 - DNA, 201 bp, Homo sapiens
agttttggaagattctgatttactttgcagttaggtagtatacatttatataaatacagcttgttttttttttttaagcgaaaaatctgaagtcaaaattyccaatgttttagcaaaaagaaagaaagatagggaaataagtaaatacctaaccgtgacaatgccagtcttggaactagaaattgaaatggaatattatta

SEQ ID NO: 525810 - DNA, 201 bp, Homo sapiens
tattttgggcattaaaaatgagtattttattcacaccattttctcttagattataaatttcaaaatgatcaattttatcaggctaaaatctcatgatttayggtctgaaacacatgcctaacttcaaatggagttttaacttgtaaaaaggccttttgcagttatagttctgcatgatatttaagtagcattttaaagcta

SEQ ID NO: 525811 - DNA, 201 bp, Homo sapiens
atttattcagtcttccactccccactgccacagtgacacagcagcactcccctatgccctggagaacccagaggatgtgttgaaacccagagaatcagttrgaaataagtttcccacctcgcaggcagaaaatgaagctcacacttgacctccaagttagccagtcttctctagttcattcccttctgtctagtgatttct

SEQ ID NO: 525812 - DNA, 201 bp, Homo sapiens
tcccactgtggaatatttcaggtcccacgtaactgcctaatcgcatcctctccagcctgcacctgaaaatgtctctaaaccatacctttgagcatgctccycccttaattgttcttttaatggctcagcaactccttcaggatgaagtcctgattccttccaaggccttcttcgtgggacccgtgactgcttttcagcctc

SEQ ID NO: 525813 - DNA, 201 bp, Homo sapiens
ttctggtttttgtcctctctctcatacctgtgatccatcagtggctctaactgtggcttctacctgcaaaagctcactccaactcatttcccccctctaayctcacagcaattaccatatttcagactattaatcatttcccactgtggaatatttcaggtcccacgtaactgcctaatcgcatcctctccagcctgcacc

SEQ ID NO: 525814 - DNA, 201 bp, Homo sapiens
atcttggctatattaacagaaagagtaggaaaagacaaaaaaatttattctctcttggtcactcttttaatgtcatatctaaaacagctgttggtttgagrttctaaattttggagaaagaatagattaggcttttgagaaagagtcaactctgcaaatgagctgtctcttcatttggggccataacatatgaggcagtac

SEQ ID NO: 525815 - DNA, 201 bp, Homo sapiens
caaatgcattttgaaatgataaaagtttgcaagagccaatagaagctatttaataatcagcactgggagagaggataatgagaaggaaaaaaataaaagamcactatttatgatggtggcaagaattcaggccttaccatctttcctcgtgcctgtgacagtctaagatggatccagaaatggctcagatatttggactcc

SEQ ID NO: 525816 - DNA, 201 bp, Homo sapiens
catgtctattcccacaaggggaacttgtgctatagattatatacatacatatatacatatgtgtgtgtgtgtgtgtggtctgtgtatataaagcctgacakcacctgggcagcccagactaaagtatagatgttgttccctgtccatgaatgatagtgtaattctcttgtatttattcatataggtttgagggtggtcgtg

SEQ ID NO: 525817 - DNA, 201 bp, Homo sapiens
aattagtggggtgggaaaatttgaactgtaatcgatgaattgctggaggctcagtctgacagttaaaaactgtaggagattccagtcacaggtggcctccrtacttttatgggttttacctccagattagtcaggttctcacagtaaatttcagagaaaaatccctttgtgtttacatcagggagagaggaaaaagtgcca

SEQ ID NO: 525818 - DNA, 201 bp, Homo sapiens
gaaaagatattcctatcctaggaaatttacaatctagtaaagggtataaggccagcacacaaatgaatgactgaaatgacatttaactaagatatctatcytaaaggatgtgtagaattgtgctgaggagtgtaaaaggtgacatttaaggtggattgtgaaaagtgaataaagttttatcatacagattgggctgaggag

SEQ ID NO: 525819 - DNA, 201 bp, Homo sapiens
caatgagcctatcgtacttccacgatatgaaaaaatatagggtttaacaatcttagccatataaccaagaaacatcttgtcacaagtgctaaaagtaaatktaaaatgttcaaaatattttaaaaggagaacaacagatttgaaaaattagccaatctgtcatgtaatagttttggttaaagatgtttattatattcaaaa

SEQ ID NO: 525820 - DNA, 201 bp, Homo sapiens
ttttctggcaaatacactggaaagacagattgtgtaatgttatggaaggccttgaatgagtttcctataattagtcattgaacaactatttattgagtgcytactgcatgccaggcactgttaacagctgctggggacacagcagtgaacaatacaggtactctgtcttactagtaccataaaatctagattggcattata

SEQ ID NO: 525821 - DNA, 201 bp, Homo sapiens
ttccaagagctttattacttattttatttacatttatctttaaagcatgagaaatttatttttatatgtgatgacaatagtgatccagttcacagaagtayatgaatatctactattcacttagcactacatctctaagctgaaatgaaatcacagtctttgcatctccaaacactaccacatgtagatcaccaatgaaat

SEQ ID NO: 525822 - DNA, 201 bp, Homo sapiens
gcgtggtaggcatcctatcatgctgaaatttgtgccattgaccttacctgattgtcttttggaaacaaggtctgaactgtaggacctggagtcagagatgmccctgatatatttctggaaaatcgttttttgggttttcttttctttttttttttttttttaagagatgggatctctctctgttgcccaggctggagtgca

SEQ ID NO: 525823 - DNA, 201 bp, Homo sapiens
atgggagtgcagtggcacaatctcaggtcactgcaacctctgccccccaggttcaagtgatccttctgcctcagcctccctagtagctgggattacaggcrtgtgccaccatgcccggctaaattttgtatttttagtagagatggagtttcaccatgttggccagactggtctcgaactcctggcctcaagtaatacacc

SEQ ID NO: 525824 - DNA, 201 bp, Homo sapiens
cagccctctggctttagattatcctggtgaagaaacaatgtcaagaagctaacactaaagcagattagattttcagaaattctgaaaattcaatgcatttkgatttttagatctccatgatacactaacatgcatatttatgattttacatcaatgctaccataccatacattccaggattcttttttttttttttttttt

SEQ ID NO: 525825 - DNA, 201 bp, Homo sapiens
agatacatacgaacagaaaagaaatggatggataatgcttaaaatgtctctgatttgggatgaggaaataaaatattcttatcttctgctgaatgcccagwtattttccagatgcactgatcatttaaatgtaagaaataaacaaaccaaatgaagccagatgctatgaactgagcatttcacaatctctgcttagaaagg

SEQ ID NO: 525826 - DNA, 201 bp, Homo sapiens
ggattttgataaggattgcattgattctgtatatttgagtagtatggatattttaacaacattaattcttccgatccctgagataaattttcatttatttktgtcttcctcaacttctttcatcactgttttatagttttcagtgtacagatctgtcacctccttggttaaatttattcctaatgttttgtttttatgctt

SEQ ID NO: 525827 - DNA, 201 bp, Homo sapiens
cctgtgaaaatcccttcaaatcaccaaatatatcactgaatcaccccttttaaaggtagtataatgttccacagtgtgtactaccataatttattcagccrttcagccatgactgggcatataactataaatgtttccagatctttgctaccatgagcaaaactgaagtatgtccttattgactggttcatttctttctgt

SEQ ID NO: 525828 - DNA, 201 bp, Homo sapiens
tattaatatctcacataccaacagctgcaaatgctgattgcagagcatctccttctatcccatcagttcttatctgcctggtatgtgagttgcagtaacakcccatcctgggttccctcctccccaacctccctccaccccagcctgcctccctgtcctttctcaacaggagcatcaacactatggccttccaaggattag

SEQ ID NO: 525829 - DNA, 201 bp, Homo sapiens
gaatggtaccagctcctctttgtacctctggtagaattcggctgtgaatccatctggtcctggactttttttgattcgtaggctattaattattgcctcartttcaaagcccgttggtctattgagggattcaacttcttcctggtttagtcttgggagggtgtatgtgtccaggaatttatccatttcttctagattttc

SEQ ID NO: 525830 - DNA, 201 bp, Homo sapiens
catgtatctactttatttcccccaaaatctatcctcttaagtaaatacataatcaaagaaatgcaaatacaataggctacaatttcccccatcaaaaatakattaaaaatatatatattttttgagatggagtttcattcttgttgcccaggctggagtgcaatgaatggcatgatctcggctcaccacaacctccacctc

SEQ ID NO: 525831 - DNA, 201 bp, Homo sapiens
gctcacgcctataatccaagcacactgggaggccaaagtgggcagatcacttgaggtcagaagttcgagaccagcctggcccacatggtgaaaccctgtcwctattaaaaatgcaaaaaaattagctgagcgtggtggccacgcctgtaatcccagccactcgggaagctgaggcaggagaatcacatgaacctgggaggc

SEQ ID NO: 525832 - DNA, 201 bp, Homo sapiens
ataatttgtttgcttttccatatacgttttagaatgagcttgtcaatttctaccaaaaatcctggttgggttttgattggaatgcactgaaactatagatyaataatgggagaattggtatcttcccaacattaaatcttccaatcagcacagtatagctctccatttatttaagtctcccttaatttctctcagcaacat

SEQ ID NO: 525833 - DNA, 201 bp, Homo sapiens
agagactagcaagtcagagcccagaggcccattcatttggctgctgcaatggcctgtgcccaggaggcatgctggcagggtaggagctgagggaaggccarggcttcaggttccctcatggtcacagaagtggcagcactggtgagtgtggggcagagaggagcaggtggtgtggggaagcaaggaagccaggcagctcac

SEQ ID NO: 525834 - DNA, 201 bp, Homo sapiens
actatctaatattcctgagtccctaaactcccctttttgtatttgacagtggctgagcctatgagaaacacgataactgcacttggacccttccttagtgygagaggtgtggcccagacatctccaacttctagctgtcagtagagatctgccatttttaatttacccatccccttcctactcttcttaagcatgtggaaa

SEQ ID NO: 525835 - DNA, 201 bp, Homo sapiens
gtatctttaattagatctttaattagagctaaaaaaaaaagtcgttttaagttttctaaatcctccaaagtttatgctttctccctttcacaaatttgagmagacataattaggtatcagattttgataggtagccacaccgaagcatatacagtgaagatgaaagtctgcatgtcacatcatgacagtgaatgaacagtc

SEQ ID NO: 525836 - DNA, 201 bp, Homo sapiens
taaatttatttactaataaaagtccctgggaactatacaataactgaattaaacacataattaataactggtagattgttttatctgcgttgatgggcccrcaaacatttttaataaaatgtctcagggattgtgctattcaaatagccaggaacttttaacccaatttaccgtggtaacaatagtataaaatatgataga

SEQ ID NO: 525837 - DNA, 201 bp, Homo sapiens
gtatgtgaataaataaatttatttactaataaaagtccctgggaactatacaataactgaattaaacacataattaataactggtagattgttttatctgsgttgatgggcccgcaaacatttttaataaaatgtctcagggattgtgctattcaaatagccaggaacttttaacccaatttaccgtggtaacaatagtat

SEQ ID NO: 525838 - DNA, 201 bp, Homo sapiens
attaatatctcacataccaacagctgcaaatgctgattgcagagcatctccttctatcccatcagttcttatctgcctggtatgtgagttgcagtaacatyccatcctgggttccctcctccccaacctccctccaccccagcctgcctccctgtcctttctcaacaggagcatcaacactatggccttccaaggattaga

SEQ ID NO: 525839 - DNA, 201 bp, Homo sapiens
gcaattttttcaaaacaggtatgtgaataaataaatttatttactaataaaagtccctgggaactatacaataactgaattaaacacataattaataactrgtagattgttttatctgcgttgatgggcccgcaaacatttttaataaaatgtctcagggattgtgctattcaaatagccaggaacttttaacccaattta

SEQ ID NO: 525840 - DNA, 201 bp, Homo sapiens
ctattcttgaaattttctgtaagttttaaattatttcaaaatgaaaagtggcaaaagtttttttttcactgtaataaacataaaacatactcagttcatcytgagttatggtagcacccttaaagaaatcttagattttcaacctttaaaatctttctgtttgataaaggaggatttttgtcaatggttagaataagcaac

SEQ ID NO: 525841 - DNA, 201 bp, Homo sapiens
tgatacattttaattttgagctttctttgttccttttgcctttctcccaccggtatctagcatataactattgccaatagaagtaataagctccagtttartactgtatattcaaagataatatattttacacagggaatctttcgtgaagaaacaagcagaaaatgcaatctctgctaatgaaagattcatttcagctcc

SEQ ID NO: 525842 - DNA, 201 bp, Homo sapiens
tgagtcatgtttgtctcctctttctttcttttctctactctggttctacaggaaattgccatgggacatttgcttctttatttgcatttcaaatttcaagkttttaatttgtaatttcaaaactataattgaaaacattgtacatcttcgcaaaaaagtccccactataaagtccgtgtaataaatttcttataaaatcct

SEQ ID NO: 525843 - DNA, 201 bp, Homo sapiens
tattatatcactgttttaatcaatgttcatgtcaaccaatttccagacagtgagtgctaagaacaaacaagagcgtttctattaagcatgagtgaacacasttctttatttctgaatcagtgacatcctgaaagtcctttttagattagtatctgtaatttgaaaagtgtgttttcctggaagcattgtaacacctggaga

SEQ ID NO: 525844 - DNA, 201 bp, Homo sapiens
atagaatagtgcataagatgtgatccttacctccaagagcttgatgctgaaggaaaagtatacccatataacaaagctgaacaaggtaactcagataaggkttttttttctaaactaaggaaggttacagagacaaaacagccttgacagtatcctgaatttaaaatagaaaacaaaaaccaaacagcgaaatagtgctat

SEQ ID NO: 525845 - DNA, 201 bp, Homo sapiens
ttttttttttttttttttttgagacagagtctggctctgtcgcccaggctggaatgcagtggcacgatctcggctcactgcaagctccgcctcctgggttmatgccattctcctgcctcagcctcccaagtagctgggactacaggcacccgccatcactcccggctaatatttttttgtatttttagtagagacagggtt

SEQ ID NO: 525846 - DNA, 201 bp, Homo sapiens
tagataaaagtcatttgtaactgaaatgtgctaattcagaattcttgagtaaaacaatacaagcccacttaaaaagtaaagcagtttagcggacaacattrgatggctcagagaatggagaggatgggagagagccaggtttagtcatgaaagccggtggcttcaactgtccttcctcaagaatcaccagctaaaaggctg

SEQ ID NO: 525847 - DNA, 201 bp, Homo sapiens
acttattcttgtgaccaaacactacctgttccctaaaaacctattgaaatttaaaaaaaatttaaataaaaataaaataaaaaaatagaatggctttaatraaacacctcacaatgtcaagtgctgatgaagatatggaacaactagaactctcatacactgctagaggggctgcagatggtatagccatagccaccgtgg

SEQ ID NO: 525848 - DNA, 201 bp, Homo sapiens
ttccatatttactaaactttcttgtgagaatggatgacagtaatcctgaagatgtctcagtatccttcagtcgttattctccttcccttttgcactgtagrtgggtaaggtatccctccttgtgtttctgtaacctgtgtatacttccatgtttgcatttatcgtatagaattataattatacatttggtctttatagata

SEQ ID NO: 525849 - DNA, 201 bp, Homo sapiens
aagatgtctcagtatccttcagtcgttattctccttcccttttgcactgtagatgggtaaggtatccctccttgtgtttctgtaacctgtgtatacttccwtgtttgcatttatcgtatagaattataattatacatttggtctttatagataaagatacttagaaatataggtggacagacagagtctttgagaagtggg

SEQ ID NO: 525850 - DNA, 201 bp, Homo sapiens
aggtaaaccaagaggactttacttatatttttaagaatgacttctttgcttctcagtccttctcattgtaaaacaagtattttggactagaactaaaatawcttagtctgcagctctaaaattttaatctctgaagaactttaagttaatagaaattgtggtgggcaggagagaggacaatggagcaggtaaatggggcaa

SEQ ID NO: 525851 - DNA, 201 bp, Homo sapiens
aaagtataaagaagatactctgagagcataaaggaaggatggtttagattgtatgagaaattctgataaagcagagaataataaaagtaatacataaaacwcagcaaaaatatttttacttacaacatcaatgtaagtttgttttttaaccttttgataaaggcttaatttttttctttgagtgtacatctattaattata

SEQ ID NO: 525852 - DNA, 201 bp, Homo sapiens
agatcactctggctgcagtgttgggaagagtgtcagaaggtaaagatggcagcaggcaaacctcttgggaggctgttgcagcagtgagaagaaatatagtrgggggatggtggggagaaatgtctagccctagatagaatttgatgatagagctgatggaatttgtatacagattgcatgagggctgtgagaaacagaaaa

SEQ ID NO: 525853 - DNA, 201 bp, Homo sapiens
tattggaaatatctctaaatgactttggaaaaaaagaataaatttagtttaataaaatggtatttccaaaatctgatctacttgaatttacaaagtggagrgaaaaaaaaggctaaggaaagcaagaagttggcaaactgtatataagataattgatttgcatatgtaaattagactaatcacatatacacataagtggct

SEQ ID NO: 525854 - DNA, 201 bp, Homo sapiens
ccacttctgactttccttttccctcagctacctgaagcgcttgttttcacttaaccattccctgtcagagcccctgaactgtgacctagaataccacagcrgggagctggagaaaggcccaggccggcagggctctccagcagatgtcagaagagatcgccagtcctccccacgctggagctctgaagggttgatcctcag

SEQ ID NO: 525855 - DNA, 201 bp, Homo sapiens
caagtggtgaaacttgaatttatcaaactgagtacatggtcatccagagagataaagatcattccagccccaaccctagtccccttgtttttaacatcaartctggccatagaaagggtgaaggaatgaaatagaagaagaggtggcttcctagcttccttctttccccacacacccacatctaacgttctcttcacccac

SEQ ID NO: 525856 - DNA, 201 bp, Homo sapiens
ttttgtgttctctatcctattttggagttatttctcaaatgttttcttccttggcttctaccagattgctttctataattctactcctaattctgagtgtyctttgctaatatgtcctccaatccccacatttaaatcctcatccatatctaaatgtatccctgggccctctcattcattccagtggctttaatagccaat

SEQ ID NO: 525857 - DNA, 201 bp, Homo sapiens
tcagtgattagagaatggcactagaggaaaagaggacaacaagaggctgacatctgcttgtctcctctgaagatgggacctagtggggtctctgttgggcrgtggtgagagatgtggggtgtttagggcataagcaggttttaattatggcaagatgatcaatggaggataaaaaggggaaaataagatggaacacaagtg

SEQ ID NO: 525858 - DNA, 201 bp, Homo sapiens
actggtggctggtacttagcaggtgctcagtgaatgaatgaatgaatcaatggggagtgaatgaatctatgtagctgcatttttagggaataccccacttyccagacaagctgcagaatctgaaggtaaacattggcaggggttctcagcaatggattcagaaacttagcccagcagcctcattgaaaacattgaaacact

SEQ ID NO: 525859 - DNA, 201 bp, Homo sapiens
acttagtcatcttaagcacttactatgtgtcaagtatttctataagtactgggaatacaaagaaaaataagataagtcatctaccttcagaaactttatcytgagtcatgaagacaaggggtgtttaataatgcttaatgatgaagggtcagagacaacagggacagataaaggacctttggatttgttggtgaaatgcac

SEQ ID NO: 525860 - DNA, 201 bp, Homo sapiens
tacttagaaatgaattggttaatggtcttcttatttgcccataaactcgccatccacgccagagccagaatattaccaatagcatgcattggcctctatcycttcctctatcccaactccttgcctcctctcaagagtgtctgttgcccgatatgttgtgtttatcattgccttctttttactttttaatcacactgatat

SEQ ID NO: 525861 - DNA, 201 bp, Homo sapiens
gaccctttataatcaatggtcatgttcttctgttcgcctgtgttttgcctatgggtgtcatttcatatgagatgggtctcttagcataccattaggtttcrcttctttatccatctttatcctctgtgccttttaattggggcatttagcctgtttacattcaatgttagtattggcatgtgtggatttgatcctgtcatc

SEQ ID NO: 525862 - DNA, 201 bp, Homo sapiens
ataaaatatgcagccaggctctaaatactatgttgtgttgcttggctatcagcagaacagtgtctggttggccagggagaagagaagaacttaatagtcargtatgtttcaataaactcagaacctcagagatagcaaagacatatggattttatattcacccagatgtgcaaacatgtaataataatcatagacaacttt

SEQ ID NO: 525863 - DNA, 201 bp, Homo sapiens
gaatggttgcactacacagtatttagattctcatgcttgtgctgtaagtttcagtgattattgggcacagtgttatgctcaacactttctgattctgagayacaagatgtagtcttgtttatcctgttaaaaattcagaatatgctttcagtatgagaattcatgatgtactcagttatggaaatttttcagttgttcttt

SEQ ID NO: 525864 - DNA, 201 bp, Homo sapiens
ctcatcaccaaggtaaaaatttttacagaaacatttttttcccaaatgtcaggtgatgtaagtctactttctaattgattgttttgtatagatctctttcragatgtttctataattgatgtaattaaattattaaaatgataatttagtagataagcttcacttcctaatagttccacctcataatgccacttaactata

SEQ ID NO: 525865 - DNA, 201 bp, Homo sapiens
atagcccaggaagccttgttggacagaactaaaatagcctgaaaattccctagcaaagcaaacgactgaagaagcattaacataaacctaaacctctatamtgttcctgtggctttgacttttaatagattattgctctttctattagcctgttttctgttcagccttggtcctttttgacctctttttcctttctgtatc

SEQ ID NO: 525866 - DNA, 201 bp, Homo sapiens
gattttgtggctaggcaagtggcagagccgagatgaacctatgtgtccttggttctaaatccactggttgtttctataactctctgctgtcttgtaactaygtaaatgtctggaattgtgattgaaaagttatatacctgtgcttgagagattcagtggggaaagtatacctctaagatgtatctagttaaatattctgta

SEQ ID NO: 525867 - DNA, 201 bp, Homo sapiens
gggcacaagccttcatgtcccttttgtaaagtagatcataggtacctatgctgtgctggtaccttaaccctacagtaattatctgtggttcattgtttctrttttacacatcttatattacactatactcaacagcaaattattattaatatgccatatgtttttactttgtgaagtggggtttgttacccccatttaata

SEQ ID NO: 525868 - DNA, 201 bp, Homo sapiens
acagcaactgaagtcactttatctgggtgtctcgcaccataagccaattaatagacgagtttcttctcagcagtgcctctcaggtaaaaatcagtagagtyagaacttcctgaatgggaaggaaatgccagatactttgtttattagtttcccaccattattctatggcagatttgaggagcctgtgtcctgtcttaggag

SEQ ID NO: 525869 - DNA, 201 bp, Homo sapiens
gtgtgtgtgtgtgtgtgtgtagacaccacattttctttatccaatcatccattgatggacacctgggttgatcatatcttggctattatgaacaatgctgyatctgttaaatggtgagtgactgattttttaatcattcctgggaaaaacctcaaatggtcatgatgcattgtactttttatatattgctgaattcagttt

SEQ ID NO: 525870 - DNA, 201 bp, Homo sapiens
tcccaatggaaaatgttagagttagagttcttcaattctatattatgatgtcttcaagattctaaaataaccatggccctttgtatatatgacttcacatrtgacatacagttcagccatttttaggggaaagtgcaccacagttacttgcagctcacgtctttagttgggtttatcacaagtttgttcattaggtgagct

SEQ ID NO: 525871 - DNA, 201 bp, Homo sapiens
aattacctaaaggaagaatatcaacattttgctgttttacatatttgaatgcataaactaagatagcctgaaggaaaatgccacatgctgtctgtagatamtaaagtacaatagataccaaagcatcactgtcttccttggtctccttagggcgacactggagaagccacacgtcatgccagagagacaaccaacatgaaa

SEQ ID NO: 525872 - DNA, 201 bp, Homo sapiens
ctgataaaaacctattaaccatccaatgaaaatgaagaaaataccactaaaacttggagttattacttatgtaatttaatgtggaggaggtggaggaaatyagattaaatttactctaagtgttcagtgaatgtatccaactctctagcagaaacataaaattctttaaaaaatatatgagtacctttactaaatattttt

SEQ ID NO: 525873 - DNA, 201 bp, Homo sapiens
atttgaggacaaacagcagttaccccggctagcaatgaacttactatgtttgatgcacattggtttgtagcttttgaggtcagaatattaaggatttattwttccttccatttttttcaataaattatgaagtacaggcatcacttgtaaaatttggtaggagaaggtaaacagcaaagagggaacaatttgtagagagac

SEQ ID NO: 525874 - DNA, 201 bp, Homo sapiens
attttattttatttgtagctattgtaaatggtgttactttcttgattcctttttcagattgtttgttgttggcatatagaaatgctactgatttttgtacrctgattttgcactctttactgatttatcagttctaatagttttcttgtggagttgtttaggttttttcaagtataccgtcatatcctctgcaaacaagga

SEQ ID NO: 525875 - DNA, 201 bp, Homo sapiens
gaatcacagtaatgctggcctcatagaataaattgagtaatattgccttttcttcaattttcaggaatagtagaatgagtattatttcttcctaagttgcyttgtagaattcaccaatgaagccaactgggcctgaaggatgttttgtgaggttttcaactacaaattcaatttgtttagtaaatataaagctatctgagt

SEQ ID NO: 525876 - DNA, 201 bp, Homo sapiens
taacactatgctttagtccctcagaaaaaccagcgcctaaattgcaggaaggtcctgcttagagtatcacccctgtaccaccagtacttggcagatgttckcacgagtaaaggaatgatgacttacagataaatgtaatgaaaaaggctccaaagtgacaggcccagctgtttgaaaagatcacatctgagcctcagtgcc

SEQ ID NO: 525877 - DNA, 201 bp, Homo sapiens
atgattatgtgttgaaaaaagaagatagctattaactgaggctgaaagactctggacagatgggtggtactatgtggtataggcagcatgatccagaggcrtgagcttctgtactgaggagttggagaatctgggttctcgccctagctcagccacttgctatgtgactgtaggcctataccactgattctcagctgggag

SEQ ID NO: 525878 - DNA, 201 bp, Homo sapiens
tgataggatccttataatgatcaaatgagatactgtctctaacggtgatttggaagatgaaacaattaggtttatgtgtcaatttaaaaagctaacataawtttttttaaaagaatcaattggtataaggaatgttttattttattttatttttttttttgagacggagtctggctctgtgacccaggctggagtgcagtg

SEQ ID NO: 525879 - DNA, 201 bp, Homo sapiens
ttggtcctgatttgttcattcataatagtgacattgctttttctcattgctccccaattatagcaatttttctctttgaaattatatccttttcaggagaytaaagactgccaattacaggtggtatttcaaagcacgaaaattcagtaaatagtcataaagcctctcaaatgcacattttcggtcatcaaagtggttttt

SEQ ID NO: 525880 - DNA, 201 bp, Homo sapiens
ctgaagaactccctttagcatttcttgtaggatgggtttggtattgatgaaatccttcaacttttgtttgtctggcaaagtctctatttcttcttcatgtktgaagggtatttcactggatatactattccagggtaaaagttgttttctttttccttcagcactttaaatatgtcatgccactctctcctggcccataag

SEQ ID NO: 525881 - DNA, 201 bp, Homo sapiens
gtatatttgtgaggggtcaggagaaacagggcaggagtgaggaactgggctgctgagttacttagatggcacagaattgttccttcttccctttggcagtycacaattgcagtggagtagcagactcacagtgtgattcctttcatgttcttaaggctggaaccaccattcccacctctcatgtaaaaggctattatttgg

SEQ ID NO: 525882 - DNA, 201 bp, Homo sapiens
tgttcattaaaacagattttcctccatttactgtgactaatgggagcatttataacattcattttttgaatgttattcttgtagtaaaaagaaaggcctayaagctcatacgtttttgtatgctacattgggaaatttatttttgttgtgtattatagtattccctgatggatttgttgtctaaaatggtggtgggccaac

SEQ ID NO: 525883 - DNA, 201 bp, Homo sapiens
ctgagtttctccttagccttttaatgaataataggatagacatgaaaattatggcccaaaatgtttatagataatgataatgtcatagctgtctgtttccrcccccactggccctaattatgccctctgatgtcctgtaatccatcctgtcctttgctagccactcactatggaggccagacccactccagggcatgcgct

SEQ ID NO: 525884 - DNA, 201 bp, Homo sapiens
agttcagtatttttctacagaaaaatttgaaggtaacctgaaatcacaatacttctggagacccaaaagaatggaacttagttttggaattcaccattatkcaggaaaggtaagaactctaaagaattatgactgagtttctccttagccttttaatgaataataggatagacatgaaaattatggcccaaaatgtttata

SEQ ID NO: 525885 - DNA, 201 bp, Homo sapiens
taaatgggaaattccagaaataaacaattcacattttcagttgtgtgcctttctgattagcatgatgaaatatcatgtggtcctgctccatcccacccagratgtgaattatcttcttgtacagcatatctatgttgtatatgctacctgcctattagtgacttagtatccatctgggttatcagattgtcatagtattgc

SEQ ID NO: 525886 - DNA, 201 bp, Homo sapiens
tttttaactattaaaaatttcctgctttggtttttgtatacatacttgtttttaaaaatctagtaagcttaagtagttgtagtaagaaaatgatttaatcmccatcttaccagggtcacaaaatattatcttagtttggagaaaagcttttcttctattaccaaaaaaaaaaaaagaaaacagtgaccatacagaaaaaag

SEQ ID NO: 525887 - DNA, 201 bp, Homo sapiens
agattgctttgggtagtgtgggtattttaacaatattgattcttctaatccataaacatggaatatctttccattttttggtgtccccttcaatttcttgsatcagttatgtagttttcattgtagagatctgtcacttctttggttaattcctaggcattttattttatttgtagctattgtaaatggtgttactttctt

SEQ ID NO: 525888 - DNA, 201 bp, Homo sapiens
cattaatctcttactgttttcttaagataaatttctatagatagtactattaagtcaaaaaattattaaagttaaatttataatttcactttattcttgaraatcctatttgtttcatcccagaaacatatcactatttagggagttggaagaagtgaataagacattacttatttgaattcctgttgtgaatatacacat

SEQ ID NO: 525889 - DNA, 201 bp, Homo sapiens
ttgaagcatgactcatcaccaaggtaaaaatttttacagaaacatttttttcccaaatgtcaggtgatgtaagtctactttctaattgattgttttgtatmgatctctttcaagatgtttctataattgatgtaattaaattattaaaatgataatttagtagataagcttcacttcctaatagttccacctcataatgcc

SEQ ID NO: 525890 - DNA, 201 bp, Homo sapiens
gtcgtttcgattgtgcctttcctaaatgtccgcggttggcagaacgtgggaggaagaggacccgcctaactcggggtaggtggggacgcgctgctcactgkggtgaggttgacacttgggccctgggtttcacttgcaggtgctgggcggcggagagccccgagaaggaggaggagagagagccagcagccaacccctacg

SEQ ID NO: 525891 - DNA, 201 bp, Homo sapiens
attcacacgaagaaagggaacttcaaccgacctctaatatccaatctgaaggatgtagatgatttagcaaccctagaaattttggatgaggtaagaatttyagtttaattaaacttagacattccagatgttttgttaatttatagaagacacgggtattggtagaaggggaaggaatatatagattatgatggttattaa

SEQ ID NO: 525892 - DNA, 201 bp, Homo sapiens
ttaaattaatttaaatgaatgccagaaaattttatccagtattttgaataaacagttacataatttttgttaaaacatagaactaggaaaaatagaagatrgagtcaatctgggtgcagtttgtggtcttgctttctccaaatgcgtgtgccagagtgttaattacattcagttattggtaacggctctacattaaatatt

SEQ ID NO: 525893 - DNA, 201 bp, Homo sapiens
cttaaattaatttaaatgaatgccagaaaattttatccagtattttgaataaacagttacataatttttgttaaaacatagaactaggaaaaatagaagayagagtcaatctgggtgcagtttgtggtcttgctttctccaaatgcgtgtgccagagtgttaattacattcagttattggtaacggctctacattaaatat

SEQ ID NO: 525894 - DNA, 201 bp, Homo sapiens
cctgcttaggtgtgccagaggcttggaggctcagggtgcaaggtgccacctcacctgagatgtgtggtggcagcaactacttcagtgttcaggaggcctgyggccctctgagagcagagtgctgcctcagctctggtggaagggagctccctcagccaggctcagagcctgtgcagactgcaggggtctccagtcgcaatg

SEQ ID NO: 525895 - DNA, 201 bp, Homo sapiens
cgtctttacttatagctatcaaacttcaccagtttaaatacttaatgctttgttctaagtattttattacatgcttgttaaagtcacaaatttcacctttygatggtgtggttttctactaggtgattgcatgtgaacagcaattggataccacttatgacgccagatgtgacacttggtccctgggtatcacggccattg

SEQ ID NO: 525896 - DNA, 201 bp, Homo sapiens
cacagtgtaagagttcaagggaaggaagagcatctccaggaaggctgatgagagaggatatcaagaagaggcattcagctaatgcagaaggatcatttgakgccaggagtttgagaccagcctgggcaatgtagcaagaccccatctctaaaaacaattttttttaattagctgggtgtggtggctcatgcctgtagtctt

SEQ ID NO: 525897 - DNA, 201 bp, Homo sapiens
ggcattgttttcggaattgtggatacagtcataaaataacaaagcccataccctcatgtagcttacattctaatgaaagaataacaggataagtggagaargctaacttcataaaggttggtcagggagggcctttctaagaaattgacatttgaactgagatctacaggacaagaaggaaccaaaggaaaaggctatttg

SEQ ID NO: 525898 - DNA, 201 bp, Homo sapiens
aactgaagtcactttatctgggtgtctcgcaccataagccaattaatagacgagtttcttctcagcagtgcctctcaggtaaaaatcagtagagttagaamttcctgaatgggaaggaaatgccagatactttgtttattagtttcccaccattattctatggcagatttgaggagcctgtgtcctgtcttaggagaacct

SEQ ID NO: 525899 - DNA, 201 bp, Homo sapiens
ttaggctttaattttcccacactgtctcccaaatacagtcagaaccactgcggagagctttggagttctttgttcttatgacctgcctctccctctgggcmaactctctgagccactgttcaggagctggcagcagagacaggggcccacatctcttagagtgacaccttgtttcacattgaactggctggggatgtttga

SEQ ID NO: 525900 - DNA, 201 bp, Homo sapiens
gaagtgttattccagagatcagatctacgtctatgtgggagacatactcattgctcttaacccttttcagagtctgggtctttactccacaaaggtatgtygtatggggtgcattctgttacttcatacacataattatacattcagatacttaaattaatttaaatgaatgccagaaaattttatccagtattttgaata

SEQ ID NO: 525901 - DNA, 201 bp, Homo sapiens
tttctaccttctctgacttaattcccctccatttagtatgttttccttttttcattttaactagaacttggcatatgacgccacaagggaataaaaggggktggtatagagaggggggctggcaggaggcagatttgataagagagcgcaaaaatagaaatagaaatatttctatttcctttgtcaacatctgcaaccttg

SEQ ID NO: 525902 - DNA, 201 bp, Homo sapiens
acagaagtagcaagaaacactcataatttgtattcctatcccacaaaacatgaggaaatcaataacatcaagaagaaggataacaaagactcgaaagcaayttcagaaagagaagcatgtggtttggcaattttttcaaaacaggtatgtgaataaataaatttatttactaataaaagtccctgggaactatacaataac

SEQ ID NO: 525903 - DNA, 201 bp, Homo sapiens
tgaagagtcaaaagcagcatatctagaaaggaaggccatatcagaaaggccaagctacccagtgccttggttagctgaaaatgagacttcctttaaaaaawctttggaacctacacttagccaaaggtcaatttatcaaaatgcaaacagcatggaaaaagaaaagaagacatctgtagttacccagagtgcaccgatatg

SEQ ID NO: 525904 - DNA, 201 bp, Homo sapiens
aaatgcgtgtgccagagtgttaattacattcagttattggtaacggctctacattaaatattgtatcactaaacagatgcctttaaaagcatatacttaartctgcttaaaaaggtatgtacttaatgtatgtctgccgctgaactgagtatgggagcgtcaaaagtataattacattgtttatgtagataatacatactt

SEQ ID NO: 525905 - DNA, 201 bp, Homo sapiens
caaccgacctctaatatccaatctgaaggatgtagatgatttagcaaccctagaaattttggatgaggtaagaatttcagtttaattaaacttagacattycagatgttttgttaatttatagaagacacgggtattggtagaaggggaaggaatatatagattatgatggttattaagaatcttaacactcactctgccc

SEQ ID NO: 525906 - DNA, 201 bp, Homo sapiens
tatattaggctattttctggtatcttatcattgaatttaataaacagattcctagaggattttcagtatcatatgtatctaaaacttttttccactatgakcagtaatcaattcttaaatcagaaagcgtttttctccacagacgtgaacgtattcacacgaagaaagggaacttcaaccgacctctaatatccaatctga

SEQ ID NO: 525907 - DNA, 201 bp, Homo sapiens
tattttctggtatcttatcattgaatttaataaacagattcctagaggattttcagtatcatatgtatctaaaacttttttccactatgagcagtaatcarttcttaaatcagaaagcgtttttctccacagacgtgaacgtattcacacgaagaaagggaacttcaaccgacctctaatatccaatctgaaggatgtaga

SEQ ID NO: 525908 - DNA, 201 bp, Homo sapiens
  misc_feature (1)...(201): n = A,T,C or G
caccttctgcatttcttctcaaagaaatgttttcttcaagcataaaaatctgtactgtcatagtgacatctagggcaaagaagcaaaagacagtgatttcnaaaatctcaagcaatttagaatgtgttctgttcttcaaagcacagcacataactgcttcacatctgtgtgccatggttctttgtattatattttaatttt

SEQ ID NO: 525909 - DNA, 201 bp, Homo sapiens
cccactgtgttccagtccttgaactaaaaatgagttcaaatcttaattgaaagattcaaagtccaaagattaatggatgagcccctgacattaagaaactyacagacctgttatggaaacagggctttaaaaatctgcattatcatgcaatgtaaagtcagctgcaggcagcaagggtgtgggtatcctgtgttcattgtt

SEQ ID NO: 525910 - DNA, 201 bp, Homo sapiens
taaagtcagctgcaggcagcaagggtgtgggtatcctgtgttcattgttgtgtctgaggcacctagaagggttcctggcaaataaatagtaggtgctcaartatttttcaaattaatgaaagaagaccgggtatttttaatgaaagtataaagaagatactctgagagcataaaggaaggatggtttagattgtatgagaa

SEQ ID NO: 525911 - DNA, 201 bp, Homo sapiens
caagacttctttataaagtcttaccaaagcatttgatgcagttttatagaaacaatcctctggctttctcacttagatttcaatctgatatttatttgaakaacatcacaccaaatacaactggcataaacaggtttgggggcaaacacagctcatccagtgagagcaaacacacacacgggcgcactagtgagaactgcc

SEQ ID NO: 525912 - DNA, 201 bp, Homo sapiens
gacaatttcattactccagttaatctgttaattgaagatacattgaggagagtttttagaatattgaaaaagtaggtcttccttaaggaaactaggagtgrgatgaaagggcgcgcaagcgtagtgagttacacatacgaaggcatagaagcatgagcaaacatggccctctggcacaattttaagtaactttcatgactg

SEQ ID NO: 525913 - DNA, 201 bp, Homo sapiens
tgaccacaaataatttttaagaaggagaaattattttattttattgcagaatacagtctcagagcaacttgagaagtgttattccagagatcagatctacrtctatgtgggagacatactcattgctcttaacccttttcagagtctgggtctttactccacaaaggtatgtcgtatggggtgcattctgttacttcatac

SEQ ID NO: 525914 - DNA, 201 bp, Homo sapiens
ttgaccacaaataatttttaagaaggagaaattattttattttattgcagaatacagtctcagagcaacttgagaagtgttattccagagatcagatctaygtctatgtgggagacatactcattgctcttaacccttttcagagtctgggtctttactccacaaaggtatgtcgtatggggtgcattctgttacttcata

SEQ ID NO: 525915 - DNA, 201 bp, Homo sapiens
cttccactttcaaacctgaagaggaaaccaccaatgctgtggagagtaacaacagagtgtatcagactccaaaaaaaatgaataatgtgtatgaggaagargttaagcaagaattctaccttgtagggccagaagtaagccccaaacagaagtctgtcaaagacctggaagagaacagcaatctaaggaaagtggagaaag

SEQ ID NO: 525916 - DNA, 201 bp, Homo sapiens
atatagatttttcagatctgtaaggtcatagaataatgttcacagcctttcttgtactagtcaggttcctgatactgacacatcaaatgtcagtgaacacscagaggctacttttgtgttctctatcctattttggagttatttctcaaatgttttcttccttggcttctaccagattgctttctataattctactcctaa

SEQ ID NO: 525917 - DNA, 201 bp, Homo sapiens
ttttcattgtagagatctgtcacttctttggttaattcctaggcattttattttatttgtagctattgtaaatggtgttactttcttgattcctttttcasattgtttgttgttggcatatagaaatgctactgatttttgtacgctgattttgcactctttactgatttatcagttctaatagttttcttgtggagttgt

SEQ ID NO: 525918 - DNA, 201 bp, Homo sapiens
ttctcaaagaaatgttttcttcaagcataaaaatctgtactgtcatagtgacatctagggcaaagaagcaaaagacagtgatttccaaaatctcaagcaayttagaatgtgttctgttcttcaaagcacagcacataactgcttcacatctgtgtgccatggttctttgtattatattttaatttttcaggtgttccttaa

SEQ ID NO: 525919 - DNA, 201 bp, Homo sapiens
gaaaggaagctattgacaagcttattttgattcaagcttgtgtcagagcattcttgtgttcaagaagataccaaaaaatacaggagaaaaggaaagaaagygctataataatacagtcaggtaatctctttgacatatttagatatggtcataaaatcaaatcttataatacttcttacaggcaaacctccaattcttgtg

SEQ ID NO: 525920 - DNA, 201 bp, Homo sapiens
ctacaaaatgtattctttttaacctttagcattccaaactatatattggatcaaagagaactgccagtcctcctcacatttttgcaatggctgacttaggwtatcaatctatgataacatataattcagatcaggtaagaagagtctcccattcttagaaatttacctcgtagttacttaaatgtcacttaattttgagga

SEQ ID NO: 525921 - DNA, 201 bp, Homo sapiens
ttggtgtcattcaattcatgagtaagtcatgaatagaagttgcctggagtccagctcctaatatggaaaattactctttggtcttcaattaaaaatatggwaggaggccgggcacagtggctcacacctgtaatcccagcactttgggaggccaaggcgggtggatcacgcggtcaggagattgagaccatcctggctaac

SEQ ID NO: 525922 - DNA, 201 bp, Homo sapiens
ctctgctccaccgctagtaaagccaaaatacaccccctctggatctccccatatccacctctcccaaatgcagacactgatgggtaattaacaccactgagaatcccagggtagaaataaaggctcagtctctaaacactcaactcagatggagccactgggtctaaatgctcaccctgtggtttgttctcttgtagatgc

SEQ ID NO: 525923 - DNA, 201 bp, Homo sapiens
gatttgtctgtgaaagaaaataattttgagatcgttttatctattttctctacggcttaggctatgtgagggcaaaacacaaatccctttgctaaaaagamccatattattttgattctcaaaggataggcctttgagtgttagagaaaggagtgaaggaggcaggtgggaaatggtatttctatttttaaatccagtgaa

SEQ ID NO: 525924 - DNA, 201 bp, Homo sapiens
cagcctggccaacatggtgaaaccctgtctctactaaaaatacaaaaaaattagccaggcatggtggtgggcacctgtaatccctgctacacaggaggatygcttgaactcaggaggcagaggttgcagtgagccgagatcacgccactgcactataatctgggagacaaagtgagactccatttcaattaaaaaaaaaaa

SEQ ID NO: 525925 - DNA, 201 bp, Homo sapiens
caggtggctactggtacaactgctgcacagactccaacctcaatggagtgtactaccgcctgggtgagcacaataagcacctggatggcatcacctggtayggctggcatggatctacctactccctcaaacgggtggagatgaaaatccgcccagaagacttcaagccttaaaaggaggctgccgtggagcacggataca

SEQ ID NO: 525926 - DNA, 201 bp, Homo sapiens
ctgcagggacaggaacaggttgggaagcctgccctcttgctcctgccttctgcccctgcaagtccctcaccagagtatcccctctgcttcaggtgttctgygacatggagacttcaggcggaggctggaccatcatccagagacgaaaaagtggccttgtctccttctaccgggactggaagcagtacaagcagggctttg

SEQ ID NO: 525927 - DNA, 201 bp, Homo sapiens
tggcagcatccgtggggacttctggctggggaacgaacacatccaccggctctccagacagccaacccggctgcgtgtagagatggaggtaagcacaaggycaggggccccatgactggaccagtgccaccacacatgaccgcgtacaactccgggggtgccattcctattctgattcaagacaaatctgtatattcattg

SEQ ID NO: 525928 - DNA, 201 bp, Homo sapiens
gccctcagtttgggattagaaaggtattctcaggccattttccagacaagtgagtcctgatttggtctgtgagatgaaaccagacatgcggaagaccaggycagacagaggaatctgaccgtgccacttcctgctcatccaaacaggaggctttctcaccatcctgcaaggaggttcttggggtcaagtgcagctctccca

SEQ ID NO: 525929 - DNA, 201 bp, Homo sapiens
attttttaaaaaaataatagactgtttttcagagcagttttaagttaacagaaaaatggagcaggaagtagtgttcccacgtatcctgtgtatacacacayacacacacacacacacacacacacacacacacacgcagcatctcccactagacacatcgcaatcacctgaaatccacgttattttagggttcattcctgg

SEQ ID NO: 525930 - DNA, 201 bp, Homo sapiens
ttccatgtgaccaaagtgatgaaaggatttttacatgccactcaatcatacactattttgcattctgtaacttcaaaatgaaacctaccttctcttgacargtaaacactacacgtgaagagtggtgaaagggaacattgattactgaagtgccctggagagggaaagcactggtcaacatcacatggacaaatttcattg

SEQ ID NO: 525931 - DNA, 201 bp, Homo sapiens
tccatcttttttatctggctcaacatgtctgagattcatccatgtggtttgacataccaatagttcatccttttttaattgtcaagttatattccattttraggatatccctaatttgtttatccatttgatttgcctactgatggacatttgggttgtttccagctttgactattgtgaataaagaggctatggatattg

SEQ ID NO: 525932 - DNA, 201 bp, Homo sapiens
gagagtgaagaaccctttatgccagaagagagatgtctacctaggatggcttctccagttaatgtcaaagaggaagtgaaggaacctccagggaccaataytgtgatcttggaatatgcacaccgcctgtctcaggatatcttgtgtgatgccttgcagcaatgggcatgcaataacatcaagtaccatgacattccatac

SEQ ID NO: 525933 - DNA, 201 bp, Homo sapiens
ttaatttggggaggactaagaatattgtctttcagatcatgaacagcatttgtctgtttgtttaggttctttactttttctcagtaacattttgtattttycacgtacaacgtacacaatacaaaatgcagttttccttcatatgctttgttaaatttatccctaagtgttcatgtttttgatgctattgcaaatggcatt

SEQ ID NO: 525934 - DNA, 201 bp, Homo sapiens
tgtgcaccactatgccctgctaactttcttgtattttcagtagagacagagtttcaccatgttggccaggctggtctcaaactcctgacctcaggtgatcyacccaccaaggcctcccaaaatactgggattacaggcatgcgccaccgtccccagccagcatacaatttttttatgtgaacacaaattttcatgtatcta

SEQ ID NO: 525935 - DNA, 201 bp, Homo sapiens
catttgatttgcctactgatggacatttgggttgtttccagctttgactattgtgaataaagaggctatggatattggtatacagatttttaaaatacctrtgtttccatttgtcttagataaatatctagaaatgaaatggctggttcacagggtaagtgtgtggttaactttttaagaaacagccaaggaattctttaa

SEQ ID NO: 525936 - DNA, 201 bp, Homo sapiens
cacaactggccactgtactccagcccaggcgatggactgagaccctggctctaggagaaaaaaggtgggtagctgcagtaaatcacattttttctttgacrgacccaacagaaggcccagttgttgctagatctcttcctgaggatagtgtcagggctcattctatatttttagagctttgagccttcaaataacattgaa

SEQ ID NO: 525937 - DNA, 201 bp, Homo sapiens
cctaaagccatcttagagataacagtttatagaagccatgacattagtgtttattgcattgaattaagcccagtgatataactatacaagaaaacaagtakgggtaccttttacaaagagcaatccaataaatcttaaaaataacagaaacttagtctgcaaggtagaaagtttcagttttaattctgtattaagctttac

SEQ ID NO: 525938 - DNA, 201 bp, Homo sapiens
agaatatgacataaaatgggacaatggtaaaataaaccatccctgttaatccagtgtttaagatggacttctggggagttagcagcctattcgtttacacrgcagattttagaagttactttttttttttttttttgctggttttgtgtttgggtccaactcatgtccaaattatggcctttttgtgataccttccactgg

SEQ ID NO: 525939 - DNA, 201 bp, Homo sapiens
cagtggcgtgaccatggctcactgcaacttccgcctcccaggttcaagtgattcttgtgcctctgtctcctgagtagctggaattacaggcacctgctacyatgcccagctgatttttgtatctttagtagagatggcatttcaccatgttggccaggctggtcttgaactcctgacctcaggtgatctgcccacctcgag

SEQ ID NO: 525940 - DNA, 201 bp, Homo sapiens
atcttaacttaccacaaccttcaattccaactcctgggcccaagcgacctcggcttcctgagtagttaaaactgtaggtgtgcaccaccatgcctggctartttttttcatatttaatttttttgtagagacggggtcttgctatgttgcctaggctggtcttgaactcctgggctcaaatgatactcgcctcagcctccc

SEQ ID NO: 525941 - DNA, 201 bp, Homo sapiens
gtgggtgtattttttaaaaaaataatagactgtttttcagagcagttttaagttaacagaaaaatggagcaggaagtagtgttcccacgtatcctgtgtatacacacacacacacacacacacacacacacacacacacacacgcagcatctcccactagacacatcgcaatcacctgaaatccacgttattttagggttc

SEQ ID NO: 525942 - DNA, 201 bp, Homo sapiens
tgggtgtattttttaaaaaaataatagactgtttttcagagcagttttaagttaacagaaaaatggagcaggaagtagtgttcccacgtatcctgtgtatwcacacacacacacacacacacacacacacacacacacacacgcagcatctcccactagacacatcgcaatcacctgaaatccacgttattttagggttca

SEQ ID NO: 525943 - DNA, 201 bp, Homo sapiens
aggactaggaagtctgcaataaggagatacggcttcccctatcctcaaagatagtacttgggtttaagtaaggaacaggggaaagggtgctgggtggagayaaaggcgaggtggtgtgtttcaacttaaaggaggactaggagtaggaaatgagaatgggtgagccaaggagactcacttgatgggagaggaaatttcctt

SEQ ID NO: 525944 - DNA, 201 bp, Homo sapiens
taaagaggctatggatattggtatacagatttttaaaatacctgtgtttccatttgtcttagataaatatctagaaatgaaatggctggttcacagggtaagtgtgtggttaactttttaagaaacagccaaggaattctttaaaatggttgtaccattttacattccttccagcaatatatgcgttgcatgtcctcacca

SEQ ID NO: 525945 - DNA, 201 bp, Homo sapiens
ttttttaaaaaaataatagactgtttttcagagcagttttaagttaacagaaaaatggagcaggaagtagtgttcccacgtatcctgtgtatacacacacrcacacacacacacacacacacacacacacacacgcagcatctcccactagacacatcgcaatcacctgaaatccacgttattttagggttcattcctggt

SEQ ID NO: 525946 - DNA, 201 bp, Homo sapiens
ataactcctgcccttgaggaatatctaatctcatttggggagacagcatttataaattaaagactagacttcagttcaagaacagaattctgaggaagggygggaggaggactaggaagtctgcaataaggagatacggcttcccctatcctcaaagatagtacttgggtttaagtaaggaacaggggaaagggtgctggg

SEQ ID NO: 525947 - DNA, 201 bp, Homo sapiens
ataaagaggctatggatattggtatacagatttttaaaatacctgtgtttccatttgtcttagataaatatctagaaatgaaatggctggttcacagggtaagtgtgtggttaactttttaagaaacagccaaggaattctttaaaatggttgtaccattttacattccttccagcaatatatgcgttgcatgtcctcacc

SEQ ID NO: 525948 - DNA, 201 bp, Homo sapiens
taaaggacaaaagactctcacatccaatttcaaattggtttctcatttattgccatcattctaaatcaaagcactctacctgttcccaaaggaagtgacarataaagcccttgaactggcaactggaagaactagaagtaggcttttgctcttcggtaggcccagaagattatgaccactgagttgggctggtttcaggcc

SEQ ID NO: 525949 - DNA, 201 bp, Homo sapiens
accatccctgttaatccagtgtttaagatggacttctggggagttagcagcctattcgtttacacagcagattttagaagttactttttttttttttttttgctggttttgtgtttgggtccaactcatgtccaaattatggcctttttgtgataccttccactggcatattcccaaggaatttactccttttgatgacac

SEQ ID NO: 525950 - DNA, 201 bp, Homo sapiens
aacatactataggcacatggatagttgataaataggaaaactttagtaagcattcattaatcgccttgatgtagagaactgttctgtacaaaataaagaamaaaataactcctgcccttgaggaatatctaatctcatttggggagacagcatttataaattaaagactagacttcagttcaagaacagaattctgaggaa

SEQ ID NO: 525951 - DNA, 201 bp, Homo sapiens
catacagaactaaaggtaattaaaagcagaagactgcctttcctttcttaccctcatatcactcttattaggggtaggaacagatgtagtattatgagaarctgggtagaatttatagaataatatatggtggtagacctggcaaacatcacctcctctggacatccttaattacaaactattaaaaaatgaattagatgc

SEQ ID NO: 525952 - DNA, 201 bp, Homo sapiens
aatgaattggtatttttattaatcacatctacactgaaatttgaaagacattttatatatatatgcataaaactttttcaaagaccacaacatggtttttwtatatatttacattaattcagggtgagaccaattttaagcaataacttgagatataaggcatcttagaaacctgtgtaaaggcttaagaatatgacataa

SEQ ID NO: 525953 - DNA, 201 bp, Homo sapiens
gggtgtattttttaaaaaaataatagactgtttttcagagcagttttaagttaacagaaaaatggagcaggaagtagtgttcccacgtatcctgtgtatamacacacacacacacacacacacacacacacacacacacacgcagcatctcccactagacacatcgcaatcacctgaaatccacgttattttagggttcat

SEQ ID NO: 525954 - DNA, 201 bp, Homo sapiens
gacctcaggtgatctgcccacctcgagttatgttttaatgaattggtatttttattaatcacatctacactgaaatttgaaagacattttatatatatatkcataaaactttttcaaagaccacaacatggtttttttatatatttacattaattcagggtgagaccaattttaagcaataacttgagatataaggcatct

SEQ ID NO: 525955 - DNA, 201 bp, Homo sapiens
ggtgtattttttaaaaaaataatagactgtttttcagagcagttttaagttaacagaaaaatggagcaggaagtagtgttcccacgtatcctgtgtatacwcacacacacacacacacacacacacacacacacacacacgcagcatctcccactagacacatcgcaatcacctgaaatccacgttattttagggttcatt

SEQ ID NO: 525956 - DNA, 201 bp, Homo sapiens
caggttcaagtgattcttgtgcctctgtctcctgagtagctggaattacaggcacctgctaccatgcccagctgatttttgtatctttagtagagatggcwtttcaccatgttggccaggctggtcttgaactcctgacctcaggtgatctgcccacctcgagttatgttttaatgaattggtatttttattaatcacatc

SEQ ID NO: 525957 - DNA, 201 bp, Homo sapiens
aattgttagttcctagaaatccgcagtcttttcctccacccctcatttttccttgtttaatgtttaagtttcgaattttgccagagatagatgtcaaactwttagtctgtaaagtctaggaattctaattctttcttttaattttgaatattaaaaataaaaacactgggggaaaaaagttctgtttgaatctctagtctc

SEQ ID NO: 525958 - DNA, 201 bp, Homo sapiens
gaaaagtaaagatcttgcatattccctgatctaccacaaaagtaaataacattagtttaaaaatgaatgattcttagcaaattgttagttcctagaaatcygcagtcttttcctccacccctcatttttccttgtttaatgtttaagtttcgaattttgccagagatagatgtcaaactattagtctgtaaagtctaggaa

SEQ ID NO: 525959 - DNA, 201 bp, Homo sapiens
ttgttagggtaagaaaaagctgcttttgcaaaacaaaaggtcttaaaaaacagaatattctgatggttccactgatggttccactcacagccttttatttwtctgacactcattgagttctccaagtaatttttttcaggttaaccatgtccaattcccttaaccatccctcacagtaaaaactagacactatgaaaaatc

SEQ ID NO: 525960 - DNA, 201 bp, Homo sapiens
cttctggtgtcactgttcaactcttaagtcctagaggaagtaatcgtttgctaacactttgcagatccttatcctggacatgcacatcccagtacccttgmcaagtctcatgcagatttctgcctctcttcccaatcttgaactctatcttataaattccagctgttttagtaaccctaacctctgttgcatcagagttgc

SEQ ID NO: 525961 - DNA, 201 bp, Homo sapiens
aagcctaagtcatagccctttaagaaaacacttgccaaaccttgtttagggtatactactgattcctaaggtgtcgcatttcttgagtagtaactaaataygaaagtgttcaatgagattgctccactcaggctgcaattccaaggattctaagtactgtataacttctggtgtcactgttcaactcttaagtcctagagg

SEQ ID NO: 525962 - DNA, 201 bp, Homo sapiens
gctataatagcagagctgagtagttgtaacatagaccctatgtgtcttagtccattcaggatggtataacaaaataccagagactagtatggagtatttakaagactgggtgtttatcaatcagtcacacagatttatttctcatggttctggaggctgggaagtccaagtttaaggcatgagcatatatggtgtcttgtg

SEQ ID NO: 525963 - DNA, 201 bp, Homo sapiens
gtgacaaaagcaaaaactggtgtgaaaaagtacaaataactatctggatttaaaaatgtgtctacgataatgtcactattataagaacaactaggatgaamtgcattttaagtacttctatgttaacagcaatttctgtttagtcttagattttagtcatctgaagggctgaacagaggtcctgtgacacccaataatcag

SEQ ID NO: 525964 - DNA, 201 bp, Homo sapiens
ttgagactgagtctcactctatcgcccaggctggagtgcagtggcgtgaccatggctcactgcaacttccgcctcccaggttcaagtgattcttgtgcctstgtctcctgagtagctggaattacaggcacctgctaccatgcccagctgatttttgtatctttagtagagatggcatttcaccatgttggccaggctggt

SEQ ID NO: 525965 - DNA, 201 bp, Homo sapiens
aatttgtaggggaggaaaaaagctgtcctctaccctcttaggtttgtgaccaaggcctgtgaatcaaactgataaaagagtaatggcataaatagaacagwtttaaacacacgtatgcacaggagtttgcaaaagaaatgtgactggaggaggtggttagaatttggggcttatctaccaacttaacaaaatgataaagcg

SEQ ID NO: 525966 - DNA, 201 bp, Homo sapiens
tttttttttttttggcatatggatgatttgtttgttccagcactcgttgaaaagactatgtatgtgtggtttggatttttaaactagtctgatcatctctrcctttcaattgttatttttagtccattttctttcaggtaatttttcacatggaaggctttttcatatgttggttttctaattgtccctccccaaccccca

SEQ ID NO: 525967 - DNA, 201 bp, Homo sapiens
tccgtcccctaatcgagaagagttagcccctaccccttcaattttgttctgggcttcccagtgaaaggtatctcattatgagttgcaattccaccctgctkcctacctgaagagtgagtgaagattttcaggtaagagatttgcccgtgaacattgcattgatatgccaagctgtcaggcttgtgctctgaatggcatatc

SEQ ID NO: 525968 - DNA, 201 bp, Homo sapiens
aaaacttaggtaggcatggtgacttgtgcctgcaggccagctactcagtgggctgaggtggaaggatcacttgaacccaggaggtccaggctacagtgagycgtgattgcatcctttactccagactgagttaacagagtaagaccctgtctcaaaaaaaaaaaaaaaaaaaaaaaaggtgttttcagaaacagattttat

SEQ ID NO: 525969 - DNA, 201 bp, Homo sapiens
aagggcgggtgtctgtcggtctttgcttgtcagctgtgccttttagatttttcaatggcagaaacccatgagttacaggaggctttaattaaacgagacckttctcagccagctgccgtggatagagcctcacatctccgtcccctaatcgagaagagttagcccctaccccttcaattttgttctgggcttcccagtgaa

SEQ ID NO: 525970 - DNA, 201 bp, Homo sapiens
gagcagttttttagtgaagtccaacttatcaattatttctttaacacatcatgcctttggcactgaatctaaaaggttgtcgccaaacccaaggttatctrgattgtctcctatgttatcttctaggagtcctattttatatttaggtctatgatccatttcaaattaattttgtgaagggtttaagaactgtgtccagct

SEQ ID NO: 525971 - DNA, 201 bp, Homo sapiens
gtgaatgagagttctgttgcttttgccattatctcactgtttaaatttacaattcctgaatgacatgatgttgaacacttttccatacgtttatgtgccayctatatgtaagaagacttccgtgaggtgtctgtccagatcttttgcccatttttcaattagcttgttcatatttgtattgttgacttttaaaagttcttt

SEQ ID NO: 525972 - DNA, 201 bp, Homo sapiens
cctaagtaatggcatcaccaaagaaaatgctaaggaataaaaactgccccaaattccaatggttgaagtttatcctttaaaataacaatttttgtttgtttatacccaaaaaaagtccagatatgaaaagggcttttctaaaatttcttggcgagggaatggcactcaaatcatagtgattaacagtaagtcttgtttgtt

SEQ ID NO: 525973 - DNA, 201 bp, Homo sapiens
tcctaagtaatggcatcaccaaagaaaatgctaaggaataaaaactgccccaaattccaatggttgaagtttatcctttaaaataacaatttttgtttgtttatacccaaaaaaagtccagatatgaaaagggcttttctaaaatttcttggcgagggaatggcactcaaatcatagtgattaacagtaagtcttgtttgt

SEQ ID NO: 525974 - DNA, 201 bp, Homo sapiens
ttcctaagtaatggcatcaccaaagaaaatgctaaggaataaaaactgccccaaattccaatggttgaagtttatcctttaaaataacaatttttgtttgtttatacccaaaaaaagtccagatatgaaaagggcttttctaaaatttcttggcgagggaatggcactcaaatcatagtgattaacagtaagtcttgtttg

SEQ ID NO: 525975 - DNA, 201 bp, Homo sapiens
tgtattttttaaaaaaataatagactgtttttcagagcagttttaagttaacagaaaaatggagcaggaagtagtgttcccacgtatcctgtgtatacacmcacacacacacacacacacacacacacacacacacacgcagcatctcccactagacacatcgcaatcacctgaaatccacgttattttagggttcattcc

SEQ ID NO: 525976 - DNA, 201 bp, Homo sapiens
cttcctaagtaatggcatcaccaaagaaaatgctaaggaataaaaactgccccaaattccaatggttgaagtttatcctttaaaataacaatttttgtttgtttatacccaaaaaaagtccagatatgaaaagggcttttctaaaatttcttggcgagggaatggcactcaaatcatagtgattaacagtaagtcttgttt

SEQ ID NO: 525977 - DNA, 201 bp, Homo sapiens
gtattttttaaaaaaataatagactgtttttcagagcagttttaagttaacagaaaaatggagcaggaagtagtgttcccacgtatcctgtgtatacacayacacacacacacacacacacacacacacacacacacgcagcatctcccactagacacatcgcaatcacctgaaatccacgttattttagggttcattcct

SEQ ID NO: 525978 - DNA, 201 bp, Homo sapiens
tattttttaaaaaaataatagactgtttttcagagcagttttaagttaacagaaaaatggagcaggaagtagtgttcccacgtatcctgtgtatacacacrcacacacacacacacacacacacacacacacacacgcagcatctcccactagacacatcgcaatcacctgaaatccacgttattttagggttcattcctg

SEQ ID NO: 525979 - DNA, 201 bp, Homo sapiens
ctgtctcaaaaaaaaaaaaaaaaaaaaaaaaggtgttttcagaaacagattttatgaatttttagagctatgtttttagtcccaaaactaagatacaatchgggaccattaatctcattcatagagattacctgtgcttcttacactcagtcctctttaaaatgaagctgtcttgtattgttttagttatccttaagtccc

SEQ ID NO: 525980 - DNA, 201 bp, Homo sapiens
ttgtttgtttatacccaaaaaaagtccagatatgaaaagggcttttctaaaatttcttggcgagggaatggcactcaaatcatagtgattaacagtaagtyttgtttgtttgtcaaggatctctacttcttgacacaaatgaaccctgtctttaataagataagatatttatttttgtagatgagaagtgtaactaccacc

SEQ ID NO: 525981 - DNA, 201 bp, Homo sapiens
gcatatggatgatttgtttgttccagcactcgttgaaaagactatgtatgtgtggtttggatttttaaactagtctgatcatctctgcctttcaattgttwtttttagtccattttctttcaggtaatttttcacatggaaggctttttcatatgttggttttctaattgtccctccccaacccccaatgttcttcctttc

SEQ ID NO: 525982 - DNA, 201 bp, Homo sapiens
agtgtgaccacatggagtcatcctgagcccatcctgtcagtgaccagctgtacagtgtgtgtgctctaagtgcctaaggatgaaaccgacttctcagtttytaaggtccctacagtagtgttctttcggtgaccttcatactgaccaaagtcatatatacagtattttgtagcttttcctttttggtgaaagacaaagaac

SEQ ID NO: 525983 - DNA, 201 bp, Homo sapiens
ttctaggagtcctattttatatttaggtctatgatccatttcaaattaattttgtgaagggtttaagaactgtgtccagctttttttttttttttttttttggcatatggatgatttgtttgttccagcactcgttgaaaagactatgtatgtgtggtttggatttttaaactagtctgatcatctctgcctttcaattgt

SEQ ID NO: 525984 - DNA, 201 bp, Homo sapiens
ttccttaatggatgtgacatcttttatattcgaggatattaatgatttttaaaaatatctttcatctggtccctttattgtctttttttcttccatgtccsttttttctctcctttttgaaaacgtttttcatcttggagttttttgtctgttttctaatcattgtaggccttccttcatatttaagagtgaggaggacac

SEQ ID NO: 525985 - DNA, 201 bp, Homo sapiens
taatttcttgcttctctttctggatctcctattattttggtgtttgatcttttggcttaattctctgaattttattatttcttctctattttctctttccktgtcttttttgttctactttgtaggtaattatttttccattctattgaattttaaaatttcaactatcatgttttcagtgtctacaagttcctctgttcc

SEQ ID NO: 525986 - DNA, 201 bp, Homo sapiens
gtaatcccagtgctttaggaggccaaggagggcggatcacaaggtcaggagatcgagaccatcctggccaacacggtgaaaccccatctctactaaaaatrcaaaaaaattagccgggtgtggtggcgggcgcctggagtcccagctactcgggaggctgaggcaggagaatggcctgaacccgggaggtagaccttgcaa

SEQ ID NO: 525987 - DNA, 201 bp, Homo sapiens
gctgagatagtgacatttttgctttctgaatattgtataaaattacctttgagccatgtgtataagatgtatgtgacactgacacataaatgatttttttwaattttttaatttttagtttttgtgggtacatagtgtacatatttatggggaacaagagatgttttgatccaggaatgcaatgtgacattagcacatcgt

SEQ ID NO: 525988 - DNA, 201 bp, Homo sapiens
aattttaagtataatttaaatgaggtacatttatgataaaatgtataggtcttaagtgtacaacttggcgaatgttgctaaatggttacacctgtttcaccgtcactccattcaaaacatggaacactttcattccccagaaaggtttctcttgtccctttcttagttcagtttcgtcagttctagaatttcgtataagtg

SEQ ID NO: 525989 - DNA, 201 bp, Homo sapiens
gggcctggtggtgtttgcctgtagtcccagttatgcaagaggctgagctgggaggatcacttgagcccgggaatgcaaggctgcagtgagccttgattgcrccactgctctccagccagggtgacagagtgagaccccatcccctcctcaaatttttttttttttctcacatcaactaaggtgattgaaattcaccatggt

SEQ ID NO: 525990 - DNA, 201 bp, Homo sapiens
ttacttgaacgcaggaggtggaggttgcagtgagccgagatcatgccattgcgctccagcctggacaacaagagctaaacttcgtctcaaaaaaaaaaaaagtactgttaaacaacacgatacggtgctttacagtaacccacaaatcacatagggaccctgcccttttggagttgacagttcagcttcatatttgtgaaa

SEQ ID NO: 525991 - DNA, 201 bp, Homo sapiens
aaattattaatgtagcgcctcattaactttgaataatttgaggctgaggaaacagtaggaaagtcagataagtctcaactttaggatatttacagatatarttttttttgttttgtttttcttttgagacagagtctcgctctgtcacccaggctggagtgcagtggcgtgatctcagctcacttcaaggtctgcctcccg

SEQ ID NO: 525992 - DNA, 201 bp, Homo sapiens
ttaaacactcctataactttatataatatagtcacagctattgcttcacgcaacgaacatctgtctattaagtacctggctgtggtgctttctgccaggtrtgagaaagagatcatttccttacctttctttttttttttctgagacagagtcttgctctgtcacccaggctggagtgcagtggcgccatctccggttcac

SEQ ID NO: 525993 - DNA, 201 bp, Homo sapiens
gttgggattacaggtgtgagccctgtgcccagtccttaatttttattgacgtaaaataactgttaagcttaattattattaaaataatttttaatcgaaakctagttttctagttttagattattagtcctcaagataatgtactgttaagttagtttgatttgaaataagagatttttgctttacagagaaaaactaggt

SEQ ID NO: 525994 - DNA, 201 bp, Homo sapiens
tatttatttattaaaatttcatttattaaatttattttttaaataaattttattaaaatttatttatttatttattttttatttacttattttttagctcwtcagctatcattagtgttagtgtattttatatgtggcccaagacaattcttcctctaatgtttcccagggaagctaaaagtttggacacccctggttaga

SEQ ID NO: 525995 - DNA, 201 bp, Homo sapiens
attactctagtctcatttcatgtatctaagctgaagtcgtctagtggaagatagatagttattaaccagtctagaggtcagatttatctgtaacagaaagraaggcagcctaattggaccttaagctctcgtttttattccctagccttttgctcaaagctgtttcttgttttgggggatatatgaccatgttttaaaact

SEQ ID NO: 525996 - DNA, 201 bp, Homo sapiens
ctcaagagcaggtacaacatttttaagacagatacaatgtaaacctttccagtctactgactgactgcttgttcttcagacgcataggtaggcggcaatgkccaggacccttgggaagcgcagagtgtaacacagctttactaatagctaacctgcccatggtggtggtcaaagaagggggccccacttaactttatatac

SEQ ID NO: 525997 - DNA, 201 bp, Homo sapiens
agagggtctaattatattcctaattctaggaaaaatactgtggaatttattattaatttccctctactgttttactttccggattttgctatacacttgcytgggtctgtgaaatactgtatattctgccaaaaggtagtttccacgtcttgtgttgctgattgtttttgaattctgaggaaattcatactctgccctttt

SEQ ID NO: 525998 - DNA, 201 bp, Homo sapiens
gacgcataggtaggcggcaatggccaggacccttgggaagcgcagagtgtaacacagctttactaatagctaacctgcccatggtggtggtcaaagaaggsggccccacttaactttatatacagaagtcaggatcatctgatcagtttttttagttctttttctgagcttcttctgtcacacccacctggaggaatcttg

SEQ ID NO: 525999 - DNA, 201 bp, Homo sapiens
tggcgtttggtttgaatttttaaatataggggcttatggttggggaacagagaacagtaaagcaaagttatataaataaaacattgcaggatgcctttttmtgtttgaagttttgaggtttagaagcatgaagtcctcagggtcatttatattctgctgtctttgattaaaatgtactttaattttcaaaaggagatttac

SEQ ID NO: 526000 - DNA, 201 bp, Homo sapiens
cttgatgcttctcagtctcccatcattccttccttcctctcagcagatgatttaacttgctgtttcccggaaaagggaacccactgatgagaattccctcrgttgatttctcatcacacctacaagcttgtccgtcccttcctgagtctaatctcccccctccatacacttgtgtccccctctgtcatctccccactctgg

SEQ ID NO: 526001 - DNA, 201 bp, Homo sapiens
gagatgatattggcgtttggtttgaatttttaaatataggggcttatggttggggaacagagaacagtaaagcaaagttatataaataaaacattgcaggrtgcctttttatgtttgaagttttgaggtttagaagcatgaagtcctcagggtcatttatattctgctgtctttgattaaaatgtactttaattttcaaaa

SEQ ID NO: 526002 - DNA, 201 bp, Homo sapiens
aggttgcagtgagcaacagagacctgggcaacagagatcgtgcccctgcactccagtctgagaacagagcgagactttgcctcaaaaaaaaaaaaaaaaatagtttggcatgggtgcaacagcccacctagcctataatcttaacactttgggaggccaaggcaggaggattgcttcagctcaggagttcaagaccagcct

SEQ ID NO: 526003 - DNA, 201 bp, Homo sapiens
taacctgcccatggtggtggtcaaagaagggggccccacttaactttatatacagaagtcaggatcatctgatcagtttttttagttctttttctgagctkcttctgtcacacccacctggaggaatcttggtcccagatcagctcatgcatctgttccttctgaccccagccccagctgctgaggccgacagagaagtta

SEQ ID NO: 526004 - DNA, 201 bp, Homo sapiens
ccagctacttaggaggtggaggcaggagaattgcatgaacccaggaaggggaagttgcagtgagccgagatctcaccattgcactcctgcctgggcaacargagtgaaaaaaaaaaaaggaaaaaatgtggtttggttttttgcattgtggcatattcctatattaaaagtgtgattgtttaaaaaaaaatgagttagttt

SEQ ID NO: 526005 - DNA, 201 bp, Homo sapiens
attttatttagctgggttcagaaattctgatagtaatttgtattctaaattctgtttttaacaccctaaactataaccttgagattttgatcttgttttawatatatactgtgatgatattgacgtgcccaatgatttcttctctctctgtaggcaccagaatttcctgagtttgccactaaagtccaggaagctatcaat

SEQ ID NO: 526006 - DNA, 201 bp, Homo sapiens
ctgagcagatatcccaaggagcatgtgctattttaacatccccttggttttctttgacagaagagaaatcagcaggaggacgactgatgagcgtactggarctggagaagaggaggccccgccccaccgctccgggagctgctcatcagccgcaacttcctgccgaccctgatgcgggtgggccgagcagtgtggacatca

SEQ ID NO: 526007 - DNA, 201 bp, Homo sapiens
ataaaatgagaaattacgtgagaatcttactttgacatatattttcacatatgctgtattccggaaaagatgtctcctgtttgatttataatttttagatrgagcactgctttttgaagcccagtgcagtatttaaatttaatgttttatttttttcctctttttcatgcagtggtctgatgatgagaacacagccacgct

SEQ ID NO: 526008 - DNA, 201 bp, Homo sapiens
gattttatttagctgggttcagaaattctgatagtaatttgtattctaaattctgtttttaacaccctaaactataaccttgagattttgatcttgttttmtatatatactgtgatgatattgacgtgcccaatgatttcttctctctctgtaggcaccagaatttcctgagtttgccactaaagtccaggaagctatcaa

SEQ ID NO: 526009 - DNA, 201 bp, Homo sapiens
aagtatctcttattctctcatgtcaatagtttcagtatttgtgcaaatttctctatagatgaaattccattacttatagtactattataaatcatagctcyatataacaaagctatttcatattgccaaaatgacctgttaaagcaaatctttcttttccctttatagaaaatggtgtataatgaatatctgaaaatgtta

SEQ ID NO: 526010 - DNA, 201 bp, Homo sapiens
aagcatcttcctttctcctcatcaagtacagaggaaaacatggagttgaaattgttttgctaggttcttttttagttcacagaataggcctaaaaataaatgattgatattctttctcctttttcttctttgtacaggattccccagctttccgttgcacaaacagtgaagtgacagtccagcccagcccctatttgagtt

SEQ ID NO: 526011 - DNA, 201 bp, Homo sapiens
tgagttagtctcctgtttctggatgcttttagtaaaacgttactctcatgttaaatatatgttaagtgtgtgcataaactggcaccagtaacaaaaagatwcagttgccttttcttcttcttccaaaggtttattcattgtactgatgattctccagatccatgtatagaatatgaggtaagaagcttattttctttgata

SEQ ID NO: 526012 - DNA, 201 bp, Homo sapiens
taagcatcttcctttctcctcatcaagtacagaggaaaacatggagttgaaattgttttgctaggttcttttttagttcacagaataggcctaaaaataaatgattgatattctttctcctttttcttctttgtacaggattccccagctttccgttgcacaaacagtgaagtgacagtccagcccagcccctatttgagt

SEQ ID NO: 526013 - DNA, 201 bp, Homo sapiens
ttaagcatcttcctttctcctcatcaagtacagaggaaaacatggagttgaaattgttttgctaggttcttttttagttcacagaataggcctaaaaataaatgattgatattctttctcctttttcttctttgtacaggattccccagctttccgttgcacaaacagtgaagtgacagtccagcccagcccctatttgag

SEQ ID NO: 526014 - DNA, 201 bp, Homo sapiens
agtctttttttccctttcccttgtttttaatgatatctgagaacaggacagaaaggttttattctgtcatctcttcatgcaactgtactctcatttatttmtttcttctttttttgagacggggtctcactctcttgcccaggctatagtgcagcggtgtgatcttaggtcattgtagcctcaaactcttgggctcaaggg

SEQ ID NO: 526015 - DNA, 201 bp, Homo sapiens
aacatttgttggatgaaggaactatagaaatacagtaagaattgtgtgttttcagtactactaactggaccccatatttttgcctgttgggtttttagtgtggttttctggattatatttctgtttttggtattcacagagcctcaataacctgaaaattattaatgtagcgcctcattaactttgaataatttgaggctg

SEQ ID NO: 526016 - DNA, 201 bp, Homo sapiens
acttttaagttgcaaagtttcgcttgaaattgtttaaaatttagtagattttcaaacgtaataagatttgttagaagaaattaaaagcctgaagaactagrttttttttttttgagacagagttttgttctgtcgcccaagctggagtgcagtggcagcgatcttggctcactgcaagcttcccttcccgagttcacgcca

SEQ ID NO: 526017 - DNA, 201 bp, Homo sapiens
cttaagcatcttcctttctcctcatcaagtacagaggaaaacatggagttgaaattgttttgctaggttcttttttagttcacagaataggcctaaaaataaatgattgatattctttctcctttttcttctttgtacaggattccccagctttccgttgcacaaacagtgaagtgacagtccagcccagcccctatttga

SEQ ID NO: 526018 - DNA, 201 bp, Homo sapiens
agcagtgtggacatcagccactttttatattcatgtacattcacctggggaaaaaaacggagggactttgctacttgtaaaaataacataataaatagatyttaaacataggaaaaccatactgttctgataataaaatgctttctatgaaatacgttgcttttctaccgagtcattattttatttatttattttaatttt

SEQ ID NO: 526019 - DNA, 201 bp, Homo sapiens
ggagctgctcatcagccgcaacttcctgccgaccctgatgcgggtgggccgagcagtgtggacatcagccactttttatattcatgtacattcacctgggraaaaaaacggagggactttgctacttgtaaaaataacataataaatagatcttaaacataggaaaaccatactgttctgataataaaatgctttctatga

SEQ ID NO: 526020 - DNA, 201 bp, Homo sapiens
attactatttggcaaccattgtaataatatttgattgaatagatgctaaaattagtgggtgaatatacagtgagaaagaggatagttccatcttttctaastatcttcacccaaattacttactgtttgcgcaaagaaaaatagtaatgttacaatgcaaagacctggcagccaagtgatcagtattaaccttgtcagtga

SEQ ID NO: 526021 - DNA, 201 bp, Homo sapiens
cgctccgggagctgctcatcagccgcaacttcctgccgaccctgatgcgggtgggccgagcagtgtggacatcagccactttttatattcatgtacattcmcctggggaaaaaaacggagggactttgctacttgtaaaaataacataataaatagatcttaaacataggaaaaccatactgttctgataataaaatgctt

SEQ ID NO: 526022 - DNA, 201 bp, Homo sapiens
catttactccagatgccattcagatcactctccttttatgaaaattccattcagtgtcatgtaaatgttacttatctgccatactcagggcactaaactarattccgtgagatgaacaaagatgaatatgatttcatttccaccattaggggtttgtaaaccagtgggaaaggtgacacaggcagggggagatgacagtgc

SEQ ID NO: 526023 - DNA, 201 bp, Homo sapiens
tgccttgtctttttgctttcttctgctcccgccagtccaactcctcttccctaatgaggactgcacacctcgctttgcttctgccttcttcaaagacagcrtgcctgtttattttcccctctctctctcaccctttgctgtggttcagtctagatgcagaatgaatttctgacaccagcccgcacaccctgttttcactgt

SEQ ID NO: 526024 - DNA, 201 bp, Homo sapiens
gttgtgggagcagggtgggaggaaggggactaggggtcgcagtgttcagtttgactttcacataacttgtcatcatagtccaggtccagcatttcaccccyatattcatttgggccattatgtacctcaaccctcttgagttcattttttccagagaataaatctgcttaccaaaggggctgaggagaattagttgctagg

SEQ ID NO: 526025 - DNA, 201 bp, Homo sapiens
tgaattttattatttcttctctattttctctttccttgtcttttttgttctactttgtaggtaattatttttccattctattgaattttaaaatttcaacyatcatgttttcagtgtctacaagttcctctgttccttttttatagcctcctgttcttccttaatggatgtgacatcttttatattcgaggatattaatga

SEQ ID NO: 526026 - DNA, 201 bp, Homo sapiens
tgaaatcacgccactgcactccagcgtgggcaacagagcgagactccatctcaaaaaaaaaaaaaaaaaaagattggaagcattattgtatccatttttgmccatttaaggtattttttctccatttattgtgttaagtacttggtgagccctttcattctaaagactttaattttcctgtttcaggatattaaaaaagaa

SEQ ID NO: 526027 - DNA, 201 bp, Homo sapiens
ctgaaatcacgccactgcactccagcgtgggcaacagagcgagactccatctcaaaaaaaaaaaaaaaaaaagattggaagcattattgtatccatttttrcccatttaaggtattttttctccatttattgtgttaagtacttggtgagccctttcattctaaagactttaattttcctgtttcaggatattaaaaaaga

SEQ ID NO: 526028 - DNA, 201 bp, Homo sapiens
tagctgggcgtgatggcggacgcctgtagtcccagctacttgggaggctgaggcaggagaatcacttgaactcgggaggcggaggttgtagtgagcagagwtcgcaccactgcactccagcctgagtgacagagcgagactccatctcaaaaaaaaaaaaaaagaaagtcaagtagaaaagatttggaggttagaaaatgt

SEQ ID NO: 526029 - DNA, 201 bp, Homo sapiens
cacctgctgagcagatatcccaaggagcatgtgctattttaacatccccttggttttctttgacagaagagaaatcagcaggaggacgactgatgagcgtrctggaactggagaagaggaggccccgccccaccgctccgggagctgctcatcagccgcaacttcctgccgaccctgatgcgggtgggccgagcagtgtgg

SEQ ID NO: 526030 - DNA, 201 bp, Homo sapiens
tgctgagcagatatcccaaggagcatgtgctattttaacatccccttggttttctttgacagaagagaaatcagcaggaggacgactgatgagcgtactgkaactggagaagaggaggccccgccccaccgctccgggagctgctcatcagccgcaacttcctgccgaccctgatgcgggtgggccgagcagtgtggacat

SEQ ID NO: 526031 - DNA, 201 bp, Homo sapiens
ggttgcagtgagcaacagagacctgggcaacagagatcgtgcccctgcactccagtctgagaacagagcgagactttgcctcaaaaaaaaaaaaaaaaatagtttggcatgggtgcaacagcccacctagcctataatcttaacactttgggaggccaaggcaggaggattgcttcagctcaggagttcaagaccagcctg

SEQ ID NO: 526032 - DNA, 201 bp, Homo sapiens
cgctcacaagctaatagacttccttaagctggtaaagtctatgtgcatttagtatgctggccatcttttcaaatagaccttcaaattggcttttatataayatttcattggaatcctgtatcacctagactttgatggttatgaatggaaccaagttactgagttagagcattttctaattaaatatgaaataggagctga

SEQ ID NO: 526033 - DNA, 201 bp, Homo sapiens
gaggttgcagtgagcaacagagacctgggcaacagagatcgtgcccctgcactccagtctgagaacagagcgagactttgcctcaaaaaaaaaaaaaaaaatagtttggcatgggtgcaacagcccacctagcctataatcttaacactttgggaggccaaggcaggaggattgcttcagctcaggagttcaagaccagcc

SEQ ID NO: 526034 - DNA, 201 bp, Homo sapiens
tcatgtacattcacctggggaaaaaaacggagggactttgctacttgtaaaaataacataataaatagatcttaaacataggaaaaccatactgttctgawaataaaatgctttctatgaaatacgttgcttttctaccgagtcattattttatttatttattttaattttaattttttgagacagtctcgctgtgtcgcc

SEQ ID NO: 526035 - DNA, 201 bp, Homo sapiens
atttatatttttgtgtggatttctgtgtaggagtttttgtatgtatggaagaaagagaagaaaatactcaaatacctgaggataatttgctcaggagtcaragtgataaactagtttaatgaattaaagcatggttttccatgacaatttttaattacatcctttgccaagacctctagaaaattacacctgctgagcaga

SEQ ID NO: 526036 - DNA, 201 bp, Homo sapiens
gcatggttttccatgacaatttttaattacatcctttgccaagacctctagaaaattacacctgctgagcagatatcccaaggagcatgtgctattttaasatccccttggttttctttgacagaagagaaatcagcaggaggacgactgatgagcgtactggaactggagaagaggaggccccgccccaccgctccggga

SEQ ID NO: 526037 - DNA, 201 bp, Homo sapiens
agaggttgcagtgagcaacagagacctgggcaacagagatcgtgcccctgcactccagtctgagaacagagcgagactttgcctcaaaaaaaaaaaaaaamatagtttggcatgggtgcaacagcccacctagcctataatcttaacactttgggaggccaaggcaggaggattgcttcagctcaggagttcaagaccagc

SEQ ID NO: 526038 - DNA, 201 bp, Homo sapiens
cagaggttgcagtgagcaacagagacctgggcaacagagatcgtgcccctgcactccagtctgagaacagagcgagactttgcctcaaaaaaaaaaaaaamaatagtttggcatgggtgcaacagcccacctagcctataatcttaacactttgggaggccaaggcaggaggattgcttcagctcaggagttcaagaccag

SEQ ID NO: 526039 - DNA, 201 bp, Homo sapiens
gaatcgcttgaacctgggaggtggaggttgcgatgagctgagattgctccattgcatccagcctgggcaacaagagtaaaacttcgtctaaaaaaaaaaaattagttttggcagctgggcatggtggttcatgcctgtaatcccagcactttgggaggccgaggcaggcagatcacctgaggtcaggagtttgagaccagc

SEQ ID NO: 526040 - DNA, 201 bp, Homo sapiens
tgatggtttcattcaataaagatcggatatgtacttgaaaatgtgtaactggcttagaatggttaaaatgtataagaaaagtttcaagttcttaaatagtrttggaatgtgtggtagaaccttagattcattgtacttaacaatttcgcttgttagctttgtaagagtaaaatacttaggaaggcttatttgtaatcagca

SEQ ID NO: 526041 - DNA, 201 bp, Homo sapiens
atgtccaagacgggcggatcaggaagtcagggtatcgagaccatcctggctaacacggtgaaaacctgtctctactaaaaatacaaaaaaaaaattagccrggcgtggtggcgggcgcctgtagtcccagctacttgggaggctgcggcaggagaatggcatgaatccgggaggcagagcttgcagtgagccgagattgtg

SEQ ID NO: 526042 - DNA, 201 bp, Homo sapiens
ccaaattgcccacctgtggtttcagaacaggacaaggtagacatttctttcagaggttggggtggttttttttttttcttttttcttttttttttttttttacgtccccttcatatgctgtcaagctctattgtacagacggaacacttaccacattcacatagaaagaaaacagcatcttcaggctgggcacggtggctc

SEQ ID NO: 526043 - DNA, 201 bp, Homo sapiens
tcagtaagtgttcgtcgaatttgagttagtctcctgtttctggatgcttttagtaaaacgttactctcatgttaaatatatgttaagtgtgtgcataaacyggcaccagtaacaaaaagattcagttgccttttcttcttcttccaaaggtttattcattgtactgatgattctccagatccatgtatagaatatgaggta

SEQ ID NO: 526044 - DNA, 201 bp, Homo sapiens
gtacagtcttgctcataacattgtttcgatgattaaatgagttcatatctcaggctgcctaggctaatgcaaagcattgaatacggctcagtaagtgttcrtcgaatttgagttagtctcctgtttctggatgcttttagtaaaacgttactctcatgttaaatatatgttaagtgtgtgcataaactggcaccagtaaca

SEQ ID NO: 526045 - DNA, 201 bp, Homo sapiens
gtgacctttccctgaggagagtcaccaaattgcccacctgtggtttcagaacaggacaaggtagacatttctttcagaggttggggtggttttttttttttcttttttcttttttttttttttttacgtccccttcatatgctgtcaagctctattgtacagacggaacacttaccacattcacatagaaagaaaacagca

SEQ ID NO: 526046 - DNA, 201 bp, Homo sapiens
ctgactataaaaagccaagtagaggctgggcacagagggtcacgcctgtaatcccaacactttgggaggctgaggcaggcagatcacgaggtcaggagatygagaccatcctgacacagtgaaaccctgtctctactaaaaatacaaaaaattagctgggcgtgatggcggacgcctgtagtcccagctacttgggaggct

SEQ ID NO: 526047 - DNA, 201 bp, Homo sapiens
ggaggcaggagaattgcatgaacccaggaaggggaagttgcagtgagccgagatctcaccattgcactcctgcctgggcaacaagagtgaaaaaaaaaaaaggaaaaaatgtggtttggttttttgcattgtggcatattcctatattaaaagtgtgattgtttaaaaaaaaatgagttagttttactgactataaaaagc

SEQ ID NO: 526048 - DNA, 201 bp, Homo sapiens
agatatcccaaggagcatgtgctattttaacatccccttggttttctttgacagaagagaaatcagcaggaggacgactgatgagcgtactggaactggaraagaggaggccccgccccaccgctccgggagctgctcatcagccgcaacttcctgccgaccctgatgcgggtgggccgagcagtgtggacatcagccact

SEQ ID NO: 526049 - DNA, 201 bp, Homo sapiens
gagaagaggaggccccgccccaccgctccgggagctgctcatcagccgcaacttcctgccgaccctgatgcgggtgggccgagcagtgtggacatcagccrctttttatattcatgtacattcacctggggaaaaaaacggagggactttgctacttgtaaaaataacataataaatagatcttaaacataggaaaaccat

SEQ ID NO: 526050 - DNA, 201 bp, Homo sapiens
tgctattttaacatccccttggttttctttgacagaagagaaatcagcaggaggacgactgatgagcgtactggaactggagaagaggaggccccgccccmccgctccgggagctgctcatcagccgcaacttcctgccgaccctgatgcgggtgggccgagcagtgtggacatcagccactttttatattcatgtacatt

SEQ ID NO: 526051 - DNA, 201 bp, Homo sapiens
gttataaaatcctgatcctgatcctcctagtttatagaagttacagctgggttttttttaatttacttaaactctttttttttgtactagaggatagcttytgagctacagagtacactaccaattaacagtggtggtttgttttcatttaaaaatgtgttttgggctgggtacagtggctcacgcctgtaatctcagcac

SEQ ID NO: 526052 - DNA, 201 bp, Homo sapiens
catattggccaggctggtctcgaactcctgaccttgtgatctgcctgccttggcctcccaacgtgttaggcttacaggtgtgagccaccacgccaagcctrtggtttatatttcttagtgggctgcttttgcacttaccagtgtgacatcattgcgtgtctaaattcattattttccattcccttagtgctgcgcctctgg

SEQ ID NO: 526053 - DNA, 201 bp, Homo sapiens
cactatagaacagttcttagctttgactggttcttagctttgtgaatctggaaaagcaagaattacaaagagttgattaaaacttggggaaggccgggtgyagtggctcatgcctgtaatcccagcactttgggaggccaaggcggttcgattatctgaggccagcagtttgagaccagactgaccaacatggcgaaaccc

SEQ ID NO: 526054 - DNA, 201 bp, Homo sapiens
attgactatagtcactctattgttctgtcaagtagtaggtctgtggtcgggtgctgtggctcatgcctgtaattccagcacttttggaggctcaggtgggyagatcacctgaggtcaggagttcaagaccagcctggcccaacatggtgaaaccccgtctcaactaaaactacaaaaattagctgggcatggtggcaggcg

SEQ ID NO: 526055 - DNA, 201 bp, Homo sapiens
gaccacatgtgtggggttttcttcccaccaagaagcaatcggttctgcagcagacaccagctaagggtcctccagtccaattcagttgacactgtctaccyggaggagcatcagatcccacaggttgaggctcagtctcacaaagactgccccccactctgatgtcagctgcaagccccaggtgcctctacctgtgcaact

SEQ ID NO: 526056 - DNA, 201 bp, Homo sapiens
tttttgtactagaggatagcttctgagctacagagtacactaccaattaacagtggtggtttgttttcatttaaaaatgtgttttgggctgggtacagtggctcacgcctgtaatctcagcactttgggaggcctaggcgggcagatcacctgagtttaagaattggagaccagcctgaccaacatggtgacaccccatct

SEQ ID NO: 526057 - DNA, 201 bp, Homo sapiens
aggccaagtatgatgactagtttaccttgtttgccgactcagatctaatggtaatggtttcctggagtgatatgtagaggattctgaggctgcatccaggrttcggtgagaaagcatgcttggtttgattctcgttgcctgctgtgggtgtaggaaaggaggctggcaatgtgcttttctggtagagacagtgattcaatt

SEQ ID NO: 526058 - DNA, 201 bp, Homo sapiens
tgaacccgggaggcggagcttgcagtgagccgagatcgcgccactgcactccagcctgggctacagagcgagactccgtctcaaaaaaaaaaaaaaaaaaattattattattatttttagtcaactaaaagtgactcaaagtttgagttacttttatctttagacagaagaggattagtttattttttaaatcttaaaagt

SEQ ID NO: 526059 - DNA, 201 bp, Homo sapiens
tggaccctaattcttcatgcctcatcctccattacttccacatatagtacatgcctttctttccagactctataaggtatagtcttgtttacagttagaakttagcacatagtctgggttcaataaatattggttgaatgagtgaatgaacatgcttatcctactttctctccatggtaacctctactgagttcagtgaat

SEQ ID NO: 526060 - DNA, 201 bp, Homo sapiens
ctccgcgtggtacccgttcttccgaggcgttaccatcaagaggtgagatgggagggggttcgcccggtcgaccggcaaaagggaactgcgacttctgagcsaatcttactgctatccaaaaaaatgcaggccttctagcgactgcatgggagggagtgtgtcgagagggaagtacatcagcaattgtctgcgtcctgttgc

SEQ ID NO: 526061 - DNA, 201 bp, Homo sapiens
gaggctgaggcgggagaatggcgtgaacccgggaggcggagcttgcagtgagccgagatcgcgccactgcactccagcctgggctacagagcgagactccstctcaaaaaaaaaaaaaaaaaaattattattattatttttagtcaactaaaagtgactcaaagtttgagttacttttatctttagacagaagaggattag

SEQ ID NO: 526062 - DNA, 201 bp, Homo sapiens
cccggaggagcatcagatcccacaggttgaggctcagtctcacaaagactgccccccactctgatgtcagctgcaagccccaggtgcctctacctgtgcarctgaccaggcggctagaaatgagggtccctccttgggtttgattcatttgctagagcagctcgcagaactgagggaaacatttacttcggtttaccggtt

SEQ ID NO: 526063 - DNA, 201 bp, Homo sapiens
tattattctgatttcttgtctactgctaccaaatgtacatcattaacattttctactttatattaaaagaaagacaattccaaaattaatcaagtgtagasatttttctctctgcttatagttggtcttttaaaatgatgccttttttggtgttttttttttagtgtcattcttccacttcctcagaatgtgaaggattat

SEQ ID NO: 526064 - DNA, 201 bp, Homo sapiens
tgaggtcaggagttcaagatcagcctcggcaacatggtgaaactccgtctctactaaaaatacaaaaaaatgagccaggcatggtggtgggtgcctgaaaycccagctactcaggaggcagagattgcagtgagcggagatcacgccattgtgctgcagcctgggcaacagagcgagactctgcctcaaaagagaaaaaaa

SEQ ID NO: 526065 - DNA, 201 bp, Homo sapiens
agctctttttctctcctagccaaaatgatgtgctgatctttgtctcatattccttctcaatgttcacttaatattttcaacattaagtacttttccctctrataattacaagttgtgaaattgagcagttcctttcatctctgtctttagaaaacagttatgatgacaacttttccttctgacggtagcagggtgggggaa

SEQ ID NO: 526066 - DNA, 201 bp, Homo sapiens
cgttctccgaaaatggtgtgaattgattcctggggctgagtttcgatgttttgtcaaggaaaacaagcttattggtgagtttttgtttgtttgtttgttttatccttcaaagtcatctttaaaagaaaacaagcttttgttggaagtaaatttccagtaattaggacagggatgtcaatctgttttcatctcagatgccac

SEQ ID NO: 526067 - DNA, 201 bp, Homo sapiens
aatctgttgagaattttgaaaagttagtgattttaggttaggttacttctacagataaaaacttgaaaattttaagtataatttaaatgaggtacatttaygataaaatgtataggtcttaagtgtacaacttggcgaatgttgctaaatggttacacctgtttcaccgtcactccattcaaaacatggaacactttcatt

SEQ ID NO: 526068 - DNA, 201 bp, Homo sapiens
ttcattgtgacaaacctcaataataattatatcaaagtaagcattacctcatggtacttaaggtagacaactttagaattatattattttattttactatrttttattttattttattttttagatggagttttgctctgtcgcccaggctggagtgcagtgtggcgcaatctcggctcactgcaacctccgcttcctggg

SEQ ID NO: 526069 - DNA, 201 bp, Homo sapiens
atgaagatggtcatttgctcaggttgagagaagcattgtctgtggagcctttttgaaacctcacaatctgttgagaattttgaaaagttagtgattttagrttaggttacttctacagataaaaacttgaaaattttaagtataatttaaatgaggtacatttatgataaaatgtataggtcttaagtgtacaacttggcg

SEQ ID NO: 526070 - DNA, 201 bp, Homo sapiens
attgcttcacgcaacgaacatctgtctattaagtacctggctgtggtgctttctgccaggtatgagaaagagatcatttccttacctttctttttttttttctgagacagagtcttgctctgtcacccaggctggagtgcagtggcgccatctccggttcacgccattctcctgcctcagcctcccaaggagctgggatta

SEQ ID NO: 526071 - DNA, 201 bp, Homo sapiens
ttgaagggctctgagcaagagaatgactcgatcagatttcagtttgcagctgtggcaggtgactgtggaaatggaagacgggttaggaggatattgcattkgactgggtgagacctgctagtggcttgaactaagatggtgacagtggggttgagggaggaagtgggtttcagaagattgggagcttgcaccttcagaact

SEQ ID NO: 526072 - DNA, 201 bp, Homo sapiens
ttagtcctcaagataatgtactgttaagttagtttgatttgaaataagagatttttgctttacagagaaaaactaggttgtttttagttttttttttttttgaaacggtgtcttactcggtcacccaggctggagtgcagtggcgcaatctcggctcactgcaacctccgcctcctggattcaagcagttctcctatctca

SEQ ID NO: 526073 - DNA, 201 bp, Homo sapiens
gagacgctcctcacttcccagacggggcggctgctgggcggaggggctcctcacttctcagacggggcggccgggcagagaggctcctcacctcccagacrgggtggaggttgggcagagacactcctcagttcccagacagcgtcgcggctgggcagaggcgctcctcacatcccagacggggcggcggggcagaggcgc

SEQ ID NO: 526074 - DNA, 201 bp, Homo sapiens
agtccccatcttggacactttggattggaatctctggggaagtattttgaaaaatcatctcattccactctctcattttcaaacctgtgttctagaagctytgacacaccctgaggttcagcgtgcagtaagtagttaactgaatataaagacagggaagaaaaagcgggcctgacaagttgtctacagatttgattgcat

SEQ ID NO: 526075 - DNA, 201 bp, Homo sapiens
ctgttcacctgggaagaactgatatctgagaacaacttaaacggcgattttagtgaagttgacgctcaagagcaggtacaacatttttaagacagatacartgtaaacctttccagtctactgactgactgcttgttcttcagacgcataggtaggcggcaatggccaggacccttgggaagcgcagagtgtaacacagct

SEQ ID NO: 526076 - DNA, 201 bp, Homo sapiens
gcatctttcttaacagtttgctctcgctcagctgagaaacagtgccagatattaggcatgctggctcagcggtcttgttgcttggaatttcacagacacayacccgctcaggacatggcggcaacacatttatagaaaaaaacaaattcattattaaccagatggcacaaatatatgaatgtttcagtgagaaaagtgaaa

SEQ ID NO: 526077 - DNA, 201 bp, Homo sapiens
ttctgaggctgcatccagggttcggtgagaaagcatgcttggtttgattctcgttgcctgctgtgggtgtaggaaaggaggctggcaatgtgcttttctgrtagagacagtgattcaatttcactgaacagttattgcatgcctagtatgagatgggcaccaaggaaacgggcaccaagcttgatactagcgtaacaagat

SEQ ID NO: 526078 - DNA, 201 bp, Homo sapiens
ttccctcgcacatgtaggcaggctctcctgtgtgcctctccgctctcacagttccctgttcttgcctctcttgaagcaaaataccctgcacattgccattrttggatggcttttggttctgttttggggaagtggagatgtgtgttctgctcaagcctgagctcttggaaggagtcgattttgtgttacgatcttcatgcc

SEQ ID NO: 526079 - DNA, 201 bp, Homo sapiens
aaataaaggatattaataatggatacagatgaagagatgcgtagggtgaggtgtaggggaagggatgcagatcttccatgccctacctacacgtgccaccytccagaagctccatgtgttcagctatccggaagctctttgtacttcacaagaaagtgggagatggctgtggaggtctgccatggaccctaattcttcatg

SEQ ID NO: 526080 - DNA, 201 bp, Homo sapiens
ctccgtgcttagatcagcctcattgtaagtgagacagtcatttgaatctgaatcacctttggacatcttcgaatcatctttggacaaaaagatatggcccrtatgatcatgtcccagaataactgttaactgttcatttaactcttacgtcaaaagacatcactatattttcacctctttgtcttcaaagatgatggtgtc

SEQ ID NO: 526081 - DNA, 201 bp, Homo sapiens
tggcttgaacccaggaattggaggctgcagtgagctatgatcatgcctctgcactccagcctgggcaacagagcaagaccttgtctcaaaaaaaaaaaaawaaaagtatcaggtattctgataagtaatgtatttggggtttaattaatcactgtgagctggggtcatccagaaagtgtttacagtaaggtgatacttgaa

SEQ ID NO: 526082 - DNA, 201 bp, Homo sapiens
tgcctcagcctccttagtagctggggctacaggtgcctgccaccacacctggctaattttttgtgtttttagtagaggaggtttcacatgttggagcgcartggcgcgatctgggctcactacaacctctgcctcctgagtagctgggattacaggcacccgccaccatgcctggctcatttttttgtacttttagtagag

SEQ ID NO: 526083 - DNA, 201 bp, Homo sapiens
gggagagctgaggatcgcgaggagggtcggggaatgctccgaagaaggatctttggagcctctgagatgtgaagattggaggaatgtagtcagttgaaggstgaagggaagaatcttccaggtggggggaacagcattaatgaaggctctaggcctggaagatcttgacatacaagaagcttgggaaaggtcatgtagcta

SEQ ID NO: 526084 - DNA, 201 bp, Homo sapiens
tccttgtctgaatattgggcaaatgacagtatagaacttactttgtagggtcattgcaaagatacaaagtgataatacataaaatgttcagtctaatgccmactatattgtatgctcttaaaacatggaactacttttattatcattgatctaagatgaacatagcaaacacacaagagaatatataatgaaaattgggat

SEQ ID NO: 526085 - DNA, 201 bp, Homo sapiens
tatgtgtctagtccccatcttggacactttggattggaatctctggggaagtattttgaaaaatcatctcattccactctctcattttcaaacctgtgttytagaagctctgacacaccctgaggttcagcgtgcagtaagtagttaactgaatataaagacagggaagaaaaagcgggcctgacaagttgtctacagatt

SEQ ID NO: 526086 - DNA, 201 bp, Homo sapiens
tatcccaaggagcatgtgctattttaacatccccttggttttctttgacagaagagaaatcagcaggaggacgactgatgagcgtactggaactggagaaraggaggccccgccccaccgctccgggagctgctcatcagccgcaacttcctgccgaccctgatgcgggtgggccgagcagtgtggacatcagccactttt

SEQ ID NO: 526087 - DNA, 201 bp, Homo sapiens
aaaataataccagcactcttagggatctgtggtagggctttttgataatttattatttcaaggtaaaaaacaaattatcccataagtttttaagagacttsaggtatggctttgccatccttaattatgattacctgaaacaaattaagctaaagcatgcctagtttaagcagctttatatctctggtgatcagttgaata

SEQ ID NO: 526088 - DNA, 201 bp, Homo sapiens
tggctcactgcaacctccgcctcctgggttgaagcagttcttctgcctcagcctcccaagtagctgggattacaggcgcatggctaccacgcccagctaawttttttttgtatttttagtaaagacggtgtttcaccacgttagccaggatggtctccatctcctcacctcgtgatccgcctgcctaggcctcccaaagtg

SEQ ID NO: 526089 - DNA, 201 bp, Homo sapiens
gagtgagactctgtctcaaaaaaataaataaatgaataaaagaaaagaaaatatgtgtctagtccccatcttggacactttggattggaatctctggggargtattttgaaaaatcatctcattccactctctcattttcaaacctgtgttctagaagctctgacacaccctgaggttcagcgtgcagtaagtagttaact

SEQ ID NO: 526090 - DNA, 201 bp, Homo sapiens
gtctcactctgtcgcccaggctggagtgcagtggtgcaatcttggctcactgcaacctccgcctcctgggttgaagcagttcttctgcctcagcctcccawgtagctgggattacaggcgcatggctaccacgcccagctaatttttttttgtatttttagtaaagacggtgtttcaccacgttagccaggatggtctcca

SEQ ID NO: 526091 - DNA, 201 bp, Homo sapiens
ccctcaggacactgtgtcctcctcctctttctccagatgccctctgctctttttgcaattcttcctctctatcaactctgtccatccggatttagtcatgytcagatacctcccatccgaaaaaaacaaaacattgttcaacccggtttcttcacccagccactctctcctttcctgccagcttcacagccagactttcct

SEQ ID NO: 526092 - DNA, 201 bp, Homo sapiens
tcaagaagctgaggcaggagaatcacttgaacccgggagacggaggttgcagtgagctgagatcacgccactgcaattcagcttgggcgacaaagactccrtctccaaaaaaaaaaaaaaaaaaaagaaaaaaattaaattacatgaataagctttcttccccatgaaaataatgtgtgtcacttcacacttggtctaaca

SEQ ID NO: 526093 - DNA, 201 bp, Homo sapiens
tgttgagcaagctggactttgggatcactcagattcagtacccatttttgccttggacctcttaattttcttctatcacttcctgtttacccttggtgtgrtcaggttgcaaggggcactgatgtcttgagactccctgaaggatatagattatcgcctacattcagtgctcttacacactccgggtttgccacagatatt

SEQ ID NO: 526094 - DNA, 201 bp, Homo sapiens
aatgcaacattcccttcaccatctgctctgcagtatagtccgcagaccagttgcatcacaatcacttgggacactattaaaatgcagattcctggccaggygcggtggctcacgcctataatcccagcactttgggaggctgaggtgggctgatcccttgagatcaggagttcaagaccagcctggccaacatggtgaaac

SEQ ID NO: 526095 - DNA, 201 bp, Homo sapiens
gggctaagaaagctgctggtggggcagggaacagagagaagagttgggactttgagattctaatcgtctaaatctgaatacatttcatcatcctgactctragcggaaaggaactatgaaattcaaagggaagttagcataggcagagcatgcaaaaacctctctcccaaacctaagcattgcttgagagttgtactttgc

SEQ ID NO: 526096 - DNA, 201 bp, Homo sapiens
agaggcagagaaaggtataccttctaaagacatgcagaagtctccagaggatggtatagggcgttaagtctgcaagcaatcagtatttgatgaaagaatasactgaatcagctcctctatcttctaagagggctaagaaagctgctggtggggcagggaacagagagaagagttgggactttgagattctaatcgtctaaa

SEQ ID NO: 526097 - DNA, 201 bp, Homo sapiens
ggaaataaacaaaagaaaactaagatccccaagcccaacagagctcaaaggaaggcagaagaggtggtaggaagtagagggaaggcagccgataggcccaraagctaaggccaaatcctgttcctatgggggtggggggagggagaagcctggggaagtggtttcccaggcccaagataatgaaacatcttcactcctgct

SEQ ID NO: 526098 - DNA, 201 bp, Homo sapiens
cctcaggtgatccgcccatcttggcctcccaaagtggtgggccactgggaccggcctctgtttttataaagggtttccatttctggggaaaagaatgggaytaagagggccagctccataatcaggtcttatatctcttttcaaaagccttaccggcccggcgtggtgactcacgcctgtaatcccagcactttgggaggc

SEQ ID NO: 526099 - DNA, 201 bp, Homo sapiens
aaaacaagtaccccaactgaactaccatcaattaaagtgcaaactgcaggggtatatggtggctggggctgaggccatctaaaggccagaggggaaaaaaygcatatgtataaatcagaggatgggtaccagaaactgtccctcctccaatcagatcacagcagagccaaagatgcaggcaaccagtgaaaattctttgga

SEQ ID NO: 526100 - DNA, 201 bp, Homo sapiens
gccatctaaaggccagaggggaaaaaatgcatatgtataaatcagaggatgggtaccagaaactgtccctcctccaatcagatcacagcagagccaaagaygcaggcaaccagtgaaaattctttggaagactctggggtccaacccccacgattaggggaaacgctacctaagaggctgcgtgaggggaaactgggcctt

SEQ ID NO: 526101 - DNA, 201 bp, Homo sapiens
tataattttgcctataaacgagggaaaaaggaggacctcaggatgttctgaccttacctattgccaggaagagatcattcacgttcatagctgtcttggckgaagtctccatgaacaataagctgttgtcatctgcatatgcctgggcctcctgcaaggagtgggatgtattagtgctcagaatgtagggtgggaacgagt

SEQ ID NO: 526102 - DNA, 201 bp, Homo sapiens
catctaaaggccagaggggaaaaaatgcatatgtataaatcagaggatgggtaccagaaactgtccctcctccaatcagatcacagcagagccaaagatgyaggcaaccagtgaaaattctttggaagactctggggtccaacccccacgattaggggaaacgctacctaagaggctgcgtgaggggaaactgggcctttg

SEQ ID NO: 526103 - DNA, 201 bp, Homo sapiens
gaaacgctacctaagaggctgcgtgaggggaaactgggcctttgaagagttacagagccacagttgacactgcacctccacctccgcccagttagcttacmaggcacctcctgcctggtgcctgagatcttgcctccccattctcacctctacctaggaacaccctccacaaggccaaatcatggataccgcaatgttttc

SEQ ID NO: 526104 - DNA, 201 bp, Homo sapiens
ggatagaaggcagtctgcaagccaaaagggcaggaaggttccaatcctaggtcactgtgacctttcctttctttctttcccaaaactccgggctggaacaaggaacttaaagttctcttttgccttgatggcttctcagagacatcttaaaacacctgatgaaggatatgaagagagactagagatttagaaaggaccaag

SEQ ID NO: 526105 - DNA, 201 bp, Homo sapiens
ccatccagagacacatccacccggatcacagccctgccaccaccactccatgcatagcccttgatggtcacctcccctgattctacagtctctccatcccrgggctctgtgatggcggactggacaggaagttcctgaatggatggagcagagtcaaaatctacagtctcccagtccacagatggagagaagcctttgtaa

SEQ ID NO: 526106 - DNA, 201 bp, Homo sapiens
cccctgcaccacaggaggaagcaacttttttttttttttaagagacaaggtctcacttttgccctggctggagcgcaagtggtataatcatagctcactgmaacctcaaactcctgggctcaagtgatcctcctgcctcagcctctcgagcagccagactataggttcacactatcatgcttggcttccttctcaatattt

SEQ ID NO: 526107 - DNA, 201 bp, Homo sapiens
gagccgtgccccagcccagcgtgcagtgctgatggctcctgttctccactccagaccttttacttctttgacctgagtcatctcagagcgtcggttgccgkcacactgcagagtgactgtgatctcgtacctgggaaagttgtgcaagtcatccagggaaagagacagtgactgacccccaggtgctcctactacgtgtaa

SEQ ID NO: 526108 - DNA, 201 bp, Homo sapiens
tttgggaggccgaggcgggcggatcacgaggtcaggagatcgagaccatcctggctaacacggtgaaaccccgtctctactaaaaatacaaaaaattatcygggcatggtagcgggcgcctgtagtcccagctactcgggaggctgaggcaggagaatggcgtgaacctgggaggcggagcttgcagtgagccgagatcgc

SEQ ID NO: 526109 - DNA, 201 bp, Homo sapiens
ccccatctctactaaaaatacaaaaattagctgggcttggtggtacatgcctgtagtcctagctgcttgggaggctgaggcataagaatcgtttgaaccchggaggcagaggttggagtgagccgagatcacgccattgcactccagcctgggtgacagagtgagactctgtcactaaataaataaataaagcaacataac

SEQ ID NO: 526110 - DNA, 201 bp, Homo sapiens
aaacgctacctaagaggctgcgtgaggggaaactgggcctttgaagagttacagagccacagttgacactgcacctccacctccgcccagttagcttacamggcacctcctgcctggtgcctgagatcttgcctccccattctcacctctacctaggaacaccctccacaaggccaaatcatggataccgcaatgttttca

SEQ ID NO: 526111 - DNA, 201 bp, Homo sapiens
tttcgaaactagtgctaaatccagtatgaatgtggatgaggcttttagttccctggcccgggacatcttgctcaagtcaggaggccggagatcaggaaacrgcaacaagcctcccagtactgacctgaaaacttgtgacataaagaacaccaacaagtgctccctgagctgaggaccctttcttgcctccccaccccggaa

SEQ ID NO: 526112 - DNA, 201 bp, Homo sapiens
gaggctgcgtgaggggaaactgggcctttgaagagttacagagccacagttgacactgcacctccacctccgcccagttagcttacaaggcacctcctgcytggtgcctgagatcttgcctccccattctcacctctacctaggaacaccctccacaaggccaaatcatggataccgcaatgttttcaaatatgagaaact

SEQ ID NO: 526113 - DNA, 201 bp, Homo sapiens
aggttaatgtctatttgagggaaggcaagcagtaattggcagtagagtattaaacaatcgggaactgagaacacttaaaagtgataatttgttgcaatgarttatctctttaggagcctgtgggaggagagaaaaaaaaaatctatctggtggaaatttacatacctccaaaattgcggctggcatggtggctcacacctg

SEQ ID NO: 526114 - DNA, 201 bp, Homo sapiens
tttccttactccctcctgctctgagctttattctcccccagggcccttaatgtaaatgaactggaaacctccttcctcagttcctgggttcaccactttcwgcatcctggggagaggagaaaagaggctcaagaacagggactgaccaaaagcagaaggggaagggacaggagtcagaagtgttttctgaaaaaatgggga

SEQ ID NO: 526115 - DNA, 201 bp, Homo sapiens
tcttacccctattggaccattggctcattcttgagtctacactttcccctccctcatatactgagaaaaatatcaccttttctttataacagcggttgagragagtgccaggaaactaaaggtattgaggggaattcaaattctgtacccacccccaccctgcctcgttttgtcagctggaaaatgtgctgggtgagaccc

SEQ ID NO: 526116 - DNA, 201 bp, Homo sapiens
ccaaacaccctttcccatcctccgcaagtataaggaggaacgccccctcccccgctacacacacacacacacacacacacacacacacacacacacacacmgcccccatcctctccatctcctcaggcttgggagtagttactgaattggctccctagccccagcaccccccttcctccctccactagccgccttctgcct

SEQ ID NO: 526117 - DNA, 201 bp, Homo sapiens
gttaaaaagtgccatgacggagctgtcaggaggcagcccttgggagccagggctcagtgtgctgttaccgtaggggttgtgtgctgaggggtagggatggmggttatttcttagctcttgtgctagctccatacttgtttgctgctagccaccccctcagttgctacaacactggctcttgttctgctgggactgttcatg

SEQ ID NO: 526118 - DNA, 201 bp, Homo sapiens
gctggggagacaggcacagtaggaactattagacatataagcgagggttgacaagagtaacaacaatagacagttttgttcatgagagaagggaatggggygaaataaggtatgcaaaaaattttctggccaggcacggtggctcatgcctgtaatcccagcactttgggaggctgaggcgggtggatcacctgaggtcag

SEQ ID NO: 526119 - DNA, 201 bp, Homo sapiens
cggcctatctggcaggttctttgcaaagtcctttgcaaagattatttcatttagttctcaaaatgttcttgtgaagtgtttttaaattaatttttggaggkttagatagagtaacttgcccaaagctacacacaaagctaccaaagagcgaaggaaggactcaaacttaggtctgtcagactccgaagctgggctcttaac

SEQ ID NO: 526120 - DNA, 201 bp, Homo sapiens
agtgttgggattaccagcatgagccacagtgcctggcctactgtatcttttctatgtttagatacacaaatatcattatgttacaattgcctacagcgttsagtacagtagcatgctgcataggttggtagcctgggagtaatagactctaccatatggccttggtgtgtagtagactataccatctaggtttgtgtaagt

SEQ ID NO: 526121 - DNA, 201 bp, Homo sapiens
tagtagagatggggtttccccgtgttggttaggttggtctcaaactcctgaccttaggtgacccacccgcctcagcctcccaaagtgttgggattacagcygtgagccagggcgcctgatccggaagtcacctttcattcagagtgcctgaatcagggtaaatagtgcattatactagaaaaaaggatgtgtcttcaggac

SEQ ID NO: 526122 - DNA, 201 bp, Homo sapiens
gtgagttgggactccaagtcacactgcacacttggcttgtgagcatgatgttcaccatggctcagttgcacctattcgtgcagtcaccaccagaagcccargcctccagctcattccacgtctctcagattctggttctcatgcagtcctttctgaccccatttgcactcttccccatctcctgaaaccctttcacagctt

SEQ ID NO: 526123 - DNA, 201 bp, Homo sapiens
tcctgaaaccctttcacagctttctggaacccaggattcatcatcaataaaatcctccaaatgcaacattcccttcaccatctgctctgcagtatagtccrcagaccagttgcatcacaatcacttgggacactattaaaatgcagattcctggccaggcgcggtggctcacgcctataatcccagcactttgggaggctg

SEQ ID NO: 526124 - DNA, 201 bp, Homo sapiens
acatgcaatattaagtacaatttccattttatttttctccagagaatagcctgtcttcagtctttaagaactcagctccttacatgggctttggtgggggwcgtggggcagcaccctgaaagacaaagaaacaaaagagtaaattaaaacccatggatccaagactcccttcccccaaagaacttgaccaccatcctctca

SEQ ID NO: 526125 - DNA, 201 bp, Homo sapiens
cacccggatcacagccctgccaccaccactccatgcatagcccttgatggtcacctcccctgattctacagtctctccatcccggggctctgtgatggcgkactggacaggaagttcctgaatggatggagcagagtcaaaatctacagtctcccagtccacagatggagagaagcctttgtaatcccgccgttgccagtg

SEQ ID NO: 526126 - DNA, 201 bp, Homo sapiens
agcagcggcacggtgagcagaggcccacggctgcagccagcaagagcagctcagcccagggtgtatgtgtgttgagtgtgtgtgtgtgtgtgtgtgtgtgwgagagagagagagagagagagggagagaaggagaggggagagcacgcttggatgtgcttggggagggggctggagagaatgtatatgtgtatatagtggg

SEQ ID NO: 526127 - DNA, 201 bp, Homo sapiens
acctgtatattttcacaaatattcaaataatcaatagcacaagaattgtcaaatttaccaagtttctagtttttgcaatctcataaccgaaacaggcaaasctttacctcagagtaaaggctgtgcactctatcacaaagtcaccctctgcccagaaaagaatcaaaacggcaaacaagagaattctcttctaccagtaac

SEQ ID NO: 526128 - DNA, 201 bp, Homo sapiens
tttctagcaatcttcttgtcccagcctcccaaagtgttgaggttacaggtataggacaccctgaccctccaggatgaaattttaaccatcactcccctggmttccattctccttttaaaatactcaccgcaggtctaaatcggggtgggggtgttcggtccttgcgggcttcacgagatcgattcctgactactttgctgt

SEQ ID NO: 526129 - DNA, 201 bp, Homo sapiens
agtcaccctctgcccagaaaagaatcaaaacggcaaacaagagaattctcttctaccagtaacaaccttaaatacgtggaaattgcctgagaggctccaamgaacagagcctccaaaagggcgaagttgggcgaaggctttaagatactgggatcctcacacagttcgcgccggtgacccacttaccatcgaagacgctcg

SEQ ID NO: 526130 - DNA, 201 bp, Homo sapiens
tgctccaggctctcacttccccacaatcccagagtctgcacccgaacccccaccctcaccacgcaagaagactcaccatcttggaggcacggaccggagasaggagacggtgcctggcagggccctcctatatagcatgagatccctacgcggacaccgggagaatccttaggagacgggcttcaagaacggcaactcact

SEQ ID NO: 526131 - DNA, 201 bp, Homo sapiens
ttgccagacgctggaccacaaggcgcactcgttattagaggccagagagggacagatgcttggtgggaattgtagtgcgaagccaagaggctcccccctcscccccttcccccctgccccaagtgcttagaccgaaggcggcgctgcgccaccgggggacgccctgggctcatttctctgacagtccttctactaggtagg

SEQ ID NO: 526132 - DNA, 201 bp, Homo sapiens
ttactggttttttcaacttactcccttacatttttatgtatttcaaagcatgtgatccaaggggtagaatattaagcctcaatgttactactctacaatamaggaaaatgtgggagttagaatggactgaattctcatggctaaacatatcacttgagctctgggggagtgtaaagacaggaaacaattgcagacacgctt

SEQ ID NO: 526133 - DNA, 201 bp, Homo sapiens
tcttcaagttgctgctgatcggggactcgggggtgggcaagacttgtctgatcattcgctttgcagaggacaacttcaacaacacttacatctccaccatyggaattgatttcaagatccgcactgtggatatagaggggaagaagatcaaactacaagtctgggacacagctggccaagagcggttcaagacaataacta

SEQ ID NO: 526134 - DNA, 201 bp, Homo sapiens
gtttctagcaatcttcttgtcccagcctcccaaagtgttgaggttacaggtataggacaccctgaccctccaggatgaaattttaaccatcactcccctgrcttccattctccttttaaaatactcaccgcaggtctaaatcggggtgggggtgttcggtccttgcgggcttcacgagatcgattcctgactactttgctg

SEQ ID NO: 526135 - DNA, 201 bp, Homo sapiens
ttgaatctgagttttcccagctggggctttttaggtgagccatggttacctaaaaatgttgcccgaaatcagaaccacacacatatcatgaagtgagcatmtcaggattgtgggttgagacttgtagactcagagccagttttaaatatatcctttcaactaagtgtagggtttactagggttaaaagggctgaaaatgtt

SEQ ID NO: 526136 - DNA, 201 bp, Homo sapiens
aggcagatcagagccagtctagaggtcatttagtccagtctctatattttataggtgaggaaaccgagacacatacaattagtcaatttgggctaggcgtsgtggcttacacctgtaatcctagcactttgggagggcgagatgggcagatcacctgaggtcaggagtttgagaccagcctggccaacgtggtgaaaacct

SEQ ID NO: 526137 - DNA, 201 bp, Homo sapiens
gctgaggtgggcggatcacctaaggtcaggaattcaacaccagtctggcgaacatggtgaaaccccgtctctattaaaaacacaaaaattagccaggtgtkgtggctgacacctgtaatctcagctacttgggaggctgaagcaggagaattgcttgaacctgggaggcagaggctgcagtgggtcgagactttgccactg

SEQ ID NO: 526138 - DNA, 201 bp, Homo sapiens
gagtgcagtggctcgatctcggctcactgcaacctccgcctcctgggttcaagcgattctcctgcctcagcctcccgagtagctgggactacaggcgcgcrccaccacgcccaactaatttttgtaattttagtagagacggggtttcaccatgttggccaggatggtctcaatctcttgacctcatgatcctcccgcctt

SEQ ID NO: 526139 - DNA, 201 bp, Homo sapiens
caaaaaaaagggagatggggcaggtttctcttcctttcaacctttttagctcagaagagaagaaatcagatttaacttcccttagaagtgcagctctgccrggtgcagtgactcatgcctgaaatcccagcactttgggaggctgaggtgggcggatcacctaaggtcaggaattcaacaccagtctggcgaacatggtga

SEQ ID NO: 526140 - DNA, 201 bp, Homo sapiens
tagagtgcagtggctcgatctcggctcactgcaacctccgcctcctgggttcaagcgattctcctgcctcagcctcccgagtagctgggactacaggcgcscaccaccacgcccaactaatttttgtaattttagtagagacggggtttcaccatgttggccaggatggtctcaatctcttgacctcatgatcctcccgcc

SEQ ID NO: 526141 - DNA, 201 bp, Homo sapiens
aattctgtggtacagaaatgaaataatacatataagattcaattatttattttctattctcattttttcccacaaaaatactaatttttttttttttttttggtaaaccagtcaagtggtatgatgattattaccttcaaacccgagacaaaaaaaagggagatggggcaggtttctcttcctttcaacctttttagctca

SEQ ID NO: 526142 - DNA, 201 bp, Homo sapiens
ctggagttttctcctgactcctttgaaaatctcctggctgtcattagggtcacagtgttgctgtatttaacttggtgtagaactggggaatgagacaatgratgtcctctgttgacgttttcagagagggctggtttggaaaaaaagaggtcccaggaacagaggaagtgttagagaggaactccacgggccaccttactt

SEQ ID NO: 526143 - DNA, 201 bp, Homo sapiens
agttgggggcttttgggttgtgacacttgaatagtcccttaccacaaatttaattgctccctccttcctgttttcacactggtacccccacagctggtacytccctaaccctctgctctggagttttctcctgactcctttgaaaatctcctggctgtcattagggtcacagtgttgctgtatttaacttggtgtagaact

SEQ ID NO: 526144 - DNA, 201 bp, Homo sapiens
ctgcctggtgtttgttgctgaagcgttaaaaagtgccatgacggagctgtcaggaggcagcccttgggagccagggctcagtgtgctgttaccgtaggggytgtgtgctgaggggtagggatggaggttatttcttagctcttgtgctagctccatacttgtttgctgctagccaccccctcagttgctacaacactggct

SEQ ID NO: 526145 - DNA, 201 bp, Homo sapiens
ctgttgcccaggctggagtgctgtagcgtgatctcggctcagtgcaacctctgcctcccgggttcaagcaattctctgcctcagcctcccaagtagctggrattacaggcgctaaccaccacaaccagctaattttttgtatttttagtagagatgggatttcaccatgttggccaggctggtcttgaactcctgacctcg

SEQ ID NO: 526146 - DNA, 201 bp, Homo sapiens
aagaacagggactgaccaaaagcagaaggggaagggacaggagtcagaagtgttttctgaaaaaatggggaggaacactagggaggaggagaaaagatacrtaagtcgctgtcttgtacctataatacaaagtgaagaaagtttgttttggaaggtaagtcctggggggagttgacccccaagccccagagtagggggtag

SEQ ID NO: 526147 - DNA, 201 bp, Homo sapiens
ccggcccatttatttgtattttttgagatagagtctcgctctgttgcccaggctggagtgctgtagcgtgatctcggctcagtgcaacctctgcctcccgrgttcaagcaattctctgcctcagcctcccaagtagctgggattacaggcgctaaccaccacaaccagctaattttttgtatttttagtagagatgggatt

SEQ ID NO: 526148 - DNA, 201 bp, Homo sapiens
aaaaaaaaaagaaaaaaattaaattacatgaataagctttcttccccatgaaaataatgtgtgtcacttcacacttggtctaacacacaaaatccccaccytatctggcacagatacacttaacatgcaatattaagtacaatttccattttatttttctccagagaatagcctgtcttcagtctttaagaactcagctcc

SEQ ID NO: 526149 - DNA, 201 bp, Homo sapiens
cccccctcccccccttcccccctgccccaagtgcttagaccgaaggcggcgctgcgccaccgggggacgccctgggctcatttctctgacagtccttctaytaggtaggtgtaggattacgaagaggaaggcctgagaggaaacaagcattttgtgaatccctccttccaatatggagaaaatcccacaatgaagtgcatt

SEQ ID NO: 526150 - DNA, 201 bp, Homo sapiens
gcagtgatggtctggagagagacaggatgccccctctcccctccttagcacctggtcttgcccttccagtctctgctctcatgggcacagagtatagcctmagagcatagtccttcatgttccgggaggttacaggtgccacagttgactggggaaggggatgggggcaccctaaggctctgataccccagaagggactag

SEQ ID NO: 526151 - DNA, 201 bp, Homo sapiens
ttcctgggttcaccactttctgcatcctggggagaggagaaaagaggctcaagaacagggactgaccaaaagcagaaggggaagggacaggagtcagaagygttttctgaaaaaatggggaggaacactagggaggaggagaaaagatacgtaagtcgctgtcttgtacctataatacaaagtgaagaaagtttgttttgg

SEQ ID NO: 526152 - DNA, 201 bp, Homo sapiens
cacagacaaggctctccaccaactgggttacctagaatggggtgtttggcagatttactggggtaatcatcccctgttccacagacttcatccctcagtgygggagatactggagtcacccttgtctagcactccctctcaccatccccttttaactccccagtagtacatcaatagccctacctggttggccagccaaag

SEQ ID NO: 526153 - DNA, 201 bp, Homo sapiens
gagatcgtgccaccgcactcctgcactccagtctgggtgacagagcaagactctgtctctacaaaaaaaaaaaaaaaaaagaggcaaatggttgtattccmctcaaagaaggcaatcaggtatgcatttatctcagtgagcagagggatgactttgaatgggaggcaggtttaccctaatcagttcccagcttgacttttc

SEQ ID NO: 526154 - DNA, 201 bp, Homo sapiens
caggcagcagtgagggccaatcccagcagtttgggaggccaaggcaagaggactgcttgaggccaggagttctaggccagcctgggcaacacactgagacmctaaaaaaaaaaaaaagtaatttaggccaggtgtggtggctcacgcctgtaatcccagcactttgggaggccaaggtgggtggatcacctgaggtcagga

SEQ ID NO: 526155 - DNA, 201 bp, Homo sapiens
cctcccaggttcaagtgatcctccctgtctcagcctcctgagtagctgggactacaggtgtgtgccaccacacctagtttttgtttttgtttttgtttttktttttgtagtagagacgaagtctcactatgttgctctggctggtctcaaactcctgggctcaagcgatccacccgccttggcttcccaaactgctgggat

SEQ ID NO: 526156 - DNA, 201 bp, Homo sapiens
agtcattattttaaaatggagacatttcatataaaaatttggatttctggtatctcttaaaaatttagaagttttggccacactagatacacattcctgcmtgacaagttctagtggacactgaaagctgctgtccctttaagtgggacatatgttctccacttcatgacagcccccaccattcttttctgcttattatcc

SEQ ID NO: 526157 - DNA, 201 bp, Homo sapiens
aaattctgtggtacagaaatgaaataatacatataagattcaattatttattttctattctcattttttcccacaaaaatactaatttttttttttttttttggtaaaccagtcaagtggtatgatgattattaccttcaaacccgagacaaaaaaaagggagatggggcaggtttctcttcctttcaacctttttagctc

SEQ ID NO: 526158 - DNA, 201 bp, Homo sapiens
agcccaggagttgaaggttgtagtgagctgattacaccactgcactccagcctgggcgacagaacaagacgctatctctggaaaaaaaaaaaaaaaaaaaaggagacataactaaagggtaaagaggaagttagcaaaagaatgagaggtgagaactcaaggtcccaaagtagactagattaatacagaggaacatgacaa

SEQ ID NO: 526159 - DNA, 201 bp, Homo sapiens
gagcccaggagttgaaggttgtagtgagctgattacaccactgcactccagcctgggcgacagaacaagacgctatctctggaaaaaaaaaaaaaaaaaaaaggagacataactaaagggtaaagaggaagttagcaaaagaatgagaggtgagaactcaaggtcccaaagtagactagattaatacagaggaacatgaca

SEQ ID NO: 526160 - DNA, 201 bp, Homo sapiens
cactcttgttgcccaggctggagtgcaatggcacaatcttggctcaccacaacctctgcctcccgggttcaagcaattctcccacctcagtctcccgagtwgctgggattacaggcatgcaccaccacgcctggctaattttgtatttttagtagagacggagtttctccatgttggtcagactagtctaagaagtcctga

SEQ ID NO: 526161 - DNA, 201 bp, Homo sapiens
tctgttaccacgattgttatgttgggagaggaagaaaggcaaatgctttctcagaagcaaaacaaaaacaaaaaaccacaacacccccccttaaaaaaackgaccagaagaaaaaaatgagctgggaaataaacaaaagaaaactaagatccccaagcccaacagagctcaaaggaaggcagaagaggtggtaggaagtag

SEQ ID NO: 526162 - DNA, 201 bp, Homo sapiens
agttttgctttgtcacccaggctggagtgcagttgcgccatttcggctcactggaacctctgcctcctgggttcaagcgattattgtgcttcagcctcccragtagctgagatgacaggtgcgtgccaccatgcctggctatttttttgtactttagtagacacagggtttcaccatgttgcccaggctgctctcgaattc

SEQ ID NO: 526163 - DNA, 201 bp, Homo sapiens
gaaaactaactcagtgatgtttttcaacctttgggtcatggacccctttgagaaacatatagaaatggatcctagaaatatgcacatacggccgggcgcartggctcacgcccgtaatcccagcactttgggaggccaaggtgggtggatcacgaggtcaggagttcaagaccagcctgaccaacatggtgaaaccccgtc

SEQ ID NO: 526164 - DNA, 201 bp, Homo sapiens
ggcaggagaatcacttgaactcaggaggcggagattgctgtgagccaagatcgtgccactgtactccaggctagcgacagagactccgtctcaattaaaaraaaaaaaagaaatatgcacatacatttttgtatactacttcaaatagcacccctctctctaatctgatcagtgggcccaaagatccacagaccataccct

SEQ ID NO: 526165 - DNA, 201 bp, Homo sapiens
agagtcttgctctgttgccaggctggagtgcagtggcaggatctcggctcactgcaacctctgcctcccaggttcaagtgattcttctacctcagcctccygagtagctgggactatagacgcacaccaccacgcccagctaatttttgtatttttagtagagatggggtttcaccatgttggccaggatggtctcaatct

SEQ ID NO: 526166 - DNA, 201 bp, Homo sapiens
cttcccatgtgccttgggtatgagccattcaggtgctacaagtagagcaaacccacagcatcatcctctactgtctatgccttcctgaactgagtgaaatstgagcaaaaatatgttgaaatcacatagctggctctgctctctatcaaagctttgcataattgaggagggagaagacgcaaaggggccagggaaaggtat

SEQ ID NO: 526167 - DNA, 201 bp, Homo sapiens
tgcctgtaaccccagctactcgggaggctgaggcaggagaatcacctgaacctgggaggtggaggttgcagtgagctgagatcacgccactgctctccagyctgggcaacagagagagactccatctcaaaaaaaaaaaaaaaaaaaaaaaagagagattaacaacaataacaaaatagaaaaattagcccggcgcagtgg

SEQ ID NO: 526168 - DNA, 201 bp, Homo sapiens
tgcaaccacacataatcctatttcatttcccttccctcgacctttagactgtggtggactgaagggtttgaagtacactaggagtcaagagcagatccagrggaaattttcccgttgaggtggaagctacaagaaaactaactcagtgatgtttttcaacctttgggtcatggacccctttgagaaacatatagaaatgga

SEQ ID NO: 526169 - DNA, 201 bp, Homo sapiens
ggagaagagaggtggtattgcacttgcttctgtgtttattttttctttttgttcttcataacttctgattaaaaatatatatatatatgtatatatatatwttatgtacacaaggaaagaagctgccagaagtattacaaaatcctatctgcagcttggacactgacacaaaaaaacaaaggtctggaaaagtgtctactt

SEQ ID NO: 526170 - DNA, 201 bp, Homo sapiens
tggagtttactaggactgattcctttattctgacaattttttttttttttttgagatggagtctcactctgtcacccaggctggagagcagtggcccgatsttgatcttggctcactgcagacttagcctcctgggtttaagtgattcttgtgtctcagcctctcaagtagctgagattacaggtatgtaccaccacacct

SEQ ID NO: 526171 - DNA, 201 bp, Homo sapiens
atagccgtcttttattttgcgtagaaaaaaaaaataataatcgccccttggtggcacacgcctgtagtcccagtactcgggaggctgaggcgggaggatcscttaagcccaggagttcgaggttgcactgagccaagatcgcggcactgcactccagcctggacaacagagcaagaccccatctcttaaaaaacaaactgc

SEQ ID NO: 526172 - DNA, 201 bp, Homo sapiens
cctgtggagtttactaggactgattcctttattctgacaattttttttttttttttgagatggagtctcactctgtcacccaggctggagagcagtggccygatcttgatcttggctcactgcagacttagcctcctgggtttaagtgattcttgtgtctcagcctctcaagtagctgagattacaggtatgtaccaccac

SEQ ID NO: 526173 - DNA, 201 bp, Homo sapiens
acccctgccgcccctccctggaggaggcctcgggatccagtccggttttccccggctgtgatctccactttaaacccagggtagacctacctctatctacyctgttgcaactacaactaccctgtttatcttttagggaaagcaaagtcaatcgcttagttctcgtattccaggaatgataacagaaatgcctaaaatagt

SEQ ID NO: 526174 - DNA, 201 bp, Homo sapiens
cagtgctcttacacactccgggtttgccacagatattccagtacaaacactggtgtactgacagtcaagtcaggtcagcagttcttgtctcagatttctgytggggagtgcattccaattaacagaacctccacattctaaaatctctacccgttccttaggctgggtgcagtggctcacacctataatcccagcactttg

SEQ ID NO: 526175 - DNA, 201 bp, Homo sapiens
caatgaatcttgctgctgctcactcttcgggtccacactgcctttatgagctgtaacactcactgtgaaggtctgcagcttcactcctgagccagcaagascacgaacccaccagaaggaagaaactccaaacacatctgaacatcagaaggaacaaactccggacacgctgcctttaagaactgtaacactcactgcgag

SEQ ID NO: 526176 - DNA, 201 bp, Homo sapiens
agacggaggttgcagtgagcggagatcgtgccaccgcactcctgcactccagtctgggtgacagagcaagactctgtctctacaaaaaaaaaaaaaaaaaagaggcaaatggttgtattccactcaaagaaggcaatcaggtatgcatttatctcagtgagcagagggatgactttgaatgggaggcaggtttaccctaat

SEQ ID NO: 526177 - DNA, 201 bp, Homo sapiens
gtccctttccacacggtggaagctttgttctttccctctttacaatgaatcttgctgctgctcactcttcgggtccacactgcctttatgagctgtaacaytcactgtgaaggtctgcagcttcactcctgagccagcaagaccacgaacccaccagaaggaagaaactccaaacacatctgaacatcagaaggaacaaac

SEQ ID NO: 526178 - DNA, 201 bp, Homo sapiens
tgacgatggggaaatggttgccagtggaaggtgaattgaaggccaaatgcaacagggggtgcctactgccaggaggtggtaggaggttacacttaccactsagtgagcggctaggagaagagtgctggctgttgggggtgctcaccgagggccccactggggccccgaggaactccttctccagagatgagtccccgctac

SEQ ID NO: 526179 - DNA, 201 bp, Homo sapiens
tcattaaccagcccgatttcctgagcaagattccaagccgttctgaacttgcttcctcatctctgaaatgacatctgcctagcagagctaacatgaagagycaacaagtacagtagtacccccttatccactggggatatgttctacgacccccagtagatgtttgaaaccacagattgcaccaaaccctatattactgtt

SEQ ID NO: 526180 - DNA, 201 bp, Homo sapiens
gggcaaaatgccttgggtttgtgaaactggatctcttgttattcattaaccagcccgatttcctgagcaagattccaagccgttctgaacttgcttcctcwtctctgaaatgacatctgcctagcagagctaacatgaagagccaacaagtacagtagtacccccttatccactggggatatgttctacgacccccagtag

SEQ ID NO: 526181 - DNA, 201 bp, Homo sapiens
actctctggaactagccacaaaacttgagatagagatcaaaagataaaggagggcagtctggtattgaggggccctttcatttccaaatcattagattcayaattgccctttggtgtttttcaaaatgaatggaaagctcaggctgggtttggtggctcaggcctgtaatctcagctctttgagagggcgaggtgggtgga

SEQ ID NO: 526182 - DNA, 201 bp, Homo sapiens
ggtgtcctctttctattaaacctttcaaaagccaggctactcaaggccttcatgggttttcttgcttttccctgttttttttgtttttgtttttgtttttktttttgagacggagtctcgctgtgttgcccaggctggagtgcagtggcatgagtttggctcccgggttcaagcagttctcctggctcagccttctgagta

SEQ ID NO: 526183 - DNA, 201 bp, Homo sapiens
caagtcatccagggaaagagacagtgactgacccccaggtgctcctactacgtgtaagcgataggtgtctggatccaggttaggtacaggcagatggttcygggtgaagaagatagggttgggtgtgatgtagttttctgtcagcagctcagggggaggctctgcattaaagggccgctggctgttgaccttcagggctgg

SEQ ID NO: 526184 - DNA, 201 bp, Homo sapiens
acgcctgtaatcccagcactttgggaggccaaggtgggtggatcacctgaggtcaggagttcgagaccagcctgaccaaatggagaaaccccatctctackaagaatacaaaattagccaggggtggtggttcatgcctgtaatcccagctactcaggaggctgaggcaggagaatcgcttgaacccaggaggcggaggtt

SEQ ID NO: 526185 - DNA, 201 bp, Homo sapiens
tggtcattgtaatctctggagacacaaattttcttccctgttcttatttatttattatatttactagagatgagatctcactatgttgtctgggctggagwgcagtggctgttcatgggcacaatcacagcacactacagcctcaaactcttggcctcaagcaatcctccttcctcagcctaatgagtagttgggactaca

SEQ ID NO: 526186 - DNA, 201 bp, Homo sapiens
ataatccaatttggtaagactctcttcttcatgtggagggtctagggcaggggtactccaggaactgagaaatcctggagctgaaatggagttgagagatkatctacaatttcctagtttttaacagaagaaactaagcccagagtcatcaatctcattaacaacagaattaggacatgtagagtccaagttaccattaga

SEQ ID NO: 526187 - DNA, 201 bp, Homo sapiens
aggtataaggagagggaagttagttacatgagacagttttgtatcaaagatcttggaaggagattagctttaaagcaacataactgtcggctgggggcggyggctcacacctgtaatcccagcactctgggaggctgaggcaagcagatcacttgaagtcaggagttcaagatcagcttggccaacgtggcgaaaccccat

SEQ ID NO: 526188 - DNA, 201 bp, Homo sapiens
gtccccaagcccgggagactgctgggggaaaatgggagaggagctaggggagagtagccgagcgccgaaagattcaaatccgaaaggcaccatcgtctgcygaaggtaacccaaaaactagcctttaatctgcacccagtttgcaatctaagcacacgctggacgcccgatgtggcctggcacgtcaggccctagagccaa

SEQ ID NO: 526189 - DNA, 201 bp, Homo sapiens
ggtggctcaggcctgtaatctcagctctttgagagggcgaggtgggtggatcacctgaggtcaggagttcgagaccagcctagccaacgtggtgaaacccsatctctactaaaaatacaaaaaaattagctgggtgtggtggtacacacctataatcccatctactcgggaggctgaggcagaattgcttgaaccggggag

SEQ ID NO: 526190 - DNA, 201 bp, Homo sapiens
ggtaatgcgggtggggaatggggtaggagggatgggtgcttctagaatcagaatcacctttctcccatcttccattctgaactttgtccaccatagagaaygatgcctggggcgaagggcctaaaggaccgaaaccaaatgtctactggccagattattatttctgaagtcagcagaggacaactgtgggtcagactgact

SEQ ID NO: 526191 - DNA, 201 bp, Homo sapiens
tcactgcaagctccgcctcccgggttcacgccattctccagcctcagcctcccaagtagctgggactacaggtgcctgccaccatgcccggctaatttttkttttttttgtatttttagtagagacagggtttcaccattttggccaggatggtctcgatctcctgacctcgtgatccgcccatcttggcctcccaaagtg

SEQ ID NO: 526192 - DNA, 201 bp, Homo sapiens
ctgggaggtggaggttgcagtgagctgagatcacgccactgctctccagtctgggcaacagagagagactccatctcaaaaaaaaaaaaaaaaaaaaaaargagagattaacaacaataacaaaatagaaaaattagcccggcgcagtggcttacgcctgtaatcccagcactttgggaggctgagacgggcagatcacga

SEQ ID NO: 526193 - DNA, 201 bp, Homo sapiens
ccacccggatcacagccctgccaccaccactccatgcatagcccttgatggtcacctcccctgattctacagtctctccatcccggggctctgtgatggcvgactggacaggaagttcctgaatggatggagcagagtcaaaatctacagtctcccagtccacagatggagagaagcctttgtaatcccgccgttgccagt

SEQ ID NO: 526194 - DNA, 201 bp, Homo sapiens
ggcaacagtgtgagacaccgtcttgaaaaaacaaaaaacaaacaaaagtcagggaagggtgactttttttttttttttttttttttttgagactgagtgtygctcagtcgcccaggctagagtgcaatggcgcgatctcagctcactgcaagctccgcctcccgggttcacgccattctccagcctcagcctcccaagtag

SEQ ID NO: 526195 - DNA, 201 bp, Homo sapiens
aaacaggatcaagtctactttcatggggctaaaatatatgtataatgaatctgtttcaggagtcagaaaggctttcttgggcaccaaggattttgaattcyagctcaggggtgaggggactagagtaagatttaggaagtttaacagttcctctctcagccccagaaaccccagtgagggaatctcaaaagtctgggactc

SEQ ID NO: 526196 - DNA, 201 bp, Homo sapiens
gagtgcagtggcacaatctcggctcactgcaacctccacctcccgggttcaagtgattatcctggctcagcctcccaagtagctgggactacaggtgtgcrccaccacgcccagctaatttttgtatttttagtagagacggggtttcaccacattggccaggatggtcttgatctcttgacctcgtgatccgcccgcctc

SEQ ID NO: 526197 - DNA, 201 bp, Homo sapiens
ctcttgcttcccaatggtaaagctattttcttcttttaagattttatttttatctcaggagctactcatctgactgttctcatgacccaagggtctgtctrgattctctggctttaggctgttagtagggaaagctgaagtcctcctgcaaaccataaagcaagattcacggacctactggcaggtccatggggaggtgag

SEQ ID NO: 526198 - DNA, 201 bp, Homo sapiens
acactccagcctgggcaacagtgtgagacaccgtcttgaaaaaacaaaaaacaaacaaaagtcagggaagggtgactttttttttttttttttttttttttgagactgagtgttgctcagtcgcccaggctagagtgcaatggcgcgatctcagctcactgcaagctccgcctcccgggttcacgccattctccagcctca

SEQ ID NO: 526199 - DNA, 201 bp, Homo sapiens
aaaggggggagggggaaggggaggggatttccaggcttcaacactcctgcaagaaaaaaaagtgaataaaattaaacatacgtccattgaagctgcaatcscttttcagagaaggatagaacctcttcatctccttgcttctatgaggacttagctctgagaaggtcccaggcagctgatcctcagtggtaagagttggga

SEQ ID NO: 526200 - DNA, 201 bp, Homo sapiens
cagagtccataactcttctaagaagaggaagcaaatcaaagcctggaattcaaagctttcttcagcagagtcaacagaccaataaagaaagggagtccctytgcctgtggcattgtccacactcacagggtcccacactcttatttgttcctacagagtaaaacgaggctagaaatacctatctttctttttctttggtgt

SEQ ID NO: 526201 - DNA, 201 bp, Homo sapiens
ccactacactccagcctgggcaacagtgtgagacaccgtcttgaaaaaacaaaaaacaaacaaaagtcagggaagggtgactttttttttttttttttttwtttttgagactgagtgttgctcagtcgcccaggctagagtgcaatggcgcgatctcagctcactgcaagctccgcctcccgggttcacgccattctccag

SEQ ID NO: 526202 - DNA, 201 bp, Homo sapiens
tgatcaggttgcaaggggcactgatgtcttgagactccctgaaggatatagattatcgcctacattcagtgctcttacacactccgggtttgccacagatrttccagtacaaacactggtgtactgacagtcaagtcaggtcagcagttcttgtctcagatttctgttggggagtgcattccaattaacagaacctccaca

SEQ ID NO: 526203 - DNA, 201 bp, Homo sapiens
attgcaccactacactccagcctgggcaacagtgtgagacaccgtcttgaaaaaacaaaaaacaaacaaaagtcagggaagggtgactttttttttttttwtttttttttttgagactgagtgttgctcagtcgcccaggctagagtgcaatggcgcgatctcagctcactgcaagctccgcctcccgggttcacgccatt

SEQ ID NO: 526204 - DNA, 201 bp, Homo sapiens
gaagctgaggcaggagaatcgcttgaacccagagggcggaggttgcagtgagctgagattatgccactgtactccagcctgggcaacagagcaagactccrtctctcaaaataaaaaataaataaaagagaagacaggtgacaccataataaaaaaaaaaggacagatgataagctgatcaagtttccttcaggtgacata

SEQ ID NO: 526205 - DNA, 201 bp, Homo sapiens
tacctcagttaaagatgggggtagtattaagaagctgggttcagtcattcaagggattctgtcttggagtatgtggtgtgagggagggtgacaggaaaagkagaagatggaggagagcagcccactcagggttcagtgataagtcctctactgaaggtgtaataaacaagttaaacctgtaaatggttatccccaccctct

SEQ ID NO: 526206 - DNA, 201 bp, Homo sapiens
aagcgattctcctgcctcagcctcccagtagctgggactacaggcgcccaccaccatgcccagctaattttttgtatttttagtagagacgggtttcaccrtgttagccaggatggtctcaatctcctgacctcatgatctgtctgcctcagcctcccaaaggctaggatgacaggcgtgagccaccatgcccagcaaaca

SEQ ID NO: 526207 - DNA, 201 bp, Homo sapiens
acataggagcggccattgcagtcttctatgtccattttaaagagattctgctgaaaaagaaaatagctgctattagaagatagctctgggaagggaggagscttttctttaatattcttgagttagcaagaaacctaaaggagcacttaagcatggtctgatactatcctaaagaagaaaaaccttagccaggcactgtgg

SEQ ID NO: 526208 - DNA, 201 bp, Homo sapiens
tgaggccttgaccctaaaaggatgagtgaacttgttggaaatccatcactggtcccagcttattcggctgaggctgcctcttgaggccagcgacttgctakgtggaggaaaatatatttaaaagtacacttagaaacactgagggcggccgggcgcggtggctcacgcctgtaatcccagcactttgggaggccgaggcgg

SEQ ID NO: 526209 - DNA, 201 bp, Homo sapiens
tcaagtgacccacccaccttggcctcctatagtgctgggataacaggcgtgagccactgcacccagtctgttctgacaatgaagcactttccctacttacmctacaccgatggtcctgataggccaacactgcaccgagacctaatagggtccccatgactctccatccctgggtgctggagttatcaccagagaaggtga

SEQ ID NO: 526210 - DNA, 201 bp, Homo sapiens
tagacaggcaagtcagactttctctcctatcctgaaggcactccttcctggtaggaaaatctcctccatttcccagtctaggctgaaaattcttcgttttygtttacctcctaaactgttcagtagttggtataacatactgcaaggaggacccctccctcttagtagaaaagcaaggcaaaggaagtctgcaaaaacaac

SEQ ID NO: 526211 - DNA, 201 bp, Homo sapiens
agtaggtgggactacaggtgggcgccaccatgcccagctaatttttgtatttttagtagagacagggtttcaccatgttggctgggacagtcccgatctcytgacctcgtgatccatccacctcagcctcccaaagtgctgggattataggtgtgagccactgcacccggccccagctaatttttgtatttttagtagaga

SEQ ID NO: 526212 - DNA, 201 bp, Homo sapiens
aattcagcttgggcgacaaagactccatctccaaaaaaaaaaaaaaaaaaaagaaaaaaattaaattacatgaataagctttcttccccatgaaaataatrtgtgtcacttcacacttggtctaacacacaaaatccccaccttatctggcacagatacacttaacatgcaatattaagtacaatttccattttatttttc

SEQ ID NO: 526213 - DNA, 201 bp, Homo sapiens
agaccagcctggacaacatagtgaaaccccatctctaccaaaaatacaaaaattaaccaggcatggtggcagacacctgtaatcccagctactcaagaagytgaggcaggagaatcacttgaacccgggagacggaggttgcagtgagctgagatcacgccactgcaattcagcttgggcgacaaagactccatctccaaa

SEQ ID NO: 526214 - DNA, 201 bp, Homo sapiens
cacagagtaaagtatctgttttcctgcccccccacccccacccaattcttgtctggagttgagactccttttgaaggctcatgagaaaacctgaaacatgsgcttaccttcacttcacaaagcaattctctcttacattttgtcagagagattcctagtatcaaccctatttccctaggaagccagggcatggagaaaaaa

SEQ ID NO: 526215 - DNA, 201 bp, Homo sapiens
gttaaaaattttcagtaaccccacttactagatcgtaaagacagaaaatcatacaggaggcaattcagaggaataaaggctctggagtccaattctccacrtttgtttttcagctctacttactagctatgaaccttgagcaagtcactaaatatatgtgtgcattcatttcctcatctgtaaaatgagataatagcctta

SEQ ID NO: 526216 - DNA, 201 bp, Homo sapiens
cctgaggcaagaaatccggaacacaccctcctgagggatccctctccagctttggtcagtgggaagaaaacaaccactcaggactttgggaccatttcccrttcatatcctctcctaaagtcccattttccccattctatcccgtcaaagcctgaggaaaaatgttcactatctatagaaaaagccttatggcttgaatct

SEQ ID NO: 526217 - DNA, 201 bp, Homo sapiens
gcctaatcttttaaaaaaattcagttaaatttcacaaacatttccttcatagccatgtacaaagcagtgttgtatgctgggcaccataccttgtgcccccrccagtctggatgcctggtgctgccttctgtgagctcagtggctgggccttgcctaccctacctttatctaggcctgagggcaagagcatcactgcctgac

SEQ ID NO: 526218 - DNA, 201 bp, Homo sapiens
ggaagaaaatcgaggttatgtgtctcccagcaagccttgcgccgcgccgactcggaagcaattctggacgatgcagttttccggtatacgcgacgctaggmgtgaaagttgccagacgctggaccacaaggcgcactcgttattagaggccagagagggacagatgcttggtgggaattgtagtgcgaagccaagaggctc

SEQ ID NO: 526219 - DNA, 201 bp, Homo sapiens
gcagtgctgatggctcctgttctccactccagaccttttacttctttgacctgagtcatctcagagcgtcggttgccggcacactgcagagtgactgtgakctcgtacctgggaaagttgtgcaagtcatccagggaaagagacagtgactgacccccaggtgctcctactacgtgtaagcgataggtgtctggatccagg

SEQ ID NO: 526220 - DNA, 201 bp, Homo sapiens
cacatcacagagccgtgccccagcccagcgtgcagtgctgatggctcctgttctccactccagaccttttacttctttgacctgagtcatctcagagcgtyggttgccggcacactgcagagtgactgtgatctcgtacctgggaaagttgtgcaagtcatccagggaaagagacagtgactgacccccaggtgctcctac

SEQ ID NO: 526221 - DNA, 201 bp, Homo sapiens
cagtggctgtaactttcctctggctgcacactcactctgcccagccatttgacatggcgggcacccaccactccaggaaccaccacacgcacagggaagcygtggtcacgtggcagaggctgcccattcatctcatatgccagcaggacctcagcttcagggtccatggcccgagccagagggatggatgctccataggca

SEQ ID NO: 526222 - DNA, 201 bp, Homo sapiens
atcccgccgttgccagtggctgtaactttcctctggctgcacactcactctgcccagccatttgacatggcgggcacccaccactccaggaaccaccacaygcacagggaagccgtggtcacgtggcagaggctgcccattcatctcatatgccagcaggacctcagcttcagggtccatggcccgagccagagggatgga

SEQ ID NO: 526223 - DNA, 201 bp, Homo sapiens
gagtttctccatgttggtcagactagtctaagaagtcctgacctcaggtgatctgcccgccttggccttccaaagtgctgatattacaggcatgagccacygtgcctggccttcttttcatttttccttagctctttgtcaaaatgagagattcactctaggggtgtgggataagagtcaccactcctaagggcagaaggg

SEQ ID NO: 526224 - DNA, 201 bp, Homo sapiens
cagtccacagatggagagaagcctttgtaatcccgccgttgccagtggctgtaactttcctctggctgcacactcactctgcccagccatttgacatggcrggcacccaccactccaggaaccaccacacgcacagggaagccgtggtcacgtggcagaggctgcccattcatctcatatgccagcaggacctcagcttca

SEQ ID NO: 526225 - DNA, 201 bp, Homo sapiens
ctagtgacttcacagacatcatactctatggcatatgtggggaaacatcattattttgtcaccacaattagtgggactggagttaaactggggttaaaaawtttcagtaaccccacttactagatcgtaaagacagaaaatcatacaggaggcaattcagaggaataaaggctctggagtccaattctccacgtttgtttt

SEQ ID NO: 526226 - DNA, 201 bp, Homo sapiens
tacagtctcccagtccacagatggagagaagcctttgtaatcccgccgttgccagtggctgtaactttcctctggctgcacactcactctgcccagccatytgacatggcgggcacccaccactccaggaaccaccacacgcacagggaagccgtggtcacgtggcagaggctgcccattcatctcatatgccagcaggac

SEQ ID NO: 526227 - DNA, 201 bp, Homo sapiens
gaagaaaataaagaagagtaaaaaaaagagaacaccaaatttgggtttgtttgtttatgtgcttgtaataaggaacaggttataaaggtcttgtttctacmgaagaaagaaaattggaaaacagagtggtacttcatttaaagataactcttaagagatatttgtgagaggagagaaaaaagtggagagaaacaacgtatt

SEQ ID NO: 526228 - DNA, 201 bp, Homo sapiens
gatggatgcatcttttctcttgttctttgcgcttctctgtcctccccatgtagactgcagaagagagagaaggctaaggtttatgagtgggagaagaaacratcctatccctcccatgtctcatttcaggacataaggaactaaggaaaagggccaaactaaacactttaaatcactagatatgatacataggagatgata

SEQ ID NO: 526229 - DNA, 201 bp, Homo sapiens
taaagagactttcagttgcattttcactggaaaaaagtcaggacttatttctgagccaagtcctgaaatatgccttacccttaacctactcagaggaaggrgattgcccagaagctacaattcaactaactaactgcactcagtgggcaacaaagacattatattttgtgtttgagacatcaacttctattgactagggca

SEQ ID NO: 526230 - DNA, 201 bp, Homo sapiens
ggtgtgccaccaactccacatccttttcatagccacccgagttcacatcataggggaggtctgagaggctgaagcgcatctgcttttcgcctgtggagaasaggaactcagcagggctgggtttggagaattcctacactctcctcaggattacttctttgtttttttacctgtggggctgggtgtaacattatttactac

SEQ ID NO: 526231 - DNA, 201 bp, Homo sapiens
tgcactccagcctggacaacagagcgattccgtctcaaaaataaataaatagccccatcccttccccggctcccccggtgtccgccatggccaaagcctaygaccacctcttcaagttgctgctgatcggggactcgggggtgggcaagacttgtctgatcattcgctttgcagaggacaacttcaacaacacttacatct

SEQ ID NO: 526232 - DNA, 201 bp, Homo sapiens
gaggtatggagtaccaggttgaagagtcccagagaggagatataatgccacagagctaaggtagggccgggggcaggtatcagcatcaaaactgaagaatyagataatgtaaagggtgaggacttaaagcaagaagcttgaagtctcttagtactaagaggagcttcctacccctggggctgctggaagatctaagagaga

SEQ ID NO: 526233 - DNA, 201 bp, Homo sapiens
tatagaaaatttaaaaagtgagaacctacaactctagcagccatgaggtaagaaaataacgggatggggtttgtgtgaggaggtacagggagggctgtttyggtacacaggagcaggcagcctgcttcccaagtttgcagctcccgtctggatgtctgccctggggattcctctgttgcatttctttcttagggctctcaa

SEQ ID NO: 526234 - DNA, 201 bp, Homo sapiens
tcctctggctgcacactcactctgcccagccatttgacatggcgggcacccaccactccaggaaccaccacacgcacagggaagccgtggtcacgtggcaraggctgcccattcatctcatatgccagcaggacctcagcttcagggtccatggcccgagccagagggatggatgctccataggcagtcccagtagggtct

SEQ ID NO: 526235 - DNA, 201 bp, Homo sapiens
aggaaacctagagatgggaataggagcagtcttcaccttgcccctgggccatgggaccattactctctctgccacctacctcaatgccagcagcctgtttrtactagaccagagcagtgcaggtagggctgactcgcaggtgaactcagtgagcccagaatcccaggtttgggagggacagccttttgctgtaatacagaa

SEQ ID NO: 526236 - DNA, 201 bp, Homo sapiens
gatggcggactggacaggaagttcctgaatggatggagcagagtcaaaatctacagtctcccagtccacagatggagagaagcctttgtaatcccgccgtygccagtggctgtaactttcctctggctgcacactcactctgcccagccatttgacatggcgggcacccaccactccaggaaccaccacacgcacagggaa

SEQ ID NO: 526237 - DNA, 201 bp, Homo sapiens
cccggggctctgtgatggcggactggacaggaagttcctgaatggatggagcagagtcaaaatctacagtctcccagtccacagatggagagaagcctttstaatcccgccgttgccagtggctgtaactttcctctggctgcacactcactctgcccagccatttgacatggcgggcacccaccactccaggaaccacca

SEQ ID NO: 526238 - DNA, 201 bp, Homo sapiens
gcagtgaggctaatgggtggggaaaggggtggaggtggctcctttccatgctcatggggagacatagacatggacacgatgccaggcattgctgagaacayctcgcaggttccagattggggccacggtgtctggctgcacattgtaaccatcatccacagccttacaaacaatgttcagttccttttgtccagctggcac

SEQ ID NO: 526239 - DNA, 201 bp, Homo sapiens
ccaccaccactccatgcatagcccttgatggtcacctcccctgattctacagtctctccatcccggggctctgtgatggcggactggacaggaagttcctraatggatggagcagagtcaaaatctacagtctcccagtccacagatggagagaagcctttgtaatcccgccgttgccagtggctgtaactttcctctggc

SEQ ID NO: 526240 - DNA, 201 bp, Homo sapiens
ctggggcgctgttcctctccatccagcttagccacctgccaggttaggcccccatccagagacacatccacccggatcacagccctgccaccaccactccrtgcatagcccttgatggtcacctcccctgattctacagtctctccatcccggggctctgtgatggcggactggacaggaagttcctgaatggatggagca

SEQ ID NO: 526241 - DNA, 201 bp, Homo sapiens
gagctgggaaataaacaaaagaaaactaagatccccaagcccaacagagctcaaaggaaggcagaagaggtggtaggaagtagagggaaggcagccgatasgcccagaagctaaggccaaatcctgttcctatgggggtggggggagggagaagcctggggaagtggtttcccaggcccaagataatgaaacatcttcact

SEQ ID NO: 526242 - DNA, 201 bp, Homo sapiens
gaaaggatttcaatctgtatacaatcaaatcactgaagaaggctaatgcccaacctatcctaccagttgttaaaaaaaaaatatatatatatatatatatrtatatatatatggagagagagagagtgagagagagagagagagggagaaagagggagagagagagaaagcgagcttcaacctaaaaaaaaaaaagtctca

SEQ ID NO: 526243 - DNA, 201 bp, Homo sapiens
tgtgaacccacgtttggtgagtgggtaccggcgcatcatcaaaaatcctatggatttttccaccatgcgggagcggctgctcaggggagggtaagtagatrtgggtgaaccgcccggtctttgctactgctgcaactcctacccagctcacagttttgcccctgccctgtccaggtacaccagctcagaggagtttgcggc

SEQ ID NO: 526244 - DNA, 201 bp, Homo sapiens
taatggtagtgacgctgaacaggaagaaatggaaactcaatcttcagacttcccaccatccctgacccagccagctcctgatcagtcatccactattcagstacatccagcaacctcaccagcagtctcgccaacaacctccccagcagtctccctagtggtttctccagcagcctccccagaaatctctccagaagtttg

SEQ ID NO: 526245 - DNA, 201 bp, Homo sapiens
cctttgctggccaaagacatggtaggatccaactttattaatgttactttacttcttcctcttagtacctgagccgcaacgtggtacacagtgtccgccgwgagcacttcagcttcagtccccgtatgcctgttggagatttctttgaagaaagagacacgccagaggtgcagacccaagggttaaatatgcttttgtccc

SEQ ID NO: 526246 - DNA, 201 bp, Homo sapiens
gtcttctcagtggtctctccagcttcctcagcagtcctcccagcagtctccttagaagtcccgttgacggcttcagtgacatccccaaaagcctctcccgwaacttccccagcagctgcctttccaacagcctccccagcaaataaggatgtcagcagctttctagaaaccactgctgacgtggaagagatcactggagaa

SEQ ID NO: 526247 - DNA, 201 bp, Homo sapiens
ggctgggcacatcatgcgccgcttcttcgagagccgctgggaggagttttatcagggaaaacaggccaatctgtgaggcaagggaggtggggagtcacctkgtggcatctccccccaccttccaaacaaaaacctgccattttcacctgctgatgctgccctgggtccagactcaagtcagatacaaccctgatttttgac

SEQ ID NO: 526248 - DNA, 201 bp, Homo sapiens
cctccgcctcccaggttcaagcgattcttctgcctcagcctcccaagtagctgggattacaggcccatgccaccacacctggctgatttttgtatttttastagagacagggtttcaccatgttggccaggctggtctcgaactcctgacctcaggtgatccgcctgtcttggcctcccaaagtgctggaattacaggtgt

SEQ ID NO: 526249 - DNA, 201 bp, Homo sapiens
aaatactaaaaattaactgggcgtggtggcacgcgcctgtagtcccagctactggggtggctgaggcaggagaatcgcttgaacctgggaggtggagattkcagtgagccgagattgtgccattgcacttcagcctgggcgacagagtgagactccgtgtcaaaaaatatatatatgtatatatagtcatgtcagaaacat

SEQ ID NO: 526250 - DNA, 201 bp, Homo sapiens
aaatgttgaatgaatgaacatccttctagcaaagattgactgcctagtatagctaagtgaaccaatataaggcactgattttgacttttggtctctcctgkgatttcctagaactgaagatgtgtggctacaatggctctgtcccttctgtggaatcgttacaccaagaggtctcagtcctggtccctgaccccacagtga

SEQ ID NO: 526251 - DNA, 201 bp, Homo sapiens
ttcatctgcccataatatctgtcttagagggttgtcacgtagacatgtggtggcgtttctataccagaaacaaaataataaatattgtcatgtcagggccrggcacggtggctcacggctgtaatcccagctctttgagaggctgagaccagcggatcatgaggtcaggcaatcaagaccgtcatggctaaaacggtgaaa

SEQ ID NO: 526252 - DNA, 201 bp, Homo sapiens
ggatggagtgcagtggcacgatcttggctcactacaagctctgcctcctggattcaccccattctcctgcctcggcctcccgagtagctgggactacaggygcacgccaccacacctggctaattttttgtatttttagtagagacggggtttcaccatgttagccaggatggtctcgatctcctgacctcgtgatccgcc

SEQ ID NO: 526253 - DNA, 201 bp, Homo sapiens
gagaaaggcagatgctagaagtacttattccaccttctgtccttggatggaaggtagggacaagggaaagtttaatgcttacctagttcccccagagagargttcataattccatatggaggtgttgctgccaggattgggtcttttcctggatttggcttaccagttgctctgtaccatgactcgccaggtacctctgta

SEQ ID NO: 526254 - DNA, 201 bp, Homo sapiens
tttctgaccagtgtttcttaaatcttgctttctgatttttttctcattatcctgctctgatttttctacccttgtaaacagagccagtgagtggaggactrtatggtattgatgacacggagctgatgggtgcagaggacaagctgcctcttgaggacagccctgtgatttctgcccttgattgcccttccctcaataatg

SEQ ID NO: 526255 - DNA, 201 bp, Homo sapiens
aatcccagctactcgggaggctgaggcaggagaatggcttgaacccaggaggcagaggttgcagtgagctgagatcacaccattgcactccagcctgggcwacaagagtgaaactccatctcaaaataataataataatataataataataataggcactgttttagtggatggacaggtgagaaatacctacatttttca

SEQ ID NO: 526256 - DNA, 201 bp, Homo sapiens
taatcccagctactcgggaggctgaggcaggagaatggcttgaacccaggaggcagaggttgcagtgagctgagatcacaccattgcactccagcctgggkaacaagagtgaaactccatctcaaaataataataataatataataataataataggcactgttttagtggatggacaggtgagaaatacctacatttttc

SEQ ID NO: 526257 - DNA, 201 bp, Homo sapiens
accaagagcttaaagcagaaggaagctaagaagaaatccaaggtaggtgcatgtacaaacttgccaagtataatttcgaagccactaaactgattttgcargacatgtacatcagtcttgttttatagtgagatttctgggctgtgaggttgggaggactgggaccagggaaggatagtgactgatatctttatggcagtc

SEQ ID NO: 526258 - DNA, 201 bp, Homo sapiens
gcctgtaatcccagctactcgggaggctgaggcaggagaatggcttgaacccaggaggcagaggttgcagtgagctgagatcacaccattgcactccagcrtgggcaacaagagtgaaactccatctcaaaataataataataatataataataataataggcactgttttagtggatggacaggtgagaaatacctacat

SEQ ID NO: 526259 - DNA, 201 bp, Homo sapiens
gacctcccagtaagttcttcaaacagatggaacagcgttacctaacccagctgacagcccagcctgtcccacctggtgagtgaccttggagtgagggcatmcggtgtgggcagtgcttcacagctggcgccccacatatatctcatctgctcacagagatgtgctcaggctggtggtggatacgagatcctgagatgttgg

SEQ ID NO: 526260 - DNA, 201 bp, Homo sapiens
agatgacttcagttgtggcagagaatggcactggcttggtaggcagcttggagctggaagaagagcagccaggtataactgggttggtgaactgggtgggraaaggaaaaatggagctcgggggggatagtggctttttgaggtgagaaaaacttgtctttccagctctctgcagtggaggctgatttgcatgttggtgat

SEQ ID NO: 526261 - DNA, 201 bp, Homo sapiens
tgtgttctgctcagaacacagagttcctaactaaaccctggcatattgagtcttttcatggaatcagcagcaaatttatttttctgcttgcctccctgccytttgtcttctgtctttattccccttaggtctttatcctctttactggaaatccagtaactgccctgaatggctcagggaggggtttctggcagcttatct

SEQ ID NO: 526262 - DNA, 201 bp, Homo sapiens
tgtagggagtctgcaaacagtttcatttaattaaaaacaaaaaaaaaggccaggcgtggtggctcacgcctgtaatcccagcactttgggaggccgaggcrggtggatcacgaggtcaagagatgagaccatcctggccaacacggtaaaaccccgtctctactgaaaatacaaaaattagccgggcgtggtgatgggcgc

SEQ ID NO: 526263 - DNA, 201 bp, Homo sapiens
agtggaatctcaaaaaagggggactaagtccaagagaaaaagaaagtataggtcctaagtttatataccctcttacttttcccttgtatgtcagcatatgkcttaactctttacttctctttacagttcctgaggaggtgataaagaaggaaactgactccttaaaagtggcagcccatgcgtcactcaaccctgccctct

SEQ ID NO: 526264 - DNA, 201 bp, Homo sapiens
tgtctaattttagtaatgtagcatatttatgaatgtaactcttgcagactttggccagtgggcatatatattcttttcttttcttttttttttttttttttgagacagggtcatgctctgtcacctaggctggagtgcagtggcatgatcatggttcactgcagcctcgacctcctgggctcaagtgatccttctgcctta

SEQ ID NO: 526265 - DNA, 201 bp, Homo sapiens
gtgtctaattttagtaatgtagcatatttatgaatgtaactcttgcagactttggccagtgggcatatatattcttttcttttcttttttttttttttttttgagacagggtcatgctctgtcacctaggctggagtgcagtggcatgatcatggttcactgcagcctcgacctcctgggctcaagtgatccttctgcctt

SEQ ID NO: 526266 - DNA, 201 bp, Homo sapiens
tgtgcaatctttcagcaggaactccctctcttctcggtagctttgaatcttaagcttctacgggagagtggtagaactggatcatttcctaatcccatttrgttgtgcttttcttcatttacttcataccccaggaccccttccccagcagcagagaccctggagcacaggagagtagggaggaggggttctgggtccatc

SEQ ID NO: 526267 - DNA, 201 bp, Homo sapiens
gtttggtgagtgggtaccggcgcatcatcaaaaatcctatggatttttccaccatgcgggagcggctgctcaggggagggtaagtagatgtgggtgaaccscccggtctttgctactgctgcaactcctacccagctcacagttttgcccctgccctgtccaggtacaccagctcagaggagtttgcggctgatgccctcc

SEQ ID NO: 526268 - DNA, 201 bp, Homo sapiens
ggacatgtcctagcccagactctacccgtgaagacttggcctactgtgagcacctctccgactcccaggaggatatcacctggcgaggtcggggcagggarggactggcacctcagcgtaaaactaccaaccctttggacctggctgtgatgcggctggctgccctggaacagaatgtagaacggcggtacctgcgggagc

SEQ ID NO: 526269 - DNA, 201 bp, Homo sapiens
atttctttttcttcctgactcctctccttattttatttttctttattttttccttttcttttgtggtcttctttcgtattctgtcttaacccccatagttmtcttctgatgtattttcctcttgcacattcacccaacttggttgtgcatctttccctactcacccccattatgctgtcctccacacagtccctaaagatc

SEQ ID NO: 526270 - DNA, 201 bp, Homo sapiens
atggggcttaactttgattcacaagaactgtatgattcctttcctgaccagaattttgaggtgatgcccaatggaccccctagttttttcacctccccacrgacttctcctatgttgggatctagcattcaaacctttgcaccctcccaggaggtaggcagtggtatccatcctgatgaggcagcagaaaaggagatgact

SEQ ID NO: 526271 - DNA, 201 bp, Homo sapiens
tcagtccgtgggtttctgctcttgtcaggtatcctgggagagagattggctccaaggctactctgccattgtggcctcttttctatcagcaggacaccttytaaagcagtctgattggagccaggggctggtgcttctgggcaggagatgtcatttgagttctttgtgccacccccatagcaggtgcctctcctacatttt

SEQ ID NO: 526272 - DNA, 201 bp, Homo sapiens
ccaggtgtgcttgtgcctgggccagctggagaggtccattgcctgggagaagtctgtcaacaaagtggtaagaggctgagagagcctggagaggctgaggrgccagccagcaggggcggggtggggtcactggcaggtagaggctggagagctcattctgcctcctcacaaccttggtccagacatgtctagtctgccgga

SEQ ID NO: 526273 - DNA, 201 bp, Homo sapiens
ctaagaagaaatccaaggtaggtgcatgtacaaacttgccaagtataatttcgaagccactaaactgattttgcaggacatgtacatcagtcttgttttayagtgagatttctgggctgtgaggttgggaggactgggaccagggaaggatagtgactgatatctttatggcagtcttggttcctctcttccttgggtagg

SEQ ID NO: 526274 - DNA, 201 bp, Homo sapiens
tgtctcaaaaaaaaaaaaaggaaatcctggaggaccctgtgtgttttgtttgtttgtttgttttgttttgttttgtttttttgagacagggtttcgctctrtcacccaggctggaatgcagtggcatgatcttggctcactgcaatctctgcttcccaggctcaaacaatcctcctgcctcagcctcccaagtggctggga

SEQ ID NO: 526275 - DNA, 201 bp, Homo sapiens
ccccgtctctactaaaaagataaaaaattatctgggcgtgttggcgggtgcctgtaatcccagctgctggggaggctgaggcaggagaatcgcttgaaccygggaggtggaggttgcagtgagccgagatcacacccttgcaccccagcatgggcaacaagagggaaactctgtctcaaaaaaaaaaaaaggaaatcctgg

SEQ ID NO: 526276 - DNA, 201 bp, Homo sapiens
gaagaagttttttgttgttgttttttttttttttttttttttgagacggagtttcgctgtgtcgcccaggctggagtgcagtggcgcgatctcgactcacwgcaagctccgcctcccgggttcacgccattctcctgcctcagcctcccgtgtagctgggactacaggcgcgcgccaccatgcccggctaatttattggct

SEQ ID NO: 526277 - DNA, 201 bp, Homo sapiens
ctgagtttgggtgcaccctaagatggaggccaggtagcaatggggccggcctcagagagagcgctgtgtgtgtgtgtgtgtgtgtgtgtgtgtgtgtgtgkcggcctcagagcgcgctgtgtgtgtgtgtgtgtgtgtcagcctcagagcgcgcgctgtgtgtgtgtgtgtgtgtgtgtgtgtgtgcgtgcttgtgaccct

SEQ ID NO: 526278 - DNA, 201 bp, Homo sapiens
agggcctctacactaacgggtctcccatgaacttcccccagcaagggaaaagtgagtgtgagggctgcttggcctggggagggaatgggcatcatcccttyagggcagattcatggggggatattttgctctactttgctgctggagagaaatcaacttctaagaacaagttctagggttttttggaaacattttttgtat

SEQ ID NO: 526279 - DNA, 201 bp, Homo sapiens
gctaatttttgtatttttagtagagaaggggtttcaccatgttggtcaggctggtctcgaactcgaattgagcctcccaaagtgctggggttacaggcatragccacagggccaagccttgaaagataacattttcagattatttggactattctgaaaactacgtaagcctgtcatttaaatcatcttttcactatttat

SEQ ID NO: 526280 - DNA, 201 bp, Homo sapiens
aaaaaaaaaggacttctgcaatgggagagacatttccattaaagattaaaggaaggccgggtgccatggctcacactgtaatcccagcactttgggaggcygaggcgggcagatcgcttgagcccagcagttcaagaccagcctgggcaacatggcgagacctcatctctacaaaaaatacgaaaattagctgggtgtggt

SEQ ID NO: 526281 - DNA, 201 bp, Homo sapiens
gattacaggcgtgagccaccgctcccaaacttaatcaccttctgaattaggcccagatggcatcacttttatagagggactgagagccattgcctttctcygatatactggatgaattcaccactgtcactctggaaatgtgtttattcatcttcattttcattgtctacccagcgtcagcttttctttcgcaaaaagctg

SEQ ID NO: 526282 - DNA, 201 bp, Homo sapiens
gatggtttagagtcaaggtatttcttttgtggcactatcatgttcctcaccagtttcccgtaattttttttttttgagatggagtcttcctctgtcgcctrggctggaatgcgatagcgcaatcttggctcactgccacctccgcctcccaggttcaagcgattcttctgcctcagcctcccaagtagctgggattacagg

SEQ ID NO: 526283 - DNA, 201 bp, Homo sapiens
cttcatttgatgaaggagagaaggttgaactagaatttttttttttttttttttttgagatagagtctccctctgtcacccaggctggagtgcaatggcgygatctcagttcactgcaacctccacctcccaggttcaagcgattctcttgcctcggcctcctgagtagctgagattacaggggcacgccaccacacccag

SEQ ID NO: 526284 - DNA, 201 bp, Homo sapiens
cgcttgaacctgggaggtggagattgcagtgagccgagattgtgccattgcacttcagcctgggcgacagagtgagactccgtgtcaaaaaatatatatawgtatatatagtcatgtcagaaacatcaattatgaaatactcttgtttgcagaattatacttccacaagtcttcccgaaaggaagaaattcagaactttta

SEQ ID NO: 526285 - DNA, 201 bp, Homo sapiens
tctcctcctgggcctagggttggtcggtgcagcctaggaaggcccctcccccagaacctgggagctgggggccagggcgctgccggaatcttgtgcttcarggcctcagggacagttgggagagagtgcgtggggagctggggctaaatctctaagggagttggggcgatggggaaggcaagagaagtccagtcttctctg

SEQ ID NO: 526286 - DNA, 201 bp, Homo sapiens
aacatggcaaaaccttgtctctacaaaatatacaaaaattagccagtcgtggtggcgtgtgcctgtaatcccagctactatcgcttgaacctggcaggctkgaacctggcaggcgtaggttgcagcgagctgagatcacaacactgcattctggcctgggtgacagagcaagactgtctcaaaacaaaacaaaacaaacaa

SEQ ID NO: 526287 - DNA, 201 bp, Homo sapiens
cgcttaggtggcatgggagtgggtaggggtgtgacctggcggcagggcccatgtgcttctctggcaggtggcggagagaggtgcgcatcaagaagggcagycaccgatggcagggggagacctggtattatggcccctgtgggaagaggatgaagcaatttccagaagtgatcaaggtaatgtagctttttttaaaggact

SEQ ID NO: 526288 - DNA, 201 bp, Homo sapiens
ttctgtagtcctcaccccaccctacatctccgggagcttggggtccaacctcagcaccgcctactgagcccaggtgggaaggactctcctcctgggcctarggttggtcggtgcagcctaggaaggcccctcccccagaacctgggagctgggggccagggcgctgccggaatcttgtgcttcagggcctcagggacagtt

SEQ ID NO: 526289 - DNA, 201 bp, Homo sapiens
tcggccctgtggggagggctttattgcttcaagcttatagggcaatgtcccttactcttataaatgaaacataggagctcttaaaagatccatttatgtayagctgggactgggctgggtgcttgaatgaatgtacttcctggtatgagagtcatctgctactctaggggttgggcactggctgatttcttttctcatttg

SEQ ID NO: 526290 - DNA, 201 bp, Homo sapiens
cgtggagatcaggagagggccttccttgctgagggtggtgctgcgcttggcttggggccctcgcgtcccgggagaatcgcgcactccggggatggaggttsatagggcttccgctgaggctttccaatttgagctgggctgaggggcagaagggaagaataaagaggaattcctttttccaaggagattcctcactgaggg

SEQ ID NO: 526291 - DNA, 201 bp, Homo sapiens
aactaaatatagcaggggaggaatcccccttccctttaccatgtctttttctagtcagtgctattactttgagtttgttttggtaaagttgcttgcctacrtatctgtaactgaccttttctttctttctctgccaggtttgaatggggatgtgaatgttaatggcttatctactgtatctcacactactacttcagggat

SEQ ID NO: 526292 - DNA, 201 bp, Homo sapiens; identical to SEQ ID NO: 316193

SEQ ID NO: 526293 - DNA, 201 bp, Homo sapiens
gggagctgggcgttttgactgtggtgagtggagggcggaaggggtttccaggggtctgagggtgtctccctcggggagcgcacccattctcttgagcgtgragatcaggagagggccttccttgctgagggtggtgctgcgcttggcttggggccctcgcgtcccgggagaatcgcgcactccggggatggaggttgatag

SEQ ID NO: 526294 - DNA, 201 bp, Homo sapiens
aatcctatggatttttccaccatgcgggagcggctgctcaggggagggtaagtagatgtgggtgaaccgcccggtctttgctactgctgcaactcctaccmagctcacagttttgcccctgccctgtccaggtacaccagctcagaggagtttgcggctgatgccctcctggtatttgacaactgccagactttcaacgag

SEQ ID NO: 526295 - DNA, 201 bp, Homo sapiens
gtcaggcagtgatgctcttgccctcaggcctagataaaggtagggtaggcaaggcccagccactgagctcacagaaggcagcaccaggcatccagactggygggggcacaaggtatggtgcccagcatacaacactgctttgtacatggctatgaaggaaatgtttgtgaaatttaactgaatttttttaaaagattaggc

SEQ ID NO: 526296 - DNA, 201 bp, Homo sapiens
tccacccacctcgccctctcaaagagctgagattacaggcctgagccaccaaacccagcctgagctttccattcattttgaaaaacaccaaagggcaattrtgaatctaatgatttggaaatgaaagggcccctcaataccagactgccctcctttatcttttgatctctatctcaagttttgtggctagttccagagagt

SEQ ID NO: 526297 - DNA, 201 bp, Homo sapiens
tactcagaaggctgagccaggagaactgcttgaacccgggagccaaactcatgccactgcactccagcctgggcaacacagcgagactccgtctcaaaaamaaaaacaaaaacaaaaacaaaaaaaacagggaaaagcaagaaaacccatgaaggccttgagtagcctggcttttgaaaggtttaatagaaagaggacacc

SEQ ID NO: 526298 - DNA, 201 bp, Homo sapiens
cccactatatacacatatacattctctccagccccctccccaagcacatccaagcgtgctctcccctctccttctctccctctctctctctctctctctcwcacacacacacacacacacacacactcaacacacatacaccctgggctgagctgctcttgctggctgcagccgtgggcctctgctcaccgtgccgctgct

SEQ ID NO: 526299 - DNA, 201 bp, Homo sapiens
aacattttcagcccttttaaccctagtaaaccctacacttagttgaaaggatatatttaaaactggctctgagtctacaagtctcaacccacaatcctgakatgctcacttcatgatatgtgtgtggttctgatttcgggcaacatttttaggtaaccatggctcacctaaaaagccccagctgggaaaactcagattcaa

SEQ ID NO: 526300 - DNA, 201 bp, Homo sapiens
aacctccgcctcctgggttcaagcgattctcctgcctcagcctcctgagtagctgggattacaggcatgaaccaccacccctggctaattttgtattcttmgtagagatggggtttctccatttggtcaggctggtctcgaactcctgacctcaggtgatccacccaccttggcctcccaaagtgctgggattacaggcgt

SEQ ID NO: 526301 - DNA, 201 bp, Homo sapiens
tgtagtcccaactactcattaggctgaggaaggaggattgcttgaggccaagagtttgaggctgtagtgtgctgtgattgtgcccatgaacagccactgcwctccagcccagacaacatagtgagatctcatctctagtaaatataataaataaataagaacagggaagaaaatttgtgtctccagagattacaatgacca

SEQ ID NO: 526302 - DNA, 201 bp, Homo sapiens
tctaatggtaacttggactctacatgtcctaattctgttgttaatgagattgatgactctgggcttagtttcttctgttaaaaactaggaaattgtagatmatctctcaactccatttcagctccaggatttctcagttcctggagtacccctgccctagaccctccacatgaagaagagagtcttaccaaattggattat

SEQ ID NO: 526303 - DNA, 201 bp, Homo sapiens
atggggtttcgccacgttggccaagctgatcttgaactcctgacttcaagtgatctgcttgcctcagcctcccagagtgctgggattacaggtgtgagccrccgcccccagccgacagttatgttgctttaaagctaatctccttccaagatctttgatacaaaactgtctcatgtaactaacttccctctccttatacct

SEQ ID NO: 526304 - DNA, 201 bp, Homo sapiens
ctccccggttcaagcaattctgcctcagcctcccgagtagatgggattataggtgtgtaccaccacacccagctaatttttttgtatttttagtagagatsgggtttcaccacgttggctaggctggtctcgaactcctgacctcaggtgatccacccacctcgccctctcaaagagctgagattacaggcctgagccacc

SEQ ID NO: 526305 - DNA, 201 bp, Homo sapiens
cactttgggaggccaagatgggcggatcacgaggtcaggagatcgagaccatcctggccaaaatggtgaaaccctgtctctactaaaaatacaaaaaaaamaaaaattagccgggcatggtggcaggcacctgtagtcccagctacttgggaggctgaggctggagaatggcgtgaacccgggaggcggagcttgcagtga

SEQ ID NO: 526306 - DNA, 201 bp, Homo sapiens
ctacttgggaggctgaggctggagaatggcgtgaacccgggaggcggagcttgcagtgagctgagatcgcgccattgcactctagcctgggcgactgagcracactcagtctcaaaaaaaaaaaaaaaaaaaaaaaaagtcacccttccctgacttttgtttgttttttgttttttcaagacggtgtctcacactgttgcc

SEQ ID NO: 526307 - DNA, 201 bp, Homo sapiens
gagtcccagacttttgagattccctcactggggtttctggggctgagagaggaactgttaaacttcctaaatcttactctagtcccctcacccctgagctrgaattcaaaatccttggtgcccaagaaagcctttctgactcctgaaacagattcattatacatatattttagccccatgaaagtagacttgatcctgttt

SEQ ID NO: 526308 - DNA, 201 bp, Homo sapiens
tgaggctggagaatggcgtgaacccgggaggcggagcttgcagtgagctgagatcgcgccattgcactctagcctgggcgactgagcaacactcagtctcaaaaaaaaaaaaaaaaaaaaaaaaagtcacccttccctgacttttgtttgttttttgttttttcaagacggtgtctcacactgttgcccaggctggagtgt

SEQ ID NO: 526309 - DNA, 201 bp, Homo sapiens
ctcacctccccatggacctgccagtaggtccgtgaatcttgctttatggtttgcaggaggacttcagctttccctactaacagcctaaagccagagaatcyagacagacccttgggtcatgagaacagtcagatgagtagctcctgagataaaaataaaatcttaaaagaagaaaatagctttaccattgggaagcaagag

SEQ ID NO: 526310 - DNA, 201 bp, Homo sapiens
acaccaaagaaaaagaaagataggtatttctagcctcgttttactctgtaggaacaaataagagtgtgggaccctgtgagtgtggacaatgccacaggcaragggactccctttctttattggtctgttgactctgctgaagaaagctttgaattccaggctttgatttgcttcctcttcttagaagagttatggactctg

SEQ ID NO: 526311 - DNA, 201 bp, Homo sapiens
ctggagaatggcgtgaacccgggaggcggagcttgcagtgagctgagatcgcgccattgcactctagcctgggcgactgagcaacactcagtctcaaaaawaaaaaaaaaaaaaaaaaaagtcacccttccctgacttttgtttgttttttgttttttcaagacggtgtctcacactgttgcccaggctggagtgtagtgg

SEQ ID NO: 526312 - DNA, 201 bp, Homo sapiens
aatggcgtgaacccgggaggcggagcttgcagtgagctgagatcgcgccattgcactctagcctgggcgactgagcaacactcagtctcaaaaaaaaaaawaaaaaaaaaaaaagtcacccttccctgacttttgtttgttttttgttttttcaagacggtgtctcacactgttgcccaggctggagtgtagtggtgcaat

SEQ ID NO: 526313 - DNA, 201 bp, Homo sapiens
agagggtggggataaccatttacaggtttaacttgtttattacaccttcagtagaggacttatcactgaaccctgagtgggctgctctcctccatcttctmcttttcctgtcaccctccctcacaccacatactccaagacagaatcccttgaatgactgaacccagcttcttaatactacccccatctttaactgaggta

SEQ ID NO: 526314 - DNA, 201 bp, Homo sapiens
tgtttgctgggcatggtggctcacgcctgtcatcctagcctttgggaggctgaggcagacagatcatgaggtcaggagattgagaccatcctggctaacayggtgaaacccgtctctactaaaaatacaaaaaattagctgggcatggtggtgggcgcctgtagtcccagctactgggaggctgaggcaggagaatcgctt

SEQ ID NO: 526315 - DNA, 201 bp, Homo sapiens
ccacagtgcctggctaaggtttttcttctttaggatagtatcagaccatgcttaagtgctcctttaggtttcttgctaactcaagaatattaaagaaaagsctcctcccttcccagagctatcttctaatagcagctattttctttttcagcagaatctctttaaaatggacatagaagactgcaatggccgctcctatgt

SEQ ID NO: 526316 - DNA, 201 bp, Homo sapiens
gcgatctcggctcactgcaagctccgcctcccaggttcacgccattctcctgcctcagcctcccgagtagctgggactacaggcgcccgctaccatgcccrgataattttttgtatttttagtagagacggggtttcaccgtgttagccaggatggtctcgatctcctgacctcgtgatccgcccgcctcggcctcccaaa

SEQ ID NO: 526317 - DNA, 201 bp, Homo sapiens
tatcatctcctatgtatcatatctagtgatttaaagtgtttagtttggcccttttccttagttccttatgtcctgaaatgagacatgggagggataggatygtttcttctcccactcataaaccttagccttctctctcttctgcagtctacatggggaggacagagaagcgcaaagaacaagagaaaagatgcatccatc

SEQ ID NO: 526318 - DNA, 201 bp, Homo sapiens
ccgcctcggcctcccaaagtgctgggattacaggcgtgagccaccgcgcccggccgccctcagtgtttctaagtgtacttttaaatatattttcctccacmtagcaagtcgctggcctcaagaggcagcctcagccgaataagctgggaccagtgatggatttccaacaagttcactcatccttttagggtcaaggcctca

SEQ ID NO: 526319 - DNA, 201 bp, Homo sapiens
aatacgttgtttctctccacttttttctctcctctcacaaatatctcttaagagttatctttaaatgaagtaccactctgttttccaattttctttcttckgtagaaacaagacctttataacctgttccttattacaagcacataaacaaacaaacccaaatttggtgttctcttttttttactcttctttattttcttc

SEQ ID NO: 526320 - DNA, 201 bp, Homo sapiens
tgccctagtcaatagaagttgatgtctcaaacacaaaatataatgtctttgttgcccactgagtgcagttagttagttgaattgtagcttctgggcaatcyccttcctctgagtaggttaagggtaaggcatatttcaggacttggctcagaaataagtcctgacttttttccagtgaaaatgcaactgaaagtctcttta

SEQ ID NO: 526321 - DNA, 201 bp, Homo sapiens
gtagtaaataatgttacacccagccccacaggtaaaaaaacaaagaagtaatcctgaggagagtgtaggaattctccaaacccagccctgctgagttcctsttctccacaggcgaaaagcagatgcgcttcagcctctcagacctcccctatgatgtgaactcgggtggctatgaaaaggatgtggagttggtggcacacc

SEQ ID NO: 526322 - DNA, 201 bp, Homo sapiens
gttatgttgctttatttatttatttagtgacagagtctcactctgtcacccaggctggagtgcaatggcgtgatctcggctcactccaacctctgcctccdgggttcaaacgattcttatgcctcagcctcccaagcagctaggactacaggcatgtaccaccaagcccagctaatttttgtatttttagtagagatgggg

SEQ ID NO: 526323 - DNA, 201 bp, Homo sapiens
ctttggctggccaaccaggtagggctattgatgtactactggggagttaaaaggggatggtgagagggagtgctagacaagggtgactccagtatctcccrcactgagggatgaagtctgtggaacaggggatgattaccccagtaaatctgccaaacaccccattctaggtaacccagttggtggagagccttgtctgtg

SEQ ID NO: 526324 - DNA, 201 bp, Homo sapiens
ttgagagccctaagaaagaaatgcaacagaggaatccccagggcagacatccagacgggagctgcaaacttgggaagcaggctgcctgctcctgtgtaccraaacagccctccctgtacctcctcacacaaaccccatcccgttattttcttacctcatggctgctagagttgtaggttctcactttttaaattttctata

SEQ ID NO: 526325 - DNA, 201 bp, Homo sapiens
tcctgacctcaggtgatccacccaccttggcctcccaaagtgctgggattacaggcgtgagccaccacacctggcctaaattacttttttttttttttagkgtctcagtgtgttgcccaggctggcctagaactcctggcctcaagcagtcctcttgccttggcctcccaaactgctgggattggccctcactgctgcctg

SEQ ID NO: 526326 - DNA, 201 bp, Homo sapiens
atcccagcagtttgggaagccaaggcgggtggatcgcttgagcccaggagtttgagaccagccagagcaacatagtgagacttcgtctctactacaaaaamaaaaacaaaaacaaaaacaaaaactaggtgtggtggcacacacctgtagtcccagctactcaggaggctgagacagggaggatcacttgaacctgggagg

SEQ ID NO: 526327 - DNA, 201 bp, Homo sapiens
ggataataagcagaaaagaatggtgggggctgtcatgaagtggagaacatatgtcccacttaaagggacagcagctttcagtgtccactagaacttgtcakgcaggaatgtgtatctagtgtggccaaaacttctaaatttttaagagataccagaaatccaaatttttatatgaaatgtctccattttaaaataatgact

SEQ ID NO: 526328 - DNA, 201 bp, Homo sapiens
caggtgtgagccaccatgccagccgcaattttggaggtatgtaaatttccaccagatagattttttttttctctcctcccacaggctcctaaagagataaytcattgcaacaaattatcacttttaagtgttctcagttcccgattgtttaatactctactgccaattactgcttgccttccctcaaatagacattaacct

SEQ ID NO: 526329 - DNA, 201 bp, Homo sapiens
gggtctcacccagcacattttccagctgacaaaacgaggcagggtgggggtgggtacagaatttgaattcccctcaatacctttagtttcctggcactctyctcaaccgctgttataaagaaaaggtgatatttttctcagtatatgagggaggggaaagtgtagactcaagaatgagccaatggtccaataggggtaaga

SEQ ID NO: 526330 - DNA, 201 bp, Homo sapiens
aggcagaaggcggctagtggagggaggaaggggggtgctggggctagggagccaattcagtaactactcccaagcctgaggagatggagaggatgggggckgtgtgtgtgtgtgtgtgtgtgtgtgtgtgtgtgtgtgtgtgtgtagcgggggagggggcgttcctccttatacttgcggaggatgggaaagggtgtttgg

SEQ ID NO: 526331 - DNA, 201 bp, Homo sapiens
ctgacctcaggtgatccacccgcctcagcctcccaaagtgctgggattacaggcatgagccaccgtgcctggccagaaaattttttgcataccttatttcrccccattcccttctctcatgaacaaaactgtctattgttgttactcttgtcaaccctcgcttatatgtctaatagttcctactgtgcctgtctccccagc

SEQ ID NO: 526332 - DNA, 201 bp, Homo sapiens
atacctttccctggcccctttgcgtcttctccctcctcaattatgcaaagctttgatagagagcagagccagctatgtgatttcaacatatttttgctcasatttcactcagttcaggaaggcatagacagtagaggatgatgctgtgggtttgctctacttgtagcacctgaatggctcatacccaaggcacatgggaag

SEQ ID NO: 526333 - DNA, 201 bp, Homo sapiens
ttttttctccatgccctggcttcctagggaaatagggttgatactaggaatctctctgacaaaatgtaagagagaattgctttgtgaagtgaaggtaagcscatgtttcaggttttctcatgagccttcaaaaggagtctcaactccagacaagaattgggtgggggtgggggggcaggaaaacagatactttactctgtg

SEQ ID NO: 526334 - DNA, 201 bp, Homo sapiens
gtagcggggactcatctctggagaaggagttcctcggggccccagtggggccctcggtgagcacccccaacagccagcactcttctcctagccgctcactsagtggtaagtgtaacctcctaccacctcctggcagtaggcaccccctgttgcatttggccttcaattcaccttccactggcaaccatttccccatcgtca

SEQ ID NO: 526335 - DNA, 201 bp, Homo sapiens
agattcaagccataaggctttttctatagatagtgaacatttttcctcaggctttgacgggatagaatggggaaaatgggactttaggagaggatatgaaygggaaatggtcccaaagtcctgagtggttgttttcttcccactgaccaaagctggagagggatccctcaggagggtgtgttccggatttcttgcctcagg

SEQ ID NO: 526336 - DNA, 201 bp, Homo sapiens
aagggagtggatagagggcagctggcaagcagcagacactgagtgaagcagtgcctgggattcttctcacaggtcaagaagcaggccttgggcaggttccrctgatcgtgggcatcttgctggtgttgatggctgtggtccttgcatctctgatatataggtaagggcctcatcacacagctcagacccccttatccctta

SEQ ID NO: 526337 - DNA, 201 bp, Homo sapiens
tgcctcattaggaccccttccctgtccccccatatcacagccttccaaacaccctcagaagtaatcatacttcctgacctcccatctccagtgccgtttcraagcctgtccctcagtcccctttgaccagtaatctcttcttccttgcttttcattccaaaaacttcaggccaatactggcaagttctagggggcccagtg

SEQ ID NO: 526338 - DNA, 201 bp, Homo sapiens
actgtctaccatcgccggggatcccggagctatgtgcctcttgctcattccagctcagccttcaccattactggtaagggtttaggaaggggcaaggccakttgtagggcaagagaaggcagggaggcttggatggactggaaaggagaaaggtgaaatgctgtgcaaacttaaagtagaagggccaggaagacctaggca

SEQ ID NO: 526339 - DNA, 201 bp, Homo sapiens
ttgtgttctgtatcgatatggttccttttccgtcaccctggacattgtccgtgagtcttgcctactttggtggctgatggaggcagctgtgtgctacctakggctggtcagtggaagcacaccttgggaggaattactcacctagataggaagaatacccaaatgccagagtcctcatttgaaagcacagggatgggattg

SEQ ID NO: 526340 - DNA, 201 bp, Homo sapiens
actgcccaggtggtcctgcaggctgccattcctctcacctcctgtggctcctccccagttccaggcaccacagatgggcacaggccaactgcagaggcccmtaacaccacagctggccaagtgcctactacagaagttgtgggtactacacctggtcaggcgccaactgcagagccctctggaaccacatctgtgcaggtg

SEQ ID NO: 526341 - DNA, 201 bp, Homo sapiens
ggatttcaggcacctgccaccacacctggctaatttttgtatttttagtaaagacagggtttcgccatgttggccaggctggtctcaaactcctgacctcrtgatctgcctaccttggcctcccaaagtgctgggattacaggcatgagccaccgtgcctggcctggggtgaactgagttttctacctgcaagaagggcag

SEQ ID NO: 526342 - DNA, 201 bp, Homo sapiens
tacagaagttgtgggtactacacctggtcaggcgccaactgcagagccctctggaaccacatctgtgcaggtgccaaccactgaagtcataagcactgcayctgtgcagatgccaactgcagagagcacaggtatgacacctgagaaggtgccagtttcagaggtcatgggtaccacactggcagagatgtcaactccaga

SEQ ID NO: 526343 - DNA, 201 bp, Homo sapiens
tttgctggctgtgggggctacaaaaggtatgtgtggatatgtggacatgagcaggtgtgaacttggggatgaattccccctgctctggtttctgtcctccwaatgggagatagcggcaatatttcaggcgtctcccactcatttgatttagtgaggatgtgggcacctgggctccctccctacatggagatttgggatttt

SEQ ID NO: 526344 - DNA, 201 bp, Homo sapiens
tctggctcttggtctcagaagagaagctttgtttatgtctggaagacctggggtgagggactcccttctcagcctatcatccacacttgtgtttacttctytctacctgatcacctttcttttggccgccccttccaccttaacttctgtgattttctctaatcttcattttcctcttagatcttttctctttcttagcac

SEQ ID NO: 526345 - DNA, 201 bp, Homo sapiens
atttcaaaaaaaaaaaaaaaaaaaaaaacagaaagcaaaaagaaaagaaaattacagttgtagtccctgctacttagcagtctcaggtgggaggatcatgsgcctgggaggtcgagactgcatgatcacgccactgtacttcagcctgggtgacagagtgagaccctgtctcaaaaagaaaaaagaaaattacagtcccta

SEQ ID NO: 526346 - DNA, 201 bp, Homo sapiens
agcctaggacctgacatagtgtggggtgtgataaacatttgaggattttttaaaactccaatgccacccctaactgtgactctggaggagtcattttcttyttctgggcctcagtttccttatctatagaataaggtttcccaggtcttatctgattccaagcctgtgactccagaatccagtaactctggttcaacctga

SEQ ID NO: 526347 - DNA, 201 bp, Homo sapiens
attcaggggacctagaagttgaacagacctatatttaaacttgtccttgatatgtgaccttgggcaagttacttgttttgtgtttccatttctttttttttcttttcttttcttttcttttctttttttttttttttgagacagagtctggctgtgtcgctcaggctggagtgcagtggcaggatctcagctcactgcaac

SEQ ID NO: 526348 - DNA, 201 bp, Homo sapiens
ccagaaggcagaggttgcagtgagccaagatcacaccaatgcactccagcctgggtgacagagcgagtctccgtctcaaaaaaaaaaaaaaaaagaaagggatgaggcccggcacagtaactcatgcctgtaatcctagcactttgagaggctgagacgggtggatcacttgaggtcagaccagcctggccaatatggtga

SEQ ID NO: 526349 - DNA, 201 bp, Homo sapiens
aacccagaaggcagaggttgcagtgagccaagatcacaccaatgcactccagcctgggtgacagagcgagtctccgtctcaaaaaaaaaaaaaaaaagaaagggatgaggcccggcacagtaactcatgcctgtaatcctagcactttgagaggctgagacgggtggatcacttgaggtcagaccagcctggccaatatgg

SEQ ID NO: 526350 - DNA, 201 bp, Homo sapiens
acctgatcacctttcttttggccgccccttccaccttaacttctgtgattttctctaatcttcattttcctcttagatcttttctctttcttagcacctarcccccttcaactctatcataattctttctggcaactcttcctcaattgtagtcctaccccatggaatgcctcattaggaccccttccctgtccccccata

SEQ ID NO: 526351 - DNA, 201 bp, Homo sapiens
gaacccagaaggcagaggttgcagtgagccaagatcacaccaatgcactccagcctgggtgacagagcgagtctccgtctcaaaaaaaaaaaaaaaaagaaagggatgaggcccggcacagtaactcatgcctgtaatcctagcactttgagaggctgagacgggtggatcacttgaggtcagaccagcctggccaatatg

SEQ ID NO: 526352 - DNA, 201 bp, Homo sapiens
gctggctgtgggggctacaaaaggtatgtgtggatatgtggacatgagcaggtgtgaacttggggatgaattccccctgctctggtttctgtcctcctaaygggagatagcggcaatatttcaggcgtctcccactcatttgatttagtgaggatgtgggcacctgggctccctccctacatggagatttgggattttgcc

SEQ ID NO: 526353 - DNA, 201 bp, Homo sapiens
tgaacccagaaggcagaggttgcagtgagccaagatcacaccaatgcactccagcctgggtgacagagcgagtctccgtctcaaaaaaaaaaaaaaaaagaaagggatgaggcccggcacagtaactcatgcctgtaatcctagcactttgagaggctgagacgggtggatcacttgaggtcagaccagcctggccaatat

SEQ ID NO: 526354 - DNA, 201 bp, Homo sapiens
ctggtcaggcgccaactgcagagccctctggaaccacatctgtgcaggtgccaaccactgaagtcataagcactgcacctgtgcagatgccaactgcagasagcacaggtatgacacctgagaaggtgccagtttcagaggtcatgggtaccacactggcagagatgtcaactccagaggctacaggtatgacacctgcag

SEQ ID NO: 526355 - DNA, 201 bp, Homo sapiens
gacttatgaagcaagacttctccgtaccccagttgccacatagcagcagtcactggctgcgtctaccccgcatcttctgctcttgtcccattggtgagaayagccccctcctcagtgggcagcaggtctgagtactctcatatgatgctgtgattttcctggagttgacagaaacacctatatttcccccagtcttccctg

SEQ ID NO: 526356 - DNA, 201 bp, Homo sapiens
atgcttggaggggcagaaggatagaaggtctctgtggcactgattctgaggcttccttggcagtgagctggagcacgggctccaaaggggtgaaatgtgcrggagactcttttaggaaacgtctcttggggtaggagatttaaagtggggagtcagagaatgtggtattgggtaagaacactaaggagatacaatcctctc

SEQ ID NO: 526357 - DNA, 201 bp, Homo sapiens
actacagaagttgtgggtactacacctggtcaggcgccaactgcagagccctctggaaccacatctgtgcaggtgccaaccactgaagtcataagcactgyacctgtgcagatgccaactgcagagagcacaggtatgacacctgagaaggtgccagtttcagaggtcatgggtaccacactggcagagatgtcaactcca

SEQ ID NO: 526358 - DNA, 201 bp, Homo sapiens
gccctccagctccatgaccccagtggctatctggctgaagctgacctctcctacacctgggactttggagacagtagtggaaccctgatctctcgggcacytgtggtcactcatacttacctggagcctggcccagtcactgcccaggtggtcctgcaggctgccattcctctcacctcctgtggctcctccccagttcca

SEQ ID NO: 526359 - DNA, 201 bp, Homo sapiens
ctttctccgtgagcgtgtcccagttgcgggccttggatggagggaacaagcacttcctgagaaatcagcctctgacctttgccctccagctccatgacccyagtggctatctggctgaagctgacctctcctacacctgggactttggagacagtagtggaaccctgatctctcgggcacttgtggtcactcatacttacc

SEQ ID NO: 526360 - DNA, 201 bp, Homo sapiens
ctggggtcttatcattcagctttgtttgaatttattaatcaccatgatacctctccctccctttgtccacatgtaacttgttcttggggctctaccagatsgctgaagagtaaatcctttctacctctggctgaaggagtggtgcagtcaatgacttggccctttttctacagcacatttagagtttgggctctggctccc

SEQ ID NO: 526361 - DNA, 201 bp, Homo sapiens
cccctgttattatcccgtctttttgctctgcccgcaggcgtcagtttcaaactggaagaaaaaaccgcccacagcagcctggcactcttcagagatgataygggtgtcaaatatggcttggtgggattggagcccaccaaggtggccttgaatgtggagcgcttccgggagtgggcagtggtgctggcagacacagcggtc

SEQ ID NO: 526362 - DNA, 201 bp, Homo sapiens
gtgtccgaagcctttttactttgcctcaagcaacctctagctcccacaattcagtgttgggtcctctgtgcaatatcatgatcatcttcctcatcccctaycttgtgaaagctaggcatacagccaaaccctccttttccccacccaccaactactgccaatttcctaggctaccatgggtgtatcttccttgacctgctt

SEQ ID NO: 526363 - DNA, 201 bp, Homo sapiens
tcgttctctgctgcactcccagctggccaccatgttttttgatgaggttgtcaaacagaatgttgctgcctttgagcgtcgggcagccaccaagtttggtycagaaacagccatcccccgtgaactgatgttccatgaggtgcaccagacttgaggcaagggattgctccctgacctcccttctaccccacttccctacac

SEQ ID NO: 526364 - DNA, 201 bp, Homo sapiens
cacaggtgtgaaactacatctcccgacaggcggcgttgtccccttccttccttccttcctctcccaggcccgagccatggcaacagcgtgacgtgggggtrccgagatctgcgggagcagcggtcccggcttcagttctagcctacccggcagcctggacgggagcaaggcgagaggtgctgccgcctcccgtcgcccctg

SEQ ID NO: 526365 - DNA, 201 bp, Homo sapiens
ggcaactggcgcttcccacacacccctttttctcatccccctcaccccgcccccagccctgtccttagctgccctcgaccttttgcactcgtgactccctrgccagagagagcctagcgggctgcagcaggtgctggggggaaagcttgtttggacgaccttcgtctgggatgcactcttcttctccttcacctacaaatg

SEQ ID NO: 526366 - DNA, 201 bp, Homo sapiens
ttgaatttcgttctctgctgcactcccagctggccaccatgttttttgatgaggttgtcaaacagaatgttgctgcctttgagcgtcgggcagccaccaartttggtccagaaacagccatcccccgtgaactgatgttccatgaggtgcaccagacttgaggcaagggattgctccctgacctcccttctaccccacttc

SEQ ID NO: 526367 - DNA, 201 bp, Homo sapiens
gcaaagtacaactctcaagcaatgcttaggtttgggagagaggtttttgcatgctctgcctatgctaacttccctttgaatttcatagttcctttccgctyagagtcaggatgatgaaatgtattcagatttagacgattagaatctcaaagtcccaactcttctctctgttccctgccccaccagcagctttcttagccc

SEQ ID NO: 526368 - DNA, 201 bp, Homo sapiens; identical to SEQ ID NO: 316145

SEQ ID NO: 526369 - DNA, 201 bp, Homo sapiens
tttagacgattagaatctcaaagtcccaactcttctctctgttccctgccccaccagcagctttcttagccctcttagaagatagaggagctgattcagtstattctttcatcaaatactgattgcttgcagacttaacgccctataccatcctctggagacttctgcatgtctttagaaggtatacctttctctgcctct

SEQ ID NO: 526370 - DNA, 201 bp, Homo sapiens; identical to SEQ ID NO: 316146

SEQ ID NO: 526371 - DNA, 201 bp, Homo sapiens
gcctcccaaagtgctgggattacaggcgtgagtcaccacgccgggccggtaaggcttttgaaaagagatataagacctgattatggagctggccctcttartcccattcttttccccagaaatggaaaccctttataaaaacagaggccggtcccagtggcccaccactttgggaggccaagatgggcggatcacctgagg

SEQ ID NO: 526372 - DNA, 201 bp, Homo sapiens
tgaataaggagctacccaggtgaacaaagtatgtgtacatttctgggcaaggttgtagcttctgttcagggacagtgggtaccttttcagagtgtctcctggttctgtggtgttatggctcctttttttaaacttgtgtttctcaagtcaggaattaatagatagtggcccaaagcttttgaccgttcaacatcaactgaa

SEQ ID NO: 526373 - DNA, 201 bp, Homo sapiens
aagcgtgtctgcaattgtttcctgtctttacactcccccagagctcaagtgatatgtttagccatgagaattcagtccattctaactcccacattttcctktattgtagagtagtaacattgaggcttaatattctaccccttggatcacatgctttgaaatacataaaaatgtaagggagtaagttgaaaaaaccagtaa

SEQ ID NO: 526374 - DNA, 201 bp, Homo sapiens; identical to SEQ ID NO: 316149

SEQ ID NO: 526375 - DNA, 201 bp, Homo sapiens; identical to SEQ ID NO: 316150

SEQ ID NO: 526376 - DNA, 201 bp, Homo sapiens; identical to SEQ ID NO: 316151

SEQ ID NO: 526377 - DNA, 201 bp, Homo sapiens
gaaaacattgcggtatccatgatttggccttgtggagggtgttcctaggtagaggtgagaatggggaggcaagatctcaggcaccaggcaggaggtgcctkgtaagctaactgggcggaggtggaggtgcagtgtcaactgtggctctgtaactcttcaaaggcccagtttcccctcacgcagcctcttaggtagcgtttc

SEQ ID NO: 526378 - DNA, 201 bp, Homo sapiens
cttggtcctttctaaatctctagtctctcttcatatccttcatcaggtgttttaagatgtctctgagaagccatcaaggcaaaagagaactttaagttccttgttccagcccggagttttgggaaagaaagaaaggaaaggtcacagtgacctaggattggaaccttcctgcccttttggcttgcagactgccttctatcc

SEQ ID NO: 526379 - DNA, 201 bp, Homo sapiens
tagttattgtcttgaaccgctcttggccagctgtgtcccagacttgtagtttgatcttcttcccctctatatccacagtgcggatcttgaaatcaattccratggtggagatgtaagtgttgttgaagttgtcctctgcaaagcgaatgatcagacaagtcttgcccacccccgagtccccgatcagcagcaacttgaaga

SEQ ID NO: 526380 - DNA, 201 bp, Homo sapiens
ggctggactctaactcctgacctcaggtgatccacgtgcctcagcctcccaaagcactgggattacaggagtgagccaccgcgcctggccgtgtgtgcgtgtgtgtgtgtgtgttttaatcctatctaatttttccaacagttttttgcatcctaagagagtttaggagtagaattatcaataaggaatttcatacataga

SEQ ID NO: 526381 - DNA, 201 bp, Homo sapiens
gctggactctaactcctgacctcaggtgatccacgtgcctcagcctcccaaagcactgggattacaggagtgagccaccgcgcctggccgtgtgtgcgtgtgtgtgtgtgtgttttaatcctatctaatttttccaacagttttttgcatcctaagagagtttaggagtagaattatcaataaggaatttcatacatagac

SEQ ID NO: 526382 - DNA, 201 bp, Homo sapiens
aggttttcaccacgttggccaggctggtctcaaactcctgacctcaggtgatctgcccatctcgccctcccaaagtgctaggattacaggtgtaagccacsacgcctagcccaaattgactaattgtatgtgtctcggtttcctcacctataaaatatagagactggactaaatgacctctagactggctctgatctgcct

SEQ ID NO: 526383 - DNA, 201 bp, Homo sapiens
aaggcgggaggatcatgaggtcaagagattgagaccatcctggccaacatggtgaaaccccgtctctactaaaattacaaaaattagttgggcgtggtggygcgcgcctgtagtcccagctactcgggaggctgaggcaggagaatcgcttgaacccaggaggcggaggttgcagtgagccgagatcgagccactgcactc

SEQ ID NO: 526384 - DNA, 201 bp, Homo sapiens
cagtggcaaagtctcgacccactgcagcctctgcctcccaggttcaagcaattctcctgcttcagcctcccaagtagctgagattacaggtgtcagccacmacacctggctaatttttgtgtttttaatagagacggggtttcaccatgttcgccagactggtgttgaattcctgaccttaggtgatccgcccacctcagc

SEQ ID NO: 526385 - DNA, 201 bp, Homo sapiens
ggcgggaggatcatgaggtcaagagattgagaccatcctggccaacatggtgaaaccccgtctctactaaaattacaaaaattagttgggcgtggtggtgsgcgcctgtagtcccagctactcgggaggctgaggcaggagaatcgcttgaacccaggaggcggaggttgcagtgagccgagatcgagccactgcactcta

SEQ ID NO: 526386 - DNA, 201 bp, Homo sapiens
tcaccatgttcgccagactggtgttgaattcctgaccttaggtgatccgcccacctcagcctcccaaagtgctgggatttcaggcatgagtcactgcaccyggcagagctgcacttctaagggaagttaaatctgatttcttctcttctgagctaaaaaggttgaaaggaagagaaacctgccccatctcccttttttttg

SEQ ID NO: 526387 - DNA, 201 bp, Homo sapiens
aagtaaggtggcccgtggagttcctctctaacacttcctctgttcctgggacctctttttttccaaaccagccctctctgaaaacgtcaacagaggacatycattgtctcattccccagttctacaccaagttaaatacagcaacactgtgaccctaatgacagccaggagattttcaaaggagtcaggagaaaactccag

SEQ ID NO: 526388 - DNA, 201 bp, Homo sapiens
tgagctaaaaaggttgaaaggaagagaaacctgccccatctcccttttttttgtctcgggtttgaaggtaataatcatcataccacttgactggtttaccaaaaaaaaaaaaaaaaattagtatttttgtgggaaaaaatgagaatagaaaataaataattgaatcttatatgtattatttcatttctgtaccacagaatt

SEQ ID NO: 526389 - DNA, 201 bp, Homo sapiens; identical to SEQ ID NO: 316168

SEQ ID NO: 526390 - DNA, 201 bp, Homo sapiens
agttctacaccaagttaaatacagcaacactgtgaccctaatgacagccaggagattttcaaaggagtcaggagaaaactccagagcagagggttagggargtaccagctgtgggggtaccagtgtgaaaacaggaaggagggagcaattaaatttgtggtaagggactattcaagtgtcacaacccaaaagcccccaact

SEQ ID NO: 526391 - DNA, 201 bp, Homo sapiens; identical to SEQ ID NO: 316173

SEQ ID NO: 526392 - DNA, 201 bp, Homo sapiens
tcccaactcttaccactgaggatcagctgcctgggaccttctcagagctaagtcctcatagaagcaaggagatgaagaggttctatccttctctgaaaagsgattgcagcttcaatggacgtatgtttaattttattcacttttttttcttgcaggagtgttgaagcctggaaatcccctccccttccccctccccccttt

SEQ ID NO: 526393 - DNA, 201 bp, Homo sapiens
ctaccccctactctggggcttgggggtcaactccccccaggacttaccttccaaaacaaactttcttcactttgtattataggtacaagacagcgacttaygtatcttttctcctcctccctagtgttcctccccattttttcagaaaacacttctgactcctgtcccttccccttctgcttttggtcagtccctgttctt

SEQ ID NO: 526394 - DNA, 201 bp, Homo sapiens
cccttctgcccttaggagtggtgactcttatcccacacccctagagtgaatctctcattttgacaaagagctaaggaaaaatgaaaagaaggccaggcacrgtggctcatgcctgtaatatcagcactttggaaggccaaggcgggcagatcacctgaggtcaggacttcttagactagtctgaccaacatggagaaactc

SEQ ID NO: 526395 - DNA, 201 bp, Homo sapiens
tatgtcacctgaaggaaacttgatcagcttatcatctgtccttttttttttattatggtgtcacctgtcttctcttttatttattttttattttgagagayggagtcttgctctgttgcccaggctggagtacagtggcataatctcagctcactgcaacctccgccctctgggttcaagcgattctcctgcctcagcttc

SEQ ID NO: 526396 - DNA, 201 bp, Homo sapiens
aaaacaaacgtggagaattggactccagagcctttattcctctgaattgcctcctgtatgattttctgtctttacgatctagtaagtggggttactgaaawtttttaaccccagtttaactccagtcccactaattgtggtgacaaaataatgatgtttccccacatatgccatagagtatgatgtctgtgaagtcactag

SEQ ID NO: 526397 - DNA, 201 bp, Homo sapiens
ggggccctccatccaagggagatcacagaggagccagggagagaattgattctgaggcctattaaaaatattcccaaatggggccgtgtgcggtggcatgygcctgtaatcccagcactttgggaggctgaggcgggtggatcacgaggtcaggagattgagaccatcctggctaacacggtgaaaccccgtctctactaa

SEQ ID NO: 526398 - DNA, 201 bp, Homo sapiens
ataaactcccacttttaaagaagttcatagtttagcagagcagacagacacaatttatatactgtgataatgtgatacatactattatagaaatacagtctttttttttttttttgagacggattcttgctttgctgtccaggctggagtacagtggtgcaatctgtgctcactgcaacctccgcctcccgggctcaagca

SEQ ID NO: 526399 - DNA, 201 bp, Homo sapiens
agatgtaagtgttgttgaagttgtcctctgcaaagcgaatgatcagacaagtcttgcccacccccgagtccccgatcagcagcaacttgaagaggtggtcrtaggctttggccatggcggacaccgggggagccggggaagggatggggctatttatttatttttgagacggaatcgctctgttgtccaggctggagtgca

SEQ ID NO: 526400 - DNA, 201 bp, Homo sapiens
ccaaaacaaactttcttcactttgtattataggtacaagacagcgacttacgtatcttttctcctcctccctagtgttcctccccattttttcagaaaacrcttctgactcctgtcccttccccttctgcttttggtcagtccctgttcttgagcctcttttctcctctccccaggatgcagaaagtggtgaacccaggaa

SEQ ID NO: 526401 - DNA, 201 bp, Homo sapiens
ggcgtgagccaccacacccggccatcactacatttcttaattacaaaagttaatatgtacatattttaaaatatggaaggtgtacagcagtttaagaagtrtaaatcctcccacacataccttattcatatttcatttaggaaggtcaaggatcagagacagcaaatcagactaatcttgctttgctttgggggatgtgtc

SEQ ID NO: 526402 - DNA, 201 bp, Homo sapiens
cccactgcactccagcctgggcaacagaatgagaccctgtctccaaaaaaaaaaaagacaaagattgccaaagcagaggagtggagtaccctcctccccamatatttttaatggtctgctagccttcttagtccctcatagattggagcctattggattttcccttactgtacttcctccttttctgcgtctctaccaata

SEQ ID NO: 526403 - DNA, 201 bp, Homo sapiens
tgaaaacattgcggtatccatgatttggccttgtggagggtgttcctaggtagaggtgagaatggggaggcaagatctcaggcaccaggcaggaggtgccktgtaagctaactgggcggaggtggaggtgcagtgtcaactgtggctctgtaactcttcaaaggcccagtttcccctcacgcagcctcttaggtagcgttt

SEQ ID NO: 526404 - DNA, 201 bp, Homo sapiens
agtttctcatatttgaaaacattgcggtatccatgatttggccttgtggagggtgttcctaggtagaggtgagaatggggaggcaagatctcaggcaccargcaggaggtgccttgtaagctaactgggcggaggtggaggtgcagtgtcaactgtggctctgtaactcttcaaaggcccagtttcccctcacgcagcctc

SEQ ID NO: 526405 - DNA, 201 bp, Homo sapiens
ttccggggtggggaggcaagaaagggtcctcagctcagggagcacttgttggtgttctttatgtcacaagttttcaggtcagtactgggaggcttgttgcygtttcctgatctccggcctcctgacttgagcaagatgtcccgggccagggaactaaaagcctcatccacattcatactggatttagcactagtttcgaaa

SEQ ID NO: 526406 - DNA, 201 bp, Homo sapiens
tccccattttttcagaaaacacttctgactcctgtcccttccccttctgcttttggtcagtccctgttcttgagcctcttttctcctctccccaggatgcwgaaagtggtgaacccaggaactgaggaaggaggtttccagttcatttacattaagggccctgggggagaataaagctcagagcaggagggagtaaggaaa

SEQ ID NO: 526407 - DNA, 201 bp, Homo sapiens; identical to SEQ ID NO: 316152

SEQ ID NO: 526408 - DNA, 201 bp, Homo sapiens
gagctaaaaaggttgaaaggaagagaaacctgccccatctcccttttttttgtctcgggtttgaaggtaataatcatcataccacttgactggtttaccaaaaaaaaaaaaaaaaattagtatttttgtgggaaaaaatgagaatagaaaataaataattgaatcttatatgtattatttcatttctgtaccacagaattt

SEQ ID NO: 526409 - DNA, 201 bp, Homo sapiens
ttgtcatgttcctctgtattaatctagtctactttgggaccttgagttctcacctctcattcttttgctaacttcctctttaccctttagttatgtctccttttttttttttttttttttccagagatagcgtcttgttctgtcgcccaggctggagtgcagtggtgtaatcagctcactacaaccttcaactcctgggct

SEQ ID NO: 526410 - DNA, 201 bp, Homo sapiens
tgtcatgttcctctgtattaatctagtctactttgggaccttgagttctcacctctcattcttttgctaacttcctctttaccctttagttatgtctccttttttttttttttttttttccagagatagcgtcttgttctgtcgcccaggctggagtgcagtggtgtaatcagctcactacaaccttcaactcctgggctc

SEQ ID NO: 526411 - DNA, 201 bp, Homo sapiens
tcaggacttcttagactagtctgaccaacatggagaaactccgtctctactaaaaatacaaaattagccaggcgtggtggtgcatgcctgtaatcccagcwactcgggagactgaggtgggagaattgcttgaacccgggaggcagaggttgtggtgagccaagattgtgccattgcactccagcctgggcaacaagagtg

SEQ ID NO: 526412 - DNA, 201 bp, Homo sapiens
ctacttcctaccacctcttctgccttcctttgagctctgttgggcttggggatcttagttttcttttgtttatttcccagctcatttttttcttctggtcmgtttttttaagggggggtgttgtggttttttgtttttgttttgcttctgagaaagcatttgcctttcttcctctcccaacataacaatcgtggtaacaga

SEQ ID NO: 526413 - DNA, 201 bp, Homo sapiens
caggctggactctaactcctgacctcaggtgatccacgtgcctcagcctcccaaagcactgggattacaggagtgagccaccgcgcctggccgtgtgtgcgtgtgtgtgtgtgtgttttaatcctatctaatttttccaacagttttttgcatcctaagagagtttaggagtagaattatcaataaggaatttcatacata

SEQ ID NO: 526414 - DNA, 201 bp, Homo sapiens
aggctggactctaactcctgacctcaggtgatccacgtgcctcagcctcccaaagcactgggattacaggagtgagccaccgcgcctggccgtgtgtgcgtgtgtgtgtgtgtgttttaatcctatctaatttttccaacagttttttgcatcctaagagagtttaggagtagaattatcaataaggaatttcatacatag

SEQ ID NO: 526415 - DNA, 201 bp, Homo sapiens
aaaaagacaaagattgccaaagcagaggagtggagtaccctcctccccacatatttttaatggtctgctagccttcttagtccctcatagattggagcctrttggattttcccttactgtacttcctccttttctgcgtctctaccaatatattttatcactacatttcttttttttttttttttttttttgagacggagt

SEQ ID NO: 526416 - DNA, 201 bp, Homo sapiens
taaggctattatctcattttacagatgaggaaatgaatgcacacatatatttagtgacttgctcaaggttcatagctagtaagtagagctgaaaaacaaaygtggagaattggactccagagcctttattcctctgaattgcctcctgtatgattttctgtctttacgatctagtaagtggggttactgaaaatttttaac

SEQ ID NO: 526417 - DNA, 201 bp, Homo sapiens; identical to SEQ ID NO: 316174

SEQ ID NO: 526418 - DNA, 201 bp, Homo sapiens
acccaggaggcggaggttgcggtgagtcgagattgtgccaccacactccagcctgggtgaaagagtgagattccatctcggggggcgggggtggggtggcaaaaaaaaaaaaaaaaaaaaaaagaaaggcatactgaacctgcatcccatgaaatttcagaacacgggaacaaagaagatcctgctaacttccaaaaagaa

SEQ ID NO: 526419 - DNA, 201 bp, Homo sapiens
ccccttgctcatgtgctctctcagaatccctgctgctccctgctgcctgcctgcctgcctgcctgaaatgtctcacacccttctctgcctgaactctgctkattgattatctttccaatttgaacctcagctcttcacagcctctcctgacacctatgcttctgggaacaagttggttgctccatcctttgtgatccccaa

SEQ ID NO: 526420 - DNA, 201 bp, Homo sapiens
acaaaatcctcttcagcttctgtggcatctgggccatgattactggtaggtgctgggttccctggaggacagtcagccttgtaatcctcccccgcggcagmtttgtagctcatttttaatgacaccaacatctttactgcagaatcaatttcatcctgagagaggaaataaaagggatggctaaaagtattactaatagct

SEQ ID NO: 526421 - DNA, 201 bp, Homo sapiens
ttgcttaccaagggaaatacaaacatttccacttacagtttatacagaacattctttcttttaaatctccttaaattccttttaccatatacagaatgttytataaacaccaacctccattcagagataactattccatcagatatagcacttgggccataaaggactgtgattctggagtaatctgtgtttcaaactaca

SEQ ID NO: 526422 - DNA, 201 bp, Homo sapiens
gggtccacaaaatcctcttcagcttctgtggcatctgggccatgattactggtaggtgctgggttccctggaggacagtcagccttgtaatcctcccccgmggcagctttgtagctcatttttaatgacaccaacatctttactgcagaatcaatttcatcctgagagaggaaataaaagggatggctaaaagtattacta

SEQ ID NO: 526423 - DNA, 201 bp, Homo sapiens
tgggtccacaaaatcctcttcagcttctgtggcatctgggccatgattactggtaggtgctgggttccctggaggacagtcagccttgtaatcctcccccrcggcagctttgtagctcatttttaatgacaccaacatctttactgcagaatcaatttcatcctgagagaggaaataaaagggatggctaaaagtattact

SEQ ID NO: 526424 - DNA, 201 bp, Homo sapiens
caaaatttaaaaacatcaatggaatcaactcaatgggaccacttctaaaagttgcagctttttctgggaagaaagcagaggacgtaccaatgagcttatcrtagtctatgccttttgcactgcttgtctgtactgtccatgggtccacaaaatcctcttcagcttctgtggcatctgggccatgattactggtaggtgctg

SEQ ID NO: 526425 - DNA, 201 bp, Homo sapiens
gtgtgtggttgtggacaagtcccattcccctctcccaagcctgttgcaaatgaggacgggccggaagcgtgagtccagggtgcgctgccctgggcgccccratcaggctcccagtcaaggcactgtggtctctctgcagatgtcccgggcgtgctggtggccgggggctgtgcaggagtcctggcctgggctgtggccacc

SEQ ID NO: 526426 - DNA, 201 bp, Homo sapiens
gcggcctctacaagggcagctcggccctggtcttacgggacggccactcctttgccacctacttcctttcctacgcggtcctctgcgagtggctcagcccygctggccacagccggccaggtgagcaggggctggaacctggcagggcggggagcccagaaggatgaggaggtcaaggtgaggtcgtgctgcccgccagta

SEQ ID NO: 526427 - DNA, 201 bp, Homo sapiens
ttcaggcaggctcagctggtctctcctccaggctgggggccacgggacagagagactgagctgggttggccccacatctgtctgacaagtggacattaccagccagagcaggagtgctcttccggcagagcctctggcaccacggtggtgcaggcacccggcctcatgcctcatccccaaacactcatggggccactgcaa

SEQ ID NO: 526428 - DNA, 201 bp, Homo sapiens
gagtcaggacagacttgctgtgtcacagagtcagtgtgtggttgtggacaagtcccattcccctctcccaagcctgttgcaaatgaggacgggccggaagygtgagtccagggtgcgctgccctgggcgccccgatcaggctcccagtcaaggcactgtggtctctctgcagatgtcccgggcgtgctggtggccgggggc

SEQ ID NO: 526429 - DNA, 201 bp, Homo sapiens
gtgcttctcaggcaccatctcctttcaggcaggctcagctggtctctcctccaggctgggggccacgggacagagagactgagctgggttggccccacatytgtctgacaagtggacattaccagccagagcaggagtgctcttccggcagagcctctggcaccacggtggtgcaggcacccggcctcatgcctcatcccc

SEQ ID NO: 526430 - DNA, 201 bp, Homo sapiens
ctctgctccaggtgttcctgacgtcgcccactgaggtggccaaagtccgcttgcagacgcagacacaggcgcagaagcagcagcggcggctttcggcctcrgggccgttggctgtgccccccatgtgtcctgtgcccccagcctgcccagagcccaagtaccgcgggccactgcactgcctggccacggtagcccgtgagg

SEQ ID NO: 526431 - DNA, 201 bp, Homo sapiens
gggttcgggaccccacagggccattgcccaggagaatgaggagcctccctgcagtgttgtcggccgaggcctgagctcgccctgcccagctactgacctcrggtcgaggggcccgccagccatcagccagggttggcctagggtggcaggagccagggaggagtgggcctctttgatgagagcgttgagttgcatggagtc

SEQ ID NO: 526432 - DNA, 201 bp, Homo sapiens
gcgctgacaggtttccatggctcatcaaacactgaccccgggaccgtttttgtcgagaagaccccacctgttcggccttggcaggagggttcctggcagcrctcctggcccggctctggcagtggctgcactctgggaggtgggggcctttggctctccctgagcccgtgtcactgagcagctggctctgcgtgtcactgg

SEQ ID NO: 526433 - DNA, 201 bp, Homo sapiens
cggtagcccgtgaggaggggctgtgcggcctctacaagggcagctcggccctggtcttacgggacggccactcctttgccacctacttcctttcctacgcsgtcctctgcgagtggctcagccccgctggccacagccggccaggtgagcaggggctggaacctggcagggcggggagcccagaaggatgaggaggtcaag

SEQ ID NO: 526434 - DNA, 201 bp, Homo sapiens
gtcttcgtcgcctatgaggcagtgctgaggctcgcccggggtctgctcacatagccggtccccacgcccagcggcccacccaccagcagctgctggaggtygtagtggctggaggaggcaaggggtagtgtggctgggttcgggaccccacagggccattgcccaggagaatgaggagcctccctgcagtgttgtcggccg

SEQ ID NO: 526435 - DNA, 201 bp, Homo sapiens
ctgtgtcttcacgagctgtcccttacaggcaggggcttcccacaggctgggggcctcggggcggggagcatgagctgggctggcaccacgactgagggctyccggcccggcttcttccccacagcaggctgctcagagggggtgctgccgggactgccatgcccacctgagaggggcctggggtggccgtcctcggccggt

SEQ ID NO: 526436 - DNA, 201 bp, Homo sapiens
gcctgaccactgggctgctcccaagcatctcttgctctgctcccttggggacctggttgggtgtgtggtcactcatctgcctctccccggccacaagagcytgcgggctgtgcaaggactccatctagctccagggctgctgcatagtagggggtgtgggatgaatgagcgagtgaatgaatgaatgaatgaatgaataag

SEQ ID NO: 526437 - DNA, 201 bp, Homo sapiens
acaggcgcagaagcagcagcggcggctttcggcctcggggccgttggctgtgccccccatgtgtcctgtgcccccagcctgcccagagcccaagtaccgcrggccactgcactgcctggccacggtagcccgtgaggaggggctgtgcggcctctacaagggcagctcggccctggtcttacgggacggccactcctttgc

SEQ ID NO: 526438 - DNA, 201 bp, Homo sapiens
gtatggtgaccagcgttcgagaggagggaccccgggtccttttcaaggggctggtactcaattgctgccgcgccttccctgtcaacatggtggtcttcgtygcctatgaggcagtgctgaggctcgcccggggtctgctcacatagccggtccccacgcccagcggcccacccaccagcagctgctggaggtcgtagtggc

SEQ ID NO: 526439 - DNA, 201 bp, Homo sapiens
ccagagggggctgcccgtgggagggcgccaggtgccttgcacagctcaccacagccacctgacagctccaagagggagggggccttgcctgccgtcacgcwtcagggaggggtgggtggactgcagccagtgcttctgaggctccagcaccccccctcctggcatcatgtggcttccaatgatgggggctatcaggggcta

SEQ ID NO: 526440 - DNA, 201 bp, Homo sapiens
cccctgcttccttctctgctccaggtgttcctgacgtcgcccactgaggtggccaaagtccgcttgcagacgcagacacaggcgcagaagcagcagcggckgctttcggcctcggggccgttggctgtgccccccatgtgtcctgtgcccccagcctgcccagagcccaagtaccgcgggccactgcactgcctggccacg

SEQ ID NO: 526441 - DNA, 201 bp, Homo sapiens
ctctgggaggtgggggcctttggctctccctgagcccgtgtcactgagcagctggctctgcgtgtcactggggagggggtttgcaggaaaggcctctgtcctcactgttttttttttttttttgagacggagtctcgctctgtcgcccaggctggagtgcagtggcgcgatctcggcttggctcactgcaagctccgtctc

SEQ ID NO: 526442 - DNA, 201 bp, Homo sapiens
cttcacgagctgtcccttacaggcaggggcttcccacaggctgggggcctcggggcggggagcatgagctgggctggcaccacgactgagggctcccggcycggcttcttccccacagcaggctgctcagagggggtgctgccgggactgccatgcccacctgagaggggcctggggtggccgtcctcggccggttaggga

SEQ ID NO: 526443 - DNA, 201 bp, Homo sapiens
tctgggaggtgggggcctttggctctccctgagcccgtgtcactgagcagctggctctgcgtgtcactggggagggggtttgcaggaaaggcctctgtcctcactgttttttttttttttttgagacggagtctcgctctgtcgcccaggctggagtgcagtggcgcgatctcggcttggctcactgcaagctccgtctcc

SEQ ID NO: 526444 - DNA, 201 bp, Homo sapiens
ccaccactgttcctgtgtcttcacgagctgtcccttacaggcaggggcttcccacaggctgggggcctcggggcggggagcatgagctgggctggcaccaygactgagggctcccggcccggcttcttccccacagcaggctgctcagagggggtgctgccgggactgccatgcccacctgagaggggcctggggtggccg

SEQ ID NO: 526445 - DNA, 201 bp, Homo sapiens
ctgggaggtgggggcctttggctctccctgagcccgtgtcactgagcagctggctctgcgtgtcactggggagggggtttgcaggaaaggcctctgtcctcactgttttttttttttttttgagacggagtctcgctctgtcgcccaggctggagtgcagtggcgcgatctcggcttggctcactgcaagctccgtctcct

SEQ ID NO: 526446 - DNA, 201 bp, Homo sapiens
ccatgtctttgaagcacccctccagggagtcaggtgtgtgctcagccaccctctgccccattcctagaccctcacccccaccactgttcctgtgtcttcaygagctgtcccttacaggcaggggcttcccacaggctgggggcctcggggcggggagcatgagctgggctggcaccacgactgagggctcccggcccggct

SEQ ID NO: 526447 - DNA, 201 bp, Homo sapiens
tgggaggtgggggcctttggctctccctgagcccgtgtcactgagcagctggctctgcgtgtcactggggagggggtttgcaggaaaggcctctgtcctcactgttttttttttttttttgagacggagtctcgctctgtcgcccaggctggagtgcagtggcgcgatctcggcttggctcactgcaagctccgtctcctg

SEQ ID NO: 526448 - DNA, 201 bp, Homo sapiens
actcaattgctgccgcgccttccctgtcaacatggtggtcttcgtcgcctatgaggcagtgctgaggctcgcccggggtctgctcacatagccggtccccwcgcccagcggcccacccaccagcagctgctggaggtcgtagtggctggaggaggcaaggggtagtgtggctgggttcgggaccccacagggccattgccc

SEQ ID NO: 526449 - DNA, 201 bp, Homo sapiens
tagaaattagtcatcttcaactaacaaagctgccgatgtttaatcctaactactaaatagttatttaatagaattttacttgctcttttgtccatattttyctctatgaaattatgtccactatccaaatagttaatttggtaaattctcttaaggcctttgatcatgaaagtatcagcctcaaattttcataggaatgtg

SEQ ID NO: 526450 - DNA, 201 bp, Homo sapiens
tcttcaactaacaaagctgccgatgtttaatcctaactactaaatagttatttaatagaattttacttgctcttttgtccatattttcctctatgaaattrtgtccactatccaaatagttaatttggtaaattctcttaaggcctttgatcatgaaagtatcagcctcaaattttcataggaatgtgtgttgaattcact

SEQ ID NO: 526451 - DNA, 201 bp, Homo sapiens
tactgttgtgtctaatgttcttcaaaaaagtaatatcctcacttggagagtgtcaaatacatactttgaggattgactttatataaggtgccctgtagaamtctgttacacatatttttgacccatattatttacaatgtcttgataattctacctttttagagcaagaatagtatctgctaatgtaagggacatctgtat

SEQ ID NO: 526452 - DNA, 201 bp, Homo sapiens
tctggcagttgatcaacaattctttgttttttaatgaaactaatgaaacatgaaaaacctagaatattaatattaggtaaaacagtattctttgaaacttyggagaggtgattttaggactctagaccaaatatttaagtagatttatagtttaggtaaatttgtagataagtccataataagtaatcaagaaattaaaag

SEQ ID NO: 526453 - DNA, 201 bp, Homo sapiens
atgcgagagagcttttcaggaggaaaaaaacaaattacatattaaaaccaaaggtttagaatcccgatttatcttttttattatagctatgtctgagaaawgctatctcccatataaggcttagaaattttcattaatgttttaaattttgaaataatttgctgataattaatttgttataagagctaaataaatgtcatt

SEQ ID NO: 526454 - DNA, 201 bp, Homo sapiens
gaaacttctagttacagagttgtaatcattatttgtgcccttaatttaaggattctcaagaatttgcataaatggacacccaatacaatagaatatgtttyttatcgttattcatcatgataagtgcttatgtaaacatgtgaatcgtgaaataaaataaatgatcagatgattactagaatttgatagtataaccacctg

SEQ ID NO: 526455 - DNA, 201 bp, Homo sapiens
taagtttgaagaccctcaattattcagaattttaacaggatactttctttttccttggttagcaattattttgaaaatagaaaatgtgtaaatattaagarccttttttttccctctcccaggggcttctttcctgtcgttgttggctttattagaagagtgccagtccttggatccctcctaaatttacctggaattaga

SEQ ID NO: 526456 - DNA, 201 bp, Homo sapiens
caatcttgctcatctaaataaggaaagacttggtgtatagtgtgatggtttagtcttaaggattaagacatttttggtacttgcatttgacttacgatgtwtctgtgaaaatgggatgatattgacaaatggagactcctacctcaatagttaatggaataataagaggctactgttgtgtctaatgttcttcaaaaaagt

SEQ ID NO: 526457 - DNA, 201 bp, Homo sapiens
gatactttctttttccttggttagcaattattttgaaaatagaaaatgtgtaaatattaagaaccttttttttccctctcccaggggcttctttcctgtcrttgttggctttattagaagagtgccagtccttggatccctcctaaatttacctggaattagatcagtaagtaatcatgtatattttaggccaacaaaata

SEQ ID NO: 526458 - DNA, 201 bp, Homo sapiens
tgattttcgaaatatttcttgttgccattgtgacaagcagtatataattggataaaggatattgattgtgcggacctaccataacatttctaatgcagtaragaaggaatcaattttaagaggaagaaagaactacagatattgtgcatttaaataataattatagaatgtgaaaggagataagtaattaaggaaacctat

SEQ ID NO: 526459 - DNA, 201 bp, Homo sapiens
tgagggtggctgcgtgtttccggaagacgtggcggctctcgcctgggctgtttcccggcttcatttctcccgactcagcttcccaccctgggctttccgasgtgctttcgccgctgtccccaccactgcagccatgatctccttaacggacacgcagagtaagcacctgctccggggcccccgcctcgagccgcgcacacc

SEQ ID NO: 526460 - DNA, 201 bp, Homo sapiens
cttgagttaattagaaaatacctgagttcacgtgctaaagtcatttcactgtaataaactgactatggtttcttaagaacatgacactaaaaaaaaagtgktttttttccaccgttgctgattattagacagtaggaaatagctgttttctttagttttacaagatgtgacagctttagtggtagatgtagggaaacattt

SEQ ID NO: 526461 - DNA, 201 bp, Homo sapiens
gtttttcctgttctttggaatgattctcttttttgacaaagcactactggctattggaaatgtgagtttttaaatatatattttaactaaatttataaggraattttaactacgaatgaattattatctgctattaaatttggggaaaataattcactattactcataagtaattcctgttacattctctatttccatcag

SEQ ID NO: 526462 - DNA, 201 bp, Homo sapiens
attcgattggattgtgtcattttaaagtattaaaaccaaggaaaccccaattttgatgtatggattacttttttttgtaaacatggttaaaataaaacttytgtggttcttctgaatcttaatatttcaaagccaggtgaaaatctgaactagatattctttgttggaatatgcaaaggtcattctttactaacttttagt

SEQ ID NO: 526463 - DNA, 201 bp, Homo sapiens
cagcagttgagctaactcataatctgagttatatatagctaggcctcatgtacttgtcacatttttaccaacaatcacaaaatttttaattaagtttgtakttatttctaagtttgaagaccctcaattattcagaattttaacaggatactttctttttccttggttagcaattattttgaaaatagaaaatgtgtaaat

SEQ ID NO: 526464 - DNA, 201 bp, Homo sapiens
atccttgtgttcagctatccggaagctccctgaacactgtccttttgggtttttatggaggcttcattactaggcatgattgattaaattattggccatgrgtgaccagcttcacagcccccctccccttcgtggaggttaggaggtagggctcagatttccagccctctaatcttgccttggtctttctggtgaccagcc

SEQ ID NO: 526465 - DNA, 201 bp, Homo sapiens
cacacccatcgcccggctgggtctcgcccctccgccggggtcaatgaatgaagctctgggttgggggcggtggcctgcgagacagagctagggctgctggsaccctaaggggctgccttcgggatgccggggctagacttggactggcggacctgacctgggagaagagtctgtggggcagggtgggacgccctatgttgg

SEQ ID NO: 526466 - DNA, 201 bp, Homo sapiens
ctgggctttgaagaatgggtaagaatttatcctataaacgagaaagggaacgacagttaacagaaggaacagacagggccataaaaacacacagcttgttstgaaaagaatgaatactcttatagaacaggagcatgtgatcagttgaaggaaatggttggtaatgaaactgaaaatgaagcctggagccaggttacaaac

SEQ ID NO: 526467 - DNA, 201 bp, Homo sapiens
gagaaaaagaagaaaacactagaagagactaggaaaagaggtgggagaagaactaggagtaaagatcatagtggctaagagagaaaagagtgaagaagagkttgttttggcagatgtatcttgcagcagaaaacttaagcaccttaagaagtaagaaaatcattggctttcccagttatgtgggggttttagtaatgaagg

SEQ ID NO: 526468 - DNA, 201 bp, Homo sapiens
agagtgaagaagagtttgttttggcagatgtatcttgcagcagaaaacttaagcaccttaagaagtaagaaaatcattggctttcccagttatgtgggggytttagtaatgaaggttaaaagccaaagctgatctttgagatgaataaaaaatgggaagtcttagtatcatcgacaagcttggagtaatacacaggtttcg

SEQ ID NO: 526469 - DNA, 201 bp, Homo sapiens
tttgatgttgtttttctagatatttataaccctaaataatggcatttgaaatcacacatttttatgttttaaaacaatacttaaaacaaaataaatgatcktttgaattcattactactagaaaatgattgtgattttctttgaaacacgcacatacaccatcaacataaatacttgtctaatttaaaaattctgctttct

SEQ ID NO: 526470 - DNA, 201 bp, Homo sapiens
tggctgcgtgtttccggaagacgtggcggctctcgcctgggctgtttcccggcttcatttctcccgactcagcttcccaccctgggctttccgaggtgctktcgccgctgtccccaccactgcagccatgatctccttaacggacacgcagagtaagcacctgctccggggcccccgcctcgagccgcgcacacccatcgc

SEQ ID NO: 526471 - DNA, 201 bp, Homo sapiens
caggttgtattttagtcattgttctatccccagtgacccagcataatatctgccgtataatggaaactcaaaatattttctgctaagcaagtgagtgaagratggcattttgttgacctcagggaacttgctcaatttcaagacaagaccagatgactgtctcttagcctacctcctcagtttcaaaactaaacaaaatcc

SEQ ID NO: 526472 - DNA, 201 bp, Homo sapiens
tctttggaatgattctcttttttgacaaagcactactggctattggaaatgtgagtttttaaatatatattttaactaaatttataaggaaattttaactrcgaatgaattattatctgctattaaatttggggaaaataattcactattactcataagtaattcctgttacattctctatttccatcaggaatgaaacct

SEQ ID NO: 526473 - DNA, 201 bp, Homo sapiens
aacttctgtagacttgtatttctaccaagaaagaatgagacatactgtgaggatcagtatctggcaggtagtctcttagtgttaactaaatgttttgaccyttagtacttacttagtaaatgatagctattattattttcatggttctacacatatggtctcaacagcccctttctttttatcagtttcaccccacacaac

SEQ ID NO: 526474 - DNA, 201 bp, Homo sapiens
attactagaatttgatagtataaccacctgggttatataacttttaatgtctctaccaattatatacaatatcagtctttacatcaccatctggaatgttaaaaaaaaaaaaaaagcccaactgctttatgtttggggtggagtaaccaaagtaaataaccacttacagtaatgtgtgttaaaatttatattcaataatta

SEQ ID NO: 526475 - DNA, 201 bp, Homo sapiens
aatgtgcgaaactcagccatccttagagaactgtggtgcctgtttcttttctttttattttgaaggctcaggagcatccataggcatttgctttttagaartgtccactgcaatggcaaaaatatttccagttgcactgtatctctggaagtgatgcatgaattcgattggattgtgtcattttaaagtattaaaaccaag

SEQ ID NO: 526476 - DNA, 201 bp, Homo sapiens
taattggtggtcaagtatatctgtgttatgaagttctaaaagctaatttagcattgcaaaataacctcatttttaaaaaattagccttatatgcagtgttytatttatcaaatgatcttcacatctttcatttccaaattgttgaaatgtactaatgaatacaaatagacttcaagtaagcaaaaatgttcttaattttga

SEQ ID NO: 526477 - DNA, 201 bp, Homo sapiens
tgtcctaaataactaggataaactagctttataggaaaacttaaaagactacaagttccagttaggttcagggaagttaatcaactttctaaagttgttcrcagatttttatagatgtttctagagagaaagttcatagcattttattgaatgctcaaagagctaaagaatggcttacctatggaagaataagtaccacta

SEQ ID NO: 526478 - DNA, 201 bp, Homo sapiens
tgtttgtccaaagactacataggcccagaagagatccacagtaatggtcagttgaaatatcttattgggttcattaatgcatgaatggctgacatttcagttttttttatgtttttattttttattttttgttaagctagcagtgttatcttcatcttatacaatttctttattcattgtgttgcatttttcatgttgcac

SEQ ID NO: 526479 - DNA, 201 bp, Homo sapiens
ttctcttttttgacaaagcactactggctattggaaatgtgagtttttaaatatatattttaactaaatttataaggaaattttaactacgaatgaattaytatctgctattaaatttggggaaaataattcactattactcataagtaattcctgttacattctctatttccatcaggaatgaaacctgtcagctttctg

SEQ ID NO: 526480 - DNA, 201 bp, Homo sapiens
attggtggtcaagtatatctgtgttatgaagttctaaaagctaatttagcattgcaaaataacctcatttttaaaaaattagccttatatgcagtgttttrtttatcaaatgatcttcacatctttcatttccaaattgttgaaatgtactaatgaatacaaatagacttcaagtaagcaaaaatgttcttaattttgaaa

SEQ ID NO: 526481 - DNA, 201 bp, Homo sapiens
tttttctgggtggtgtatttgtagtccttattggttggcctttgataggcatgatcttcgaaatttatggattttttctcttgttcaggtaaggcatattrttgtctctttcagtaaatcagtgtgtcagatagttagtacaaaaactcagatatttgcatcagttggagtaagatgatgatcatttccttaaatggaatt

SEQ ID NO: 526482 - DNA, 201 bp, Homo sapiens
aacccactccttggttctgctgcttggttgtacattacagttctgtctggccagttgcccacattaaaagccaaacaaatgtgcttctttttttatatttrgctttgactttacgtttaaaatttatgcattgtgtttaattaccttttccgtgttgtattttctttctcttttaggttttatttgtagccggcttggctt

SEQ ID NO: 526483 - DNA, 201 bp, Homo sapiens
ctcaatttcaagacaagaccagatgactgtctcttagcctacctcctcagtttcaaaactaaacaaaatccttaatttctaaaagaatctaggtgatctaraattcagctgagttggctacaatccttttggctctaggtcagacccatatcagaagtattcatatccttctttggattggtttcatagatccaactctgt

SEQ ID NO: 526484 - DNA, 201 bp, Homo sapiens
aagttggggttcccacgatcccctgtttggatcagactaatttactagagaggctcacagagctcaaggaaacactgatgtttactagtttattataaagsatattacaaaggatacaaataaagagatgcatagggcaaggaaaggggggagggtcgcagatccccccccaccctccccaacccaccatcctccaagaac

SEQ ID NO: 526485 - DNA, 201 bp, Homo sapiens
gggttcccacgatcccctgtttggatcagactaatttactagagaggctcacagagctcaaggaaacactgatgtttactagtttattataaaggatattrcaaaggatacaaataaagagatgcatagggcaaggaaaggggggagggtcgcagatccccccccaccctccccaacccaccatcctccaagaacatcctt

SEQ ID NO: 526486 - DNA, 201 bp, Homo sapiens
cgcccggctgggtctcgcccctccgccggggtcaatgaatgaagctctgggttgggggcggtggcctgcgagacagagctagggctgctgggaccctaagkggctgccttcgggatgccggggctagacttggactggcggacctgacctgggagaagagtctgtggggcagggtgggacgccctatgttgggaggggagc

SEQ ID NO: 526487 - DNA, 201 bp, Homo sapiens
aacccaccatcctccaagaacatccttgtgttcagctatccggaagctccctgaacactgtccttttgggtttttatggaggcttcattactaggcatgaytgattaaattattggccatgggtgaccagcttcacagcccccctccccttcgtggaggttaggaggtagggctcagatttccagccctctaatcttgcct

SEQ ID NO: 526488 - DNA, 201 bp, Homo sapiens
tacatattaaaaccaaaggtttagaatcccgatttatcttttttattatagctatgtctgagaaaagctatctcccatataaggcttagaaattttcattmatgttttaaattttgaaataatttgctgataattaatttgttataagagctaaataaatgtcattatgaagttaacctgcaatgttgggtacctgttttc

SEQ ID NO: 526489 - DNA, 201 bp, Homo sapiens
tctacttggctatgttagataacaagctaatattaaacttgaatcccctaaaagatgcgtcccccagaagttcagaatactccagtgtccttgagtttcaygtaaccaaacacctttaacctaaaaaataaaaattctgtgggaagaggtatggcattaatggttaagcacatgagctttggattcaaaagaccttggttc

SEQ ID NO: 526490 - DNA, 201 bp, Homo sapiens
ttatacctgcattccagtagtattggaagtattaagttatatataaggtatgtgaagcacttcataaggcctaattcgtggtaaattctcagtacatagtrggtgtctttccatataccttcctttctaaaaacatctcagaatttttatgtaatcatcaaggttatttgtgaaatgatagaaattagtcatcttcaacta

SEQ ID NO: 526491 - DNA, 201 bp, Homo sapiens
cgtcttctgcctttaatgagtgctcctcctcatgcctaactttatgggggaaacaagagttggggaaaataacttggatcttatcctaaattacaaaattrtcattcactcaatttcttccactttttaggcagagaataaactccattgtaatacttagaaggagaaaatgaaatttgtggcatttttattttaaataat

SEQ ID NO: 526492 - DNA, 201 bp, Homo sapiens
cttagaaggagaaaatgaaatttgtggcatttttattttaaataattagtcttactttgcttttttaaattagctcttcatgcagcacatgtagaattcarttcttatattcaccatgcagctttttcttcccatgaggaacgtggctcagtgaaaatggtgacttgatatttaaccgatccctttcagcctcctcttcct

SEQ ID NO: 526493 - DNA, 201 bp, Homo sapiens
attgtaatacttagaaggagaaaatgaaatttgtggcatttttattttaaataattagtcttactttgcttttttaaattagctcttcatgcagcacatgwagaattcagttcttatattcaccatgcagctttttcttcccatgaggaacgtggctcagtgaaaatggtgacttgatatttaaccgatccctttcagcct

SEQ ID NO: 526494 - DNA, 201 bp, Homo sapiens
taattagtcttactttgcttttttaaattagctcttcatgcagcacatgtagaattcagttcttatattcaccatgcagctttttcttcccatgaggaacrtggctcagtgaaaatggtgacttgatatttaaccgatccctttcagcctcctcttcctcatcgtatctctcatcctccacttcatcttccacatcactgc

SEQ ID NO: 526495 - DNA, 201 bp, Homo sapiens
gctggaaactcggcagccccgcgcgaccctatcctggagcaacctgccccctccccacgcccggggactgcgctgtgccgggaggagctgaggtttaagcscgggttgtcccgggccaggctgtcgctgagccccaggtctcgtttttgcagagggtcgccgcttcatctccgaccagagccggagaaaggacctctccga

SEQ ID NO: 526496 - DNA, 201 bp, Homo sapiens
ctcgggttgcctgggaaatatctcagtaacccgacctccgctccaaagcgcccttgcggcgtccggtcaggcgcggggctttcctccagagctccagggcycctggctcagcccggggttgcgctgggagcgctggaaactcggcagccccgcgcgaccctatcctggagcaacctgccccctccccacgcccggggactg

SEQ ID NO: 526497 - DNA, 201 bp, Homo sapiens
taggtgagggaggggtgggagaggggaagagtccctgattattggaaatcctccatccttattagaaattctccatccaaaactggagggttgcttctctyggtccaaatggggactcgggttgcctgggaaatatctcagtaacccgacctccgctccaaagcgcccttgcggcgtccggtcaggcgcggggctttcctc

SEQ ID NO: 526498 - DNA, 201 bp, Homo sapiens
ataccctgtttgtaaacttgacataaccaattgtaagtcatttccaaggcaattgtgacatgttaaaaaattagtcttctgtgtaagtagtcctttgttgrggggtcaaaatctatttcatagaggtttttctagtattgctgcatgttagaataggacttatctacatcaatatataaatgctaagagaatctgtataca

SEQ ID NO: 526499 - DNA, 201 bp, Homo sapiens
cccatattgtttaaattttcagtagcagagtccataagttaacatagcttagaaggctaaatgtttatttcctgagattctctttgtcttaccttttcctytattaaaacgcagagtgtatatttattttaaagaatttttttttcttacagatgaagaaaaaaactttgatcaaaccagattcctggaagacagtctgct

SEQ ID NO: 526500 - DNA, 201 bp, Homo sapiens
ttagaaagagctcatttttaatttgatttgatcctcacaacaactgtgtgaaatgggccattttattgcccttagtactcatagaaatttgggttcattcmgtgaagactcttcggacctccctaagtagacttaactagtccccctcctgagtcttccttgtaccctggaaaactattagtataacaccttgtaacattt

SEQ ID NO: 526501 - DNA, 201 bp, Homo sapiens
tatttacccatcagacataaaattgtacaaattgactattcaaaatagtatgtgtattcaaagaacacttttaacatctatcttatgaaataattcttccyacaactaaccagaacaatctcaaaaatgtcatactaaccattgttttaaaagctgtctcaatgatcaatagctgttaaaatatagctccaagtattctaa

SEQ ID NO: 526502 - DNA, 201 bp, Homo sapiens
cacagtaatatgcctgatctcttcctttttaaaagccaacttgagttcagtaccatctgaatacacacacatgcacatatacccacacacgcatacacacmtactcctgtggcaaacataataatgtatttatttagaattataatatgaccatcatgttaattattttttacctaatcagagttgttattgacaaatgtc

SEQ ID NO: 526503 - DNA, 201 bp, Homo sapiens
ttaaattttcagtagcagagtccataagttaacatagcttagaaggctaaatgtttatttcctgagattctctttgtcttaccttttcctctattaaaacrcagagtgtatatttattttaaagaatttttttttcttacagatgaagaaaaaaactttgatcaaaccagattcctggaagacagtctgcttaactggtga

SEQ ID NO: 526504 - DNA, 201 bp, Homo sapiens
attctgtactgcttgagtgaggcccaagaatctctgtccttaagaagttcttccacattattctgatgattggtcaggtttgaaaacaggaacttcagagyccgttaataaaggttgaaatcatgagaatggagataccttctagggcttagatatagtgggaaaagggaagacaataaaacacccaaaaatcaagggaaa

SEQ ID NO: 526505 - DNA, 201 bp, Homo sapiens
tgaaattgtaaagattgaaatgctaaaattaaaaagtatacttacttggaaaaataccaaacactgttgaacacatagtaggtgcttaaatttttgtttargctcttcaaacatgctgtgtaattgagcttatttattttatgaggttaagatttgtttctcaacttcagttgccccaaattagaaatcatgttttgtgct

SEQ ID NO: 526506 - DNA, 201 bp, Homo sapiens
aacataaatcggctaaattaataatcattcatctatgactctatgcacatcacagaatatgttgagacattgtcattattacaactgaatagatgttctattttttctaactattttttaaaaagatagcttctctaggaattattcataacagctgcttcccacatgttattcgaatgtctaaacaatttttaaagaagg

SEQ ID NO: 526507 - DNA, 201 bp, Homo sapiens
aatcggctaaattaataatcattcatctatgactctatgcacatcacagaatatgttgagacattgtcattattacaactgaatagatgttctattttttctaactattttttaaaaagatagcttctctaggaattattcataacagctgcttcccacatgttattcgaatgtctaaacaatttttaaagaaggcattat

SEQ ID NO: 526508 - DNA, 201 bp, Homo sapiens
tcggctaaattaataatcattcatctatgactctatgcacatcacagaatatgttgagacattgtcattattacaactgaatagatgttctattttttctaactattttttaaaaagatagcttctctaggaattattcataacagctgcttcccacatgttattcgaatgtctaaacaatttttaaagaaggcattatca

SEQ ID NO: 526509 - DNA, 201 bp, Homo sapiens
caaaccatagcaggtggtacaatccataaaacgggtctttctctcagctgatcaggcaccacacacgttttctatagttcctgtccttcaatttatgaatwcatacattctttaaaagcaaaattttttgaacctctatgtctcccaataagaccatttatctatgcaactattatgtacaaggcactgtactagacacag

SEQ ID NO: 526510 - DNA, 201 bp, Homo sapiens
agagagaaagaaagaaaaaggaagaaagaaaaaatatcagtgggtttatccaaacataatcccattgtaagttgaggagcacctatatatgaatttggggrgcacacaaacattcaaaccatagcaggtggtacaatccataaaacgggtctttctctcagctgatcaggcaccacacacgttttctatagttcctgtcct

SEQ ID NO: 526511 - DNA, 201 bp, Homo sapiens
tctcctcaccagcttttgtcggtcttggggaaaaggatgaagaaatgactacagtggagggatggagtcacctggcagcagctgtctgaataggggactgmgtagaggatagaaggtgattcctacacatactgccaaagccaggtatttgtaagtcagctaaattccatgtgccctatcatttgtacacacttattatca

SEQ ID NO: 526512 - DNA, 201 bp, Homo sapiens
ctcaccagcttttgtcggtcttggggaaaaggatgaagaaatgactacagtggagggatggagtcacctggcagcagctgtctgaataggggactgagtasaggatagaaggtgattcctacacatactgccaaagccaggtatttgtaagtcagctaaattccatgtgccctatcatttgtacacacttattatcatcaa

SEQ ID NO: 526513 - DNA, 201 bp, Homo sapiens
aatgaataactacttagttagcaaaaaagcaatccaagagtgtgatttttgtttttgttttgttgccaatttagacttaattacacttaaaacataaatcrgctaaattaataatcattcatctatgactctatgcacatcacagaatatgttgagacattgtcattattacaactgaatagatgttctattttttctaac

SEQ ID NO: 526514 - DNA, 201 bp, Homo sapiens
gttgccaatttagacttaattacacttaaaacataaatcggctaaattaataatcattcatctatgactctatgcacatcacagaatatgttgagacattktcattattacaactgaatagatgttctattttttctaactattttttaaaaagatagcttctctaggaattattcataacagctgcttcccacatgttat

SEQ ID NO: 526515 - DNA, 201 bp, Homo sapiens
tttgtctgatttgctgcttgtatccaacagttttctacttttttctagctactgcagcaataggagggctggattacagttttccagtggtcttgaaccayctgacaccttgtcgttgctgctattccatttttgtgatcaataatccagcactgagaagaccaaaacttttttagaacctcttcagaacaaggccaattg

SEQ ID NO: 526516 - DNA, 201 bp, Homo sapiens
atgactctcagaactcttgcagtgaaaaggtgtgaaatagttgaataacgggtagaggatgctgtatccaaggtgttctttttaaaacccaagacatggarcccagcgatttttggagtcagtacgaaaagagctctgatggagattggttgatagtgacgttttagatttgattgttgggaaaatgtgcagagccagaaa

SEQ ID NO: 526517 - DNA, 201 bp, Homo sapiens
taatgagtgctcctcctcatgcctaactttatgggggaaacaagagttggggaaaataacttggatcttatcctaaattacaaaattgtcattcactcaadttcttccactttttaggcagagaataaactccattgtaatacttagaaggagaaaatgaaatttgtggcatttttattttaaataattagtcttactttg

SEQ ID NO: 526518 - DNA, 201 bp, Homo sapiens
ttctctttgaaaacatgaaccatgtgaataaaacctttggacccttttattccatttgtaatcttaagaacacacacagatagttttattctttcagaaayaaaatatatataggatgcttagctgagaacatcatcttctttcattgcttcaggtcctgtttagatgaccaaaaatgttttcagatcaccttgtgtctta

SEQ ID NO: 526519 - DNA, 201 bp, Homo sapiens
cggctaaattaataatcattcatctatgactctatgcacatcacagaatatgttgagacattgtcattattacaactgaatagatgttctattttttctaactattttttaaaaagatagcttctctaggaattattcataacagctgcttcccacatgttattcgaatgtctaaacaatttttaaagaaggcattatcag

SEQ ID NO: 526520 - DNA, 201 bp, Homo sapiens
tcaactttatgatgggatgaaagcaacacacagtacactccttgacttaccatggatttatattctgataggcccattataaattaaaaatatcagtgggytggccaggcatggtggctcatgcctgtaatcccagcactttgggaggccaaggtgggcacatcacttgaggccagaagttcaaagaccagcctgaccaat

SEQ ID NO: 526521 - DNA, 201 bp, Homo sapiens
aaattaataatcattcatctatgactctatgcacatcacagaatatgttgagacattgtcattattacaactgaatagatgttctattttttctaactatwttttaaaaagatagcttctctaggaattattcataacagctgcttcccacatgttattcgaatgtctaaacaatttttaaagaaggcattatcagtgaaa

SEQ ID NO: 526522 - DNA, 201 bp, Homo sapiens
acttggatcttatcctaaattacaaaattgtcattcactcaatttcttccactttttaggcagagaataaactccattgtaatacttagaaggagaaaatkaaatttgtggcatttttattttaaataattagtcttactttgcttttttaaattagctcttcatgcagcacatgtagaattcagttcttatattcaccat

SEQ ID NO: 526523 - DNA, 201 bp, Homo sapiens
gccatcagctgagctcatcccccgtgcactccacaacgctgaggctctgcacatggctcaccagtgccaggtgctgccagtcagcagtgccgtgctgtttscacagcagcctgcatacgtctatattgcccagcccgtttcacctggcggggtcacacaaaccaccccctggtattgttagcacgtccacataatggcatc

SEQ ID NO: 526524 - DNA, 201 bp, Homo sapiens
acgctgaggctctgcacatggctcaccagtgccaggtgctgccagtcagcagtgccgtgctgtttgcacagcagcctgcatacgtctatattgcccagccygtttcacctggcggggtcacacaaaccaccccctggtattgttagcacgtccacataatggcatctccacagctgtgtcatccagaagaaacccatagcc

SEQ ID NO: 526525 - DNA, 201 bp, Homo sapiens
actgaccaggggctgctgtgaatgctgtttggagaaatcggggctgggggtaggcagggttatgttttgaatttctgagaccagagcttctttctgtggcrttgtaacagctgtgctttgcctcctagagtcttagagagcctccttgtgtctctggtaaccaccgtggtggtgtttgtggcctcgatggtgttaggagaa

SEQ ID NO: 526526 - DNA, 201 bp, Homo sapiens
gctcactgcagcctcagcctcccaggctcaagcgatcctcccacctcagcttcttgagtagctgggaccataggcatataccttttgtactttttgtagcracatggtctcactacattgcccaggctggcctccaactcttaggctcaagtgatcctcctgcctcagcctcccaaagtgttgggattacaggcatgagcc

SEQ ID NO: 526527 - DNA, 201 bp, Homo sapiens
tttcaccctgcccagggctcttcgtggggaaggaaggccccatgatccacagtggttcggtggtgggagctggcctccctcaggtaagatgggctgagagrgtgtgggcctctgggcaggcctagtgggaggtctggttacactgggccaaatccattgggacaccctgacatcacattggaacctggtgccattctggct

SEQ ID NO: 526528 - DNA, 201 bp, Homo sapiens
catccagcgagctacggaacatgtgtgatgagcacatcgcctctgaggagccagccgagaaggaggacctcctgcagcagatgctggaaaggaggtgagarcctggcggggcccccactgcccgcagggctacacagcggtggggtgagcctttggctcagatgttgtgaggtggctcctgagtttcctgggaaagttgga

SEQ ID NO: 526529 - DNA, 201 bp, Homo sapiens
gagacaagcggtcccgtctcacacggcttagtgctttgcccacccctggctggggtggacttaccggctctcaggggaagttggcactgttctcatcacaygcgacagggagagtagatttgacagcaggggcagctttatcaggccgtgaagatgtgtgtgcgttcttgccgcaatgagcatgtggacagatctgttttt

SEQ ID NO: 526530 - DNA, 201 bp, Homo sapiens
ttttaacctcacctttgtcttcctggcaagcctccttgttctcattgaggtgaggtggtttggattcacctgctcgcttaggaggttttagagtcccgcaytccttttccccacctccttccagaatgtcaggaaactgagaatgcagattcctgcagaaagtggcctcttgttcactaaaggtaaaggtttcacctctgg

SEQ ID NO: 526531 - DNA, 201 bp, Homo sapiens
tcttgaactcctgaactcaagtgattcacctgcctcggcctcccaaagtgctgggattacatgcgtcagccactgcacccggcctcagtcttttcttctaygcggcacaaccctggcatgcatagtgcgtacttacacaggttttgttgcagtaggttaacttatgtcccttgaaatgtaattgccaactacactgacaga

SEQ ID NO: 526532 - DNA, 201 bp, Homo sapiens
cttgaactcctgaactcaagtgattcacctgcctcggcctcccaaagtgctgggattacatgcgtcagccactgcacccggcctcagtcttttcttctatrcggcacaaccctggcatgcatagtgcgtacttacacaggttttgttgcagtaggttaacttatgtcccttgaaatgtaattgccaactacactgacagag

SEQ ID NO: 526533 - DNA, 201 bp, Homo sapiens
tcagctgatatgcatattcatgtaaatttttgttgttcttgtcattgtttgagacagagtctcactctgtcgcccaggctggaatgcagtggtacggtctyggatcactgcgacctccacccccgcctctgagttcaagctgttctcctacctcagcctcccaagtagctgggactacatgcatacaccaccatgcctggc

SEQ ID NO: 526534 - DNA, 201 bp, Homo sapiens
tgaggcaggagaatggtgtgaacccgggaggcggagcttgcagtgagctgagattgcgccactgcactccagcctgggcgacagagcgagactccgtctcaaaaaaaaaaaaaaaaagtggaagttgcttttaaaaatactttccatgttagtttgtcttgtgactaacctcatttccatagacactaactacaaaagata

SEQ ID NO: 526535 - DNA, 201 bp, Homo sapiens
aactcaagttcggagtggtacagacatgtatccttttcacggttcctggtgttcgtggacttcagtggtcaccaagattctttcttacatagaaatgggtytaacagtaagcatagtattagaagggccgcttattagctattcagctttaatatttctaatgatcactgaaggacacaaaagaaggactttaataagcaa

SEQ ID NO: 526536 - DNA, 201 bp, Homo sapiens
tggtctcacatctttttctgcacctgcttccctctttgttttccgttgcttcactcaacttagctgtactctctgcctttgttctttggaggggcagtggractgggctggagaagggatctcctccttctgcgcttttctgctgtgcattcacgtactgctggctggtgagcagcctccgtatgtgcagtgggggaggag

SEQ ID NO: 526537 - DNA, 201 bp, Homo sapiens
ttctttaaaaagtgcaagtctggccactttgggaggccaaggcgggcagatcacctaagatcgggagtttgagaccattctgaccagtgtggagaaacccygtctctagtaaaaatacaaaattagccggtaaaaatacaaaattagccgggcgtggtggcgcatgcctgtaatcccagctactcgggcgactgaggcagg

SEQ ID NO: 526538 - DNA, 201 bp, Homo sapiens
tacctcaaaaaaaaaaaagaaaaaaaagtgcaagtcctcccattgcccctcagacctcctgagtcagatcctctggagtggggcccagcagctgtggttcwgcaagccctccaggtgacgctcacgctgctaatgaaggtggccagctctccctcttccgccgcccagattgttgagggtaagccagagaaccaatggatt

SEQ ID NO: 526539 - DNA, 201 bp, Homo sapiens
agccctcgttagctgtttatcccaatcaagctgtgtctggctgtgcactatccaggcctccacattctgtgacaaactaacagggccggctcctgtcactyctgttctcgccagcgggttttaccctgaaggtgactcaggccttctctttgccctagatcgtggggatcatcacacggcacaacctcacctatgaatttc

SEQ ID NO: 526540 - DNA, 201 bp, Homo sapiens
gagctgagcgctgagcatgtgccctgtggaaggacattttagttcagatgccagctggcccaagccctttttggagctaaccttgtccccttggcctccartgtgtgagccctcgttagctgtttatcccaatcaagctgtgtctggctgtgcactatccaggcctccacattctgtgacaaactaacagggccggctcct

SEQ ID NO: 526541 - DNA, 201 bp, Homo sapiens
ttgacacccaggctccctcaccccttctactaaattgtacttacatttgtaatgtgcttgccttcagctgatatgcatattcatgtaaatttttgttgttsttgtcattgtttgagacagagtctcactctgtcgcccaggctggaatgcagtggtacggtcttggatcactgcgacctccacccccgcctctgagttcaa

SEQ ID NO: 526542 - DNA, 201 bp, Homo sapiens
gctggtctcgaactcctgacctcaggtgatactgcttcggtctcccagagtgctgggattacaggtatgagccactatacctggccattttcttctgtttygtaagtatttgttttcttgtacatagttgagaagtttgcaggaattagtataagatactccatattgttctgtcaccttgcactccctcactgaaccctg

SEQ ID NO: 526543 - DNA, 201 bp, Homo sapiens
tacaaaggaatgcatcgggtttgagggagagctggggcagttcagaagagccccccaccccgcccgtggtctgagcagggctggagagccagcacagcttsctcccaggggcctgcgggcactgtcatgaggctggatgacttgccctcctcccccaggctgagagccagcgacatcatggagcccaacctgacctacgtc

SEQ ID NO: 526544 - DNA, 201 bp, Homo sapiens
tagtgtattttatgtgtggccaaagacaattcttcttccagtgtggtccagggaagccaaaagagtagacacccctgtgtcagtagtctttcttggtctcrcatctttttctgcacctgcttccctctttgttttccgttgcttcactcaacttagctgtactctctgcctttgttctttggaggggcagtgggactgggc

SEQ ID NO: 526545 - DNA, 201 bp, Homo sapiens
tgttcgtatgttaccattcagatacctgacaaacacactcttcagttttgggatttggaatttagcttgtggaattagcttttgtcaaaattagcaagctytttgtgtcaacagccagatagtaaatatttaaggctttgtgggccaagaatcagaatggaagctcttatgtagatgtttatgtaactatttacatgtgtg

SEQ ID NO: 526546 - DNA, 201 bp, Homo sapiens
tttaatgcatggggtgggagaggcgaggaagtcaccatcaaaccactttatctacagttagcataagatgtgagaagtgttgacaggaagctgcagcttaratgggatgatcacaactccatggcaacaagatgacacaaatgcagcagagaccccaggggacaggagcctcttgcagtctgtccctaggcccagccctgc

SEQ ID NO: 526547 - DNA, 201 bp, Homo sapiens
tcacgaggaaggtttttgtagccaaggtctcctgacccaggggcgtttctgcactgactgttggtctttcctttttcaccctgcccagggctcttcgtggrgaaggaaggccccatgatccacagtggttcggtggtgggagctggcctccctcaggtaagatgggctgagagggtgtgggcctctgggcaggcctagtgg

SEQ ID NO: 526548 - DNA, 201 bp, Homo sapiens
aaagcaagcttgtccaacccatggcccaacacagattcatataccttttaaaaacatttatgagatttttctgagtttttcttttcttagctcatcagctrtcattagtgtattttatgtgtggccaaagacaattcttcttccagtgtggtccagggaagccaaaagagtagacacccctgtgtcagtagtctttcttgg

SEQ ID NO: 526549 - DNA, 201 bp, Homo sapiens
gtggtacagacatgtatccttttcacggttcctggtgttcgtggacttcagtggtcaccaagattctttcttacatagaaatgggtctaacagtaagcatrgtattagaagggccgcttattagctattcagctttaatatttctaatgatcactgaaggacacaaaagaaggactttaataagcaaagacatatacctat

SEQ ID NO: 526550 - DNA, 201 bp, Homo sapiens
gaggctgaggcaggagaatggcatgaacctgggaggcggagcttgcagtaagccaagatcacgccactgcactccagcctgggtgacagagcaagactccrtctcaaaaacaaacaaacaaaaacatcaatggctgggtgcagtggctcatgcctgtaatctcaggactttgggaggccgaggcaggcagatcacctgagg

SEQ ID NO: 526551 - DNA, 201 bp, Homo sapiens
tcacggaccaccttctttttgtattcctgcaagttcggcacatacccagaaggcaccttgatgtttttactgatgccggggttttctggaaggaagatccrgtgggaacatggtgcagcagtgatcgtgccgatctttgatctgccccctgagctgggggctgagattctgagatcacagaaaacacagaggtcaggggct

SEQ ID NO: 526552 - DNA, 201 bp, Homo sapiens
cccatgcggagctgcctcttcatgccgttggcgtctcaggcagtcagtgacacgtggtctctttgcaggatgtcaccccatacatgaacccttcgcctttyaccgtctcgcccaacacccacgtctcccaagtcttcaacctgttcagaacgatgggcctgcgccacctgcccgtggtgaacgctgtgggagaggtgagcg

SEQ ID NO: 526553 - DNA, 201 bp, Homo sapiens
tgttgcttctctgtaaccacttgaatctctcagatccccattggggcccttgtcttggaggacagcctcttcagtgtccccagttatatgtatatattatwtatatatatatatatatatatatacacacacacactatatatatacacacacacacacacacacacacacacaaacacacattatatatttctgtttgtt

SEQ ID NO: 526554 - DNA, 201 bp, Homo sapiens
tccacaggaaagctcaggacagctgggaaagctgaaggaccagaaccatgtgctgtggggagcagtgcagggtctagcagacatcccttgggtaccaggargaaggagcactggccctgggttcctcctgattccgattcagaatccagggagagggggtatcctgttgcctcacttgggtcatgtgccactccttggctt

SEQ ID NO: 526555 - DNA, 201 bp, Homo sapiens
acctgcccgtggtgaacgctgtgggagaggtgagcgaggccccggccctgcccccacctttgagagaggatcccctagccaggtgctgtttgtgcacccakgcttctcaccagaaacgtaggcatcccaccaggaggggagagtgtggcccaacactagctttgaaccctgctcggcttccgtgcactcgggaccctttcc

SEQ ID NO: 526556 - DNA, 201 bp, Homo sapiens
tgggagaatcgcttgaacccgggagacagaggctgcagtgagccgagatcgcgccattgcactccagcctgggcaatgagagcaaaactgtctcaaaaaamaacaacaaaaaaaaaaaacaaacaaaatcaataaatttgaccacatcaaagtacatattgtatttataaagacaaaaactccaaataacaacaataaaac

SEQ ID NO: 526557 - DNA, 201 bp, Homo sapiens
acttgggtcatgtgccactccttggctttgggggcaggcacgttgattgaaaattctatcaagacaggatgtaggagatggcttgttcccctctggagaawcaagctgctcttcccagattaaaggaaaccacagaagctgcagccaggtcctagggttcaggctcatttgaaccaccagcctgagccactcttttgaacc

SEQ ID NO: 526558 - DNA, 201 bp, Homo sapiens
atcgcttgaacccgggagacagaggctgcagtgagccgagatcgcgccattgcactccagcctgggcaatgagagcaaaactgtctcaaaaaaaaacaacaaaaaaaaaaaacaaacaaaatcaataaatttgaccacatcaaagtacatattgtatttataaagacaaaaactccaaataacaacaataaaacaccataa

SEQ ID NO: 526559 - DNA, 201 bp, Homo sapiens
cagccgagaaggaggacctcctgcagcagatgctggaaaggaggtgagagcctggcggggcccccactgcccgcagggctacacagcggtggggtgagccyttggctcagatgttgtgaggtggctcctgagtttcctgggaaagttggatggggagcgggctgggaacatggatcagaagcgctcccgctgagggtatcc

SEQ ID NO: 526560 - DNA, 201 bp, Homo sapiens
tgatccttcggtcgcagcttgtcaccctgcttgtccgaggagtttgttactctgaaagccagtcggtaagtctctccgaggcagaaatcagccaggccagrcctgacgaagctcgaggggttgggcgctgccggcgggccgtgaacagtgccatagggaaagctgaatgcaaggcgagaagtgcagagtggacttagggga

SEQ ID NO: 526561 - DNA, 201 bp, Homo sapiens
tgtgaacacagcccccatcctcgccactgtcatcacacggcgttctcctgtgtatcttctctcctttccctaaggacgcttgtcaccggatttggggcccrccctaatccagcatgggttcatctgaactcggtcacatctgtagagaccttgtttccagaaaggtcgcattcataggtactagggcttaggacttggcca

SEQ ID NO: 526562 - DNA, 201 bp, Homo sapiens
tacctacaatgacatggccacactcttcttcaacccgcaggagtctgccatcctccagctcttccaccaggatggtgagtgtctgcactgcagcccaatcrtgggtgattggtgtcatctcggacacagccaggcttgcccttcattccaagcaagaccaggacttctttgtaacgcccacccagacaaaagattggtttc

SEQ ID NO: 526563 - DNA, 201 bp, Homo sapiens
attcataggtactagggcttaggacttggccatatcttttggtggggggacacattcaccccccagccactttacttagtgctttctcacttaaacttccwaataagccatttgcatctcatgaatcaggaagaaagggagtgcagacagatcaggggacttgcccagggtgccacagctaggacttggccaaggacttgg

SEQ ID NO: 526564 - DNA, 201 bp, Homo sapiens
gaatatacaagtgccgtgtacaacagtgtggacacttttgaaatacacacaataatttcaggttagtggtttctcccaggggagagaggaaggaaaactgtttttttttttgttttgttttgtttcttaaaatggtactgaatgttttcttttttaaaaatacctggagcatatatggcatgttgttgagatttgttaaag

SEQ ID NO: 526565 - DNA, 201 bp, Homo sapiens
catttgcatctcatgaatcaggaagaaagggagtgcagacagatcaggggacttgcccagggtgccacagctaggacttggccaaggacttggtttgactrgagagctctcactctggagcgcttgctgctgctgcaccacctgcctcagcagcctggagctgggcatattcaggcatcaaggggaggggctctaaggtga

SEQ ID NO: 526566 - DNA, 201 bp, Homo sapiens
cttctctgctgtgtggagctgcttttggacgtttagttgccaatgtcctaaaaaggtactctgtgtgtgtgcgtgtgtgtgcgcatgtgcatgtgtgtgcrcgtgtgcgtgtgtatgcatgtgtgtgcgtgtgcgtgcgttgatgtgtctgtgcccatgcatgcacatatgtgcataggcacaagagtatgagctgtaggt

SEQ ID NO: 526567 - DNA, 201 bp, Homo sapiens
ccagcccaccctctcctggtgctgcctggggaggcaaatcatgctcactccggcgggcacagctggctggggctgttccggggcatggaagattcccagtyacccactcactcagaaagccgggagtcatcggacaccttgctggtcagaggtcctgggggtggttttgaaccatcagagcttggacttttctgacttccc

SEQ ID NO: 526568 - DNA, 201 bp, Homo sapiens
cataggttatatgcaaatatacaccattttatatctgggacttgagcatccctggattttggtatccatcgggatcctggaccctatccctggtgaatackgaggaacaactgtactctttccttgttgcttctctgtaaccacttgaatctctcagatccccattggggcccttgtcttggaggacagcctcttcagtgt

SEQ ID NO: 526569 - DNA, 201 bp, Homo sapiens
gcgggcacagctggctggggctgttccggggcatggaagattcccagtcacccactcactcagaaagccgggagtcatcggacaccttgctggtcagaggycctgggggtggttttgaaccatcagagcttggacttttctgacttccccagcaaggatcttcccacttcctgctccctgtgttcccaccctccagtgttg

SEQ ID NO: 526570 - DNA, 201 bp, Homo sapiens
tccatcgggatcctggaccctatccctggtgaatactgaggaacaactgtactctttccttgttgcttctctgtaaccacttgaatctctcagatccccaytggggcccttgtcttggaggacagcctcttcagtgtccccagttatatgtatatattatatatatatatatatatatatatatacacacacacactatat

SEQ ID NO: 526571 - DNA, 201 bp, Homo sapiens
ggagatgccagtgacaacatacagttcatgactaggtttaggaattgggcactgagaaaattctcaatatttcagagagtccttcccttatttgggactcytaacacggtatcctcgctagttggttttaagggaaacactctgctcctgggtgtgagcagaggctctggtcttgccctgtggtttgactctccttagaac

SEQ ID NO: 526572 - DNA, 201 bp, Homo sapiens
cttgttgcttctctgtaaccacttgaatctctcagatccccattggggcccttgtcttggaggacagcctcttcagtgtccccagttatatgtatatattatatatatatatatatatatatatatacacacacacactatatatatacacacacacacacacacacacacacacaaacacacattatatatttctgtttg

SEQ ID NO: 526573 - DNA, 201 bp, Homo sapiens
aatggacaagtaaggccatgattttgctcatgtcctagtttcagaatgtataagctctgaggcctaaggaatgttgttattagggtaggaaacagtaactyacttttcttgggctgaaagaagcaacacacccattcctgagcatgtgtgagaatgtggagcagcccatgggctgggggctgcgggggcagggcaggggac

SEQ ID NO: 526574 - DNA, 201 bp, Homo sapiens
ggcccttgtcttggaggacagcctcttcagtgtccccagttatatgtatatattatatatatatatatatatatatatatacacacacacactatatatayacacacacacacacacacacacacacacaaacacacattatatatttctgtttgttttgtttttttaagacggagtcttactctgttacccaggccggag

SEQ ID NO: 526575 - DNA, 201 bp, Homo sapiens
ctgtaacagccctgcaagacacagataacattttatttttttaaaaagttgttagtcccctaaaccaaagagcaacatatactgcagaaataaaaagttartcatagcaaaggagaagtaacagtatctggttttaataatagctcatatattccattggtacatatttacaaagggccaaactcaactaatttatttaaa

SEQ ID NO: 526576 - DNA, 201 bp, Homo sapiens
gaggtgtcctgaagaggagggtggttatttggagactatcagtggaaatgaagagctcagctgatggctgtagatcctcacccacatggtccctcaccccygaaaggttttttttgagggctggttcctatttgataatggctccagatgatttagaagctagccactgatttcagtaaatacttctgcctccttccactc

SEQ ID NO: 526577 - DNA, 201 bp, Homo sapiens
tgcgatctcggctcaccacaacctccacctcccaggttccagtgattctcctgcctcagcctccaaagtagctgggactacaggtgcgcgccaccatgccyggctaattttgtatttttagtagagacagggtttcaccatgttggctagactggtcttgaactcctgacctcaggtgatccacctgccttgacctcccaa

SEQ ID NO: 526578 - DNA, 201 bp, Homo sapiens
aaatccttaagctccatcagtactgctgtgttcgtttgcccatgcgcagtagcctgtggcctccccacccacagaaatccagcatcctcacccgggctggygagcagcgcaaacggagccagtccatgaagtcctacccatccagcgagctacggaacatgtgtgatgagcacatcgcctctgaggagccagccgagaagg

SEQ ID NO: 526579 - DNA, 201 bp, Homo sapiens
tcacttttatatgcactgggtaaccaaaacactcgtgtgactcactttattgtgatatttgctttattgtggtggtctagaaccaaacccatgctatctgyaaggtaggcctatgttggcatttattccctaggcctttatcctgccaaccagagttccccctgtcagtgcaccttgcccagcctcttaagagtccatcat

SEQ ID NO: 526580 - DNA, 201 bp, Homo sapiens
cattttttaaaatataaaaaagcacaccatttgtgctatgagaatttcagacaacacccagaaacaaatatctccttaagcactacctcacggatgttttyccattatgaatgctgacgtacaaataatcctaattttgtttaatcaaaaagggatattatacttttaattctccatcctgctttatttttattttttaat

SEQ ID NO: 526581 - DNA, 201 bp, Homo sapiens
aaagcacaccatttgtgctatgagaatttcagacaacacccagaaacaaatatctccttaagcactacctcacggatgttttcccattatgaatgctgacktacaaataatcctaattttgtttaatcaaaaagggatattatacttttaattctccatcctgctttatttttattttttaattgcatcttgctcttttgc

SEQ ID NO: 526582 - DNA, 201 bp, Homo sapiens
caaataacaacaataaaacaccataaataaagtgaaaacaagtccacagcctgagagaggttatttactatgcatttaagaggcagataattagtatccasaatacaggaagaggctgggcgcggtggctgacgcctgtaatcccagcactttgggaggccgaggcaggcggatcacttgaggtcaggagttcaagaccag

SEQ ID NO: 526583 - DNA, 201 bp, Homo sapiens
gaaattatttttctttaaaaagtgcaagtctggccactttgggaggccaaggcgggcagatcacctaagatcgggagtttgagaccattctgaccagtgtrgagaaaccccgtctctagtaaaaatacaaaattagccggtaaaaatacaaaattagccgggcgtggtggcgcatgcctgtaatcccagctactcgggcga

SEQ ID NO: 526584 - DNA, 201 bp, Homo sapiens
ttccagctccaggtaaccccagtgcacctgctacctttatcccataccacgaggaagaatccagaaatgtatgaccttcctctgttgagaactaatagatrtgttgggttcatccttccacacccattacctgagcgttgagagatatgggaatctgtagtcgtctttttacctcagagaaagtgcacaccacatgccctg

SEQ ID NO: 526585 - DNA, 201 bp, Homo sapiens
gttctcattgtaaccctaacatgtgagaataaaatgtcttctgtctcctctgtctcctttagccttttgtctccatgctgctttctttctttctttctttytttgagacagagtctcgctgtcacccaggctggagtgcagtggtgccatctcagctcactgcaagctccgcctcccaggttcacgccattctcctgcctc

SEQ ID NO: 526586 - DNA, 201 bp, Homo sapiens
accagagaaaatctaattaatactctcattttctgaatgttcccccctaaaaacaacaaaaaccccactaggagtggaatttgaggcctccccaaccaccyaccaaaaaaggagggtgaaatgaaaggaagaagaaaaactcagcattctttcctctgacaaagagtaaaacgacaaggaatatcggcctgaattctcttc

SEQ ID NO: 526587 - DNA, 201 bp, Homo sapiens
ggtaccttgttcagtctagaggagggttcgtccttctggaaccaagggctcacgtggaaagtggtgaggaggaccttcagtgaaagcattaaccacacccmccgaattacactgggtgtcccttactcggtacatggaatggtagttttgatgagactgggggggtcaactggatcagaaacagctttcctcttgtgccca

SEQ ID NO: 526588 - DNA, 201 bp, Homo sapiens
gttcatgactaggtttaggaattgggcactgagaaaattctcaatatttcagagagtccttcccttatttgggactcttaacacggtatcctcgctagttkgttttaagggaaacactctgctcctgggtgtgagcagaggctctggtcttgccctgtggtttgactctccttagaaccaccgcccaccagaaacataaag

SEQ ID NO: 526589 - DNA, 201 bp, Homo sapiens
gcccttgtcttggaggacagcctcttcagtgtccccagttatatgtatatattatatatatatatatatatatatatatacacacacacactatatatatacacacacacacacacacacacacacacaaacacacattatatatttctgtttgttttgtttttttaagacggagtcttactctgttacccaggccggagt

SEQ ID NO: 526590 - DNA, 201 bp, Homo sapiens
ttcttctccaggctggcccgccccctctgactaggcacccaaagtgagcatctgggcattgggcattcatgcttatcttcccccaccttctacatggtatyagtcccagcaggcatccctggggcagacgtgctttggctcaagatggccttcatttacgtttagttttttttaaaaccgtggaggttgcccacgggcctc

SEQ ID NO: 526591 - DNA, 201 bp, Homo sapiens
cccttgtcttggaggacagcctcttcagtgtccccagttatatgtatatattatatatatatatatatatatatatatacacacacacactatatatatacacacacacacacacacacacacacacaaacacacattatatatttctgtttgttttgtttttttaagacggagtcttactctgttacccaggccggagtg

SEQ ID NO: 526592 - DNA, 201 bp, Homo sapiens
gtgacaggaaagcctttcgagaggcccaaggtggcctcgccagccctgcagtattgatgtgcagtattgcaccacagctctgcggaccttggccattgccrcagtcgcagcttccttttttctgtttgcactgtttgtttgtatgatgttagctaattccactgtgtatataaattgtattttttttaatttgtaaaatgc

SEQ ID NO: 526593 - DNA, 201 bp, Homo sapiens
aacttcttaaagcccaatctagagttggtcatacctggggtgtatctactgtaagggtgactagatctctgtacccggatgtagattccggaggtctctgygtagagcagtgggtaccaggaggaagggttgggagagagtaggacatgccactcctgaaccttcttgtcttttgtcacctctcccctagctcttttgttc

SEQ ID NO: 526594 - DNA, 201 bp, Homo sapiens
ctctagaattcatctcctcctgctagcagccgcgtcctggaggagcagcggatggggaatccattctgtttcttcctggtgtttaggaagttgccccacamacagattgccccgatgtccaaccagaagaagtgaaactgctgctgggtctggagaggtgaagacccgtggccagcttctgttgttgccatcggccattgc

SEQ ID NO: 526595 - DNA, 201 bp, Homo sapiens
ccttgtcttggaggacagcctcttcagtgtccccagttatatgtatatattatatatatatatatatatatatatatacacacacacactatatatatacacacacacacacacacacacacacacaaacacacattatatatttctgtttgttttgtttttttaagacggagtcttactctgttacccaggccggagtgc

SEQ ID NO: 526596 - DNA, 201 bp, Homo sapiens
agggcagatcgatcagaggagtcccaggggccccgcccgagggcacctccatctctctgggctgggctgacttccccggtccagggaggcacctcagggarggggctgagagcagcccccgcttcttcattcggctcactgagcacttgtgggggcacgacctcatcttctaaaggcatcttttcttccaaatggtccagc

SEQ ID NO: 526597 - DNA, 201 bp, Homo sapiens
cggccattgctttttgttcgcttgcttttggttttgcaagaagagcggcctctgtctctgatctgcttcaaatcatcattccatcagtgacagaagtggcygttccatcagtggtcgcagccagttcagctcctgcatccatccccaagtgttctgtaagtcccaggggcattttctgccttgtgtttttgtcatttttca

SEQ ID NO: 526598 - DNA, 201 bp, Homo sapiens
cttgtcttggaggacagcctcttcagtgtccccagttatatgtatatattatatatatatatatatatatatatatacacacacacactatatatatacacacacacacacacacacacacacacaaacacacattatatatttctgtttgttttgtttttttaagacggagtcttactctgttacccaggccggagtgca

SEQ ID NO: 526599 - DNA, 201 bp, Homo sapiens
tgtcttggaggacagcctcttcagtgtccccagttatatgtatatattatatatatatatatatatatatatatacacacacacactatatatatacacayacacacacacacacacacacacaaacacacattatatatttctgtttgttttgtttttttaagacggagtcttactctgttacccaggccggagtgcagt

SEQ ID NO: 526600 - DNA, 201 bp, Homo sapiens
cagtggtcgcagccagttcagctcctgcatccatccccaagtgttctgtaagtcccaggggcattttctgccttgtgtttttgtcatttttcaatcagttycattcaatgagaactccctgtgttacctgtgttacggtgacaccttgagaatgggctacttcccctcctagcaacccgcaacaccatcccagacctcagg

SEQ ID NO: 526601 - DNA, 201 bp, Homo sapiens
caagtgatccacccatctcggcctcccaaattgctaggattacaggtgtgtcaccacgcccagcctggtttatatatatatgtttttgtttttgtttttgytttttttttggcaaagtctcactctgttgcccaagctggagtggagtggcaagatctcggctcactgcaaactccacctcctgggttcaagcgattctcc

SEQ ID NO: 526602 - DNA, 201 bp, Homo sapiens
cgcaaggagcaagttactacttcatttcctcttttcccaatttctggacaagaccaaggcaatttgaccaacatttatggggcatcaactctgagagtgcygaaggggcatttgccctcaaagagcttgcagtctagggacgtagacacaagcaattgcacataggcaactcgtgttgtgtgctattataacagttacatg

SEQ ID NO: 526603 - DNA, 201 bp, Homo sapiens
tgctggaacggaaacttcttaaagcccaatctagagttggtcatacctggggtgtatctactgtaagggtgactagatctctgtacccggatgtagattcyggaggtctctgcgtagagcagtgggtaccaggaggaagggttgggagagagtaggacatgccactcctgaaccttcttgtcttttgtcacctctccccta

SEQ ID NO: 526604 - DNA, 201 bp, Homo sapiens
tatgaatattttaatttcccagtgctagtggcagttgcttttttttttttttttttttgagacggagtcttgctctgtcgcccaggctggagtgcagtggygccatctctgctcactgcaagctccgcctcccgggttcacgccattctcctgcctcagcctccggagtagctaggacttacaggcgcctgccaccacgcc

SEQ ID NO: 526605 - DNA, 201 bp, Homo sapiens
aatggctccagatgatttagaagctagccactgatttcagtaaatacttctgcctccttccactcctaaccactaaaaaaggctccctctgcggatctgtktttctagaccatccttggagaaacacaggaggaggaggatgagattcttccaaggaaagactatgaggtgagctcctttgatactgcttgggcaactaaa

SEQ ID NO: 526606 - DNA, 201 bp, Homo sapiens
ctaattttttgtatttttagtagagacggggtttcaccgtgttagccaggatggtctccatctcctgacctcgtgatccacccgccttggcctcccaaagygctgggattacaggcgtgagccaccgcgcctggcctttttttttttttttttttttttttgagacagtctcgctctatcacctaggctggactgcagtgg

SEQ ID NO: 526607 - DNA, 201 bp, Homo sapiens
ggggtttcaccgtgttagccaggatggtctccatctcctgacctcgtgatccacccgccttggcctcccaaagtgctgggattacaggcgtgagccaccgygcctggcctttttttttttttttttttttttttgagacagtctcgctctatcacctaggctggactgcagtggcgcgatctctgctcactgcaacctctg

SEQ ID NO: 526608 - DNA, 201 bp, Homo sapiens
ctgtgtggagctgcttttggacgtttagttgccaatgtcctaaaaaggtactctgtgtgtgtgcgtgtgtgtgcgcatgtgcatgtgtgtgcacgtgtgcrtgtgtatgcatgtgtgtgcgtgtgcgtgcgttgatgtgtctgtgcccatgcatgcacatatgtgcataggcacaagagtatgagctgtaggtcctcccca

SEQ ID NO: 526609 - DNA, 201 bp, Homo sapiens
tgggattacaggcgtgagccaccgcgcctggcctttttttttttttttttttttttttgagacagtctcgctctatcacctaggctggactgcagtggcgygatctctgctcactgcaacctctgcctcctgggttcaagtgattctcctgcctcagcctcccaagtagctgagagtacaggtgcccgccaccacacccag

SEQ ID NO: 526610 - DNA, 201 bp, Homo sapiens
tccaggatccctgcctattcattcacaggtgtgagaaaatgttcatgataaggaagtcagaaaccaccttttgggggctgggggctctttattggataacycgtctctctcctctcctcagagacaagagagactttgtatcagcaggagcggctgctggagttgctgcagctttcggggcgccaatcgggggtaccttgt

SEQ ID NO: 526611 - DNA, 201 bp, Homo sapiens
gcacacatgttgactgaccaggggctgctgtgaatgctgtttggagaaatcggggctgggggtaggcagggttatgttttgaatttctgagaccagagctkctttctgtggcgttgtaacagctgtgctttgcctcctagagtcttagagagcctccttgtgtctctggtaaccaccgtggtggtgtttgtggcctcgatg

SEQ ID NO: 526612 - DNA, 201 bp, Homo sapiens
ccaagcaagaccaggacttctttgtaacgcccacccagacaaaagattggtttctgcctcctgtgttggaaggggaactggtatggggtgtggtcgggccyggtaggtctactgggccttggcaggcatccggtagtgggactcaggttggctcttcccttgcaggtactttcagccccgtcactctggccttgttcttcg

SEQ ID NO: 526613 - DNA, 201 bp, Homo sapiens
caaaccactttatctacagttagcataagatgtgagaagtgttgacaggaagctgcagcttagatgggatgatcacaactccatggcaacaagatgacacraatgcagcagagaccccaggggacaggagcctcttgcagtctgtccctaggcccagccctgcttgtcctccctggctgttatcttcggtactgcaaagag

SEQ ID NO: 526614 - DNA, 201 bp, Homo sapiens
tacagttagcataagatgtgagaagtgttgacaggaagctgcagcttagatgggatgatcacaactccatggcaacaagatgacacaaatgcagcagagamcccaggggacaggagcctcttgcagtctgtccctaggcccagccctgcttgtcctccctggctgttatcttcggtactgcaaagagaacacagacatatc

SEQ ID NO: 526615 - DNA, 201 bp, Homo sapiens
aacaagatgacacaaatgcagcagagaccccaggggacaggagcctcttgcagtctgtccctaggcccagccctgcttgtcctccctggctgttatcttcrgtactgcaaagagaacacagacatatctggcttggtgacctggctgtcctggaaaagtcagcttcatgtatgagtgtgcccatcctctgaacttgattac

SEQ ID NO: 526616 - DNA, 201 bp, Homo sapiens
ggaggaccttcagtgaaagcattaaccacaccccccgaattacactgggtgtcccttactcggtacatggaatggtagttttgatgagactgggggggtcractggatcagaaacagctttcctcttgtgcccataacctccacactggactttctgtacttctcatatcaataccctccctaaccccaaatcaaaccgct

SEQ ID NO: 526617 - DNA, 201 bp, Homo sapiens
cccatttccatccccagttcctcttacccggaagctgttacagcccagtccgctctgggctccaatcctgtccatcctgcccccgaagcagctggatctcygcaggctccgaggggcagtgagcagcgccctcagcttgctttttaggagggcagatcgatcagaggagtcccaggggccccgcccgagggcacctccatc

SEQ ID NO: 526618 - DNA, 201 bp, Homo sapiens
ttccagccagagccgcgcctctaccaggctgtgtcttcctcctgaaatgttgctcttcactccgtaccactggtgttccttggttctccacctgcgtaggkatttgcgcattagatgagagaatttcaagcaaaatactttgagttttacaaagatataaaacacctagtaattattgctgcagactttccttttttcttc

SEQ ID NO: 526619 - DNA, 201 bp, Homo sapiens
ggactgcagtggcgcgatctctgctcactgcaacctctgcctcctgggttcaagtgattctcctgcctcagcctcccaagtagctgagagtacaggtgccygccaccacacccagctaatttttgtatttttagtagagctggggtttcaccatgttggccaggatagtcttgatctcttgacctcatgatccgcctgcct

SEQ ID NO: 526620 - DNA, 201 bp, Homo sapiens
tgagagaggatcccctagccaggtgctgtttgtgcacccaggcttctcaccagaaacgtaggcatcccaccaggaggggagagtgtggcccaacactagckttgaaccctgctcggcttccgtgcactcgggaccctttcccctgcctgccagcagatggcaccagcgtcccactggccgtcctttccagccagagccgcg

SEQ ID NO: 526621 - DNA, 201 bp, Homo sapiens
caggtgcccgccaccacacccagctaatttttgtatttttagtagagctggggtttcaccatgttggccaggatagtcttgatctcttgacctcatgatcsgcctgcctcggcctcccaaagtgctgggattacaggcgtgagccaccgtgcccagcccccccccttttttttttaagcattttctcagcagactagctaa

SEQ ID NO: 526622 - DNA, 201 bp, Homo sapiens
ctggggtttcaccatgttggccaggatagtcttgatctcttgacctcatgatccgcctgcctcggcctcccaaagtgctgggattacaggcgtgagccacygtgcccagcccccccccttttttttttaagcattttctcagcagactagctaaggacaatagatggcatgtcctgacacccatggggcactctgggtgtt

SEQ ID NO: 526623 - DNA, 201 bp, Homo sapiens
tcaagtgatcctcctgcctcagcctcccaaagtgttgggattacaggcatgagccattgcacccagtcatctcaggcagtttttaaaaaatttttatatakagagaaaaagtgcactcagcagccagcatgatccaaaggagaagcagctgcaccctctcaagtgatgacggggacacccctcggctgatgaacaagtttc

SEQ ID NO: 526624 - DNA, 201 bp, Homo sapiens
tgcctgctctccacgtggaatttagcttaaaactggttggccaagatgtatttcttcccctctgccaccataaccctgtaaactgaatcattcttttcctrtgtgaacagaaaggtcgaagatatgaggcggtgaagtggatggtggtgtttgccattggagtctgcactggcctggtgaggaggcagggcctggagggat

SEQ ID NO: 526625 - DNA, 201 bp, Homo sapiens
aactggttggccaagatgtatttcttcccctctgccaccataaccctgtaaactgaatcattcttttcctgtgtgaacagaaaggtcgaagatatgaggcrgtgaagtggatggtggtgtttgccattggagtctgcactggcctggtgaggaggcagggcctggagggatggtgggccatagggctggaggggcttacag

SEQ ID NO: 526626 - DNA, 201 bp, Homo sapiens
gatagtcagtcaactagaaaacccttctgttgaatatctttctaaaaagtgccccttcttcctgtctcaggaagagttcattgcacatatttgactctttrtttgataaatttagggtcttacaaaatgttagaatcccattttgacatccattctcattataggtggtttgaaaaatggtaactttctgtgagatgtgcc

SEQ ID NO: 526627 - DNA, 201 bp, Homo sapiens
tctttcctttttcaccctgcccagggctcttcgtggggaaggaaggccccatgatccacagtggttcggtggtgggagctggcctccctcaggtaagatgrgctgagagggtgtgggcctctgggcaggcctagtgggaggtctggttacactgggccaaatccattgggacaccctgacatcacattggaacctggtgcc

SEQ ID NO: 526628 - DNA, 201 bp, Homo sapiens
ttggtgtcatctcggacacagccaggcttgcccttcattccaagcaagaccaggacttctttgtaacgcccacccagacaaaagattggtttctgcctccwgtgttggaaggggaactggtatggggtgtggtcgggcccggtaggtctactgggccttggcaggcatccggtagtgggactcaggttggctcttcccttg

SEQ ID NO: 526629 - DNA, 201 bp, Homo sapiens
tcctctgacaaagagtaaaacgacaaggaatatcggcctgaattctcttcccaagaagaaagaaagcacaccaacgcaggcatttgtcttctgtccatggkgctgaagtttattcactttcaaaccactttcagtaacaggtgaggttctaccttaaaatttaatgcatggggtgggagaggcgaggaagtcaccatcaaa

SEQ ID NO: 526630 - DNA, 201 bp, Homo sapiens
tcaccatcaaaccactttatctacagttagcataagatgtgagaagtgttgacaggaagctgcagcttagatgggatgatcacaactccatggcaacaagrtgacacaaatgcagcagagaccccaggggacaggagcctcttgcagtctgtccctaggcccagccctgcttgtcctccctggctgttatcttcggtactg

SEQ ID NO: 526631 - DNA, 201 bp, Homo sapiens
tttgtatttttagtagagacgaggcttctccatgttggtcaggctggtcttgaactcctggcctcgggtgatccgcccgccttggcctcccaaagtgctgrgattacagacgtgagccactgcgcccagctaattcctacagtcaattttagaatattttcatcacctgagaggaaaccctgcactcattagcagccactg

SEQ ID NO: 526632 - DNA, 201 bp, Homo sapiens
ccaggatagtcttgatctcttgacctcatgatccgcctgcctcggcctcccaaagtgctgggattacaggcgtgagccaccgtgcccagcccccccccttytttttttaagcattttctcagcagactagctaaggacaatagatggcatgtcctgacacccatggggcactctgggtgttggggcagaaacttgagaggg

SEQ ID NO: 526633 - DNA, 201 bp, Homo sapiens
gctgcaggtggtgctgctgctgcggtgagcgtgagacccgcacccccgaggagctggtaagaagccggcggagtcggcctggggagggggcggttgctaarggactgagagaggcgttgccgggggtggggccgggccaatctgggcccgcaggtggcagcgggtggggcctggggaccgcagccagggctctcgaagcgt

SEQ ID NO: 526634 - DNA, 201 bp, Homo sapiens
aagctgtgtctggctgtgcactatccaggcctccacattctgtgacaaactaacagggccggctcctgtcactcctgttctcgccagcgggttttaccctkaaggtgactcaggccttctctttgccctagatcgtggggatcatcacacggcacaacctcacctatgaatttctgcaggcccggctgaggcagcactacc

SEQ ID NO: 526635 - DNA, 201 bp, Homo sapiens
ttcagaagagccccccaccccgcccgtggtctgagcagggctggagagccagcacagcttgctcccaggggcctgcgggcactgtcatgaggctggatgayttgccctcctcccccaggctgagagccagcgacatcatggagcccaacctgacctacgtctacccgcacacccgcatccagtctctggtgagcatcctgc

SEQ ID NO: 526636 - DNA, 201 bp, Homo sapiens
atgcaaggcgagaagtgcagagtggacttaggggaggagtcgccacagccgggtggtgagaagcaacagcggtttattccttcatagttcaaggccagaartacaaaatccgggtgtcaccagggcagcgctccctggctctggtgctgtccttgccccttcctagctcatgggagttgcctgcagaccttggtgctcctg

SEQ ID NO: 526637 - DNA, 201 bp, Homo sapiens
agcatgtgtcgggggatagaagtacaaaggaatgcatcgggtttgagggagagctggggcagttcagaagagccccccaccccgcccgtggtctgagcagrgctggagagccagcacagcttgctcccaggggcctgcgggcactgtcatgaggctggatgacttgccctcctcccccaggctgagagccagcgacatcat

SEQ ID NO: 526638 - DNA, 201 bp, Homo sapiens
cctaataagccatttgcatctcatgaatcaggaagaaagggagtgcagacagatcaggggacttgcccagggtgccacagctaggacttggccaaggactyggtttgactggagagctctcactctggagcgcttgctgctgctgcaccacctgcctcagcagcctggagctgggcatattcaggcatcaaggggaggggc

SEQ ID NO: 526639 - DNA, 201 bp, Homo sapiens
tgtgtgtgcgtgtgcgtgcgttgatgtgtctgtgcccatgcatgcacatatgtgcataggcacaagagtatgagctgtaggtcctccccacagcctatcartgtggttcaaagccatgttctcggtgttttccttcactagctacattggattgggccacatctattcggggacctttgccctgattggtgcagcggcttt

SEQ ID NO: 526640 - DNA, 201 bp, Homo sapiens
caccattttatatctgggacttgagcatccctggattttggtatccatcgggatcctggaccctatccctggtgaatactgaggaacaactgtactctttycttgttgcttctctgtaaccacttgaatctctcagatccccattggggcccttgtcttggaggacagcctcttcagtgtccccagttatatgtatatatt

SEQ ID NO: 526641 - DNA, 201 bp, Homo sapiens
tgctacacttggaaataaggctgtgtgacagatctcttgctcttcacaggtgggtctctttgtggacttttttgtgcgactcttcacccaactcaagttcrgagtggtacagacatgtatccttttcacggttcctggtgttcgtggacttcagtggtcaccaagattctttcttacatagaaatgggtctaacagtaagc

SEQ ID NO: 526642 - DNA, 201 bp, Homo sapiens
gcatttcagataagtgttactcaagctgaagcaactttacctcctacctttgtattttaggaaggcacacctgcctttatgacatagcactcccaactctygtccattgatgtgtggccactttatggcttcagtatcaaaaagcctccaggcattggcttgagggaaggccagagttaaaggcaagaagctttgatcctg

SEQ ID NO: 526643 - DNA, 201 bp, Homo sapiens
gactgaggcaggggaattgctggaacccagaaggcggaggttgcaatgagtggagattgtgccattgcactccagcctgggcaacaagagtgaaactctayctcaaaaaaaaaaaagaaaaaaaagtgcaagtcctcccattgcccctcagacctcctgagtcagatcctctggagtggggcccagcagctgtggttctgc

SEQ ID NO: 526644 - DNA, 201 bp, Homo sapiens
gttccccagatggggtctagaaggagaggcagcctggaggactgggtctgctctccaggcattatggaggtgggttttcttttgcagcaaattcaggtgctttttttttttttgtagcaaattgcagcaaaatcaaaggctttttctatttggaaccagagttggggctttcggtcaagtggtgccctggattttcctccc

SEQ ID NO: 526645 - DNA, 201 bp, Homo sapiens
tcatggagcccaacctgacctacgtctacccgcacacccgcatccagtctctggtgagcatcctgcgcaccacggtccaccatgccttcccggtggtcacrgagaaccgcggtaacgagaaggagttcatgaagggcaaccagctcatcagcaacaacatcaagttcaaggtaaagaaaacggcatgagaggaaaggcagg

SEQ ID NO: 526646 - DNA, 201 bp, Homo sapiens
ggcgccaatcgggggtaccttgttcagtctagaggagggttcgtccttctggaaccaagggctcacgtggaaagtggtgaggaggaccttcagtgaaagcrttaaccacaccccccgaattacactgggtgtcccttactcggtacatggaatggtagttttgatgagactgggggggtcaactggatcagaaacagcttt

SEQ ID NO: 526647 - DNA, 201 bp, Homo sapiens
ttaactgtccactttttacaaacaaattgctggaatacagcaaatcacggatcaattctgcacacatgttgactgaccaggggctgctgtgaatgctgttyggagaaatcggggctgggggtaggcagggttatgttttgaatttctgagaccagagcttctttctgtggcgttgtaacagctgtgctttgcctcctagag

SEQ ID NO: 526648 - DNA, 201 bp, Homo sapiens
acctcctgcagcagatgctggaaaggaggtgagagcctggcggggcccccactgcccgcagggctacacagcggtggggtgagcctttggctcagatgttktgaggtggctcctgagtttcctgggaaagttggatggggagcgggctgggaacatggatcagaagcgctcccgctgagggtatcccaggcagcatctggt

SEQ ID NO: 526649 - DNA, 201 bp, Homo sapiens
ctgaagccatctaagggcccccagccgccactcatctcattagcaaacaaaagataccacggctcaaaaaaaaaaaaagacaaagtatgtttgtgtgtgtgtgtgtgtgtgtgtgtgtgtgtgtgtgtgtgtgtgtgtgtattgttggggctcagaaaatgatacctggaaatatggtgctttgatatgctgaactctcca

SEQ ID NO: 526650 - DNA, 201 bp, Homo sapiens
gaagccatctaagggcccccagccgccactcatctcattagcaaacaaaagataccacggctcaaaaaaaaaaaaagacaaagtatgtttgtgtgtgtgtgtgtgtgtgtgtgtgtgtgtgtgtgtgtgtgtgtgtgtattgttggggctcagaaaatgatacctggaaatatggtgctttgatatgctgaactctccacc

SEQ ID NO: 526651 - DNA, 201 bp, Homo sapiens
agtggtgaggaggaccttcagtgaaagcattaaccacaccccccgaattacactgggtgtcccttactcggtacatggaatggtagttttgatgagactgrgggggtcaactggatcagaaacagctttcctcttgtgcccataacctccacactggactttctgtacttctcatatcaataccctccctaaccccaaatc

SEQ ID NO: 526652 - DNA, 201 bp, Homo sapiens
gagatgccagcaacagaaatggacttcgacctccttaagaaagagaaagaaatccacaggaaagctcaggacagctgggaaagctgaaggaccagaaccaygtgctgtggggagcagtgcagggtctagcagacatcccttgggtaccaggaggaaggagcactggccctgggttcctcctgattccgattcagaatccag

SEQ ID NO: 526653 - DNA, 201 bp, Homo sapiens
tggagaagggatctcctccttctgcgcttttctgctgtgcattcacgtactgctggctggtgagcagcctccgtatgtgcagtgggggaggagatgccttyaagaggagcacacctgtactatacttgtgctacacttggaaataaggctgtgtgacagatctcttgctcttcacaggtgggtctctttgtggactttttt

SEQ ID NO: 526654 - DNA, 201 bp, Homo sapiens
ttgtcctttccccaaggatttttaatttgacccatgaaaatttcctctcaagtgaaggaccagagagaaatgagcagagggctaggtacaacttccagggrcacatctcacccattagcctctgccgtgcgggaaagcagccccactcttgcttctgtcttctcttctgtctcttccggttctcatggctgctatggtttt

SEQ ID NO: 526655 - DNA, 201 bp, Homo sapiens
cttgacatctcccaggctttgaattcaaatctcatttccagcatgtattggtctagaaggccactgaatccctctgagcctctgtttcctcacctgcaaawtgggaacgatagttatgcttacctcataggattgttttgagggtggaattgttttgagggcgttgcattttgctgcatgcttagtggctggtccagtgcc

SEQ ID NO: 526656 - DNA, 201 bp, Homo sapiens
gttgctgcaggaactggagtaagggcccaggaccctgcttttccttggctccctgggcaactgggagcctgtggtagagaatgccagagagcgttctctcyaacacgtcacacatggctctttagaggggcacaaaagccttttctacatctgcacacttgatccagaaacccaatctgggtatcccagagggatacctgg

SEQ ID NO: 526657 - DNA, 201 bp, Homo sapiens
aattgttttgagggcgttgcattttgctgcatgcttagtggctggtccagtgcccagcacctaatgggtgcttggggagtgtcttgatggggaggaaaaarctgtaggaaacagaaacattcggcattctagcctatttctgctacatgctagctgtgtggctttagacagttgagttatcctttctgagccaccatttct

SEQ ID NO: 526658 - DNA, 201 bp, Homo sapiens
aggggcacaaaagccttttctacatctgcacacttgatccagaaacccaatctgggtatcccagagggatacctggacacatatgcaaatgtgagggtacraaggtgttcacagtcttgtttagattgcaaggactctgcgctgacagtggaggacccatcaaaccagtggccctgcagccacctgctgtgtcacctgctc

SEQ ID NO: 526659 - DNA, 201 bp, Homo sapiens
tgaggaagaacagtatttatagcggagtcttcctgcacccaacggaggcaatcttttgactaatgaggaaactaaggcacaaaacattgttgctgcaggarctggagtaagggcccaggaccctgcttttccttggctccctgggcaactgggagcctgtggtagagaatgccagagagcgttctctctaacacgtcacac

SEQ ID NO: 526660 - DNA, 201 bp, Homo sapiens
gctagctgtgtggctttagacagttgagttatcctttctgagccaccatttcttcatctgtaaaataggtataataccaacctttccaaattgcagagaaratgatattatattgaacatctcactcaaactagaggctcaagaaatagctgttaaatgaatgaggaaaattgcaagattggacttggaggaaaatatctt

SEQ ID NO: 526661 - DNA, 201 bp, Homo sapiens
gcttcagacttctcatttatgaatgacctggacttccccgtctgatgtcctaggatcctgtgttctgtgctttttttttttttttgccccacctgcagccwgtttgtgtttgcacatcctcattgaatccaggtggggtcattctcacccattttacaggtgaggagactgagccctagagaagtgacttggcttaaggcc

SEQ ID NO: 526662 - DNA, 201 bp, Homo sapiens
ccagtgactattagcacacctatgtgccagatgccttacatatctaacctcatgcaagtcccaccaccaccctgccctttgttgattcaatagatacttgscaaaggcctgctctgtgcaagacggtggggccagtaagtatagcccctgccctcaaggagcttaagccccattttctgctgaaatggggagcagaggtgg

SEQ ID NO: 526663 - DNA, 201 bp, Homo sapiens
gctctgtaaaatgggggtgtggtttcttacgagttctgcttcccagggttgaggtaaaagtcaattaaaacagtgcagtaggaaaacattttgcaaaaggrtttgaaaataaatcaatatggcttaatgcttccgtttattgagcacctactttgtgctaggtgcagtgatgacttctttaaatatgtgataattatggga

SEQ ID NO: 526664 - DNA, 201 bp, Homo sapiens
acctgcacgagtacatggagatgtgcagcatgaagcgaggcctggacgtgcagatggagacctgccgccggctcatcaaaggctccgcagacaggtacccrcccatcctcccaggggattcagctatggcatccttggaggggaattcccaaggctgcaactcggccatgtgtcatgctcccaacctgtctctctgtccgt

SEQ ID NO: 526665 - DNA, 201 bp, Homo sapiens
cagcctaggcgacagaatgagactccatctcaaaaaaaaaaaaaaaagaaataatataaaataaaacatcaggacttatctgacttggagactgatggccygaactcagcaagctactgctggcagagccagaattaacctgatgccaagttgagggacctccaacttgtaggttattccttttctgagccctaagacata

SEQ ID NO: 526666 - DNA, 201 bp, Homo sapiens
gtctgagtagagatgcattaatctgccgcttaacctatcccgccctcccccgggctcccctgatggtctgtgtgtgtttgctcccactccttcccagctcrccttgatgagggcaggcctcggtgtctgggcgtagcagggcgtctggcaggttgggccaggtgccgtctggtctgtgcgggcctgagagactcgcaggcc

SEQ ID NO: 526667 - DNA, 201 bp, Homo sapiens
ttctgtcctgggggaagaagatgaaatgtaagccggcagccagcctgagttgggctgtgggagatattctgggctgccgggcctgggtgtctccagaaacmcccaacgctcgctcatgaaggctctcttggtgccaggtcttgtgccaggcactgggatatggtgccgaattggatacaagggagatgggacgtcctcctg

SEQ ID NO: 526668 - DNA, 201 bp, Homo sapiens
gatgttcgcttggagggggcttcacaaatgtcactttgctcactccagacgcccatcctaggagatggggtatcactccccttttgtagacagggaaactgagactctgagaggagaagggacttgggtaacaccactcagctagtatgtggctgagctgggattcagagccaggctgcctcccacgctagtacgctgtca

SEQ ID NO: 526669 - DNA, 201 bp, Homo sapiens
tgatgttcgcttggagggggcttcacaaatgtcactttgctcactccagacgcccatcctaggagatggggtatcactccccttttgtagacagggaaactgagactctgagaggagaagggacttgggtaacaccactcagctagtatgtggctgagctgggattcagagccaggctgcctcccacgctagtacgctgtc

SEQ ID NO: 526670 - DNA, 201 bp, Homo sapiens
aaggctgctgcctcgttgcctgaaggggtgtgtggctggggggccggagcccagttaggggcttgccgttctttcccactcacctctcaagtcctgttggstcaccacagagagcccagagaccagctagctgccctgcaaagggccccttggtcaccaggaaacaagtggggggaatgtcaggtgaggggaatgtcaggt

SEQ ID NO: 526671 - DNA, 201 bp, Homo sapiens
tggattaggcccttaggttccctccctgccccctcttagctttctctgtgccctccagccctggaaggaatcccagccccttgccctccaggtccgggccygggagcccacgcagatctcagcctagcagctaatgctggggctgggaaaggctggagaaaagggggagagggagagagtgtgtgtcctccaggagccctg

SEQ ID NO: 526672 - DNA, 201 bp, Homo sapiens
caaggctgctgcctcgttgcctgaaggggtgtgtggctggggggccggagcccagttaggggcttgccgttctttcccactcacctctcaagtcctgttgrctcaccacagagagcccagagaccagctagctgccctgcaaagggccccttggtcaccaggaaacaagtggggggaatgtcaggtgaggggaatgtcagg

SEQ ID NO: 526673 - DNA, 201 bp, Homo sapiens
cgtttccccggattgcttgcacaggggcggtgaatgggaggcttgggctgagagtagcctgcagcactggaagaatttgaattcatttcctttttttttttgagacagggtctcactttgtcacccaggctggaggctggagtgcggcggcatggtcacagctcactgcagcctcaacctcttgggtttagggatcctttc

SEQ ID NO: 526674 - DNA, 201 bp, Homo sapiens
tcgtagaagagtggagtctgatgagagagacagggaagtgaaaattcacagcccctggatgccagtgctgaaggagtgggttcaggactgggaacatcagwatgggcatagtgacttattctggggaagtcatgaaaagctccctggaggaggtgatgaaggggtacccaagcctggaagaggctggcagtggtactccag

SEQ ID NO: 526675 - DNA, 201 bp, Homo sapiens
aggagcggccgagtgccctctctcgcctcggcgcccgcatccggggccatccgtcctgccgtctctgcggaggccgcatctggcgcgcatctggaaccgcycggccggccgcgctggagcccgcgcccaccctggcccggccgcgccgggagccctgcccggagctggagccgcacctggagccgcgggcccggggccctg

SEQ ID NO: 526676 - DNA, 201 bp, Homo sapiens
ggaggagctcgccaagcgcatgaaccttcagaccatggtggacacgctgcaggaggtaagagccctccgatatcccgaccaggagaggcacgccagagagycatgtggccaaggggcacagtcttcatgcggcaaagccaggaaattcttgcacagcccctactctgttacctcctaccacctcagtctctcctttatgga

SEQ ID NO: 526677 - DNA, 201 bp, Homo sapiens
cctgctaacgccgcctgcttcttagaggacctgcacctttcctggcactggccggccccagtcacgctcatcatcctgtgagatgccggctcccttcccarttcacccctaccttccatcctagccgagccccccagttaccttgattgcttcctttccggttcaggtggtccccaaaaagaaagagcgtaaggtggcttc

SEQ ID NO: 526678 - DNA, 201 bp, Homo sapiens
tccatccccttgagctgtatttagtcactaattcttttggtgcgcgtgtttgcagtctaattacctgcctcagctgcgctggaacctgccccttcccagcyagtgaggaccatgacggctctgcacagacaggtgaccgttgccctgttacccatccttggttgcacaagccccacgtgtcttttgttagctgggtccttg

SEQ ID NO: 526679 - DNA, 201 bp, Homo sapiens
gggccctggacgctgtagcagccctcccagtagcctccctcccagccttcccagcagctggaggtggggcttgctcactaggaggagcaaaataatgttasgcactggtgtttatgatcttatggggtcttcaccatccagggaggtgtaggtactattgttattcccattttacagatgaggaaactgaggctcagagag

SEQ ID NO: 526680 - DNA, 201 bp, Homo sapiens
cctgggggaagaagatgaaatgtaagccggcagccagcctgagttgggctgtgggagatattctgggctgccgggcctgggtgtctccagaaacccccaaygctcgctcatgaaggctctcttggtgccaggtcttgtgccaggcactgggatatggtgccgaattggatacaagggagatgggacgtcctcctgtgtgtc

SEQ ID NO: 526681 - DNA, 201 bp, Homo sapiens; identical to SEQ ID NO: 317093

SEQ ID NO: 526682 - DNA, 201 bp, Homo sapiens
gaacccagagacagagcctctaaggggaagcatggtgcagctcagccaagcccggggccctggacgctgtagcagccctcccagtagcctccctcccagcyttcccagcagctggaggtggggcttgctcactaggaggagcaaaataatgttaggcactggtgtttatgatcttatggggtcttcaccatccagggaggt

SEQ ID NO: 526683 - DNA, 201 bp, Homo sapiens
ttgggaggcagaggcaggagaatggcttgaacccgcaaggtggaggttgcagtgagccaagatcttgccactgcactccagcctaggcgacagaatgagamtccatctcaaaaaaaaaaaaaaaagaaataatataaaataaaacatcaggacttatctgacttggagactgatggcctgaactcagcaagctactgctgg

SEQ ID NO: 526684 - DNA, 201 bp, Homo sapiens
gccagatgggagactgctgaaggtttgtgatgttgccgccgcctgcccacgaggggagtgtcctcccacccacactgggcaccgggtgcttggcttcctgrgcaggatgtggtttctcattctagacctggtacaagagagggtagttttcacccaacagtaaacctggcaaatggcaatgcctggttctctggagggtcc

SEQ ID NO: 526685 - DNA, 201 bp, Homo sapiens
gcatctgtgggttgcacagccctttgagcattgccagactgtgaggtgtttagaaaattccaggccagatgggagactgctgaaggtttgtgatgttgcckccgcctgcccacgaggggagtgtcctcccacccacactgggcaccgggtgcttggcttcctgagcaggatgtggtttctcattctagacctggtacaaga

SEQ ID NO: 526686 - DNA, 201 bp, Homo sapiens
tggaagaagtagacaggctcgcctagctacagcacagggcgtgtaaacagtcaagttcagaatgatttcacagggcagagagtgggtgccctacagaggcrgatctgtgctggccctgtggggtgggcagaggttgagaaccaagctggaaactgggagagggtgtcccgtgccctttgctggcagcatctgtgggttgca

SEQ ID NO: 526687 - DNA, 201 bp, Homo sapiens
ccagggattcggctgtttgtggaggggagggcctgcacttggaatcagaaggcctgggccaaagttcaaagtttgaatgaacccccaagcctggcagtgcrgggtgctggggccccagggcaggagttaaaagccgagtgagcttgggctagtcactgcctctcgagcctcagtttcttcatctgtaaaacagggatgcta

SEQ ID NO: 526688 - DNA, 201 bp, Homo sapiens
cgagatgcgttgccttccaggagaattgatttaaactgtgccatgtgtcagtgacaccggaggctgtgggctttgcatttgcagtcctggcttttgatcgyattgagaggtgaaggccggctggcattccatttatttcctatgtcgcggatggctgaaggcccgggacgggaaggaggcagccctgtcatgtccctgtgc

SEQ ID NO: 526689 - DNA, 201 bp, Homo sapiens
cagagcctcaagctagagggaggggaatgaggtcccagaaaagaaaaggaagcagggagacagctgacgctgaagattccttctcagaggaatgcgaggcrgggctttgccttggcaaacgagaccggatgcgggtccctgggtcccccttccccccacgtgtatgcacactcacactcacacacatgtacgtgcacacac

SEQ ID NO: 526690 - DNA, 201 bp, Homo sapiens
atgcattaatctgccgcttaacctatcccgccctcccccgggctcccctgatggtctgtgtgtgtttgctcccactccttcccagctcgccttgatgaggrcaggcctcggtgtctgggcgtagcagggcgtctggcaggttgggccaggtgccgtctggtctgtgcgggcctgagagactcgcaggcccagcggcctttg

SEQ ID NO: 526691 - DNA, 201 bp, Homo sapiens
ccccgggctcccctgatggtctgtgtgtgtttgctcccactccttcccagctcgccttgatgagggcaggcctcggtgtctgggcgtagcagggcgtctgkcaggttgggccaggtgccgtctggtctgtgcgggcctgagagactcgcaggcccagcggcctttggcagggttgctccatgaggtcaggaaaggccagtg

SEQ ID NO: 526692 - DNA, 201 bp, Homo sapiens
ggccccgcgcagataccgcggcctccaccgcgtcccgaggagcggccgagtgccctctctcgcctcggcgcccgcatccggggccatccgtcctgccgtckctgcggaggccgcatctggcgcgcatctggaaccgcccggccggccgcgctggagcccgcgcccaccctggcccggccgcgccgggagccctgcccggag

SEQ ID NO: 526693 - DNA, 201 bp, Homo sapiens
cccctgatggtctgtgtgtgtttgctcccactccttcccagctcgccttgatgagggcaggcctcggtgtctgggcgtagcagggcgtctggcaggttggsccaggtgccgtctggtctgtgcgggcctgagagactcgcaggcccagcggcctttggcagggttgctccatgaggtcaggaaaggccagtgcgcgtgtct

SEQ ID NO: 526694 - DNA, 201 bp, Homo sapiens
acaaggctgctgcctcgttgcctgaaggggtgtgtggctggggggccggagcccagttaggggcttgccgttctttcccactcacctctcaagtcctgttrgctcaccacagagagcccagagaccagctagctgccctgcaaagggccccttggtcaccaggaaacaagtggggggaatgtcaggtgaggggaatgtcag

SEQ ID NO: 526695 - DNA, 201 bp, Homo sapiens
catccctgttatttttctacagcccccaccacacagctaaactgtcccctttgggccaggcgcagtggctcatgcctgtaatcccagcactttgggaggcygaggtgggcggatcacctgaggttgggagttcgagaccagcctggccaatatggcgaaatctcatctctactaaaaatataaaaattagccaggcctggt

SEQ ID NO: 526696 - DNA, 201 bp, Homo sapiens
cacaaggctgctgcctcgttgcctgaaggggtgtgtggctggggggccggagcccagttaggggcttgccgttctttcccactcacctctcaagtcctgtyggctcaccacagagagcccagagaccagctagctgccctgcaaagggccccttggtcaccaggaaacaagtggggggaatgtcaggtgaggggaatgtca

SEQ ID NO: 526697 - DNA, 201 bp, Homo sapiens
aagtgacttgcccaaggccttgcggccaggaagcagcattgaagtataattctctctggctccagaggctgtgcatgtgatcacttctataaacgatagtyattgctattatgcaggagaaagggaagcccagctccttccctagaggaagtatcacttgatagaggacaagagtcagaaacatgaaaaagccttcaggat

SEQ ID NO: 526698 - DNA, 201 bp, Homo sapiens
agcacaaggctgctgcctcgttgcctgaaggggtgtgtggctggggggccggagcccagttaggggcttgccgttctttcccactcacctctcaagtcctsttggctcaccacagagagcccagagaccagctagctgccctgcaaagggccccttggtcaccaggaaacaagtggggggaatgtcaggtgaggggaatgt

SEQ ID NO: 526699 - DNA, 201 bp, Homo sapiens
ttccagcacaaggctgctgcctcgttgcctgaaggggtgtgtggctggggggccggagcccagttaggggcttgccgttctttcccactcacctctcaagtcctgttggctcaccacagagagcccagagaccagctagctgccctgcaaagggccccttggtcaccaggaaacaagtggggggaatgtcaggtgagggga

SEQ ID NO: 526700 - DNA, 201 bp, Homo sapiens
tgtgtgtgcaaacagtatccgttttctcttgtttccaaaagccggtgacgtaaccggctctccacccctccctcccctctggcctatttttagctggcccygacagcatcctaaaagggttccagactgccctgctccgaggccatgtagggagggtagcagtggggtgaggaaggagagaaactcctctgtctgtcccag

SEQ ID NO: 526701 - DNA, 201 bp, Homo sapiens
acccgtttgcctccacatcccactcactccctccccttccccgagaggtagcactacctgaccctgtggcctccccaggaaaacgtagaatcaggcacccrtggactcataggctcgtctgactgcttcatcctatggctggggagaccgaggcccagagggtgatgtgctgtgctcacggaaggaagtggcagaaatcag

SEQ ID NO: 526702 - DNA, 201 bp, Homo sapiens
cttccagcacaaggctgctgcctcgttgcctgaaggggtgtgtggctggggggccggagcccagttaggggcttgccgttctttcccactcacctctcaagtcctgttggctcaccacagagagcccagagaccagctagctgccctgcaaagggccccttggtcaccaggaaacaagtggggggaatgtcaggtgagggg

SEQ ID NO: 526703 - DNA, 201 bp, Homo sapiens
ggctccggggctcggcttctagttagaatcctggctggctgtgtttgaccatgaggatgacggatgcattggatgcatcggagaccaggcaccctcctccygccccctccccacttctgcttccctcggtctgagtagagatgcattaatctgccgcttaacctatcccgccctcccccgggctcccctgatggtctgtgt

SEQ ID NO: 526704 - DNA, 201 bp, Homo sapiens
atttgtgaagtggaggcctcttccgagtcccttctcttgcccgtctttctgtcctttccagcttcctgtccctcggctggggtttccttcagatcccagaygctgggaaggaagtgaagtcaggaattgagtgtgtgatgcagtgaccactggaccctggcggctccgggccacacggccctctccagcacccacccccta

SEQ ID NO: 526705 - DNA, 201 bp, Homo sapiens
acttccagcacaaggctgctgcctcgttgcctgaaggggtgtgtggctggggggccggagcccagttaggggcttgccgttctttcccactcacctctcaagtcctgttggctcaccacagagagcccagagaccagctagctgccctgcaaagggccccttggtcaccaggaaacaagtggggggaatgtcaggtgaggg

SEQ ID NO: 526706 - DNA, 201 bp, Homo sapiens
tgcaggagaaagggaagcccagctccttccctagaggaagtatcacttgatagaggacaagagtcagaaacatgaaaaagccttcaggatttttgtaatcrggtctggataaaggaacccaaagatgttgagttctcagaaccgggtggggtgcatcagagccaggctgctgctggggttgctaagcaaccattccccttt

SEQ ID NO: 526707 - DNA, 201 bp, Homo sapiens
gctgctggggttgctaagcaaccattcccctttggccagaaggagttctaggggaagtggacccatgtgcagagagcagagggtgagggaggttgatgtcyggaggcagggtcctgatggcatggtgtccaatggtggccttgatggcaccatccctgaggaatccaggaggagaggttgccgaggcttctgtcacgagga

SEQ ID NO: 526708 - DNA, 201 bp, Homo sapiens
ctattatgcaggagaaagggaagcccagctccttccctagaggaagtatcacttgatagaggacaagagtcagaaacatgaaaaagccttcaggatttttrtaatcaggtctggataaaggaacccaaagatgttgagttctcagaaccgggtggggtgcatcagagccaggctgctgctggggttgctaagcaaccattc

SEQ ID NO: 526709 - DNA, 201 bp, Homo sapiens
cacctcccacctctgagcttcagacttctcatttatgaatgacctggacttccccgtctgatgtcctaggatcctgtgttctgtgctttttttttttttttgccccacctgcagccagtttgtgtttgcacatcctcattgaatccaggtggggtcattctcacccattttacaggtgaggagactgagccctagagaagt

SEQ ID NO: 526710 - DNA, 201 bp, Homo sapiens
tcacctcccacctctgagcttcagacttctcatttatgaatgacctggacttccccgtctgatgtcctaggatcctgtgttctgtgctttttttttttttttgccccacctgcagccagtttgtgtttgcacatcctcattgaatccaggtggggtcattctcacccattttacaggtgaggagactgagccctagagaag

SEQ ID NO: 526711 - DNA, 201 bp, Homo sapiens
tgtgtgaacatgggcaagtggcttggcctctctgagctgcccgtggagctccccgcttcgtcctctgtaaaagagggatcatcttgttgctctcccagggwttgagaaggaacaaatgaggtctggtgttaaggtacctggggcttggcagattttgggcatacctacctccaccccagcccagcccccttcccctggcaa

SEQ ID NO: 526712 - DNA, 201 bp, Homo sapiens
actcccattgacactttcgttatttctgaagctggcaccgatacggattctttatttctgattttccagtgaggcagccttcgatggtggaaaagggtttygcatcctggctctgccactgtctgtgtgaacatgggcaagtggcttggcctctctgagctgcccgtggagctccccgcttcgtcctctgtaaaagaggga

SEQ ID NO: 526713 - DNA, 201 bp, Homo sapiens
tattgagccctaacaaactcagccttaaaagcccccaggagaagataatgttgggctggagactggacattgaatggactgagaccacaatctctggctakaactggggtccagactctgcaagactggccagtgcattcctgcctagcccagattccccagctgggaaactgtcattgcttcctgtctgcagtctggccg

SEQ ID NO: 526714 - DNA, 201 bp, Homo sapiens
gtggggcaaacaatggaagtggatgtgaggcttggggaagagatgacatttgagacaagcctgggagaatggctagggtttcaggaggctgaggaggagasaggaagaggggaaatgagttacctgacctctgagcctcatctgcaacatggggatgatccccaggggagggctcagcgggattttatagagggaagtatg

SEQ ID NO: 526715 - DNA, 201 bp, Homo sapiens
ttgatgtccggaggcagggtcctgatggcatggtgtccaatggtggccttgatggcaccatccctgaggaatccaggaggagaggttgccgaggcttctgycacgaggatgacttgccctcacccttattcctcattggttcctcccagctcgagctggccacagccaaaagtgacatgaaccgacacctgcacgagtaca

SEQ ID NO: 526716 - DNA, 201 bp, Homo sapiens
agccgagatcatacctctgcactccagcctgggtgacagagcgagactccgtctcaagaataaataaataaataaataaataaataaataaataaataaawaaaataaactgtcccgtttgttctatttccccagcaagaggaaaacttgggcaacttgatccatgagaccgaatccttcttcaagacgagagacaaggag

SEQ ID NO: 526717 - DNA, 201 bp, Homo sapiens
tggtctgtgtgtgtttgctcccactccttcccagctcgccttgatgagggcaggcctcggtgtctgggcgtagcagggcgtctggcaggttgggccaggtsccgtctggtctgtgcgggcctgagagactcgcaggcccagcggcctttggcagggttgctccatgaggtcaggaaaggccagtgcgcgtgtctttttgac

SEQ ID NO: 526718 - DNA, 201 bp, Homo sapiens
gcttgaacccgcaaggtggaggttgcagtgagccaagatcttgccactgcactccagcctaggcgacagaatgagactccatctcaaaaaaaaaaaaaaaagaaataatataaaataaaacatcaggacttatctgacttggagactgatggcctgaactcagcaagctactgctggcagagccagaattaacctgatgcc

SEQ ID NO: 526719 - DNA, 201 bp, Homo sapiens
gtgacatgaaccgacacctgcacgagtacatggagatgtgcagcatgaagcgaggcctggacgtgcagatggagacctgccgccggctcatcaaaggctcygcagacaggtacccgcccatcctcccaggggattcagctatggcatccttggaggggaattcccaaggctgcaactcggccatgtgtcatgctcccaacc

SEQ ID NO: 526720 - DNA, 201 bp, Homo sapiens
caaggagtaccaggaaacgataggtcagatcgaggtgagggctcgggacgtggagcccactcgtgaggctctcctgaggtccacatggttgagatcctggygatcaaacacccatgtgtcatgggcaggggctggtagagtggggcaggcgcaggatcgggagtcaggaggcctcggggcgagtaatgtctttcttagggc

SEQ ID NO: 526721 - DNA, 201 bp, Homo sapiens
agaggtaaagtcgctttagcagatcaccagctgcggagcggctgagttggacgcccatcccagctctgcctgacgtcaaagtgttttgggataagggacagggggtggctgcaagtggcctcccactttgccccaagccggcttcttctcgccatgctggcctggaccatctcctttttggctttttgctgagtccgggct

SEQ ID NO: 526722 - DNA, 201 bp, Homo sapiens
gaagggagaggtgaggtggaggggctgggttgtgtggtcttcagagcctggccactcagtgccatctgtagcccagcatcactggggagctgtctgccccmgccctcgcctgcggaaccagcttctgcatgttaataagatgcccaggtgattggtatgcacattctaggctgagacacgctgctttagagactggactag

SEQ ID NO: 526723 - DNA, 201 bp, Homo sapiens
gagaggtaaagtcgctttagcagatcaccagctgcggagcggctgagttggacgcccatcccagctctgcctgacgtcaaagtgttttgggataagggacagggggtggctgcaagtggcctcccactttgccccaagccggcttcttctcgccatgctggcctggaccatctcctttttggctttttgctgagtccgggc

SEQ ID NO: 526724 - DNA, 201 bp, Homo sapiens
tcactggggagctgtctgccccagccctcgcctgcggaaccagcttctgcatgttaataagatgcccaggtgattggtatgcacattctaggctgagacaygctgctttagagactggactagctttgagtcccagctccctgcttgctagctctgtgaccttagacaagttactttacctctttgaacctcagctccctc

SEQ ID NO: 526725 - DNA, 201 bp, Homo sapiens
attggtaatatcatccagtcccagggaactgctcccaccccttcctgcagttaagggcgggggtccactgaaccctcctttgccttctcccctcccgcccrcgtttcctattcagcttcgggcagtactcgtgtcaaagtagtggtgtggaagcccttggaacaacagggcttggcacatagtaaacgctaaatcagtggg

SEQ ID NO: 526726 - DNA, 201 bp, Homo sapiens
gagcaggacggggaggtgaaccggttctcggacgatgaggtcggctccatgaacatcaccgatgagatgaagcgcatgtttaaccagctgtgagtatcccsgtggcccgcacactctccgtttccccggattgcttgcacaggggcggtgaatgggaggcttgggctgagagtagcctgcagcactggaagaatttgaatt

SEQ ID NO: 526727 - DNA, 201 bp, Homo sapiens
ccagatctcggctcactgcaacctctgcctcccgggttccagtgtttctcctgcctcagcctcccaagtagctggaatcacaggcatgcaccatgatgccyggctaatttttgcatgtttagtagaggcagggttttaccacgttggccaggctggtctcgaactcctgacctccagtgatctgcctacctctgcctccca

SEQ ID NO: 526728 - DNA, 201 bp, Homo sapiens
caggctgcctcccacgctagtacgctgtcagtaggaaacactgcttggggtggtggcagggtctgggctgggtatgatcagtggtgggcgagcctgctggygccagctcttagaagctgctatacccactccaggctcagtgatgtcatattagtaccttaaaatttgccattgcaggaaatcagcaaatgctaccaatca

SEQ ID NO: 526729 - DNA, 201 bp, Homo sapiens
gctctccacccctccctcccctctggcctatttttagctggccctgacagcatcctaaaagggttccagactgccctgctccgaggccatgtagggagggwagcagtggggtgaggaaggagagaaactcctctgtctgtcccaggatggacagacatccgaggagggaaagaacctgcccccagcttcctccagggaggg

SEQ ID NO: 526730 - DNA, 201 bp, Homo sapiens
tacccactccaggctcagtgatgtcatattagtaccttaaaatttgccattgcaggaaatcagcaaatgctaccaatcagagctctgggaggctctgccayctcccggaagccccccagagagggcatgctccttctagcagatgcctttgacatcatttgtttcaaaagcccagggcacgggctctcctaacctccctgc

SEQ ID NO: 526731 - DNA, 201 bp, Homo sapiens
tctggcctatttttagctggccctgacagcatcctaaaagggttccagactgccctgctccgaggccatgtagggagggtagcagtggggtgaggaaggaragaaactcctctgtctgtcccaggatggacagacatccgaggagggaaagaacctgcccccagcttcctccagggagggaggaactctgttggaggagct

SEQ ID NO: 526732 - DNA, 201 bp, Homo sapiens
aggctcagtgatgtcatattagtaccttaaaatttgccattgcaggaaatcagcaaatgctaccaatcagagctctgggaggctctgccacctcccggaasccccccagagagggcatgctccttctagcagatgcctttgacatcatttgtttcaaaagcccagggcacgggctctcctaacctccctgcagagctctga

SEQ ID NO: 526733 - DNA, 201 bp, Homo sapiens
gtgctaggtgcagtgatgacttctttaaatatgtgataattatgggagcagtcccaagcagtgggaagtgattatgctcattttacaaatgagaggttcaragaggtgaagacttctgtcccagatctcgccacgagtccgtctgggtctctggaccccaaggtcagtgctcctcccaggaggtggccttgtcccatgccc

SEQ ID NO: 526734 - DNA, 201 bp, Homo sapiens; identical to SEQ ID NO: 317154

SEQ ID NO: 526735 - DNA, 201 bp, Homo sapiens
aggatccaggaaggagttgagggagggcaggcaatggggagagccctgggatggcagcctggagacagggtccacattgtcctgtgctaccgatgcactgrgtcaagtgatttcactcctacagactcagccttccccttggaaataggggtatgttggatgagctgatctttaggtctcctccagttggggtaaccaagg

SEQ ID NO: 526736 - DNA, 201 bp, Homo sapiens
tattttttgtgcccttctttgctactcctgctcttgctgcaagatgtgttagcaggttcgctctagactccaggctgcagccagaggcttgccggggctcrcccttgcacctgccctgctcagcggctttggaattgagtcgccttccccgctctgagccgtgtggccaggagagatgattcagctcgggacctgtgctcc

SEQ ID NO: 526737 - DNA, 201 bp, Homo sapiens
agcaggttcgctctagactccaggctgcagccagaggcttgccggggctcgcccttgcacctgccctgctcagcggctttggaattgagtcgccttccccrctctgagccgtgtggccaggagagatgattcagctcgggacctgtgctccagcctttaccccccagagaagccccagatgccctgtgctcctgggcaggg

SEQ ID NO: 526738 - DNA, 201 bp, Homo sapiens
cagggggcggagcctgcagtgagccgagatcgcaccactgcactccagcctgggcgacagcgagactccgtctcaaacaaacaaacaaacaaacaaaaaaacaacaacaacaacaaacaacgaaacctctgatcactttgatcaccccccacccccattctgcagttctgtgtgggccgccctgaccccaccccaggcggg

SEQ ID NO: 526739 - DNA, 201 bp, Homo sapiens
tcttccactgagggctccagcccagcctcacctgagctcatttcccttcacctgagtgagtcggcctaggcgtgccggccgctcgccttcccgcaaggtgkgggccatttccacacctccctcccaactctggaggtgggaggcagccatgcgctgtgccgttgacgtggagctgctgaacacccatggtctgctggatgc

SEQ ID NO: 526740 - DNA, 201 bp, Homo sapiens
ggcttgcccagcaaccctgtgaagactacgttctctctgtaatgtagcacaactctgtgcatgccatttaatctcttgcacctcagtttgtcgctctgtamaatgggggtgtggtttcttacgagttctgcttcccagggttgaggtaaaagtcaattaaaacagtgcagtaggaaaacattttgcaaaagggtttgaaaa

SEQ ID NO: 526741 - DNA, 201 bp, Homo sapiens
cccccattgtgattcctgtccccaacatggggcctgctcttctcggtgagaggtggcctgggaccggactcctagccttgctcctgatatactgggtgatstgggcaaatggcttgaccactcggcttcagttgccccatctgtacaatgaggggaggttcagtgagatggtcctggctggattaggcccttaggttccct

SEQ ID NO: 526742 - DNA, 201 bp, Homo sapiens
tgccccctcttagctttctctgtgccctccagccctggaaggaatcccagccccttgccctccaggtccgggcccgggagcccacgcagatctcagcctarcagctaatgctggggctgggaaaggctggagaaaagggggagagggagagagtgtgtgtcctccaggagccctggctgggctgtctcctgtgggagagag

SEQ ID NO: 526743 - DNA, 201 bp, Homo sapiens
catggggcctgctcttctcggtgagaggtggcctgggaccggactcctagccttgctcctgatatactgggtgatctgggcaaatggcttgaccactcggsttcagttgccccatctgtacaatgaggggaggttcagtgagatggtcctggctggattaggcccttaggttccctccctgccccctcttagctttctctg

SEQ ID NO: 526744 - DNA, 201 bp, Homo sapiens
ggctggattaggcccttaggttccctccctgccccctcttagctttctctgtgccctccagccctggaaggaatcccagccccttgccctccaggtccggrcccgggagcccacgcagatctcagcctagcagctaatgctggggctgggaaaggctggagaaaagggggagagggagagagtgtgtgtcctccaggagcc

SEQ ID NO: 526745 - DNA, 201 bp, Homo sapiens
aagtcaattaaaacagtgcagtaggaaaacattttgcaaaagggtttgaaaataaatcaatatggcttaatgcttccgtttattgagcacctactttgtgctaggtgcagtgatgacttctttaaatatgtgataattatgggagcagtcccaagcagtgggaagtgattatgctcattttacaaatgagaggttcagaga

SEQ ID NO: 526746 - DNA, 201 bp, Homo sapiens
cctgcttcttagaggacctgcacctttcctggcactggccggccccagtcacgctcatcatcctgtgagatgccggctcccttcccagttcacccctaccytccatcctagccgagccccccagttaccttgattgcttcctttccggttcaggtggtccccaaaaagaaagagcgtaaggtggcttccgatgatgacatc

SEQ ID NO: 526747 - DNA, 201 bp, Homo sapiens
cctggacccacctgctgccacagtggcccttgttaggacagacctcaaagggctgggcatgcccattagttcctggggtatgtctatggggtgtggacggygaaagcagggttttcagtgggttttgctgacgggggttctgtggcattagcatctggcttctttccttctgccaccctgtccccttgtactgccagccac

SEQ ID NO: 526748 - DNA, 201 bp, Homo sapiens
tacagccgtgagccaccatgttcagcctctccaaagttgtgttcaataagcaataccaagtggcagtgatgctgggaacctgggcaaatatagacaggagrgaattggacaggtggctcagaaaacaactgaaacctcagattggcattggggcaggtgacccgggggttccctgggccccatgttgcccaaaagagccag

SEQ ID NO: 526749 - DNA, 201 bp, Homo sapiens
tgcttgcctggcacaaggcagccagtgcccagaacttcccacacttcttgggttgaagggattgaggatctgaggctggaggagccagaggtcctgccccrgcgagagctccggaactcgcctcccctctctcagcaggaagagaatactcttaatccacttctgtgtccccagcacttggctcctgggtgagcacttggg

SEQ ID NO: 526750 - DNA, 201 bp, Homo sapiens
acctgctgggcagctgcccctttctgtcccctgtatgggtccctggagcctgccttctgttcagtcatgccctctggtgtcacccccacaggcgggagacstttgactttgacgacgactgtgacagcctgacgtgggaagagaatgaagacacgctgctgctctgggaggatttcaccaactgcaatccgaccatcgacc

SEQ ID NO: 526751 - DNA, 201 bp, Homo sapiens
gacatcatttgtttcaaaagcccagggcacgggctctcctaacctccctgcagagctctgaggctggctcagaattccatagtccagagctcactctgccyagccacttcattgtacaaatgagagaatggactcagaggggcacacagagccaggcccccaactcttggtccagtgctttgtcccccacgccatgcctgg

SEQ ID NO: 526752 - DNA, 201 bp, Homo sapiens
ggcaacttggatggggccccttcactcatggacggaggaagatgccccctgtcccagggtgagcattcccttccatccctgcttgcctggcacaaggcagycagtgcccagaacttcccacacttcttgggttgaagggattgaggatctgaggctggaggagccagaggtcctgccccagcgagagctccggaactcgcc

SEQ ID NO: 526753 - DNA, 201 bp, Homo sapiens
tccctggagcctgccttctgttcagtcatgccctctggtgtcacccccacaggcgggagacctttgactttgacgacgactgtgacagcctgacgtgggargagaatgaagacacgctgctgctctgggaggatttcaccaactgcaatccgaccatcgacctgcagggcgaggtaagcccagcgcctggcttcccaaagg

SEQ ID NO: 526754 - DNA, 201 bp, Homo sapiens
gaatggactcagaggggcacacagagccaggcccccaactcttggtccagtgctttgtcccccacgccatgcctggaagagaattctctcttctgtccctmttctaggctgacttttaaggtagacaggaggcagaggcagggttggaactgggtggggacaggaactcttttgcctgatacttcctggacctgccattcc

SEQ ID NO: 526755 - DNA, 201 bp, Homo sapiens
atacaaagtacccagaagtcgaatccacagagacagaaagtagaagggtggttgccaggggctgcggggagaggggtacggggtactactgcttaacaggyacagttgcagttttgcaagatgaaagagttctggagatggatggaggtgatggttgcacagcagtgtgaatgcacttaatgccactttaaaaatggttaa

SEQ ID NO: 526756 - DNA, 201 bp, Homo sapiens
taagttaaaacaaacaggccgggcgcggtggctcacgcctgtaatcccagcactttgggaggccgaggcaggcggatcacgaggtcaggagatcgagaccrtcctggctaacacagtgaaacgctgtctctactaaaaatacaaaaaattagccgggcgtggtggcgggcgcctgtagtcccagctacgcaggaggctgag

SEQ ID NO: 526757 - DNA, 201 bp, Homo sapiens
gtccctcccacctctgtcttcacgaagtgctgggctcataccttaacgtggcacttgtcaccaccacctgatactctggttatatgtcagcctggctgtcytctcacaccacctcccctaggctgggagctcccagagggcaggcagggatggatgccccaatgcaccttccttgcccagctcaagatagtccctgggtgg

SEQ ID NO: 526758 - DNA, 201 bp, Homo sapiens
aggatattatgctaaatgaaatcagccaggctgggcgcggtggctcacacctgtcatctcaatactttgggaggccaaggtgggagaattgcttgagcccrggagttcgagacctgctggacagcatggtgaaaccccgtctctacaaaaaataatttttaaaaattaactgggcatggtggctcatgcctatagtcccag

SEQ ID NO: 526759 - DNA, 201 bp, Homo sapiens
aacctctgatcactttgatcaccccccacccccattctgcagttctgtgtgggccgccctgaccccaccccaggcggggccctgggcctttcccatggacrtctccaccagctgtgggcaggaccctagccaggctgcccctggccagatctgatgaagtgtttgaataatgcagccgtgttacagttgtgttttgttttg

SEQ ID NO: 526760 - DNA, 201 bp, Homo sapiens
gtggccctgcagccacctgctgtgtcacctgctcgggaggatgctgccgtatattgttaggtggaaaaaatgcatttgaaaaccacatatggtcgcatccygttgtcgttaaaaaccaatctcataagaagagaaaatctcataagaaaaagttgggaaggatatagagccgatgttaaccgtaattctctcagggagggg

SEQ ID NO: 526761 - DNA, 201 bp, Homo sapiens
gagtcaagtgatttcactcctacagactcagccttccccttggaaataggggtatgttggatgagctgatctttaggtctcctccagttggggtaaccaakgcatcttgggaaccccttagtcccaggcaaacctgcctggttggtcaacctacttctagttctagccaatagggaggtcttgacatctcccaggctttga

SEQ ID NO: 526762 - DNA, 201 bp, Homo sapiens
gtttatatgaaggtcaatgaattaacactttatgagtgcttagaagagtgcctatattcaattcagattagctgttcttatcattaccattaataaacatytctttgcttcttaccatctctttctttccaaacttctagacattttggtcctaggacccctttatacttttaaaaaatattgaagaccccaagaacttct

SEQ ID NO: 526763 - DNA, 201 bp, Homo sapiens
tctgtgctctgagttattaggacttttagttttctctaaatttaattttctctatattctgaatttagaatataacccattttccctccacccctttttcttttttttttttttctagacagagtctcacctgtctcacaggctggagtgcagtgatgcgatctcagctcactgcaacctttgcctcccgggttcaagtga

SEQ ID NO: 526764 - DNA, 201 bp, Homo sapiens
gatttaactagcatttggtataagtaactaaacttttcaaacacgtataatctatatagatagagttagttataacttataatgacttttcttcctattaratcattaattattggttgcacctctattggagagttacttcatgcttatagactaataatgttctttaagtttagtgctaaacttgtttatgggcatctt

SEQ ID NO: 526765 - DNA, 201 bp, Homo sapiens
ctgtgctctgagttattaggacttttagttttctctaaatttaattttctctatattctgaatttagaatataacccattttccctccacccctttttcttttttttttttttctagacagagtctcacctgtctcacaggctggagtgcagtgatgcgatctcagctcactgcaacctttgcctcccgggttcaagtgat

SEQ ID NO: 526766 - DNA, 201 bp, Homo sapiens
ccaccatgcctaattaacttttttatttgtatagagatagggtctcaccatgttgcccaggctggtctcaaactcctgaactcaagcactcctcctgcctyggcctcccaaagtgctaggattacaggctcaagccaccatgcccagcctatagtattctttataggtgatcttgtatatctcatatagcatcatataagg

SEQ ID NO: 526767 - DNA, 201 bp, Homo sapiens
ggcaaaactacccctcttgttagatttcttaaagtcttattccaggaccaccaatctgttattgtttccagatgaaaacctttactaagctttgaattgakttctttattgagaaccatagactgggaaatcatgtatggaatctagaaaatagtgtcatttatagaaggagttactctttcttttgattgatattttatt

SEQ ID NO: 526768 - DNA, 201 bp, Homo sapiens
aaaaaatattgaagaccccaagaacttctgtttatgtgggttagatgtatcaacacatggaaataaaaacaagttttttaaaaaaattggtttataaattwttattattgttattattattgagacgggagtttcgctcttgttgcccaggctggagtgcagtggcaccatcttggctcgctgcaacctctgcctcctggg

SEQ ID NO: 526769 - DNA, 201 bp, Homo sapiens
acccctcttgttagatttcttaaagtcttattccaggaccaccaatctgttattgtttccagatgaaaacctttactaagctttgaattgagttctttatkgagaaccatagactgggaaatcatgtatggaatctagaaaatagtgtcatttatagaaggagttactctttcttttgattgatattttatttgtcttcat

SEQ ID NO: 526770 - DNA, 201 bp, Homo sapiens
atgttggccatgctggtgttgaactcctgacctcaggtgatccacccacctcaccctcccaaagtgctgggattacaggtgtgagccaacatgccaggcattttttttttttttttttttttttgacagggtcttgttttgtggcatagtcatggcttactacaaccttgacctcctgggctcaggcgatcctcctgcttc

SEQ ID NO: 526771 - DNA, 201 bp, Homo sapiens
tgcagaccatttaatacatatgccatcaaaatgagcggttccattttcaaaccactgtattttgacagtacttgttggttgttatttttctgtcttggcgrcattaactgccagcgtaactcatctctgtttggattcaagggcatcgtagtttactggctctctgatgaagctgttttgtggcatcaatggattttcctt

SEQ ID NO: 526772 - DNA, 201 bp, Homo sapiens
tgttggccatgctggtgttgaactcctgacctcaggtgatccacccacctcaccctcccaaagtgctgggattacaggtgtgagccaacatgccaggcattttttttttttttttttttttttgacagggtcttgttttgtggcatagtcatggcttactacaaccttgacctcctgggctcaggcgatcctcctgcttca

SEQ ID NO: 526773 - DNA, 201 bp, Homo sapiens
gtggcatgatgtcagcactcaaaagattttacattttggagcttttcaaattttcagattaggaatgttcaatctgtgatgtatttgtttagctctctgcsatagtcaagtgaaagtctgtgttattttgctttttttccccttaggtgtctttgccttttggaaacttatccgtatctgagtacaaacactactttgacc

SEQ ID NO: 526774 - DNA, 201 bp, Homo sapiens
gcgcctccgctgtgccaggattcttgtaggcacagggaatactcagtgaacaaaagatacagaaaactgtctcctgtggcttacatttttttttttttttkgggggggacggagtctcactctgtcgcccaggctggagtgcagtggcgcgatttcagctgactgcaacccccgcctcctgggttcaagcgattctcgtgt

SEQ ID NO: 526775 - DNA, 201 bp, Homo sapiens
atgctcgttgccaattaataccccatctcccagacataaccattgttccagtataccacgattgattattcattagtttagtctgttcttgaacagacttaaaaaaaaaaaaagcttttgcttttcctaaagtttattgccttatatttttgttacttcctgtttaagttgtaatagaaataaaaatataggtaaacttct

SEQ ID NO: 526776 - DNA, 201 bp, Homo sapiens
ctaaagtaaaaattctttttacagattagaaaaatttatgttagctttattgtggtaaaattgatgtacaataaatcacacatatgtaaagtatacaattyggtaagtttcaacatgtgcctacttccataaaaccatcactacaatctagctgatgaatagatcctctcatttccctctctaatccctccctcctacctt

SEQ ID NO: 526777 - DNA, 201 bp, Homo sapiens
aaaatataggtaaacttctgcagtttggcatagaaaagctgctttttggtatttagaataattctcaattggataatatttgcaaagcatgtaagttctattttttttttttttttttttttttgagagactgtctctctctgtcaccaggctagaatgcagtggcatgattacagctcactgcacccttgacctctggtg

SEQ ID NO: 526778 - DNA, 201 bp, Homo sapiens
attcccccttaacctataccttccaagaccaccagtgaatgcctgaaaccatggatagtaccaaacactatatatactatgttttttcctacatacatatstataataaagtttaacttatgaattaggcacagtaaaagattgagaataataactaataataaaatagagcaattataataatatagtatgataaaagtt

SEQ ID NO: 526779 - DNA, 201 bp, Homo sapiens
cctggcctcaagcattcctcctgcctgagctcgacctcccaaagtgctgggattataggcatgagccaccatgcccagccaaagcatgtaatttcttttcttttttttttttttttgagacagagtcttgctctgtcacccaggctggggagggcagtggcatgatctcggctcactgcaacctccgcctcccaggttcaa

SEQ ID NO: 526780 - DNA, 201 bp, Homo sapiens
tataataaagtttaacttatgaattaggcacagtaaaagattgagaataataactaataataaaatagagcaattataataatatagtatgataaaagttwtgtgaatgtggtctctttctctcaaaatattttattgtactttacacacctatttttggaccacgctgactgagagtaaccaaaacctgggataaggggg

SEQ ID NO: 526781 - DNA, 201 bp, Homo sapiens
attttctgattataaaagaaatgtgtactcatgcataaaaccccaaaaaacataatttaatataaataattataaaaattaatcatagtcccccagcccarcaataaaccccattaatattttggtctgttcctttccaatcttggtgttttatgaaagtgtgtgtaataggtacagttttatatccttttttcccctcat

SEQ ID NO: 526782 - DNA, 201 bp, Homo sapiens
tcaggccggtctccaactcctgacctcgtgatccggccgcctcggcctcccaaagttacaggattacaggcgtgagccaccgtgcccagccagcttgtgtyttttcagcgttgaatcaagttctgtgggcactgttcctgaactaagaggagaaccagcctggtgtcaaaagcacatttttggcattgacaaaccttggtt

SEQ ID NO: 526783 - DNA, 201 bp, Homo sapiens
ccttattttaaattattttaatttgtagggccctttaaaaggacgcagagttgaaggaattcaatatgaagacatttctaaacttgcctgagtttgaaaawttgttaacaatacattaaaatcttaaagcatcaaattggtgttcgccaaggcattatgagactctactgtgttagggtatattcttttgtataaaacaaa

SEQ ID NO: 526784 - DNA, 201 bp, Homo sapiens
tattaggacttttagttttctctaaatttaattttctctatattctgaatttagaatataacccattttccctccacccctttttcttttttttttttttmtagacagagtctcacctgtctcacaggctggagtgcagtgatgcgatctcagctcactgcaacctttgcctcccgggttcaagtgattctcatgcctcag

SEQ ID NO: 526785 - DNA, 201 bp, Homo sapiens
tccatgaatccttctccatttaacggttccttattcgctatataaaactgtttcttttcctgtcttagcccacttgtcacagtttaaatgttagctggatmtgcatttttcttttacttgctgcattgtgagttttctgagaatagagattatcaacctctctccttcgtccccagtacagtgtaaatacaccaggaaaca

SEQ ID NO: 526786 - DNA, 201 bp, Homo sapiens
cctacttgtaggattgtcgctgagttttaaatgagtgaagtatatatagagtggctcaaggagtctgggcagatctcgaaaagccttatatggctacactrtggaatttacacttttccccattaaagaggtggttgattgaatgctgtgcaggctagtgatgtgatcatatttttctccggagattggactggattgggt

SEQ ID NO: 526787 - DNA, 201 bp, Homo sapiens
tttttttttttctttctgatcctgacaatgctaacctagaagctgttacttgctaactgttactaacgtaaactaaggggaagaaagggaaaaaggactcytacttggcattgaggaacatgtcagtctgactaaattagcagattgagttttaacaaaaaactctataagattttctctgactctatcagcataaggcag

SEQ ID NO: 526788 - DNA, 201 bp, Homo sapiens
tttgttttttattatgtttattcagtgtagtacattttgctgtaacaagttagaagaaaagtggagatatttcttcacattaatttttatattcttttccrtcataggaaaaagaattctagttttaaatggaggctacagaggaaatgaaggtaccctagaatccatcaatgagaagactttttcagctactatcgtcat

SEQ ID NO: 526789 - DNA, 201 bp, Homo sapiens
tttcttttgattgatattttatttgtcttcatttcatttgcttttgaccttttaaatgagtgtgcacatatttcttctattataaaagtgttcattttacrtgacaggaagtaattgacaaatatacagctgttgtgaagatgattgattctggagacaagctgaaacttgaccagactcatttagagacagtaattccag

SEQ ID NO: 526790 - DNA, 201 bp, Homo sapiens
ttcttattaatgtctgttttctacaacactcttttgctgtctctttgatctcaaggattattctttgattagcagagttgaaagctcaactctataaaaawtttttttgaaaacctgatagagtagttacagctaatgatttgattatattttaatttatcatcaaagagcagattttttgggttttaactaaatacttct

SEQ ID NO: 526791 - DNA, 201 bp, Homo sapiens
taggatgttgtctggtttcatggcttgggtgcttgtgcttcagatagagatagggaatacaagaaaggcacattttttgtttctattactagtgaagaatgagggtcaaatattaaggagaggtatactaagtcaaaacttgtatgtttttttcctgtcattttaagaaggtacagatttaatatgtttaacaaggttaat

SEQ ID NO: 526792 - DNA, 201 bp, Homo sapiens
tgtttgcttcctaggtcagttgacttgctttattatatacttttaaaaactgaagttttttttaaatcaaaaactaatgacaagtaatgtttatttgtatytatcagagctcgcaaattatgtcattggtcttctgtgaagtagaggacttcacagttttatggtgttattttgctaaatagaatggtattttgaaatcca

SEQ ID NO: 526793 - DNA, 201 bp, Homo sapiens
taacttttgttatgattggttatgctagattgtaacctccttgaaggttaagatttatgtcttattcacccacgtttatctagcacttaatacggtgtacscagctcagagggacatattaagtgccaatttcatgtggaatcagggcagttttgttgtcatagatagactggggtcattatgccaccatcagtggcacta

SEQ ID NO: 526794 - DNA, 201 bp, Homo sapiens
tgtagttttcacctgtttttggtttttattggttgcgttgtttttttagcaattgttctttttttttttttaagagatggggtcttgctatgttgcccagsctggcctcgaactcctgggctcaaggtgatcttcctgcctcagcctcccaggtatcaatagctgggattacaggcacgccctactgtgcccagctagcaa

SEQ ID NO: 526795 - DNA, 201 bp, Homo sapiens
ctcaagtcccttatataaaataaaatgatgtagcacttgcatgtaacctatatacatcctcccacatactttaaatcatctcgagatttcttataatattkaatacaatgtaaatagtttttatactctattgttagggaaaaatgggaaggaaaaaatgtctgtgcatgttcagtacagatgcaaccatccgtttttctt

SEQ ID NO: 526796 - DNA, 201 bp, Homo sapiens
aagcatgtaatttcttaattaggatcttaatcacttgcgtattagagctgcctgggaacacaggtagcaagtcataatttaggcctattgaatggtgatartaagtgcaatgtacaccaaaaccttaaaactttcttttttttaggaggtccctacttttacggaattaagcagagaaaatgatgaagagaaaggtagttt

SEQ ID NO: 526797 - DNA, 201 bp, Homo sapiens
cacaggtagcaagtcataatttaggcctattgaatggtgatagtaagtgcaatgtacaccaaaaccttaaaactttcttttttttaggaggtccctacttktacggaattaagcagagaaaatgatgaagagaaaggtagttttattttttattttttctttttttaaacatagatgcttttatattggctttgttaaaaa

SEQ ID NO: 526798 - DNA, 201 bp, Homo sapiens
cagggaatactcagtgaacaaaagatacagaaaactgtctcctgtggcttacatttttttttttttttggggggggacggagtctcactctgtcgcccagrctggagtgcagtggcgcgatttcagctgactgcaacccccgcctcctgggttcaagcgattctcgtgtctcagcctcccaagtagctgggactacaggca

SEQ ID NO: 526799 - DNA, 201 bp, Homo sapiens
cctgtggcttacatttttttttttttttggggggggacggagtctcactctgtcgcccaggctggagtgcagtggcgcgatttcagctgactgcaaccccygcctcctgggttcaagcgattctcgtgtctcagcctcccaagtagctgggactacaggcacaagccaccatgcccagctaattttttgcatttttagtag

SEQ ID NO: 526800 - DNA, 201 bp, Homo sapiens
ctaatattgatacagttactctctttagttctattaaggaatacctgtatatgcattatctaatgtcttagtctgcttggactgccatataaagtgcagtagactgggtggtttaaatgacagaaatttatttctcacagttctggaggctgggaagttcaagatcaaggtgctggcatggtcagattctagtgagggtcc

SEQ ID NO: 526801 - DNA, 201 bp, Homo sapiens
agtgctgggattataggcatgagccaccatgcccagccaaagcatgtaatttcttttcttttttttttttttttgagacagagtcttgctctgtcacccaggctggggagggcagtggcatgatctcggctcactgcaacctccgcctcccaggttcaagcaattctcctgtctcagcctcccaagtagctgggattacag

SEQ ID NO: 526802 - DNA, 201 bp, Homo sapiens
cacctgccttggcctcgcaaagtgctaggattacaggcatgagccaccatactgggccaaaatatgtaatttcttttttttttttttgagatggagtctckttctgtcacccaggctggagtgcagtggcatgatcttggctcactgcaacctctgcctcccgggttcacgtgattctcctgcctcagcctcctgagtagc

SEQ ID NO: 526803 - DNA, 201 bp, Homo sapiens
ggttaaaaaagatgagtaagacaagagagtcaagtaccagtatctactggaatttgcttttaagccagatgatattttctattttacttagtactttacatgttgtttttttaagatctaagtttttcgggtttgtttgtaggtcattgtttatttacactattgaataagtggctaggagtatggaaggagataggtagg

SEQ ID NO: 526804 - DNA, 201 bp, Homo sapiens
gttaaaaaagatgagtaagacaagagagtcaagtaccagtatctactggaatttgcttttaagccagatgatattttctattttacttagtactttacatgttgtttttttaagatctaagtttttcgggtttgtttgtaggtcattgtttatttacactattgaataagtggctaggagtatggaaggagataggtaggc

SEQ ID NO: 526805 - DNA, 201 bp, Homo sapiens
tatatttcccaacaacccaatcatacagacattaccattatttccactgggagataataaggcacagagaggaaactgaaggacagagaggttaaatcaaytgttgaaagtgagatttgaacttggggagtgtaggttcacagcccatattcttagcctctgtgttcccaggttatatccgcttttgtgatagaaaatatc

SEQ ID NO: 526806 - DNA, 201 bp, Homo sapiens
ttaaaaaagatgagtaagacaagagagtcaagtaccagtatctactggaatttgcttttaagccagatgatattttctattttacttagtactttacatgttgtttttttaagatctaagtttttcgggtttgtttgtaggtcattgtttatttacactattgaataagtggctaggagtatggaaggagataggtaggct

SEQ ID NO: 526807 - DNA, 201 bp, Homo sapiens
ctttccctttttgttcgatatgaaagaagaaaataaagttaaagttggactctttttataatctggaccagtgtaactatcacagccaacctagacaaacrtgtttgagtatctgtaatgcttacaaaatgatatttcctataaaaaaaagaaaaccccaaatggacaatggcacaaacatggtagaagttaacgtttcac

SEQ ID NO: 526808 - DNA, 201 bp, Homo sapiens
ccctgagatcttgctgggctcttctgatcatctttttccccattattgtcacattctaagcatttaatgatgctgagtaaattttctttttctttctttcttttttttttttttttgagacggaatttcgctcttgttgcccaggctggagcgcagtggcatgacctcggctcaccacaacctctgccttccaagttcaag

SEQ ID NO: 526809 - DNA, 201 bp, Homo sapiens
gagtccttcatggttggcctccctccttcaactgctactctcctgttgactttgacttccgcttagcacctcctagcgagcacgagaaacctgtgacatgttttttttttggttgctgtttttgttgttgagacagtctctctctgttgcccaggccagacagagtgcagtggcacaatctcggctcactgcagtctccgc

SEQ ID NO: 526810 - DNA, 201 bp, Homo sapiens
agaaaaatggaaagccaaattgaccttttttgaatataatgcatactaattttagaacactgtttgttgaaaaggtgaaggatttaaaatgaggttttttktttttttttgagatggagtgtcactctgtggcccaggctggagtgcagcaatgtgacctcggctcactgcaacctccgcctcacagggttcaagcaattc

SEQ ID NO: 526811 - DNA, 201 bp, Homo sapiens
ttaaacatttaacaatattttaaaatgattatttattgatgctctattttagacttactgagacatgacattttcataaaactttcagagtgtcttattcttttttttatttttaaatagagacagggtcttgctctattgaccaggctggtctgaaactcctggcctcaagcgatcctcccacctcagcttccagagtag

SEQ ID NO: 526812 - DNA, 201 bp, Homo sapiens
atactaatattgatacagttactctctttagttctattaaggaatacctgtatatgcattatctaatgtcttagtctgcttggactgccatataaagtgcrgtagactgggtggtttaaatgacagaaatttatttctcacagttctggaggctgggaagttcaagatcaaggtgctggcatggtcagattctagtgaggg

SEQ ID NO: 526813 - DNA, 201 bp, Homo sapiens
ataccaatatcaggatatttcacctttaaatacttaaataggcatctctaaaatttcaggatacttttctatataaccatagtatatgtcatcaacataayacaattaatagaagttcctctttatcatctaatacacattcacacttcctcagttgtcctccaactgctccttgaaatcaagattcgatcaaaagcaata

SEQ ID NO: 526814 - DNA, 201 bp, Homo sapiens
cctttactaagctttgaattgagttctttattgagaaccatagactgggaaatcatgtatggaatctagaaaatagtgtcatttatagaaggagttactcwttcttttgattgatattttatttgtcttcatttcatttgcttttgaccttttaaatgagtgtgcacatatttcttctattataaaagtgttcattttaca

SEQ ID NO: 526815 - DNA, 201 bp, Homo sapiens
accaatatcaggatatttcacctttaaatacttaaataggcatctctaaaatttcaggatacttttctatataaccatagtatatgtcatcaacataacamaattaatagaagttcctctttatcatctaatacacattcacacttcctcagttgtcctccaactgctccttgaaatcaagattcgatcaaaagcaataga

SEQ ID NO: 526816 - DNA, 201 bp, Homo sapiens
actgggagagaaatatcataagaaaaaggctattgttaaggtaaggacgtgcaattatgaatggaatttgtgaaaaaagcttgggtcactgagtgaagctmttttggtatttcttgaaaatcaagtcctagtagcagaagtactatgtttaaaattcttgattattccatgaaatggaagctgaattcatgattgttggag

SEQ ID NO: 526817 - DNA, 201 bp, Homo sapiens
gatatttcacctttaaatacttaaataggcatctctaaaatttcaggatacttttctatataaccatagtatatgtcatcaacataacacaattaatagamgttcctctttatcatctaatacacattcacacttcctcagttgtcctccaactgctccttgaaatcaagattcgatcaaaagcaatagactgttataggt

SEQ ID NO: 526818 - DNA, 201 bp, Homo sapiens
gggaaggcagagaactccagcatttcttatttggcagggcagttacattttcctgtggttttgggtgaacatagtttaaaaggaagaagtaaatgacaaaygataacttctgtctttcctttcattttttttgttattattttctaggaaattattgtgaaaattataaccaagaaactgggagagaaatatcataagaaa

SEQ ID NO: 526819 - DNA, 201 bp, Homo sapiens
atctaatacacattcacacttcctcagttgtcctccaactgctccttgaaatcaagattcgatcaaaagcaatagactgttataggtttggttattaggayctccgctcccctctccagtctccctcatcatcaacatcctgcaacgaggtgttatatttgttaccatggatgaaactacattgacacatcagtatcatcc

SEQ ID NO: 526820 - DNA, 201 bp, Homo sapiens
ctaatacacattcacacttcctcagttgtcctccaactgctccttgaaatcaagattcgatcaaaagcaatagactgttataggtttggttattaggaccyccgctcccctctccagtctccctcatcatcaacatcctgcaacgaggtgttatatttgttaccatggatgaaactacattgacacatcagtatcatccag

SEQ ID NO: 526821 - DNA, 201 bp, Homo sapiens
tctctaaatttaattttctctatattctgaatttagaatataacccattttccctccacccctttttcttttttttttttttctagacagagtctcacctrtctcacaggctggagtgcagtgatgcgatctcagctcactgcaacctttgcctcccgggttcaagtgattctcatgcctcagcctcccaagtagctgtcc

SEQ ID NO: 526822 - DNA, 201 bp, Homo sapiens
gaataacatttttttcttctagtcacgtttaatttgagtaaaggagcatgtagctcatccggagcaacatcttccaagtcaaggtgagctgcatcattcayggatatcttaaaacattaggatttttgtgaaatattggttactgtattttaaagtattgtgaatcatttttttctagttgtagttttcacctgtttttgg

SEQ ID NO: 526823 - DNA, 201 bp, Homo sapiens
tctttttttttttttaagagatggggtcttgctatgttgcccaggctggcctcgaactcctgggctcaaggtgatcttcctgcctcagcctcccaggtatsaatagctgggattacaggcacgccctactgtgcccagctagcaactgttcttttcctatttgcctgttatgagatgattgtgttttttgaggaaagcctc

SEQ ID NO: 526824 - DNA, 201 bp, Homo sapiens
tgttttttgaggaaagcctcattttgattatatgtttcacatcaataaacttttgcttctccatgaatccttctccatttaacggttccttattcgctatrtaaaactgtttcttttcctgtcttagcccacttgtcacagtttaaatgttagctggatatgcatttttcttttacttgctgcattgtgagttttctgaga

SEQ ID NO: 526825 - DNA, 201 bp, Homo sapiens
tactcttttgcccaggctggtcaacatagtagcctcaagtgatcctcctgcctcgacttcccagggtgttaggattactggcccgagccactgtgccgaatttttttttttttttttttttgagatggagttttgctctcattgcccaggctggagtgcaatggcacgatctcagctcaccgtaatctctgcctcctgagt

SEQ ID NO: 526826 - DNA, 201 bp, Homo sapiens
cattctaagcatttaatgatgctgagtaaattttctttttctttctttcttttttttttttttttgagacggaatttcgctcttgttgcccaggctggagygcagtggcatgacctcggctcaccacaacctctgccttccaagttcaagcgattctcctgcctcggcctcccaagtagctgggagtacaggcatgcacca

SEQ ID NO: 526827 - DNA, 201 bp, Homo sapiens
tgtcattgccaatgtagtgataacatcagtctctggaacttcttattatcatattctttattctttttccccctaaagtaaaaattctttttacagattasaaaaatttatgttagctttattgtggtaaaattgatgtacaataaatcacacatatgtaaagtatacaatttggtaagtttcaacatgtgcctacttcca

SEQ ID NO: 526828 - DNA, 201 bp, Homo sapiens
acaaaaaactctataagattttctctgactctatcagcataaggcagtagaaaatccagtatttccttgacaacttgcttatccttcccttattaatttcttttttttttttttttgcatggaccatgcatgaaacttaccttattaatttcatagtgctatcaaatgcagatcctgtttcatgttttcatctcagggaaa

SEQ ID NO: 526829 - DNA, 201 bp, Homo sapiens
cctaactcctcttttgctagggttattagtgcctattttgtagacatattgtagttgattatgatctgaattatccctggatccctagttcaaagtacacytaaatctaaagaacatttaagtagcaagttgaggagcttatcttacgtggatttggcctgttcaaaacccatgtccattatttatagctgtcacaccctg

SEQ ID NO: 526830 - DNA, 201 bp, Homo sapiens
actccggcctgggtgacagcgagactccgtctcaaaaaaaaaaaaaaagggaatctgtctcctaatttttttttcttcctttcttcagcctgtcctcattaaaaaaaaaaaaaaaatctctgtatatgcttgtgtcatcacttgagctttgcaagtggttatttttatcatttctggcaccttaagttttcatgtcgttga

SEQ ID NO: 526831 - DNA, 201 bp, Homo sapiens
aagcaatcctcctcctgcctcagcctcccaagtagctgggaccacaggtgattgccaccatgcctaattaacttttttatttgtatagagatagggtctcmccatgttgcccaggctggtctcaaactcctgaactcaagcactcctcctgcctcggcctcccaaagtgctaggattacaggctcaagccaccatgcccag

SEQ ID NO: 526832 - DNA, 201 bp, Homo sapiens
gtctacaacgaatacatcagccaccgagagcacatccacatgaatgccactcagtgggaaactctgactgattttactaagtggctgggcagagaaggtamgaatgagattttaaagttgctttttctttcccacttctaatcttcataggatgagatgtttgggataagaaaagagaaaaaaaattgggtcagtgttttg

SEQ ID NO: 526833 - DNA, 201 bp, Homo sapiens
ggtcttgaactcggaggctcacacaatcctcctgccttggcctcccaaagtgctgggattacaggcatgagccactgtgtctggccatccttaaatgttawactgagatgcaatttttttgggaaaggagtaaaggattaattcttttctgtaatctcctgatactggaaggctgaagagaatgaaggtcagagccagggt

SEQ ID NO: 526834 - DNA, 201 bp, Homo sapiens
ttagtagagacagggtttcaccatgttggtcaggccggtctccaactcctgacctcgtgatccggccgcctcggcctcccaaagttacaggattacaggcrtgagccaccgtgcccagccagcttgtgttttttcagcgttgaatcaagttctgtgggcactgttcctgaactaagaggagaaccagcctggtgtcaaaag

SEQ ID NO: 526835 - DNA, 201 bp, Homo sapiens
ctgggcttaagcaatcctcccgcctcagcctctcaagtagctgggactataggcacataccacccatgcctggctaattttcaaaaaatatcttgtggagmtggaggtctcattgtgttgctcaggttggtcttgaactcggaggctcacacaatcctcctgccttggcctcccaaagtgctgggattacaggcatgagcc

SEQ ID NO: 526836 - DNA, 201 bp, Homo sapiens
taagccactgcgctcggcctgatttgcgtgtgtttgaatgaataaatatgcagaggtgaaacacattcatatttatgttttgctttgattgtatgctaatwtatggcagtggctgtttttttaaggcttgtgcaaagtggacgagacaccaaaaggctggtatattcagtacatagacagggacccagaaactatccgccg

SEQ ID NO: 526837 - DNA, 201 bp, Homo sapiens
aagcagggccacttaccaaccgtgtggtcttgggcaagttatttacttatattcccctttacttatctgtaaagagggaataataatttcacctacttgtwggattgtcgctgagttttaaatgagtgaagtatatatagagtggctcaaggagtctgggcagatctcgaaaagccttatatggctacactatggaattta

SEQ ID NO: 526838 - DNA, 201 bp, Homo sapiens
caagcagggccacttaccaaccgtgtggtcttgggcaagttatttacttatattcccctttacttatctgtaaagagggaataataatttcacctacttgwaggattgtcgctgagttttaaatgagtgaagtatatatagagtggctcaaggagtctgggcagatctcgaaaagccttatatggctacactatggaattt

SEQ ID NO: 526839 - DNA, 201 bp, Homo sapiens
tcctggcctcaagcattcctcctgcctgagctcgacctcccaaagtgctgggattataggcatgagccaccatgcccagccaaagcatgtaatttcttttcttttttttttttttttgagacagagtcttgctctgtcacccaggctggggagggcagtggcatgatctcggctcactgcaacctccgcctcccaggttca

SEQ ID NO: 526840 - DNA, 201 bp, Homo sapiens
tttagaataattctcaattggataatatttgcaaagcatgtaagttctattttttttttttttttttttttttgagagactgtctctctctgtcaccaggstagaatgcagtggcatgattacagctcactgcacccttgacctctggtgctcaagtgaacctcttgcctcatatgagtagctgggactataggtgtgcac

SEQ ID NO: 526841 - DNA, 201 bp, Homo sapiens
tagacagggacccagaaactatccgccggcaactggaactggagaaaaagaaaaagcaggaccttgatgatgaagaaaaaactgccaaatttattgaagarcaagtgagaagaggcctggaagggaaggaacaggtgggtaagcaacatcatcctgagaagcaacgtccagaggtctaaagaagcacaatggcttggtttt

SEQ ID NO: 526842 - DNA, 201 bp, Homo sapiens
attgctaaggaaatgtttgtcattgttgggaaggcagagaactccagcatttcttatttggcagggcagttacattttcctgtggttttgggtgaacatastttaaaaggaagaagtaaatgacaaacgataacttctgtctttcctttcattttttttgttattattttctaggaaattattgtgaaaattataaccaag

SEQ ID NO: 526843 - DNA, 201 bp, Homo sapiens
ttcagttggagtttcttaagttctaaatgtatgtttaagtgaatgatttaactagcatttggtataagtaactaaacttttcaaacacgtataatctatayagatagagttagttataacttataatgacttttcttcctattagatcattaattattggttgcacctctattggagagttacttcatgcttatagactaa

SEQ ID NO: 526844 - DNA, 201 bp, Homo sapiens
aatagaaccagagtttaaatatatgttcagtgggttgaattacaggtcaaaacccagtgagtaaaattttacaaaggtaaatggaaagcctgacagttagstaaagaaaaacaacccccataaaaacagagtgacagagtccttacctacaattctccatagagaaaagaagtaggggttttagttgacttcaagcttaaa

SEQ ID NO: 526845 - DNA, 201 bp, Homo sapiens
tggtcttctgtgaagtagaggacttcacagttttatggtgttattttgctaaatagaatggtattttgaaatccaatgaggattttagggagataatttargacattatgtgttctacagattgaagaggaaaagaaaagaactgcccgaacagactactggctacagcctgtaagtattcagttggagtttcttaagttc

SEQ ID NO: 526846 - DNA, 201 bp, Homo sapiens
gagttaaagatagcacgggttaaatgctcacacagtgctgatggttctgtaagagatgtggacagggactccatggttttcactaatctcctgtaaattastatgtcacacatttattctatattgtgaattttgcacatcgtaaagcattcgtctgtgtatggttcttggtaacaagcatggttctcctgttcatcagta

SEQ ID NO: 526847 - DNA, 201 bp, Homo sapiens
tcagtagaattcagttagaaattggagtccttcatggttggcctccctccttcaactgctactctcctgttgactttgacttccgcttagcacctcctagygagcacgagaaacctgtgacatgttttttttttggttgctgtttttgttgttgagacagtctctctctgttgcccaggccagacagagtgcagtggcaca

SEQ ID NO: 526848 - DNA, 201 bp, Homo sapiens
aggtcagagagccaggagggccaacaccatagaggtcttacatgctgtgacagggatttttaaaatttaattttattcaaagaaaaatggaaagccaaatygaccttttttgaatataatgcatactaattttagaacactgtttgttgaaaaggtgaaggatttaaaatgaggttttttgtttttttttgagatggagtg

SEQ ID NO: 526849 - DNA, 201 bp, Homo sapiens
tactaatattgatacagttactctctttagttctattaaggaatacctgtatatgcattatctaatgtcttagtctgcttggactgccatataaagtgcagtagactgggtggtttaaatgacagaaatttatttctcacagttctggaggctgggaagttcaagatcaaggtgctggcatggtcagattctagtgagggt

SEQ ID NO: 526850 - DNA, 201 bp, Homo sapiens
acgttggccaggctggtctcaaactcccgacctcaggtaattcacctgcctcggcctcccaaggtgctgggattacaggtgtgaaccactgcgcccagccktctttttcttgacattgacttgttgaagagaggaggccaggctgttgtcctgtagcatcccatatatgttgacttgtttcctctggttgtcttttgcctt

SEQ ID NO: 526851 - DNA, 201 bp, Homo sapiens
accaaagaaatgaaatcagaaaaggttttgcacccctcacaggggcggggatactgcaatactagacgcccgggcaatgccagtaacagtcatcagctctkacttgacttgactcttaagagaaacagggtggttaggattcactcctcttttgggatcaggtgaaaaaggagagctaagctcttccacactactcatcta

SEQ ID NO: 526852 - DNA, 201 bp, Homo sapiens
ccaacaggatcaagtccaaggggctgcagaagctacgctggtattgccagatgtgccagaagcagtgccgggacgaggtgagtgggcccggagtggccccrtcttcccaggagggcccctggcaatccaggatcaggtcctggacgcggggctgagggcgcggggctggggctcccggggtccgggtcgtgaggcttctga

SEQ ID NO: 526853 - DNA, 201 bp, Homo sapiens
tcatagatgtatacaaatgttaacaatcttaatggtattttagggatgcggaaaaggcaaatttgtatccataagtatggtgtcatttttttgtcttttargaatatgtgtttttaaccttattttaaattattttaatttgtagggccctttaaaaggacgcagagttgaaggaattcaatatgaagacatttctaaact

SEQ ID NO: 526854 - DNA, 201 bp, Homo sapiens
tgctttcatgggctggagctccatgcatggccacagctaaccacaagggagccaggaaactggctatttatccaggaagcagaggagatactgaacagctwgcaggtctctgccacaatgtctattgataacgtatgtcagatgtcacagaagaaaatatggtagttcttaatgagaatgccatagattattcttaaaatt

SEQ ID NO: 526855 - DNA, 201 bp, Homo sapiens
ttcgcatgacattcggggtacttcaaaaattagccaaaccttattttggtttcccagccacctcgtctcccttattctactctaccctcactctcactctyatttttatcagccataaattttagtcaaattaggccatttctcagatctgtgaggctttcatgtttctgtgccagctggaaatagctttctcttgcagtt

SEQ ID NO: 526856 - DNA, 201 bp, Homo sapiens
gcttgtcagtaaaatgtactttattttttaatgataggccatatattaaaagtagtggcaaaaactgcaattacttttatgccagcctaacaattatactstcagaggtctcatgaggacttcttgtgttttgcttgagaaactgtcttttggctactctgggattttatttatttttatttttatttctgagacagagtc

SEQ ID NO: 526857 - DNA, 201 bp, Homo sapiens
atgtttaaaattcttgattattccatgaaatggaagctgaattcatgattgttggagaaatatttctttttcatccatagtttctactcagcgttgatctrttttcttactaggacagatagtatgtatgaaggcccatcagcacctcttcaaaacctcagcatgcatgccttgcttgtcagtaaaatgtactttattttt

SEQ ID NO: 526858 - DNA, 201 bp, Homo sapiens
aacctgtggaaccaccacccagataaagatatagaacttttctagtatcccagagggtttcctcatgctcgttgccaattaataccccatctcccagacawaaccattgttccagtataccacgattgattattcattagtttagtctgttcttgaacagacttaaaaaaaaaaaaagcttttgcttttcctaaagtttat

SEQ ID NO: 526859 - DNA, 201 bp, Homo sapiens
gcacatgcttcaataagcacagactatctccagaaggttacacaagacacagaagagaaagtagttacctctagaaaagggagctaggggactgggaaacrggagtatagggaacattttctttttcatatcatatcatcacactctttgttaaatatcctgcaacagatccccattttattcacagtaaaatcaaagccc

SEQ ID NO: 526860 - DNA, 201 bp, Homo sapiens
ctctacaaaaacacaaaaattagccggttgtggtggcacgtgcctgtaatcccagctactcaggaggctgagggaggagaatcgcttgaacctgggaggcrgaagttgcagtgagccaagatcatgtcagtgcactccagcctgggtgacagagcgggactccatctcaaaaaaataaaataaagtgaaatattctacatg

SEQ ID NO: 526861 - DNA, 201 bp, Homo sapiens
tatataaaaagttcttaaaagaagtttttgtagttgttgtatcacttctctgtgtttacttcaacccactccaaccaggtttgcctccatcattccactgrgactagccttgtcaagatcatcagttacctgctgattgacaacagctgcatttaacacagatgacctatccctctttattctcttggcttccacaacacc

SEQ ID NO: 526862 - DNA, 201 bp, Homo sapiens
tactctctttctccagccacccattcttgcccaatggcctcatgaacaaagtagccatgatggcagggatgaaggttatgcatgggcccagcaacatagaygaacattcactaaggctaatctgtcagcttcatagaacaacactgagctcccaaaatagcaccactcctgggggtggcaggcggcagggggtggagtggg

SEQ ID NO: 526863 - DNA, 201 bp, Homo sapiens
aaaattaacaaaacaaagtttactctagccatcagtgccaatgaacataaatgactgcctgagagttatattaacaaaataattaattcagacgaattaargaattaaaccagctatgggaaatatacactctatacttagatgcacatttattttattttatcttatttggagacagggtcttgttctgtcatcccggct

SEQ ID NO: 526864 - DNA, 201 bp, Homo sapiens
agcagaaaaatgaaaactataataaagagacaaatggcaattctacaatatactacatatactacaatatatactacatatatactacaatatatactacatatatactacatatatactacatatatactacatatactacaatatacaatatactacaatactgcaacatttaaaaagaaaaattcattggataggatt

SEQ ID NO: 526865 - DNA, 201 bp, Homo sapiens
ggcatgatctcagttcactgcaacctccacttcccaggttccagtgattctcctgcctcagcctcccgagtagctgggattacaggcgctcgccaccatgmccagctaatttttgtatttttagtagagacggggtttcatcatgttggccaggctggtcttaaactcctgaccttaggtgatccgcccccttgggcctcc

SEQ ID NO: 526866 - DNA, 201 bp, Homo sapiens
gcagaaaaatgaaaactataataaagagacaaatggcaattctacaatatactacatatactacaatatatactacatatatactacaatatatactacatatatactacatatatactacatatatactacatatactacaatatacaatatactacaatactgcaacatttaaaaagaaaaattcattggataggatta

SEQ ID NO: 526867 - DNA, 201 bp, Homo sapiens
aagagttcacccagcatagctgccctgggctcagggccttggtttctgtctagtccctggggatatttatatttaataaactttcctataaatacacagakaaatagaaagcataaaatctgaggtgttggtggagaaaggcaggggacttggcaagaagccagagctggagaggtctgctcaggccaacctgacctcctc

SEQ ID NO: 526868 - DNA, 201 bp, Homo sapiens
tgcaaaagggattatatttataattcagtaatataagtctgtgagaactagataacacaagcacatagagacgtgaatgtacaatgctttaaaaacacaartttgggaagaacccgtgtgttgcttcacttatgtgactttttcccctaccatgatcactgaaacgccgctgcttctgatttgctgagatacttctctgga

SEQ ID NO: 526869 - DNA, 201 bp, Homo sapiens
atgcaaatggtatgtattagataaagcttgagcaggtcttgaaggaacaaattacattgcatgagatgctcctgacccatactcctgctcccctgctacaytgatgtctaaatcaacaaatatggcctcatggggagttccctaggacctggtgatgaagaaagaaacaatacaagtcttatttacagttgtttctgcaca

SEQ ID NO: 526870 - DNA, 201 bp, Homo sapiens
tcctctaacatataaaatgtacagatcaatacttgtttaaattgaaatatttaattcactttatgaattatcttggaaatgtatgtatattgagaatctgycatatgtgaacaatcagtgaaataaacactgacctagaacaagcttttattatagattttattaaatacattctgtacttgagattccctgctgatagcc

SEQ ID NO: 526871 - DNA, 201 bp, Homo sapiens
aaagctgatgggttttggagtatttggccataaaagattctgtccaggagacaagacttgaaatgatctatggaaatggaattttcataatgtaaggggamtgtttaggcaagggcactacataaagacagacatggagatagacaaagctgagtatgttcatggaaaaataagactcagttcagtcaaatgacaggttaa

SEQ ID NO: 526872 - DNA, 201 bp, Homo sapiens
ataggagcagatgaaaatcactaaagctgtaggagtcggggaagaggagagtgaagagaagctacggcgagttcatggtccatgaggtggaaaaggaaggkaggacctttataccatgttaatgaatttgatttttggactacaaacaataaaacgccatctgaaagcttaaacaaagggatagcatattcacagacgtat

SEQ ID NO: 526873 - DNA, 201 bp, Homo sapiens
gataaagcttgagcaggtcttgaaggaacaaattacattgcatgagatgctcctgacccatactcctgctcccctgctacattgatgtctaaatcaacaartatggcctcatggggagttccctaggacctggtgatgaagaaagaaacaatacaagtcttatttacagttgtttctgcacaatatgctggtaccacccat

SEQ ID NO: 526874 - DNA, 201 bp, Homo sapiens
tgtcaactcagtcctctaacatataaaatgtacagatcaatacttgtttaaattgaaatatttaattcactttatgaattatcttggaaatgtatgtataytgagaatctgtcatatgtgaacaatcagtgaaataaacactgacctagaacaagcttttattatagattttattaaatacattctgtacttgagattccc

SEQ ID NO: 526875 - DNA, 201 bp, Homo sapiens
ggaaaacctatagaagaattaatcctaaatgattagcactagttataattaggagttcagactaaaaggaaatggatagggaagaggagatgattaatttyactttagaaactcctatagtgctaaaattaaacaaaatatattactttggtttctcaaactaccaaaattaaaacagtaaataacaatatattatagtat

SEQ ID NO: 526876 - DNA, 201 bp, Homo sapiens
cacccagcctatgttttctttaatgaaggaaaacctatagaagaattaatcctaaatgattagcactagttataattaggagttcagactaaaaggaaatsgatagggaagaggagatgattaattttactttagaaactcctatagtgctaaaattaaacaaaatatattactttggtttctcaaactaccaaaattaaa

SEQ ID NO: 526877 - DNA, 201 bp, Homo sapiens
acaaaactcagctgaagtgtttgccgagagcaaaggaaatatggaatcagtagttgaaggaggtaattataaataccacctacaaccacatgaccagttayagaaacaagccctgtaatacttataaatattttttccttattttgctgtaaatacacttgcatatatattaaccaattcttttttttctttttgattccc

SEQ ID NO: 526878 - DNA, 201 bp, Homo sapiens
tgggaggattacctgagcccaagaacttgagaagaatacagtgagctgtgattgcatcactgcactccagcctgggcaacagagtgaaatcctgtcccccmaaaaaaaaaaagacttggtccatgttattaaggcaaagaaaattgattcgattatgcagacgcattatgaaactaacttacacaaaagttctcaaaaaac

SEQ ID NO: 526879 - DNA, 201 bp, Homo sapiens
tcacaaaagtttaatggcttaggccaccatttgacaacattttatataacaggtaacacaccagacacgagcggtaacttgattattcatttaataaagtytaattttcagaattcaataatttaaatgttttacccttttcctgtttgtgtaaaatcactgtcctagcaaagcgattcacattctataaaactttagcgc

SEQ ID NO: 526880 - DNA, 201 bp, Homo sapiens
gttcgtatggtttaaataataaaaaaatcaatttacctaaatgacaaattaaacagcaatttttaactttatagacggatgtaaaatcaaatccttaaaamaattcctctagaaaatgatttaagttatatgcaacatttccaataacagccaaagtacatagaaagtttatgttacaattcaatttttcctccataacaa

SEQ ID NO: 526881 - DNA, 201 bp, Homo sapiens
cctttttcggttgccatctcccttcccactttattgttaaccacataaatttgaggaaagggaagggaagaacatgaaattcctctttaaaccctttcttmtatctcacacctataacaaccacatgcatgtaccttactacttacagaaaattccctgatattttctactgttgtcatcacctacaaaaggattgactta

SEQ ID NO: 526882 - DNA, 201 bp, Homo sapiens
aaacacatttactaatttatataaaaacaaaatgacaagaagcgacttgaaacacaaatgttaaaattttcctccttttcattttactttttaaacaatayagggcacatttttcaaaagcataatttggtattattttctctatgtctttgagtatatgttagcttccaaataaagcaatttgttcaagaaaataggaga

SEQ ID NO: 526883 - DNA, 201 bp, Homo sapiens
aaatgaaaactataataaagagacaaatggcaattctacaatatactacatatactacaatatatactacatatatactacaatatatactacatatatactacatatatactacatatatactacatatactacaatatacaatatactacaatactgcaacatttaaaaagaaaaattcattggataggattacagtag

SEQ ID NO: 526884 - DNA, 201 bp, Homo sapiens
taataaagagacaaatggcaattctacaatatactacatatactacaatatatactacatatatactacaatatatactacatatatactacatatatactacatatatactacatatactacaatatacaatatactacaatactgcaacatttaaaaagaaaaattcattggataggattacagtagactgcaaagaag

SEQ ID NO: 526885 - DNA, 201 bp, Homo sapiens
ataaagagacaaatggcaattctacaatatactacatatactacaatatatactacatatatactacaatatatactacatatatactacatatatactacatatatactacatatactacaatatacaatatactacaatactgcaacatttaaaaagaaaaattcattggataggattacagtagactgcaaagaagaa

SEQ ID NO: 526886 - DNA, 201 bp, Homo sapiens
taaagagacaaatggcaattctacaatatactacatatactacaatatatactacatatatactacaatatatactacatatatactacatatatactacatatatactacatatactacaatatacaatatactacaatactgcaacatttaaaaagaaaaattcattggataggattacagtagactgcaaagaagaaa

SEQ ID NO: 526887 - DNA, 201 bp, Homo sapiens
ggaaagatgtcttactaagaacggttggttgcaatcttactatttcatgtaataactgcttttctcctgacccattcggctgcaggcatttcagcaagggsactaacacagaacaacagcaaaggtattactacttggcactgtggcatttacctgctgtcttttccattctgcaatgctacgtatcgatctgtggtcctt

SEQ ID NO: 526888 - DNA, 201 bp, Homo sapiens
agggcagatcacctgaggtcgggagttcaagaccagcctgaccaacatggagaaaccccgtctctactaaaaatacaaaaaattagccgggtgtggtggcrcatgcctgtaatcccagctaattgggaggctaaggcaggagaattgcttgaacccgggaagcagaggttgtggtgagcagagatcgcaccattgtactcc

SEQ ID NO: 526889 - DNA, 201 bp, Homo sapiens
tgttaggctaaagattaattctgctattatctttatcttaagtatggttaagagaagtgtggctaaatctcatacttaaaatgatggccaagctgacaagsagtgggttttaatgacttccaatgtgttaacttagctaaactggaactccgtttcccagaattcccttctctctatggtcctaggctaacatcagccaca

SEQ ID NO: 526890 - DNA, 201 bp, Homo sapiens
ccagcctgaccaacatggagaaaccccgtctctactaaaaatacaaaaaattagccgggtgtggtggcacatgcctgtaatcccagctaattgggaggctraggcaggagaattgcttgaacccgggaagcagaggttgtggtgagcagagatcgcaccattgtactccagcctgggcaaaaagactgaaactctgtctcc

SEQ ID NO: 526891 - DNA, 201 bp, Homo sapiens
aagagccataagaaagaaaggttagtgatttgatccaagataaactagcttatccatagctttttgctttctattcctatagttgcttttcttttcttttmttttttctttttttttttttggagacggagtctcactctgttgcccaggctggagtgcactggtgcgatcttggctcactgcagcctccacctccagggt

SEQ ID NO: 526892 - DNA, 201 bp, Homo sapiens
ataatttctgcagaaaaaagtacccaagacagtttacaggtaagtaggtaccaaaatgagatgtaccagtaagagccataagaaagaaaggttagtgattkgatccaagataaactagcttatccatagctttttgctttctattcctatagttgcttttcttttcttttcttttttctttttttttttttggagacggag

SEQ ID NO: 526893 - DNA, 201 bp, Homo sapiens
cctcccaaagtgccaggattacaggcgtgagccactgcacccagccaattagttgcttttcatttctaaaagcaggctggacactatctttacaaagcaayaatatccctccttaagaaactgaagaggtggtaatagaaagataaatctaacccagaacagagcagtagctaaataatctttccctttagttcaactata

SEQ ID NO: 526894 - DNA, 201 bp, Homo sapiens
taagaaagaaaggttagtgatttgatccaagataaactagcttatccatagctttttgctttctattcctatagttgcttttcttttcttttcttttttctttttttttttttggagacggagtctcactctgttgcccaggctggagtgcactggtgcgatcttggctcactgcagcctccacctccagggttcaagcga

SEQ ID NO: 526895 - DNA, 201 bp, Homo sapiens
ttaaaactatttaataattatcaatagcaagattcaacttcaaatttgtaattatgtataattctagtagtcgctcaatttagaaaatatatacattaacyttgtagttagcaaataaacaccaatttccaaataagcaatttcttttagaagttatgctaacaattcatgcacatgataaaatatcacagcaaattaaca

SEQ ID NO: 526896 - DNA, 201 bp, Homo sapiens
ctcaacaaaataagaatggaaaaaaattacatcaacataaaaaagaccgtatataaaaagaacattgatgcaaaaatcctcaatagaatactggcaaaccraatccagcagcacatcaaaaagcttatccaccatgatcaagtgggcttcatccctgggatgcaaggctggttcaatatatgcaaatcaatcaatgtaatc

SEQ ID NO: 526897 - DNA, 201 bp, Homo sapiens
attcaagatggattaaagacttaaacgttacacctaaaaccataaaaaccctagaagaaaacctaggcattaccattcaggacataggcatgggcaaggayttcatgtctaaaacaccaaaagcaatggcaacaaaagccaaaattgacaaacgggatctaattaaactaaagagcttctgcacagcaaaagaaactacca

SEQ ID NO: 526898 - DNA, 201 bp, Homo sapiens
cagagccacttggtgaaggagtacttatctttcaagcctcatttcaaaggctttcttgagcacctggcccgcctctccttccttctttactctgtgttctmatcagctggatgacaaggaactgcaactttctactatacttgtttgtctctatgtctgtctcccacttcaggctctgagtcactccagagcagggaacag

SEQ ID NO: 526899 - DNA, 201 bp, Homo sapiens
tggtactgtggctcagcttctaatttgtttaccacctggactaacctgatacagtggtcaaaacagtattaaataacactttctcaggagaaagattcagyctaaaactaaaggcactgtcttaatctcttttccgttgctataacagaatacggcagactgagtaatttataatgaacaaaaatttatttagctcatgat

SEQ ID NO: 526900 - DNA, 201 bp, Homo sapiens
aaaacattaagccattcgtgagggctctgaccttatgacccaatcatctcttattaggccccatctcccaccactgttgcattgggtattaagtttccaayacacaaacttttgggaggcacattcacaccacagcaggcaccatatggtaaactcctttttcggttgccatctcccttcccactttattgttaaccacat

SEQ ID NO: 526901 - DNA, 201 bp, Homo sapiens
gctgatagaacccagcttacactagaggtcactacaaaaaaatcaatgaaacacataggaatacagcaagagaggataagagggacaaaaacctacaagayggaaaatagttaacaaaatggcaatagtaagtccttccctatcactaattgcaccaaatgaagatggattaaacactgtaatcaaaagacagaattgttg

SEQ ID NO: 526902 - DNA, 201 bp, Homo sapiens
ttttcctccataacaaacactgaatcttattagaaaggtcttaatgtgatggtgactatcatgtattttcacatggtgctatatttttagaaactcttaaygaacaaaatgagatgtaaccaacacattacccaggccggtaagcttcagagccgtctttaatggttggcagtgtgactttaataggatgaccagaagtgg

SEQ ID NO: 526903 - DNA, 201 bp, Homo sapiens
tctatctcacgacttcctttccaaagtactctgtttcccctagagtctaaatttttgttgcagttaagagaaatattttgcacaatgcttaatgcacaatyagtaatcaagcactaaactataaacctatttttcttcactttaaaattaattctggcttaaccatgagaaagtactggctttttgaaatggccttaaata

SEQ ID NO: 526904 - DNA, 201 bp, Homo sapiens
ggtctccacatatgtgttcaaagactatatggcaatctttatcagaacctcccaacagaccagctctaaggcactttcttgctttggcattctatctcacracttcctttccaaagtactctgtttcccctagagtctaaatttttgttgcagttaagagaaatattttgcacaatgcttaatgcacaatcagtaatcaag

SEQ ID NO: 526905 - DNA, 201 bp, Homo sapiens
tttacttttgaacatgttctgtttcagagtctataacgtatctaagtggagaggctgagcagcagttggatatgagtctgcagttcagcagaaagatgtgsgctagagatacagttaggagttgttcatacaggacggaatctaatgtcatgagcctgactgagatcaccaagagtgtaaggaaaaccagagaaaaaaatg

SEQ ID NO: 526906 - DNA, 201 bp, Homo sapiens
ttaaaaaccataaaacaaaataaaaacagaaaataaacattggtgaggatgtagagaaattgcaacccttgtgcactgttggtggaaatgtaaaatgctgyagctgctatgaaaaacaatatgaagtctcctcaaaaaattaaaaatagacttaccatttgacccagtagaactaccatatgacccaacaatagaactaac

SEQ ID NO: 526907 - DNA, 201 bp, Homo sapiens
gaggaacgagagtttacttttgaacatgttctgtttcagagtctataacgtatctaagtggagaggctgagcagcagttggatatgagtctgcagttcagsagaaagatgtgcgctagagatacagttaggagttgttcatacaggacggaatctaatgtcatgagcctgactgagatcaccaagagtgtaaggaaaacca

SEQ ID NO: 526908 - DNA, 201 bp, Homo sapiens
ttattgcaggcatcccccaagtaatatggaaacaaaaagcctatttcaaacagtcatagaaagaaaccttcatagcttcatcaaagttaatagattattcrtgatacagaaaatcctgtaattaaatttcttgaacaattatccaaatagagatgttataattgcaacttgttaacctatctcacttatgtgatttaagaa

SEQ ID NO: 526909 - DNA, 201 bp, Homo sapiens
ggactgtaaactagttcaaccattgtggaagtcagtgtggcgattcctcagggatctagaactagaaataccatttgacccagccatcccattactgggtrtatacccaaaggactataaatatgctgctataaagacacatgcacacgtatgtttattgcggcactattcacaacagcaaagacttggaaccaacccaaa

SEQ ID NO: 526910 - DNA, 201 bp, Homo sapiens
acaaattcaacagtttcaggctacaaaatcaacatacaaaagtcagttacatttctatgcactaacaaagaactaacctaatggcattttttacagaaacaaaaaaaaagtataaaattcatatggaaccacaaaggaccctgaatggcctaaacaatcttcagaaagaacaaagttagaagcctcacacttactggcttc

SEQ ID NO: 526911 - DNA, 201 bp, Homo sapiens
gtagtcaaactcatcaaagcagaaaataagaatggtggttgccagggtctggaaagaaagggaaatagggagttgctgttcaatatgtacactgtttcagycacacaagatgaaaaatttctagagatgtgctgtacaatattgtgcctatggatgaaattggaggtcattatgttaagtgaaataagccaagtacagaga

SEQ ID NO: 526912 - DNA, 201 bp, Homo sapiens
aaaggttcagaagtagggatagggacggcataccctgttcttcctctaataaagtatcttataccatttcatatgctcttctaaaatctattttttttttttaaaaaaaagggttcacactctgtcacccgggctggagtgcagcggtgtgatcttggctcactgtagcctttatctcctcggctcaagcaaccctcccac

SEQ ID NO: 526913 - DNA, 201 bp, Homo sapiens
aaaagtcactacaggaaaaaaaaactacaagtcaatatccctaatgcatatcaatataaaaattctcaggaaaaaaaaaaacctagcaattcaatttcaayggcacattagaaggatcacgtaccacgcccaagaggcaattatccctaggatacgaggatggcacaacatacaaaaatcaatgtgatatataccacattc

SEQ ID NO: 526914 - DNA, 201 bp, Homo sapiens
aatgtcttctaccatacattacttgtttgggattattatctcttctgtaagctccttgcagggagagactttatcttaaacactacttctatatccccttcccaaccctttacctaaaaaatgaacatgctgagtgcatacttattaattgacaggtgtcatataatagatattttccacagcaattaggagaaaataagg

SEQ ID NO: 526915 - DNA, 201 bp, Homo sapiens
tattatataatattaagcatacttaagtgattaaatgggatgatgagaacagagaaatgaatggatgctctagttgactcatcatagtagttaattctagmtatgtggtaatagttgttaattctagttaacccatcatagcagttaattctagatatgtgagtttaggctaggaaagatatatacaagagttcaaaaaat

SEQ ID NO: 526916 - DNA, 201 bp, Homo sapiens
tactacatatatactacatatatactacatatatactacatatactacaatatacaatatactacaatactgcaacatttaaaaagaaaaattcattggayaggattacagtagactgcaaagaagaaagggtcaatgaacttgaagacagattaataaaatatagccaatcttaacaactgggacacaggaagactgaat

SEQ ID NO: 526917 - DNA, 201 bp, Homo sapiens
agaaataatacccatgggcctataggctgcagttggccaacccttggtgtaacatgtcacattttgggatacaggtttaaattgttctcaatgattttttwaaaagatctcctagccctcaacattaaacatgatcatttatacacaatacatttatatgtcttaaataaaaaatcagaatatacagcatatattttatat

SEQ ID NO: 526918 - DNA, 201 bp, Homo sapiens
aattaggaaatgaggaagtcaagaggtccctgtttgcagatgacatgattgtaaatttagaaaatcccatcatctcagcccaaaatctccttaagctgatragcaacttcagcaaagtatcaggatacaaaatgaatgtgcaaaaaatcacaagcattcctatacaccaataacagacaaacagagagccaaatcatgaat

SEQ ID NO: 526919 - DNA, 201 bp, Homo sapiens
tgttctcaatgatttttttaaaagatctcctagccctcaacattaaacatgatcatttatacacaatacatttatatgtcttaaataaaaaatcagaatayacagcatatattttatattacatatattatacattctgaatatattatatattctgattataagatatccaccaaaacaaatattttcaaaaattacatc

SEQ ID NO: 526920 - DNA, 201 bp, Homo sapiens
gaggctgaggtgggtggatcacgaggtcaggagatcgagaccatcctggctaacacagtgaaaccccatctctactaaaaatacaaaaaattagccaggcrtggtggcgggtgcctgtagtccccgctactcaggaggctaaggcaggagaacagtgtgaacccaggatgcggagcttgcagtgagccaagatcatgccac

SEQ ID NO: 526921 - DNA, 201 bp, Homo sapiens
gtagttagtttctaagtagttacttagcagatgttaccagtttctcaagcttacaatgaggattaaataaaataatgtctaaaaaagcattcaacacagawgttgttgtcagtgttgagtaaatgatggctgctattaagtagttactaagtagatagaaactacttacctactttctaagcaaattagtagattatgcct

SEQ ID NO: 526922 - DNA, 201 bp, Homo sapiens
atgtagggtaataaattttcatcctagttgcattttagctgaaatgttctataaatgtttcaagagaagagtatattctgttttgagagtatacgactctrtacatttccattgagtaatacttattttgcttgttcaagttttgcttattcttatttctatagttttatcattagagatgcttcttaaaaatcatctatt

SEQ ID NO: 526923 - DNA, 201 bp, Homo sapiens
ttaagatcacggtgaacaatgtacttttgatgacaatactgtacagcagatacaatctggaataaacatttggataaaagagtcaaattattaaaaaaacrcaattttccccaataatcacctccaatttagataaattactaattcggatttcaaggtaatatttaataaatatgcaatgcttttagttcagaaaactat

SEQ ID NO: 526924 - DNA, 201 bp, Homo sapiens
aaagtctgtccaatacaaattttacataaaccaatgaagtacatgtttgttgtttgacaaaacaaaccaaattgaatactttggaaatactagataaaagytgctagactgctgtccagctaggtgtgggcaagataaatgcaaaagactggaataaaatctaggcttctgctctgattgctgcccgagtgtcattcaatt

SEQ ID NO: 526925 - DNA, 201 bp, Homo sapiens
gttgtgtgaacctcatgcatatgtaaaattctttcatggtaaccaaaagagttaacgttaaaagtcgagggaaaaactttcccagaaaatggaggtactgkgtgacaggagagagctcatgtaacccgagtctgggtggtctcaggcatggtataaagaactaggccaaccaactgcactagacatagaaactagctgaat

SEQ ID NO: 526926 - DNA, 201 bp, Homo sapiens
agtttctaagtagttacttagcagatgttaccagtttctcaagcttacaatgaggattaaataaaataatgtctaaaaaagcattcaacacagaagttgtygtcagtgttgagtaaatgatggctgctattaagtagttactaagtagatagaaactacttacctactttctaagcaaattagtagattatgcctgaattt

SEQ ID NO: 526927 - DNA, 201 bp, Homo sapiens
agtctttagcctgagcttttgggctagggaagcctttgtttcctccccactcccagttatattttgttgctccaacctccctccccccgacccccgctctycataggcaatccaagaccaggggcttgccatgtagccagccctcacagaacagtgcatatacaagtacacactcacatttcagcatttccttctgttcct

SEQ ID NO: 526928 - DNA, 201 bp, Homo sapiens
tagacaaagcaataaagacagccctggcctgccaagagactgtgtcttagttcagcacctgctactggccaagctacctacttaaatgcaggaagaggacygatatcaatatgtacagttggccctctacatctgtagtgtcccacatccatggattcaaccaactatggattgaaaatattcagaaaaaaaaattccaca

SEQ ID NO: 526929 - DNA, 201 bp, Homo sapiens
ctgtatctacatagcatcacctcatattcttaaagtactccactatttccagggaatgaatgaatcttaactgtatacatttactaaacatccaatgagtkgctgctatgtgcacagcactgtgctaaagtattgtaggaagaggaatgtattttgttgacatactcttgctgtttttaatccagcaaggtaagcaattct

SEQ ID NO: 526930 - DNA, 201 bp, Homo sapiens
ccattctgtcctgcttaggacctgaatcatgcctttgtgcagcatacacatgctgtataggctttccacccattagtcacttagtagccatctcacttatyagataggctgtctcggcatcacagtgcttttatgtttgagtaactctattttacttcgtaatggtccaagtgcaagggcagtgatgctggcaattaaggt

SEQ ID NO: 526931 - DNA, 201 bp, Homo sapiens
atatatcttttgaaggctaatttcttgactgcccaggtaccttcccctcatttattaatatctacctaaagctaatcaccagaaaataagaaatccagggmagatctctaacaactggaatctcttaagaatactgctgtgctggattggaggcttttccagcagtcatcatcacatgatttttttttttttttttaaaga

SEQ ID NO: 526932 - DNA, 201 bp, Homo sapiens
ggagcgcaagaatttaatgtagtcatccctgtggtacttggtcatctcctcagtactgggtttgtgagggtgacagatttctattgttcagtggagaccayagctgggcagcaaattgtgagtagtagatttggtgaggcttcattggatggtcttgtctataatattaatttccaacatccccgtcgtagtagtaacaga

SEQ ID NO: 526933 - DNA, 201 bp, Homo sapiens
taatatgataaccctccaaatctagagaattttggccaattgaaaagtaccacatcttaagcaaatgtctaagatatctcttcctctccaagactcccctmaacccctgcctaactctttattttccagctggctgcatgaaagaaagagaccgaagctaatggcagagttttctgcatgagctgcatgaggcaaaaggaa

SEQ ID NO: 526934 - DNA, 201 bp, Homo sapiens
ccagagtttgctagacttgtgtgttaaattaggaaaataagccaggagtgaaggcctgagatatgtcttctatatcacagctattctagttgttcagaggyctttgtttccttcttggttcttggctttgttccagataactaaagtagtaaacaatcttcaattctttggagatatttacttttcaattgggtctttcct

SEQ ID NO: 526935 - DNA, 201 bp, Homo sapiens
atagcatattcacagacgtattttgcatccttgacaacttttaaactctatgtattacattttaaactctctctctctcgcgcgcgcgcgcgcgtgcgtgygtgtgtgtgtgtgtgtgtgtgtgtatacgtatgtaaagtggatgcagttggaaggctacaagaagataacagtgactttgtctaaactggtcatgataga

SEQ ID NO: 526936 - DNA, 201 bp, Homo sapiens
taaaagcaaaccctcttttcaaattgtgaaagcagcattgctgatcccaaaaggaaaggtagtcttgttaaacctgtcaccatatactttacaggtagttmactataatttggtactgtggctcagcttctaatttgtttaccacctggactaacctgatacagtggtcaaaacagtattaaataacactttctcaggaga

SEQ ID NO: 526937 - DNA, 201 bp, Homo sapiens
aaggttcagaagtagggatagggacggcataccctgttcttcctctaataaagtatcttataccatttcatatgctcttctaaaatctatttttttttttwaaaaaaaagggttcacactctgtcacccgggctggagtgcagcggtgtgatcttggctcactgtagcctttatctcctcggctcaagcaaccctcccacc

SEQ ID NO: 526938 - DNA, 201 bp, Homo sapiens
tacaataggtgtttgttctttatttattaattattattattatattttttttctgagatgggagtcttactgtccacccaggctggagtgcagtggcacartctcggctcaccgcagcctccggctcaccacagtctctgcctcccaggttcaagcaattctcctgcctcagcctcccaagtagctgggactacaggtgcc

SEQ ID NO: 526939 - DNA, 201 bp, Homo sapiens
taggcaacattacaaattggaaccacttcctcccagcatcagcataggcaggttaaagctcttgacaaattccatacacttggcatgcccccctcaaccctttttttttttttttgagatggagtctcactcagttctccaggctggagtgccctggtgcaatcagctcactgcaacctccgcctctagggtgcaagcgat

SEQ ID NO: 526940 - DNA, 201 bp, Homo sapiens
aaataaaataaaaataaaaaataaataaataaaataaatacatgtcgagggacattccaagaaggccgaacaggaagacctctggtctgcagctcccagcrtgatcatcccagaagacaggtgatttctatatttccaactgaggtacctggttcatctcactgggactggctggacagtgggtgcagcccacggagggcg

SEQ ID NO: 526941 - DNA, 201 bp, Homo sapiens
tggtatgcgagtcccaagctagacttcaagaggccttgttgtgtctcaacttgctgtctgccatcaccatgagaaggacttatccagactgacagcaggaygatgagaaatacatggagcagagtcactgccagttaagccaagatttaatcaactgatccccagctgactctgactcatgagaaatcataaatggttctt

SEQ ID NO: 526942 - DNA, 201 bp, Homo sapiens
tcctctggaatcacctgcatttggacccaggtttgtggggcagcattctcaggttctcaaacagtcgctgtttatcttctccaagtaccattcgtgttctkgttagtcatactggaaggactgatgtggagcctgaaatctggtccaaactattccaagtagtcgctgtatggaagctcattagggatctctgtatccagg

SEQ ID NO: 526943 - DNA, 201 bp, Homo sapiens
ttaagtatgactgactgggagatgctactgcctaaatgggaaaggtcaaatgctgaatgttctaaacacatgagaattaatgaagacttgatctgcttttycttcagaacttctaaaagaaagcaaatctatcaacatacatgtaaatcactcaaaaaacaatcacacacacactgtactggctacatttagtgagtcttc

SEQ ID NO: 526944 - DNA, 201 bp, Homo sapiens
gaattaatgaagacttgatctgctttttcttcagaacttctaaaagaaagcaaatctatcaacatacatgtaaatcactcaaaaaacaatcacacacacastgtactggctacatttagtgagtcttcatctttattttcacgggttaaagaaaacaaaattgtatcatttttatatgcctatttggaaaagcaatacttt

SEQ ID NO: 526945 - DNA, 201 bp, Homo sapiens
attatttcattttaaaaatatttgttattgctgatgagaactctaacttttgttactttggaaatcatgttttctctgttattaaaattttctttctattstgagtttgccattccataggtatgaatctccttttatttattctgctggtacttgctgtgcatcaatctgaagacatgtatctctctccacttctggata

SEQ ID NO: 526946 - DNA, 201 bp, Homo sapiens
ctagtaaagggaagccacagcctggtcaatcaaaaattacatttggctttgtatttggggcctacgtttcaaacaaaatgatgaagtgtgttttgttggaytgctcttttaaattctccctgtcatgtagtctggataaaattccatctcactacttccatccacattgatttatttctttcctttcctatactctgtgtt

SEQ ID NO: 526947 - DNA, 201 bp, Homo sapiens
ctcaggggtctcagggaggtgtgggccttggtctgagtggcgtgccctcaggtcagcagaggagaatgtgcctggaatctgggtgattatccagagtgagkgctgagggggcctctcactctgacacagaaaggatgccacccctgcctgggcctacccaggactgacaacagaaatggagctccatggggtcccttggtc

SEQ ID NO: 526948 - DNA, 201 bp, Homo sapiens
actgtacataggtccttgccaagtggacttctccaacatggctatttactttcttaagccagcaagtatagtctctagagcaagtctgctagcaagatagwataatataatataatataatataatataatataatataatataatatgatataatcatgacagtgaaattccatcaccttttccctattgcattggttag

SEQ ID NO: 526949 - DNA, 201 bp, Homo sapiens
attgcattggttagaagcaagtcataggtcctgttcacaatcaaggggaagggattatgcaaaagtgtgaacatcagaaggcaagaatcatgggggttgcytcaaagtctgtccaatacaaattttacataaaccaatgaagtacatgtttgttgtttgacaaaacaaaccaaattgaatactttggaaatactagataaa

SEQ ID NO: 526950 - DNA, 201 bp, Homo sapiens
tctccttcagcagttttggacaaggagagagaaaaaaacataagcgataacaagaagatgtgcgtgggtttgggtgtgtgttgactaaaaatgataggcasttgtcgaagaatggttgctgtaagaaggaacattaggatgttttacatggtatattgagtaaggataatggaataccagattcctattccatcaagcatc

SEQ ID NO: 526951 - DNA, 201 bp, Homo sapiens
ccagactccacacatccacttcaggcccatcatacttctttccttggaaaagctcgggagcagcatagggtgggcttccacaaaatgtgtccaatttgttmccaactgtaaattcattactaaaaccaaagtcagcaattttaatattcatatcaccatcaaggagaaggttttcagcctaagaggaaaataatagaaaga

SEQ ID NO: 526952 - DNA, 201 bp, Homo sapiens
atggcttagacaatcgtcattctagttacacccaaagtgtcatagtcaggggccaaatgcacatggttttctctccatcagacctgctcaccagtctgacraagttgcccttggtctcatcaatgtcacaggacttcgccatcgcttgcttgatcttgaggcagaaggagcacattgtggtcattgggagcttgacaaagg

SEQ ID NO: 526953 - DNA, 201 bp, Homo sapiens
ataatcacctccaatttagataaattactaattcggatttcaaggtaatatttaataaatatgcaatgcttttagttcagaaaactatacacattaaagtsatgaaactttcactgttaaatgcagaaaatatggtaaagtaatattctcttgcgaaaatacaataaaatatttctttgtcagaggctgtgaagatttcat

SEQ ID NO: 526954 - DNA, 201 bp, Homo sapiens
gtaatcccaacactttgggaggccgaggtgggtatatcacgaggtcaggagatcgagaccatcctggccaacatggtgaatcctcgtctctactaaaaatmcaaaaaaaaaaaaaaaaaaaaaaaattagccaggcatggtgcatgcacctgtagtcccatctactcaggaggctgagtcaggagaatcgcttgagcctgg

SEQ ID NO: 526955 - DNA, 201 bp, Homo sapiens
cttgggaaagacagagtaggagtcgcattgctgtgtattccagctagcacaacaggcctgagtagttctagatgccacttaaaaatcactcaatttgccagagtaacccacaactaaatccaggaaaagtagaaaagctatgtgggccatggacagggacactgtgtacaattacccagtttgtgcattttaagtgggttc

SEQ ID NO: 526956 - DNA, 201 bp, Homo sapiens
cagaattttaattgatcagaatcttatattaacaagattatcccctgcctctctctaatttagatttcagaagtaaaagacaaagcatcaaaaatgaactmattacagttttagcttatcctcctataatagcagccagcagtttggaagcaataggagagctgggtttctattcactccctcctttgtgagctggtggta

SEQ ID NO: 526957 - DNA, 201 bp, Homo sapiens
cagctttttaaattctaggatcatcatgtcatttcctttttagcttttagacatctcattgggatgtcaagtattttgtaaaattattgctagcagcactrtaacaatttaagctaacttcttaaggtcttcctatgaaatcgtagcacagaaagagatctgaatataattaaatgaatatatattagatgatttataact

SEQ ID NO: 526958 - DNA, 201 bp, Homo sapiens
aaatagcaccactcctgggggtggcaggcggcagggggtggagtgggcaggtgggtaagagaaggttacccagtcacccagtgacaggttgattattttakactactttcataatagaagggaaggtgttttgtctattctcattggaacagatacttgctacagacatgtatttgtcttctctgtccacaatgctatgac

SEQ ID NO: 526959 - DNA, 201 bp, Homo sapiens
ctcctcacaaagaaacacttgaattgtcagctggatttggatccctgttatgaaatgaactgtgcccccctaaattcatatgttgaatccctaatgcccartgtgactatacttggagacagggaattcaaggagctaatgaaggttaaataaggtcagaagagtggggttccaatccaatatgactggtgtcctaaaaag

SEQ ID NO: 526960 - DNA, 201 bp, Homo sapiens
tgagttcaagtcctgagtatcttgttaatcttctgtctcggtgatctgtctaatactgacagtggggtattaaagtcttccactattattgtgtgtgtgtgggggggggggggtctaagtctctttgtaggtctttaagaacttgttttatgaatctgggtccttctatattgggtgcatgtatatttaggatagttagct

SEQ ID NO: 526961 - DNA, 201 bp, Homo sapiens
agttcaagtcctgagtatcttgttaatcttctgtctcggtgatctgtctaatactgacagtggggtattaaagtcttccactattattgtgtgtgtgtggkggggggggggtctaagtctctttgtaggtctttaagaacttgttttatgaatctgggtccttctatattgggtgcatgtatatttaggatagttagctct

SEQ ID NO: 526962 - DNA, 201 bp, Homo sapiens
tcaagtcctgagtatcttgttaatcttctgtctcggtgatctgtctaatactgacagtggggtattaaagtcttccactattattgtgtgtgtgtgggggkgggggggtctaagtctctttgtaggtctttaagaacttgttttatgaatctgggtccttctatattgggtgcatgtatatttaggatagttagctcttca

SEQ ID NO: 526963 - DNA, 201 bp, Homo sapiens
aaagggggtgttacagcactgatttcttatatactgtactagtcactgtgctgggcactggcaacacagactaagggagacaaagtcaggcaattagatgmtatgtgataggtactgtgacatgtgaaggatgcacagaaaatccaaggatagtgacaaaggtatgctttcctctcgcttcttcatgccattaacaatgat

SEQ ID NO: 526964 - DNA, 201 bp, Homo sapiens
ctaactacttgtatagtgtccagcagcacagttaggcaataaaatagacagctctaatattattattaaatatatgttaataataacgatttttttttttaaaaaattacactcagaagcttaccttaagatcacggtgaacaatgtacttttgatgacaatactgtacagcagatacaatctggaataaacatttggata

SEQ ID NO: 526965 - DNA, 201 bp, Homo sapiens
atccctagttcctgaaaagttctctccctacttaggagaagacatagtcatgacccagtctgtggtatagaaggcctcttccatcccatcgccgtggtgawtatcaatgtcaatatacagcaccctctggtgataggttagcagttccaggatggccaagacaatgtcattgatgtaatagaagccagatgcctcaggctt

SEQ ID NO: 526966 - DNA, 201 bp, Homo sapiens
tgtccctgtctgacagctccgaagagagcagtggttctcccagcatggtgtttgagctctgaaaatggacagactgcctcctcaagtgggtccgtgacccycatgtagcctaactgggagacacctcccagtaggggctgacagacacctcatataggtggctgcccctctgggacgaagcttccagaggaaagatcaggc

SEQ ID NO: 526967 - DNA, 201 bp, Homo sapiens
ccctcattttatatcatacacaaaaactatctcaaaagggattaaagatttaaatttaagacttgaattataaaatccctagaagaaaacataggagaagrgcttcatgatattggtcttgacaaagatttcttgtatatgatatcaaaagcacagccaacaaaagcaaaaatagacaatcaggactaaatcaaactaaaa

SEQ ID NO: 526968 - DNA, 201 bp, Homo sapiens
gtaatccatcacataaacaacaaacaatgaaaaccacgattatctcaatagatgcagaaaaggcctttgacaaaattcaacagcccttcatgctaaaaactctcgataaaccaggtattgatggaacgtatctcaaaataataagagctatttatgacaaacccacagccaatatcatcatactgaatgggcaaaaactgg

SEQ ID NO: 526969 - DNA, 201 bp, Homo sapiens
atctcatgaagatagagagtagattggtggttaacaaaggctagaaagggttagtaggaaggggaggatgaagagagattgattaatgagtataaacatayacttagaaggaaaaagacctcgtgttcaatagatcactgaggtgactatagttaactaatcaattgtacatttcaaaatagctagaataattttaatgtt

SEQ ID NO: 526970 - DNA, 201 bp, Homo sapiens
tttcgggtatctcttcaggaatcggaagaggcctgaatagcctttaatgtgaaaaggcttaccacataactggtagctctcctgtgtttttccatccctcwtaggtaaaacacaagtactaattttgtcctatcagaagcttctttagtatttactccatgagccagcaactccacttctaagattttagcctacaaataa

SEQ ID NO: 526971 - DNA, 201 bp, Homo sapiens
tacagcactattctagatgtggtttccttgctgaatcaaatcaacacactccagtacctggtgtgtgactgatgaactgcaaatgcttttttatttataaytgttagtaaagaaacatctgaaccagcttgctgcttcatttactatcctacctgggggctatttcaaacctctacccttatgtcataatttagttcaggg

SEQ ID NO: 526972 - DNA, 201 bp, Homo sapiens
agatctccttaagaaagggaagatgtgggggtttaactctgttaataactctgttatttttttccaaaataaagcatagaaagcaacgaagtatggatacwtgaaagggaagagagatatggactacctgcccttagttgtgtgaacctcatgcatatgtaaaattctttcatggtaaccaaaagagttaacgttaaaagt

SEQ ID NO: 526973 - DNA, 201 bp, Homo sapiens
agaatgcttaaccagcttccacaattgtgtaagtataatcccttagtaaaagctttattctgtatcacttaacagaattctgcttccctgactgaactccratgtgataaattaaatggcaacgttcttacttctaaaaggtaattgaacatgagattgtatttctaatttaagtcactattatgtaaacctgaccaaggt

SEQ ID NO: 526974 - DNA, 201 bp, Homo sapiens
caatgggagtcagccttcactcagaagcgttcctcagagttttgaactcttcacctcccaaacagggctaacaggttttaaaaagctattagctattagcrtgctactgattgcttgtcaaaactgagcatctgacccacagagggacagctgcattcactgaccaaattgccttactcaggtatgtgaaccaggaaaagt

SEQ ID NO: 526975 - DNA, 201 bp, Homo sapiens
gtaacactgaaaaaacattcatgatgttccattttttttaaatgtggaaattaccagaaaaatattttatattaaaatatacaaagttggtacaaatctaygaggcttattaaccagactccttaagacaagtagttaaaagacactgagagcttatacatgaagaagcacaaactattcattaaaaatattccattttat

SEQ ID NO: 526976 - DNA, 201 bp, Homo sapiens
gaatggatgctctagttgactcatcatagtagttaattctagatatgtggtaatagttgttaattctagttaacccatcatagcagttaattctagatatstgagtttaggctaggaaagatatatacaagagttcaaaaaatttggatctactcttaagtgctgcctagaatacacttaccccaggtatttacatgacat

SEQ ID NO: 526977 - DNA, 201 bp, Homo sapiens
aaacagcaatctgtagcctccagttagcttctttgtaatctatttttacccaaagtatcacttcctggggttatcactcaggttatcacttttcttctgcytaaataaactatccttaaacattgtgtcttttcaaataccctcaaattaaggaaaacacttcatcgctaattatatatatatatatatatataatatata

SEQ ID NO: 526978 - DNA, 201 bp, Homo sapiens
ataaaatctgaatcaccataaaaattataaatttcattaactaaaagagctcaatagtaagttcaacactaagtttttctattgattagcaaaaaatcaaycagccaaataatttcagctgccttctttcttcttcagttgcttaaatcctgagcccttaaaacctccctttaagtattctttatttttacttattaaatg

SEQ ID NO: 526979 - DNA, 201 bp, Homo sapiens
gggtgaagaactcaatcagctctcaggggtggtcagatatcaagggtgatatctcaccaaactgacttagcaagattctttgctaattcggagttgtgcargcccagtaagggaaggaaggaaatagagggccaaggtcaaggcctagtagagaacaggactctgagcagcctaattaaagtttgtcaagagtctttgtca

SEQ ID NO: 526980 - DNA, 201 bp, Homo sapiens
aggttcagaagtagggatagggacggcataccctgttcttcctctaataaagtatcttataccatttcatatgctcttctaaaatctattttttttttttwaaaaaaagggttcacactctgtcacccgggctggagtgcagcggtgtgatcttggctcactgtagcctttatctcctcggctcaagcaaccctcccacct

SEQ ID NO: 526981 - DNA, 201 bp, Homo sapiens
aaaaaataaaataaagtgaaatattctacatggctttagggatatgctttcaatttaaaattgtaaatatacagccagaagcctcacaaaccattattccyataaaggtgttatcgctttaggttgtgatgacagtatagctcagggctgcttcattaaaaaggcagaatgtctttattgccaagacaacctcatgggtat

SEQ ID NO: 526982 - DNA, 201 bp, Homo sapiens
tgtttcactagctgtgattgttcctgctcttgtctagctttgtctgcattttgacatacataaaatttctagcagtttttgtgaaaatgttgaatcacacrtaataaacacaacatctttctctggcttcttaaaaaattgctgaagaagagtaaaacaaaataacaaaggaaaggatatattttgtttgcaaaatgacta

SEQ ID NO: 526983 - DNA, 201 bp, Homo sapiens
caatgagatgtcaataaatttgataagacagtcacatacctatttacaaaaacataaaacacaaaaatatgagttctaacaatggaaaaagaaaaagctaytgaaataaattgccactaaaaccttctgaaagctactatgctatgcacagcataaatccaaagggagaaattgtaccatatgttcctgcctgcccttatt

SEQ ID NO: 526984 - DNA, 201 bp, Homo sapiens
aaaaattacatctttccttaggattgctacagcatcacttaggagacaacctttccttggaaggactctttgaagtacagtttgggatagctgatctcacyttcctgatcaatagcttaattctcaaatagaaaatgtggcaagaatatcaattcagctcatgctagattaaacagtgaatttaatttggaactacctcaa

SEQ ID NO: 526985 - DNA, 201 bp, Homo sapiens
acaataaaagacagaagaaatcctacagaagttccaggtgaaaaaaactttttaaaaacctttgtctaaggaatagatctaaatgcaaacatatgtgataygttagtgtgaaatttagcacttcatatcaatgaagaagtaataaattattcaacaaatggtattggaacagctagaaaaaataaagctgaatctctagga

SEQ ID NO: 526986 - DNA, 201 bp, Homo sapiens
ttttttttgtatttttagtatagatggggtttcgccacgttggccaggctggtgtcaaactcctggcctcaagtgatccacctgcctcagcctcccaaagygctgggattactggcgtgaatcaccatgaccggcctgtttttgttaatagtaatagtatcatcaaaaggccaactggctataccaagattctcaaataag

SEQ ID NO: 526987 - DNA, 201 bp, Homo sapiens
tatggtttagctgtggccccacccaaatctcatcctgaattggagctcccataactcttatgtgttgtgggaaggacctggtgggagataaacgaatcatgggggggcagtttcccccatactgttctcatggtagtgaataagtctcatgagatctgatggctttataaggggtttcccctttcgcttggctctttctct

SEQ ID NO: 526988 - DNA, 201 bp, Homo sapiens
caaagggaaagaatgaaagcaaatatttcactcagcaaagagatcaaaacacacataaaatctaagtggtcatagttcagtgcctaataacactacctaayttgcagaccaccctcagatggacgcaaagatttatgttatcttgctgttacagaaacacaccccaagatgccatctgttttgacttttaatattgtcaat

SEQ ID NO: 526989 - DNA, 201 bp, Homo sapiens
tatattttaagtctatctacatattagcagcaagaagaaagggaaccatgtcaattcagtccactatgtttttggtactctcccctttttcctggctatayattctccctaggtgaatttactcagtcatgtgactttcaatattatctgtaccatatgacacccaaactttctctctacctatgaccttccttgaatttt

SEQ ID NO: 526990 - DNA, 201 bp, Homo sapiens
acaccaacctggataacagagtgagactctgtctcaaaaacaacaaacaaacaaacaaacagaccaaccgaccaaacaaacaaaataaaccccacaaaacyaaaccaaaccaaaaatcatttaaagaaaaggaggtggaaaaatggtgacagtgggagtcaaatcttgacaaataggttggtcaaagtcatgaattcaaaa

SEQ ID NO: 526991 - DNA, 201 bp, Homo sapiens
cagcctggctgggggaggggaatttgccaatgctgaggcttgagtaggtaaacaaagcagccaggaagcttgaactgggtggagcccaccgcagcccaacwaggcctactgcctctagactccatctctgtgggcagggcatggttgaacaaaaggcagcaggcaacttctgcagacttaaatgtccctgtctgacagctc

SEQ ID NO: 526992 - DNA, 201 bp, Homo sapiens
agtttatgttacaattcaatttttcctccataacaaacactgaatcttattagaaaggtcttaatgtgatggtgactatcatgtattttcacatggtgctrtatttttagaaactcttaatgaacaaaatgagatgtaaccaacacattacccaggccggtaagcttcagagccgtctttaatggttggcagtgtgacttt

SEQ ID NO: 526993 - DNA, 201 bp, Homo sapiens
accgcagcccaactaggcctactgcctctagactccatctctgtgggcagggcatggttgaacaaaaggcagcaggcaacttctgcagacttaaatgtccstgtctgacagctccgaagagagcagtggttctcccagcatggtgtttgagctctgaaaatggacagactgcctcctcaagtgggtccgtgacccccatgt

SEQ ID NO: 526994 - DNA, 201 bp, Homo sapiens
ccccatctgtaggtcaccaacatcaaagaccaaaggtagataaaaccacaaagatggggagaaaccagagcggaaaagctgaaaattctaaaaatcagaayacctcttctcctccaaaggatcgcagctccttgccagcaacagaacaaagctggacggagaacgactttgacaagttgacagaagtaggcttcagaaggt

SEQ ID NO: 526995 - DNA, 201 bp, Homo sapiens
ataaactatccttaaacattgtgtcttttcaaataccctcaaattaaggaaaacacttcatcgctaattatatatatatatatatatataatatatatatmtttcatacctatattaggatgattcagtatcttcattattcgtacttctcgaaataactgttaaagaaaacaggtagatatatttctgttaaaaaaaaac

SEQ ID NO: 526996 - DNA, 201 bp, Homo sapiens
tatcagtgactgaagatcaaattagtgaaataaagcgagaagataaggttagagaaaaaagagtagaaagaaatgaacaaagcctccaagaaatacgggaktgtgtgaaaacaccaaatctacatttcactggtgtacctgaaagtgacagggagaatggaaccaagttggaaaacactctttaggatattatccaggaga

SEQ ID NO: 526997 - DNA, 201 bp, Homo sapiens
tattaacctgaaatgtaaatgggctaaatgccccaattaaaagacacagagtggcaaattggataaagagtcaagacccatcagtgtgctgtattcaggaracccatctcatgtgcagagacacacataggctcaaaataaagggatggaggaagatctaccaagcaaatggaaaacaaaaaaaagcaggggttgcaatcc

SEQ ID NO: 526998 - DNA, 201 bp, Homo sapiens
tacaccaataacagacaaacagagagccaaatcatgaatgaactctcattcacaattgctacaaagagaataaaatacctaggaatccaacttacaagggrcgtgaaggacctcttcaaggagaacaacaaaccactgctcaacgaaataaaagaggacacaaacaaatggaagaatattccatgctcacggataggaaga

SEQ ID NO: 526999 - DNA, 201 bp, Homo sapiens
gaaccaaaaaagagcctgcattgtgaagacaatcctaagcaaaaagaacaaacctggaggcatcatgctacctgatttcagactatactacaaggctacartaactgaaagagcatggtactggtaccaaaacagaaatacagaccaatggaacagaacagaggcctcagaaataatgccgcacatctacaaccatctgat

SEQ ID NO: 527000 - DNA, 201 bp, Homo sapiens
cactcaggttatcacttttcttctgcttaaataaactatccttaaacattgtgtcttttcaaataccctcaaattaaggaaaacacttcatcgctaattawatatatatatatatatataatatatatatatttcatacctatattaggatgattcagtatcttcattattcgtacttctcgaaataactgttaaagaaaa

SEQ ID NO: 527001 - DNA, 201 bp, Homo sapiens
atctgaaagcttaaacaaagggatagcatattcacagacgtattttgcatccttgacaacttttaaactctatgtattacattttaaactctctctctctsgcgcgcgcgcgcgcgtgcgtgtgtgtgtgtgtgtgtgtgtgtgtgtatacgtatgtaaagtggatgcagttggaaggctacaagaagataacagtgactt

SEQ ID NO: 527002 - DNA, 201 bp, Homo sapiens
tctcaaagattattactcctatgacagaaaactacttaccacaaagtgatttagaaccaacttcttgagttgaaaaagttaagtttctaggattaaaaggycattactttttcaaattagaataaggtaataaaaggaactcttaaaatcagaaaaacagaatttaaactgaagtttaaaaagagactatgttacattaca

SEQ ID NO: 527003 - DNA, 201 bp, Homo sapiens
tatttgtggaaagccaaagaaatgtatttaagctgactttgagaaaaatccacagaattttaattgatcagaatcttatattaacaagattatcccctgcstctctctaatttagatttcagaagtaaaagacaaagcatcaaaaatgaactcattacagttttagcttatcctcctataatagcagccagcagtttggaa

SEQ ID NO: 527004 - DNA, 201 bp, Homo sapiens
cattaattctgaatgatatcaattattttagtggagagcagaagatagcaaggtagcagaaaacagcaatctgtagcctccagttagcttctttgtaatckatttttacccaaagtatcacttcctggggttatcactcaggttatcacttttcttctgcttaaataaactatccttaaacattgtgtcttttcaaatacc

SEQ ID NO: 527005 - DNA, 201 bp, Homo sapiens
aagtgtggcccattaagctacaacatgaataagccatgctggtttctgggttctaactcctcttctttctcttgtcttgacaaagtacatcaaattacagwatactgaagacaacactgtcatatgaataatcttgaatttactccagttactttttatgaaattactggcaaatttggtagttttctcttagaatcggct

SEQ ID NO: 527006 - DNA, 201 bp, Homo sapiens
aataggagcagatgaaaatcactaaagctgtaggagtcggggaagaggagagtgaagagaagctacggcgagttcatggtccatgaggtggaaaaggaagktaggacctttataccatgttaatgaatttgatttttggactacaaacaataaaacgccatctgaaagcttaaacaaagggatagcatattcacagacgta

SEQ ID NO: 527007 - DNA, 201 bp, Homo sapiens
tttaattccaataaaacaacaatacacagccattgggttcctatatctcaaagatgtcttgagtatattgtttaatccttagtttcctctccttcagcagytttggacaaggagagagaaaaaaacataagcgataacaagaagatgtgcgtgggtttgggtgtgtgttgactaaaaatgataggcagttgtcgaagaatg

SEQ ID NO: 527008 - DNA, 201 bp, Homo sapiens
ttaattgcaggtgctttgctaagtcccaaacgatgtataagcaagacaacctctaaggaacacattagaacaaggcagttagaagtgtaagataataaagyaggtatttggcctgttggccaccacaacgcaggctgaatttgaagtttgagtcaagccaaattaactgtctgctaaagcaaaaaccaacagttcagaaga

SEQ ID NO: 527009 - DNA, 201 bp, Homo sapiens
attacatttactgatcctggcaagcacagtgtatttacatccactcacatcacctccttttagaaatgaacaaataaacaaaacaaaaaaccccagcaacrgtttgctctcagtaaactgcttgaccaataatagtttcaagtacaaatgttttctggtctgcagatggagatccaaactagaaaattctagcagatagat

SEQ ID NO: 527010 - DNA, 201 bp, Homo sapiens
aagattgccaaatgttctctcttaaaaggatcatccctctgaaatcatggccttcttctcatggtaagttttcccccacatacttgacaaacaaaaagctsgcaatgtcatccattgccaatagatttttatttttattaattttctaagtccatgaaactctgaaatctagaatatctagaagtaaacagaacacaacag

SEQ ID NO: 527011 - DNA, 201 bp, Homo sapiens
caaagggatagcatattcacagacgtattttgcatccttgacaacttttaaactctatgtattacattttaaactctctctctctcgcgcgcgcgcgcgcgtgcgtgtgtgtgtgtgtgtgtgtgtgtgtgtatacgtatgtaaagtggatgcagttggaaggctacaagaagataacagtgactttgtctaaactggtca

SEQ ID NO: 527012 - DNA, 201 bp, Homo sapiens
aaagggatagcatattcacagacgtattttgcatccttgacaacttttaaactctatgtattacattttaaactctctctctctcgcgcgcgcgcgcgcgtgcgtgtgtgtgtgtgtgtgtgtgtgtgtgtatacgtatgtaaagtggatgcagttggaaggctacaagaagataacagtgactttgtctaaactggtcat

SEQ ID NO: 527013 - DNA, 201 bp, Homo sapiens
tccattctgcaatgctacgtatcgatctgtggtcctttcacagacatatgtattccttcttgccatgctacctccagaatacacattgttcttcaagaatwaaaaaaaggcaattaaaaaattataaatatatttgtggaaagccaaagaaatgtatttaagctgactttgagaaaaatccacagaattttaattgatcag

SEQ ID NO: 527014 - DNA, 201 bp, Homo sapiens
gtgacaaaaccaggttatttttatgttctgatgtaaggggctggtcattgtaaatttctgcagctgtttgtgagcaagctggacttttttcagtctctctmaaaatgtctggatggatatcaaagtatccaagctgcctcagaagagaagagctgcaaggggttctgaggtctccttccaggaatgtacaggaaaactctc

SEQ ID NO: 527015 - DNA, 201 bp, Homo sapiens
tatttttcaaataaaaattgcttcctatttatactcttaaacactattttggcacactaaaggactcttacttgttgcctagggacagcacttcttaccaygtttaaatacttacctattctttttgtgtcattgaaatccggatcaggctcagtatatggctttagttcttcctcttcatgaccaacattcatccatcga

SEQ ID NO: 527016 - DNA, 201 bp, Homo sapiens
acactattttggcacactaaaggactcttacttgttgcctagggacagcacttcttaccatgtttaaatacttacctattctttttgtgtcattgaaatcyggatcaggctcagtatatggctttagttcttcctcttcatgaccaacattcatccatcgatctttcattatttgctaggaaataaactctacattatgtg

SEQ ID NO: 527017 - DNA, 201 bp, Homo sapiens
gggatagcatattcacagacgtattttgcatccttgacaacttttaaactctatgtattacattttaaactctctctctctcgcgcgcgcgcgcgcgtgcktgtgtgtgtgtgtgtgtgtgtgtgtgtatacgtatgtaaagtggatgcagttggaaggctacaagaagataacagtgactttgtctaaactggtcatgat

SEQ ID NO: 527018 - DNA, 201 bp, Homo sapiens
gatagcatattcacagacgtattttgcatccttgacaacttttaaactctatgtattacattttaaactctctctctctcgcgcgcgcgcgcgcgtgcgtstgtgtgtgtgtgtgtgtgtgtgtgtatacgtatgtaaagtggatgcagttggaaggctacaagaagataacagtgactttgtctaaactggtcatgatag

SEQ ID NO: 527019 - DNA, 201 bp, Homo sapiens
cttgctggctcagggccagtatgacctggacccgctgccgccgttccctgaccacgtccagtacacccactatagcgaccagatcggtaagggccttgccrggtcaccgaggcctggctgctcagatgtgcctggctcagccagggaccgcactggacacgctgatgggaactctgggggttggtccctggctcaggaggg

SEQ ID NO: 527020 - DNA, 201 bp, Homo sapiens
tattcctgcctggtaagtggctcctggggcagggggtagctcctcttatgtggggctgaggagtagggttagtagggggaattcatagtgagcctttgtcrcgacttatgaccagaactcagctccccagctcccagggccttctgcctgcttggaccacagactggaccagccaaccctggcagcatctggaggcagctc

SEQ ID NO: 527021 - DNA, 201 bp, Homo sapiens
gggtggaagtggggctgagacctcccgtgccctgtccccgcagcctccgccgtgtgtacgtcattaacaaggagatctgtgttcgtacagtgtgtgcccaygaggagctcctccgaggtaggaaggccacctccccaagacctcccctgtccccacacccgcatcattatctggccacctagccacccacctgatgtttat

SEQ ID NO: 527022 - DNA, 201 bp, Homo sapiens
tcctccgaggtaggaaggccacctccccaagacctcccctgtccccacacccgcatcattatctggccacctagccacccacctgatgtttattcaacacrtattatccaccaggcccacttccaggacaccctgagctcccctccttgctacttttcatcctcaaaacactcccatcaccagagttgggggaggggcagc

SEQ ID NO: 527023 - DNA, 201 bp, Homo sapiens
ttccttttattctgtaaaaagttagtggactgcagccctgggggttgcaggctgcggtgcctcaggcccctccttcagcctgtggccacctctggggcacratgggggctccccactgcccagtctgcccctcgggttgggggagtatcccaggcctctctgtgggacctgggcccctgacgggccttctcagcccgtttt

SEQ ID NO: 527024 - DNA, 201 bp, Homo sapiens
ccggcagagccctccctccgtctgatgtctgagcgagcgtcggggccccctgtcccccacctcccaggacgcaggggagtcgggggtgggggaggccgcakctgtggaagaggccagaggtgggggtggggcagcctcccaggcaggtcctggcctcccgcacgccccaaaaccccttcgtctagaagagctcggagatgt

SEQ ID NO: 527025 - DNA, 201 bp, Homo sapiens
cctcccctctccctggactcccagtggggaaaatagaccaaagttggggtttccagctagctctctgaaaggacttcctgggttgcagccgggaggggccstcctggatggaccccgccctcgcagccctccctacagaaggctgacggacctgaggtggccctccactgagctggggctggatgtggggaaccggaggct

SEQ ID NO: 527026 - DNA, 201 bp, Homo sapiens
cgcgcggagcaagtttccgcggctgattgttcccagctgtgcggcgctgcaacatctgggtttctcccgccgggacccctccccctgagcccggctctggrgccggcagagccctccctccgtctgatgtctgagcgagcgtcggggccccctgtcccccacctcccaggacgcaggggagtcgggggtgggggaggccgc

SEQ ID NO: 527027 - DNA, 201 bp, Homo sapiens
ctgaccctgcctccttcctgcccccaatagctgacctctgtcgggacaagttctccaaatgtggcgtgatggccagcagcggcctgtgccaatccgtggcrgcctcctgtgccaggagctgtgggagctgctagggtggtgctggcatcctgagtcctggccctcctgggatctggggccctcgggccctgcctgacctgg

SEQ ID NO: 527028 - DNA, 201 bp, Homo sapiens
gtcagggaggtgacccatgaccagggtggggaagggtctttaccatcgaagaagagtctggatcctctaggaatctgcttgtggggtcctaggctcttatrggcctgaccttgtgacccccgcctccactctccagaagcgcctcgggcccccgttgcccctcccgatggggtaccctacatgctttgcctccccacagca

SEQ ID NO: 527029 - DNA, 201 bp, Homo sapiens
gccttgtcccttgtgacctgaacacctgggtgggccagcagggactgggatgtccctccactccagccctcccatgcctggcttctattctgggtgccacsttctccagggcgaaatcaggggatcaaaggtgagctctgctgtcctgggtgtggccctgggtagagctctcccaccggtctttccccagctgtcctctct

SEQ ID NO: 527030 - DNA, 201 bp, Homo sapiens
gcgcgcggagcaagtttccgcggctgattgttcccagctgtgcggcgctgcaacatctgggtttctcccgccgggacccctccccctgagcccggctctgragccggcagagccctccctccgtctgatgtctgagcgagcgtcggggccccctgtcccccacctcccaggacgcaggggagtcgggggtgggggaggccg

SEQ ID NO: 527031 - DNA, 201 bp, Homo sapiens
ggccttgtcccttgtgacctgaacacctgggtgggccagcagggactgggatgtccctccactccagccctcccatgcctggcttctattctgggtgccascttctccagggcgaaatcaggggatcaaaggtgagctctgctgtcctgggtgtggccctgggtagagctctcccaccggtctttccccagctgtcctctc

SEQ ID NO: 527032 - DNA, 201 bp, Homo sapiens; identical to SEQ ID NO: 317779

SEQ ID NO: 527033 - DNA, 201 bp, Homo sapiens
ccggagcatggggggctagagggcacaggggacagctctggcccgccaaggtgggagttggaggaaagatagtgagtccttaagttgagctcagttctgtrgttgagcctgggccagggacctcctccactcctgggctccagtgccaggttctgtccgggctcccgtgccaggttctgtccgggctcccgtgccaggttc

SEQ ID NO: 527034 - DNA, 201 bp, Homo sapiens
tgtggtttcctgctgagcaggatgcttagggcccaggggctaattgggagcaggtggtggcttggcagaagctgctgagtccaggcggtgatgccggctgrccagggctggggtcccaaggatgggcctgggttcagtgattcacgcagtcagtgccttggacacccagggagccactgggccagagggctgagcacgggt

SEQ ID NO: 527035 - DNA, 201 bp, Homo sapiens
ggagagactcccgcgcttgcgggctccacccggggcggcggggcagggcgggggtgccagtgggtgtgtgggtgtctgaagctcagtgtgccctcccaggyggaatccagccttccctgatgggcctacggattgtttttttggacgaactcagtgtctgcgaccctgcttgtgtataaaggccacgcagcagacagcctg

SEQ ID NO: 527036 - DNA, 201 bp, Homo sapiens
ggcacttcttttcgaccaatcaagtcccagttggttgccccaaaaatcaaaagctgccctttgcactttgacccttcaagtttctgcagagacagagaaaggaaaaaagaattagtgtgtaagtctgcacctagctttccaaggctgtccaatgacagcacgaaacgaaagaaaatcattcagttagcccttatgtcacct

SEQ ID NO: 527037 - DNA, 201 bp, Homo sapiens
attaaagaacggcgggctgaagggccagcactggcactcgagcaggagaggcagatacaccagcttccaatgggagctgcccaagttcatgtgaaaggcaygtgaatacagagcaacaagtgcaagtctcagtggactgagatgcggcaggacagggtgagcgggccacagatggagaccccacatgagcaatgcgtcagc

SEQ ID NO: 527038 - DNA, 201 bp, Homo sapiens
cggagggcaaatgtctggagtctggcacagcagactagacgtcaaaggaaaacagttcctgtgttccagtttctcaatactttggccattgtctagtctarcctgatccaagaccccgggcaagaccttttgacagcttttgacgggctctcctccactgcctaacatgttaaccctttcacccagaaggcacttttacaa

SEQ ID NO: 527039 - DNA, 201 bp, Homo sapiens
tactaaaaatacaaaaaaattagccaggcgtggtggcatccgcctgtcgtcccagctactccagaggctgaggtagaagaatcccttgaacccgggaggcrgaggttgcagtaagctgagattgcaccattgcactcccagtgttgctgcccaggctggagtgcagtggcgtgatctcggcttgctgcaacctctgcctcc

SEQ ID NO: 527040 - DNA, 201 bp, Homo sapiens
acacagatccccaatcccccaccaggggggacacggccgattctataatgtcgcagccagaaggctgtgggcgtacaggcagccaaggggagaaacagaascgacaccggcctaggcccatctgcaagaaaaagcggagaaggagtgacccggatgcttccgaagcacgcgagcgtgattttggatggaggcgggccggtg

SEQ ID NO: 527041 - DNA, 201 bp, Homo sapiens
aacaaaaattcaaccggccactctcggatccctcccgataagagaaaaaccacacatgtaacctgacgtggggaaactgacggagatcttacagtggtgasaagtcagggcaattctagggggttttgcaaccttctccagcaatgaacttttcacccttaggttgtgataaaggcagacagcagagccattaagatgagt

SEQ ID NO: 527042 - DNA, 201 bp, Homo sapiens
gaggcggagcttgcagtgagccaagatcgcaccactgcactccagcctgggcgactgagcaagactccatctcaaaaaaaaaaaaaaaaaaaaaaaaaaatatatatatatatatatatatgtgggctgggtgtggtggctcacgcctgtcatctcagcactttgggaggctgaagcaggcggatcacctgaggtcaggag

SEQ ID NO: 527043 - DNA, 201 bp, Homo sapiens
gcctgaccaacatggagaaaccccgtctctactaaaaatacaaaattagccaggtgtggtggcacatgcctgtaatcccagctactccagaggctgaggcmggggaatcacttgaacccgggaggcggaggttgcagtgagccgagattgcgccattgcactccagcctgggcaaaaagagtgaaactccgttctcaaaaa

SEQ ID NO: 527044 - DNA, 201 bp, Homo sapiens
gttgcagtgagctgagatcgcgccactgcactctagcctggcaacagagcgagactctgtctcccctccaaaaaaaaaagactgcctatctcgtatttgtrttctaagcatctggctggtgactttatacaaggtcaaaacaaagtatttgggggaagtacaattacatccatataacatcactcactttctttggaacag

SEQ ID NO: 527045 - DNA, 201 bp, Homo sapiens
agcaagactccatctcaaaaaaaaaaaaaaaaaaaaaaaaaaatatatatatatatatatatatgtgggctgggtgtggtggctcacgcctgtcatctcarcactttgggaggctgaagcaggcggatcacctgaggtcaggagttcaagaccaaccatggtgacaaagccagccctgtctcaaaaaaaaaaaaaaaaaaa

SEQ ID NO: 527046 - DNA, 201 bp, Homo sapiens
ctctcaggaagtgagaaaagccgagcctcaccgtgtggttagcgccacaggccacgtctcgtacaaccacgtttggtacaggcagaatctgtccatctttygtcttctcaatgaagatggccactcgccggggaactagttcacagtcgtactctatccgctgtgcccgggcgatgaacttcccatctgagttgtgtcctg

SEQ ID NO: 527047 - DNA, 201 bp, Homo sapiens
aaaaaaaaaaaaaaaaaaaatatatatatatatatatatatgtgggctgggtgtggtggctcacgcctgtcatctcagcactttgggaggctgaagcaggyggatcacctgaggtcaggagttcaagaccaaccatggtgacaaagccagccctgtctcaaaaaaaaaaaaaaaaaaaagaaagaaagaaaaagaaaaaag

SEQ ID NO: 527048 - DNA, 201 bp, Homo sapiens
gaccagcctggccaacgtggtgaaaccccgtctctactaaaaatacaaaaaattagccaggtgtggtggtgggcgtctataatcccagctactcgggaggmtgaggcagaagaattgcttgaacccgggaggcggagattgcagtgagctgagatcgcaacattgcactccaacctgggcaacaacagctaaactccagct

SEQ ID NO: 527049 - DNA, 201 bp, Homo sapiens
ctactcgggaggctgaggcagaagaattgcttgaacccgggaggcggagattgcagtgagctgagatcgcaacattgcactccaacctgggcaacaacagmtaaactccagctcaaaaaaaaaaaaaaaaaagcaaaacttaaatgtagggtgtgcactttccatgaggcataaaggggcatcatatgctgaaccctcagc

SEQ ID NO: 527050 - DNA, 201 bp, Homo sapiens
caggattcccccttggcacctgggtggtaagggagcccctgctccccggctaccccacctgctgcttttgtctccgcagtctccccccaaacccactcatsgcatttaatgcaacgctctcccccaccccgcatcagccctggacccccgttcggccccagctcaggggtgccgacctcgggctctagttagccgaatccc

SEQ ID NO: 527051 - DNA, 201 bp, Homo sapiens
cattcccaaccgggcaactgtgtacctttctctaggagtgcacgacacccttcccccacaactccttgttttaaaggatttaacccattaggaagcccatktttcaatctaagccagaaggagctgcgggacaaggcagtcttcactttgaaggtccctttcctgctccagtccctgggctagggttctagaagaggctgg

SEQ ID NO: 527052 - DNA, 201 bp, Homo sapiens
ccaccgaagatctaagtccagctaagcccagggaggctcctgcaaaggctgggacctcgggtgctgcgtcctcaaccctctcggtgaccacggctcaaagragagacctcaagggtgccaggagcacaggtgcctgggctgcattccaggaaagagacctgtccagggaaacggatcaggctgtcgcatggaagcttacgt

SEQ ID NO: 527053 - DNA, 201 bp, Homo sapiens
ctgtcgcctctcttgggtccaggcgagaggagggttccgggaaaggcacctcataactcactcagcgcagcacacacggcggcgagctcgggcacttgacraggacgcaggtggcagtcacagcatccgtgctgacacgcaaggaaggggactcttcggtaatcccaactatttggtaccagagccaagcaaacgtgacta

SEQ ID NO: 527054 - DNA, 201 bp, Homo sapiens
ttagcgtgagacaccaggaaagccagctgagatggtaaacaagacaacccaaacagactgcgatgatcaaaatcatgaggagtgacataccactgggtacrgacacgtccccgagctggcacagctgcccccactcacctgctctgagaaaatgccatccagagtctttacctcctgggctgcagtggaagacttgggctt

SEQ ID NO: 527055 - DNA, 201 bp, Homo sapiens
cccagccccaaacacctgctcgcacagacacgaaaaataaaaactttaatggtgcccaactctctcccagcccccttgccggccgtgcggcccggccggtytccgattcgactgcaaagtgtccagggccgccgccagctccccggcgtccctgcgctctcccctgtctgcttttttttttttttttaattgattttgaac

SEQ ID NO: 527056 - DNA, 201 bp, Homo sapiens
aagaaggcttcgggacacttccaggattcccccttggcacctgggtggtaagggagcccctgctccccggctaccccacctgctgcttttgtctccgcagyctccccccaaacccactcatggcatttaatgcaacgctctcccccaccccgcatcagccctggacccccgttcggccccagctcaggggtgccgacctcg

SEQ ID NO: 527057 - DNA, 201 bp, Homo sapiens
ctgcagtcttggatgtctaaacacaatcttgcttttggaaactcactcaaaataggatacaggagacgcggaagctcacctggcctttctttttagtttcrtcctaacatactgtgttcggagggcaaatgtctggagtctggcacagcagactagacgtcaaaggaaaacagttcctgtgttccagtttctcaatacttt

SEQ ID NO: 527058 - DNA, 201 bp, Homo sapiens
ggcctggacaacacaacgagttcctgtctcaaaaaaataaagaacactgggaggtaaagagaattggggttcgtggtctagggacaggacaatggctacayggttccgcaccagagcactgataagccagggggcagaaatcactaacccacttcactgacagcaaaggagcaggtgtaaccagcatagatctgggaagcc

SEQ ID NO: 527059 - DNA, 201 bp, Homo sapiens
aattttcagagtttacaaatgtgcagagatgactcagaattatctgactagcacagaattgtccttgaaaactcatgggactcaatcgtgttgcaaacctyaatacaataaggggggaatcccaaatgtttttcttctgtgtgttttgggagacaggtggagagaacccaaaggccatgagccaccctgactggcttccac

SEQ ID NO: 527060 - DNA, 201 bp, Homo sapiens
gcaagttcagacagccagagcttaaccgcagtggccttggccttggggagggagtttcctgggtgacctggacatttggtcaagggctcatgaagactgayccatcaagctagctaagcatttataggcaaacccaaccacgccaataaaaatgtatttgtgggccgggcatggtggctcacgcctgtagtcccggctact

SEQ ID NO: 527061 - DNA, 201 bp, Homo sapiens
ccaggctggagtgcggtggcatgatctctgctcactatcactgtcttatgacagcagttctctactgttgacataatcccttccagtggaacatctgtccrtttaaaagtctgagggtcttggccgggcgcggtggctcgcgcctgtaatcccagcactttgggaggctgaggtcggcggatcacgaggtcaagagattga

SEQ ID NO: 527062 - DNA, 201 bp, Homo sapiens
attgtctagtctagcctgatccaagaccccgggcaagaccttttgacagcttttgacgggctctcctccactgcctaacatgttaaccctttcacccagarggcacttttacaaagcatattcccatgtgcaatttgcagggacatcaggagttacagcatttggagatccagttccatccatgactttggacaaggccct

SEQ ID NO: 527063 - DNA, 201 bp, Homo sapiens
ctcacgcctgtcatctcagcactttgggaggctgaagcaggcggatcacctgaggtcaggagttcaagaccaaccatggtgacaaagccagccctgtctcaaaaaaaaaaaaaaaaaaaagaaagaaagaaaaagaaaaaagggcagctccaggcccaatcattctaacctctacagtgtgatcaccccatgggtatgctt

SEQ ID NO: 527064 - DNA, 201 bp, Homo sapiens
ggtgacaaagccagccctgtctcaaaaaaaaaaaaaaaaaaaagaaagaaagaaaaagaaaaaagggcagctccaggcccaatcattctaacctctacagygtgatcaccccatgggtatgctttggcagtacggctcacgcatttctaagattacacatcttcatgacggatgatttccacttcaataggaacctttaca

SEQ ID NO: 527065 - DNA, 201 bp, Homo sapiens
cgccactgcactccagactgggcgaaagagcgagactccatcttaaaaaaagaaaaagaaaaagaaaaagaaaaaaatatatatatacactcacacacacwtatatatacacacacacacacatatacatacgtgtgtatacatatacatatatacgtgtgtatgtgtgaaaaaccccggtaaactgagtctactccagtg

SEQ ID NO: 527066 - DNA, 201 bp, Homo sapiens
tcagcacctgggcttacgttactgtagaccaggaggtgcttccctgggacaacagccaccatgtggacgtggccccctctggcttgggcctgaaggctggrcattttccaaacaacgcgctgctgctacctgcaacttaaacccatttctaattcagctggcccccaggtgttttcatggaacaaggtgatttccaacgcc

SEQ ID NO: 527067 - DNA, 201 bp, Homo sapiens
acccagccggtgtgtgctgcagaactgattgcttgcttgatagcagggggagacctccctttacgtctagtcacagaagtcttgtgttgggaggcggggcrtggtggctcacgcctgtaatcgcagcactttgggaggcgggcaaatcacgaggtcaggagttcaagacagcctggccaacatggtgaaaccccatctcta

SEQ ID NO: 527068 - DNA, 201 bp, Homo sapiens
ctttgagaaatgatgcaacacgggcacaggactggcaacaaggcgccatcagcacctgggcttacgttactgtagaccaggaggtgcttccctgggacaamagccaccatgtggacgtggccccctctggcttgggcctgaaggctgggcattttccaaacaacgcgctgctgctacctgcaacttaaacccatttctaat

SEQ ID NO: 527069 - DNA, 201 bp, Homo sapiens
gactgatccaatgtaggaactgataaaaaggctacaatgtctctatcaagcgcctggctgcctagaaagtatctgtgaagtacgttccagccccaccctcygccctcagcagagggcaccacatgctccctcattcaggtgtgggggcaagtgggcaagactcctggccgcaggcgggcaggggccagccgatcccgcatg

SEQ ID NO: 527070 - DNA, 201 bp, Homo sapiens
ttgtggtgattatcctgaaatgctagccactgccaaatcgagtgtgtaagactgatccaatgtaggaactgataaaaaggctacaatgtctctatcaagcrcctggctgcctagaaagtatctgtgaagtacgttccagccccaccctccgccctcagcagagggcaccacatgctccctcattcaggtgtgggggcaagt

SEQ ID NO: 527071 - DNA, 201 bp, Homo sapiens
gctgagtctcatcttcagtattatcagggtgaaaagaggacgggatggcaaacaagtgttctgtctaaaagataactggagccaggcgtggtggcgtgccygtgcagtcctagctactcaggacgctgtggtggtaggactgcttgagcccaggagttcgacaccggcctggacaacacaacgagttcctgtctcaaaaaa

SEQ ID NO: 527072 - DNA, 201 bp, Homo sapiens
gagccaccatgcccagcaatcttaatttttgaaattgagatgctcaagagtatttccaggattgtggtgattatcctgaaatgctagccactgccaaatcragtgtgtaagactgatccaatgtaggaactgataaaaaggctacaatgtctctatcaagcgcctggctgcctagaaagtatctgtgaagtacgttccagc

SEQ ID NO: 527073 - DNA, 201 bp, Homo sapiens
aaataaagaacactgggaggtaaagagaattggggttcgtggtctagggacaggacaatggctacacggttccgcaccagagcactgataagccagggggsagaaatcactaacccacttcactgacagcaaaggagcaggtgtaaccagcatagatctgggaagccccacgcccagggaagtcaaacagcttcaccaggc

SEQ ID NO: 527074 - DNA, 201 bp, Homo sapiens; identical to SEQ ID NO: 181252

SEQ ID NO: 527075 - DNA, 201 bp, Homo sapiens
atgtcgtcttcccagtgtcacagcaactcaagtcctgctacgtttccaactacgtataattttcaacctgcagcgtaggaatacatcaagctctgcttgtktatttctttgaacagaaaccttcaaaatgactttcttcccacaagacagggaacagccatctgttctagcagcaaatgggccctctcccctcctgtaccc

SEQ ID NO: 527076 - DNA, 201 bp, Homo sapiens
actccatctcaaaaaaaaaaaaaaaaaagactcacctagcaccaggatctaagaatgaaagacatttgtttgcggaaggccacgtgtgtgaaattgagggycatgagttctaacctcatcactcaagtaactggtattaacaacagaaacacaggtttaaactcaatttggaaaaatgaagaatgtcctcaaatcacccac

SEQ ID NO: 527077 - DNA, 201 bp, Homo sapiens
agaaaatgccatccagagtctttacctcctgggctgcagtggaagacttgggcttgtggtccccgtagccctggcgaagcaaacaagatgttcgcaatcgrggatccatgtggctcagtccacaagtggggaatcacggcaacatttcctggcccccactaaccagaagccagtgatgatgccctctggcccatgacaagc

SEQ ID NO: 527078 - DNA, 201 bp, Homo sapiens
tcttgatcttctctttctcagtctcactttcatctcttgctatcaccaaggagtgtgagtagcccatggcgacctggggggacaaatcagcgttgggtgtrcctgaggcgcctggactaatcaatgcgttgaagagactctggaaactgggctgctaaagcgggtcagcatggagaaaaacagagtgcccttgaaaactgc

SEQ ID NO: 527079 - DNA, 201 bp, Homo sapiens
tttttctgagtaaatggcgattcctcttccatgtggcatctgcttggatcacgatgctaattgtaactggaaaggggtgttttggggagtgtattcaggaraggaagaaagaaaaaacttaaaaaaaaaaaaaacctagattgctcaaagtttctgcctcttttgtaggaatggtaaatcaactatgagcaagtattttaa

SEQ ID NO: 527080 - DNA, 201 bp, Homo sapiens
tcagggaggggcaccccatgggtgtgtctgacacccccatgaaaggaagagacctcatacccacaggagatgctgccacctacccacaagccaggctccgrattctccagccgcagaggtcctgcactgcttttgggtacatggtagattcacgggaggtgttggtggccccccagaaaaacagaccacctaagggaagac

SEQ ID NO: 527081 - DNA, 201 bp, Homo sapiens
tgaacctgggaggcggaggctgcagtgagccgagatagcgtcactgcactccagcctgggtgacggaatgagactccatctcaaaaaaaaaaaacaaaacraaacaaaaaaaaaaacacaacaaaaaaaaaacagattcaattgcagaaagaacagaaaaggcctacctgttcctggatttttcgtttcttttccccccct

SEQ ID NO: 527082 - DNA, 201 bp, Homo sapiens
aaaaagacatgggctgtgaacgaaggagcccagccttataagacgcgagtctcttttccaggcaaacagaagaacgtgctgtgtggggacagctggtgacrgtggtccccagtgcccagcacccgcacggtactcaccccagctccacagcttcccttccgtggtgatgaggaggctgtgtgcagcacacgagcccgagac

SEQ ID NO: 527083 - DNA, 201 bp, Homo sapiens
cacagctttggtgggtatgcaggggtctgaatcaggcggcctttgatggcaccctcatgccgctgtccatgagcccgggagccaatggtgagtgaaacagkacctcccaggggcccggctctcaaggaacaagctgtcacagcagccagcatacttcagtgttcatcctcagtctctcaacacaaagtcatcagggccacc

SEQ ID NO: 527084 - DNA, 201 bp, Homo sapiens
tgagagggaagatggaaaaggtggcaatgttcatttgaggatactacttgtattttcctgattaatcttaacggaattagtgagtcacttcaaaattgtgmctttaaaagactaagattagggttcaaatccagctcatcactacagtggctgtgtggcctcaggcaagtcacttggcctctgtgaaaatgcatttgtaaa

SEQ ID NO: 527085 - DNA, 201 bp, Homo sapiens
gggactcttcggtaatcccaactatttggtaccagagccaagcaaacgtgactaaagggagctgggtcagcagaacggtaccccgagtctcagcaacaggwcggcccgcgcgaggcaggatccaggcgggggggagaaaaagagaccaaagcacaaggcgatcgaggctggcacagaaagggctgatccttcttgcaagga

SEQ ID NO: 527086 - DNA, 201 bp, Homo sapiens
aacacactctcaaatgatgcccatctgtctctggaaggtaccctccaaattcccaacaacagccaagatccagagcaaagaacgccccggccctctgcccrctggaatggcgcctgctgcagctccccggacctccttccctggggcagcagcgggaccacccgtgcacacctcccacgtctctgctacaaagggaaatga

SEQ ID NO: 527087 - DNA, 201 bp, Homo sapiens
ggcattttccaaacaacgcgctgctgctacctgcaacttaaacccatttctaattcagctggcccccaggtgttttcatggaacaaggtgatttccaacgcccctgttttaaggtgccaagacgagccagcgtgcaaatatttgttcatggggcaaagcaatgctggaaagcactttgggagtctttccagatgaaatcaa

SEQ ID NO: 527088 - DNA, 201 bp, Homo sapiens
ttttccaaacaacgcgctgctgctacctgcaacttaaacccatttctaattcagctggcccccaggtgttttcatggaacaaggtgatttccaacgcccctgttttaaggtgccaagacgagccagcgtgcaaatatttgttcatggggcaaagcaatgctggaaagcactttgggagtctttccagatgaaatcaagaag

SEQ ID NO: 527089 - DNA, 201 bp, Homo sapiens
ggatggttttcaacccgaccacaaactaagcctgttttaaaaactatagcaaggctgtgtgcagtggctcacacctgtaatcccagtactttgggaggccraggtgggtggatcacctgaggtcaggagttccagaccagcctgaccaacatggagaaaccccgtctctactaaaaatacaaaattagccaggtgtggtgg

SEQ ID NO: 527090 - DNA, 201 bp, Homo sapiens
agagaactcccagcaccccttctcacttaaggggtgctcctcttcctcagagaccagaaacagccaatcgtgggagagactcccgcgcttgcgggctccamccggggcggcggggcagggcgggggtgccagtgggtgtgtgggtgtctgaagctcagtgtgccctcccaggcggaatccagccttccctgatgggcctac

SEQ ID NO: 527091 - DNA, 201 bp, Homo sapiens
gagaagccacccagggctaaagctgtaggctccctccagcctagaccctcacaaatgcctggcacgcagcgagcactcaatgggaaagaaaaccacagcaycttcctcacaaaccccccttcacaccctattagaggatggggcagggccaatttcttacttttctttttttttttttttttttttttttgagacagtttc

SEQ ID NO: 527092 - DNA, 201 bp, Homo sapiens
ccagtcagatgcccgcagggtcagcgccaagcacattcccaaccgggcaactgtgtacctttctctaggagtgcacgacacccttcccccacaactccttrttttaaaggatttaacccattaggaagcccatttttcaatctaagccagaaggagctgcgggacaaggcagtcttcactttgaaggtccctttcctgctc

SEQ ID NO: 527093 - DNA, 201 bp, Homo sapiens
tcaggccccttgaggaggggcactgctcacacagtatcaccccacctcctgctcccttctcacccgtccagtgtgacagccacttcatgactcccctgacmcccacccatatattcgcttcccctagaatgtccttcccacctcctacttcttcctgaaagctcaagtcaagcaccagttcgcctccttggggaagccctc

SEQ ID NO: 527094 - DNA, 201 bp, Homo sapiens
ggggagatgctgtggcggcagatgccgggttcagatctccggctctgcaggctttttcgggaacgttaacttgagtcagccacgaccttaattaagatttkagaaaacagaagcccgcccaggaccctaggagatgcttcttcacttgggggggctacaacagagccctcgcgagcatcctgcagcttcggaccaccggcg

SEQ ID NO: 527095 - DNA, 201 bp, Homo sapiens; identical to SEQ ID NO: 181276

SEQ ID NO: 527096 - DNA, 201 bp, Homo sapiens
gcacgcccacccgcaagtgcccgggacctggtgcgaggtctgtccaggaggcaggagtgctggctttccacagccgtcagctgaggaagaggctgacccargaaaccccgctcaccctgacagtaacctacccctcctcctcactccctgccgcctgcccctcctttcccaggctctcctgccctccatctccggccttca

SEQ ID NO: 527097 - DNA, 201 bp, Homo sapiens
acaggcaacaagaggggtcatcgtttctgtgcagacaacctggtgcaaatgctaagggcaaaggaacagcaacattcaagatcccctaccagccgggcacrgtggttcacatctaatcccaacactttgggaggccaaggtgggtggatcacttgaggtcaggagtttgagaccagcctggccaacatggtgaaaccctgt

SEQ ID NO: 527098 - DNA, 201 bp, Homo sapiens
aatctctgcgatgcctctgaaggcccaaaaatcaaaatacccagaagctggcacaggcctggcgtcacctgccacctttacacccattcggccccagcccsctctctgggtcccacctctcacagggctcagccccacgtgttctgccattgagcacgcccacccgcaagtgcccgggacctggtgcgaggtctgtccagg

SEQ ID NO: 527099 - DNA, 201 bp, Homo sapiens
agaattgcttgaacctgggaggtggaagctgtggtgagccgagatcacgccattgcactccagcctgggcaacaagagtgaaactgtctccaaaaaaaaargggggggggggcgggggggacaacctactgattaaaaacgactcacatccccagtatggggcaccatctactgacctggaaagatgtctgtgatgttatg

SEQ ID NO: 527100 - DNA, 201 bp, Homo sapiens
tcacttcgaatctctgcgatgcctctgaaggcccaaaaatcaaaatacccagaagctggcacaggcctggcgtcacctgccacctttacacccattcggcyccagccccctctctgggtcccacctctcacagggctcagccccacgtgttctgccattgagcacgcccacccgcaagtgcccgggacctggtgcgaggtc

SEQ ID NO: 527101 - DNA, 201 bp, Homo sapiens
tccccaatcccccaccaggggggacacggccgattctataatgtcgcagccagaaggctgtgggcgtacaggcagccaaggggagaaacagaaccgacacsggcctaggcccatctgcaagaaaaagcggagaaggagtgacccggatgcttccgaagcacgcgagcgtgattttggatggaggcgggccggtgactgcct

SEQ ID NO: 527102 - DNA, 201 bp, Homo sapiens
cagcgagcactcaatgggaaagaaaaccacagcatcttcctcacaaaccccccttcacaccctattagaggatggggcagggccaatttcttacttttctttttttttttttttttttttttttgagacagtttcactgttgcccaggctggagagcagtggcacaatctcggttcactgcaacctctgcctcccaggttc

SEQ ID NO: 527103 - DNA, 201 bp, Homo sapiens
ctgaagctgaggtggggaactcaccccttttgggggcccctccaggggccctgctcttgctgggggctccccaggatcagccagaagggctctgagaccayccaggaggatgtccctgtggggtgtccttggtgtggttgggggagaggctgcctgtctcctcgggtcctggagaaggtgccctctttggatcaccagaaa

SEQ ID NO: 527104 - DNA, 201 bp, Homo sapiens
aaaccaccctgaaggagcaaatgcgggagctcagggaggaatgggaaaggggcctgagtgctctgtaagggtggcctccttcccagctgccacattgactcaggaccctccaacctgggcaattgttcctggactcatagccacacaagctgcctggtggggactgcagagatgggagtgccagcacatcacaaagagaga

SEQ ID NO: 527105 - DNA, 201 bp, Homo sapiens
cggctaatttgtttatttttagtagagacaaggtttcaacatgttggcccttgacaacaagctggtcttgaactcatgatctcaggtgatccacccacctyggcctcccaaagtgctgggattacaggcatgagccaccgtgtccggccccttacagccatattttctaaatttttcatcacccatcatacttctttttgt

SEQ ID NO: 527106 - DNA, 201 bp, Homo sapiens
agctcattccctccttgattcagtcactggcgtgagcactcatacagtggaggtgctgtcctggtccctggagcagcccccgcctagggacatgtatcatyggctctggccagcaccatagtacataaacttgtcctcttccagagcaccattccaactgtccgccccattctctatgtgtgtctatgtccagagtgcaag

SEQ ID NO: 527107 - DNA, 201 bp, Homo sapiens
gggaactcaccccttttgggggcccctccaggggccctgctcttgctgggggctccccaggatcagccagaagggctctgagaccacccaggaggatgtcyctgtggggtgtccttggtgtggttgggggagaggctgcctgtctcctcgggtcctggagaaggtgccctctttggatcaccagaaactccgaggagacac

SEQ ID NO: 527108 - DNA, 201 bp, Homo sapiens
ccctgtggggtgtccttggtgtggttgggggagaggctgcctgtctcctcgggtcctggagaaggtgccctctttggatcaccagaaactccgaggagacrcacgccagaagctgcccatggacttgctggtgctggaggatgagaagcaccacggggctcagagtgcagccctgcagaaggtgaaggtaagcctgggagg

SEQ ID NO: 527109 - DNA, 201 bp, Homo sapiens
tgcttgaacctaggaagtggaggttacagcaagccgagatcacaccaccgcactccagcctgggtgacagagtgggactcggtctcaaaaaaaaaaaaaaatacacaagctggccctctggatgctccctgaggagcccagccagagtcccacatgcagcagtagctgcagccccaggttatctttcattcttggaagaag

SEQ ID NO: 527110 - DNA, 201 bp, Homo sapiens; identical to SEQ ID NO: 318771

SEQ ID NO: 527111 - DNA, 201 bp, Homo sapiens
tcccaggctggtctggatagagcataagggagctggcagaacacagaaaacatgggggccaagcacaggggtgagaatcaagctggggggaaggcctgggmctcagcttgggtgggagatgggctcaggcctggagccagaggccaggccctgacagcctctctggggacagttccgtcggacagcactgcaccgagcttc

SEQ ID NO: 527112 - DNA, 201 bp, Homo sapiens; identical to SEQ ID NO: 318823

SEQ ID NO: 527113 - DNA, 201 bp, Homo sapiens
tcggcctcccaaagtgcttggattataggcgtgagccactgtacctggcctatttattttttgaggcagggtcattctctctctctctcactgtcactcargctggagtgcagtggcatgtccttggctcactgcaacctccccttcctgggctcaagtaatcctcccacctcagtctcccaagtagctggcactacaaca

SEQ ID NO: 527114 - DNA, 201 bp, Homo sapiens
gtgcccaagggggtctgaggagatccagttctgctgtcaaggggagggagatcctgtctgctacacctgtggtggggaggggggcagatgtccccaggggyccagttgggcctcattcctgtcccagggtattactggcagggggtattgctggcagcagaagactgaggcttcagccttcaaaattaagtcagtgagatg

SEQ ID NO: 527115 - DNA, 201 bp, Homo sapiens
cgggctcaagaaaggctaaagggataatgagaaaagcaggaaaatatggagaaggtataaatgaggggttttcaccctcagcattattgacatttagggcygggtgattgtttgttgtaggggaccatcctatgccttgtaggatatttaagcaacattcttggcctctgcccactagatgccagtagtacccatccccta

SEQ ID NO: 527116 - DNA, 201 bp, Homo sapiens
gtccttggaaggggaaggtgcccagggaacaccttggactagggaacacttagtccaagttcttctttggggcccagagcattcacaaaaggaggccatgrgagagtccctcgggctcaagaaaggctaaagggataatgagaaaagcaggaaaatatggagaaggtataaatgaggggttttcaccctcagcattattga

SEQ ID NO: 527117 - DNA, 201 bp, Homo sapiens
tgggaaaacatgtgtaaatgaattatttattcaacataaggcaaatgtcttgtaagcttttgccatgtccattacatagtcatctctcaataaatgacatmtattatgattattaaaagaagggtagaagagtgagcagctgggtgagaggagaatcacagaaggcttcccagaggaagtggcatttaaggctttagagtt

SEQ ID NO: 527118 - DNA, 201 bp, Homo sapiens
gccatgcattgggcctgccgcgggggccacttagaggtggtgaaacttctgcaaagccatggagcagacaccaatgtgagggataaggtgaggcaaaaacrctcagaagcaacagatattggggtggctgtggggagaaaggcaggggtccaagggcaggaaagcctagggggcaggaaggtagtgagctagtctggtttc

SEQ ID NO: 527119 - DNA, 201 bp, Homo sapiens
cttgctgggggctccccaggatcagccagaagggctctgagaccacccaggaggatgtccctgtggggtgtccttggtgtggttgggggagaggctgcctrtctcctcgggtcctggagaaggtgccctctttggatcaccagaaactccgaggagacacacgccagaagctgcccatggacttgctggtgctggaggatg

SEQ ID NO: 527120 - DNA, 201 bp, Homo sapiens
attaggtgcaccaccatgcccagctaatttttgtacttttagtagagacagggttttaccatgttgaccaggctggtcttgaactcctgaccttaagtgatccatgtgcctcagcctcccaaaatgctgggattacaggcatgagccactgaacctggccaggactggtgctttttgtcagaggcccatagtgactacaga

SEQ ID NO: 527121 - DNA, 201 bp, Homo sapiens
agaaggaacaggagctctgcttgtcaagtctcctcccctccctatccgctactatttactgcatgcagtagataactggtgacatggactgagcacatttraggtgttcattccgtgggcatcagcagaccctcagaggtgcattagctaactatagaacctcctcttaatttctctataaagggggctgtttgccacact

SEQ ID NO: 527122 - DNA, 201 bp, Homo sapiens
cagagcaagtgtttgcactgcgtctgcaggacaaaaagctcccaccgctgctctctgagatctgggatgtgcacgaatgactgttctgtccccatattttytgttttcttggccggatggctgaggcctggtggctgcctcctagaagtggaacagactgagaagggcaaacattcctgggagctgggcaaggagatcctc

SEQ ID NO: 527123 - DNA, 201 bp, Homo sapiens
ttaggtgcaccaccatgcccagctaatttttgtacttttagtagagacagggttttaccatgttgaccaggctggtcttgaactcctgaccttaagtgatccatgtgcctcagcctcccaaaatgctgggattacaggcatgagccactgaacctggccaggactggtgctttttgtcagaggcccatagtgactacagag

SEQ ID NO: 527124 - DNA, 201 bp, Homo sapiens
agtgtttgcactgcgtctgcaggacaaaaagctcccaccgctgctctctgagatctgggatgtgcacgaatgactgttctgtccccatattttctgttttyttggccggatggctgaggcctggtggctgcctcctagaagtggaacagactgagaagggcaaacattcctgggagctgggcaaggagatcctcccgtggc

SEQ ID NO: 527125 - DNA, 201 bp, Homo sapiens
taggtgcaccaccatgcccagctaatttttgtacttttagtagagacagggttttaccatgttgaccaggctggtcttgaactcctgaccttaagtgatccatgtgcctcagcctcccaaaatgctgggattacaggcatgagccactgaacctggccaggactggtgctttttgtcagaggcccatagtgactacagagc

SEQ ID NO: 527126 - DNA, 201 bp, Homo sapiens
tgggagctgggcaaggagatcctcccgtggcattaaaagagagtcaaagggttgcgagttttgtggctactgagcagtggagccctcgctaacactgtgcygtgtctgaagatcatgctgaccccacaaacggatgggcctgggggccactttgcacagggttctccagagccctgcccatcctgcctccaccacttcctg

SEQ ID NO: 527127 - DNA, 201 bp, Homo sapiens
ggtgcaccaccatgcccagctaatttttgtacttttagtagagacagggttttaccatgttgaccaggctggtcttgaactcctgaccttaagtgatccatgtgcctcagcctcccaaaatgctgggattacaggcatgagccactgaacctggccaggactggtgctttttgtcagaggcccatagtgactacagagcca

SEQ ID NO: 527128 - DNA, 201 bp, Homo sapiens
gaaactccctggaaggcccagcacctgcctctctccacccctggatttctaccagcttggctgaggcctggggctagtggggagagcttcttggcctcttyccagaggcaagggaggaggagggaggctgggaaagccgctggggctcagtgtcgcaattccgggccgtgctgggacctttgctccacgaggtgcctatgg

SEQ ID NO: 527129 - DNA, 201 bp, Homo sapiens
gtgcaccaccatgcccagctaatttttgtacttttagtagagacagggttttaccatgttgaccaggctggtcttgaactcctgaccttaagtgatccatgtgcctcagcctcccaaaatgctgggattacaggcatgagccactgaacctggccaggactggtgctttttgtcagaggcccatagtgactacagagccac

SEQ ID NO: 527130 - DNA, 201 bp, Homo sapiens
ccgctgctctctgagatctgggatgtgcacgaatgactgttctgtccccatattttctgttttcttggccggatggctgaggcctggtggctgcctcctaraagtggaacagactgagaagggcaaacattcctgggagctgggcaaggagatcctcccgtggcattaaaagagagtcaaagggttgcgagttttgtggct

SEQ ID NO: 527131 - DNA, 201 bp, Homo sapiens
caccaccatgcccagctaatttttgtacttttagtagagacagggttttaccatgttgaccaggctggtcttgaactcctgaccttaagtgatccatgtgcctcagcctcccaaaatgctgggattacaggcatgagccactgaacctggccaggactggtgctttttgtcagaggcccatagtgactacagagccacagg

SEQ ID NO: 527132 - DNA, 201 bp, Homo sapiens
caccatgcccagctaatttttgtacttttagtagagacagggttttaccatgttgaccaggctggtcttgaactcctgaccttaagtgatccatgtgcctcagcctcccaaaatgctgggattacaggcatgagccactgaacctggccaggactggtgctttttgtcagaggcccatagtgactacagagccacaggccc

SEQ ID NO: 527133 - DNA, 201 bp, Homo sapiens
gaattttgtctctaggcctttctgagcctcactttccttgtttataaaatggaaataaaaattatggttgtcataaggatcagtgcatataaaaggctcayacagtacctagaacataatggcacttggcaaatgagggctactcttctcataaaagagagactggagtttgtataatgaagggaatgaaggtcactgagt

SEQ ID NO: 527134 - DNA, 201 bp, Homo sapiens
accatgcccagctaatttttgtacttttagtagagacagggttttaccatgttgaccaggctggtcttgaactcctgaccttaagtgatccatgtgcctcagcctcccaaaatgctgggattacaggcatgagccactgaacctggccaggactggtgctttttgtcagaggcccatagtgactacagagccacaggccca

SEQ ID NO: 527135 - DNA, 201 bp, Homo sapiens
ccatgcccagctaatttttgtacttttagtagagacagggttttaccatgttgaccaggctggtcttgaactcctgaccttaagtgatccatgtgcctcagcctcccaaaatgctgggattacaggcatgagccactgaacctggccaggactggtgctttttgtcagaggcccatagtgactacagagccacaggcccaa

SEQ ID NO: 527136 - DNA, 201 bp, Homo sapiens
catgcccagctaatttttgtacttttagtagagacagggttttaccatgttgaccaggctggtcttgaactcctgaccttaagtgatccatgtgcctcagcctcccaaaatgctgggattacaggcatgagccactgaacctggccaggactggtgctttttgtcagaggcccatagtgactacagagccacaggcccaat

SEQ ID NO: 527137 - DNA, 201 bp, Homo sapiens
ggaagacctacagctgaaagaactgggagggtgatgataactcgtgccatttctcaaacactatgtgccacacgttgtgatagactctctttctttctttytttttctttctttctttctttctttctttctttctttctttctttctttctctctctctctctctctctctctttctttctttctttctttctttctttc

SEQ ID NO: 527138 - DNA, 201 bp, Homo sapiens
gaagacctacagctgaaagaactgggagggtgatgataactcgtgccatttctcaaacactatgtgccacacgttgtgatagactctctttctttctttctttttctttctttctttctttctttctttctttctttctttctttctttctctctctctctctctctctctctttctttctttctttctttctttctttct

SEQ ID NO: 527139 - DNA, 201 bp, Homo sapiens
aagacctacagctgaaagaactgggagggtgatgataactcgtgccatttctcaaacactatgtgccacacgttgtgatagactctctttctttctttctytttctttctttctttctttctttctttctttctttctttctttctttctctctctctctctctctctctctttctttctttctttctttctttctttctc

SEQ ID NO: 527140 - DNA, 201 bp, Homo sapiens
atttctcaaacactatgtgccacacgttgtgatagactctctttctttctttctttttctttctttctttctttctttctttctttctttctttctttctttctctctctctctctctctctctctttctttctttctttctttctttctttctctttctctctctctctctctttctttcttctttttttttggagtttt

SEQ ID NO: 527141 - DNA, 201 bp, Homo sapiens
tttctcaaacactatgtgccacacgttgtgatagactctctttctttctttctttttctttctttctttctttctttctttctttctttctttctttctttctctctctctctctctctctctctttctttctttctttctttctttctttctctttctctctctctctctctttctttcttctttttttttggagttttg

SEQ ID NO: 527142 - DNA, 201 bp, Homo sapiens
ttctcaaacactatgtgccacacgttgtgatagactctctttctttctttctttttctttctttctttctttctttctttctttctttctttctttctttytctctctctctctctctctctctttctttctttctttctttctttctttctctttctctctctctctctctttctttcttctttttttttggagttttgc

SEQ ID NO: 527143 - DNA, 201 bp, Homo sapiens
tctcaaacactatgtgccacacgttgtgatagactctctttctttctttctttttctttctttctttctttctttctttctttctttctttctttctttctctctctctctctctctctctctttctttctttctttctttctttctttctctttctctctctctctctctttctttcttctttttttttggagttttgct

SEQ ID NO: 527144 - DNA, 201 bp, Homo sapiens
tgtattcctttggcacttgtagactcatgctatctgaatctgcacctattcatagatttatttatacaagcagttttgaagtaatcatgcttgcatttctyatttcatgagtgaggtcttggggagaaggaacaggagctctgcttgtcaagtctcctcccctccctatccgctactatttactgcatgcagtagataact

SEQ ID NO: 527145 - DNA, 201 bp, Homo sapiens
cacgttgtgatagactctctttctttctttctttttctttctttctttctttctttctttctttctttctttctttctttctctctctctctctctctctytctttctttctttctttctttctttctttctctttctctctctctctctctttctttcttctttttttttggagttttgctgttgttgcccgggctggag

SEQ ID NO: 527146 - DNA, 201 bp, Homo sapiens
cgggcgtggtggcttacacctgaaatcccagcactttgggaggccgaggcaggcggatcacctgaggtcaggagttcgagaccagcctggcccatatggcraaaccccatctctactgaaaatacaaaaattagctgggcgtggtggtgcacacctgtggtcccagctactcaggaggctgaggcaggagaattgcttgaa

SEQ ID NO: 527147 - DNA, 201 bp, Homo sapiens
agtgggattatctgtgggaggggcctccagacatcgagctgggagagccaaatctgctgggaagcagggatgaggagaatcggcctccctggaagaggccrtgctccaagaccagccctcctagtccccgtttgaggtttgctgcttgtgtgcaggtgatgcttctggagacatctcggaggtacaaccctgggagtgaga

SEQ ID NO: 527148 - DNA, 201 bp, Homo sapiens
gtggagaagggagctgaggccagaaaggagcccagttctagaagagtataatctgggtccttcctgcaggacagtgccttggtaatgaccagggctccagraagagatgtccttgtggctgggggcccctgtgcctgacattcctcctggtaagcttcattccatccctctcccctgagcccagaccgcaggctccacgcc

SEQ ID NO: 527149 - DNA, 201 bp, Homo sapiens
actgaggcaggagaatcacttgaacacgggaggtggaggttgcagtgtgccaagatcatgccactgcactccagcctgagcaagtgtgagactctgtttcaaaaaaaaaaaatcttcttgcctttacccagtgctgtctgcttttctggagccccaaaccaccccctttgccccatccttccctcctgtctttcccccacc

SEQ ID NO: 527150 - DNA, 201 bp, Homo sapiens
gattaggtgcaccaccatgcccagctaatttttgtacttttagtagagacagggttttaccatgttgaccaggctggtcttgaactcctgaccttaagtgatccatgtgcctcagcctcccaaaatgctgggattacaggcatgagccactgaacctggccaggactggtgctttttgtcagaggcccatagtgactacag

SEQ ID NO: 527151 - DNA, 201 bp, Homo sapiens
aaagaggtatctgtcaaaggaaaccttttcaaattagttggactaaacgggacctaggccggacatggctcacacctgtaatcccagcactttgggaggaygaggcgggtggatcacctgaggtcagcagttcaagaccagcctggccaccatggtgaaaccccatctctactaaaaatacaaaaattagccagtcgtggt

SEQ ID NO: 527152 - DNA, 201 bp, Homo sapiens
ggtgtggaggaggggcaatgggaaacagcaagagacttacaccaaggagggctgcaggtcccacaggaatcggtggggggaggggggtggtggcttgggarggtggaggcatttgctgtgttattttaggatgagagagcttggctggagcatgtctctatattttggttgcaatttggggtatggaactggaccctggcc

SEQ ID NO: 527153 - DNA, 201 bp, Homo sapiens
atgcccagctaatttttgtacttttagtagagacagggttttaccatgttgaccaggctggtcttgaactcctgaccttaagtgatccatgtgcctcagcctcccaaaatgctgggattacaggcatgagccactgaacctggccaggactggtgctttttgtcagaggcccatagtgactacagagccacaggcccaatg

SEQ ID NO: 527154 - DNA, 201 bp, Homo sapiens
ggaccctggaaagtggcacgagcgaggttctctaataagcagcgtgtttcactgggtggagtgagctgtcctcagtgttggagtgagggggaaggggcccragagaagcagggcagatgcacccaaacattccctgctggcctggaggggactttgggggagaaaagccggcacggtggctgggagcccagactttggagt

SEQ ID NO: 527155 - DNA, 201 bp, Homo sapiens
agataagttcttgctctgtcacgcaggctgaagtgcagtggcatgaacgtggctcactgcagcctcaaccacctgggctccagtaatcctcctgcctcagcccccaagtaggtgggactacaggcatgcaccaccatgccaggctaatttttatatttttttgtagagagtgggtttcgccatgttgcccaggctggtctc

SEQ ID NO: 527156 - DNA, 201 bp, Homo sapiens
gggtgtcacaggggcttttctgaaatgtgaaaatgaatacatgggcagattttgcaacagcacccagcctgctgtcttctcacactctgctccccagcccyggcctgttccccctctcccaccctgtgcttcctctcatctttcaccaggctgctcttctgcctcagccttcatctttttctcatctggttccttctgtcc

SEQ ID NO: 527157 - DNA, 201 bp, Homo sapiens
acacaacacttgataaacatcagggtgaaagtacaggaagtgactcaccaagaagccttgaatggaaaagtgtagcagatggttgctaaaagaaatctgamaaagcctggggaactctgtagggtgcagagactttgacaatgtgtatgagagacattctctaggtatcattactttagctcatgttttgttgcattttag

SEQ ID NO: 527158 - DNA, 201 bp, Homo sapiens
tgttcccacggatgctaatgaaactggtgagcctccggaccctgagcagcgtccactcagagcaagtgtttgcactgcgtctgcaggacaaaaagctcccmccgctgctctctgagatctgggatgtgcacgaatgactgttctgtccccatattttctgttttcttggccggatggctgaggcctggtggctgcctccta

SEQ ID NO: 527159 - DNA, 201 bp, Homo sapiens
tcgggggagagcgttgaagcactttcctgtatccagagatccgtccacaaaagcggaaaaaggggccagcccccaaaatgctggggaacgagctatgcagygtgtgtggggacaaggcctcgggcttccactacaatgttctgagctgcgagggctgcaagggattcttccgccgcagcgtcatcaagggagcgcactaca

SEQ ID NO: 527160 - DNA, 201 bp, Homo sapiens
ggcgggtggatcacgaggtcaggagatcaagaccatcctggctaacatggtgaaaccccatctctactaaaaatacaaaaagttagccgggtgtggtggcrggtgccggtagtcccagctactcaggaggctgaggcaggagaatgtcgtgaacccagcaggcggagcttgcagtgagcggagatcgtgccactgcacccc

SEQ ID NO: 527161 - DNA, 201 bp, Homo sapiens
cagaagaggcaacccgcataccttcccaggtccatcctgggctgccacctgagttgcctgtcttccttctgccacctccacccctatcccaggcctgccaytgctcatagcagatttcctatcaaaggctctcctggcctcctctcttatctgtggcccccgcagggcacccactttcagaaactccctggaaggcccagc

SEQ ID NO: 527162 - DNA, 201 bp, Homo sapiens
cttcccaggtccatcctgggctgccacctgagttgcctgtcttccttctgccacctccacccctatcccaggcctgccactgctcatagcagatttcctaycaaaggctctcctggcctcctctcttatctgtggcccccgcagggcacccactttcagaaactccctggaaggcccagcacctgcctctctccacccctg

SEQ ID NO: 527163 - DNA, 201 bp, Homo sapiens
catgtctggagaaccagcgtcccctccaggcttgaccccatagctagatcgggtgcagaattgaggcgagggatgggaaagtagaggtcgcttctctccaygcccctgcctttgtggggagattgagccctggccctgttctccaggagatgttttgcttggggtgcaggacacagtatgtaaacaaccctttggactccg

SEQ ID NO: 527164 - DNA, 201 bp, Homo sapiens
taatcccaaatggttcacaaagaccatttattacaggtttcataaatcagcatctctgaatacctgatttaacctagtcctcttactttacagcttaggaracaaacctaaagagaggaagtgacttgcccaaattcacagtttgggcatgggcacagtttgagaatggattaaaagtcaagttttggccgggtgcgtgct

SEQ ID NO: 527165 - DNA, 201 bp, Homo sapiens
ggcatgatcgagaagctcgtcgctgcccagcaacagtgtaaccggcgctccttttctgaccggcttcgagtcacggtacttgacacacctggggagaggcrgctgcgcccagatcaccagtgggcttcttgatgtccgactcaaagcgctttgccttttccctcctgggtagccttggcccatggcaccagatccccatag

SEQ ID NO: 527166 - DNA, 201 bp, Homo sapiens
cccatctctactaaaaatacaaaaattagccagtcgtggtggcgtgtgcctgtaatcccagctaccggggaggctgagacaggagaatcacttgaacccasgatacagaggctgccgtgagccgagattgtgccacttcactccagcctgggcaacagagcgagactctgtctcaaaaaaaaaaataaaataaagagggct

SEQ ID NO: 527167 - DNA, 201 bp, Homo sapiens
ccccgcttccctggggacaggcaaaagctgtgtttgtctctctcctttccccaggaccgactgatgttcccacggatgctaatgaaactggtgagcctccrgaccctgagcagcgtccactcagagcaagtgtttgcactgcgtctgcaggacaaaaagctcccaccgctgctctctgagatctgggatgtgcacgaatga

SEQ ID NO: 527168 - DNA, 201 bp, Homo sapiens
atattttctgttttcttggccggatggctgaggcctggtggctgcctcctagaagtggaacagactgagaagggcaaacattcctgggagctgggcaaggrgatcctcccgtggcattaaaagagagtcaaagggttgcgagttttgtggctactgagcagtggagccctcgctaacactgtgctgtgtctgaagatcatg

SEQ ID NO: 527169 - DNA, 201 bp, Homo sapiens
taccagcactttgagaggccgaagcaggcagatcacctgaggtcaggagttcgagaccagcctggccaacgtggcgaaaccccgtctctactaaaaatacaaaaaaaaaaaaattagccgggtgcagtggcgtgctcctgtaatcccagctactctggaggctgaggcaggagaatcgcttgaactcggaaagcggaggtt

SEQ ID NO: 527170 - DNA, 201 bp, Homo sapiens
ctcccgagtagctggaactacaggcgcctgccaccatgcccggctaattttttgtatttttaggagagacggggtttcaccgtgttagccaggatggtctygatctcctgacctcgtgatccgcctgcctcggcctcccaaagtgctgggattacaggcgtgagccaccgcgcccggccgagaatatattatatttttctt

SEQ ID NO: 527171 - DNA, 201 bp, Homo sapiens
tgcaacagcacccagcctgctgtcttctcacactctgctccccagccccggcctgttccccctctcccaccctgtgcttcctctcatctttcaccaggctsctcttctgcctcagccttcatctttttctcatctggttccttctgtcccatctacaccccctgtccactctttccctgtttcctgtgttctcttccctgg

SEQ ID NO: 527172 - DNA, 201 bp, Homo sapiens
ctgggaatggggcagggggtgaatgaccagcagtaacctcagcagcttgcctcccacatctggactggagcatctgcagggttctcagcctctcccctgtrgcccaccagccctggctgcttccattacagcacttcactggcccaagacgcaacaagacaagattgtcctggactctgacacagcaaagggactggagtg

SEQ ID NO: 527173 - DNA, 201 bp, Homo sapiens
caggaagactgtttccaagaaaaatgtattatttattgaccaggcgcggtggctcatgcctgtaatcccagtactttgggaggccgaggcaggcagatcaygaggtcaagagatcgagaccatcctggccaacatggtgaaatcctgtctctactaaaaatacaaaaattagctgggcgtggtgacatgcaccagtagtcc

SEQ ID NO: 527174 - DNA, 201 bp, Homo sapiens; identical to SEQ ID NO: 319795

SEQ ID NO: 527175 - DNA, 201 bp, Homo sapiens; identical to SEQ ID NO: 319797

SEQ ID NO: 527176 - DNA, 201 bp, Homo sapiens; identical to SEQ ID NO: 319796

SEQ ID NO: 527177 - DNA, 201 bp, Homo sapiens
aggccgactgtgattccccctacccccacaaggcgattttgaccccctgagggctgctctagaggactcaggccccgaagctgtcccagggaggtccccgytgcatcccaccacccaagctgtgcctcatggagtcgatgtttagcagccctgccgaggcggcgctgcagcgagagaccggggtgccaggactgcttactc

SEQ ID NO: 527178 - DNA, 201 bp, Homo sapiens
tggctctgaccccacggccccagctggagctggctgagagcagtcctgcaggtaaatgtacaagtctccactcccagctgagctttttctccagatgcagygcactcagactgagccccctccctctacagcctcattccttagttcccggagctggcaagggctggagccccgcctgggtcagacgccagtgacagaagc

SEQ ID NO: 527179 - DNA, 201 bp, Homo sapiens
gaggagacgacagggtcaaagatgttcattctgggtgacacagcctacggcaggtgtgaacttggccttaggtgggccaggcctggggatccggggctcayggggttttacgtctatgacagtgattgccttcaatggtggtgtttctccttgatgataatggtaatgactccccttctgatgctagctcctttcattgac

SEQ ID NO: 527180 - DNA, 201 bp, Homo sapiens; identical to SEQ ID NO: 319799

SEQ ID NO: 527181 - DNA, 201 bp, Homo sapiens
tgccaagatccttgaaggaccctggaaggagggagagcaggcagcccttcacaggataggatccgtctctgtcctgtcctggcactggcacaagctcagcmcatgcccagtaatgcgtgttgtttggctgatggaataaagggcttagggacttccctgaggcctctggacccatctgtcttcctgagggcagcccaggac

SEQ ID NO: 527182 - DNA, 201 bp, Homo sapiens
aaaagctcagtttctcagtcacattagtcattcaagtgttcagacagccacatgaggggacagtgcagctacaggatatgccatcatggcagaaagttctrttggttggacagcgttggtctatactgactcttatttctcagggagatcacagcaacctaaataaaccagataccttttctctttgtgtttctttttaat

SEQ ID NO: 527183 - DNA, 201 bp, Homo sapiens
ctcagtcacattagtcattcaagtgttcagacagccacatgaggggacagtgcagctacaggatatgccatcatggcagaaagttctattggttggacagygttggtctatactgactcttatttctcagggagatcacagcaacctaaataaaccagataccttttctctttgtgtttctttttaattcatgaaatactg

SEQ ID NO: 527184 - DNA, 201 bp, Homo sapiens; identical to SEQ ID NO: 319810

SEQ ID NO: 527185 - DNA, 201 bp, Homo sapiens; identical to SEQ ID NO: 320180

SEQ ID NO: 527186 - DNA, 201 bp, Homo sapiens; identical to SEQ ID NO: 319878

SEQ ID NO: 527187 - DNA, 201 bp, Homo sapiens; identical to SEQ ID NO: 319867

SEQ ID NO: 527188 - DNA, 201 bp, Homo sapiens; identical to SEQ ID NO: 319966

SEQ ID NO: 527189 - DNA, 201 bp, Homo sapiens
caggaagccatgacccaggccccatgttttcagagggcccattagctcccaccatcccccggctctgtggtcatcgagggacacctatagtcagaggagakaactcaggtggctctgggtccagaacacagttcacagaggggcgaggtgaagcagctctgggtgggcagcacaggctgaggcttggggctcactatcatt

SEQ ID NO: 527190 - DNA, 201 bp, Homo sapiens; identical to SEQ ID NO: 319910

SEQ ID NO: 527191 - DNA, 201 bp, Homo sapiens
ctcgggccccagccctcgctgccacccgggcctggagccccacacccgaggtaagccagcccacttgcctgtttctggtcccagccctggatggacgctcytgggctgggggagaggacaggaccacccccctcctctcctttcttgcatcctccctctcttgggccctcggcacagttctccgcccctcccagcccctca

SEQ ID NO: 527192 - DNA, 201 bp, Homo sapiens
cccggaaaggtgcctagaagaacaaggtgcaggaccccgtggtgagtagcaggctggtggatggggaggcaagggccagagaaccaaatggccctagaccmcaaggaggtaggaggcagggcctgagctgccctcaagagacctgctcccgggctccccctagcgcagagggctcctaaggctgccctgcctgcctttccc

SEQ ID NO: 527193 - DNA, 201 bp, Homo sapiens; identical to SEQ ID NO: 319811

SEQ ID NO: 527194 - DNA, 201 bp, Homo sapiens
aaaggccgggcatagtggctcatgcctgtaatcccagcactttgggaggctgaggcgggaggatggcttgaggccaggagtttgagatcagcctgggcaayacagggagaccccatctttacaaaaagtgaaaaaaaaaaaatagtcaggtgaggtggcgcatgcctgtattcccagctacttgggaggctgaggtgggat

SEQ ID NO: 527195 - DNA, 201 bp, Homo sapiens; identical to SEQ ID NO: 319836

SEQ ID NO: 527196 - DNA, 201 bp, Homo sapiens
acaggctatgtgagtcctgcatccatttctcaggggtgcatgcttgtgtgcacctgcaaaatcctggaggcccaggattctagttgagcccttaaggccasggccaaccgttttaggtcttttgcctccttcctttacctaagtctgggtacaggccccaccactatcttgccaaactcagctcttccgcaaggctggtat

SEQ ID NO: 527197 - DNA, 201 bp, Homo sapiens
cttgccaaactcagctcttccgcaaggctggtattccctggggaacgtggctgccctcacggtggatgggctgaaggggctgcacgggcctgccctggggrtcttggcctctgtatcctgccttgccccacccctgccttgagtctgggcactgacgcagctctccctgcagcgctgcctggaagaggagtatttgaggcc

SEQ ID NO: 527198 - DNA, 201 bp, Homo sapiens
atcccagcactttgggaggctgaggcgggaggatggcttgaggccaggagtttgagatcagcctgggcaacacagggagaccccatctttacaaaaagtgaaaaaaaaaaaatagtcaggtgaggtggcgcatgcctgtattcccagctacttgggaggctgaggtgggataattgcttgagctcaggaattcggggctgc

SEQ ID NO: 527199 - DNA, 201 bp, Homo sapiens
tcccagcactttgggaggctgaggcgggaggatggcttgaggccaggagtttgagatcagcctgggcaacacagggagaccccatctttacaaaaagtgaaaaaaaaaaaatagtcaggtgaggtggcgcatgcctgtattcccagctacttgggaggctgaggtgggataattgcttgagctcaggaattcggggctgca

SEQ ID NO: 527200 - DNA, 201 bp, Homo sapiens; identical to SEQ ID NO: 319841

SEQ ID NO: 527201 - DNA, 201 bp, Homo sapiens
tgctccctcatgtcccaggggccttctggaggaggagtgtcacaccttggagagggagatcctcatcctgcaggtgagccgcagccctgggccctcccccragcctcactgctgagcgtagactctcacctgggtgagacccatgtacctgtgtgcatacataggtgcatgtacaggctatgtgagtcctgcatccatttc

SEQ ID NO: 527202 - DNA, 201 bp, Homo sapiens
ccatgcccagctaatttttttgtatttttagtagaggcggggtttcactgtgttagccaggatggtctcgatctcttgatctcatgatccgcccatctcakcctcccaaagtgctgggattacaggcatgagccacctcgcctggccgaccctgtttcaaaaataaataccttgacacaggggtagcctgtgtcagaggat

SEQ ID NO: 527203 - DNA, 201 bp, Homo sapiens
aggtcagtaggatgactgatctgggcaactagcttgtcagagaaatgatgccattttactaagatactgaataccttaggaagaatagatttaagaaaaayataagtttcagtgttgcagattttgaacttgcaatgcatattcaacacctaaatgtgatattgagtggactgttggctttggaagcctgacattcaagaa

SEQ ID NO: 527204 - DNA, 201 bp, Homo sapiens
ctgttttggattttagttgttctaataagtatgtgatgatatttcattgttattttaatttgcaattccctaatgatacatgatttgaatatcttttcatktgtttatttgccatctgtgtgtctttggtgagatgtctgttcagatcttttgccctctttttttaaattgtggtaaaaaatattaaatgtacaatcttaa

SEQ ID NO: 527205 - DNA, 201 bp, Homo sapiens
gttgttgttgttgttgttgttgttgttgttgttgagacggagtcttgctctgttgcccaggctggagtgcagtggcaccatcttggttcactgcaacctcygcctcctgggttcaagcaattctcatgtctcagcttcctgagcagctttattacaggagcacgccaccatgcccagctagtttttttgtatttttagtag

SEQ ID NO: 527206 - DNA, 201 bp, Homo sapiens
tgaatcaatattgatatattaattaaatttaatagttcgcattagcattcattctttgtgttgtataattataggagttttgccaaatgcataatattacrtatctaccattacagtatcatacagaatagtttcactgccctaagaaatctccaatcctcacacgttcaggtcatttctctccctcttccccaccccctg

SEQ ID NO: 527207 - DNA, 201 bp, Homo sapiens
tttttcagaatttagtaaaaagcactccaagatgagtagtaatttaatctcagatatagtattggagaattatatttgccagctttgtttgttaaaattayaacgctgattttttttcccctaatcctcagtattcatccattgtttctaagcaagaatgccatcactcaaagtgagtatgaaagtgtcattaatcagaaa

SEQ ID NO: 527208 - DNA, 201 bp, Homo sapiens
aacatttgaagttgactttggggctattttgactattaagaaatatcaaattttaggagtattttgaagtagtaagagaaaattcttttgaatcctttagwattatgtcaaaagaaggactgttttatgttcaagtgaacataaattctcagttcttattttgtttcttgtttctttatgactctaacatactaagatctc

SEQ ID NO: 527209 - DNA, 201 bp, Homo sapiens
gaggccaaaatctttgaacttgaggaactgtagtttttcctgactggctgaagatccaccagcacagttgcctttcttagcatacatttttattatacttyttcagtttactttcttcagtaaaacatttgaagttgactttggggctattttgactattaagaaatatcaaattttaggagtattttgaagtagtaagag

SEQ ID NO: 527210 - DNA, 201 bp, Homo sapiens
gcatggtgaaaccccgtctctactaaatatacaaaaaaaaaaaattagcagggaatcattatttgatttttttattgtgtgacccacatagtatgacaccwtttctttagtctttttttttttaagctttcattgaacacatttgagaatttggaattttttgctttctgcccataatggtagagaagaaaattgagagaa

SEQ ID NO: 527211 - DNA, 201 bp, Homo sapiens
gcattattcacaaagaaggttttttaaaacatatgaataatgtttggcaacagttcacattcaatgtaagaatcactaagactcctgagtagcagtaatamtaaataataacataggccgggggtggtggctcacacctgtaatcccagcactttgggaggcaacgtgccgggggggtggatcatgcggtcaggagatcga

SEQ ID NO: 527212 - DNA, 201 bp, Homo sapiens
ttttacttccatgggacatttccatttagatgatttcataggtaccttaaaccaatatacatataagaatcacctggagatcttcttaaaatacagagtayaattctataaatttgggatgggtcctgagagtctatatttcttacagtcctacagactgtggtccacatttttaatacaaaggctttaaacacagcatgt

SEQ ID NO: 527213 - DNA, 201 bp, Homo sapiens
tactggccgggcacagtggctcacgcctgtaatcccagcactttgggaggccgaggtgggcagatcacgaggtcaggagattgagaccatcctggctaacrcggtgaaaccccgtctctactaaaaataaaaaaaaattagctgtgcgtggtggcgggtgcctgtagtcccagctgctgggtaggctgaggcaggagaatg

SEQ ID NO: 527214 - DNA, 201 bp, Homo sapiens
tgagaccatcctggctaacgcggtgaaaccccgtctctactaaaaataaaaaaaaattagctgtgcgtggtggcgggtgcctgtagtcccagctgctgggkaggctgaggcaggagaatggcgtgaacccaggaaggcggagcttgcagtgcgccgagatcgcgccactgcactccagcctgggcgacagagcaagactcc

SEQ ID NO: 527215 - DNA, 201 bp, Homo sapiens
cggggctaaaactggcgaaggcgtggcttcttggctgcttgacgaagtgtcgtgaataaaagaaaggagaccgcagaagtaaagaagtggggagtttaggmaagtgcctgatttgggtaatcgaaagcacccagtgattgtatttgatgacttttaagctttcatatgccgttatttaatacctgtcacttccaaatgaga

SEQ ID NO: 527216 - DNA, 201 bp, Homo sapiens
caaggtcaggagatcgagaccatcctggctaacatggtgaaaccccatctctactaaaaataaaaaaattagccaggtgtggtggcacgtgtctgtagtcmctgctgcttgggaggctgaggcaggagaatcacttgaacccgggaagcagaggttgcagtgagccgagattgcgccactgcactccagcctgggcaagac

SEQ ID NO: 527217 - DNA, 201 bp, Homo sapiens
ttgttgttggcgactgtgcttcaagcggtgagtgtagatcaccttcgcagctgccacagggagagtaggagtgattgcagctgagaaagacgcaacattcrgtcctggttgaaaagggtggggaggactgcgcttccttaatgactgctgcggccagaatgcaacgtggcttaatttctcggttgatccttctccttcccc

SEQ ID NO: 527218 - DNA, 201 bp, Homo sapiens
agtatttgtccttgtgactgatttacttggatcagggttcatccatgttgtattgtgtgacaggatttccttcctttttaagaatgcatagtattccactacacacacacacacacacacacacacacacacacacacagagacacacacttttttttttttttttttttttttggacatggtcttactctgtcacccagg

SEQ ID NO: 527219 - DNA, 201 bp, Homo sapiens
gtatttgtccttgtgactgatttacttggatcagggttcatccatgttgtattgtgtgacaggatttccttcctttttaagaatgcatagtattccactacacacacacacacacacacacacacacacacacacacagagacacacacttttttttttttttttttttttttggacatggtcttactctgtcacccaggc

SEQ ID NO: 527220 - DNA, 201 bp, Homo sapiens
tatttgtccttgtgactgatttacttggatcagggttcatccatgttgtattgtgtgacaggatttccttcctttttaagaatgcatagtattccactacacacacacacacacacacacacacacacacacacacagagacacacacttttttttttttttttttttttttggacatggtcttactctgtcacccaggct

SEQ ID NO: 527221 - DNA, 201 bp, Homo sapiens
atttgtccttgtgactgatttacttggatcagggttcatccatgttgtattgtgtgacaggatttccttcctttttaagaatgcatagtattccactacacacacacacacacacacacacacacacacacacacagagacacacacttttttttttttttttttttttttggacatggtcttactctgtcacccaggctg

SEQ ID NO: 527222 - DNA, 201 bp, Homo sapiens
tttgtccttgtgactgatttacttggatcagggttcatccatgttgtattgtgtgacaggatttccttcctttttaagaatgcatagtattccactacacmcacacacacacacacacacacacacacacacacagagacacacacttttttttttttttttttttttttggacatggtcttactctgtcacccaggctgg

SEQ ID NO: 527223 - DNA, 201 bp, Homo sapiens
tgatgtgatcacagctcactgcatcctcaccctctaaggctcaagcaatcccgccacctcagcctcccaagattctgagaccacaggtacacaccaacatkaccagctaattttttttatttttttatagagatagggtcttgctatgttgcctaagctggtcttgtattcctgggctcgggcgatcctcctgcctcagcc

SEQ ID NO: 527224 - DNA, 201 bp, Homo sapiens
acaaaatgccgggtgtggtagcaggggcctgtaatcccagctactcgggaggctgaggcaggagaattgcttgaacccaggaggcagaggtggcagtgaascgagatcacgccattgcactctagcctggacaacaagcgaaactccatcccaaaaaaaaaaaaaaagtaacctgaccaaaaatggttaagtagtaatgtt

SEQ ID NO: 527225 - DNA, 201 bp, Homo sapiens
agtagctatgtagaatggtgtattggaaagcagacagatgaagcagttctcaggtaaagagcagagctaggtactaggtaagcagtcccctagatattttrtatctttattcctcaattactagagtaaaccacttctactttagatgatttagaagatttagctcagcttcccatcttcttagacttctccccaacctta

SEQ ID NO: 527226 - DNA, 201 bp, Homo sapiens
ttattttatattcccttcgttgtgtctcatatgtatttgtacatttaaatccctctgaagcgtaaatggccccagttcatttgtgttgttgctccatgccrtcaaagtcatcaggatatttgcaatttgtgtagagcagtgaggaagcccaaccactctcaaaaatacaaaaatgactcagaaaagagagagtgctggaca

SEQ ID NO: 527227 - DNA, 201 bp, Homo sapiens
tgtgatcttctcggacagttcaacctgcttcagctggatcctgattgcagaggatgctgtcaggaggaagcacaatttgaaaccaaaaaggtactgttttstagtatattccttccattggatggtttagttgagataaggtaaaaatgtaagttgcttaatcaatttaagtgtaaaaaagcctctaagcttttacatttt

SEQ ID NO: 527228 - DNA, 201 bp, Homo sapiens
tgttagtcagggtctattatcttgagattttcttctcttctgactctaccgaatggtgtcccactccctcagtttcaattacagtacttatctgatgactmccaatctatatctttacataaagttttgttagaaattgtatttcttatatttttttacttccatgggacatttccatttagatgatttcataggtacctt

SEQ ID NO: 527229 - DNA, 201 bp, Homo sapiens
ttctcatattttcctaatgatttcttacatttccctagtcctaatacaataatgggctagagttagattgtctgtacaagtaagactcctctaattcgtayttttaaaaaggcctaccaacttgctgttagaagttatatgactttcttctttgatttttctcttgtaatggtatttttccctaaatgtttgaagattaaa

SEQ ID NO: 527230 - DNA, 201 bp, Homo sapiens
tctactgttttacctcctgactactaaatcttacttggccctagcctttgaaactgtcttcacttgtgtgacttcattatctcctagctttctgctacttytaacatttctttctcttctgttctggcatctcttctactgcctgcacttcaaacgttgttgttagtcagggtctattatcttgagattttcttctcttct

SEQ ID NO: 527231 - DNA, 201 bp, Homo sapiens
tgagataacatgtaagtcacttagtatgtgtctggcaccaccaaaaacagagtaaatcattccataattctataaatatttattgatgcttactgtatgamaatcactattccagtaatgaagatgttaaatggtaagtattgttattgtatcttatatttgctccttggttaataataagtttcaattatgaaccatcaa

SEQ ID NO: 527232 - DNA, 201 bp, Homo sapiens
taaggtcacttaatttaaattaaccatttcatgaaacaagagtaaattaatgttaaattatttcaggaggaaggatttaaattttggtatgttttacctayattaaaccactcacagttgtgtaaaaaaaaatctcagatcatatttcttagtcaattccaaatatgccttctaaaatacctttttttccttattctagtt

SEQ ID NO: 527233 - DNA, 201 bp, Homo sapiens
cattccagtgcactttgggaggctgaggtgggcaaatcacctgaggtcaggagttcaagactagtctggccaacacggtgaaaccccgtctctagtaaaamtataaaaattagctgggcgtggtggcgcatgcctactcgggaggctgaggcaggagaatcacttgaacccaggaggcggaggttgcactgagccgagatt

SEQ ID NO: 527234 - DNA, 201 bp, Homo sapiens
aatatttaattatctacttgcttaaaataaaaattattaattccataatgtgtaactgtatttaatattgttatgtataataccagtattttctgagcccrtgaaaagttgttataattgtgataaaaccattattaaattcccaccctcagaatttccatcttaaagatattctgaaatagaacatggagagttgttgat

SEQ ID NO: 527235 - DNA, 201 bp, Homo sapiens
cagaaaggtacaagtggagaattggcatcacttgtttagcttatttcacatactgtattctccctcaccagacctttgagcatggtgttttcattacctasaagccgcttcccagcgtctcatcctttcctccctttctcctaccctacaacaaaaatggctgtcttctacttactctctttctgttcttagtagagaaat

SEQ ID NO: 527236 - DNA, 201 bp, Homo sapiens
aagaatttgaaatacaaaagagagaaagtcatatgtatatatcttcacagggaattttgggtaaacatgttaaaggataattgtgaaggtatattctttgrgttgacatccaatagtaatgaggagctttgcattgccaagaaaggcttgaactaaggcttttgtcttgcatgtcactttgaaaatcagttttatgaaact

SEQ ID NO: 527237 - DNA, 201 bp, Homo sapiens
gcagaggttgcagtgagctgagatcatgccactgcactccagcctgagcagcagagagagaccctgtctcaaaaaagatacatatatttaaacatagctcwgtgtgtgtggaatcatcgtgagcataaattctttaaaagtcaactcgggtgtgatggctcacccctgtaatcccagcactttgggaggccgaggcgggca

SEQ ID NO: 527238 - DNA, 201 bp, Homo sapiens
aatggctgtcttctacttactctctttctgttcttagtagagaaatcacttcctccaacaaagcttcgctatccctcaagtttggattaagagtctttctrtgtgctccagtggtgatcaatatttattctctgagatacgttccatagttttctttaataatttcttgttctttggcattctcctacccactcccaaagg

SEQ ID NO: 527239 - DNA, 201 bp, Homo sapiens
gatcctgattgcagaggatgctgtcaggaggaagcacaatttgaaaccaaaaaggtactgttttctagtatattccttccattggatggtttagttgagayaaggtaaaaatgtaagttgcttaatcaatttaagtgtaaaaaagcctctaagcttttacattttttagtaaaactcaactgatttcttgtctggcctatt

SEQ ID NO: 527240 - DNA, 201 bp, Homo sapiens
actggcgaaggcgtggcttcttggctgcttgacgaagtgtcgtgaataaaagaaaggagaccgcagaagtaaagaagtggggagtttaggcaagtgcctgrtttgggtaatcgaaagcacccagtgattgtatttgatgacttttaagctttcatatgccgttatttaatacctgtcacttccaaatgagagatgtaaggg

SEQ ID NO: 527241 - DNA, 201 bp, Homo sapiens
ctttagtggagacggggtttcaccatgttggccaggctggtctcgaactcctgaccctgtgatccacccgcctcagcctcccaaggtgctgggattacagrcttgagccaccacccctggccttgtatcatcatactttatactgtattacacaaatccacatggtcttaaccaaatcatagctctgtgtgtgtgtgtgtt

SEQ ID NO: 527242 - DNA, 201 bp, Homo sapiens
gaaagaatttttattaagtaactatcttggatagatgatatatacctatattcagtttatcaccctaaaaaaaaggtaggaaacctttaatattttgtagmgcttcctaggacatcttacctatttaaagtttattgtcaaatctccttatctccttcggtctttttggctaggtttaagaataattgaagtaggttggaa

SEQ ID NO: 527243 - DNA, 201 bp, Homo sapiens
cacagttccctcccactaggctgggatgtctcatctgttttgaaaaattatacatatgacattattacagagataagattaaagatgtataaaatatcacrtcagcattttgggtgaatatgccaacaagtacttaaattttcttttcattgggaaatgccactggatattaatctacctggtgagtttagaaaaggattg

SEQ ID NO: 527244 - DNA, 201 bp, Homo sapiens
ccttaattataacaaagatagctacaaaaatagtgtggcctttttctacatgtgaaacctcacttaaccccttactaatctcagtacagtttgagtagctsttatctggaattattgggactagaagtgttttggatttcagatttttttcagatttgagatgctcaacctgtagtacctgtagtagttaaaatatttaaa

SEQ ID NO: 527245 - DNA, 201 bp, Homo sapiens
attgacacactgcagctggtgggccaaattcagtcaacccagtttttgtagaacaaattaacataacaaaatgaagcaaagtttcattggaacacagacahattcattcattcatgtgttatctgtgactagtttttgcactgccatggctgagttagatagttgtacagaaaccatatggccacaaaagcctaacaaaat

SEQ ID NO: 527246 - DNA, 201 bp, Homo sapiens
ggtgctggtggtggtggtagtggtatgatgatggcacaagagttaacaaatactgcactttttaaaaaattcagaaaatgtgtgtaattctcaagtgtcayctttgttcagtgttataaatgaacttattttggaatctagctatctggtgagaaacagcatagaccagctttttgaacatttttgtggcaactagttgga

SEQ ID NO: 527247 - DNA, 201 bp, Homo sapiens
ctccataaatgccagaataaaaccaaatagtataattgcatgattattcatttgaggttcttattttgttgtttaaaaggttttggtaacagttttatacrtttgttaacgagttcacagtttccaaagtgatttcactcttattgcctctttcagtaactatggctgcaaaacagaattaccctaaaatttagtgacgta

SEQ ID NO: 527248 - DNA, 201 bp, Homo sapiens
tgacacactgcagctggtgggccaaattcagtcaacccagtttttgtagaacaaattaacataacaaaatgaagcaaagtttcattggaacacagacacaytcattcattcatgtgttatctgtgactagtttttgcactgccatggctgagttagatagttgtacagaaaccatatggccacaaaagcctaacaaaatta

SEQ ID NO: 527249 - DNA, 201 bp, Homo sapiens
attatctggcccttcacataaagtttgcatacccttagtctagaagatcagtcagttgcagtcaatctgaaatttcccctacctgacgctatggctttgtscgatttatttatccaacagatatatgaaaactgtcacaagtgagggaaagacagagaaacaacttaatgcttgccttcagaagagttcatagtattgttg

SEQ ID NO: 527250 - DNA, 201 bp, Homo sapiens
aatgtatgaaagattgcatttggaggaaaaaaggttgtgctaataaaaaatgtctcaagaccaatgttaaagtggagcttaattttctttggtttttttgkttgtttgttgttgttgttgttgttgttgttttagagatagggtttccctctgtcacccaagctagaatgtagtggtgcagtcatagctcacagcagcctc

SEQ ID NO: 527251 - DNA, 201 bp, Homo sapiens
tggaggaaaaaaggttgtgctaataaaaaatgtctcaagaccaatgttaaagtggagcttaattttctttggtttttttgtttgtttgttgttgttgttgktgttgttgttttagagatagggtttccctctgtcacccaagctagaatgtagtggtgcagtcatagctcacagcagcctccaactccagggctcaggtga

SEQ ID NO: 527252 - DNA, 201 bp, Homo sapiens
caaaacaaaaaaagagccagagtaaaaagttacagcctattagaaatgtatttggaatctggaatcagtatttacagcttggctgtgttcccatttcatgmatgatagtcaatgagcagttagttgcattcaaagcacattgctcattttggttatatttaccttcaaaatcaggaaaatacggaataaatatttgcgttt

SEQ ID NO: 527253 - DNA, 201 bp, Homo sapiens
ggagaatcacttgaacccgggaagcagaggttgcagtgagccgagattgcgccactgcactccagcctgggcaagaccgaggctgaccccgcgctcagccragtgagaccccgtctcaaaaaaagaaagaaagaaagaaagaaaagaaaagaaagaaagaaggaaggaaggaaggaaagaagaaagaaagatgtattacac

SEQ ID NO: 527254 - DNA, 201 bp, Homo sapiens
atacaaaaattagccaagtgtggtggtttacgcctatagtaccagctactcaggagcctgaggtggaaggatagcttgagcctgggaggcagaggttgcastgagctgagatcatgccactgcactccagcctgagcagcagagagagaccctgtctcaaaaaagatacatatatttaaacatagctctgtgtgtgtggaa

SEQ ID NO: 527255 - DNA, 201 bp, Homo sapiens
ctaacgcggtgaaaccccgtctctactaaaaataaaaaaaaattagctgtgcgtggtggcgggtgcctgtagtcccagctgctgggtaggctgaggcaggrgaatggcgtgaacccaggaaggcggagcttgcagtgcgccgagatcgcgccactgcactccagcctgggcgacagagcaagactccgtctcaaaaaaaaa

SEQ ID NO: 527256 - DNA, 201 bp, Homo sapiens
accacaggtacacaccaacatgaccagctaattttttttatttttttatagagatagggtcttgctatgttgcctaagctggtcttgtattcctgggctcrggcgatcctcctgcctcagccttccaaagaacggggatttacaggcatgagccactgtgcccagctcccattttctttacccatgcatccatcagtggac

SEQ ID NO: 527257 - DNA, 201 bp, Homo sapiens
ccaaaaacgtaagaattgatccagcccaaagtcatcaaactgttaagaatcattgtctttttaggtcacattaaggtagttttttaatcactactttatgsctttctgtattttccaaactattttaaataaacatgcatagggcatgtgttgttgttgttgttgttgtttttaattaagtaaatgctgttttagaacctg

SEQ ID NO: 527258 - DNA, 201 bp, Homo sapiens
gctattttaccttttattttgaaaatgttaatagtaagacctgcttcggagttactttaagaagttgaatgagttcaatataaaacactgggctgtctttytgaaggccccttttgccatttgtacttaacaatattaataatagaatttcgttactagtttttatttaaaattaccaaatccttatttctcagtttacca

SEQ ID NO: 527259 - DNA, 201 bp, Homo sapiens
gtgtataaatatctgtttgaggccttgctttcacttcttttgagtatatacccagaagtagaattgcagatcatatggtaattctatttttaattttttgmaaaactgcaattccattttctgtagccactggaccacttctcattcccaacagcagtgtacaagggttccaatttctccacatcctcatctctttttttt

SEQ ID NO: 527260 - DNA, 201 bp, Homo sapiens
tctcaaaaaaaaaaaaaaaaatagtcattttaaatcctctttcctttcactgtctgaattcaattagtcgttaaagccttaaaaatctctaagccagtccrcttaataattttgtttccacagttagtatttatattcaggctactatctttgcctagaattacaacagcttccttaactagtctcccatctcattatttc

SEQ ID NO: 527261 - DNA, 201 bp, Homo sapiens
catttaaaatcaacattttatgtgaatcgttttcactatatattcccaggaataagaatttttaggattatactttcttaacaatatatgcttttttttcratttgttttcatggaagtggtttgttaaagtaattggtgaatgctatgttactttaaaaaaaacacaatatatgaaatttagaggccaggcgtggtgggt

SEQ ID NO: 527262 - DNA, 201 bp, Homo sapiens
taaatgtgaattgatttatgtggaacaattgcattaagagtagacctgtacaaaataacaaatcaccaaggaaagaagtaattgccaaagaatttgaaatmcaaaagagagaaagtcatatgtatatatcttcacagggaattttgggtaaacatgttaaaggataattgtgaaggtatattctttgggttgacatccaat

SEQ ID NO: 527263 - DNA, 201 bp, Homo sapiens
tgtagttaagttatttattcgccatgaaaaacaaatattttccagtgaacaccacaaatcatatatatatatgtgtgtgcgtgtatatatatgtgtgtgtrtgtgtgtgtgtgtgtgtgtgtgtgtgtgtgtgtatgtatgtgcgcccgctaacaacacagattaatgcttttagagtttgacttttaataatgctctgca

SEQ ID NO: 527264 - DNA, 201 bp, Homo sapiens
tagatcataatttttcaatgattatgtggtacatattaatttgtttaaccaatatcgttttacacatttagattatttccaaattttcagacttggtttarcgagactttttataagttatttcctcagaataaagtcctagaagtgtacttgcaggtttacaaagtacgtacattttaagactcttggttgattttgcta

SEQ ID NO: 527265 - DNA, 201 bp, Homo sapiens
ttttagttcaacattgtatctttatggaaagattcctccaatgtattcttagcatctgtagagcctagtttaaatcaaggtagatgttacttgcttgtttyataacttttcttctcagtttcaaggcagaaactaaagatacaaaaaggaataacactttaatggtatagtaaaataagttttaaacttagtgagtttcct

SEQ ID NO: 527266 - DNA, 201 bp, Homo sapiens
gaataaagttgattttttaaaattatactggatattattagtgtttggaaaagtgactcatttatatttgagtgtatcataattgatttttcattggaatrtctaaataatacagtgctcagcttttatcatactatagccatgcttccttattttaaaatcccttcattttatttaaaggcaaaccttcaatagacctat

SEQ ID NO: 527267 - DNA, 201 bp, Homo sapiens
tttcatctctacatgggaggaatgacagagtcactttgcaaagtgtgcataccaggataggaggtatttatggaattaactaattccatatgtaataatgrtaggaattaattaaacagcgtaccacagtgactgtgcacagaatccaaactagaaatttggatgtcatgtttgactcctttccttacatatatcatatcc

SEQ ID NO: 527268 - DNA, 201 bp, Homo sapiens
caagaccaatgttaaagtggagcttaattttctttggtttttttgtttgtttgttgttgttgttgttgttgttgttttagagatagggtttccctctgtcmcccaagctagaatgtagtggtgcagtcatagctcacagcagcctccaactccagggctcaggtgatgcttctgcctcagcctcccaggtagctgggatta

SEQ ID NO: 527269 - DNA, 201 bp, Homo sapiens
tggtttttttgtttgtttgttgttgttgttgttgttgttgttttagagatagggtttccctctgtcacccaagctagaatgtagtggtgcagtcatagctyacagcagcctccaactccagggctcaggtgatgcttctgcctcagcctcccaggtagctgggattattgacatgcgtcatcacccccagctaattttcta

SEQ ID NO: 527270 - DNA, 201 bp, Homo sapiens
ctagatatcctaatttagtttatctggggtaggttttagggatcagtaatgttcaaaatatttccaggtgattctagtgtactgtcagggttgagaactcygctctaaggtagtttgaatttgaaagcttgagaaaatttggagtggccattttcattacagacgaacaatgagtaatatccctgaatagtccctgaactg

SEQ ID NO: 527271 - DNA, 201 bp, Homo sapiens
ctattaatataacatagtataaggcagtattcctcatccctgcctgcccattacaatcatttgagtagtaattaaaaatactgatgcatggatctcacccytagatatcctaatttagtttatctggggtaggttttagggatcagtaatgttcaaaatatttccaggtgattctagtgtactgtcagggttgagaactcc

SEQ ID NO: 527272 - DNA, 201 bp, Homo sapiens
gagaaatattattaggtaaggtagtggaatctccaccaagagtttctaaaggcttataaacaaaagataaatctaataaccaaatctaaatatggccttawatgcttttaattatagtaaaatgtacactattcactattttaactatacactatgtatgtacactatacactatttagtgtacgtacactatacactagt

SEQ ID NO: 527273 - DNA, 201 bp, Homo sapiens
aggaaagggaaaaaaaaaaaagtactgtaacatttgtcttgcttcagtcgatgtttatggtttaccttttcagattaatgcagttaatctgttgaacaaaragcctactgttttaccattttgcaatttttgccctattaatataacatagtataaggcagtattcctcatccctgcctgcccattacaatcatttgagta

SEQ ID NO: 527274 - DNA, 201 bp, Homo sapiens
ccacattcactgataggtaaaaaagaatggatgagggaagggaatattgttgaaagcctgcttttgtcagccattctgattgattaaatcatctctgattwaatgtaacgatttatgtaaggtaaccatagcaatctgttttatgtaggaagtattgccccttaatttatgagtgaggaaattaaagcttagggaggatag

SEQ ID NO: 527275 - DNA, 201 bp, Homo sapiens
ttctgttttggatcaggctctggagtggacgcccctagcttaggggtccttctaggcagccagaaacctgcggaaaatggtagcgatggcggctgggccgrgtgggtgtctggtgccggcgtttgggctacggttgttgttggcgactgtgcttcaagcggtgagtgtagatcaccttcgcagctgccacagggagagtag

SEQ ID NO: 527276 - DNA, 201 bp, Homo sapiens
ttgtagcttcattattgtaaaacatattcaagatcctacagtaagagtgaaacattcacaaagatttgcgttaatgaagactacacagaaaacctttctarggatttgtgtggatcagatacatacttggcaaatttttgagttttacattcttacagaaaagtccatttaaaagtgatcatttgtaagaccaaaatataa

SEQ ID NO: 527277 - DNA, 201 bp, Homo sapiens
aaatttaaaagaatttatctccaaatgaaacatttcagtaacttgtcttcaatgtgttagtttttgacaaccccgtgttctctttttggaaagctttgtartataaatatggaattgtgttttatttcccattttttattttcaggtgtctgcttttggggcagagttttcatcggaggcatgcagagagttaggcttttc

SEQ ID NO: 527278 - DNA, 201 bp, Homo sapiens
tccccccatttccacatataccctctttctagaacaaggaggaggacagatgtgggtttgggttttggggttttttttttaatactccttaatactttttwaaaaaatactcctttttaatactccttaaagttagctctaaatcccttgacattctgagcagtgtgtatagcaaaacttagctcttctagggggcagcat

SEQ ID NO: 527279 - DNA, 201 bp, Homo sapiens
tcatttatagtaagaacccagtgttggatgaaacttgaaatgaaagtaaagcacataatacctggcacttaattgtctacaataaattgtaacatgaaatstggttaaaaagaatatggactgttagtttacacacctattgctagtaatttgagacacctaacctcacctttaacatctgaaaacagagccaaggatagg

SEQ ID NO: 527280 - DNA, 201 bp, Homo sapiens
ttttgtataatattgaaactcttggattattatagctttatttttgtatctttttaaagttcaaatgtattaggtgattactatctatagggagataccayaatttaatttgttttagtagctttgtttcttattgttttcagatatttataatctttcttaaagatgatcataactggccaggcacgcctgtaatcctag

SEQ ID NO: 527281 - DNA, 201 bp, Homo sapiens
caaacaaattaatagtgaacttgctcatcttttaaatattttcatcaaaactcttagatttatttaaattataaagtagactggaaagatcatttgagttrtccagttaaaactaaattggtaagatacctgtgtttgtagtgagaaaaaaatgttagcatatttctgttgtttccttccagtactgtctttgacttgtac

SEQ ID NO: 527282 - DNA, 201 bp, Homo sapiens
actcctgacctcatgatccacccagctccgcctcccaaaatgctgggattacagacctgagccaccgcgcccagccaacagttttatttttgaagaaaaawttattttgaagaaaaccttttttcttcaaaaaagttttaatttaaaaggccatgaattttatttggctgccataatgaattctaaaatagtatattgaca

SEQ ID NO: 527283 - DNA, 201 bp, Homo sapiens
ttatttaaattataaagtagactggaaagatcatttgagttgtccagttaaaactaaattggtaagatacctgtgtttgtagtgagaaaaaaatgttagcrtatttctgttgtttccttccagtactgtctttgacttgtacatgctgaattctgtttgaagtattatggtttgtaaagctttcaggcataatgatgtgtt

SEQ ID NO: 527284 - DNA, 201 bp, Homo sapiens
tctgtatgcaggggacaaaattaaaggattataaagagtaaactggtatcagatttgtattttaataacttttgttggtgtgaacaatagttgataaggcrgaggggaatacttatgccagaaaaatagtttgccgttttccagaggcaagatacaagggcttaaaccaacacattggctgtgaaaatgaaaaaggacaga

SEQ ID NO: 527285 - DNA, 201 bp, Homo sapiens
acatgctgaattctgtttgaagtattatggtttgtaaagctttcaggcataatgatgtgttattattattggtagtaaaggtttgtttttaacagtaagtrcattttcggagttctaaaagaaaaacaagcaggcaagctttgaaatgttagtattcagccaaaatttaacccttgatttctctgtatctgaacctgaaat

SEQ ID NO: 527286 - DNA, 201 bp, Homo sapiens
ttactgccttttcttagtagttcttcataataccccagttttttggtataattttagtagaaccaaacttgcaccacaaacctctaaaattaattatattyctattcaattttcattattaatggagctatatgttgtatcttgacacatttcagcagttgcagctcagcaataaaagtagatctgccaattaatatatgc

SEQ ID NO: 527287 - DNA, 201 bp, Homo sapiens
gtgaaaccccgtctctacaaaaaatacaaaaattagccaagtgtggtggtttacgcctatagtaccagctactcaggagcctgaggtggaaggatagcttragcctgggaggcagaggttgcagtgagctgagatcatgccactgcactccagcctgagcagcagagagagaccctgtctcaaaaaagatacatatattta

SEQ ID NO: 527288 - DNA, 201 bp, Homo sapiens
tctgctactcagcgagtgttcttggacaaattacctgattactgtgtgtctgtttttataactataaattggggataattatagttcctgtctcatagggygattatgaggattaaataagttaatatgcatgcactgcttaaaattgtgtctagcatataacaagtagtaggtaaatacttgctgcaggtggcgatgaca

SEQ ID NO: 527289 - DNA, 201 bp, Homo sapiens
atttgtttaaccaatatcgttttacacatttagattatttccaaattttcagacttggtttagcgagactttttataagttatttcctcagaataaagtcytagaagtgtacttgcaggtttacaaagtacgtacattttaagactcttggttgattttgctaaatacccttcaggaaggatgtgcctatttatattcctc

SEQ ID NO: 527290 - DNA, 201 bp, Homo sapiens
tcccagcactttggaaggccgaggcgggtggatcacctgaggttgggaattcgacaccagcctgaccaacatggagaaacctcgtctttactaaaaatacaaaaaaaaaaaaaaaacattagctgggcgttgtggcgcatgcctgtaatcccagctgctcgggaggctgaggcaggagaatcgcctgaacccgagaggcgg

SEQ ID NO: 527291 - DNA, 201 bp, Homo sapiens
agtggaatcatatagtatttgtccttgtgactgatttacttggatcagggttcatccatgttgtattgtgtgacaggatttccttcctttttaagaatgcrtagtattccactacacacacacacacacacacacacacacacacacacacagagacacacacttttttttttttttttttttttttggacatggtcttac

SEQ ID NO: 527292 - DNA, 201 bp, Homo sapiens
ttcatccatgttgtattgtgtgacaggatttccttcctttttaagaatgcatagtattccactacacacacacacacacacacacacacacacacacacasagagacacacacttttttttttttttttttttttttggacatggtcttactctgtcacccaggctggaaggcagtgatgtgatcacagctcactgcatcc

SEQ ID NO: 527293 - DNA, 201 bp, Homo sapiens
gggctgtctttctgaaggccccttttgccatttgtacttaacaatattaataatagaatttcgttactagtttttatttaaaattaccaaatccttatttytcagtttaccacagactttaatggctcctgtcacttggtgtttttcaagaatatgttcccaaattgggctttatttaaggcccagccagataatatttta

SEQ ID NO: 527294 - DNA, 201 bp, Homo sapiens
caggagagagaccagctagttacaagatggcccattaaggcaataatggatgggagaaggggcagcaacagaataacttttaataaagcataccccttagstgtaaatagtttttttgttgttgttgttttgtttgtttgtttttgagatggagtcttgctctgtcgcccagactggagtgcagtgacgcgatctcagctc

SEQ ID NO: 527295 - DNA, 201 bp, Homo sapiens
ttattttctgttttttggtagtagccatcctaataggtatgaggtactgtctcactgtggctttgatttgcatttctcttaaaataaatggtgttgaacaytttgttgaccatttgtttatcttctttagaacattgtttattcaagtcctttgcccattttataattgggatttttggttgttgttgttaagttgtggag

SEQ ID NO: 527296 - DNA, 201 bp, Homo sapiens
acgtttagcagagagagaaaaggaaagaactgatgaaaaatagtaattagtgactcatcttagtattccttttaaatttgttcacttattgcagtctgttaaaaaaaaaaaatctttttactggccgggcacagtggctcacgcctgtaatcccagcactttgggaggccgaggtgggcagatcacgaggtcaggagattg

SEQ ID NO: 527297 - DNA, 201 bp, Homo sapiens
cagatgattactatgcctcatgtgctgtgtgctctttgaaaggaatgacagcagactacaaagcaaataagatatactgagcctcaacagattgcctgctyctcagagtctctcctatttttgtattacccagctttctttttaatacaaatgttatttatagtttacaatgaatgcactgcataaaaactttgtagcttc

SEQ ID NO: 527298 - DNA, 201 bp, Homo sapiens
gtcatgtctaaaagcctttttttaattactaaatttaaactggattgaattgctttgtcttagatgaggctgagaaggttgtttctgaacagaaagtaatratgacgtccctcttttttgtagtatgtccgtggttcagaccctgtattaaagcttttggacgacaatgggaacattgctgaagaactgagcattctcaaa

SEQ ID NO: 527299 - DNA, 201 bp, Homo sapiens
ttccaattatcttgttattcaggcatttggtgctaggaattactggatcacctctccctaaactttctactgtttaagggtttttgcacatctttaggtcrttcgagataacatttcaggttgtctttttttgatctccctctgtctttgactgtcagttgtctatagctgtgtaaccgccctaaaacctagtagcttaaa

SEQ ID NO: 527300 - DNA, 201 bp, Homo sapiens
atctatctgaatttggaattcttctggtttgttctttcatgtttaaaaatgatgtttttcaatgcatttttttcatgtaagccctttttttagccaaaatrtaaaaatggctgtaatatttaaaacttataacatcttattgttggtaatagtgctttatatttgtctgattttatttttcaaagttttttcatttatgaa

SEQ ID NO: 527301 - DNA, 201 bp, Homo sapiens
tttgttgataccactaacaaaatgctttgtaacagacttgcggttaattatgcaaatgatagtttgtgataattggtccagttttacgaacaacagatttytaaattagagaggttaacaagacagatgattactatgcctcatgtgctgtgtgctctttgaaaggaatgacagcagactacaaagcaaataagatatact

SEQ ID NO: 527302 - DNA, 201 bp, Homo sapiens
cccaaagacagccatcatacacagcctttttctctcaaactctgcctattgaattcatactcatgacgtataatttagtgggaagtacactactttaacgmaatgtattttttagttttaacttctaataactgactaaggcaaattaatttactcttggcctttgtttctttatctctttctccctgaactaagatgttt

SEQ ID NO: 527303 - DNA, 201 bp, Homo sapiens
acgcctgtaatcccatccaacactttggaagacgaaggcgagaggatcacttgaggccaggagtttgagaccagcctgggcaaaatggcaagaccaagacytccatctctacaaaaaattaaaaaaaaaaaaaaagctgggtgtgatgacacacacctgtggtcctagctatttgggaggctgaggctaccggaggatcac

SEQ ID NO: 527304 - DNA, 201 bp, Homo sapiens
gggttgggaatataccaagtgttaataatcacatctgagctagtctccatctttggagttcacaaccccagaataccctagataaactgaagcataattcyggaagaagttctaagaactctgtcatcactgccgaactacataactacattgttagttatccaatgctacttaatttaaaattggatatttgatctctta

SEQ ID NO: 527305 - DNA, 201 bp, Homo sapiens
attgcactccagcctgggcaacaagaatgaaactccatctaaaaaaaaaaaaaagaaaaaataggcatggaagctggactgccagaatactgttgatatgrtattctgtttgttggacgaaaacataatatctaatgttacgaaggtaaccactaaaagaattaaattaaataaaagttggaaggaaaggggaactaagag

SEQ ID NO: 527306 - DNA, 201 bp, Homo sapiens
ttaaccaattttaagtgtactacagtccagtattaagtattttcacattgttctgtaacagttctctataactttttcatcttgtgaaactgaaactctaygcccattaaacacttaattttatctttctgtgcccaccaccacccccgccctcctgccagcccgtgacaactacctgttttctgtttctatagttttgac

SEQ ID NO: 527307 - DNA, 201 bp, Homo sapiens
gtggtgactcacacctgtaatcccaccactttgggaggctgaggtaggcagatcacctgaggtcgggagtttgagaccagcctgaccaacatggagaaacyccatctctactaaaaatacaaaattagccaggcgtggtggcacatgcctgtaacctcagctactcgggaggctgaagcaggagaatcgcttgaacccagg

SEQ ID NO: 527308 - DNA, 201 bp, Homo sapiens
gatctcctgacttcgtgatccacccaccttggcctcccaaagtgctgggattacaggcgtgagccaccataccctagccgagagtttaattttcatctcarcttcttactgactttgtgattgagctagcacattactccaggatcttcaattttgtcataattacattaccttacattagtgtttattttacactggtta

SEQ ID NO: 527309 - DNA, 201 bp, Homo sapiens
tgaagcaggagaatcgcttgaacccagggggtagaggttgcagtgagctgagatcttgccattgcactccagcctgggcaacaagaatgaaactccatctaaaaaaaaaaaaaagaaaaaataggcatggaagctggactgccagaatactgttgatatgatattctgtttgttggacgaaaacataatatctaatgttac

SEQ ID NO: 527310 - DNA, 201 bp, Homo sapiens
aaaaaaaaaaagctgggtgtgatgacacacacctgtggtcctagctatttgggaggctgaggctaccggaggatcactcgagcctaggaggtcgaggctayagtgatccatggtcacaccacttcactccagcttgggtaacagagcgagctctgtctccaaattaaaaaagaaaaaaagagttattaagtagagggtaga

SEQ ID NO: 527311 - DNA, 201 bp, Homo sapiens
cattatagcagaaaataaattgagctatatgtttgtaatataaaaataattatttcataaaaaaacaaagcaagctatcaaacaaatcgcaattatttcaratttttctactaatattcttctcttatttatatgtgtaacctatcacctggtaacagatttcaaaggcttaagaaaaattgggaagagaaaagcttaaaa

SEQ ID NO: 527312 - DNA, 201 bp, Homo sapiens
atgttggccaggctggtctggaactcctgacctcaggtgatcagcccacctcggcctcccaaagtgctgggattacaagtgtgagccaccgcgcctggcckctttgagtcatttttaccaattctttggatattggatctcagaaaatatagtggtcacattctcacttcctcaagttactttttttttcatcatgtgata

SEQ ID NO: 527313 - DNA, 201 bp, Homo sapiens
aaatttaaatgccaatcagttacttttggcaataaaaggatggcaggaataatatcaaactctcatatattagcatttatctgtcaggtacttaaaaatastttctgatgtccttaaattcaaagccttaagtctgcaaaaccagtgatagaacagctagaaaaaagtagtttacctaagaaactcgatactttgtatctc

SEQ ID NO: 527314 - DNA, 201 bp, Homo sapiens
ctgtagttaagttatttattcgccatgaaaaacaaatattttccagtgaacaccacaaatcatatatatatatgtgtgtgcgtgtatatatatgtgtgtgwatgtgtgtgtgtgtgtgtgtgtgtgtgtgtgtgtatgtatgtgcgcccgctaacaacacagattaatgcttttagagtttgacttttaataatgctctgc

SEQ ID NO: 527315 - DNA, 201 bp, Homo sapiens
catttttagtcttttgcatttacacttgccttatttctgaactactattctgaaggtcaagctggtaccaaaccagagcacctctggagataagaattcayttagctgaattgcttatctgtgtgaaataataaacaaattatttcagcctaatttattgttcagttttgattaaaaacaaagaagtttagactaatggtt

SEQ ID NO: 527316 - DNA, 201 bp, Homo sapiens
tatctcagctcactgcaacctctgcttcctgggttcaaacaattctcctgcctctgcctcccaagcagctgggattaaggcgcctgccaccacacccagcyaatttttgtattttttagtagagacagggtttcaccatgttggccaggctggtctcgaactcctgacctcagatgatccgcccacctcggcgtcccaaag

SEQ ID NO: 527317 - DNA, 201 bp, Homo sapiens
ctactgttttaaatggctttgctcacaacccgggtataatttacagacattattggtaaggatgttgacttattgtaaaaatcataactaatttgtagctygaagaaaatgtaaactaatgaaacaaaacgtacttaaattttagtactgtttttgtacagttagtatttactaaggaatataagtgacttcagctttata

SEQ ID NO: 527318 - DNA, 201 bp, Homo sapiens
gttaacctattctttctttctttcttttttttttttttttttttttttgagacagagtcttgctctgctgccaggctggagtgcagtggcgtgatctcggstcactgcaaccttcggctcactgcaacctccgcctcctgggttcaagcaattcttctgcctcagccccacgagtagctgggattacaggcatgcgccacc

SEQ ID NO: 527319 - DNA, 201 bp, Homo sapiens
aggatgagactcatttttagtaatggtcactttttcaacaaactgaatttagactttgatagccagaggcataaaatttttgttagaaattattcccaaaraagcagaaaatgtctttgaaaccccttgtcattctgctgattgatattccactatttttatttggtctccctcccttccagttttgatcataaaagacct

SEQ ID NO: 527320 - DNA, 201 bp, Homo sapiens
accaaactaactttcatgtcttcactgcttcatattcttttctctctttttttttgagacagagtctcactgtcgcccacactggagtgcagtggcgcaayttcagctcaccgcaacctctgcctcccaggttcaagtgattctcctgcctcagtctcctgagtagctgggactacaggcgcacgccaccacacccagcta

SEQ ID NO: 527321 - DNA, 201 bp, Homo sapiens
cataggaacattttctggaaattagagtgattggattttctttagaaatctccaaattggtggctgggcaaggtggcttacgcctgtattcccaccacttygggaggccgaggcaggcagatcacgaggtcaggcgttcgagaccagcctgactagcatggtgaaaccccgtctctactaaatatacaaaaaaaaaaaatt

SEQ ID NO: 527322 - DNA, 201 bp, Homo sapiens
ggaatacaggcatgcaccaccgtgcctggataatttattttttattttatttatttatttatttattttagacggagtcacactgtcgcccaggctggagygcagtggcgcttgcagtgattttggctcactgcaagctccgcctcccaggttcacgccattctcctgcctcagcctccggagtagccgcgctacaggcgc

SEQ ID NO: 527323 - DNA, 201 bp, Homo sapiens
cctcggcctcctaaagtgctgggattacaggcgtgagccactgcgcctagcctcttgtggctctaatttattatgtagtactctgtggtctgtatattaaygtcttgcctttatcttttatattatatggtaaaaccctgatttttgtattttgaattttcttgtttaattgtacacatttttgtactggtatatcaatag

SEQ ID NO: 527324 - DNA, 201 bp, Homo sapiens
gccatcatgctcccattttaaaagaatcacccaatttgataatacatccccacctgtagtttcttttggctctccgtcatacattttttgtttcatccttactgactgactacttggtgatatttttggtgccattatccccattatgaaggggcttcttcagattcctaatggactgttggtatttatcttagatttcct

SEQ ID NO: 527325 - DNA, 201 bp, Homo sapiens
gattggagggtggctagtctagaggtgatggtagcaattggtgatggtttttctaaaatcttttttttttttttgagacggagtctcactctgtcgcccaractggagtgcagtggtgtgatctcagctcactgcaacctctacctcccaggttcaagcaagtctctctgcctcagcctcagtagctgggattacaggtac

SEQ ID NO: 527326 - DNA, 201 bp, Homo sapiens
ccatcatgctcccattttaaaagaatcacccaatttgataatacatccccacctgtagtttcttttggctctccgtcatacattttttgtttcatccttactgactgactacttggtgatatttttggtgccattatccccattatgaaggggcttcttcagattcctaatggactgttggtatttatcttagatttcctc

SEQ ID NO: 527327 - DNA, 201 bp, Homo sapiens
aggagtttgaggctgcagtgagctatggttgcgccactgcactccagcctgggcaacagtgaaaccctgtcttttaaaataaaaacaaaaaaccaagcatyttcctccatctcccacttttcattcactctttaacctgttctatttccactgctctctgaatgctaataacctccatgttgcaaaattctttcccatttt

SEQ ID NO: 527328 - DNA, 201 bp, Homo sapiens
tttcaccgtgttagccaggatggtctcgatctcctgagctcgtgatccgcccgccttggcctcccaaagtgctgggattacaggcgtgagccaccgcgccyggctaaactggtgcttttagtttaaatctagaactaaaggattctttcttaacctggattttcttatgtcaaaatctattttgaaccatgccccaaattt

SEQ ID NO: 527329 - DNA, 201 bp, Homo sapiens
tatgtttcccagggtggtctcgaactcttgggttcaagtgatccttctatcttggtgtcccaaagtgtagggattactgtgaggactagtaattttttttytttttttgagataagtctcactctgtcgcccagtctggagtgcagtggcacaatctcggctcactgcaacctccgcctcccgggttcaagtgattctcgt

SEQ ID NO: 527330 - DNA, 201 bp, Homo sapiens
caccatgctcggctaatttttgtatttttggtagagacgaggtttcaccatgttggccaggctggtctcaaactcctgacctcaggtgatccgcctgcctyggcctcccaaagtgctgggattacaggcgtgagccaccgtgcccggccagttgttttttttaaatgtccttattggccaataaaattggcagcaatactt

SEQ ID NO: 527331 - DNA, 201 bp, Homo sapiens
taggattacaggtgcatgccagctaatttttgtatttttagtagagacggggtttcaccatgttggccaggttggtttcaaactcctgacctcaagtgatytgcctgccttggcctcctaaagtgctgggattacagacatgagccactgtgcctagccattatttttgttttgaaaagcaactagctttgaatgagattt

SEQ ID NO: 527332 - DNA, 201 bp, Homo sapiens
aggccatcatgctcccattttaaaagaatcacccaatttgataatacatccccacctgtagtttcttttggctctccgtcatacattttttgtttcatccttactgactgactacttggtgatatttttggtgccattatccccattatgaaggggcttcttcagattcctaatggactgttggtatttatcttagatttc

SEQ ID NO: 527333 - DNA, 201 bp, Homo sapiens
atcatgctcccattttaaaagaatcacccaatttgataatacatccccacctgtagtttcttttggctctccgtcatacattttttgtttcatccttactgactgactacttggtgatatttttggtgccattatccccattatgaaggggcttcttcagattcctaatggactgttggtatttatcttagatttcctcag

SEQ ID NO: 527334 - DNA, 201 bp, Homo sapiens
cagtcctgctaggcttggaagtcagcatagtccaggcaggacagcatctttaaatcagagaccaaggacacacaggtaagcctttaggttgagtatctcarcatctctaaagtgggtgtaactgactggcgacaaactcctatggaggtgctgagtaaaggtgaggtgccactctaatgctaatataaaatgtaaaagttg

SEQ ID NO: 527335 - DNA, 201 bp, Homo sapiens
tattgtcagattgcaaatgatgtggaaagtaaaaataggacacagattagtgtcaaggaccacggtactgtggctggagtcagctgattgaactggaatascagtaccagaccctggaaaagtgtcatcagcagtgagaccccactgatagcctgaagaaggttgtctgatgcaaccaatctgccagtagcatgtgatgtg

SEQ ID NO: 527336 - DNA, 201 bp, Homo sapiens
gagaaatgtctagtcaagtcttttgcccatttttgagtcgggtttttttttttgttgttgttgaggttttttgagctgatttttgataaggctgttgcagyactaagcgatataagatgctgtggatggtagactgtcacctaccttgactaacagctcattgttgagtgacttttgtgataaaaggtgtacctattgtca

SEQ ID NO: 527337 - DNA, 201 bp, Homo sapiens
attacaggcgtgagccactgtgcctggcctctatttgcctgtcttctttggagaaatgtctagtcaagtcttttgcccatttttgagtcgggttttttttkttgttgttgttgaggttttttgagctgatttttgataaggctgttgcagtactaagcgatataagatgctgtggatggtagactgtcacctaccttgact

SEQ ID NO: 527338 - DNA, 201 bp, Homo sapiens
tttttttttttttttgagacagagtctcactctgtcgccaggctggagtgcagtggcataatctcagctcactgcagcctctgactccctggttcaagcgwttctcctgcctcagcctcccgagtagctgggactacaggcacacaccaccatgcccagctaatgtttgtatttttggtagagatggggtttcaccatgtt

SEQ ID NO: 527339 - DNA, 201 bp, Homo sapiens
agttaaatttgaggttttgcacatttgcagagaaatgtcctttgtgagggatgattctaaaagacggatcactaatgtcccccctttttccttacttcccmgcatctaaggtgttttccccacaggtgccagacagggttgttgtacccctttgactgccacaaaatcagtgtgtcccattccagtagctagctttacctt

SEQ ID NO: 527340 - DNA, 201 bp, Homo sapiens
tgattatgcaacttcatttgtcactctgattaatcttaccgacagaggctgggaccagatccattcagtttttcttataacacatttcattacagttactrtcaacaggatagcaggatgaggccagactgcaatattgacttcaattatgctccccagggtccaagacccagccaacagaacaaatgcaataaaccttta

SEQ ID NO: 527341 - DNA, 201 bp, Homo sapiens
gatctgccctactcggcctcccaaagtgctgggattacaggcatgagccaccacacccaactggagatgatatctttattgtactagacagcaaacaaacytgccttttactcctgagggagacactgtttcttgatccctcaagaccattccttatataatacaaacatatgtagcaagttggtatggaacaaaatgagt

SEQ ID NO: 527342 - DNA, 201 bp, Homo sapiens
ttagaaagctgctgccattgttgctgcctcaactgcctcttgacacccacaaacctggtgactgggcattgaacttggagtccagctgttgtttccagtgyggttgcctgtaaacatccaaacagttggagaatggacactggagcatcaatttggaaaaaaaccttatttcttgacttactttgccaataggaaatgtaa

SEQ ID NO: 527343 - DNA, 201 bp, Homo sapiens
gaaacaacatcattttgtgttttctacttatgtcatctgttctgtctcttttttctcctttctttcttttggattaacttccttcggagatttgttacatrtgtacatgctgactcctgcttgtggtgaatttttttccttatgtgttttgtaaatttgtgttgtaagcttattttaagatctcatgtgttgagatctctg

SEQ ID NO: 527344 - DNA, 201 bp, Homo sapiens
gaaaatttaaatgctggtgctggtcagactttttttgttagattctctcatttaaaaaaaatactgtttgtttaaagcatgcataaaaatttatgtattgmaatatacttaaaaattcaagatgcttcccatttgtgtaatatttacctggaggactcgtacttaggtgtcttaacgtgaattgagtctccaaggtctcca

SEQ ID NO: 527345 - DNA, 201 bp, Homo sapiens
gttggtgttgtagtagtagtagtagtagtacgtgaatgtttttagtgttttgatgtgcacattttcccttctgtctaaatgtagtaatgattagtatcttyacagcatagcttttctttttcattacatactaaccagcatggctagttactaagagttgtttctaaacacttttttaggtttgtgagagttttttgtttt

SEQ ID NO: 527346 - DNA, 201 bp, Homo sapiens
tgttttctacttatgtcatctgttctgtctcttttttctcctttctttcttttggattaacttccttcggagatttgttacatgtgtacatgctgactcckgcttgtggtgaatttttttccttatgtgttttgtaaatttgtgttgtaagcttattttaagatctcatgtgttgagatctctgtgccacttaagggatat

SEQ ID NO: 527347 - DNA, 201 bp, Homo sapiens
gtttcccagacatcatatgtgactttgttactgaattgttaggatgaagatgatttttcagatgcgtatttgagcaaattgacaagtaagatctatagttygtgttcatgcacacatttcaaaaattttaggaaacccagtgtttgaatgcagataagtttgatctcagtgaacatgtttaacaataaaataagatattaa

SEQ ID NO: 527348 - DNA, 201 bp, Homo sapiens
cagtggtatttgtgtatccaagcatgtctaaacatagaaaaggtacaataaaaatacagtattataatcttatggaactattgttattatgtggtgtgatrtatatgtggtccattgttgaccaaaatgttatgtgacacatgactgtacaatacagttttattaactgtagtcctcgtgttgtacatggatctctaaact

SEQ ID NO: 527349 - DNA, 201 bp, Homo sapiens
ttttttttttttctcaaatgaattttagcatttgtttacgttggaatcagttgagttttcaaactgctggtatcttttttttttttttttttttttttgaracggagtctcgctctgttgcccaggctggagtgcagtggcgtgatcttggctcactgcaagctctgcctcccaggttcatgccattctcctgcctcagcc

SEQ ID NO: 527350 - DNA, 201 bp, Homo sapiens
ttagcatttgtttacgttggaatcagttgagttttcaaactgctggtatcttttttttttttttttttttttttgagacggagtctcgctctgttgcccargctggagtgcagtggcgtgatcttggctcactgcaagctctgcctcccaggttcatgccattctcctgcctcagcctcccgagtagctgggactacaggc

SEQ ID NO: 527351 - DNA, 201 bp, Homo sapiens
atgaacactagtaataattaacagcctggatcataatttacaaaggacttttcatatgtagttggccctttgtatctctaagtttgcatctgtggatttarccaaccttggataaaaaaattccagaaagaaaaagtaaaaaatacgaggacaatacaagagtaaaaaataatacaaataaatacaatataactactattt

SEQ ID NO: 527352 - DNA, 201 bp, Homo sapiens
aacgctcgcgagagaacgaggttcaggcggctgcacgaagggggtggaggggggctggagagagtgaggaggaaggggaggaggtgccgtcccacaatacyaggcgggagggcgggtaggcggtttgtatccgggctgtgaggtgctcggagcctcggcggaccttgctgcctctgtctctttaacgcgagaggaagcgat

SEQ ID NO: 527353 - DNA, 201 bp, Homo sapiens
gtgatgtaaattttagtgttttggtatttgtatttaaatatatctgggttttatttaaatagtatttactgtgttaatgcattttatgctatgaaataaayggtacatgttagtttaataggaatttaaaaatatgcaaaatatcccaaagtaaatctggttcgatttttgggaataataataagatatgtataagagaat

SEQ ID NO: 527354 - DNA, 201 bp, Homo sapiens
gcacttatacagtaaacaaatataaaacaactttttctataatatgaaatgcttggtttataaccaacttaatgtgtttttaatttgttgtttgtttagatttttctagtctaatcccccctgccccgcacaagtgaaacttaatttggaactctctggtatatacaacagtcaaaggatcagggtgaaggtggggacagg

SEQ ID NO: 527355 - DNA, 201 bp, Homo sapiens
tattgcctttagtctctctcacaactcttgatatgatttttgcttgtcataatgagtctgccaaaagagttttccacttgtattatattcgctctgttttkttttttttttttttttttgagacggaatcttactcttacctgggctgtagtgcagtggtgtgattgtggctcactgcagccttgacctcttgggctcagg

SEQ ID NO: 527356 - DNA, 201 bp, Homo sapiens
tgggaggctgaggtgggaggatggcttgagcctgggaggtggaggttgcagagagctgagattgtgccactgcgctctagcctgggtgacagagtgagacmccatcttaaacaaaacacaaggcttcaagaagaaatactgatcaatgatgaagtttgagaaccactgtcctagagattcaggaattatatttaggaatgt

SEQ ID NO: 527357 - DNA, 201 bp, Homo sapiens
aaatttaactttaatatgcgattttattacataagtagaactagagaacaaaaacattgcagaaataaactgaatttattggcatgtttgagacagcgtastaatggtaaaattaaagacacaaacattgtcaaagttttccttcaaattaatataatgaaattgctggctatcacttttaaggtcattaacgtgttcaga

SEQ ID NO: 527358 - DNA, 201 bp, Homo sapiens
atcatatttcaaatacataatgtgttacattcatgttttcatattaatattttagaaatgctttatcttaattgcagagttgtagattgggtagtttgatmaataagattcagatttattattttttagtacttttttgtatcaagcaatgttagagtttctaatatgctattcccattttatataagctgtgttagtccg

SEQ ID NO: 527359 - DNA, 201 bp, Homo sapiens
agcttctataaggaacttaaaagaaaaaaaaacaaccccattaaaaagtgggcaaaggacttgaacagagaacagacacttctcagaagacatacatgtgyggccaacaatcatttgaaaaaaaattcaacatcactgaccattaaagaaatgcaaataaaaaccacaatgagctaccatctcataccagtcagaatggct

SEQ ID NO: 527360 - DNA, 201 bp, Homo sapiens
ttatttttttcatattctgaatttttagatcccatctttttgtgtattatttttcttttccccacttagacatttaatttactctgcaaataggatttttgtgacttttttatataatacatagttttatagttttattttagcaatgcttgtgtggattattttcaaaccgtatactttaattaatgaccacattctttt

SEQ ID NO: 527361 - DNA, 201 bp, Homo sapiens
ccttcctgtagtagcagtggcagttgtgaggatgatagtaggccttctgagatgatattgtagaaaatccatggaacgttaagtagtgttgctatgtcatrcttctttcctgcctggctttctgtcttttgatgattaagaaggatttttctggaagatctttaaaagaagcatatgtgttatttttatttcctccagagt

SEQ ID NO: 527362 - DNA, 201 bp, Homo sapiens
aaatattttcttccatctatgggttgtcgttttactttgttgattgtttcctttcttgtgcaggagctttttagctttatgtaattccatttgactttgcyttgttgcctgtgctttttgaggttgtcatttttattgactagatgatattccagtatattaattttttttcttttttgtatttttgagatggaatctcgc

SEQ ID NO: 527363 - DNA, 201 bp, Homo sapiens
agcgaacattactgcctcctgtcagattagctgtggcattagattctcacaggagcgcaaaccctattgtgaaccttatgtccaagggacctaagttgcaygctccttatgagaatctaatgcctgatgatctgaggtagaacagtttaatcccaaaaccattcgcctgtctccccagtgcgtggaaaattgtcttccaca

SEQ ID NO: 527364 - DNA, 201 bp, Homo sapiens
ttctggttgttggtcctgtgtcagatggatagtttgcaaatattttcttccatctatgggttgtcgttttactttgttgattgtttcctttcttgtgcagragctttttagctttatgtaattccatttgactttgctttgttgcctgtgctttttgaggttgtcatttttattgactagatgatattccagtatattaat

SEQ ID NO: 527365 - DNA, 201 bp, Homo sapiens
tttaggatcttttcaactttatgatggtacaaaaatgatatgcattcagtatgcttctcaacttatgatggagctttgtctggataaacctgttataagtaaaaaaaatacaagttgaaaatgtactttcaatttacaatattttccactaaacagtgggtttattgggacataaccccattgtatgtaagtggaggagca

SEQ ID NO: 527366 - DNA, 201 bp, Homo sapiens
ttttttttttttttttttttttttgagacggagtctcgctctgttgcccaggctggagtgcagtggcgtgatcttggctcactgcaagctctgcctcccargttcatgccattctcctgcctcagcctcccgagtagctgggactacaggcgtccgccaaccacgcccagctaattttttgtatttttagtagagacgggg

SEQ ID NO: 527367 - DNA, 201 bp, Homo sapiens
gatcttggctcactgcaagctctgcctcccaggttcatgccattctcctgcctcagcctcccgagtagctgggactacaggcgtccgccaaccacgcccarctaattttttgtatttttagtagagacggggtttcactgtgttagccaggatagtctcgatctcctgacctcgtgatccgcccacctcggcgtcccaaag

SEQ ID NO: 527368 - DNA, 201 bp, Homo sapiens
cagttcctcagtcttctcttgacctcatctgaccttgatcctttgttttttgagatggagttttgctcttgttgcccaggctggagtgcaatggcacaatmtcggctcaccgcagcctctgcctcctgggttcaagtgattctcccgcctcagcctccccagtagctgggattgcaggcgtgtgccaccatgtctggctaa

SEQ ID NO: 527369 - DNA, 201 bp, Homo sapiens
ggcatagaatgagacaagctttcctacatggcttttgtggctctttctagagccacatgttatttttgtttatataaaaacacttaatactcagtgaattytccatatttacataggaggttgctttaagttctttttatttataatgaatgacctgtatatgtattttaaagcagagctaggggaaagtttttttttttt

SEQ ID NO: 527370 - DNA, 201 bp, Homo sapiens
ctaatcttgctttaaagtctggaaatggatttttacttcctatagttcagataccatagcatggcataaaagtctcattgatgtggtctcttcaactctcstatttctgccatgcccagcttcttgaagtgttgcagacacagctgtaaatttgtgcgtctttgtttttccaattatgtgtttgtcttacctggaattcag

SEQ ID NO: 527371 - DNA, 201 bp, Homo sapiens
cagccacattcagtgaccaaactgctgtactcctgtgtagaccaggaggaggtgacagaggtatactcagaaatcttttgagttgattaaaattttttttwaaattgtggcaaaatacatatatgatcaccatcttaaccattttaagtgtgcagttcagtggtgttaagtatagttacaatgttgagcaaccaataatct

SEQ ID NO: 527372 - DNA, 201 bp, Homo sapiens
aaataaaaagtgactttggaactgtccttgagcttgagtataaacagctagtttgggagtctccttccaaatttcatgttcttttggttgtctgtaagccrttcactcaccaggctactgctcagacctctgaagtctgagtcttcacagtagcctaatcttgctttaaagtctggaaatggatttttacttcctatagtt

SEQ ID NO: 527373 - DNA, 201 bp, Homo sapiens
aatccctccctcttgtcccttgtccttagggtttctgtccctagagattagtttacattttctaaatttttatataaatggaatcatatagtatttactawttttttttttggtctggcatgttttactatggataattattttgagattcattcatgtttttgcatgtaaaagtagttcactcttttattgctgagtagt

SEQ ID NO: 527374 - DNA, 201 bp, Homo sapiens
cacacatgtatacccatgtgaccatcaacacattcaagataatgaaccatcccctttccccctgccaaatttcttcattctcctacgtaatccctccctcktgtcccttgtccttagggtttctgtccctagagattagtttacattttctaaatttttatataaatggaatcatatagtatttactatttttttttttgg

SEQ ID NO: 527375 - DNA, 201 bp, Homo sapiens
gggaaatgtactccaaggttctgcaggtttttgttttgttttttgttttgttttgtttcatttgcaaactgttctttgcatacttatgtttgtggtccttrtaactgacttctgctttttgtttgtttccttttctttcctttatctgttttacttcccccatactgtgttgttgctaccagtttctattgctccaccccc

SEQ ID NO: 527376 - DNA, 201 bp, Homo sapiens
tgtaaacatctatattagtgacccagatggtttgatcagcaactacaattgatctccatggtttttggacagtcttaaatatgtcattctgtagttttccwagtggctgactaaatacctaggcagttggtaatagcctgatagtcagtaaaaatataacaaggttttcaaggggaatattggccagatctgtgagaatgt

SEQ ID NO: 527377 - DNA, 201 bp, Homo sapiens
tatgtggtccattgttgaccaaaatgttatgtgacacatgactgtacaatacagttttattaactgtagtcctcgtgttgtacatggatctctaaacttaytctgaatatctgctattttgtatcttttgacccacagctccctctcctttccccccaaaataaccatggtaaccactgtttcattctctatttctgtgta

SEQ ID NO: 527378 - DNA, 201 bp, Homo sapiens
cttattttcctttgatttggtttcattgctgaggctaattgtgttgtgctaggggagtagctggtatcctttggcttcttctctgcttcttgtatctgctrggtgctggaattacacagctcctgagtcagagcaatatgcttagcagaaataagcatcagtcttcctgaaccatcagatggcagactgacgtgatatgcc

SEQ ID NO: 527379 - DNA, 201 bp, Homo sapiens
tcagacatagttggtagtgaacccgtgtttatgaagaaaatctgttaatgagggaccacacccagctaattttttgtaatttttgtagagatgggattttrccgtgttgcccaggtttgtcctgaactcctggactcaagtgatcctcctgccttggcctcccgaagtgttgggattacaggcgtgagccaccatgcccga

SEQ ID NO: 527380 - DNA, 201 bp, Homo sapiens
ctcagacatagttggtagtgaacccgtgtttatgaagaaaatctgttaatgagggaccacacccagctaattttttgtaatttttgtagagatgggatttygccgtgttgcccaggtttgtcctgaactcctggactcaagtgatcctcctgccttggcctcccgaagtgttgggattacaggcgtgagccaccatgcccg

SEQ ID NO: 527381 - DNA, 201 bp, Homo sapiens
acagtaaatatccatcccttagaatggagacttgagatttgactactgtgtgtcaatccaaataagtacttttaactttggatctactaattttctccatytacaaaataaaactttctcagacatagttggtagtgaacccgtgtttatgaagaaaatctgttaatgagggaccacacccagctaattttttgtaatttt

SEQ ID NO: 527382 - DNA, 201 bp, Homo sapiens
tagtctaatgagcatttatttttgtgtcatgttgatgctcaagaagttttgggttttggatttccagattagggatactgaacctgtataggaattacagsctagcttttcactgagctccctggatccttttttcttttcctgcatccttgcctgtcttttttctattgttagtctgtgttgcaattgtgctaagaaatt

SEQ ID NO: 527383 - DNA, 201 bp, Homo sapiens
cattaagccaaattaaggatatgaactatggctgtttgatgtcaggaggggtctgtacccattttcctctcctcaataatattaaaaagttttatagaggragttatgggcaaagataaaatggatctaggaatgaggcagaaaaattaattgtagacccgtttgataggtgttatagtgagcattaccatatagggtttg

SEQ ID NO: 527384 - DNA, 201 bp, Homo sapiens
tctgtgctattttaaaatctgtatttctttttgcagaagtgggaatcaattaaaaataaaatctgtatttctatagagttctgaaaaatgcttgtgatttdgttgaacacttttggttgcctttgaaatatatttccttctattgactttactgggttaacggactttaagctagtagatgtagctcttgagaccagcagc

SEQ ID NO: 527385 - DNA, 201 bp, Homo sapiens
gaatatccctttgttcacatctcagattttttggaatagcagtagcatagaaaattcaattgattacagtagagattaattgatacttacagttttgtaakttttatactcttccagaatagattaagaaattaggatacacgtaatttgtcaggtagtgtcatactggtcctgatttttgatttggaaaatgtgattaat

SEQ ID NO: 527386 - DNA, 201 bp, Homo sapiens
attttttgtctcttgtttctgtgtgaacagaatatccctttgttcacatctcagattttttggaatagcagtagcatagaaaattcaattgattacagtasagattaattgatacttacagttttgtaagttttatactcttccagaatagattaagaaattaggatacacgtaatttgtcaggtagtgtcatactggtcc

SEQ ID NO: 527387 - DNA, 201 bp, Homo sapiens
atgtgataatttattaataaattattattttttgtctcttgtttctgtgtgaacagaatatccctttgttcacatctcagattttttggaatagcagtagyatagaaaattcaattgattacagtagagattaattgatacttacagttttgtaagttttatactcttccagaatagattaagaaattaggatacacgtaa

SEQ ID NO: 527388 - DNA, 201 bp, Homo sapiens
tgcctccaaaagtgctgggattacaggcgtgagccactgtgcctggcctactgtaaacattttttgtttgttttttcttttctacttctttatctttttawtttttctgcccttgaaaatcaaaacattttttaaaggactatagcagaatctagagtttctgtaaggtatcatttaccacatataaaatgtaatctaaaa

SEQ ID NO: 527389 - DNA, 201 bp, Homo sapiens
cacttgaaggtagactatgctattacttcaggagtatgtttaagactttgtaatagttgattccacttctctcctgtcttagggctgttggtgtcatgcaytttcttttttcttttattgagacggagtctcgctctgtcacccaggctggagtacagtggtgcgatctcggctcactgcaacctctgcctcccacgtgca

SEQ ID NO: 527390 - DNA, 201 bp, Homo sapiens
ttgtgtttttttgaacagagtctcgtgacgcccaggctggagtgcaatggtgcgatctcagctcactgcaacctctgcctcctgggttcaagcaattcttytgccccagcctcccgagtagctgggactacagtcatgcaccaccacgcccagctaatttttgtatttttaatagaggcggggtttcaccattttggccag

SEQ ID NO: 527391 - DNA, 201 bp, Homo sapiens
atcaccaaaagatggtaactttggcatttgaagtgttcaactacaggttaagtatcctttattcaaaatgcttgggaccagaaatgtttcagatttttttytgaattttggaatgtttgcattatatacttactggttgagcctccctaatctgaaaatctgaaatccagaatagtctaatgagcatttatttttgtgtca

SEQ ID NO: 527392 - DNA, 201 bp, Homo sapiens
aatttttgaaattaaataaaagatactctaaaatataccagtgatttctgatagcattaggttttcttcctttgtattttctttccttctccttcctcctytctccctcttcccctttttctttctttccctacccccttacttttttccttcctttaacatttcctgccaaggaaacacattttggctaaaatataattt

SEQ ID NO: 527393 - DNA, 201 bp, Homo sapiens
taaattagtcatattgagtaaaattattaattaaatttgtgatcgttgctagaataaaggctgataacaaagttaacaatatttttagattgcttttcacaaagtctttaggatttcaccagctgtttctccttatatatactgcatattaagtagttttgttaaataactttttgttggccattttgctttagaaatata

SEQ ID NO: 527394 - DNA, 201 bp, Homo sapiens
aaattagtcatattgagtaaaattattaattaaatttgtgatcgttgctagaataaaggctgataacaaagttaacaatatttttagattgcttttcacaaagtctttaggatttcaccagctgtttctccttatatatactgcatattaagtagttttgttaaataactttttgttggccattttgctttagaaatatat

SEQ ID NO: 527395 - DNA, 201 bp, Homo sapiens
ctatggaagagtagaggctgtctccttatagcatgcatggctgacgatgagtcatcgttttccttacttttattgagaagctaatcttgaaaataggtgcmgacatgttactgaaactgaagagcacggtcttcagttttttctctttgtgtgcatggttactgacccatataaatttcaaagctgcaattttcttatgtc

SEQ ID NO: 527396 - DNA, 201 bp, Homo sapiens
ccacttgatgaatagaccctttatctttgtaaagcctctttttatcttgggtagtattcttcagaaatctgctttgtctgatatgaatacaaccattccarctttccttttatcctctttttctgcctccttgtgtgttaatggagtgaattttttttggggggggtgctgatttggtgtaacactttgttctgcttctct

SEQ ID NO: 527397 - DNA, 201 bp, Homo sapiens
aatttatattttgaagtcataactcccagtccctcagagtgtgactgtatttggagatggggtctttgaagaggtaattaagttaaaatgaggttacagartaggccctagtccagtatgactggtattcttgaaagaagagggtgaagacgcaaagagaagatggccatctgtaagtcaaggagaaaggccctgagaaga

SEQ ID NO: 527398 - DNA, 201 bp, Homo sapiens
ctggttttacagcatggcttgaaggaataacagttgaattgggtcttaaaggaagcctgttcatttatcatgttgatacggagtatagatgcattccagtstgaggtaatggcattagagaaagacatgcatggttttttcagggtgattagaatgtagggtatgatttctgcaatgaggaaagtacctggagatcaattt

SEQ ID NO: 527399 - DNA, 201 bp, Homo sapiens
tattgatgtattcagtctaatcagattgtcatttggctctaagattaagccaatgatttaagtacatggttggccactgacctacttatattgatagatacaaaaattaagaaatcttcataaaaatagttttgctgtgctatatatttaattgtctttgtcttaaaattcaagtaaattttggatatagtgcactcatgt

SEQ ID NO: 527400 - DNA, 201 bp, Homo sapiens
taaaaattcaagatgcttcccatttgtgtaatatttacctggaggactcgtacttaggtgtcttaacgtgaattgagtctccaaggtctccatgtgaaacragcaaaaagagaattatctgtaatgttgtaatttgtacctaagttttttaatgagtgaaatttgcattataaactttttccattcataaatacataagtg

SEQ ID NO: 527401 - DNA, 201 bp, Homo sapiens
aaaattcaagatgcttcccatttgtgtaatatttacctggaggactcgtacttaggtgtcttaacgtgaattgagtctccaaggtctccatgtgaaacaamcaaaaagagaattatctgtaatgttgtaatttgtacctaagttttttaatgagtgaaatttgcattataaactttttccattcataaatacataagtgaa

SEQ ID NO: 527402 - DNA, 201 bp, Homo sapiens
catagagtaattttgactttccaatcttactatttaagaaatacattttgtaaggctatagctgccttagatagtgattcctctgatgaacttgggaaaartaaattgaaaactttctggaaaggattcaccattctggatgccattaggaacattagtaattcatgggaggaggtcagaatatcaacattaacaggattt

SEQ ID NO: 527403 - DNA, 201 bp, Homo sapiens
tatatgtagtacttctgactagtcctggtctgtttagaacctcaattttagcatgcttctgtcttttggagagttttcttagaaaattattgaaataatcycttaggatacttgcaaatttttcttgtgtgcttctgcgttctccagttgattctgatagctcaggaatgctaatagtccttgtggaaaggagatatttag

SEQ ID NO: 527404 - DNA, 201 bp, Homo sapiens
gccttgggtgattacagtttttttttaaatatgtctctagaattggtttttcacagtttttttttttcttttcagtggaagtagtggaggaagtggaagtygagaaaacagtggtagcagtagtattggcattcccattgctgtgcctacaccttcgccacccactattggaccaggtgtgttatttattaatctatgttt

SEQ ID NO: 527405 - DNA, 201 bp, Homo sapiens
tcacatatatcagttcttgctaatactctcaaggtgagaatactgcatatttttaggactatataatatttgcaaatttgtattaaaactaatgtcttctsttttttcttttgtggctttaatactaataacagctttatatgtagtacttctgactagtcctggtctgtttagaacctcaattttagcatgcttctgtct

SEQ ID NO: 527406 - DNA, 201 bp, Homo sapiens
gtgcatgtcttttgatgttaattttgatgttctatcataaccttctgcattacagattgttggtatttttatatgtgtagtctttataaatttcaaatacwtatgacgtgggttgaaaatgatctctttttgaaaggaacttttagagagaattctaaggaacagtagtgtttgggggttctcaggcaaagtttctcctaa

SEQ ID NO: 527407 - DNA, 201 bp, Homo sapiens
tcattttcatttagctgaatataatttctaagtttgcttttttatttctttctgacccaggggttattggaaatgtgttgcttagtttgcaagtattttcrggttttgcaaggatatttctgctgttgatttttctaatttaatttcttactggtcagaaaaatacacctcatttgatttttttttcattaagtagctttc

SEQ ID NO: 527408 - DNA, 201 bp, Homo sapiens
aatctaatggtagtggttgatgatggaccaaaactgtattggtgtggcccatatactgaggtgaatgcctttttaaaaatgcttttgtatcctgttaattkgtgtttagatttctaagtgattaaattacctatttgcctgggatctgatgtgataatttattaataaattattattttttgtctcttgtttctgtgtgaa

SEQ ID NO: 527409 - DNA, 201 bp, Homo sapiens
gcttcttcattcactctgttgtgatttgttgtttgggttgaagtatgtgaagaaattttgcttcacaaaaatatgtagttagaaaagacaggatcttgggracttcaggagtctttagatcagtcagagaactattgctttatgtggttattacagtttagttcctatagattatgtattgcgaatattatatgcaggcca

SEQ ID NO: 527410 - DNA, 201 bp, Homo sapiens
agaaatccactgttagtacaaataacattttaatgaaaaaaactgttatccaaaacaaataaatttatgagaagagtggcattgttttacatttctgaaartgtctttaaaatgtttggtaagacgatcactgggttctcatgtctgcttcttcattcactctgttgtgatttgttgtttgggttgaagtatgtgaagaaa

SEQ ID NO: 527411 - DNA, 201 bp, Homo sapiens
atacacttaacttaccatgtgactcagcagttgtatctttaggtattacccaaaagaaatgaaaacatacctccacacaagaccttctactcaaatattcwtagtagcccagaactggaaacaacccaaatgtccatcagctgataaatggagaaacaaattatgatacatccatacaatagaacactacttagcggtaac

SEQ ID NO: 527412 - DNA, 201 bp, Homo sapiens
tcttaaaaaaaataaaaaaaaagagtcaaatatacagagtgaataaaagagtgggttaccaggagcaagtgggtggggaatgggaaatgtaggtgaggggyaagaaaatagcaagtatgtaggatgaaagagcctagagatctaatgtgtaacatgtagctaataagaggactgtagctaataaaattgtactatatttgg

SEQ ID NO: 527413 - DNA, 201 bp, Homo sapiens
tgcttttcagcagccccgggctcagctcctggttcccagtatggcacaatgaccaggcagatatctcgacacaactctactacttcttcgacatcttctgstggatacagacgaactccctctgtgactgctcaattttctgctcagcctcatgttaatggaggtccactttattctcaaaattcaagtaagcttgtgctt

SEQ ID NO: 527414 - DNA, 201 bp, Homo sapiens
tctgtcataccttggctgttgagtggtgtgtttttagttaaaattctgctttataatctcttaatacagcatagattatgtgccaattaggacataatctyaaaatttagaattcagagcttgtttgagttttcagtttcaaaaaatttttaaactaaaacaaacaaaaatcatctccaattctatcaggacttggataaa

SEQ ID NO: 527415 - DNA, 201 bp, Homo sapiens
attgtgttgtaattacttttttggggggtgtgtggggaggttctgcatcacactgaataaataaagtgtcagctactcataccaggacaactttccctttstacacataccaaatctctctcttttttttgagacagggtctccctctgttgcccaggctggagtgcagtggcataattacagctcactgcagcctcgacc

SEQ ID NO: 527416 - DNA, 201 bp, Homo sapiens
tccctggcccaactgatcctcccacctcaagctcccaagtagctgggaccacaggcataagccaccaggcctatctgattttttatttttgtagagacagsgtgtcactatgttgctcaggctggtctcgaactcctgagcttaagcagtcctctcgccatgacctcccaaaatgctgagattacagtcatgagcccccat

SEQ ID NO: 527417 - DNA, 201 bp, Homo sapiens
cgcctcagcctcccgagtagctgggattacaggtgcctgcgaccactcctggctaatttttgtatttttagtagagatggggtttcaccatgctggccagkctggtcttgaactcctgaccttaagccatccacctgcctgggcctcccaaactgctgggattacagatgtgaaccaccatgcccagccacatgttttgta

SEQ ID NO: 527418 - DNA, 201 bp, Homo sapiens
tattaacaccagcaataaagagactaaaaacaatttcagtttttccttcccctctttcaattacttttattctaatggtaaatcctattaagaatgtacawtcgaattactgtgctttgaagccacttgtagagtggtttctctctggtttaggccactaattggatgcacagttaggctcatttgattaatttaccttta

SEQ ID NO: 527419 - DNA, 201 bp, Homo sapiens
acattttcaccctcagttttggtggggtggtagggaggtactattagccttattcttagtttcctggtatctgcaagatggttgcaacagaaatgttacgyggctattgtggatcatttggaaaatgtcacaagagggaaaggatgaaaacataaatcactcataatccaactatttacatgcctatcttctcattgtctg

SEQ ID NO: 527420 - DNA, 201 bp, Homo sapiens
agatgaggaggctgcagtagttcagtataatgatccatatgcagatggggatcctgcttgggcccccaagaattatattgagaaaggtaaggtacagtcaytgagttgatgtgaaggaaaataacctaattgtagaaatttagaactataaagaacatctaatccaatgtttctcagccttttaaactgccttaccaacca

SEQ ID NO: 527421 - DNA, 201 bp, Homo sapiens
tgtgttgtgaattctatgtctttctttcactactgaacatttaaaaataaaagtctacatgcttttcaaaattactttagaaaataatttataaatacttytatcgtttcatttctaaatatgtatatatatttgtatacctgtgtgtgtatctataatgccagcaacttattaaaaaatgaaaattgtatgtaattttgt

SEQ ID NO: 527422 - DNA, 201 bp, Homo sapiens
ccaaaatttaactttaatatgcgattttattacataagtagaactagagaacaaaaacattgcagaaataaactgaatttattggcatgtttgagacagcrtagtaatggtaaaattaaagacacaaacattgtcaaagttttccttcaaattaatataatgaaattgctggctatcacttttaaggtcattaacgtgttc

SEQ ID NO: 527423 - DNA, 201 bp, Homo sapiens
ctggtggatcatgaggtcaggagatcaagaccagcctggacaacatgatgaaatcctgtctctactaaaaatacaaaaaattaggcaggcatggtggctcrtgcctgtagtcccagctacttgggaggctgaggcaggagaatctcttgaacctgggaggtggaagttgcagtaagccaagattgtgccactgcactccag

SEQ ID NO: 527424 - DNA, 201 bp, Homo sapiens
ttcctacatggcttttgtggctctttctagagccacatgttatttttgtttatataaaaacacttaatactcagtgaattctccatatttacataggaggktgctttaagttctttttatttataatgaatgacctgtatatgtattttaaagcagagctaggggaaagttttttttttttttttttttttttttgagaca

SEQ ID NO: 527425 - DNA, 201 bp, Homo sapiens
tgttatttttgtttatataaaaacacttaatactcagtgaattctccatatttacataggaggttgctttaagttctttttatttataatgaatgacctgkatatgtattttaaagcagagctaggggaaagttttttttttttttttttttttttttgagacagagtttcactcttgtcgcccaggctggagtgcagtgg

SEQ ID NO: 527426 - DNA, 201 bp, Homo sapiens
ttttggctacatccaggcccacgaagattgttcctgaatatgaaaatcagttaacttttttagatcttctctcgaatgaagttcagggatttttttttgtkgggggggagaagttattttggatatatggctttaatcaggatagactagtttatattactgcctgattacttttgaaattccagaagatgtgtaatccta

SEQ ID NO: 527427 - DNA, 201 bp, Homo sapiens
tttcccagacatcatatgtgactttgttactgaattgttaggatgaagatgatttttcagatgcgtatttgagcaaattgacaagtaagatctatagtttrtgttcatgcacacatttcaaaaattttaggaaacccagtgtttgaatgcagataagtttgatctcagtgaacatgtttaacaataaaataagatattaaa

SEQ ID NO: 527428 - DNA, 201 bp, Homo sapiens
tgagcctgcatgagattggaataattaagtggtggtttccttatgaatataattcttttgaaaaatacatgaaacacatgagtatttccccagtacgtatrgatctctttttctttacaaagtagttgaaacatggctggaaaaaagcttattaacatgaattgagtaactgtaaatgtaaacctgtcctatcggatataa

SEQ ID NO: 527429 - DNA, 201 bp, Homo sapiens
cagatttttttttgaattttggaatgtttgcattatatacttactggttgagcctccctaatctgaaaatctgaaatccagaatagtctaatgagcatttwtttttgtgtcatgttgatgctcaagaagttttgggttttggatttccagattagggatactgaacctgtataggaattacaggctagcttttcactgagc

SEQ ID NO: 527430 - DNA, 201 bp, Homo sapiens
tcattacatgtttattcatgctgttgtgtcaaggtgatacagggctgggtagagcaggatctgacctagcatatcagttctttttttttcttttctttcctttttttttttcttctttcacaccaagtctgtgaacccagcatatcagttcttatgaaagtccatatcacatatatcagttcttgctaatactctcaaggt

SEQ ID NO: 527431 - DNA, 201 bp, Homo sapiens
tggaatattattcagccttaaaatgcagatactgccatttgccacaacatggatgacctggaggcagtatgctgagtgaaataagccagacacaggaagamaaatattgcatgatctcatatgtggaatcttaaaaaaaataaaaaaaaagagtcaaatatacagagtgaataaaagagtgggttaccaggagcaagtggg

SEQ ID NO: 527432 - DNA, 201 bp, Homo sapiens
ttcctttgagacagagtctcgctttgtcgcccaggctggagtgcagtggcactatctcggctcactgcaagctccgcctcctgggtccaagtgattcttaygcctcagcctcccgagtagctgggattacaggtgcctgcgaccactcctggctaatttttgtatttttagtagagatggggtttcaccatgctggccagt

SEQ ID NO: 527433 - DNA, 201 bp, Homo sapiens
actgttaacagctatgaacaatctttgattagatcttagatcatatggaataaaataaaacatacgtaaagaggtttttttttcctttgagacagagtctygctttgtcgcccaggctggagtgcagtggcactatctcggctcactgcaagctccgcctcctgggtccaagtgattcttacgcctcagcctcccgagtag

SEQ ID NO: 527434 - DNA, 201 bp, Homo sapiens
gccattcttctgcctcagcctcccaggtagttgggactacaggcgcccgccaccattcccagctaatttttttgtattttttaatagagatagggtttcaytgtgttagccaggatggtcttgatctcctgacctcgtgatccgcccgccttggcctcccaaagtgctgggattacaggagtgagccactgcgcccggcca

SEQ ID NO: 527435 - DNA, 201 bp, Homo sapiens
gtaacattaggattgaattaagtatatttgttcttttataaaattaattaattggctaagcacaacttggcctttaggtttgcttgtgggaaatgtactcsaaggttctgcaggtttttgttttgttttttgttttgttttgtttcatttgcaaactgttctttgcatacttatgtttgtggtccttgtaactgacttctg

SEQ ID NO: 527436 - DNA, 201 bp, Homo sapiens
tattgttagtgtttattaatgtcttgtggtatatagagctattttttttttcaactcaattgggtatttcttccacccatcctacctctcctaccttgccycactaccacaaagaagaagaagaaaggcagcatggtactatctctatgaaaatcctgccactctcatttttgctttttgggtgaggaggtacggtgctgc

SEQ ID NO: 527437 - DNA, 201 bp, Homo sapiens
atcactgaggagaattgcaatacattccttttatagtcacatggaagttttaggaaaagctttgcttctacatatatatatatatatatatatatatatawtttttttttttttttttttttttttttttttttgagacggagtcttgctatgtcataaaggctggagtgtggtggcatgatctcagctcactacaacctc

SEQ ID NO: 527438 - DNA, 201 bp, Homo sapiens
acaagaccttctactcaaatattcatagtagcccagaactggaaacaacccaaatgtccatcagctgataaatggagaaacaaattatgatacatccatamaatagaacactacttagcggtaacaaggatgaatcttaagggcattctgctaagtggaagaagccagatacagaagactgtagctttcaattctatttat

SEQ ID NO: 527439 - DNA, 201 bp, Homo sapiens
aacatacctccacacaagaccttctactcaaatattcatagtagcccagaactggaaacaacccaaatgtccatcagctgataaatggagaaacaaattakgatacatccatacaatagaacactacttagcggtaacaaggatgaatcttaagggcattctgctaagtggaagaagccagatacagaagactgtagcttt

SEQ ID NO: 527440 - DNA, 201 bp, Homo sapiens
tttcaaaattttagggaaagctttgtagcctcagatttttgtacatacatgatattgaacctacgtaaaggttcattgttaggataagattgaatgaccargaataagtaaattacattcatgctatccatttcagtgtgagtgataagcaatttagcatccttttcacattttggctacatccaggcccacgaagattgt

SEQ ID NO: 527441 - DNA, 201 bp, Homo sapiens
tcatttctaaatatgtatatatatttgtatacctgtgtgtgtatctataatgccagcaacttattaaaaaatgaaaattgtatgtaattttgtcttaatgycccccaatctcccccacaaaaaaacccccaacagattttcaggagagatatgatgtgttgcctgtgttcatttctaagcatgggaaattagctgatcttg

SEQ ID NO: 527442 - DNA, 201 bp, Homo sapiens
ctgcgaatatggagcgccctgtaaggtatattcggaaacctatcgattacacagttctggatgatgtgggccatggtgtcaaggtaagcattttatattayattaacaagctaatttgcatatccagtaaatattttggataggaaatattgtcataaagatgattttaatagattctctttagcagctggcattataatt

SEQ ID NO: 527443 - DNA, 201 bp, Homo sapiens
agcaatgattatctaaataccttagtagcctttatacgttgggctgcatgatccaggccactagttgcctccctaagggactcagacagggtcaggctcaraaagtgatgtggaagttgatgtggtaggtggtgctgctgactttggtgctaagaatggggaatgaataatattagaaatatccattagggtgtctgttga

SEQ ID NO: 527444 - DNA, 201 bp, Homo sapiens
tttgcatatgataggcacttggtatttgaatgaattgaaacatctaataaattctaaaattcagagagctttcttaaagtgattgacagaacctattgatstattcagtctaatcagattgtcatttggctctaagattaagccaatgatttaagtacatggttggccactgacctacttatattgatagatacaaaaatt

SEQ ID NO: 527445 - DNA, 201 bp, Homo sapiens
gtggattggtacagccatgatggaaaatagtatggaggttgctaaagaaatgaaaaatagaagtactatatgacccagcaattccttatcgggcatatacstaaaggaagtgagatcaccttataaagatatctgcactcccatgttcattgcagtgttatttacattagccaagctgtggaaacaacctgaatgtccact

SEQ ID NO: 527446 - DNA, 201 bp, Homo sapiens
gactcataaaagttaagttttgtttagtcatagagttagtaattggcagtcaggacttccttctgactctggcagactccataggctgtgctcttttcatrtcatactgttttcacatgaaagaatctagaactcaaaactggttcaggaataccgtggaataaacagaatagactggtattgggcaagcctgggaaccta

SEQ ID NO: 527447 - DNA, 201 bp, Homo sapiens
ttggctctaagattaagccaatgatttaagtacatggttggccactgacctacttatattgatagatacaaaaattaagaaatcttcataaaaatagtttwgctgtgctatatatttaattgtctttgtcttaaaattcaagtaaattttggatatagtgcactcatgtgatatttcaactgttttttccatagttgttgc

SEQ ID NO: 527448 - DNA, 201 bp, Homo sapiens
ctgtgattaatatttttattgatatatgaaataaatagctattatatatttgttttatttatttgggtcctaatttacaacattaccttaaagctagacawacctgttatagctatggcaaagacacaatattctggaaacctatgtaggtatttcattgttacctattttagaagtctttccttagaatttgaaaatttt

SEQ ID NO: 527449 - DNA, 201 bp, Homo sapiens
cccccaaatctgtaaaaaattagactctaaaacctgaagatatttttttttagtggcattgtacaagtagtgatgctttaggactacacattgtttcatgytgtgtaggctagtcagctttaatagaagtagcctttaggatcaaaacaacttttcttcaactttgaattttgacttaactggctcagatgaaaacttaga

SEQ ID NO: 527450 - DNA, 201 bp, Homo sapiens
gttctttggttctgttgacttttaactagtaggttgtattattaatagcaaaacatctgaaaagattctactacattaaaaaggacagtttttttctttctttctttttttttttttgagacagacttgctctgtcacccaggctggagtgcagtggtgtgtgaacaccattcactgcagccttgacctcctgggctcaag

SEQ ID NO: 527451 - DNA, 201 bp, Homo sapiens
ctttggttctgttgacttttaactagtaggttgtattattaatagcaaaacatctgaaaagattctactacattaaaaaggacagtttttttctttctttytttttttttttttgagacagacttgctctgtcacccaggctggagtgcagtggtgtgtgaacaccattcactgcagccttgacctcctgggctcaagcag

SEQ ID NO: 527452 - DNA, 201 bp, Homo sapiens
ccacaacatggatgacctggaggcagtatgctgagtgaaataagccagacacaggaagaaaaatattgcatgatctcatatgtggaatcttaaaaaaaataaaaaaaaagagtcaaatatacagagtgaataaaagagtgggttaccaggagcaagtgggtggggaatgggaaatgtaggtgaggggtaagaaaatagcaa

SEQ ID NO: 527453 - DNA, 201 bp, Homo sapiens
atgtagctaataagaggactgtagctaataaaattgtactatatttggaattcctgctaaatgaatagatttttagctgtccttgccacaaaaacaaaccaaaaaaaaaaaaaaaaaggtaactatgtgggttgatatatatgttaatttgcttcactgcagtaaccattttgctttctatatgaatcccataacatcatg

SEQ ID NO: 527454 - DNA, 201 bp, Homo sapiens
ccttttggattatttgtttttttgccattgcattgtatgagctccttatatattctggttgttggtcctgtgtcagatggatagtttgcaaatattttctyccatctatgggttgtcgttttactttgttgattgtttcctttcttgtgcaggagctttttagctttatgtaattccatttgactttgctttgttgcctgt

SEQ ID NO: 527455 - DNA, 201 bp, Homo sapiens
gttgctgtgtctgctctcaaactcctggcctcaggtaatcctcctaccttgacctcccaacgcattgggattacaggtgtgagccaccaagcctggcatgtttttttttttttttaaacagaagtacttctttttctcaagtcagttaagggtggtgctgattgtgacagtgttaactaccaccctacctagtagtttgtt

SEQ ID NO: 527456 - DNA, 201 bp, Homo sapiens
gctctttaccctcccagtgaattaaaattcatgcggtatgcagagtagttaatgatgacttggagtggttcatcatagaggccacattagaattatacttygttcatttttagaattataaatggaggcagtgtggcatagtggcagaccgtggtctttgggagacgtagcggttctattcttcctagcagtgttatcttg

SEQ ID NO: 527457 - DNA, 201 bp, Homo sapiens
agtttcatattaattttagactagaacggagtacccttttaatttacttccacatcatttgtactttctcttttgttgtatctattacattaccttttcakgtcagttttcccattatgaacttcagatggtgtagttcatgactgcattgttcactgctcttcatagcaggttttgaataaacaattgttgactcgtact

SEQ ID NO: 527458 - DNA, 201 bp, Homo sapiens
ctaatgtttgaagttaaagattattctaattgtgaatagaattgtgtccccctgccatccttatgttgaagcctcaaacccgtctcccccaccatgtgactgtgttggagctagggcctttaaggaggtgaatatggttaaatgaggtcataaggctggagccctgatcccatagagctagggtacttataaaagaggaaa

SEQ ID NO: 527459 - DNA, 201 bp, Homo sapiens
ttctgaaaaatgcttgtgatttagttgaacacttttggttgcctttgaaatatatttccttctattgactttactgggttaacggactttaagctagtagmtgtagctcttgagaccagcagcattctttcctgcccaagttttggatatgtggcaaaagtaaatttgttttccttttatatttttttattttttgagatg

SEQ ID NO: 527460 - DNA, 201 bp, Homo sapiens
ctggtcattaatgctgcagagtttaaaaacaaggccagtgtaaacttttgaactgccatatcagtaagaattattaggaaataatttaaaatagccataawgaacatcagttttgtgggtccaaagtgactgactagctatttggtaaatcttttctttatatagaaatccagtattagtgtacattattctaggcatgtg

SEQ ID NO: 527461 - DNA, 201 bp, Homo sapiens
tgtttcaagctatccaatgagttgttaaaaattactttaatgcaaagaactacgtattttaacttattggagatcaggtttcctttttcagaacagtgatraaaaggtcacttttgagatatcccatgaaactctgactgattaacatgatatattcccttgtaaatttaggactgatatttttaaacataaaattgccaa

SEQ ID NO: 527462 - DNA, 201 bp, Homo sapiens
taatgtttgaagttaaagattattctaattgtgaatagaattgtgtccccctgccatccttatgttgaagcctcaaacccgtctcccccaccatgtgactgtgttggagctagggcctttaaggaggtgaatatggttaaatgaggtcataaggctggagccctgatcccatagagctagggtacttataaaagaggaaat

SEQ ID NO: 527463 - DNA, 201 bp, Homo sapiens
agaacaaaaacattgcagaaataaactgaatttattggcatgtttgagacagcgtagtaatggtaaaattaaagacacaaacattgtcaaagttttccttyaaattaatataatgaaattgctggctatcacttttaaggtcattaacgtgttcagaaatgagttcaaaaccgattaaaactgtttgtgatgcctgcttaa

SEQ ID NO: 527464 - DNA, 201 bp, Homo sapiens
accattttaagagtaattgtttaccactttctcttccaaaatttagacttaccaagtatacttaactaaatttatcgagacgtgtctatattgagtatacyaaaatttaactttaatatgcgattttattacataagtagaactagagaacaaaaacattgcagaaataaactgaatttattggcatgtttgagacagcgt

SEQ ID NO: 527465 - DNA, 201 bp, Homo sapiens
ccgtgcctggtctgttgcattgtggttttgatttgtgtttctctgattaatgatgttgaatattttttcacatacctgtttgccattcgtatgtcttcttttgtgtgtgtgtgtgtgtgtgtgtgtgtgtgtgtgtgtgtgtgttttgtatgtcttgagaagtatctgtccagatcttttgccattttccttttggattat

SEQ ID NO: 527466 - DNA, 201 bp, Homo sapiens
ttcttgccagtgatagacaacaattgaaaaccatgatgtttcatgtttatttttgttttaggatattagtccttgaatcataccattttaagagtaattgyttaccactttctcttccaaaatttagacttaccaagtatacttaactaaatttatcgagacgtgtctatattgagtataccaaaatttaactttaatatg

SEQ ID NO: 527467 - DNA, 201 bp, Homo sapiens
cgtgcctggtctgttgcattgtggttttgatttgtgtttctctgattaatgatgttgaatattttttcacatacctgtttgccattcgtatgtcttctttkgtgtgtgtgtgtgtgtgtgtgtgtgtgtgtgtgtgtgtgtgttttgtatgtcttgagaagtatctgtccagatcttttgccattttccttttggattatt

SEQ ID NO: 527468 - DNA, 201 bp, Homo sapiens
gtgcctggtctgttgcattgtggttttgatttgtgtttctctgattaatgatgttgaatattttttcacatacctgtttgccattcgtatgtcttcttttgtgtgtgtgtgtgtgtgtgtgtgtgtgtgtgtgtgtgtgtgttttgtatgtcttgagaagtatctgtccagatcttttgccattttccttttggattattt

SEQ ID NO: 527469 - DNA, 201 bp, Homo sapiens
aaaatggaccccttgtacactgttggtgggagtgtggattggtacagccatgatggaaaatagtatggaggttgctaaagaaatgaaaaatagaagtactrtatgacccagcaattccttatcgggcatatacctaaaggaagtgagatcaccttataaagatatctgcactcccatgttcattgcagtgttatttacatt

SEQ ID NO: 527470 - DNA, 201 bp, Homo sapiens
tctctgattaatgatgttgaatattttttcacatacctgtttgccattcgtatgtcttcttttgtgtgtgtgtgtgtgtgtgtgtgtgtgtgtgtgtgtgtgtgttttgtatgtcttgagaagtatctgtccagatcttttgccattttccttttggattatttgtttttttgccattgcattgtatgagctccttatata

SEQ ID NO: 527471 - DNA, 201 bp, Homo sapiens
aaattggcatctttttagggggagagggttagattgggtctcaggctctggaattttttaaaaagctcaccagatagtgctggtgtccagctagaattttytttttggattccacactaaaagcttaggccataaaagcaaaaataaataaatggaatgacgtcaaactgaaaagcttcttcaaaacaaaggaaacaatca

SEQ ID NO: 527472 - DNA, 201 bp, Homo sapiens
ctctgattaatgatgttgaatattttttcacatacctgtttgccattcgtatgtcttcttttgtgtgtgtgtgtgtgtgtgtgtgtgtgtgtgtgtgtgtgtgttttgtatgtcttgagaagtatctgtccagatcttttgccattttccttttggattatttgtttttttgccattgcattgtatgagctccttatatat

SEQ ID NO: 527473 - DNA, 201 bp, Homo sapiens
tctgattaatgatgttgaatattttttcacatacctgtttgccattcgtatgtcttcttttgtgtgtgtgtgtgtgtgtgtgtgtgtgtgtgtgtgtgtgkgttttgtatgtcttgagaagtatctgtccagatcttttgccattttccttttggattatttgtttttttgccattgcattgtatgagctccttatatatt

SEQ ID NO: 527474 - DNA, 201 bp, Homo sapiens
tatgtcttgagaagtatctgtccagatcttttgccattttccttttggattatttgtttttttgccattgcattgtatgagctccttatatattctggttrttggtcctgtgtcagatggatagtttgcaaatattttcttccatctatgggttgtcgttttactttgttgattgtttcctttcttgtgcaggagcttttt

SEQ ID NO: 527475 - DNA, 201 bp, Homo sapiens
tgttgaatattttttcacatacctgtttgccattcgtatgtcttcttttgtgtgtgtgtgtgtgtgtgtgtgtgtgtgtgtgtgtgtgtgttttgtatgtyttgagaagtatctgtccagatcttttgccattttccttttggattatttgtttttttgccattgcattgtatgagctccttatatattctggttgttggt

SEQ ID NO: 527476 - DNA, 201 bp, Homo sapiens
ctgggttcacgccattcttctgcctcagcctcccaggtagttgggactacaggcgcccgccaccattcccagctaatttttttgtattttttaatagagayagggtttcattgtgttagccaggatggtcttgatctcctgacctcgtgatccgcccgccttggcctcccaaagtgctgggattacaggagtgagccactg

SEQ ID NO: 527477 - DNA, 201 bp, Homo sapiens
cggctcactgcaagctccgcctcccgggttcacgccatcgattttgtttttaaaggaaatagttgacgtggtcattttaacagtaaatatccatcccttaraatggagacttgagatttgactactgtgtgtcaatccaaataagtacttttaactttggatctactaattttctccatctacaaaataaaactttctcag

SEQ ID NO: 527478 - DNA, 201 bp, Homo sapiens
attttgccgtgttgcccaggtttgtcctgaactcctggactcaagtgatcctcctgccttggcctcccgaagtgttgggattacaggcgtgagccaccatrcccgaccagcaaaaacacatttttgaaaaacttcaatttacctttaattcactcatttcctgaatgctttatcattaatttttattaataatttctacat

SEQ ID NO: 527479 - DNA, 201 bp, Homo sapiens
agtttcgttcttgttgcccaggctagagtataatggcacaatctctgctcacctcaacttctgcctcctgggttcaatcaattctcctgcctcggcatccygagtagctgggattacagggatgcgccaccacgcctggctaattttgtatttttagtagagacagggtttctccatgttggtcaggctggtctcgaactc

SEQ ID NO: 527480 - DNA, 201 bp, Homo sapiens
gcgccaccacgcctggctaattttgtatttttagtagagacagggtttctccatgttggtcaggctggtctcgaactcccaacctcaggtgatccacccayctcggcctcccaaaatgttgggattacaggcgtgagccaccgtgctcggcccagattcttattttaataaggcaatatagagaaaagagtacatgggtgc

SEQ ID NO: 527481 - DNA, 201 bp, Homo sapiens
caggctggtcttgaactcctgacctcaggtgatctacctgcctccgcctcccaaagtgctgggacccagttatgttcttttaacacatgcatacacaccarcccgccatcccacccctgagtgaacaaagaatgaaacttgaaccatcacccttatggggtcagaatattatttatttttaggatagagaataggggcaat

SEQ ID NO: 527482 - DNA, 201 bp, Homo sapiens
gataaggaaaaccaatgtttcatgtccactggttctgtagggccaactgcaggacttgaacatccatgggttttggtatccaagggggctcttgaaaccartcctccaaggatactgagggatgactatatgacataaaaggagtatttagtggccttgggtgattacagtttttttttaaatatgtctctagaattggtt

SEQ ID NO: 527483 - DNA, 201 bp, Homo sapiens
aggttgctttaagttctttttatttataatgaatgacctgtatatgtattttaaagcagagctaggggaaagttttttttttttttttttttttttttgaracagagtttcactcttgtcgcccaggctggagtgcagtggcgcgatctcggtccactgcaacctcaccctcccaggatcaagcgattctcctgcctcagc

SEQ ID NO: 527484 - DNA, 201 bp, Homo sapiens
tccacccacctcggcctcccaaagtgttgggattacaggcatgatccaccgctcctggccttgtatttattatttttaaatgtcctaaaagtcaattaccyggtgggtttttaaaaatttagttacagagcataacaagcattcagaaaagtatccacttcagtaagtatacagcttgatgaatggacacacactcatata

SEQ ID NO: 527485 - DNA, 201 bp, Homo sapiens
ttgctattattgagcatttaaaaaattataaccataatttttagaaataaggttaggactttaaattaccctttcctatgtttttcctaggaaaaggtaayaaattttagttttcatgttaaagtaacaaaattcatatatcccagtgaagaatattttttaaaattacaaactttgtcatatatatttttaaatcctggt

SEQ ID NO: 527486 - DNA, 201 bp, Homo sapiens
aataacattttaatgaaaaaaactgttatccaaaacaaataaatttatgagaagagtggcattgttttacatttctgaaaatgtctttaaaatgtttggtaagacgatcactgggttctcatgtctgcttcttcattcactctgttgtgatttgttgtttgggttgaagtatgtgaagaaattttgcttcacaaaaatatg

SEQ ID NO: 527487 - DNA, 201 bp, Homo sapiens
atttattgagaaagtaatgattagaatgtatatctccatttattgccatattgagatgggaataaattgcagcttcctatgtaaataaatttagcttcctrtttaaagaacagtggcttatgggtgactgtactgagaaaaatgtacattttaaagtttgctattattgagcatttaaaaaattataaccataatttttag

SEQ ID NO: 527488 - DNA, 201 bp, Homo sapiens
ctcttctagacaaatcttagtctggaagatttcatgaagcagacctgctgaggctgactgtcagcttgataaggaagtcctcctatctgcaggagtgttgrcaataaccaaggcatcattcaggctgttgtctttgaatctgcctacttcctggtacttatcctgaaacttcctcttcatttcagcctcattcacaggcac

SEQ ID NO: 527489 - DNA, 201 bp, Homo sapiens
tgttggcaaggatgtggagcactagaattttcataagtttctagtgagaatgccaaataatgttgtttctgtttctttgtaaaatagtttggtagttttgtttttttttttttttttaaaggagacagggtcttgttctgttgctcaggcttggagtgtagtggtgcaatcacagctcattgcagcctcaacctccctggc

SEQ ID NO: 527490 - DNA, 201 bp, Homo sapiens
atcatctttcttcataaagcagctgaggttgagggatgagggaggctgggagagagtagctttgcaccagtgaacaagagacatttgctttcagttttgartggtgctatagctgtgtgctgatcagtccaataaacctgcagtaattttggtgctaccaaaaccctgtattctgtgcaagatcgttattgcttgagccca

SEQ ID NO: 527491 - DNA, 201 bp, Homo sapiens
ggagaatctcttgaacctgggaggtggaagttgcagtaagccaagattgtgccactgcactccagcctgagcaacagagcgagactccgtctcaaaaaagaaaaaaaaaaaaaatcaaactagccacaatattcccttaagccaaagcctaattcagaacaaggccctaactgttcagttctgtgaaggctgagagaggtg

SEQ ID NO: 527492 - DNA, 201 bp, Homo sapiens
ataaggattgtggggccccaaacctactaatgcctttctacatgggctattcgcagtgagcataatctccctggagcttatgagccctcacagttcaggcmtgtaaaatatcaataccactatacactcagaagtggaagctacaaacagtagtacattgaatggtccaaagagccccacccaaaaggtcacagtagcttc

SEQ ID NO: 527493 - DNA, 201 bp, Homo sapiens
atgctatcaaatatcgcatgccatagagaaatcttgttaaaacaaaagtcaatagatgcagcaaatttcattgttgtcttattttaagaaattgccccagytaccccaaccttcaaaaatcccaccctgatcagtcagcagccatcaatatggaggcaaagccctccaccagcacacaaatattaggactctctgaaggct

SEQ ID NO: 527494 - DNA, 201 bp, Homo sapiens
gtgacccagatggtttgatcagcaactacaattgatctccatggtttttggacagtcttaaatatgtcattctgtagttttccaagtggctgactaaatasctaggcagttggtaatagcctgatagtcagtaaaaatataacaaggttttcaaggggaatattggccagatctgtgagaatgtccttgagttttgcccgt

SEQ ID NO: 527495 - DNA, 201 bp, Homo sapiens
tctattgttacacattttgtttatgtgttcacatgttgatggaaatctgggttgtttttaggttttggctattacaaatcctatgaaaacatttgtatgcaaatctttgtgtggtcatatgcttttatttcttttgggtaagtacctctgtgcagaatggagaggtcatgtggtaggtgtctgtttcactttagaagaacc

SEQ ID NO: 527496 - DNA, 201 bp, Homo sapiens
agccccaccctctgccctcagggccccactgcccagccccaggtgggctcccctgcacagctcaagcatccatcctcattcctgccggaacctgtggcccygtgcccccagcctacatgagaaagccgtcctcacactcagcccccagcacaataatccctctggcctgggcctagcttgagcccccttcctccccaaatc

SEQ ID NO: 527497 - DNA, 201 bp, Homo sapiens
tctgaggttgggggctcaggaaggtctgggcaaaacatgctcagaggcctgagtaatagagctaacggggtctgtgtgtggagcagttcccaggtgggtgyaaggggtcctctgtgtctgccctcggagggctggggctggggcttgggcactaagaagtaacttgagcctctcctggaccagtttgtgaagaccatggtg

SEQ ID NO: 527498 - DNA, 201 bp, Homo sapiens
cagagggaccggcctgagcacaggcctctgaggttgggggctcaggaaggtctgggcaaaacatgctcagaggcctgagtaatagagctaacggggtctgwgtgtggagcagttcccaggtgggtgcaaggggtcctctgtgtctgccctcggagggctggggctggggcttgggcactaagaagtaacttgagcctctcc

SEQ ID NO: 527499 - DNA, 201 bp, Homo sapiens
tgagctgggcttcaaggagtgaggacttcaaaggaaggatggcagtatgggcagagggaccggcctgagcacaggcctctgaggttgggggctcaggaagdtctgggcaaaacatgctcagaggcctgagtaatagagctaacggggtctgtgtgtggagcagttcccaggtgggtgcaaggggtcctctgtgtctgccct

SEQ ID NO: 527500 - DNA, 201 bp, Homo sapiens
ctttggccgtgccttctgctacttccagaacctcttccccatcacagccatgtttgtcagcatctactccatgaccgccattgctgccgacaggcaagagrgtccttggggaagctggggggagcctccccactgagccggggctcagataagggtggtgacatgcctgtgattacacagcaagtttgggtagaaccatgg

SEQ ID NO: 527501 - DNA, 201 bp, Homo sapiens
gggagctgcagtgaatgaaggggtcccagacaccttttgtaggaagtggccattgagctgggcttcaaggagtgaggacttcaaaggaaggatggcagtaygggcagagggaccggcctgagcacaggcctctgaggttgggggctcaggaaggtctgggcaaaacatgctcagaggcctgagtaatagagctaacggggt

SEQ ID NO: 527502 - DNA, 201 bp, Homo sapiens
gtcgtggcctggtcccacgtggccggaggatgcctcacactcacgtaacctctgaacctctggctttctctctctaaaatgaggattcataatagtacctygctctgtgagcataaatgagatagtgtacctgaagcccttagcaccatgcctggcacagaactggtacccagtatgtggcagcttaaataggggacacat

SEQ ID NO: 527503 - DNA, 201 bp, Homo sapiens
gctgagcttcaggctaatgttggatgcttgatcttgccctgagatgggcttccagtgtggctttcttgtggccgtccacgggcatgtccatgcccagaggkaaatggtgggccgaggtgcctgggccggggttccaaggcatcagtgtgctgtgtggctgtgggagagtcacccagcgggctctctgcaggtcggctgata

SEQ ID NO: 527504 - DNA, 201 bp, Homo sapiens
gaagcagtggatgggggctggggccagcacaggggtggggcaggctgctccctggaaagctcacagtgcatgccctgtcctccagggactttcagggcagstgggaagtgaccctgtcagagacagccaggaaggagggggccagaatctcactctcctggcatcatccagtttccctacgcctcgtgattctgaggaaat

SEQ ID NO: 527505 - DNA, 201 bp, Homo sapiens
tcctgatgtgccaccacgcttggcatctgctcctctccctgcccccatattcccatgctctgaaggggagttctctttcatagcaaatccgagaggagccraggagccaggtcctttgttccagacccagaagcagccatggggacctgtgacattgtgactgaagccaatatctcatctggccctgagagcaacaccacg

SEQ ID NO: 527506 - DNA, 201 bp, Homo sapiens
tgaccgccattgctgccgacaggcaagagggtccttggggaagctggggggagcctccccactgagccggggctcagataagggtggtgacatgcctgtgrttacacagcaagtttgggtagaaccatgggaatggcttcccaaatctggtcatggtccaaaactatgaatctggaaggcagggggactgtggagctgaag

SEQ ID NO: 527507 - DNA, 201 bp, Homo sapiens
gccaggtcctttgttccagacccagaagcagccatggggacctgtgacattgtgactgaagccaatatctcatctggccctgagagcaacaccacgggcaycacagccttctccatgcccagctggcaactggcactgtgggccacagcctacctggccctggtgctggtggccgtgacgggtaatgccatcgtcatctgg

SEQ ID NO: 527508 - DNA, 201 bp, Homo sapiens
atgaaggggtcccagacaccttttgtaggaagtggccattgagctgggcttcaaggagtgaggacttcaaaggaaggatggcagtatgggcagagggacckgcctgagcacaggcctctgaggttgggggctcaggaaggtctgggcaaaacatgctcagaggcctgagtaatagagctaacggggtctgtgtgtggagca

SEQ ID NO: 527509 - DNA, 201 bp, Homo sapiens
gccccccctcgtgagcaggcagcacctctgccaaggcccccactggccctgccccagagaacggcagggaagctgcagcgagggctggcagctggcagagycctgagcacccagcacccagcccggcttgcagcccaaagcctggagagaggctgctgcgccattgacctgtggactccagagactcccgctgtgcattcc

SEQ ID NO: 527510 - DNA, 201 bp, Homo sapiens
gactctctatatgctcaggccacaaagcggcaggagactgaggcagaacgagtccatgatggagcctgggacattttcaggctgctgaggtgggcatcacrggctggaggcagggagggcagggttagaggaattcaggcatggcccagctgctgtgtgaccctgggtgagtcctttctccattccggcctcagtttctga

SEQ ID NO: 527511 - DNA, 201 bp, Homo sapiens
gggtgggggcagtcacatcacagctcctgagcccctaactccctggctcaaggtgcccctcgctcccccaggtttcgctctggattccggcttgccttccrctgctgcccatgggtcacacccaccaaggaagataagctcgagctgactcccacgacctccctctccacgagagtcaacaggtgtcacactaaggagact

SEQ ID NO: 527512 - DNA, 201 bp, Homo sapiens
tttctttcactgtcgtaatttcctcgttatttttgcaaaggtggtttcaccatgggtccccttcccttggggtagcagcacctctagaaaggggcgcagcmagcctagcatgtggcaggtagaagcaggaggtttgggaacacctcagtcctcccagtaagaaagaaaaagtcaaatgacgggaccaggggtctcaggccc

SEQ ID NO: 527513 - DNA, 201 bp, Homo sapiens
tccatctcttcagcgaaggggttgatttataagggtgttttctgctctgacactgtgatttgaattctgtgtttccacatgatattcgagaagtctggccrgaaggatggaatctgaaatgacaatggttctggactgggctttgtgctcagcccagctcatctttgcctgagacctaggagtggccccaggctctcctga

SEQ ID NO: 527514 - DNA, 201 bp, Homo sapiens
atatatgtacatatacatatacatatacgtatacgtatacatatatggctatactgtaggatacactccaagacacccggtggatgcttgaaacttcagayagtactgaattctctctatatagatatatactgtttttttcctcaacatacctatgataaagtttaatttataaattaggcacagtaagagattaacagt

SEQ ID NO: 527515 - DNA, 201 bp, Homo sapiens
tatgtacatatacatatacatatacgtatacgtatacatatatggctatactgtaggatacactccaagacacccggtggatgcttgaaacttcagatagyactgaattctctctatatagatatatactgtttttttcctcaacatacctatgataaagtttaatttataaattaggcacagtaagagattaacagtaac

SEQ ID NO: 527516 - DNA, 201 bp, Homo sapiens
acaatatactgtaattaaacttctgtgaatgaggtctctccctctcaaaatatcttgttgtactctcctcccctattttggatccgcagttgggaggggtwactgaaacccgggaaagtgaaactcccatcaggggtgactactattcatacatatgattctggaaaaaatatgccagatattaatagttaatgttaatag

SEQ ID NO: 527517 - DNA, 201 bp, Homo sapiens
ttcatacatatgattctggaaaaaatatgccagatattaatagttaatgttaatagtggtgggagtgggataattttactgcctcctttgtgcttaatggyattttaaattgcaaacaaattatttcttaatttgtttcattcacttttcctttttttgacacgtgtctatcacgtggaaggacgtgatatggaaggacgc

SEQ ID NO: 527518 - DNA, 201 bp, Homo sapiens
acgagaaacctgggttcgagtcctaacttgtcaccaacttcctgagtgacctgggctggtcccgtcccctcttggaatctctgtcttccatctcttcagcraaggggttgatttataagggtgttttctgctctgacactgtgatttgaattctgtgtttccacatgatattcgagaagtctggccggaaggatggaatct

SEQ ID NO: 527519 - DNA, 201 bp, Homo sapiens
gtcccctcttggaatctctgtcttccatctcttcagcgaaggggttgatttataagggtgttttctgctctgacactgtgatttgaattctgtgtttccayatgatattcgagaagtctggccggaaggatggaatctgaaatgacaatggttctggactgggctttgtgctcagcccagctcatctttgcctgagaccta

SEQ ID NO: 527520 - DNA, 201 bp, Homo sapiens
caggcatgagccaccacgcctggcctacactgtttccaaaaggaaatgaaaagcctcaacacaacccagtgtcctccctggggacggggtaggaagccacscaatggtactctgcatcacttcctcaaaggtggtatgaaagagcatttgctgacacaaacgaggttcccagccaaatgctgataaaccataagcagatga

SEQ ID NO: 527521 - DNA, 201 bp, Homo sapiens
gggaccaggggtctcaggcccattggtggaatgctctaaggactctgttccatgaaagggacccccaaatgccaaaggagcccagacccaaagaaggaggsagaacaaatccagtttgtcaatattgggtgatttattgagggaatttacagaccgaagtgggatcttgggtggccacaagacaggtggagctctgcattc

SEQ ID NO: 527522 - DNA, 201 bp, Homo sapiens
ctgggcaaaacatgctcagaggcctgagtaatagagctaacggggtctgtgtgtggagcagttcccaggtgggtgcaaggggtcctctgtgtctgccctcrgagggctggggctggggcttgggcactaagaagtaacttgagcctctcctggaccagtttgtgaagaccatggtgctggtggtgctgacgtttgccatct

SEQ ID NO: 527523 - DNA, 201 bp, Homo sapiens
ccaccagaatcatgagccaaataaacctcttttctttataaattacctagtctcaggtattccatgaaagcaacacaaatggactgagataggtgcctatygaaccctgaagccttgtgcctggctgcagaatgaggtgtagcaccctttgagaagtagccaatcgagaagaccacatctgaaagttcagctcatgcccca

SEQ ID NO: 527524 - DNA, 201 bp, Homo sapiens
tgtgtgtggagcagttcccaggtgggtgcaaggggtcctctgtgtctgccctcggagggctggggctggggcttgggcactaagaagtaacttgagcctcycctggaccagtttgtgaagaccatggtgctggtggtgctgacgtttgccatctgctggctgccctaccacctctacttcatcctgggcagcttccaggag

SEQ ID NO: 527525 - DNA, 201 bp, Homo sapiens
acctccctctccacgagagtcaacaggtgtcacactaaggagactttgttcatggctggggacacagccccctccgaggctaccagtggggaggcggggcrtccccaggatggatcagggctatggtttgggtatggtttgcttgcccccaccaaaactcatgttgaaatttgatcccaatgtggcagtgttgggaggtag

SEQ ID NO: 527526 - DNA, 201 bp, Homo sapiens
ttgggggctcaggaaggtctgggcaaaacatgctcagaggcctgagtaatagagctaacggggtctgtgtgtggagcagttcccaggtgggtgcaaggggwcctctgtgtctgccctcggagggctggggctggggcttgggcactaagaagtaacttgagcctctcctggaccagtttgtgaagaccatggtgctggtgg

SEQ ID NO: 527527 - DNA, 201 bp, Homo sapiens
cagagagatgaaggggaggggagagtcacagagagggggtgggacagacagacgaaggaaagaaaagctaagtagcgggagggagggactgacttctgttmtagtattttcacaagcttcctactgagggctttcctggagccaagtgaatggcacccatccggcagtggaagcagtggatgggggctggggccagcacag

SEQ ID NO: 527528 - DNA, 201 bp, Homo sapiens
atgttggtgcagatggagccttattaacaccagtcattctatccatccagacagatacagattatatatatatatatatatatatatatatatatatatartatatatatatatatatatatatatatatatatatatgtacatatacatatacatatacgtatacgtatacatatatggctatactgtaggatacactcc

SEQ ID NO: 527529 - DNA, 201 bp, Homo sapiens
ctcaggaaggtctgggcaaaacatgctcagaggcctgagtaatagagctaacggggtctgtgtgtggagcagttcccaggtgggtgcaaggggtcctctgygtctgccctcggagggctggggctggggcttgggcactaagaagtaacttgagcctctcctggaccagtttgtgaagaccatggtgctggtggtgctgac

SEQ ID NO: 527530 - DNA, 201 bp, Homo sapiens
cagtatgggcagagggaccggcctgagcacaggcctctgaggttgggggctcaggaaggtctgggcaaaacatgctcagaggcctgagtaatagagctaayggggtctgtgtgtggagcagttcccaggtgggtgcaaggggtcctctgtgtctgccctcggagggctggggctggggcttgggcactaagaagtaacttg

SEQ ID NO: 527531 - DNA, 201 bp, Homo sapiens
ttattgagggaatttacagaccgaagtgggatcttgggtggccacaagacaggtggagctctgcattctcacaccccagatgcaaggcttagataccatarggaaagggtattcgtgctccagcaagacaaccaaaggcagccctccagaacaggcaagaacgctacgtgcgtcacagcctacgatttgtggagtaacatc

SEQ ID NO: 527532 - DNA, 201 bp, Homo sapiens
cttcctgtgcctctctgggcctcagtttcctatctggacactgagataggtggccctgtagatcctcactctgtaaggtgatgggccctggccctcgttgyccctcctcccctcttatctgctccacactggggttctcaacccaaagcctacttgaggatcagggagtctaggagcgcctgaacctcttgtaattggcat

SEQ ID NO: 527533 - DNA, 201 bp, Homo sapiens
tcctttgtgcttaatggtattttaaattgcaaacaaattatttcttaatttgtttcattcacttttcctttttttgacacgtgtctatcacgtggaaggaygtgatatggaaggacgcagggctactgctggcgtcccttttgcagggaagccgtctcctggcacacaggctacccaatgccacctttatttttgtttaaa

SEQ ID NO: 527534 - DNA, 201 bp, Homo sapiens
tggcgtcccttttgcagggaagccgtctcctggcacacaggctacccaatgccacctttatttttgtttaaatcaaaccaagtccctgggaggcgcccagsgtgggcccgcaggggcggctccacagtgcccgcggggtcccaggaccaggcgctggcagacttcggagtcgcccccgggccctccgctgcccaggcctcg

SEQ ID NO: 527535 - DNA, 201 bp, Homo sapiens
cccatgctctgaaggggagttctctttcatagcaaatccgagaggagccgaggagccaggtcctttgttccagacccagaagcagccatggggacctgtgrcattgtgactgaagccaatatctcatctggccctgagagcaacaccacgggcatcacagccttctccatgcccagctggcaactggcactgtgggccaca

SEQ ID NO: 527536 - DNA, 201 bp, Homo sapiens
gtctgttcctgctggctcttctgggttctgtgtctggggcaagagaagagagaagggagggccagagagatgaaggggaggggagagtcacagagagggggtgggacagacagacgaaggaaagaaaagctaagtagcgggagggagggactgacttctgttctagtattttcacaagcttcctactgagggctttcctgg

SEQ ID NO: 527537 - DNA, 201 bp, Homo sapiens
ccagacagatacagattatatatatatatatatatatatatatatatatatatagtatatatatatatatatatatatatatatatatatatgtacatatrcatatacatatacgtatacgtatacatatatggctatactgtaggatacactccaagacacccggtggatgcttgaaacttcagatagtactgaattctc

SEQ ID NO: 527538 - DNA, 201 bp, Homo sapiens
cctctgatctggaaggtttcctgaattacgtgacgagaaacctgggttcgagtcctaacttgtcaccaacttcctgagtgacctgggctggtcccgtcccytcttggaatctctgtcttccatctcttcagcgaaggggttgatttataagggtgttttctgctctgacactgtgatttgaattctgtgtttccacatgat

SEQ ID NO: 527539 - DNA, 201 bp, Homo sapiens
caggtagaagcaggaggtttgggaacacctcagtcctcccagtaagaaagaaaaagtcaaatgacgggaccaggggtctcaggcccattggtggaatgctytaaggactctgttccatgaaagggacccccaaatgccaaaggagcccagacccaaagaaggaggcagaacaaatccagtttgtcaatattgggtgattta

SEQ ID NO: 527540 - DNA, 201 bp, Homo sapiens
gaggctgctgcgccattgacctgtggactccagagactcccgctgtgcattcctctgatctggaaggtttcctgaattacgtgacgagaaacctgggttcragtcctaacttgtcaccaacttcctgagtgacctgggctggtcccgtcccctcttggaatctctgtcttccatctcttcagcgaaggggttgatttataa

SEQ ID NO: 527541 - DNA, 201 bp, Homo sapiens
agtgtgctgtgtggctgtgggagagtcacccagcgggctctctgcaggtcggctgatactatgatatcagcagatggcagcagtgcggggaatggctagarggcgtgggcctgggttgggagagagggagacaggggaaagggagctgggctaacaggagggcccctgccgctcaagctgccctctgctcacaggtacatg

SEQ ID NO: 527542 - DNA, 201 bp, Homo sapiens
tccagtttccctacgcctcgtgattctgaggaaatgagtcccagagaggggcctgcacttgctctggggcacctggagaggtggggggtggtgagtcaggsaggaacccagccccaggagttctgcagagcaggcctttcagtggcaggaaaccctgaaggtggggcaaataaggggcggcaagaggtggacacagtctca

SEQ ID NO: 527543 - DNA, 201 bp, Homo sapiens
gggactttcagggcagctgggaagtgaccctgtcagagacagccaggaaggagggggccagaatctcactctcctggcatcatccagtttccctacgcctygtgattctgaggaaatgagtcccagagaggggcctgcacttgctctggggcacctggagaggtggggggtggtgagtcagggaggaacccagccccagga

SEQ ID NO: 527544 - DNA, 201 bp, Homo sapiens
acaccccagatgcaaggcttagataccatagggaaagggtattcgtgctccagcaagacaaccaaaggcagccctccagaacaggcaagaacgctacgtgmgtcacagcctacgatttgtggagtaacatcaaggttgacatgttcttacactaggggcagtaaataaagtagaaatcagaaggcattcacaagactgggg

SEQ ID NO: 527545 - DNA, 201 bp, Homo sapiens
ccctctccacgagagtcaacaggtgtcacactaaggagactttgttcatggctggggacacagccccctccgaggctaccagtggggaggcggggcgtccycaggatggatcagggctatggtttgggtatggtttgcttgcccccaccaaaactcatgttgaaatttgatcccaatgtggcagtgttgggaggtaggggt

SEQ ID NO: 527546 - DNA, 201 bp, Homo sapiens
ttcaggacttgaagttggtaaagaagtcagctacgcagaagtcacggagatgcacacttcaggctgaaggaacagccaaggccctgaggcaggagcatccrctgtcttcatagcacagcaaggacgctggggactggcgcaggctgttggaggagtggaagaagagggcatggggaaccaggggccaaacacaaagggtct

SEQ ID NO: 527547 - DNA, 201 bp, Homo sapiens
ggtgtgaagagtttttggtttgggatttttattttatctttttttagctggagagaagaaattttaacttgagctaatagtttgttaatttggttttaggmgggaaatgatgcccctgctgtccctgatcttctctgccctcttcatcctcttcggcactgtcatcgttcaggctttcaggtaaatgtcctgtggcttctc

SEQ ID NO: 527548 - DNA, 201 bp, Homo sapiens
caaagttcggggattataggagtgagccactgtgcctggccttttgtttgtttgtttttaattttttgtagagatgggatctctccatgttgcacaggctkgtctctaactcttgggttcaagggatcctcttgccttggcctcccaaagcatttgggttagaggaatgagcctccatacctggccgtgtttcttaatttc

SEQ ID NO: 527549 - DNA, 201 bp, Homo sapiens
gctgcaagtcaggaagaaaacaaataccagtgtccgaatagaaaagagaagataatctcaatccagggtaaatggatgaggatttcctaaattggtctttyggaacagtttatagttctgagaattatatttatttatcccactggggaaaattgtaaatcaaatacatttacaaaattattggtagaatggctgctttac

SEQ ID NO: 527550 - DNA, 201 bp, Homo sapiens
atagtttgtatagagttcagtactatgtggtttcaggcacctactgggggtcttggaacgtatcctctgcagttaggggatgactgctgtatgtaaagtarggccaaggaggccaaggacaaaactcagaacagccaccggcacacaagacaagggggtgcctgatggagacgagaaggtgctgcaagtcaggaagaaaac

SEQ ID NO: 527551 - DNA, 201 bp, Homo sapiens
cttgtcaacaggaagtcatcttctcatttgtatatgaaccttttggatgccctcattatgatatgcctacctgttatgtgtctttttattattattatttwttttttttttttttggagacacagtcttgctctgtctctaaggctggagtgcagtggtgagatctcgactcactgcaacctccgcctcctgggttcaagt

SEQ ID NO: 527552 - DNA, 201 bp, Homo sapiens
actcctgacctcagatgatccacccatctcggcctcccaaagtgctgggattacagacgtgagtcaccgcacctggctgtttttattatttttatgatacycacattttaaaattatttattgacatataatacacatgcagaaagatgcacaagtcagaggtgtgaagctcagtgaattctcacacaatgaacacatcca

SEQ ID NO: 527553 - DNA, 201 bp, Homo sapiens
atatattggtcttttgtactttttgtatacattttaaattctgtcaacttccatcaaaacaaaccaacccaaaaaacttactggtgtcttattgggtttakactgattgttaagtcggtttggggaggatagagatcgtataaaaggcaaagctatacggcttttagaagctctgagaagaataccttcatgatcttgata

SEQ ID NO: 527554 - DNA, 201 bp, Homo sapiens
agaagagagttgtttgtatttactttgttggtacagtttttgcacatggaacaccatagaatggaagtatacaaggatacggaagacctagtggagctgtrtaagctggcatgtacctctctgctcagtgatgtgaaaaagccctacttgatttgtcatttacatctttgctgtagttttattttcttcctctctattatg

SEQ ID NO: 527555 - DNA, 201 bp, Homo sapiens
tttaaaatttttaatttaaaacgtttaaaaattttagcacctttaaagggctcctgttggaaaaccaacaatctttttccaaaatgaatttaaaagttaartgtaaaacagtaataaaaaggaataagaagaagccacaaactaactgagagaatgtacagatgaatatttatctgatcttaaggtaggaaagggttaaaa

SEQ ID NO: 527556 - DNA, 201 bp, Homo sapiens
gacaggagacttgcttgaacctgggagggggaggttgcagtgagctgagatcccatcattgcactccagcctgggcaacgagtgaaactccgtctcaaaamaaaaaacaaaaaaacaccatattactaatgattaaagagcagcttctcattttcttgtttgaatggtgtggtgagaaagaatagaattgaggcatactgc

SEQ ID NO: 527557 - DNA, 201 bp, Homo sapiens
tatatgttaaatcttcatttgtatgattgcataatttttgatccactcagtcgtcagcctgatggtttggttgatgggttggttttgttggtatttttgtktttttttttgtcatccagaaatgctttggagtctccatctcgtttccttaagtcatgctgttttcattatgactagctgagatttttttcccccactaat

SEQ ID NO: 527558 - DNA, 201 bp, Homo sapiens
ttctcaccgcctgcctgtttgtgtttcaggcatcctgacaaaaacaaagatcctggagcagaagacaagttcattcaaatcagtaaggcttacgaggtatygtgtccagctttgtgatgcatccattagctcttacaaaatatgccttaggaggtgatgagttttgtaaagttgtcagaaaggtcatgttccccatgccct

SEQ ID NO: 527559 - DNA, 201 bp, Homo sapiens
ctactccggaggctgaggcaggagaatcgcttgaacccgggaagcagaggttgcagtgagccaagatcgtgccactgcactccagcctgggtgacagagcragactctgtctcaagaaaaaaaaataaaaagaaaaaaaggaagactaattcctggccaggcgcagtggctcatgcctgtaaccccagcactttgggaggc

SEQ ID NO: 527560 - DNA, 201 bp, Homo sapiens
ccaccacgctcggctaatttttgtgttttagtggagatggggtttcaccatgttggccaggctggtcttgcactcctgacctcaagtgatccgcccacctyggcctcccaaagtgctgggattaaaggcatgagccaccacgcctggccactatccctgtttgcatagagcaagatactgaggcttagagcagtcatataa

SEQ ID NO: 527561 - DNA, 201 bp, Homo sapiens
ctatatgttaaatcttcatttgtatgattgcataatttttgatccactcagtcgtcagcctgatggtttggttgatgggttggttttgttggtatttttgtgtttttttttgtcatccagaaatgctttggagtctccatctcgtttccttaagtcatgctgttttcattatgactagctgagatttttttcccccactaa

SEQ ID NO: 527562 - DNA, 201 bp, Homo sapiens
aggctggtcttgcactcctgacctcaagtgatccgcccacctcggcctcccaaagtgctgggattaaaggcatgagccaccacgcctggccactatccctrtttgcatagagcaagatactgaggcttagagcagtcatataacccacccaagttctcactacagcatggtgagcgcgattcccactgacttcagacctgc

SEQ ID NO: 527563 - DNA, 201 bp, Homo sapiens
tctgatgtatgtaatcatacaagacctgattttggttctaacacagtggtctttgactatcaacattgatgtttttagagatgggttcttctggttgatasagactatgcattgcgtttagcagatggggtaaaactggcctaaaacaagtctttgcagaatacatgccaatttccaaaaaaaaaaaaaaatttgttgctc

SEQ ID NO: 527564 - DNA, 201 bp, Homo sapiens
catttttctgctttagctctgtgttcttgattttgtttcatttcacgttattttgcatcttgtggttagtgtaccagcatgtttgtatttagccacattcragtggcgtgttcttccagttggctctgtgccatcccctaaggcctattcaaaggtggagagaaaattaatgtgtatgtgcagctgaggggggaaaaaact

SEQ ID NO: 527565 - DNA, 201 bp, Homo sapiens
ttcctctctggctggcagcaagagaataagcctcatgtccttctgtttgaccaaacgcccattgtgccactgttatacaaggtactttctatgctaggatratggtttctttttcttttcttttctttttttttttttttttttagcagaaagtaatctctgagttggaacttatagcctatttgtcttttttgtaagaaa

SEQ ID NO: 527566 - DNA, 201 bp, Homo sapiens
tcttccagggaacttggtggagaaagtaagtatctgtcaaggaaactatggctgagaagtagtttaagaggtacctaggactgttaattgcccagaacatyttctgtagtcctctcaaacctgagtttcattgtgaggaaggcatgacacttattaattaattaattactcaaactaaatcgtttaagtgaagtctgtagg

SEQ ID NO: 527567 - DNA, 201 bp, Homo sapiens
ccccatctgtactaaaaatacaaaaatcagccaggagtggtggcgggtgcctgtagtcccagctactccggaggctgaggcaggagaatcgcttgaacccrggaagcagaggttgcagtgagccaagatcgtgccactgcactccagcctgggtgacagagcgagactctgtctcaagaaaaaaaaataaaaagaaaaaaa

SEQ ID NO: 527568 - DNA, 201 bp, Homo sapiens
gggagtgggaggttgcagtgagcagagatcgaggcctgggtaacagagggagaccgtctcaaaaaataaaataaaataaaaaataatagaacatatttggccacatccagtatattggaacaagtgcctgaacacttcagctcttggaaaaactggcctattttaaaggctttaactagaattgtagaattaccctgagta

SEQ ID NO: 527569 - DNA, 201 bp, Homo sapiens
acagagggagaccgtctcaaaaaataaaataaaataaaaaataatagaacatatttggccacatccagtatattggaacaagtgcctgaacacttcagctyttggaaaaactggcctattttaaaggctttaactagaattgtagaattaccctgagtatgtctgtatgtgtcactattgccttcttagaaatatgcatta

SEQ ID NO: 527570 - DNA, 201 bp, Homo sapiens
gcctcatgtccttctgtttgaccaaacgcccattgtgccactgttatacaaggtactttctatgctaggataatggtttctttttcttttcttttcttttyttttttttttttttagcagaaagtaatctctgagttggaacttatagcctatttgtcttttttgtaagaaacagtttcatccatgagaaatgtttgaaga

SEQ ID NO: 527571 - DNA, 201 bp, Homo sapiens
ctttgggaggccgaggtgggtggatcacgaggtcaggagttcgagaccagcctgaccaacatgctgaaaccctgtctttactaaaaatacaaaaaaaattmgccgggcgtggtggcacgtgcctgtaatcccagctactcaggaggcttaggcaggagaattgcttgaacccgggagtgggaggttgcagtgagcagagat

SEQ ID NO: 527572 - DNA, 201 bp, Homo sapiens
tatctcttttttttttgagacggagtctcgctctgtcacgcaggctggaatgcagtggcacaatcttggctcactgtaacctccgcttcctgggttcaagrgattctcctgactcagcctcccaagtagctgggactacaggcgtgcaccaccacacccagctaattgttgtatttctagtagagacggggttttgccata

SEQ ID NO: 527573 - DNA, 201 bp, Homo sapiens
attaagcaagaaccaactctggaagctcagtttttataatatggtcagtaattgtttcagacaggattatgatttcagtctgtaagagttcaatgaaaatrtgaaatcaatatcaccattcttttaatagctttagccaaatgaagacaaaaagattagttatctgcatttttattttttgcaatcttttacacttacttg

SEQ ID NO: 527574 - DNA, 201 bp, Homo sapiens
gatctcagctcactgcagcgtccgaggaggagctgtagtttaaaggaagatactcaatactctaggaagcagatcatcaaaattttaaaaagcggctgggygcggtggctcatgcctgtaatcccagcactttaaggaggctgaggcgggcggatcaccttaggtcaggagttcaagaccagcctggccaatgtggtgaaa

SEQ ID NO: 527575 - DNA, 201 bp, Homo sapiens
aaactaacagtaaattattttgtgtaattctttgctgtattaccttctctatctttgtttttattcctttaagaggtaactagagagccagtagatactacacgcaatatttcctctactttgaattttaaagattgtgtattatattgcagttcctgaaataatttcatattaactgaaaatagcattggacaatacttt

SEQ ID NO: 527576 - DNA, 201 bp, Homo sapiens
ggtgactccaagctggctgtaccaaccatgaggaatggaagaaagtttgggacaggtaccatcactgagcacctactacatgctaatctcctggttctatrctttttatctcatttaaaccttataatgagcctatgaaggaggatatcagtatctcttttttttttgagacggagtctcgctctgtcacgcaggctggaa

SEQ ID NO: 527577 - DNA, 201 bp, Homo sapiens
aggcatactgcgtcttaactacacagttttttgagagtgtttcacgtccatgtttgtacttatttaatgcccaagaatgccacaactatctcattttgtasttttgtacatggtaaatcttacagtttcatgagtttgtttaacatgtactcaatgaagtattcttaaaccatttattttatttattcttatcagaataaa

SEQ ID NO: 527578 - DNA, 201 bp, Homo sapiens
ccactcccggctaagttagtatttctttaatcttaatgctttaaactaagccacttggatcctgaataatttaaatcttgagctacattggtaagtaatawattatttaaggccaggaattcctgtagttttcatggagtctgtagctttattaaaaaataaatcactgccaggcttcattcttccatatgatcctctaaa

SEQ ID NO: 527579 - DNA, 201 bp, Homo sapiens
tctgatacattttactaagtgtttcttagactgcttaagaattttactttgcttggtgaaaccatttgactttactttttcccttaggaaaactatgtttytctcccaataattaagttttatcgtaggtactttttgtttgttatccacattagcaaaagaaataactcctcccacccaaagaatggcagattggtgtga

SEQ ID NO: 527580 - DNA, 201 bp, Homo sapiens
agagatgggttcttctggttgatacagactatgcattgcgtttagcagatggggtaaaactggcctaaaacaagtctttgcagaatacatgccaatttccaaaaaaaaaaaaaaatttgttgctcaggtgttgcacaatttttatctaacactgaggctatcagctccaactaaacaacatttcagtgggtgaggctgccc

SEQ ID NO: 527581 - DNA, 201 bp, Homo sapiens
tcaccatgacttcctgtttaaaaagagagactgctgggcacggtggctcatacctgtaatcccaacactttgggaggctgaggcaggtggatcacaaggtyaggagttcgagaccagcctggccaacatggtgaaaccccatctgtactaaaaatacaaaaatcagccaggagtggtggcgggtgcctgtagtcccagcta

SEQ ID NO: 527582 - DNA, 201 bp, Homo sapiens
ataggtaaaatagagatggtgaagattggtcttaaactccaggagatacgaaagagatggtgaaggctggtcttaaactcctggtcacaagcgatcctccygcctcagcctcccaaagcactggtattacaggcatgaatcaccgtgcccagccaacttttcagtttctaattcaggtttctgtgtgcgctcggtctggta

SEQ ID NO: 527583 - DNA, 201 bp, Homo sapiens
gcaggtttctctaacaaaacaccagactcacctccccggcacctgccccccagatcctgtcatctgataacgcagcattggaacatagagtgtagagaagractctcatgcacctcctcccatgtaaactgtggctacagggaaaagtcactgtgatttgtgtttactaagaccctgtaggtgtttagatgccttagattt

SEQ ID NO: 527584 - DNA, 201 bp, Homo sapiens
attcacttgaacccaggaggcaaaggttgcagtgagccaagattgtttcactgtactccagcctgggtgagaatgagactctgtctcaaaaaaaaaaaaawtttttttgtttgagagacagggtctcactttgttgactaggatggtcttgaactcctggcctcaagtggtcctcctgcctgggcctcccaaagtgctggg

SEQ ID NO: 527585 - DNA, 201 bp, Homo sapiens
accccgtctctactaaaaatacaaaattagccgggcgtggtgttgcatgcctataatcccagctactcaggaggctgaggcaggagaatcacttgaacccrggaggcggaggttgtgatgagccacgatcgtgccattgcacttcagcctgggcaacaagagcgaaactccatctcaaaaaaaaaaaaaaaaagaatgtaa

SEQ ID NO: 527586 - DNA, 201 bp, Homo sapiens
aaccatgcttttgaaacttctgatgttttttctctacttttcttccaggtgtctattttagaaaggcgcaacacagcaggaagggtggtgtataaaacccyggaagacccttggattgggagtgagagtgacaaatttatcctcttgggctatctcgaccagctgcgtaaagatccagctcttctgtcctctgaagcagtg

SEQ ID NO: 527587 - DNA, 201 bp, Homo sapiens
ggtgcagtggctcaccctagcacttttggaggctgaggtgggaggaccacttgagctcaggagttcaagaccagcctgggcaacacagtgagactttatcttttttttttttttttttaattttggaaaaaagaatgaagacagtatctttttgttgttttttctgtttgctggtataagtaatacagttgttggttgttt

SEQ ID NO: 527588 - DNA, 201 bp, Homo sapiens
ttttgtaaaactccttttttcttactttagcgactctaatgatgagcgagagtcaagccctccagaaaaagaggaagcccaagagaagactgggaaaactragccaagcttcaccaaagaaaacagcaggtttctctaacaaaacaccagactcacctccccggcacctgccccccagatcctgtcatctgataacgcagc

SEQ ID NO: 527589 - DNA, 201 bp, Homo sapiens
gaaaaaagagctttaacttttaacaaaagcttaggaaagtcaccataaaagttatttcttaggccgaacgcggtggctcacacctataatcccagcacttygggaggccgaggcgggtggatcacttgaggctaggagtttgagaccagcctaatcaacatggtgaaacctcatctctactaaaaatacaaaaattagctg

SEQ ID NO: 527590 - DNA, 201 bp, Homo sapiens
gtgtttcaccatgttggtaaggctggtctcgaactcctgacctcaggtgatccacccacctcagcctcccaaagtgctgggattacaggcgtgtgccaccrtgcccggccacttccctttttttatattggctgactgaccctttcccactggctaggaaaggatcacccatggctgccattctgggcagcagagcctggg

SEQ ID NO: 527591 - DNA, 201 bp, Homo sapiens
cttgtcattgagccctggtgatcaacattatgttattttatttgttttgctgaagtgtttaatgttgtggtagtttgaaatctttaatgccaagatgagcmtgagtacctaaactgaaatattttagtcttgaatgttctttaatgtttctctagtgaaagaagagtttctcattcttttgaatgactgcatttagaatat

SEQ ID NO: 527592 - DNA, 201 bp, Homo sapiens
atgtggtggcaggcacctgtagtcccagctacttgggaggctgaggtaggaggatcacttgagcccaggaggtcgaggctgcagtgagccatgatcatgtygctgcactcaagcctggaaaacagagcaagaacctatctcaaaaagaaaaagaaaagcagcacagaaaggctgtttgtaggtcagggattaccaagtcag

SEQ ID NO: 527593 - DNA, 201 bp, Homo sapiens
aatcgcctagatgaaaatcttttcctctgggtgttatttttccccactgaatgccacaccattgaaaatagactgctcatcccctcttcctttcttgtccytgtcccatgctcaccccaccctcctgtcctgtgtcttggagaagcacagggctccaccctgcaagcggcatctggcggaccctcatgagcctgtcgtgca

SEQ ID NO: 527594 - DNA, 201 bp, Homo sapiens
gcatgagtaagggtgagtgggctaatggttggctggggaggagctgaatgcgagtaggaagttatccagaagcaaaactgccacattgaggtgatgcatgrtacagactgcatgcgtgactgcgcctgacactgttctgcttcagtgaacaggtatattttagcattaaactggttgaaataaaggtaaagatcattgaaa

SEQ ID NO: 527595 - DNA, 201 bp, Homo sapiens
ggtcccaaactcctggcctcaagcagtccttccaccttggcctcccaaagtgctgggattatcaatatgagccaccatgccagatttgttcatttttaaayatttttatctcttcaagtcatcttttgatcttttaaaaagcaccttcaaacagctgcaccttccatttgcactaggaaatgaaggtagtgatgggattgg

SEQ ID NO: 527596 - DNA, 201 bp, Homo sapiens
tgggggtcttggaacgtatcctctgcagttaggggatgactgctgtatgtaaagtaaggccaaggaggccaaggacaaaactcagaacagccaccggcacmcaagacaagggggtgcctgatggagacgagaaggtgctgcaagtcaggaagaaaacaaataccagtgtccgaatagaaaagagaagataatctcaatcca

SEQ ID NO: 527597 - DNA, 201 bp, Homo sapiens
ttaagaaaagcatacaggctggggatagaaactggtgtatcatcagtaaatggttagtggttgaagtcctgagtagggtaagatcttcccggcataatacygtagtctcccctgatccaccccacttacccctttttcagtttctgaggtttcagttacccacagtcaaccaggtccaaaacataggtgactacagtgcaa

SEQ ID NO: 527598 - DNA, 201 bp, Homo sapiens
ctgagacaggagacttgcttgaacctgggagggggaggttgcagtgagctgagatcccatcattgcactccagcctgggcaacgagtgaaactccgtctcaaaacaaaaaacaaaaaaacaccatattactaatgattaaagagcagcttctcattttcttgtttgaatggtgtggtgagaaagaatagaattgaggcata

SEQ ID NO: 527599 - DNA, 201 bp, Homo sapiens
agacggagtctcgctctgtcacgcaggctggaatgcagtggcacaatcttggctcactgtaacctccgcttcctgggttcaagggattctcctgactcagyctcccaagtagctgggactacaggcgtgcaccaccacacccagctaattgttgtatttctagtagagacggggttttgccatattggccaggctggtctc

SEQ ID NO: 527600 - DNA, 201 bp, Homo sapiens
atctacgcccctaccctcttggtctttaaagaacatataaacaggcctgccgatgttatccaggtacgtgagggtcaccttggttaagattttcttcacawtttatcccaagattttatgtaaataaacagcaaaattgaacaaagtggctgaaggaaaggatcttccttcagatgcacaaaattttttaatgaatttttt

SEQ ID NO: 527601 - DNA, 201 bp, Homo sapiens
cttcttccacaatgcagttgtccgtgaaaatctgcgacaatttgtagaaagtcttcttccagggaacttggtggagaaagtaagtatctgtcaaggaaacyatggctgagaagtagtttaagaggtacctaggactgttaattgcccagaacattttctgtagtcctctcaaacctgagtttcattgtgaggaaggcatga

SEQ ID NO: 527602 - DNA, 201 bp, Homo sapiens
tctcctcactttgttttttagatttggggaaaggttttttttccttcaaaagcattatagctgttggtcttttgtactttttgtatatattggtcttttgkactttttgtatacattttaaattctgtcaacttccatcaaaacaaaccaacccaaaaaacttactggtgtcttattgggtttagactgattgttaagtcg

SEQ ID NO: 527603 - DNA, 201 bp, Homo sapiens
agctaggcagggtggcgcatgcctgtaatcccagctactggggaggctgagacaggagacttgcttgaacctgggagggggaggttgcagtgagctgagakcccatcattgcactccagcctgggcaacgagtgaaactccgtctcaaaacaaaaaacaaaaaaacaccatattactaatgattaaagagcagcttctcat

SEQ ID NO: 527604 - DNA, 201 bp, Homo sapiens
cccaccttcctctgtgaaatgctgcagtattatatggtgctttgaaaacatgccctgctggagtgctttgggaaaaaatagcctgtttcaaagtttcattwattatagtcatgtaaaacaactgattgcctctatcatttattttaagaaactttcctaacaaaatagccctccgtctgcctctgtagtgaactctgtgga

SEQ ID NO: 527605 - DNA, 201 bp, Homo sapiens
gctggccccggggggagccgggagccaacagggccgggccctgggctctcggagggcggcgggggagggggctgtctcctgcagggttgcgacctccggcrggagcgcgaggcggggcttagacctggagcttgtctctgggagcttcttcctggtcctggatatgctgcccagagagctggcagcctacctgttgggcag

SEQ ID NO: 527606 - DNA, 201 bp, Homo sapiens
aatcccagcactttgggaggccgaggtgggtggatcacgaggtcaggagttcgagaccagcctgaccaacatgctgaaaccctgtctttactaaaaatacaaaaaaaattcgccgggcgtggtggcacgtgcctgtaatcccagctactcaggaggcttaggcaggagaattgcttgaacccgggagtgggaggttgcagt

SEQ ID NO: 527607 - DNA, 201 bp, Homo sapiens
gcaggacctgatgcttcctctgggtagatagtgtcagaactgagttgatacccaattggtgtctgctggaggatttatggggaacccccacccccacagcrtgtggtgtcagaagggaagcattgagttgggcatagtggcacgtgcctggaatcccagctactcaggtggctgaggcaggaagatcgcttgagcccagga

SEQ ID NO: 527608 - DNA, 201 bp, Homo sapiens
tgggtaagcatgtgtgtgtgtgcatgtatgtatgtgtgtgagagagagagaggcaggcacactgaaattgcacgcttttctctttggtcttgtggggcttyatccatacagcaagatgctggctgtgacctttccaatccagacatctgagccattgcgacagggacctcttttcccacttcacttcgtgttttgttggtt

SEQ ID NO: 527609 - DNA, 201 bp, Homo sapiens
ttccttctcgtttccagtcactgctggccccggggggagccgggagccaacagggccgggccctgggctctcggagggcggcgggggagggggctgtctcytgcagggttgcgacctccggcaggagcgcgaggcggggcttagacctggagcttgtctctgggagcttcttcctggtcctggatatgctgcccagagagc

SEQ ID NO: 527610 - DNA, 201 bp, Homo sapiens
gggctggagattgagttaataattgatcacgcctgtatgatgaagccttcataaaaatccctgaactctggctcggtttcctggggggtgggctcagtctrcaccacctcccctcagccaagcctacagtagagggcccaggcatcctcccgtatgggagaggcgtttgagtaaggagcctcacctggggtgtcctagcct

SEQ ID NO: 527611 - DNA, 201 bp, Homo sapiens
gaagcccaagagaagactgggaaaactgagccaagcttcaccaaagaaaacagcaggtttctctaacaaaacaccagactcacctccccggcacctgcccsccagatcctgtcatctgataacgcagcattggaacatagagtgtagagaagaactctcatgcacctcctcccatgtaaactgtggctacagggaaaagtc

SEQ ID NO: 527612 - DNA, 201 bp, Homo sapiens
ccggtaactccttcccggcgtgacgcgcggaaccgcggacgcggcggggccaggccgactcagggatttcccctcagttccttctcgtttccagtcactgytggccccggggggagccgggagccaacagggccgggccctgggctctcggagggcggcgggggagggggctgtctcctgcagggttgcgacctccggcag

SEQ ID NO: 527613 - DNA, 201 bp, Homo sapiens
aggggggaaaaaacttccctaaagggtgtgatatgtgtttaggattgcttagtgagagctgtttggcatctcaaattatgggtatgacagatgtttactartgcacggaagaccctctcacagcctcagtatagtatttttaattcccgagggtgtgcagattagccagaagcatcaatttatataaacatcaaataatgt

SEQ ID NO: 527614 - DNA, 201 bp, Homo sapiens
attgagaacttattcttcatttaacaaatactgggccgggcatggtggctcatgcctgtaatcccagcactttgggaggccgaggagggcggatcatctgmggtccggagttcaagaccagcctgaccaacatggagaaaccccatctctactaaaaatacaaaattagccgggcatggtggcttatgcctgtaatcccag

SEQ ID NO: 527615 - DNA, 201 bp, Homo sapiens
tgtagtcctctcaaacctgagtttcattgtgaggaaggcatgacacttattaattaattaattactcaaactaaatcgtttaagtgaagtctgtaggagastaataattgaaacagatgaagtacagagactgaaagaattaattcctattaatacccatcttgcagaacttacactgtcataggaatctgagcctaaaat

SEQ ID NO: 527616 - DNA, 201 bp, Homo sapiens
tggagaagggtgatgggagggtcgggtcctcactccgggaatccttgggaccgaactccgccattgccaagcctcagtcttttcatctctgatttaggctyatagtccctgtctcttgtcctagaccaagaaaggcttcagaggccaggccagagtgcagcgctattgggctccctgtcaggcagtggcagagactgaggc

SEQ ID NO: 527617 - DNA, 201 bp, Homo sapiens
ctcaaggggaccaaggagcttctggggagaggtgggcatgaggaccggcagggtgggccactgttgacggggattgaggaagtgatgggccatgcatggamtaagacagggctgagtgatgggatggcctccctgtcccccttgcacagatttccccggaggctccaggcagctgggctgctctcattccctatacctgcg

SEQ ID NO: 527618 - DNA, 201 bp, Homo sapiens
tggctcattcatgggcccggcatctcctgccggccacgggagcccgctggggaggatgcggcatgctcagcctctgtgccctgtctaggctgttgtcacayagcaggtgcctcctctaaccccgaacctcctggcggccccgtgttagggtacagctgaggagaccaagcctcagggacgtttgaggacacttgcctgggc

SEQ ID NO: 527619 - DNA, 201 bp, Homo sapiens
cccaagccctgtgtgggtctccagggtgaggtgggggttgtttcctgggaggctgtgggtcccgagcagtcccaactgatgccttgcccatcccttcttgwcctgccaggcaccggcagtggctctgtgtcccacgccatcatccgcaccattgcacccacgggtcacctgcacacggtggagttccaccagcagcgggca

SEQ ID NO: 527620 - DNA, 201 bp, Homo sapiens
ccctgcacatatacaggtgctggggccgcccagtgtggcgattgaagccaagattggccccaggcgctgatgcatctaggttgttggtggcgtgttcctcmcgggcaggagagctagggtccaggttcacgaagagtgcctagcactgccatgctggctttctgagggctgcaggtcaccatgtccctccctggggtgtct

SEQ ID NO: 527621 - DNA, 201 bp, Homo sapiens
caggacgcccaggctgggggctctcctcgcccgccctggtgtctgacagcctcaaggaaggagcagtgcctgtgtcagccatggggcccttggagctgccrctggtgcctagggggcctgggtttctgcccaggcagccagtggctgttgggagcctctgtttcccctgtgctgggggccttgagtgctatgctagcaggg

SEQ ID NO: 527622 - DNA, 201 bp, Homo sapiens
cacaaaggtggaggtcagagcctccagcctgcccttcctacagacacatgtggctcctcagtttctattttcacatctttccgggatgctgacagcagggwgtgaaggtggaggcagagaagcccgttaggaggctggtgctgtaactggagtgagaggtggtgggaaatggaccaggaggagctggggaggactggtgct

SEQ ID NO: 527623 - DNA, 201 bp, Homo sapiens
tgccacaggctcccctgggtgttgaagccaaagggtgcaggtgggggagtctgaccccctcccaggtgggcctaagcaggaagggggtggaggagggaggrgggcattgaccctgagaccacgctgcgtctgacccctgggcccccacggccctggctgccccacggggcctgagaccatctcgtgcttctccagtccccg

SEQ ID NO: 527624 - DNA, 201 bp, Homo sapiens
gctgcaggtcaccatgtccctccctggggtgtctgggtgggaggggtggagagcaggacttagccaactccatcagctgctgctcctgtgcatcctgtggygggtgctggcctctccgcccctgccccactctcgcgagagagctcaatcaagcagcaccttctcctggcctcctcagatatgccaggtcccctcctagga

SEQ ID NO: 527625 - DNA, 201 bp, Homo sapiens
gaggccaggccagagtgcagcgctattgggctccctgtcaggcagtggcagagactgaggctgagctagccacaccccgcccatgcccactgctgggatgyaggcctcgaagccttctacctagaccctaggccctcatcctgcctcctgacttgctcatgcctacacacacccctccccaggtccttggcccttgccaga

SEQ ID NO: 527626 - DNA, 201 bp, Homo sapiens
tggccctgccggctccgacaccagccccttccgcagcggcacgcccatgaaggaggccgtgggccacaccggctacctgaccttcgccaccaagaccccargctagggggccgcctcccagggcaccagggagctgggagcactgaagggctgggcagggaggccagaggcaccttatatggtcagcgatgcctgccagac

SEQ ID NO: 527627 - DNA, 201 bp, Homo sapiens
actgtcagcctgccaccgcccgacctgggcacaggcacagatggccctgccggctccgacaccagccccttccgcagcggcacgcccatgaaggaggccgkgggccacaccggctacctgaccttcgccaccaagaccccaggctagggggccgcctcccagggcaccagggagctgggagcactgaagggctgggcaggg

SEQ ID NO: 527628 - DNA, 201 bp, Homo sapiens
ccagagaccaagccacaccatggcagtggccaggccagggccccactttggcctgaggtgaggagtgggtcaggctcgccaggggaggcagagctggggakgatggtccctggctgggccctgctcctggtctctggcctctcccaaccccctgatggaggaaggtggcagcgccacccaagtgcagggcaggcccggccg

SEQ ID NO: 527629 - DNA, 201 bp, Homo sapiens
cctctccgcccctgccccactctcgcgagagagctcaatcaagcagcaccttctcctggcctcctcagatatgccaggtcccctcctaggaaccgtgaacwagagagaccaggttcctgccctcgaggagggggacacagcctaggtgagcatctcagtgccgctggttgctgtgaagcctgtgagacagggctgcgtgtc

SEQ ID NO: 527630 - DNA, 201 bp, Homo sapiens
agcctctgtgccctgtctaggctgttgtcacacagcaggtgcctcctctaaccccgaacctcctggcggccccgtgttagggtacagctgaggagaccaarcctcagggacgtttgaggacacttgcctgggccacatacctctacccggccctggcttccccaggtcctccctgccaggacagggacccgggctgggttc

SEQ ID NO: 527631 - DNA, 201 bp, Homo sapiens
gccaagggcatggaggaggtccctccacagtgacaacggtgtggggtaggggaggtgcattcaggacaccacccagggacagtgcctatgtgatcacctcytaaaggctaagcttaggggcatttcccaaagtggggacagagggcaggacgcccaggctgggggctctcctcgcccgccctggtgtctgacagcctcaag

SEQ ID NO: 527632 - DNA, 201 bp, Homo sapiens
tggtggccaggccctgcgtcctgagtccaaccaggccagggcagagccccagcccctgtgtggtgggggcaggtttgggcaggcttggtgggggtgggctstctcaaggggaccaaggagcttctggggagaggtgggcatgaggaccggcagggtgggccactgttgacggggattgaggaagtgatgggccatgcatgg

SEQ ID NO: 527633 - DNA, 201 bp, Homo sapiens
gagctcctgggatctcagaggggtccagagaccaagccacaccatggcagtggccaggccagggccccactttggcctgaggtgaggagtgggtcaggctsgccaggggaggcagagctggggatgatggtccctggctgggccctgctcctggtctctggcctctcccaaccccctgatggaggaaggtggcagcgccac

SEQ ID NO: 527634 - DNA, 201 bp, Homo sapiens
gtccctggctgggccctgctcctggtctctggcctctcccaaccccctgatggaggaaggtggcagcgccacccaagtgcagggcaggcccggccggaggrgtctggagtcccctccctgctgtttcccaaagcctctcctcccccaggctctggagcccagggagctggccccttttagggaagatgctgggtgcggagg

SEQ ID NO: 527635 - DNA, 201 bp, Homo sapiens
ggtctgtgagtctggtgagttcctcaggctgcctcagtttaacgcagaaattgacacaaaggtggaggtcagagcctccagcctgcccttcctacagacasatgtggctcctcagtttctattttcacatctttccgggatgctgacagcagggagtgaaggtggaggcagagaagcccgttaggaggctggtgctgtaac

SEQ ID NO: 527636 - DNA, 201 bp, Homo sapiens
cctctcccaaccccctgatggaggaaggtggcagcgccacccaagtgcagggcaggcccggccggaggggtctggagtcccctccctgctgtttcccaaarcctctcctcccccaggctctggagcccagggagctggccccttttagggaagatgctgggtgcggaggcggggcagccctggggaaggtcgggcctcaag

SEQ ID NO: 527637 - DNA, 201 bp, Homo sapiens
cttgcctgggccacatacctctacccggccctggcttccccaggtcctccctgccaggacagggacccgggctgggttctcattcactgcaggccaggccragtgaagcccgtggctgccctggtgggaggcggcagggaggggctgtcatgctcgggctctgcttcgagtaggcgcctcctgttcccgggagcagcgaca

SEQ ID NO: 527638 - DNA, 201 bp, Homo sapiens
tgtcatgctcgggctctgcttcgagtaggcgcctcctgttcccgggagcagcgacagcctctaatttcctgtgacagcagcggcccccgcaccgccccackctgccgtgctgtcagagctgctccgggcccagagctccagcagccctgtggaaggcaggagagcagtgcccgctgtgggccaagtgagacaatggcagcg

SEQ ID NO: 527639 - DNA, 201 bp, Homo sapiens
ccttgccagacattagcaccatgagcttcgtggcatacgaggagctgatcaaggagggtgacacggccatcctgtcactgggccatggtgcaatggtggcrgtgcgtgtgcagcgtggggcacagacccagacccggcatggtgtcctgcggcactcagttgaccttatcggccgccccttcggctccaaggtgacgtgcg

SEQ ID NO: 527640 - DNA, 201 bp, Homo sapiens
ggaacaccttccagcttcggggtgaagacaaagggccgtgagggctgcaccccgactccagcccgccggcccgccccagcccgctggaaaggacacccctrgagcagctctgggacttccccgcctacctgcgcgcaccgccggtgctacagccggggcaggcgcacgcgaacacgtgcagcagacggtgaaacggggagc

SEQ ID NO: 527641 - DNA, 201 bp, Homo sapiens
gcagcacccatcgaccccagctccggcacccgccctcaccggaatgccgcccagcttgctagcagtccaggcacccggccctgtggggctgccgtgcaccrgcgcatctcgaaggcccagcagcaccggcttcagaacggccgccatggccgccgggcgaccaggtgaaaacgcaaactacggcggcctctctgcgcacgc

SEQ ID NO: 527642 - DNA, 201 bp, Homo sapiens
aaaactttttagtaagttttcactcctgctctaaaatttgcttcggtctctcctctgtcttatgtgcctcggtcaaattctttcttcggaggaggcaagarctgaggttgctacagacccctacagattcaccgctgctaacagtattgtggcaaaaatgttagtcacaaagggggaaaaaatcagaccaccctcatacct

SEQ ID NO: 527643 - DNA, 201 bp, Homo sapiens
catggaccagtactggttggtagcctattaggaatagggccatgcagcaggaggtgagcaacagccaagcgagcattaccacctgatctccacctcccgtygtatcagcagcattagattctcataggagcgcaaatcctattgtgaactgcacatgcaagggatctaggttgtgtgctccttctgagaatctaaagcctt

SEQ ID NO: 527644 - DNA, 201 bp, Homo sapiens
ccctagcactttgagaagctgagaggctgaggtgagggaactgcttgagtccaggagttcaagaccagcctaggccacatagtgagacacccatctctttaaaaaaaaaaaaaaggaaatggaggaaaaaacaataacagaataaaattaacccaacatggtggggtgcggtggctcatgcctgtaatcccagcattttgg

SEQ ID NO: 527645 - DNA, 201 bp, Homo sapiens
cagcttggccaacatggtgaaaccccatctccactaaaactacaaaaattagccgggcgtagtggcaggtgcctgtaatcccagctgtgggggaggctgasgccgcggctgcagaatcgcttaaacctgggaggcagaggttgcagtgaactgagattgctccactgcactccagcctggatgatagagcaagactctgtc

SEQ ID NO: 527646 - DNA, 201 bp, Homo sapiens
aaattagccgggcgtagtggcaggtgcctgtaatcccagctgtgggggaggctgaggccgcggctgcagaatcgcttaaacctgggaggcagaggttgcartgaactgagattgctccactgcactccagcctggatgatagagcaagactctgtctcgaataataataataatacaaaaattagccagacatagtgtaat

SEQ ID NO: 527647 - DNA, 201 bp, Homo sapiens
taaggcagaaggatcacttgagcccaggagataaaggctgcaataagctatgattgcaccaccgtactctggcccgggtgatagagcgagaccctgtcttaaaaaaaaaaaaaaaaagaagagagaaatatatatcataggacacactactgccgagaaaggataaggattcaggcaaaaaatataaaataaaccctaaga

SEQ ID NO: 527648 - DNA, 201 bp, Homo sapiens
ggctgaggccgcggctgcagaatcgcttaaacctgggaggcagaggttgcagtgaactgagattgctccactgcactccagcctggatgatagagcaagaytctgtctcgaataataataataatacaaaaattagccagacatagtgtaataatacaaaaattagccagacatagtggtgcacgcctgtggtcccagcta

SEQ ID NO: 527649 - DNA, 201 bp, Homo sapiens
tgcaatctttattagaatacctgggctttgctttttcctctgagacagtgtaaaatgctgtatgttgagaaagatcccactcgaatggaggcgaaattgcycttaactttccaatcattgctctgactcatggaacaaaggaatgttgcttctgagaggcaatccccgtcctttcctacaccacctccccaccacacccag

SEQ ID NO: 527650 - DNA, 201 bp, Homo sapiens
tttcttttcctttttccattttttcaccccaatcttattatcccagatcaaatggtagttttctaacttgcctgtctctgctataaagacatattagaaayataaaagaaaatttaagagtcagtgaacgcgtcttctataaatacttgccatctctaacttctgtttgttcatcttcactttcttaacggcaattataaa

SEQ ID NO: 527651 - DNA, 201 bp, Homo sapiens
tatcacttatgggaatcatacaggtttgtttttaatctcccccactagtcacagtggctcaagcctgtaactccagcactttgggaggctgaagcgggcasatcatttgaagtcaggagttcgataccagcctgaccaacatggtaaaactccgtctccactaaaaatacaaaaagtagtcaggcgtggtggcgctgtaat

SEQ ID NO: 527652 - DNA, 201 bp, Homo sapiens
aacatggacttcatctgtgccgtttcttgctatatctgcagcacctacaaataccagcaactggcatgcagaatagacttcgtaagtatttgttagacaartgagtgcactttaccttactgaatcctcctacacatcctataaagtaggtattaggtcctataaagcaggtattaggttctctcttggtttggggaatac

SEQ ID NO: 527653 - DNA, 201 bp, Homo sapiens
aagtaggtattaggtcctataaagcaggtattaggttctctcttggtttggggaatactgtaggttttgcttttctcatattttcctgtgttttccaaackaatatgtattcctttataatcaaggaaaacaataaaaggaactgtgcctttttttacctcaaaatctgctcctgacaagcagcaattcgcttcatgaatt

SEQ ID NO: 527654 - DNA, 201 bp, Homo sapiens
atcacaaggtcaggagatcgagaccatcctggccaacatggtgaaaccccatctctactaaaaaatgcaaaaaattggctgggcatggtggcttgcgcctatagtcccagctactcagcaggctgaggcagaggaaatcgcttgaacccgggaagcggaagttgcagtgagccgagatcgtgccatgccactacactccag

SEQ ID NO: 527655 - DNA, 201 bp, Homo sapiens
ttcccaatccagtcacctctcaacctcagcagcacacatcctcacctttgggaaagcaactgatccatggcaatgccttctctctgctgatagtccctcaraaggctgtgggcatgatccaggttgacaaagtccctgtaatcatcctcatctgcaacacagatgtagtagggcaggaagagcggcagcccaggaggcaca

SEQ ID NO: 527656 - DNA, 201 bp, Homo sapiens
tggctgcaggctgggagctcggtgacttctgatgtagggcaggtcaaaaagagtggctctccactccaggaatacctaggacaaggaaacaaagaaccccraatcagagccacacaagtcgcattctagcatctaaggccatgctttgcaacctttctttgtttcttgcagaaatctcccagaggcccaaaaacctagcac

SEQ ID NO: 527657 - DNA, 201 bp, Homo sapiens
gtcctgcgcctctctctctggcacctgcaggcactgggagcggaacaccttccagcttcggggtgaagacaaagggccgtgagggctgcaccccgactccrgcccgccggcccgccccagcccgctggaaaggacacccctggagcagctctgggacttccccgcctacctgcgcgcaccgccggtgctacagccggggca

SEQ ID NO: 527658 - DNA, 201 bp, Homo sapiens
tctgctgatagtccctcagaaggctgtgggcatgatccaggttgacaaagtccctgtaatcatcctcatctgcaacacagatgtagtagggcaggaagagyggcagcccaggaggcacaggatgggcagcacccaggacagcatcctgcaggcggaggtcttggagccgagcagtccagtctacgtctttggcactgctgg

SEQ ID NO: 527659 - DNA, 201 bp, Homo sapiens
gaatactgtaggttttgcttttctcatattttcctgtgttttccaaactaatatgtattcctttataatcaaggaaaacaataaaaggaactgtgcctttytttacctcaaaatctgctcctgacaagcagcaattcgcttcatgaatttgtaaaacgtctgatctccacttttaattatggtcttctcatatttttcatc

SEQ ID NO: 527660 - DNA, 201 bp, Homo sapiens
tctgcaacacagatgtagtagggcaggaagagcggcagcccaggaggcacaggatgggcagcacccaggacagcatcctgcaggcggaggtcttggagccragcagtccagtctacgtctttggcactgctggcatcattcccaaaatccaaggtaaactgtggtgaaggcccctcctcagtatcacttccccagtcatca

SEQ ID NO: 527661 - DNA, 201 bp, Homo sapiens
tgaggcaggagaattgcttgaacctgggaggcacaggttgcagtgagaagagattgtgccactgcactccagcctgggcaacagagtgagactctgtctcaaaaaaaaaaaaaaaaaaatgaaaaaatggcagagtttaactggtatatgacattcctctaggagcatctgactggtaagggaaaagcgcctcaagtgagc

SEQ ID NO: 527662 - DNA, 201 bp, Homo sapiens
gaggcaggagaattgcttgaacctgggaggcacaggttgcagtgagaagagattgtgccactgcactccagcctgggcaacagagtgagactctgtctcaaaaaaaaaaaaaaaaaaatgaaaaaatggcagagtttaactggtatatgacattcctctaggagcatctgactggtaagggaaaagcgcctcaagtgagca

SEQ ID NO: 527663 - DNA, 201 bp, Homo sapiens
ggccgaggcaggtggatcacgaggtcaaaagatcgagaccatcctggccaacatggtgaaaccctgtctctactaaaaatacaaaaattagctgggcatgrtggtatgcacttgtaatcctagctattcaggaggctaagggaggagaattgcttaaacctgggaggtggaggttgcaatgagctgagattgagccactgt

SEQ ID NO: 527664 - DNA, 201 bp, Homo sapiens
ttgagccactgtactccagcctggcaacagagcgagattctgtctcaaatatatatattttcatatatattttttaatatatatattttattatttattttatatatatatatatatatatatgtatttttcatctgggtgcggtggctcacgcctgcaatcccagcactttgggaggccaaggagagtgggtcacttgag

SEQ ID NO: 527665 - DNA, 201 bp, Homo sapiens
tctcccagaggcccaaaaacctagcaccatggctgtaaagcatagcaagatatctggaaatcttgtcagtgttcgattcaaagtctcaaaggcactaaagycaatgttcaactgaatctaggtaaagctgcaacaaagtccagactcagctccactgcagattaaatggaatcagccctccacatcactggccttacagag

SEQ ID NO: 527666 - DNA, 201 bp, Homo sapiens
tgagccactgtactccagcctggcaacagagcgagattctgtctcaaatatatatattttcatatatattttttaatatatatattttattatttattttatatatatatatatatatatatgtatttttcatctgggtgcggtggctcacgcctgcaatcccagcactttgggaggccaaggagagtgggtcacttgagg

SEQ ID NO: 527667 - DNA, 201 bp, Homo sapiens
gagccactgtactccagcctggcaacagagcgagattctgtctcaaatatatatattttcatatatattttttaatatatatattttattatttattttawatatatatatatatatatatgtatttttcatctgggtgcggtggctcacgcctgcaatcccagcactttgggaggccaaggagagtgggtcacttgaggt

SEQ ID NO: 527668 - DNA, 201 bp, Homo sapiens
aggagaattgctcgaacctgggaggcggaggctgcagtgagccaagattgtgctactgcactccggcctggcaacaaagcgaaactccatctcaaagaaaraaaaaaatctggagtgagccgggcatggtggctcacgcctgtaatcccagcactttgggaggccgaggcgggtgggttgcctgaggtcaggagttcaaga

SEQ ID NO: 527669 - DNA, 201 bp, Homo sapiens
ttggctgggcacagcacattggctcatgcttgtaatcccagcacattgggaggctgtggtatatggatcacctgaggtcaggagttcaagaccagcctggycaacatggtgaaaccccgtctctactaacaatacaaaaaattagctgggcgtggtggtaggcacctgtaatcccagctacttgggaggctgaggcaggag

SEQ ID NO: 527670 - DNA, 201 bp, Homo sapiens
attatcaatgaataaagccattaaaaaaagataccaagaaaacataagcaataagaactcctgatattagaacagaaaagcaggagtcaagaggatgacgkaggcaatgatttgcagcagcaaaggagaaatacattgtttaaaaatgtatgcattggctgggcacagcacattggctcatgcttgtaatcccagcacatt

SEQ ID NO: 527671 - DNA, 201 bp, Homo sapiens
aaacacactgcgcatgcggcctctcccaagtgctggagggccactatgcatgtggacagcccaccccaagggaagaaacaagagaagtaacccaagacccrggaagtataaaaccccaagtcaaaggtcaaatggacacttgaatctctcaggttgcctgcttggccctcttccaactatatttacttcctttcgttcttg

SEQ ID NO: 527672 - DNA, 201 bp, Homo sapiens
cagaggaaatcgcttgaacccgggaagcggaagttgcagtgagccgagatcgtgccatgccactacactccagcctggtgacagaatgagactccatctcaaaaaaaaaaaaaaaaaaaaatcaatcacgcctttaatcccagcactttgggaggccgaggtgagcagatcacctgaggtcaggagcttgaaaccagcctg

SEQ ID NO: 527673 - DNA, 201 bp, Homo sapiens
gtggtggtgggcacctgtaatcccagctactcaggaggctgaggcaggagaatcacttgaacctgggaggcagaggttgcagtgagccgagatagcaccaytgcactccaacctgggtgaaactccgtctcaaaaaacaaaaaagatactgaaatatttcaaggtaggaatagggtataaatttccttatctactatggta

SEQ ID NO: 527674 - DNA, 201 bp, Homo sapiens
aaaaacagaagcagaaaacacttttgaatgtctatatccagaaaattacagcatttgcaagacaaaacaagataattttcttttaaaaaattttatcaggscaggcgcagtggctcacgcctgtaatctcagcactttgggaggccgaggcaggcagatcacaaggtcaggagatcgagaccatcctggccaacatggtga

SEQ ID NO: 527675 - DNA, 201 bp, Homo sapiens
aaaaaaaaaaaaaaaagaagaatactctagtctgaagaaacccaccaaaaataagcaaatacataaaaacttaagaaattaaaaaataaaaaatcctgccrggcgcggtggctcacacctgtaatcccggcactttgggaggccaaggcaggtggatcacgaggtcaagagattgagactatcctggtcaacatggtgaaa

SEQ ID NO: 527676 - DNA, 201 bp, Homo sapiens
atggaactggagaacattttgctaagggaaataagccagacacaaagacaaatgctgcatgtattcacttatatgtggaatctaaaacaacctcaaagaartagagagtagagtggtggttaaagaaatctggagtggccaggtgtggtggctcacgcctgtaatcccagcacctcaggaagccaaggcgggtggatcacg

SEQ ID NO: 527677 - DNA, 201 bp, Homo sapiens
agctactagggaggctgaggcaggcaggataagcgcttgcatccgggaggtggaggttgcagtgagctgagattgtgccattgcactccagcatgggcaayaagagcgaaactcggtctcaaaaaaaaaaaaaaaaaaaaaaaggaagaaagaaacctggagcgggaagaataaggagatgacggtcaaagaatacaaaac

SEQ ID NO: 527678 - DNA, 201 bp, Homo sapiens
ccaaaaacctagcaccatggctgtaaagcatagcaagatatctggaaatcttgtcagtgttcgattcaaagtctcaaaggcactaaagtcaatgttcaacygaatctaggtaaagctgcaacaaagtccagactcagctccactgcagattaaatggaatcagccctccacatcactggccttacagaggaaagggcatgc

SEQ ID NO: 527679 - DNA, 201 bp, Homo sapiens
tccaactttcttttcttcttactgtttttctttccccagaaaggcctgagtgtggactgatgggcagacaggaggacctcacttgagccactgggcccagstctagaacagcagatctttttcttactcttcttcctatccaccactgctgccctggcaaaatactctccattattaatttttaagtataaataatcccag

SEQ ID NO: 527680 - DNA, 201 bp, Homo sapiens
gcctacaaggccaggctaacaaggccttgaaaggccccaaaagaggaagaggtagttgaggccttcagtggacctcccatgtaaatggtaacagtagggcyccagctttgggagacagatctgaatgtccttactctgtcctttgttagaacacgtcccatttttctggtgtctccatgaggctttgggggtagaggagtc

SEQ ID NO: 527681 - DNA, 201 bp, Homo sapiens
ctttctaaaggaacttccacctttaaaatctgtgatggttgtgttctattataaagtggcaccattggagtctaagggtgcttgtttgcccttacactaartggtcccaagtgtttatgtggttctgacactgccgtccagtgtgagttgtccccgataccattgtcaatatgcctgagaaaaaaagtaatttcctgcctt

SEQ ID NO: 527682 - DNA, 201 bp, Homo sapiens
ctatggcgggctattactttgtggtgagaatgtggagacatggaggtgtcaggagatttggggaattctcactttaatacgggcttctctgtttaccagctttgtgagttgggcaagatatctaacttttctgggcctcagtttccttttgtttaaaagtggataatagaagtaaccaacctgagagagttgttttgacaa

SEQ ID NO: 527683 - DNA, 201 bp, Homo sapiens
cctggccccagaccccactggcctccctcgggagggtgtgatgacattcctttctctatcccggagacctacaacataaagctttccacaaaaagggagamtagggtgggagcacatggccctagcagggcagggctggcctttccctgcaacctgtttacacaaactcagaggaagaccaggctggagggaccctgtgct

SEQ ID NO: 527684 - DNA, 201 bp, Homo sapiens
atcgggagcttctaagaagttggttaacctcgaccaataaactaaatctattacaagagactcaaaaccaagctgagcctccacctgctctgcctccattsctcttgcctggtggtaggagtagttcaaggaaagcaggtgcaagctatgcacctaaagttccctctgatcctgtccttgctgttgtggccaagccctggg

SEQ ID NO: 527685 - DNA, 201 bp, Homo sapiens
aggttgtggtggccgagtctgagctacagaaggaactaaagaaggtgaagacagcccacagcaacgatggggactgcaagacccagtagttggcccctgarccttatacctccaccacagggggtgccgtgagacttcaaggcttggcccttcttgaccacggcagcctcctgtcttctaggagctatcaagggtctctaa

SEQ ID NO: 527686 - DNA, 201 bp, Homo sapiens
tgagtttccagtggcggattcgaaacctcccctatcctaaggatgtctatagtgtctctgtggaccagaaggagcgctgcatcattgtcagaacaaccaayaagaagtgagtagcgtggaaggcaccctgtgtgcttgtgtatgagcggggtgtagggtggggtttgatctggcgttaggatcattattcaggccggtcct

SEQ ID NO: 527687 - DNA, 201 bp, Homo sapiens
gcctccattcctcttgcctggtggtaggagtagttcaaggaaagcaggtgcaagctatgcacctaaagttccctctgatcctgtccttgctgttgtggccmagccctgggattcattttccggtcccactgccccagcctgggggaatggttctgctgggctgcttccctcctggttctgctttttgtgtatatttgcagg

SEQ ID NO: 527688 - DNA, 201 bp, Homo sapiens
ttgccgagtgccccaatggcctctcggtgtccccacaggtactacaagaagttctccattcctgatctagatagacaccagctacctctggatgacgcctygctgagctttgcccacgccaactgcaccctgatcatctctgtaagattcacccagacttcttggacactgcatcagggagagtcttcctctttccctgcc

SEQ ID NO: 527689 - DNA, 201 bp, Homo sapiens
gggtcctaaagaattaataaggtcaggcacagtggctcacgcccgtaattccagcactctgggaggccaaagtgggcggatcatttgagctcaggagttcsagaccagcttgggcaacatggccaaacctcatctctacaaaaaatacggaaattatggccggatgtggtggttcacgcctgtaatcccagcatgttggga

SEQ ID NO: 527690 - DNA, 201 bp, Homo sapiens
acgccaactgcaccctgatcatctctgtaagattcacccagacttcttggacactgcatcagggagagtcttcctctttccctgcccacttcccatcccayaagagtcctcagttctagccccaagccctagggtatgcttgtgggagaataggcatctctaattcagcatgggggagagcagggagggggctcaggaagg

SEQ ID NO: 527691 - DNA, 201 bp, Homo sapiens
ctgcttagcaggggaaagatggcggtgacgggctggttggagagtctgcggacagcccagaagactgcgctgctgcaggacggtaactcgagggtccccasgggctccttcgtttttttccctcagggtccggccctccgggaagggcctcagggcctgggtcggcagagctggaagggtctcggcggtcagccgggccag

SEQ ID NO: 527692 - DNA, 201 bp, Homo sapiens
cccataagagtcctcagttctagccccaagccctagggtatgcttgtgggagaataggcatctctaattcagcatgggggagagcagggagggggctcagraaggagcctgaccatataattcacagctagaagagggtagagggtgaaagggaagcggtggaaattgctgaacttgggttcttctggtccaaggtctgct

SEQ ID NO: 527693 - DNA, 201 bp, Homo sapiens
aaatggctgaagaatatgacgagaagacgagtgaactacttggtaagtgacagaggctcccagtgggcctttagtaatacttggggctgacataagcacartgaacactcctagccttaggcttgaggtaggagcccagatcaaatgtagaggctgggagagacggaagccctcgagacaacaacgttcctgagcataatc

SEQ ID NO: 527694 - DNA, 201 bp, Homo sapiens
gggacagagttcctcccgtcggtgttaataagcatgttagtgtcctgtttttttcctaccctctcagtgctattcattcccaccccccacaatgattgctkcatgtattcatagaggaaaaaactgaaggccccacaacaatgatcggaacatcaaaccagcctgagaagaacacagcatgtccaagggggctgaggctga

SEQ ID NO: 527695 - DNA, 201 bp, Homo sapiens
gccagtggcagcttgaagtaggagacccagcgcccctaggagcagggaacctggggcctgaactcatcaaggaaagcaatgccaatgtacgtccatctgtycaggtgtcttgcacggactgaggtgggggtgggctgtgggctgctggctcttgagggcagggaccatgtcttgttcacctcctcgcctccagtgtgccac

SEQ ID NO: 527696 - DNA, 201 bp, Homo sapiens
aagccaggatttaagcctagttctgtccaattaagagcccatgctttagtcctcaacaacatagtgctgggagttgagaacacttaaatccaactttcttktcttcttactgtttttctttccccagaaaggcctgagtgtggactgatgggcagacaggaggacctcacttgagccactgggcccagctctagaacagca

SEQ ID NO: 527697 - DNA, 201 bp, Homo sapiens
aaatcatatatgtacaggccagcacaacggctggcctgaagcaggtcctcaacagttctttggaaattggaatctgaggagagcttggctgatttgacatyggtgatagtaacactgtgggaggtgttaataggcttcactagaaaaaaggattctgtggttaaataaatttaagaaactctggattaaacaggcttctct

SEQ ID NO: 527698 - DNA, 201 bp, Homo sapiens
tgtgccttacttataccggtgagggcgtttggatttgacacagctgctcaaaaggtctaaagtaaaaccgccggctgcctagtgctgagaacctgactgtwgctctcaactcctacctggaaaaagacacaaacagaaacaactgtaactgagtactgtgcactttttgagttgtttagctccttaaacagctacagaggc

SEQ ID NO: 527699 - DNA, 201 bp, Homo sapiens
aaataatctgcttccatcccgccagtttggtttcattgtactgacaacctcagctggcatcatggaccatgaagaagcaagatgaaaacacacaggagggraaatcctgggattctttttctagggatgtaatacatatatttacaaataaaatgccccgtggaaaaaaaattatattcattgccaattctcttcttaagc

SEQ ID NO: 527700 - DNA, 201 bp, Homo sapiens
ccttatactattcatacctcttttggcgctgcctagttttatgttatagacgttaggttaccttattttatctacaactcaccaaaatattagctcctcaracacaaatcttacatctcatatttttagcctacaaagcaccttccacatactttacacatcacccacgacctcatacacaaactttttcacatgctcagc

SEQ ID NO: 527701 - DNA, 201 bp, Homo sapiens
ttatgactactatgcaagccgagttccagaatctattaaaaatgcacttgttccttaaaggaaagtttcatttggccgggcgcggtggctcatgcctgtartcccagcactttgggaggccgaggcaggtggatcacttgagctcaggagtttgagaccagcctgggcaatatcgtgagaccccatctctacaaaaataca

SEQ ID NO: 527702 - DNA, 201 bp, Homo sapiens
cacctcccaggttcaaacgattctcgtgcctcagcctcccaagtagctaggattacagacatgcaacacaacacccagctaattttttgtatttttagtasagatgggttttgctatgttggccacgctggtctcaaactcctggctgcaagtgatccacctgtctcagcctcccaaagtgctggcattacaggagtgagc

SEQ ID NO: 527703 - DNA, 201 bp, Homo sapiens
ttttaaacacaaaagtaattattgtattccttggacttggggaaaatatctgattttaagacattttggtctatttctaagccagttgtcttaattattgrccatagaagatatggttactgttatacccagcatacaaactgtaagatgggcagagatctagaactttggaataaaatgggtttcgttgttgtttgtttt

SEQ ID NO: 527704 - DNA, 201 bp, Homo sapiens
ttgggtcattctttatagctgtatgaaaatggactaatacaccctccctttttaattacaccctacacacctacatcccttatactattcatacctctttyggcgctgcctagttttatgttatagacgttaggttaccttattttatctacaactcaccaaaatattagctcctcaaacacaaatcttacatctcatatt

SEQ ID NO: 527705 - DNA, 201 bp, Homo sapiens
gtgatctgcccgtctcggcctcccaaagtgctgggattacaggcgtgagccaccgcgcccagcctttctttctttcttttttttttttttttaagacaggktctagctctgtcccccaggctggagtacagtggtgccattatgtctcactgcaaccttgacctcccagggtctggtgattctcccacctcagcctcccga

SEQ ID NO: 527706 - DNA, 201 bp, Homo sapiens
aaaataattttatatcctttagttagttaaaattgttctgtagtcttaaatttcaagtgaattaaaacttaacctttatggacactcattatttcatccaraatttattggctactattggataaggaagcaaaaggcacttaaaaataactagaaaaaccacaatccaattagccactaacttgattgattgattgatgt

SEQ ID NO: 527707 - DNA, 201 bp, Homo sapiens
tttcttttttttttttttttaagacaggttctagctctgtcccccaggctggagtacagtggtgccattatgtctcactgcaaccttgacctcccagggtytggtgattctcccacctcagcctcccgagcagctgggactacaggcatgtgccaccacaccatctaatttttgcatttttttgtagagacgaggttttgc

SEQ ID NO: 527708 - DNA, 201 bp, Homo sapiens
ccattatgtctcactgcaaccttgacctcccagggtctggtgattctcccacctcagcctcccgagcagctgggactacaggcatgtgccaccacaccatytaatttttgcatttttttgtagagacgaggttttgccatgttgcccaggctggtctcgaactcctgagctcaagcaatacaccagccttggcctcccaaa

SEQ ID NO: 527709 - DNA, 201 bp, Homo sapiens
agtaactgagattgtgccattgcactccagcctgggcaagactccatctcaaaaaaaaaaaaaaaaaaaaaaagaaaagaaaatgctaaataaaattaatwttaatcagagaaaaaataattttatatcctttagttagttaaaattgttctgtagtcttaaatttcaagtgaattaaaacttaacctttatggacactca

SEQ ID NO: 527710 - DNA, 201 bp, Homo sapiens
catgcctgtaatcccagcactttgggaggccgaggcaggtggatcacttgagctcaggagtttgagaccagcctgggcaatatcgtgagaccccatctctrcaaaaatacaaattaactgggcatcctgtcatgcgcctgtcatcccagctacttgagaggctgaagcagaagaatctcttgagcccggaaggcagaggtt

SEQ ID NO: 527711 - DNA, 201 bp, Homo sapiens
tttgcatttttttgtagagacgaggttttgccatgttgcccaggctggtctcgaactcctgagctcaagcaatacaccagccttggcctcccaaaaagttytaggattacgggtgtgagccactgcattcagcgacaatttttttttttttttttttttttgagtcggagtctctgtcgcccaggctggactgcagtggcg

SEQ ID NO: 527712 - DNA, 201 bp, Homo sapiens
tcccaaagtgctgggattacaggtgtgagccaccgcacctggcctaaaccagatttctttagggcacaattttttctggaatctcactcttgtttttcacagtaattttaaaaacgtttctactccaattaagaatatatatgatgttattatatatgcttatgaaacagatttatgagaaaagttttttttaaataaatt

SEQ ID NO: 527713 - DNA, 201 bp, Homo sapiens
gcaggagaattgcttgaacccaggaggcagagtttgcagtgagctgagattgcgccactgcactccagcctgggcgacagagcaagactctgtctcaaaawatatatatatataaaaaatataaaatatatataaaatacatatatatcatatatattttatatatatatacactctctctctctctctctctctctctct

SEQ ID NO: 527714 - DNA, 201 bp, Homo sapiens
agcctgggtgacagagtgagactacgtctcagaaaaaaaaaagaaaaaagatgttaaaggggttaaaacatcaaatcaaatattcagtcagaaagtcatgrtagaacaatgactattgctgaatggaggtttataatgttctctatagtcccagggctgagcgtggtggctcaggcatgtaatcccagcactttgggaggc

SEQ ID NO: 527715 - DNA, 201 bp, Homo sapiens
gcgacagagcaagactctgtctcaaaatatatatatatataaaaaatataaaatatatataaaatacatatatatcatatatattttatatatatatacactctctctctctctctctctctctctctctctctctatatatatatatatatatatattgtccttggaacaatcatgtgttcccttattgcgatgaaataa

SEQ ID NO: 527716 - DNA, 201 bp, Homo sapiens
gtgctggggtggtagcccacttggggtaggaaatggcctttaaatctccctattgtgacgtttcaggtgaagtgatccttctcagcagatatactcccaamgaaagatggcagctgaaagccatcttttgacagctgtctcagcaagtggggaaataagctcttcagttctgaagggaatgtgggtggtacatccaggaca

SEQ ID NO: 527717 - DNA, 201 bp, Homo sapiens
cgacagagcaagactctgtctcaaaatatatatatatataaaaaatataaaatatatataaaatacatatatatcatatatattttatatatatatacactctctctctctctctctctctctctctctctctctatatatatatatatatatatattgtccttggaacaatcatgtgttcccttattgcgatgaaataat

SEQ ID NO: 527718 - DNA, 201 bp, Homo sapiens
agtctagagtgtaatccaggaatataaagtgattcggcaggtaaggatgagttggatgatggtggaagaggcacagaggaatctgatgatgatggctgcaraattatggctgctttatttagttggtttacacattgtactaatgagaccatgatagccaattcaattaagtggccatagatcctatggctgtttctggcc

SEQ ID NO: 527719 - DNA, 201 bp, Homo sapiens
aaagagttatatgttattgagaaagtctctggggttaaattgcttgtgtctattaattctttaaatatgattttaatgttgatactgttatatacagacayaagtttgtggtttttatgtaaactttaagttaatactattactttcaaaaggggcatttaattcatataaagcattgtaatgcacggtacctttcatcaa

SEQ ID NO: 527720 - DNA, 201 bp, Homo sapiens
tttcatcaagaaaaaatctaagtgcttaggagttaataattttcaccacttctttctgagattagaaaaattgtattcattttccacagaacaatgaaaarcagcagttaagggaacacaggaatgaagcaaaggtgagaaaaatagctagggttttggctccactagtaggtagaaaagaagcaggcaacttgtggtacc

SEQ ID NO: 527721 - DNA, 201 bp, Homo sapiens
tatgtatttcttcataatactggtataatttaaacctgctaaaagctttaactaaatttaacagaggaactgattaaatgtccttgatagaaacaagcagyttttcttatctgtacctcaatcttttcatgactttcaattattctttctattatcaaaggataattcttatttttacccttacagattattcagctgatt

SEQ ID NO: 527722 - DNA, 201 bp, Homo sapiens
atatataaaaaatataaaatatatataaaatacatatatatcatatatattttatatatatatacactctctctctctctctctctctctctctctctctmtatatatatatatatatatatattgtccttggaacaatcatgtgttcccttattgcgatgaaataatgttgatttgatttagaggtgggaagtttttgtc

SEQ ID NO: 527723 - DNA, 201 bp, Homo sapiens
ttttagaattttgtgtgcttgatttagatattttccttctctctttttaattttagctcgtggtctgggttgatcctctggatggaaccaaggaatatacygaaggttgatatctcttttgtattcatatttgacagtagtgggacaaggatatgatgttagttgtaaatatttgatattttgtatgttgtatggaaagct

SEQ ID NO: 527724 - DNA, 201 bp, Homo sapiens
gcattatatttattgttttaaacacaaaagtaattattgtattccttggacttggggaaaatatctgattttaagacattttggtctatttctaagccagwtgtcttaattattgaccatagaagatatggttactgttatacccagcatacaaactgtaagatgggcagagatctagaactttggaataaaatgggtttc

SEQ ID NO: 527725 - DNA, 201 bp, Homo sapiens
attatgactactatgcaagccgagttccagaatctattaaaaatgcacttgttccttaaaggaaagtttcatttggccgggcgcggtggctcatgcctgtratcccagcactttgggaggccgaggcaggtggatcacttgagctcaggagtttgagaccagcctgggcaatatcgtgagaccccatctctacaaaaatac

SEQ ID NO: 527726 - DNA, 201 bp, Homo sapiens
atataaaaaatataaaatatatataaaatacatatatatcatatatattttatatatatatacactctctctctctctctctctctctctctctctctctmtatatatatatatatatatattgtccttggaacaatcatgtgttcccttattgcgatgaaataatgttgatttgatttagaggtgggaagtttttgtcac

SEQ ID NO: 527727 - DNA, 201 bp, Homo sapiens
atctctacaaaaatacaaattaactgggcatcctgtcatgcgcctgtcatcccagctacttgagaggctgaagcagaagaatctcttgagcccggaaggcrgaggttgcagtgagctgagatcgtgccactgcactccagcctgagtgacaggagttaagccctgtctcagaaaaaaaaaaaacaaaaacccaaaaagtac

SEQ ID NO: 527728 - DNA, 201 bp, Homo sapiens
gaatcgcttgaacccgggaggcagaggttgcagtgagccgagattgcgccattgcactccagcctgggcaacagggcgagactccatctcaaaaaaagaaraaaaaaaaagactccagactttctacgtccaagatctttatttatatgtctgagtcttctgaaccatatctatccccaaggcattgtaaccgagcttcaa

SEQ ID NO: 527729 - DNA, 201 bp, Homo sapiens
tgcactccagcctgggcaacagggcgagactccatctcaaaaaaagaaaaaaaaaaaagactccagactttctacgtccaagatctttatttatatgtctragtcttctgaaccatatctatccccaaggcattgtaaccgagcttcaaatcctagagtaatctattacatgcagtgccatgcaatccttagtgaactcaa

SEQ ID NO: 527730 - DNA, 201 bp, Homo sapiens
attatatacatatataatatatattatatttatatataattataatatatataatgtaatataattatatataattatattatataaaatttattataaawtattatttattataaattatttattatttatatataagtataattattatatataattattatttattattataaattattatttatatataattataat

SEQ ID NO: 527731 - DNA, 201 bp, Homo sapiens
gctctgtggtatggaggaaacaaagaaaatgagacatggtggggctgggcatggtggctcacgcctgtaatctcagcactttaggaggccgaggcaggcgkatcacgaggtcaggagatcgagaccaacctccgcctcccaggttcaagcaattctcctgcctcagcctcctgagtaactgggattacaggcatgtgccac

SEQ ID NO: 527732 - DNA, 201 bp, Homo sapiens
aagcaaaggtgagaaaaatagctagggttttggctccactagtaggtagaaaagaagcaggcaacttgtggtaccccaggtggtcattgtacatcccacawaccagttcattttctccagttctgcttctcttcattacctctctctgtaccacttcccttctggacactctgtttatcctttctcttgcttctcttgctt

SEQ ID NO: 527733 - DNA, 201 bp, Homo sapiens
tgctcagtagctgaggtagggatgccatccttctcaaaagacttattgacagtgccaaagctcggtactggacacaacgagggacctgggtctacgataamgcgcttttgctcctcctgaagtgtctttggtccaacgttgttccaggtttgtcaccgtttctctccggccggtcagggcaagagccaggtagataggatt

SEQ ID NO: 527734 - DNA, 201 bp, Homo sapiens
ccagtccaaacccctcatatgatagatggatgagagagcagattttcagcaagttttactttagttatcgtctctttttttgaactttgatctgcatacarttaatttaatttagcccttatttatagcctttttttttttttgacacagggtcgctattgtctaggctggaatgcagtggtgcaatcatggctcactgca

SEQ ID NO: 527735 - DNA, 201 bp, Homo sapiens
gtagggatgccatccttctcaaaagacttattgacagtgccaaagctcggtactggacacaacgagggacctgggtctacgataacgcgcttttgctcctyctgaagtgtctttggtccaacgttgttccaggtttgtcaccgtttctctccggccggtcagggcaagagccaggtagataggatttatgttaaaaaaata

SEQ ID NO: 527736 - DNA, 201 bp, Homo sapiens
gatcttggctcactgcaacctccacctcccaggttcacgccattctcctgcctcagcctcccaagtagctgggactacaggcacccaccaccatgcccggmtaattttttgtatttttattagagacggggtttcaccgtgttagccaggatggtttagatatcctgacctcgtgatccgcccgcctcggcctcccaaagt

SEQ ID NO: 527737 - DNA, 201 bp, Homo sapiens
atgtttacccctaaagctatatttgtgctcatggttatcatacatcgttgattgttaagacaggagaataaaattcatctccttcaaataccaccccccayatactccaccagccccacacttctaatgtctcccagatgagaataacatattaaaccagtgttaccaaaatgactatactgaacccagctttattggggt

SEQ ID NO: 527738 - DNA, 201 bp, Homo sapiens
ctgggattacaggtgtgagccaccgcacctggtaggttttaggttttaagcttagagttttatttttaaacttaagatctaggccaggcgtggtggcttaygcctgtaatcccagcactttgggaggccgaggtgggcagataattaggtcggaagttcaagaccagcctggccaacatggtgaaacaccttctctcctaa

SEQ ID NO: 527739 - DNA, 201 bp, Homo sapiens
ttctaaaccagatttctctttttttttcctgagacggagtctcgctctgtagcctaggctagaatgtagtggcgtgatctcggctcactgcaagctccgcytcccgggttcatgccattctcctgcctcagcctcccgagtagctgggactgcaggcaccgccaccacgcctggctaattttttgtatttttagtagagaa

SEQ ID NO: 527740 - DNA, 201 bp, Homo sapiens
tgaccttgaacattatcatcaggccaagttccaaaatataaataattttagtattttgacttggaactcatcatttttagatcctaatcctcatatggtcmcaatcgttatatgagaagaaactaatgtttgattcctgttgtttttttccatccttctgaactagccctttggcagttgtaaagacttctcaaggatagg

SEQ ID NO: 527741 - DNA, 201 bp, Homo sapiens
ttatacattctcgactttggggattagtttattcttgtggcatcattataaggcttaattgtggaaagctaagtacttgcttctattccttccaatgagakattataacataaactattaaaattattctgctaatatacctagatttttatttttaggtctctgtccattgcttttaattaaaattatctgttttcaaat

SEQ ID NO: 527742 - DNA, 201 bp, Homo sapiens
ttcttgtactttataacattatcatgttttttgagacggagtcttgccctgtcgcccagactggagtgtagtggcgtgatcttggctcactgcaacctccrcctcccaggttcacgccattctcctgcctcagcctcccaagtagctgggactacaggcacccaccaccatgcccggctaattttttgtatttttattaga

SEQ ID NO: 527743 - DNA, 201 bp, Homo sapiens
cacttgatccctgaagactggggctacagtgagctgtgatcatgccactgcactccagcctgggtgacagagtcaaactctgtctcaaaaaaaaaaaaaaaagaatataggccaggcacagtggctcatgcctgtaatcccagaactttgggaggccaagacaggcagatcacttgaggtcaggagtttgagaccagtctg

SEQ ID NO: 527744 - DNA, 201 bp, Homo sapiens
tcactgcaggcgccgccgacgtgtcttagcggttagtcatccctcttaccgccttcctccacttcctggactgcgcgaccggaggcctagcgggcgcgcgsccgcaccatcgactcgccaacgagagaaggtcctggggcacggacaccgacgggttgcgactgtgacgtgaggtgttctcgcgcgcgctagcgcgcgtct

SEQ ID NO: 527745 - DNA, 201 bp, Homo sapiens
atataaggctgtaaaatgagaattctgccccctcacctcttaccccagtactattctccagaggtaatctattaacaatttcttatgtaattttcagaaaatttgtatgcgtatataagcaaatatgtaatctttattttttaaataaatgggatcatattatatattctaccttgcatcttgcttttttgcttacatagt

SEQ ID NO: 527746 - DNA, 201 bp, Homo sapiens
ctctcagtccagaaatgcagagctttgtgagataccacccacttctgatacaaagtcagatactgcaacaggtaacttttaatgtacctttttgagtgcartagaagctccttcactacattttaatatttaaatattaatattttaaaaatatattgtatgtatttttcttcacatttatttaacttaaaatttaagagt

SEQ ID NO: 527747 - DNA, 201 bp, Homo sapiens
cagtatataaggctgtaaaatgagaattctgccccctcacctcttaccccagtactattctccagaggtaatctattaacaatttcttatgtaattttcaraaaatttgtatgcgtatataagcaaatatgtaatctttattttttaaataaatgggatcatattatatattctaccttgcatcttgcttttttgcttaca

SEQ ID NO: 527748 - DNA, 201 bp, Homo sapiens
atgtgataagtaatagaaattcttttttctctgccctcagtatggagaagccctagtcatgtgtttatgtattccataggtaatgacatataagtattgtrattgggctgctttgtcctttatcttatttcataactgttaggcaggaagaccagttacctactaagtacgttactgtagtgaggacagagggaagctcaa

SEQ ID NO: 527749 - DNA, 201 bp, Homo sapiens
acctgtaattatgcttgccttcaaattacactgactacattattatcttaacagaccattggcaatgatttatagattgatagacatttgaccattaagcrtgccattaataaactcgtctagacttacattttatgaagttttattcttttaactgcagttttcgttgcattcaaaataatatctggggcagattatcaa

SEQ ID NO: 527750 - DNA, 201 bp, Homo sapiens
aggcattataacaaatcttcatgccagtcctatgtgataagtaatagaaattcttttttctctgccctcagtatggagaagccctagtcatgtgtttatgkattccataggtaatgacatataagtattgtgattgggctgctttgtcctttatcttatttcataactgttaggcaggaagaccagttacctactaagtac

SEQ ID NO: 527751 - DNA, 201 bp, Homo sapiens
attagtttttgagatggggtttcattacgttgcattacactaccatgctcagctgattttatattattatttttttttcctgaggcggagtctcactctcrcccaggctggagtacggtgacatgatctcggctcactgcaacttccgcctcccaggttcaagcgattctcctgtctcagcctcccgagtagctgggttta

SEQ ID NO: 527752 - DNA, 201 bp, Homo sapiens
cagtgttgcagcactatgaagataattcctgttttctctagtagagtcatagtatatacattttttgtgttcttttcgtaaattactatgaataaattagmccatgctttttccctctgcaatgatttttttttacactaagaataaagggacttgagctaaaatgtttggcttgaggttgaacaaagttttagttcattt

SEQ ID NO: 527753 - DNA, 201 bp, Homo sapiens
gggccttcaagcgccctgtaaggactttggcttttactttgaggaaaatggggagccattgtgtgatctaagcagagggttgatgtgatctttttttttttagagaaagttgctgtgttaagaatagacttagcaggaagaccaatttggaggcttttactaggcttccaggtgagatgtgatagcttggatcagggtagt

SEQ ID NO: 527754 - DNA, 201 bp, Homo sapiens
cactgactacattattatcttaacagaccattggcaatgatttatagattgatagacatttgaccattaagcgtgccattaataaactcgtctagacttamattttatgaagttttattcttttaactgcagttttcgttgcattcaaaataatatctggggcagattatcaagtttttggatcataaaactttttcttta

SEQ ID NO: 527755 - DNA, 201 bp, Homo sapiens
tgcactgatgactgcttattattgtggtactttgcgcatcataatttagatggcttcttttatgaaatattttgtatcatttaaatagtccagtgtagttkgttttcattgctcttcatgatgtgaactgtgtatgcagtcacacttttcatttagtggaaaattcagttttcaaatttggcagaaagtggtataggtggg

SEQ ID NO: 527756 - DNA, 201 bp, Homo sapiens
agacctgtaattatgcttgccttcaaattacactgactacattattatcttaacagaccattggcaatgatttatagattgatagacatttgaccattaascgtgccattaataaactcgtctagacttacattttatgaagttttattcttttaactgcagttttcgttgcattcaaaataatatctggggcagattatc

SEQ ID NO: 527757 - DNA, 201 bp, Homo sapiens
aaattaaaacaaacttgcgtttgtatttctcagaagaaaattctacagatggtctataaatacatttatacaccattttcagatggtgtatattttcagayacaagcacgataccattatcatactcaagaaattctcaattgatacagtaagattatctaatttgtccgtattcagatttcccagttgctccaataatgg

SEQ ID NO: 527758 - DNA, 201 bp, Homo sapiens
ttttatagagtataaatcaacctgtattttggtctctactgccatggtaagtttagattcttatctattaattaaaatccaatttattttctgcctagatrcatttgctaaaaagtgaaacatcagtagcaaatggcagtcagtcagaaagttcagtgtctactccatctgcgtcatttgaacctaacaacacttgtgaaa

SEQ ID NO: 527759 - DNA, 201 bp, Homo sapiens
acaatctcggctcactgcaacctccacctcccagattcaagcgattctcctgcctcagcctcccgagtagctgggattacaggtgcccaccaccacacccrgctaatttttatatttttagtagaggcaggggtttcaccatgttggtcaagctggtctcgaactcctgacctcaggtgatctgcccgcctcggcctccca

SEQ ID NO: 527760 - DNA, 201 bp, Homo sapiens
tgccgctgacgggcgtgcgcgcttgtgcggagccggaggtgggggccgaaccagccaaggttgcgggggccgcagagccggacgaagacggagggcggagycggcttcgggactgcggagactacacaccgagcgagcgcctgggcccgaagggagcgatgctgtggttccagggcgccattccggccgccatcgcgacgg

SEQ ID NO: 527761 - DNA, 201 bp, Homo sapiens
ctggcctcaaataatccacccgccttggcttcttcaagtgctgagattacaggcttgagccaccacgtctggccaggatatacaatgtttcactaaagtarcagatgtgaaataggaatcttttagcgaatctttagttaaaatgcattattttgtttatttcattatgttttttttttttttccctgagatggagttttg

SEQ ID NO: 527762 - DNA, 201 bp, Homo sapiens
tcaagtgattctcctgccccagcctcccaagtagctgggattacaggcacctgccaccacactgagctgatttttgtatttttagtagagacagggtttcmccatgttggccaggctggtctcaaactcctgacctcaggtgatctgcccgcctcggcctcccaaagtgctgagattacaggtgtgagccaccgcaccctt

SEQ ID NO: 527763 - DNA, 201 bp, Homo sapiens
accacactgagctgatttttgtatttttagtagagacagggtttcaccatgttggccaggctggtctcaaactcctgacctcaggtgatctgcccgcctcrgcctcccaaagtgctgagattacaggtgtgagccaccgcacccttcctaacattggaatatttttggagcccctctgtatattcaggaaactgccatgcc

SEQ ID NO: 527764 - DNA, 201 bp, Homo sapiens
attcagttttcaaatttggcagaaagtggtataggtgggattatattttatttgaggtttccgttttccaggggaaaagagtttgcaatcagcagatcccrgcctggtataagaatttttgaaatgttttacaggtgatgatgaacagtctacacagatggctgcaagttgggaagatgataaagttacagaagcatcttc

SEQ ID NO: 527765 - DNA, 201 bp, Homo sapiens
cttttattttaataaaatcttatgtacaaaagcccaaataggcactgcactgatgactgcttattattgtggtactttgcgcatcataatttagatggctkcttttatgaaatattttgtatcatttaaatagtccagtgtagtttgttttcattgctcttcatgatgtgaactgtgtatgcagtcacacttttcatttag

SEQ ID NO: 527766 - DNA, 201 bp, Homo sapiens
acagtatataaggctgtaaaatgagaattctgccccctcacctcttaccccagtactattctccagaggtaatctattaacaatttcttatgtaattttcagaaaatttgtatgcgtatataagcaaatatgtaatctttattttttaaataaatgggatcatattatatattctaccttgcatcttgcttttttgcttac

SEQ ID NO: 527767 - DNA, 201 bp, Homo sapiens
tctggagattaattagcaatttcttgtttagtaatccgcctcccacacagacttcagtgagagtaacatcgtcagaacccccaaaccctgcatcatctagsaaatcagaaaaaaggtatctgtgtgtgttttccccatttataaaatatgtaagtcatgcccagtatcttttttaagtaaaaagttgagtactttgccttt

SEQ ID NO: 527768 - DNA, 201 bp, Homo sapiens
ataacataaaattacaattgtatatataatatacaatattatacaattatatacaattattatataaaataattatataaaataattttataattataatatattatataaaatataatatatataatatataaaataattgtatactatacaattatacagttattatacaattatatacaattgtataatattgtatat

SEQ ID NO: 527769 - DNA, 201 bp, Homo sapiens
tataacataaaattacaattgtatatataatatacaatattatacaattatatacaattattatataaaataattatataaaataattttataattataatatattatataaaatataatatatataatatataaaataattgtatactatacaattatacagttattatacaattatatacaattgtataatattgtata

SEQ ID NO: 527770 - DNA, 201 bp, Homo sapiens
ttataacataaaattacaattgtatatataatatacaatattatacaattatatacaattattatataaaataattatataaaataattttataattataatatattatataaaatataatatatataatatataaaataattgtatactatacaattatacagttattatacaattatatacaattgtataatattgtat

SEQ ID NO: 527771 - DNA, 201 bp, Homo sapiens
tttcactgagaactactttctagtttgtatattacaatttctcttaaacacagctccaaatattataacataaaattacaattgtatatataatatacaatattatacaattatatacaattattatataaaataattatataaaataattttataattataatatattatataaaatataatatatataatatataaaat

SEQ ID NO: 527772 - DNA, 201 bp, Homo sapiens
aatagtccagtgtagtttgttttcattgctcttcatgatgtgaactgtgtatgcagtcacacttttcatttagtggaaaattcagttttcaaatttggcaraaagtggtataggtgggattatattttatttgaggtttccgttttccaggggaaaagagtttgcaatcagcagatcccagcctggtataagaatttttga

SEQ ID NO: 527773 - DNA, 201 bp, Homo sapiens
atttcactgagaactactttctagtttgtatattacaatttctcttaaacacagctccaaatattataacataaaattacaattgtatatataatatacaatattatacaattatatacaattattatataaaataattatataaaataattttataattataatatattatataaaatataatatatataatatataaaa

SEQ ID NO: 527774 - DNA, 201 bp, Homo sapiens
catttcactgagaactactttctagtttgtatattacaatttctcttaaacacagctccaaatattataacataaaattacaattgtatatataatatacaatattatacaattatatacaattattatataaaataattatataaaataattttataattataatatattatataaaatataatatatataatatataaa

SEQ ID NO: 527775 - DNA, 201 bp, Homo sapiens
ttgaacttctgacttcaggtcatctgctcaccttggcctcccaaagtgctgggattacaggtgtgagccacagcacctcgcctgtgatggttttttgtttktttgtttttgagatgaagtctggctctgttgccaggctggagtgcagtgacatgatctcggctcactgcaacctcctccacccagttcaagtggtcctcg

SEQ ID NO: 527776 - DNA, 201 bp, Homo sapiens
acttgatccctgaagactggggctacagtgagctgtgatcatgccactgcactccagcctgggtgacagagtcaaactctgtctcaaaaaaaaaaaaaaaagaatataggccaggcacagtggctcatgcctgtaatcccagaactttgggaggccaagacaggcagatcacttgaggtcaggagtttgagaccagtctgg

SEQ ID NO: 527777 - DNA, 201 bp, Homo sapiens
acagaagcatcttcaaacagttttgttgctattaaaatcgataccaaaaggtttgtttatgttttaatattttattaattttaaaatttataagtattgtstttgatttatagtgatactcttggactagaagaatgttgatgttgggctgggcactcccagcactttgggagactgaggtgggaggatcgcttgagccca

SEQ ID NO: 527778 - DNA, 201 bp, Homo sapiens
ctcccaaagtgctgagattataggcgtgagccaccgagcccagcccacaacttttattttaataaaatcttatgtacaaaagcccaaataggcactgcacygatgactgcttattattgtggtactttgcgcatcataatttagatggcttcttttatgaaatattttgtatcatttaaatagtccagtgtagtttgtttt

SEQ ID NO: 527779 - DNA, 201 bp, Homo sapiens
agtatataaggctgtaaaatgagaattctgccccctcacctcttaccccagtactattctccagaggtaatctattaacaatttcttatgtaattttcagraaatttgtatgcgtatataagcaaatatgtaatctttattttttaaataaatgggatcatattatatattctaccttgcatcttgcttttttgcttacat

SEQ ID NO: 527780 - DNA, 201 bp, Homo sapiens
agaaggaacagaactgttgtttccgtaaatggtacgtcaggaattggatttttttttttgagatggagtctcgttctgtcgcccaggctggagtgcagtgstgtgatctcagctcaagtgcagcctccgcctcccaggttcaagtgattctcctgccccagcctcccaagtagctgggattacaggcacctgccaccacac

SEQ ID NO: 527781 - DNA, 201 bp, Homo sapiens
actgtaatataggagagctcgttgtatggatttttaaaacttttttcaggctgggtgtggtacctcatacttgtaatcccagctctttgggaagctgaggygcaaggatcacttgaggccagaagtttgagaccagcctgggcaacatagtgaggctccatctctacaaaaaaaacttttagtgagctgtgtgtgatagca

SEQ ID NO: 527782 - DNA, 201 bp, Homo sapiens
tagtgaggacagagggaagctcaaacaaggctgaatcttaaaactcttactgagcaatgggtgggagcatttaatactgaattactgtaatataggagagytcgttgtatggatttttaaaacttttttcaggctgggtgtggtacctcatacttgtaatcccagctctttgggaagctgaggcgcaaggatcacttgagg

SEQ ID NO: 527783 - DNA, 201 bp, Homo sapiens
aaatttgcaagcatattctaaagtagagagaacagaataacgaactcgaggtactcatcatcctgcgtcagtgattcccattatttgctcggtttttgttwtctgtctccctatatgaccacccttccaggttattttgaagcaaatctcaggcatttgtatgatttcatcttttaaaatatcaatatctaaaagataaga

SEQ ID NO: 527784 - DNA, 201 bp, Homo sapiens
actatttggatttgatagcttttcagctgcttaggggctggaagcacaattttatacctttttttgagtttacatgtaatgaacttttaaaattaaggcartgttaattaaagcatcattttggattcatctgagtaatatcttacttttaaaggcactctttaagtttttaaaacttattttacagactgttggcaacac

SEQ ID NO: 527785 - DNA, 201 bp, Homo sapiens
taaactgtacagatcctgtagtgtgtgttccatccagtttctttattggagacagtggaattcccttggaagtaatagcaggaagtgtttctgcagatgarcttgttacaagaattcacaaggtccgacaggtaagaaggaacagaactgttgtttccgtaaatggtacgtcaggaattggatttttttttttgagatgga

SEQ ID NO: 527786 - DNA, 201 bp, Homo sapiens
taccattagattttaagctctgttgaaggcagacaatgtctcatttggtttatatttagtatacagttcaatgcctagaacaaaataaatgcaataaaatrgtgaacatataaaagaatgaatggaaaggatttctcattcttcacagccttctctgagaagggttcgtagtaagaatattctcatatacttatttttctt

SEQ ID NO: 527787 - DNA, 201 bp, Homo sapiens
ctgtgtttctcccagtgttctgcatctgattggcactaccatacatctggttggataaaccataaatatgagagtcatctttgactcttaactcttcagtstcttcttgagctccggattgttcacaacattccaaatcacataggcctttccctacacacgtattccttctgcgtggtgaactcttctggctgttggcat

SEQ ID NO: 527788 - DNA, 201 bp, Homo sapiens
gcaagatggatagaaaaggaagttatgatagaggagaatgtagtagattcttcactagaatatacctcataaattaacatgtcacatgtattaatactacrggtataatgatgcagtacttgaaattatttaataaatgttagattatattgtgaaaatcacaaagatcatttgttttcctttgttaccaatagtgtttcg

SEQ ID NO: 527789 - DNA, 201 bp, Homo sapiens
tggatgaaccttgaaaatacaatttccatgaaaaaagcaagttacaaaggtcacatactgtatgattctattacacaacatgcccaaaatagacaaatccrtagagatagtagattagtggttgccagggtctggaggagggagggatggggagtgactgctgatggggttggagttcctttttggcatgatgaaaatgtt

SEQ ID NO: 527790 - DNA, 201 bp, Homo sapiens; identical to SEQ ID NO: 217443

SEQ ID NO: 527791 - DNA, 201 bp, Homo sapiens
cccaggcctcgggggctctcccggtttgggggaaccgggcgaggcaatgccacaggcccagggttagagggggtgggcacttgcagctgccgatgtggctrgatctggaacttctcagacggctcctgtcagcgccaagtttcaccaaatccaggcctgcgggctcctcccccaggacccccactcgcagtccctcaagcc

SEQ ID NO: 527792 - DNA, 201 bp, Homo sapiens; identical to SEQ ID NO: 217416

SEQ ID NO: 527793 - DNA, 201 bp, Homo sapiens; identical to SEQ ID NO: 217418

SEQ ID NO: 527794 - DNA, 201 bp, Homo sapiens
ccagactccccccagcacagcagagcgcttccctgcccacccgcggaaaccgccccaggtgggccgcgccccctccccagcagccagcagggcgccagggmtgagccggccgtggaggggagcgggtcccgcgggttatacaggcgccggggctccgcggcaggcaagagaagctgaggcctgagaacggcccgggccttg

SEQ ID NO: 527795 - DNA, 201 bp, Homo sapiens; identical to SEQ ID NO: 217441

SEQ ID NO: 527796 - DNA, 201 bp, Homo sapiens
acctataatcctagcactttaggaggccaaggcaggaggttggcttgaggccaggagttcgagaccagcctgggcaacccaattctacaaaaaaaaataawaataataataattagccagacatggtggtgtgcgcctgtaagtcctagctactcaggaagctgaggcatgaggatcaggccaggaggctgaggctgcagt

SEQ ID NO: 527797 - DNA, 201 bp, Homo sapiens
cttgtcactgctgggccaagaagccttcactaggagtgggatccaggctcctctcccacagaaagcggtgacttcacctcatggagcccgggaagctgctygcctcggcagccataggagcgaacactgctgctctctcgctggcccctggtgaggacaggaagcctgaacccgggtgatggctgaacgctgcccagcgtg

SEQ ID NO: 527798 - DNA, 201 bp, Homo sapiens
tgaactgctctgactgccgcccggctttaccggagctttaactgcgcaggcgcaagggcagccaacccggtaaacggaagagctgggtgctgacggcgctrggcgggtcaggggcggagagcgtgctaaccaatgacttgagggagtagggggccgggtttgggccctcagttgctaagggctacccgagtgggaagcggt

SEQ ID NO: 527799 - DNA, 201 bp, Homo sapiens
cgcctgtccctatcaactatgtgttctcattgccatgtattcgacagagaagacaatgatgcggctagggacaaaatcagaacacgaacccagtacttgtsatggccagagtcattcatttttgtagcctgcaggaagagggaacagatgggatgccgccaacctcgactctgagcctggttctgtgtccagaaccatagc

SEQ ID NO: 527800 - DNA, 201 bp, Homo sapiens
gtgacctgtaaagtgtgagtattcccatcttagatgaagagactgtctcaggtgaagagaggtagagtcagctgtttcaggtcccccagcctgttaatggyggagttggtgtttgaactcacacctgcacagttaggcttggaaaggggaaggtccacatctcttgtcagagaagctccctcctaggagaagggcctggga

SEQ ID NO: 527801 - DNA, 201 bp, Homo sapiens
cacacctataatcctagcactttaggaggccaaggcaggaggttggcttgaggccaggagttcgagaccagcctgggcaacccaattctacaaaaaaaaawaataataataataattagccagacatggtggtgtgcgcctgtaagtcctagctactcaggaagctgaggcatgaggatcaggccaggaggctgaggctgc

SEQ ID NO: 527802 - DNA, 201 bp, Homo sapiens
gagattgacccatcctttcttggtccagccacccttgtgagatcatgttggggagaggggagtgctgaggaagtgggtggagaagaaggttggtttccacwgtctgtgggtgtctgagcagagcatgtgacaggtgatccctgcagctctggggagaaggtgagagggatggaggctgcagagccagcctctcaaggccac

SEQ ID NO: 527803 - DNA, 201 bp, Homo sapiens
ctctgactgtatggccttctgtctatccctgctagatggtgaccacagccctggcaaccatgagcagtcctacgtggggaagcggtcaaaccgggtggtgygaaccctccagaacagtaagtggaggatgtggctggcctgggcacctaggtgctgtctgcctgggcttgagggactggctttggtcagcagccaccttcc

SEQ ID NO: 527804 - DNA, 201 bp, Homo sapiens
ccctgagccagggagagggctggcaagcgggcactggtgctccggtccctgctggcgccttcccttccccacgcctcatccagggttcaccaagcactgtrtgttgtccgggtggcagtcaccagatgccagcccagtcccgcccgcagagctctctgggccatcaggccacttgagcaggaacttaaacattggttggca

SEQ ID NO: 527805 - DNA, 201 bp, Homo sapiens
tcaggagaggaagtcgggaagtcaggattgggtgggactgcccctgggcataggccagggtggcctgaggagccagggatggctggaaggagggtgtccaytggtggggggaccacatcagctgccagcttttttctggtcacagtatcctggagcgatacgggaccatctcatcttggggggattcaatggcagagaagg

SEQ ID NO: 527806 - DNA, 201 bp, Homo sapiens
cctcccaggacacccttgactgcgctctcctgtgacgatgccactgcagcccgcaccttgtcactgctgggccaagaagccttcactaggagtgggatccrggctcctctcccacagaaagcggtgacttcacctcatggagcccgggaagctgcttgcctcggcagccataggagcgaacactgctgctctctcgctggc

SEQ ID NO: 527807 - DNA, 201 bp, Homo sapiens
gcctcctgagtgacagaaagggcctgacccggagggagcggcgggagctgcggcgccggaccatcctgctgctctactacctgctgcgctctcctttctaygaccgcttctccgagtaagcacccaggacaccctgagccagggagagggctggcaagcgggcactggtgctccggtccctgctggcgccttcccttcccc

SEQ ID NO: 527808 - DNA, 201 bp, Homo sapiens
taaaactgactccggcagcgtcccagcgtgcggcctctccgtgcctaccggccaggccccacacacagccctggtcgccaccagcgttcctcccaggacayccttgactgcgctctcctgtgacgatgccactgcagcccgcaccttgtcactgctgggccaagaagccttcactaggagtgggatccaggctcctctccc

SEQ ID NO: 527809 - DNA, 201 bp, Homo sapiens
tctctactaaaaatacaaaaattagctgggcatggtagcaggtgcctgtagtcccagctacttgagaggctgaggcaggagaattgcttgaacctgggagrcagaggttgcagtgagccgagattgtgccattgcactccagcctgggcaacaagagtgaaactccgactcagaaaaaagaaaagtggaggtggaatagac

SEQ ID NO: 527810 - DNA, 201 bp, Homo sapiens
ctggcctcacataggcggggtggcagcggcccctgctcctcctgttgctgcccctctggacacccagcccatggctcctccccttccgtgggcctagatcrtgcccctggccctgaccatgtcctccctgcctcccagcctgagcctcctgagtgacagaaagggcctgacccggagggagcggcgggagctgcggcgccg

SEQ ID NO: 527811 - DNA, 201 bp, Homo sapiens
ggcctgggcacctaggtgctgtctgcctgggcttgagggactggctttggtcagcagccaccttcccctgccccagcctgggcctggctcgctcatctgcygcccttgtgttctagcgccgtccctgcactccaggcactggggagctccccagcagcgggagggacggcagcagcagcatcacgaggagctgagtgcgac

SEQ ID NO: 527812 - DNA, 201 bp, Homo sapiens
ataaaactgactccggcagcgtcccagcgtgcggcctctccgtgcctaccggccaggccccacacacagccctggtcgccaccagcgttcctcccaggacmcccttgactgcgctctcctgtgacgatgccactgcagcccgcaccttgtcactgctgggccaagaagccttcactaggagtgggatccaggctcctctcc

SEQ ID NO: 527813 - DNA, 201 bp, Homo sapiens
actaactgtgctgtctaggggatcgagacggcactagagggctggactccttactgcctcagtttccccagcactacctttgttgaggaaacggagatggsgatactggccgaacgcgcgcctgctgagacacagtgcaactgtatttagacgccccgcacctccccaaatctgatcgaggctccttttttcaagcacccg

SEQ ID NO: 527814 - DNA, 201 bp, Homo sapiens
acctggcagaaaatctacttctacagttggggctgacagacctcccggaaggagggtgtggggaggggtggggcagggagcccctcttccctaataaaacygactccggcagcgtcccagcgtgcggcctctccgtgcctaccggccaggccccacacacagccctggtcgccaccagcgttcctcccaggacacccttga

SEQ ID NO: 527815 - DNA, 201 bp, Homo sapiens
tctcgctggcccctggtgaggacaggaagcctgaacccgggtgatggctgaacgctgcccagcgtgtcttctggctggggccctccgtctgccccttctcygcagggccctgtggctctggcagccccaggccatggcgttgccagcctccctgtgacagagcctggtgaacagtgagcctggctcccacgcaagtggcac

SEQ ID NO: 527816 - DNA, 201 bp, Homo sapiens
tgtgctggagacatccttgacgccttggccgtcagtgctcagcctgggcctgtggggtcagaggtcgtggaaaccctggctcttggctggtgttgtggacstgaccaggtgagcctgggcctgcctggggcttcactctccactgggctttctgctataatcctggcctcacataggcggggtggcagcggcccctgctcc

SEQ ID NO: 527817 - DNA, 201 bp, Homo sapiens
ctgggcgggtcaggggcggagagcgtgctaaccaatgacttgagggagtagggggccgggtttgggccctcagttgctaagggctacccgagtgggaagcrgttcaagagatggggtgaagggtggttcaccggttcttcaagtcctcagccttctggcccgcggaagttaagcaaccaagaggcgggcctaagaccggaa

SEQ ID NO: 527818 - DNA, 201 bp, Homo sapiens
ctataatcctagcactttaggaggccaaggcaggaggttggcttgaggccaggagttcgagaccagcctgggcaacccaattctacaaaaaaaaataataataataataattagccagacatggtggtgtgcgcctgtaagtcctagctactcaggaagctgaggcatgaggatcaggccaggaggctgaggctgcagtga

SEQ ID NO: 527819 - DNA, 201 bp, Homo sapiens
gagacagcagtgcggggcttcagttacctgctggcaggtgccaccctgacctttgatcagttccttctgggccctgacctatgaccccagtggcccccttmcctgcggagtcagggtagtgatcgctgtgcttgagaagacccgtccaggttcccaaagggcgtagggaggggatttccgggacccgaagacgaaatgtga

SEQ ID NO: 527820 - DNA, 201 bp, Homo sapiens
ctgggcctggctcgctcatctgctgcccttgtgttctagcgccgtccctgcactccaggcactggggagctccccagcagcgggagggacggcagcagcascatcacgaggagctgagtgcgacccccacccccctggggctgcaggagaccatcgcagagtttttgtacattgcccggccgctgctgcactgtatcctta

SEQ ID NO: 527821 - DNA, 201 bp, Homo sapiens
ctatattactctcaagccacaaatgccttgacccaagggttagtcaggacatttcagttttttgttgttccctctgtagcttccagtggtgtctgtagtgwgagaaacagagtcccagttactgccagatgtgggagctattgtaacctgtaaggtaagttggtcctgacctccatgcttagaatgcccattcaatactga

SEQ ID NO: 527822 - DNA, 201 bp, Homo sapiens
tctctactaaaaatacaaaaattagctgggcgtggtggcacatgcctgtaatcccagctattcgggaagctgaggcaggagaaccgcttgaacctgtgagrcagaggttgtgaactgatatcacgccaccgcactccagcctggttaacggagcaagactccatctcagaaaaaaaaaaaggtagaaaaacaactcaggtg

SEQ ID NO: 527823 - DNA, 201 bp, Homo sapiens
ccacttcgatctgacaggaggcggagctcaggcagtaatgtatgcgattgggaagcagctgtaaatacagatgaagcttgcctgccactcacttccttctmtgcagcccggttcctcacaggccaccagaagttgggggcccttgctatagtgcttctgttcaagccctgaggcaacgaaattccttatcctttcttgcca

SEQ ID NO: 527824 - DNA, 201 bp, Homo sapiens
cccaggaggcggaggttgcggtgagccaagatcgcgccattgcactccagcctgggcaacaagagtgaaactccgtctcaaaaaaaaaaaaaaaaaaaaamccataccacctttgtttcccatagtaactctaccaggtggccagagtggctcttattcctctttacatgtgtcacttacgcagagagaagtaggagttaa

SEQ ID NO: 527825 - DNA, 201 bp, Homo sapiens
gaagccaaagaatcgcttgaacccaggaggcagaggttgcagtgagccaagattgcgccattgcactccagcctgggggacagagcgagactctgtctttaaaaaaaaaaaaaaaaaaaattagctgggcatggtggtgcgtgcctgtactcccagctacttgtggagctgaagcaggaagatcacttgagcctaggaggc

SEQ ID NO: 527826 - DNA, 201 bp, Homo sapiens
taaggtcttccacatcacacaagaagctattgcacatcactcctttattatactgatatggaaaaaggatttagtacagttatgctcagatgaacactggrcccatgtggcagggtcaagcaactagaacatgattcagaaatcagtgaaagatacacttggacaggaccaagaggcatttcactgccatgaaacaaggca

SEQ ID NO: 527827 - DNA, 201 bp, Homo sapiens
tcttccagtttacgctgtagatggaacatgtttctgtgaacctatcagtggatttcattctcttgagtaataaatcttatcttttcaaggcaccaacaaamaaaactgtgatattggaaatagcctatccctcctgacagtccttataaatacatattttttgctatgataaaacttttttactaaaaggatgttatagag

SEQ ID NO: 527828 - DNA, 201 bp, Homo sapiens
atgttggcgtgtgcctgtaatcccagctgctcaggaggctgaagccaaagaatcgcttgaacccaggaggcagaggttgcagtgagccaagattgcgccaytgcactccagcctgggggacagagcgagactctgtctttaaaaaaaaaaaaaaaaaaaattagctgggcatggtggtgcgtgcctgtactcccagctact

SEQ ID NO: 527829 - DNA, 201 bp, Homo sapiens
gctgaggcaggagaatcacttgaacccaggaggtggaggttgcagtgaaccaagatggcacccttgcactccatcctaggcaacaagagtgaaactccatytcaaaaaaaaacaaaaaaagtaaaattgtcaatgattataggcaatatagttgtataccaagaaattctgagagaatcaccaaaaaacttattagaagtt

SEQ ID NO: 527830 - DNA, 201 bp, Homo sapiens
gaaatcgacttcgttttcatcctggttttgggacagcggcaatcatggcgccacctgtgagatactgcatccccggtaagtgagcgcttcccgtacagagycctggataggggctgaagcaagaaggctaaacggcctacagcttctgggggcccgtgaccgatgcagcattttttctgcaggcgaacgtctgtgtaactt

SEQ ID NO: 527831 - DNA, 201 bp, Homo sapiens
tacaagttggtaacaataaacagttaaaaaaaaaaattctgaggcctgcacggtggctcacacctgtaatcccagcactttgggaggccaaaactggctckagaccagcctgggcaacttggcaaaaccccgtctctactaaaaatacagaaattaagcaagcatggtggcacatgcctgtggtcccagctactcaggagg

SEQ ID NO: 527832 - DNA, 201 bp, Homo sapiens
ttgagaaaggacaaacatttcttgccaggcagataatctaacttttgaggccctttccagcctcaggatttgatgtggttctgtagtgcagcagtccccawcctttttggcaccagggaccagtttcttggaagacagtttttccacagaccatggagggggtggttgcagaatgattcaagtgcattacatttatggtgc

SEQ ID NO: 527833 - DNA, 201 bp, Homo sapiens
tatccttttcacatataccttagcaactggaataagattaggatagactaggacaccagaattttgagcaacagttacaattcctatttttcttttgcccrtttttctttcttctttgtgctttgattctcccctagtagtatccaaaaaatacatggatgatctaggacaaaaggaaaatattaacgagagggtttaaaa

SEQ ID NO: 527834 - DNA, 201 bp, Homo sapiens
atcagccaccatgcctggccttgggttttttgttttgtacatgcaatttttgaagagacagggcctcaaaatgtcacccaggatggagtgcagtggtgcartcatagctcactgtagcctcaaactcctgggctcaggtgattccccatcaatcccctgagtagctgggactacaggcatgtaccaccatgcctggctaat

SEQ ID NO: 527835 - DNA, 201 bp, Homo sapiens
tgagagacatttcaagttaaatgctaaagtttcctcagataaggtcttccacatcacacaagaagctattgcacatcactcctttattatactgatatggwaaaaggatttagtacagttatgctcagatgaacactggacccatgtggcagggtcaagcaactagaacatgattcagaaatcagtgaaagatacacttgg

SEQ ID NO: 527836 - DNA, 201 bp, Homo sapiens
actcccagctacttgtggagctgaagcaggaagatcacttgagcctaggaggcagaggttgcagtgagctgagattgcaccactgcactctagcctgggcracagagtgagaccctgtctcaaaaaacaaataaataaataaaaggtaaagcaaaaagaattgagtgaagctgaagtttagcagtgtcaggatgactcaaa

SEQ ID NO: 527837 - DNA, 201 bp, Homo sapiens
ggtgggggaagacttctaactcctcattttccttcaccggtgttatgtgactagatctccttaggtgatgcacagtccaactacctgctaaccaccgccgwgaacgagctgggagtggtggtagcccacagtgagtcaggtgagatggccttgtttccacatccttactttccctggatctatggtttgggataaatccat

SEQ ID NO: 527838 - DNA, 201 bp, Homo sapiens
tgataaaggactttgacagaaattaaaataagacaccctttctgatctttatagtagttctgaacccagggaatggcccccaccatacttatttctcagcyattaaactgaaaagcaagaaaaggtatacaagatagaccaccaacaaactacagcaaggtatatggccagatatctctaccaaagtgggatctagaagcc

SEQ ID NO: 527839 - DNA, 201 bp, Homo sapiens
tgacacgtgtcttactgcggaactgtgcctgggtttggccaatgagaaatcgacttcgttttcatcctggttttgggacagcggcaatcatggcgccaccygtgagatactgcatccccggtaagtgagcgcttcccgtacagagtcctggataggggctgaagcaagaaggctaaacggcctacagcttctgggggcccg

SEQ ID NO: 527840 - DNA, 201 bp, Homo sapiens
actcaagggacatttatttgtaccttctgtaatcggtctatacagaggaacattttaccgttaattcagatgatttacaagggtttaataggtgttttttwtatatatatatatatatatatatatatatttttttttttttttgagatagagtctcacctatcacccaggctagagtgcagtggcgtgatcttggctcac

SEQ ID NO: 527841 - DNA, 201 bp, Homo sapiens
ttcctactctgccttttgttatatagttgttatgtatttctttatatttcttgaatatcataaagttctggaaggcagagacatgcctttgtcaccctttkcccccagcaggacctagcgcagtgccttgtgaacagtaggctctctagacacacttagtagatagataaatgtcactgagtggaaaagaagggttcatat

SEQ ID NO: 527842 - DNA, 201 bp, Homo sapiens
tgcatggggaaacattcagggaaagtttgaacacaggagaggagcgggttgtgattccaagagatccctccagactggtgtccgcaccatgaggccactgrggaaacgtgcttctgctcatggaccctgaacgagggccaatttgtcccatgttctgcattctaaagataaagtcacgtctgtcattctttctagtcctaa

SEQ ID NO: 527843 - DNA, 201 bp, Homo sapiens
ctgtaatcggtctatacagaggaacattttaccgttaattcagatgatttacaagggtttaataggtgttttttatatatatatatatatatatatatatwtatttttttttttttttgagatagagtctcacctatcacccaggctagagtgcagtggcgtgatcttggctcactgcaacctccacctcccaagttcaag

SEQ ID NO: 527844 - DNA, 201 bp, Homo sapiens
taccacataaactgctgctaaaagcaatgtcagtttcaaaagaagaaaataaacctaagaaaatacttaaattatttttaataatttcaataaggaaaccracatttgttttgtctgttttacatagacatttagttctagaatgaaatgtgtaaatgttaaatctcctagggagcacgctgccaatgatgtttcatttgc

SEQ ID NO: 527845 - DNA, 201 bp, Homo sapiens
gtaatcggtctatacagaggaacattttaccgttaattcagatgatttacaagggtttaataggtgttttttatatatatatatatatatatatatatatatttttttttttttttgagatagagtctcacctatcacccaggctagagtgcagtggcgtgatcttggctcactgcaacctccacctcccaagttcaagca

SEQ ID NO: 527846 - DNA, 201 bp, Homo sapiens
cattgaacacataaactgtaataaaataaaaatgtattcattcatcaaatactattagggcccatgtcaaagcaatgatgaatatctctctaattttatasccccaagaagtgggagaatcagatttagagattttatagaaccaggctttaagaaagatcctaatctaatggaattaagttctaacgaggagagagaaca

SEQ ID NO: 527847 - DNA, 201 bp, Homo sapiens
gcaggacctagcgcagtgccttgtgaacagtaggctctctagacacacttagtagatagataaatgtcactgagtggaaaagaagggttcatattgcaagtttttttttttttaatgcaaacttgacatgataaaaatgtacttgattttgggtggaagcaatagctgagtggcagcggctgctgattgcgttccaggggg

SEQ ID NO: 527848 - DNA, 201 bp, Homo sapiens
gaagtgggagaatcagatttagagattttatagaaccaggctttaagaaagatcctaatctaatggaattaagttctaacgaggagagagaacatataaasaagatacttctgggtagcataaagtgctgagaagataacatgctgaattcatggagtggctgggagtggggttgttcctttagatcagggtcaggaaagg

SEQ ID NO: 527849 - DNA, 201 bp, Homo sapiens
ctgcagaatattgtaatttgttgcatactatgtaacaaaacaactgaagatatgtttaataaatatcgtacttattggaagtaatatttaaaaaaatgtamttggttccctatggctaatgttcaaacaagaagtcctgtatgttgggttttttaaaatttaaaaacattacttgtactttgagtgcacattttattctta

SEQ ID NO: 527850 - DNA, 201 bp, Homo sapiens
acaagtacaaaatccccttattccatttctttatttggtgagagttaagaaggatatcttttctagctgtaatggctcatttgtagttctctttgaagacygataatgggcttaccgcctcttctcgcccaggctgctttaatttgtgtagctaataaccccgggcttcttcctctcgtttctctcacttggtttttgatt

SEQ ID NO: 527851 - DNA, 201 bp, Homo sapiens
cacttcagcctcaacctcctgggctcaagtgatcttcccacttcaaccctccagtagttgggactaattagccacgcctggctaattaaaaaaaaaaaaamaatttgtaaagatacggtctcactatgttgcctgagctggtcttgaactcctgggctcaagcaatcttcacacctcagcctcttaaagtgctgggattac

SEQ ID NO: 527852 - DNA, 201 bp, Homo sapiens
ttcagcctcaacctcctgggctcaagtgatcttcccacttcaaccctccagtagttgggactaattagccacgcctggctaattaaaaaaaaaaaaaaaawttgtaaagatacggtctcactatgttgcctgagctggtcttgaactcctgggctcaagcaatcttcacacctcagcctcttaaagtgctgggattacaga

SEQ ID NO: 527853 - DNA, 201 bp, Homo sapiens
tggatggattcacaaaattaagccagtgggcagcagagtaataatccgtcagcttaggtgatataaaaggtcttgattagcccaggataatacatagtacmtgctgaaggccctcttattccacggtatttatttgccattgcaagtatcttcctactacttcattctagaatagacaagcaatgtttaatgtatgagtct

SEQ ID NO: 527854 - DNA, 201 bp, Homo sapiens
tggatagggaggcttctctaggaggcccagcagaacacctttgatttagtgcaaaaggcaaagtcagctgatggtcttggaaggaagtgtaacatgaagagggcattaaaaggactgtcctctctttagaggagggagggaaaaggggggctggggagggagagagcagatggtaaggctttgtgatgtttccgctttccc

SEQ ID NO: 527855 - DNA, 201 bp, Homo sapiens
cacctggtagggacatcagtttcctctctatgttgtctctggtttcttaggacttttgacaatagagcagccctttttggcacattgccatgtggaggacrcccccctgctggggtttgtagactttgtggctggtgtcttcctgtcgccagtacttggggcattttggtttctcctccttatcccacgactgttcactct

SEQ ID NO: 527856 - DNA, 201 bp, Homo sapiens
ttttttttgcagagatgtgaatgagagaaatacagtaaaagggtacgtgacgtactttacgctatactgtgctatatttttatttatttaatagttggaakacttttcagcatttctttcctatattgtatagatttaggaagttcaacattttgggcacgcacacaaaagtgatgaacatggaggagtccaccaatggca

SEQ ID NO: 527857 - DNA, 201 bp, Homo sapiens
tgttggtaataccctaaaactggagggggagtagtttatctaaacgttaatagggaattggcataataaataaattgtaacagataattttttttaagtartggcttttatttttctttccagactgttggtgaaattgcaagagctgaattataatttgaaagtcaaagtcttatttgataagtaagatatctttaacat

SEQ ID NO: 527858 - DNA, 201 bp, Homo sapiens
gaaagcaaaaagtggacccatacttcactctgatcatgagaataaacaaatatatcagcgatctaaaagttaaaaagaaaaaaaggaaaccttgcaagtgytagggaaatgagtgaatgatgtaatgtcaatagggaaaggctttctaatataaggaaaattccagacatgaagaaaagatgatacaattgcacatataaa

SEQ ID NO: 527859 - DNA, 201 bp, Homo sapiens
taccgcctcttctcgcccaggctgctttaatttgtgtagctaataaccccgggcttcttcctctcgtttctctcacttggtttttgatttgcatcagactscctgagcccatgtcctatttggaggaaagctgagggaaatgcataaataatgtctaaaataaacttgtaaagtcaagtatcagttacattgaagatctag

SEQ ID NO: 527860 - DNA, 201 bp, Homo sapiens
gactcaaagtttagaagagaggaaaaattatagccacctggcttagagccccagttgagaatgaaatgatatttgcttttcttttaaaaaatattttaaarttcagtgattaaaaatgaatttatttcactttgtttcttctattgcctttaggaagtagttcacaaaataatagagttgctgaatgtcactgaacttacc

SEQ ID NO: 527861 - DNA, 201 bp, Homo sapiens
agaaacaagaacagctgttactcaagaagatgtatttaatgcttgacaataagagaaaggtagttatttactttccagaatagcatgccacttttgttatrcactgtaaataatggactcaaagtttagaagagaggaaaaattatagccacctggcttagagccccagttgagaatgaaatgatatttgcttttctttta

SEQ ID NO: 527862 - DNA, 201 bp, Homo sapiens
tctattcatcatctggggtataccatggttcataggcagagattatcagtatgatttgggtagaaagtataagagacagcaacttcaactaccacttcctrctcatctacttctctttgaaagctacagctatgctttgtatacattttttatctgaattctgttcagataaaacattttattatttacatttatttttat

SEQ ID NO: 527863 - DNA, 201 bp, Homo sapiens
tggaattgttttcgtgtttctctgggttccatagaagcaatactctgttgcctaaagtctttggaagttgctgatcagtagaaaacatgtttacatctttstttgtagtgtatagagcatgaaatcaagagcctggaagatttacaagatgaatatgacttcaaatgcaaaaccttgcagaacagaggtaagggttcacaa

SEQ ID NO: 527864 - DNA, 201 bp, Homo sapiens
cactgtgtaagaaaggttgacaagcacagtttttgctgtgtgggggatttaactctaaaaaaataacatctttctagaatttaatctctatgagaacaggratcactggttaccactctaacacccgagcctagagcattgcctgacatttacttagtacctagtatgtgcagggtacatctggtgtatgaagcaagtaga

SEQ ID NO: 527865 - DNA, 201 bp, Homo sapiens
ttcagttttctaatctgtgggatgggatatgagggctttctggctggaacttctcacacccatggagtgcctattcccttacttggacaactgctcactcyattggaaaggacccccttcctgagcagaagacttttctttgctctggggtctggagtaaccaagttcccatccaaacaaggtctctagaggtacagtagt

SEQ ID NO: 527866 - DNA, 201 bp, Homo sapiens
ttgcttcaaataatcccatttggggactagaagagtaaggagaatagggatgaaacaaggccatccatgaatgctaattgttgaaactgtgataggtacayggggattcaacagattcaacaagttaaaaacatgcaaaattccgagttagttcagatcatttagagaccacaaaattctatagacatgccgagatgggaa

SEQ ID NO: 527867 - DNA, 201 bp, Homo sapiens
aatttcggttgatggaaagcgtacacaatgtgtttatttctagcaccagagccaatggaacttgatggccctaaaggaactggatatatcaagactgagtygatttctgtgtctgaagtgtaagtgaacacagaagagtgacatgtttacaaacctcaagccagccttgctcctggctggggcctgttgaagatgcttgta

SEQ ID NO: 527868 - DNA, 201 bp, Homo sapiens
gtacatgactgtgtatattctattcatgctaaagtatatgtgtatggaatggtgtgatgtctggtatttgcttcaaataatcccatttggggactagaagwgtaaggagaatagggatgaaacaaggccatccatgaatgctaattgttgaaactgtgataggtacatggggattcaacagattcaacaagttaaaaacat

SEQ ID NO: 527869 - DNA, 201 bp, Homo sapiens
ctttggatcttgaaggtttaccagcttttgagctccctccccattaaaaatgtaggtaatctggggattgttttgagcctctcagaggacacctgagtccrtgaacacctttgcaaagccttcttggggtgtgagggaagtttctgggtgtctggggatgtcagggaaagggaaaaggcacaataggtgcctcctttccaa

SEQ ID NO: 527870 - DNA, 201 bp, Homo sapiens
ctataagaatattcttcctcatagcatggtctgtgccttgtcttccctgccatcatctttggtatatcggttagcttttgcttcctaacaaaccactcccraaacttagtggctaggccaggtgcagtggctcacacctgtaatcccagcactttgggaggccaaggcaggcagatcacatgaagccagagtttgagaccg

SEQ ID NO: 527871 - DNA, 201 bp, Homo sapiens
agccaccatgttatggattgttctggaggagcccattgctatatggatgccagaggacacagtatgcatcctgtgtgcatttcaccaacaaataactaccraagtgaactgtgtgacagtggagagggagggagtttaggtgtggtggaggatgccattctccacacactgcctgagcatttgtcccagtccttgtaatcc

SEQ ID NO: 527872 - DNA, 201 bp, Homo sapiens
agccatccgtccaaccaaagctttagaatcagtttctgtttgctgaaaaatctggtttttatttgtttaggtcctaacgccagccccgatggtctcattcygtggacgaggttttgtaaggtgaggactgtctgggttttatgctctctaagtcctttttgctcttggttgaggttctcatgtttcttgctgtgatagtta

SEQ ID NO: 527873 - DNA, 201 bp, Homo sapiens
ctctttacccccacggtccaccctattaagcacacatttgaaacatcagccaggccgggcgcggtggctcacgcctgtaatctcaacattttgggaggccrgggcaggtggatcacctgagatcaggagtttgagaccagcctggccaacacggtgaaaccccatctctactaaaaatacaaaaattagccagccatggtg

SEQ ID NO: 527874 - DNA, 201 bp, Homo sapiens
aagatgcttgtattttacttttccattgtaattgctatcgccatcacagctgaacttgttgagatccccgtgttactgcctatcagcattttactactttaaaaaaaaaaaaaaagccaaaaaccaaatttgtatttaaggtatataaattttcccaaaactgataccctttgaaaaagtataaataaaatgagcaaaagt

SEQ ID NO: 527875 - DNA, 201 bp, Homo sapiens
catcacaggaactgtaaaatggggggattttttatacctcctttgttgttcctgagcaaattacatcatcatcaccaccaccattaataggtgacattaarcacctacagtataccatgtacttcacaggtagtaactcattcagtcctcacagccaccttctgagttaggtgttattgttattcctactttgacagatgt

SEQ ID NO: 527876 - DNA, 201 bp, Homo sapiens
aacactgtgtggagcagctttatctgcattcaaacctcaaggtagggatgagggactccccagacatttctctggtgcttttctgtccagggtaagccacraggcattgtcatctcagggtagtgcaccgcacatgctcacacctaggcttacccaggcagaagcggcacagattccagtctggctattgcttatcacatc

SEQ ID NO: 527877 - DNA, 201 bp, Homo sapiens
atgtgtgtgaagtccctcttcatcgccgccagtcagctcatacagatagtgcgtttgggacatgaaattgcagatcttatacttaccccaaatgagccccygataggatttaataaaccaccacaaatgtttgtggttgtggttcactctctggaacatattgtggaaatgatggttttgaaaagacaatgccaattcttt

SEQ ID NO: 527878 - DNA, 201 bp, Homo sapiens
gaaagagcttgacagtaaagtcagaaatgtgaaggacaaggttatggtgagtattgagtaaacacatgcatttattctgaaactttctgtaggggaaaaarggtttcaattgcttggggtgtaaacctcgtaactgagttcagtcttttaagtagttgggaagaaaaattttgcagaagtctcaagctataagtaaacaaa

SEQ ID NO: 527879 - DNA, 201 bp, Homo sapiens
cgctttttttaaaaccttagtatatacatgtataagtgaaatgcttccttaagtgtcaactgaacagattttaaaatagtctacgttttttaccgtaggtyttttttctcacattccagccattttcttggtttgtaagttagcatgaaaatggaaatcatgattgaactaaaagcccatccgtccatctcttcgatatcc

SEQ ID NO: 527880 - DNA, 201 bp, Homo sapiens
gcaggaagcctgtagtacatgtcagaagatctggaaggcaagtggggacttgactttggagtgtaaccagcaagtacacaccctgaagaaaacgatggctrtaatcatgcccttcccattacaggctcagtcggggaatattcagagcacagtgatgttagacaaacagaaagagcttgacagtaaagtcagaaatgtgaa

SEQ ID NO: 527881 - DNA, 201 bp, Homo sapiens
tcagctgatggtcttggaaggaagtgtaacatgaagagggcattaaaaggactgtcctctctttagaggagggagggaaaaggggggctggggagggagasagcagatggtaaggctttgtgatgtttccgctttccctaaaaactctcatatcgtggtgcccaggaatctgccatccattcctttctgccattaaactca

SEQ ID NO: 527882 - DNA, 201 bp, Homo sapiens
gaagttgtattagtctgttcttgcatggctataaagaaatacctgagactgggtaatttataagaaaagaggtttaattgacttatggttctgcaggctgtacaggaagcatggtgctggcatctgctcagtttctggggaggcctcaggaaacttacagtcatagcagcaggtgaaggggaagcacacatatcacatggc

SEQ ID NO: 527883 - DNA, 201 bp, Homo sapiens
cttcaagtggtgaaaacagacaataatgaaaataaaatatgtggtaggtcagatggtggtgtaagtactatgaagaaaaataaaccagggaaaagagagarcatgtttccagggtgggaggtggttgcagtttaaataaaagaggccagagaaggctgccctgatatgttgacaataagcaaagacatgaagatgtgtttc

SEQ ID NO: 527884 - DNA, 201 bp, Homo sapiens
ggcaggtggacctggagtcactgggcccagcctggaggactctgctgagggaaaggggagggagaagctgtcccgagcctcagggcatgaaacagttaacraaggtgcatggggaaacattcagggaaagtttgaacacaggagaggagcgggttgtgattccaagagatccctccagactggtgtccgcaccatgaggcc

SEQ ID NO: 527885 - DNA, 201 bp, Homo sapiens
gtggctcatgcctgtaatcccagcactttgggaggccgaggtgggtggatcacctgaggtcaggagttcgagagcagcctggccaacatgatgaaaccccrtccctactaaaaatacaaaaattagccaggcatggtggcgggcgcctgtaatcccagctacttgggaggctgaggcaggagaattgctcgaacccaggtg

SEQ ID NO: 527886 - DNA, 201 bp, Homo sapiens
tcttccaagggtcctctcatcgttactgaagagcttcactcccttagttttgaaacccaattgtgccagcctggtttggtaattgacctcgaggtaagacktttatggtcccgagttggaaaacttcattatttttacttttaattgttacatgtatttttatttctcagtgtttgttctggaggtatttacctaattgtt

SEQ ID NO: 527887 - DNA, 201 bp, Homo sapiens
ctgctgttactttccctgacatcattcgcaattacaaagtcatggctgctgagaatattcctgagaatcccctgaagtatctgtatccaaatattgacaargaccatgcctttggaaagtattactccaggccaaaggaaggtaagtggggcaagcaggtggtaacagcgtggcacagtctttcctgatgagggggtgatt

SEQ ID NO: 527888 - DNA, 201 bp, Homo sapiens
gtgtaagtgaacacagaagagtgacatgtttacaaacctcaagccagccttgctcctggctggggcctgttgaagatgcttgtattttacttttccattgkaattgctatcgccatcacagctgaacttgttgagatccccgtgttactgcctatcagcattttactactttaaaaaaaaaaaaaaagccaaaaaccaaat

SEQ ID NO: 527889 - DNA, 201 bp, Homo sapiens
aatattcagagcacagtgatgttagacaaacagaaagagcttgacagtaaagtcagaaatgtgaaggacaaggttatggtgagtattgagtaaacacatgmatttattctgaaactttctgtaggggaaaaaaggtttcaattgcttggggtgtaaacctcgtaactgagttcagtcttttaagtagttgggaagaaaaat

SEQ ID NO: 527890 - DNA, 201 bp, Homo sapiens
aagatttacaagatgaatatgacttcaaatgcaaaaccttgcagaacagaggtaagggttcacaactgaagtggtgcccgttggctgcaattttttctgtycacactagataacgaagatgattactcctttctatttgccgagtattttatgactctgaattcttccttgataacccaggccagggcttctcaacatcca

SEQ ID NO: 527891 - DNA, 201 bp, Homo sapiens
tatacatagaaagaatgtatattctttttccctataggatgtctcagtggtacgaacttcagcagcttgactcaaaattcctggagcaggttcaccagctytatgatgacagttttcccatggaaatcagacagtacctggcacagtggttagaaaagcaagactggtaaggaaaattcactagacagaagaagaagttta

SEQ ID NO: 527892 - DNA, 201 bp, Homo sapiens
tgggacaaactatgttttggattaagcaagatatttaagagtacaacctgatgctaggaaggctttctttggagctatggtttccatatacatagaaagartgtatattctttttccctataggatgtctcagtggtacgaacttcagcagcttgactcaaaattcctggagcaggttcaccagctttatgatgacagttt

SEQ ID NO: 527893 - DNA, 201 bp, Homo sapiens
agatccttcttctcgttgtttctgcattcccactagaattttaggtgactcaggcagggaggttatagctccttaaagttttaggaggctaagctgtctasaaacacagtagaactttaatccccccgaaaagttgatgttgtattctgatggaatttcggttgatggaaagcgtacacaatgtgtttatttctagcacca

SEQ ID NO: 527894 - DNA, 201 bp, Homo sapiens
ctgtaatggctcatttgtagttctctttgaagaccgataatgggcttaccgcctcttctcgcccaggctgctttaatttgtgtagctaataaccccgggcktcttcctctcgtttctctcacttggtttttgatttgcatcagactccctgagcccatgtcctatttggaggaaagctgagggaaatgcataaataatgtc

SEQ ID NO: 527895 - DNA, 201 bp, Homo sapiens
tgtgacaacagtaaaaacaccacatttgtgctttactattgtcaaacgattttgcacacaaattcattagacactcatggacaactcagtggagtagctgytgtgggcttttgtattcttcgcatcttacgggtgaagaaattgactcacagaagtttgcaggatttagctaagggtgcacagagttactgtcagagttgg

SEQ ID NO: 527896 - DNA, 201 bp, Homo sapiens
aggtgcctgagggtattcagagccgccctcagggccccagcctgctccctcgtcagctcagggattgacagctcagagattgacgtccacttgagggcagktggacctggagtcactgggcccagcctggaggactctgctgagggaaaggggagggagaagctgtcccgagcctcagggcatgaaacagttaacgaaggt

SEQ ID NO: 527897 - DNA, 201 bp, Homo sapiens
aaaggtcattcagtgatacttgccagacctagtatgggtagatggaagcagggagtgaatgaaaggctgcaaatccataggtgtagatttattttttattyatcattcacttacactcttatgctcttatactcttataattttgttaaagcttatttcaaattttaaatacgcatatgtgattatatatattttttttgc

SEQ ID NO: 527898 - DNA, 201 bp, Homo sapiens
aaaagcattgaacttctggttgagattggaaaggaaggggaactaatagatctgtgagtgagcccatgatttctagtctacatctaggacgctcacggatwcattatttggccagaacatgacaaagtaatcactggatatagaagtgcaaggtctttcaaaattttaacctcagacttaaaacttaaacttgccactttc

SEQ ID NO: 527899 - DNA, 201 bp, Homo sapiens
cacacctgtaatcccagcactttgggaggccaaggcaggcagatcacatgaagccagagtttgagaccggcctggccaacatggcgaaaccccgtctctaygaaaaatacaaaaaattagccaggtgtggtggtgtgcaccggtaatcacagctacttgggaggccgaggcacgagaatcgcttgaacctgggaggcagag

SEQ ID NO: 527900 - DNA, 201 bp, Homo sapiens
tgaattataatttgaaagtcaaagtcttatttgataagtaagatatctttaacattatataacatacatgtactattgaaatgttgattttgttactcaakcacagattcctccactaaataagcagatttctagctgtggaagggtctatactgggtggaagtttgcctccctagggccccagggctgaacccagagtcc

SEQ ID NO: 527901 - DNA, 201 bp, Homo sapiens
tttgccctgagaccctagacctggactggcactaacttggccactctcattaaggaacaagatggctccccccccacccctcccatatttaatgtttttgytagcttgtgtcacatactgttttggcaagtttcaaaaatgatttatgatcattcagatcattttcctctggctttttgctttttcccactcctataagaa

SEQ ID NO: 527902 - DNA, 201 bp, Homo sapiens
tttaagtaatggcttttatttttctttccagactgttggtgaaattgcaagagctgaattataatttgaaagtcaaagtcttatttgataagtaagatatstttaacattatataacatacatgtactattgaaatgttgattttgttactcaagcacagattcctccactaaataagcagatttctagctgtggaagggt

SEQ ID NO: 527903 - DNA, 201 bp, Homo sapiens
cctggagcaacagctggtggtgctgagaagtccagtgttaaaattcagagcactctggtcaagcagtcaggtggaggttcctgctaaaatttgcctccatycttttctcacagtaataaatttgcaatctgaacccaagtgaagaaacaaaattgcctgaattgtactgtatgtagctgcactacaacagattcttaccat

SEQ ID NO: 527904 - DNA, 201 bp, Homo sapiens
cataacctgagccttatgaaccccagaagctgtatgaatgtggatttataacatgtacatttttctgatggatggatttatagctttcatcagtttctcaragcagtccgtgatataaatatctgtggaccaccacagtaaatggcctagtgtctgtcctcccaggattttgtccatgtctacacaaatatatatttcata

SEQ ID NO: 527905 - DNA, 201 bp, Homo sapiens
atggccctaaaggaactggatatatcaagactgagttgatttctgtgtctgaagtgtaagtgaacacagaagagtgacatgtttacaaacctcaagccagscttgctcctggctggggcctgttgaagatgcttgtattttacttttccattgtaattgctatcgccatcacagctgaacttgttgagatccccgtgttac

SEQ ID NO: 527906 - DNA, 201 bp, Homo sapiens
tgataattcaattacagacaaaagataaagtgtgtaagtatgcactagtgctttcatcactcagatgttgacattgctcttttctttttccccattttagkcacccttctagacttcagaccacagacaacctgctccccatgtctcctgaggagtttgacgaggtgtctcggatagtgggctctgtagaattcgacagta

SEQ ID NO: 527907 - DNA, 201 bp, Homo sapiens
cagtgggcagcagagtaataatccgtcagcttaggtgatataaaaggtcttgattagcccaggataatacatagtacatgctgaaggccctcttattccayggtatttatttgccattgcaagtatcttcctactacttcattctagaatagacaagcaatgtttaatgtatgagtctgcatttcacaagatcagtgtaat

SEQ ID NO: 527908 - DNA, 201 bp, Homo sapiens
tgactgggagatggccatgccactccctgagttggtaacaggttttgtgagtagatgagactgactccagatttgtgaacatgagcttatttattcattgttttttttttttagagacagagtctctctctgtctcccaggctggagtacagtggcgcgatctcagctcactgcaacctccgcctcctgggttcaagcaat

SEQ ID NO: 527909 - DNA, 201 bp, Homo sapiens
ctcatgtttatggaaggcagttttcttcattcagcaaatacaattgagcacacacttattggtatttagagaagtaatagagactaactccatttatgttwtctacagcatcagtaaatatagcataagtaaaataagataccaatttattttataaacacagaaggaatttttagggttaaatgtatcacctcttaggta

SEQ ID NO: 527910 - DNA, 201 bp, Homo sapiens
catgaatgtacctgtataaagagccattattgctattggtagtgttttgcaaactagctttgacaatggcaacagaaaaccctagatgaatatctttggtytagttcaaagcttagaccaacagatgcattcattgaggaatgtcatgtatagtttttatatcatttgcattgtctcgggatcctaaccaaagataattgg

SEQ ID NO: 527911 - DNA, 201 bp, Homo sapiens
ctggcttagagccccagttgagaatgaaatgatatttgcttttcttttaaaaaatattttaaaattcagtgattaaaaatgaatttatttcactttgtttyttctattgcctttaggaagtagttcacaaaataatagagttgctgaatgtcactgaacttacccagaatgccctgattaatgatgaactagtggagtgga

SEQ ID NO: 527912 - DNA, 201 bp, Homo sapiens
gagaggaaaaattatagccacctggcttagagccccagttgagaatgaaatgatatttgcttttcttttaaaaaatattttaaaattcagtgattaaaaakgaatttatttcactttgtttcttctattgcctttaggaagtagttcacaaaataatagagttgctgaatgtcactgaacttacccagaatgccctgatta

SEQ ID NO: 527913 - DNA, 201 bp, Homo sapiens
tgcacatataaaaacacccccgtagaatctgtgctgtatagggcactgtgtaagaaaggttgacaagcacagtttttgctgtgtgggggatttaactctaraaaaataacatctttctagaatttaatctctatgagaacagggatcactggttaccactctaacacccgagcctagagcattgcctgacatttacttagt

SEQ ID NO: 527914 - DNA, 201 bp, Homo sapiens
ttagaagagaggaaaaattatagccacctggcttagagccccagttgagaatgaaatgatatttgcttttcttttaaaaaatattttaaaattcagtgatwaaaaatgaatttatttcactttgtttcttctattgcctttaggaagtagttcacaaaataatagagttgctgaatgtcactgaacttacccagaatgccc

SEQ ID NO: 527915 - DNA, 201 bp, Homo sapiens
tacatttatttaggtaattacctgacagtgtcttaagtggcagatactactatgtctgatttacatgggtcactgaaaacaagttttttttgttttttttytgttttttttgtttttttttggagacggagtctcgctctgtcgcccaggctagagtgcagtggcgagatctcggctcactccaagctccgcctcccgggt

SEQ ID NO: 527916 - DNA, 201 bp, Homo sapiens
taactcaagggacatttatttgtaccttctgtaatcggtctatacagaggaacattttaccgttaattcagatgatttacaagggtttaataggtgttttwtatatatatatatatatatatatatatatatttttttttttttttgagatagagtctcacctatcacccaggctagagtgcagtggcgtgatcttggctc

SEQ ID NO: 527917 - DNA, 201 bp, Homo sapiens
gcccatccgtccatctcttcgatatccaggtgcatcatgggcttcatcagcaaggagcgagagcgtgccctgttgaaggaccagcagccggggaccttccygctgcggttcagtgagagctcccgggaaggggccatcacattcacatgggtggagcggtcccagaacggaggcggtgagtgggagtttgagcacatagtc

SEQ ID NO: 527918 - DNA, 201 bp, Homo sapiens
tgaccacagagaaagtagtagactacacaacagccaaggaatttgctgattcccttggaattctgtttttggaaactagtgctaggaatgcaacaaggccyggcacggtggctcatgcctgtaatcccagcactttgggaggccgaggtgggtggatcacctgaggtcaggagttcgagagcagcctggccaacatgatga

SEQ ID NO: 527919 - DNA, 201 bp, Homo sapiens
ctatattatcatgcaaatgctgtattcttctttggtggagataaagatttcttgagttttgttttaaaattaaagctaaagtatctgtattgcattaaatrtaatatgcacacagtgctttccgtggcactgcatacaatctgaggcctcctctctcagtttttatatagatggcgagaacctaagtttcagttgatttta

SEQ ID NO: 527920 - DNA, 201 bp, Homo sapiens
tttattcaaattacttctgattggcgactctggggttggaaagtcttgcctccttcttaggtttgcagatgataacatatacagaaagctacatcagcacmattggtatggatttcaaaataagaactatagagttagacgggaaaacaatcaagcttcaaatatggaacacagcagaacaggaaaggtttcgaacagtca

SEQ ID NO: 527921 - DNA, 201 bp, Homo sapiens
tatggtgagtaccacggctggcctgtgtgtagctctcaataagtgtgtgtgctcagaggcagggagcgcaccatggcagatcccgggcctgtctgcgggakggagccctggcggagccaaggagagtgcagtgctcagatgagccatgacaagttggagctgctggatttaaaccacctacatcatcagtgggatttttat

SEQ ID NO: 527922 - DNA, 201 bp, Homo sapiens
gacagtatggtgagtaccacggctggcctgtgtgtagctctcaataagtgtgtgtgctcagaggcagggagcgcaccatggcagatcccgggcctgtctgygggagggagccctggcggagccaaggagagtgcagtgctcagatgagccatgacaagttggagctgctggatttaaaccacctacatcatcagtgggatt

SEQ ID NO: 527923 - DNA, 201 bp, Homo sapiens
tgggaaagtagttcttttcaatctagaaaaggccaaagtaatgattgagatacactgtctccacttgctttgattttgttgtttcattttataaaaggtaraaaaaattttggaaatgtcattgtcagttatttggcctgcagcactgtcttggggtgaatggatgtagccttcatgtaaaaacactgtgtggagcagctt

SEQ ID NO: 527924 - DNA, 201 bp, Homo sapiens
gttcttatgaggttcactcaaatccatcaactctgcagtgttttatttctctgtcctctttcattttgggatgttctatgggatttacttagcttttctcytttttagaacctgacttccatgcggttgaaccctacacgaagaaagaactttctgctgttactttccctgacatcattcgcaattacaaagtcatggctg

SEQ ID NO: 527925 - DNA, 201 bp, Homo sapiens
gagttccattctggttcctcatcacctgctgatccaagtgaatgcccagctgggcattcacggccccccttctgcagcctggacctagctgaacactccaygcttcacgtccacacacgcccctttctaggcaaacttgacctcttgctgattcctataggggccatgccgcatacttgcttttctgtggctctcctgagg

SEQ ID NO: 527926 - DNA, 201 bp, Homo sapiens
catgtggaactatgtgtcaattaaacctctttcctttataaattctccagtctcgagtatgtctttattagcagcatgagaatggactaatataccatgaktccctttaatccaggctgcttctggactgtttctcatagagacatctgtgtcttgtgtcttcccaggttcactatagttgcggagagtctgcagcaagtt

SEQ ID NO: 527927 - DNA, 201 bp, Homo sapiens
tcacctagaagccctgcctccacccatctctcctcacataggcctcagtggtgtgtagaagtttttgatgtaggctgtaatcattcagtgcatgttagttktactcctcaaataacaaagcttctactgctggcacaagcctcgttccctttgtttttccctagagggcagagcatggcatcctaggtgacattttgtgtt

SEQ ID NO: 527928 - DNA, 201 bp, Homo sapiens
tcctctttgccctgcaccagtcacagatcacctagaagccctgcctccacccatctctcctcacataggcctcagtggtgtgtagaagtttttgatgtagrctgtaatcattcagtgcatgttagttgtactcctcaaataacaaagcttctactgctggcacaagcctcgttccctttgtttttccctagagggcagagc

SEQ ID NO: 527929 - DNA, 201 bp, Homo sapiens
tttttattcatcattcacttacactcttatgctcttatactcttataattttgttaaagcttatttcaaattttaaatacgcatatgtgattatatatatwttttttgcagagatgtgaatgagagaaatacagtaaaagggtacgtgacgtactttacgctatactgtgctatatttttatttatttaatagttggaaga

SEQ ID NO: 527930 - DNA, 201 bp, Homo sapiens
caaattttaaatacgcatatgtgattatatatattttttttgcagagatgtgaatgagagaaatacagtaaaagggtacgtgacgtactttacgctatackgtgctatatttttatttatttaatagttggaagacttttcagcatttctttcctatattgtatagatttaggaagttcaacattttgggcacgcacacaa

SEQ ID NO: 527931 - DNA, 201 bp, Homo sapiens
gaaaggggagggagaagctgtcccgagcctcagggcatgaaacagttaacgaaggtgcatggggaaacattcagggaaagtttgaacacaggagaggagckggttgtgattccaagagatccctccagactggtgtccgcaccatgaggccactgaggaaacgtgcttctgctcatggaccctgaacgagggccaatttgt

SEQ ID NO: 527932 - DNA, 201 bp, Homo sapiens
aactcaagggacatttatttgtaccttctgtaatcggtctatacagaggaacattttaccgttaattcagatgatttacaagggtttaataggtgtttttwatatatatatatatatatatatatatatatttttttttttttttgagatagagtctcacctatcacccaggctagagtgcagtggcgtgatcttggctca

SEQ ID NO: 527933 - DNA, 201 bp, Homo sapiens
tgaaccacggggacctctggggctccgaggacgatgctgatacggtagatgactatggagctgactccaactctgaggatgaggaggaaggtgaagcggtragattcatctttttgggcattcatagaaggatccttgctatttagtttctttcccagattcttgagactgtttcttagtggcaaggataagcctgactag

SEQ ID NO: 527934 - DNA, 201 bp, Homo sapiens
acaaagacccaagcttcctccagcttccaggatagcagtcagccagctggaaaagccgaagggatcagggagccaaaggtgactgggaagctaaagcaacratcacctaaattacagtcctccaagaaagttgctttcctcaggcagaatgcccctcccaagggcacagacacacaaacaccggctgtgttatccccatcc

SEQ ID NO: 527935 - DNA, 201 bp, Homo sapiens; identical to SEQ ID NO: 322977

SEQ ID NO: 527936 - DNA, 201 bp, Homo sapiens
aacccttagggatctctgcaggagctgtccagacagctggtaagaagggaccccagtccctatttaatgctcctcgaggcaagaagcgcccagcacctggyagtgatgaggaagaggaggaggaagactctgaagaagatggtatggtgaaccacggggacctctggggctccgaggacgatgctgatacggtagatgact

SEQ ID NO: 527937 - DNA, 201 bp, Homo sapiens
caccggctgtgttatccccatccaagactcaggccaccctgaaacctaaggaccatcatcagccccttggaagggccaagggggttgagaagcagcagttsccagagcagccttttgagaaagctgccttccagaaacagaatgatacccccaaggggcctcagcctcccactgtgtctcccatccgttccagccgccccc

SEQ ID NO: 527938 - DNA, 201 bp, Homo sapiens; identical to SEQ ID NO: 322979

SEQ ID NO: 527939 - DNA, 201 bp, Homo sapiens
accggctgtgttatccccatccaagactcaggccaccctgaaacctaaggaccatcatcagccccttggaagggccaagggggttgagaagcagcagttgscagagcagccttttgagaaagctgccttccagaaacagaatgatacccccaaggggcctcagcctcccactgtgtctcccatccgttccagccgcccccc

SEQ ID NO: 527940 - DNA, 201 bp, Homo sapiens
cttgagactgtttcttagtggcaaggataagcctgactagaggaaaggggtttttgtgctccatcactgtttccctactgccttatatcctcccagtgcactacaagtttgaaagagctgtaggatagagcatttaaaaaaatctagaaggctgtcttggtgtaggtatgggaaggtggacaatggtgtgctccactgatg

SEQ ID NO: 527941 - DNA, 201 bp, Homo sapiens
gtacatgcccgttgtcccagctactcaggaggctgaggcacgagagaatcgcttgaatctgggaggtggaggttgctgtgagccgagattgcgccacctcrctctagcctgggcaacagagtgagactccatctcaaaaaaaaaaaaaaaaaatcttcatcccttttcaggctctaatcaatcgtggggttaacctggatc

SEQ ID NO: 527942 - DNA, 201 bp, Homo sapiens
agaaaccttttggcccaaggataggcagtgatttttttttttttttttttttttttgagacggtgtcttgctttgtcgctcaggctggactgcagtggtgsaatctcagctcattgcaacctccaccttccaggttcaagcgattcttgtgcctcagactcccaagtagctaggattacaggtgtgtaccaccatccctgg

SEQ ID NO: 527943 - DNA, 201 bp, Homo sapiens
acccgacgcttctaccctcatacccacaatatggatgggttcttcattgccaagttcaagaaattttccaattctatccctcagtcccagacaggtaagtratctttttcttcccttcgtcaccacctttgctctttccacctttcaggaggctttatggtgtgacaagaggaagggaaaggaaagattcatgcatccctt

SEQ ID NO: 527944 - DNA, 201 bp, Homo sapiens
aaggataggcagtgatttttttttttttttttttttttttgagacggtgtcttgctttgtcgctcaggctggactgcagtggtgcaatctcagctcattgsaacctccaccttccaggttcaagcgattcttgtgcctcagactcccaagtagctaggattacaggtgtgtaccaccatccctggctaatttttgtatttt

SEQ ID NO: 527945 - DNA, 201 bp, Homo sapiens
tccaagggttcaggggccccaggttaaagacccctgttgtaaagtcagttgttgggttatatgtgttgtatatttcctggtgtgaagaaaacctaataatrtaatgtggtataaccaatgtcattaaatttttagtatagtggaggggctcagcctcttagaaaatcagatgccacttctaggaaataaagtaacaggagg

SEQ ID NO: 527946 - DNA, 201 bp, Homo sapiens
ctcatggacctcttccctctgtctgaggtactggattgccagaatgcctcttttgcttttcttttctcgcctccttacgctgtgtaaggaagatgttcggyccccttgctcccctcttctgactgagctccttagccagcctcacttattccctgctgtcttgccccgcagctggtggagttcttagaagctaatgaggtg

SEQ ID NO: 527947 - DNA, 201 bp, Homo sapiens
ctccggaccaataccttgaaaacccgacgccgagaccttgcacaggtgaggggtggcctttgaggctcactcatctcagaagggaagtgacttctgccaaytccagagattcctctgtgctaccctgactgggtggggccttaggacctaagcatgatcctgggggggcaaacccagaggcctgatgtctctggcaggata

SEQ ID NO: 527948 - DNA, 201 bp, Homo sapiens
gctgaagcgggaagatgactggagcttgggaggttgaggctgcagtgagctgtgatcttaccactgcactccagcttgggtgacagagtgagactgtctcaaaaaaaaaaaaaaaaaataactgcttccttttgacatagtaattccctattaaggaagatgatccaaaatgtcagcaaatagttctttactgaggtgcag

SEQ ID NO: 527949 - DNA, 201 bp, Homo sapiens
tatggtgaaccacggggacctctggggctccgaggacgatgctgatacggtagatgactatggagctgactccaactctgaggatgaggaggaaggtgaascggtgagattcatctttttgggcattcatagaaggatccttgctatttagtttctttcccagattcttgagactgtttcttagtggcaaggataagcctg

SEQ ID NO: 527950 - DNA, 201 bp, Homo sapiens
ttgggaggctgaggcaggaggattgcttgagcccaggaattggagaccagcttgggcaacatagggagatcccgtatctacaaaaaattaaaaaattggcytggcacagtggctcatgcctataatcctagcactttgggaggccaaggtgggcggatcacctgagctccggagttcgagaccagcctggacaatatggcg

SEQ ID NO: 527951 - DNA, 201 bp, Homo sapiens
agcggctcaagagtgttgtgggcaacttgcatcggctgggagtcaccaacaccattatcagccactatgatgggcgccagttccccaaggtgagactcgarctgtgtgtcttctgaggcttcttccggttgaccttctcccttcctgacctcaatgtttagactcgaccctagtaaatattgccctgctggttgcagaaga

SEQ ID NO: 527952 - DNA, 201 bp, Homo sapiens
aagctgctgtcacttaaaagaagtaatttagtatgtaggaccacataggtgtttggtaaaaatgggaaaaccacatcggtagacttgccgatcaccagggsctagtgcagagtggatcagcctatacagtaggcaggcttgttgggagcgaagttgccttgaggtgatgacacttctcatgtggattcctggacaggaggg

SEQ ID NO: 527953 - DNA, 201 bp, Homo sapiens
gagcggctcaagagtgttgtgggcaacttgcatcggctgggagtcaccaacaccattatcagccactatgatgggcgccagttccccaaggtgagactcgrgctgtgtgtcttctgaggcttcttccggttgaccttctcccttcctgacctcaatgtttagactcgaccctagtaaatattgccctgctggttgcagaag

SEQ ID NO: 527954 - DNA, 201 bp, Homo sapiens
ggattacaggtgtgtaccaccatccctggctaatttttgtatttttagtagagatggtttcaccatgtgggctaggctggtcttgaactcctggcctcaarcaatccacttgccttggcctcccaaagtgctggaattacaggtgtgagccaccacgcctggcctataggcagtgatcttttaatacaaggttcaactagg

SEQ ID NO: 527955 - DNA, 201 bp, Homo sapiens
ctgctgggtgagttttggaagctattgggatggagcataggaagccactggggtggggaagctgtgaggaaggaggaggtatctgttttggtctgtgaatyactctgttcctggacctgtttctaggatccagtggagtgaagaggagaccgaggacgaggaggaagagaaagaagtgacccctgagtcaggccccccaaa

SEQ ID NO: 527956 - DNA, 201 bp, Homo sapiens
ggtttttgtgctccatcactgtttccctactgccttatatcctcccagtgcactacaagtttgaaagagctgtaggatagagcatttaaaaaaatctagamggctgtcttggtgtaggtatgggaaggtggacaatggtgtgctccactgatgggcacagaaatgcactttttataaagcagttatctcagaactttgaaa

SEQ ID NO: 527957 - DNA, 201 bp, Homo sapiens
acctgggtttcaggtgggagggcgttcggtcgggcctccagggggatagcgggggtgcttgagtcgcgggtgctgagtcgggagtgctgagtgagttgcgkgtgctgagttgaggctgtgccctttcccactataatacgccaagcgtgcgttctgccgttccctccgacacgcgcgacgccaccttctcccatttctgcc

SEQ ID NO: 527958 - DNA, 201 bp, Homo sapiens
tcaatattttaaactcatttccaagggttcaggggccccaggttaaagacccctgttgtaaagtcagttgttgggttatatgtgttgtatatttcctggtstgaagaaaacctaataatgtaatgtggtataaccaatgtcattaaatttttagtatagtggaggggctcagcctcttagaaaatcagatgccacttctag

SEQ ID NO: 527959 - DNA, 201 bp, Homo sapiens
tcccagacaggtaagtaatctttttcttcccttcgtcaccacctttgctctttccacctttcaggaggctttatggtgtgacaagaggaagggaaaggaargattcatgcatcccttactccagcctttgcatgcttggctgagagaaccctctcattccagctagaattgcttttgagtgctggaccccatgtgaacagg

SEQ ID NO: 527960 - DNA, 201 bp, Homo sapiens
ggaatttaggtaatctgctcttaggcactgacctaattgtgtggagctcctgcccaggaaatggcaattctcatattttaatatgagaatattaaaatatrgtgataaggcccattttctgacaccatctgtttaattttaaccccaggaaattctgaaacagccacacctacaaatgtagacttgcctcaggtcatcccc

SEQ ID NO: 527961 - DNA, 201 bp, Homo sapiens; identical to SEQ ID NO: 323008

SEQ ID NO: 527962 - DNA, 201 bp, Homo sapiens
catgatgactgtgtttggagtaagcactataggagttgtggggtatgggccatgtttttatgaagcatgtgtttaatgtcttcatctgtcttctgggtagrgtagcctatgaggttattaaaatcttcatccctaccgggcgcggtgactcaacgcctgtaatcccagcactttgggaggccgaggcgggcagatcacctg

SEQ ID NO: 527963 - DNA, 201 bp, Homo sapiens
gaatttaggtaatctgctcttaggcactgacctaattgtgtggagctcctgcccaggaaatggcaattctcatattttaatatgagaatattaaaatatgrtgataaggcccattttctgacaccatctgtttaattttaaccccaggaaattctgaaacagccacacctacaaatgtagacttgcctcaggtcatcccca

SEQ ID NO: 527964 - DNA, 201 bp, Homo sapiens
aagctattgggatggagcataggaagccactggggtggggaagctgtgaggaaggaggaggtatctgttttggtctgtgaatcactctgttcctggacctrtttctaggatccagtggagtgaagaggagaccgaggacgaggaggaagagaaagaagtgacccctgagtcaggccccccaaaggtggaagaggcagatgg

SEQ ID NO: 527965 - DNA, 201 bp, Homo sapiens
aagctcatggacctcttccctctgtctgaggtactggattgccagaatgcctcttttgcttttcttttctcgcctccttacgctgtgtaaggaagatgttsggcccccttgctcccctcttctgactgagctccttagccagcctcacttattccctgctgtcttgccccgcagctggtggagttcttagaagctaatgag

SEQ ID NO: 527966 - DNA, 201 bp, Homo sapiens
tgagcggctcaagagtgttgtgggcaacttgcatcggctgggagtcaccaacaccattatcagccactatgatgggcgccagttccccaaggtgagactcragctgtgtgtcttctgaggcttcttccggttgaccttctcccttcctgacctcaatgtttagactcgaccctagtaaatattgccctgctggttgcagaa

SEQ ID NO: 527967 - DNA, 201 bp, Homo sapiens; identical to SEQ ID NO: 323024

SEQ ID NO: 527968 - DNA, 201 bp, Homo sapiens
agttacacaaagccacctcccacaccatgcttcacgttttgcaggctccacctggtacctcccttcctgcagttctgccttccctatgtcaccctcaagcsgaggccctttggggcctgaactgagaaggcagcagcttggttgggatccgcccccctcaccacccctcccctcaagctgctgtgccctgcccagtgtatt

SEQ ID NO: 527969 - DNA, 201 bp, Homo sapiens
aactgggtatggctgctggaatgagggaggttacacagaaaatgctagaaaaagaaggggctttaacacatataaactagtgtttctcaaagtttcctctsaaagaggaaaaaaaatcaccttcaatgtttcaaaatttatctagtttgaaagcactaactaaaaatattaaaagacttctttgattgttataggtatgat

SEQ ID NO: 527970 - DNA, 201 bp, Homo sapiens
gggtgcccaagaaactgggtatggctgctggaatgagggaggttacacagaaaatgctagaaaaagaaggggctttaacacatataaactagtgtttctcmaagtttcctctgaaagaggaaaaaaaatcaccttcaatgtttcaaaatttatctagtttgaaagcactaactaaaaatattaaaagacttctttgattgt

SEQ ID NO: 527971 - DNA, 201 bp, Homo sapiens
acacggtgaaaccccgtctctacgaaaaatacaaaaaattaaccaagcgtggtggtgggcgtctgtagtcccagctacttgggaggctgaggcaggagaawggcgtgaacccgggaggcggagcttgcagtgagccgagatcgcgccactgcactccagcctgggcgacagagcaagactccgtctcaagaaaaaaagtaa

SEQ ID NO: 527972 - DNA, 201 bp, Homo sapiens
actcactgccttcgttgccgttctaagctaggggcgcagcccgaccgtcggactacatcccccaagtggacccttgagaaaacctggcagtcggccttgtvtgccgcgcacggctctccgggttttgtagtctcgtgtaggagtgatggggacgactccccactgttctcggccggggttggagttggggggtggggaccg

SEQ ID NO: 527973 - DNA, 201 bp, Homo sapiens
gagattttcagtgtgccctagttctttgctaaccaacttccagcatatttggttaccttcaaattgggctcatggtagaaagagcttagttgacctccccrgtgagaaatgctctatttgttcatgaacttgcagtacacactgttcctaggaagtggtacagagcaatctatgggaccaagaactaccttagacagtgca

SEQ ID NO: 527974 - DNA, 201 bp, Homo sapiens
aatctatgggaccaagaactaccttagacagtgcactatttttcatatcacagcagagaaatgttcaaggccactgagacttttattcctggaagaggatrtctgttgttgctcaaagccttggatctgagggaagacccttattgtctccaatttcctcctccaccttctccatcactctttacaaaggcactggaaaac

SEQ ID NO: 527975 - DNA, 201 bp, Homo sapiens
ccaagcgtggtggtgggcgtctgtagtcccagctacttgggaggctgaggcaggagaaaggcgtgaacccgggaggcggagcttgcagtgagccgagatcrcgccactgcactccagcctgggcgacagagcaagactccgtctcaagaaaaaaagtaatgcttccttcctctccaagaacaatagtttagaacgggctgt

SEQ ID NO: 527976 - DNA, 201 bp, Homo sapiens
ccctacccaggatttcagcacccaggtgtatgtaaccaggtcctatgtaggaaagctgttgacagtcatggccgtataccttcctcctccctgaccgcctrgggggcacagcactttaacccctggcctttttttgttttgttttgttttgttttttgagacggagtcttgttctgttgccaggctggagtgcagtggcgc

SEQ ID NO: 527977 - DNA, 201 bp, Homo sapiens
gataagctggagaagatcttccagaatgccccgacggaccctacccaggatttcagcacccaggtgtatgtaaccaggtcctatgtaggaaagctgttgasagtcatggccgtataccttcctcctccctgaccgcctggggggcacagcactttaacccctggcctttttttgttttgttttgttttgttttttgagacg

SEQ ID NO: 527978 - DNA, 201 bp, Homo sapiens
ccacgcccagctaaattttttttgtatttttagtagagacggggtttcatcatgttggccaggatggtctcgatctcctgacctcgtggtctgcccacctyggcctcccaaagtgctgggattacaggcgtgagccaccgtgcacggccaccactggcctattaggagcattcgggtgactgtcttctggacgtgttgtct

SEQ ID NO: 527979 - DNA, 201 bp, Homo sapiens
  misc_feature (1)...(201): n = A,T,C or G
gatggggcaagtgaggtgctggctcggaggagggacattgacctgttgtcattgctctactctccctcttcttccctatccttccaggtgttgaaggcggntttgaccttagcgaggagaagtttgaattagacgaggatgtgaagattgtcattttgccagattacctggagattgcccgggatggactggggggactgc

SEQ ID NO: 527980 - DNA, 201 bp, Homo sapiens
gcaccacccccagagcaaggacaaggagcccacttttctgggggatctggtgggagagagggtagggagcaggacaggaagggaagcttggaaatgaacamgacatggggatggccagaggagaagagagagagaccttggattggcggggggcctgcagagccctctctctctgccactccctcaaatccccgacccaca

SEQ ID NO: 527981 - DNA, 201 bp, Homo sapiens
agatcaagaccatcctggctaacacggtgaaaccccgtctctacgaaaaatacaaaaaattaaccaagcgtggtggtgggcgtctgtagtcccagctactwgggaggctgaggcaggagaaaggcgtgaacccgggaggcggagcttgcagtgagccgagatcgcgccactgcactccagcctgggcgacagagcaagact

SEQ ID NO: 527982 - DNA, 201 bp, Homo sapiens
ccccagaacttgttaaaaatgtaatgcttctgtttggccgggcgcggtggctcacgcctgtaatcccagcactttgggagggtgaggtgggcggatcacgmggtcagcagatcaagaccatcctggctaacacggtgaaaccccgtctctacgaaaaatacaaaaaattaaccaagcgtggtggtgggcgtctgtagtccc

SEQ ID NO: 527983 - DNA, 201 bp, Homo sapiens
aggtgggcggatcacgcggtcagcagatcaagaccatcctggctaacacggtgaaaccccgtctctacgaaaaatacaaaaaattaaccaagcgtggtggygggcgtctgtagtcccagctacttgggaggctgaggcaggagaaaggcgtgaacccgggaggcggagcttgcagtgagccgagatcgcgccactgcactc

SEQ ID NO: 527984 - DNA, 201 bp, Homo sapiens
tttatggtagatctaggaccagcatcctggcctcccaactcccaggcttagtattatttgtcttatactgggacccctaagatgggtgccgtgcttttagyagctcctctttacagagcagttctgacatagggggcaggggattgaggttcccgaatcactttccaggtaggcctccgggagctgctgaggtgacccttt

SEQ ID NO: 527985 - DNA, 201 bp, Homo sapiens
gggcgatggggagcgggtgccagaacagaaggtgcgtctaggaccctgtccctttcaggccctgggattgtggggaagctgaggtctgggagatgtctaargaaggcccctggatggccactgagccccagctgagtccctgccctgactcttcccaggaagttcaagatggcattgcccctcggatgttcaaggccctca

SEQ ID NO: 527986 - DNA, 201 bp, Homo sapiens
aaccggcagcaggatgcccaggagttcttccttcaccttatcaacatggtggaggtaagggctggcaagatggcacacccccatcttcctgcaatttactmgctctccttcctgcccatttctccctctatcagccccaacccagtcccatccctgaaccccaacagtctgtgtccctgtgaacagtgcttgcacctgagg

SEQ ID NO: 527987 - DNA, 201 bp, Homo sapiens
ccttcaccttatcaacatggtggaggtaagggctggcaagatggcacacccccatcttcctgcaatttactcgctctccttcctgcccatttctccctctrtcagccccaacccagtcccatccctgaaccccaacagtctgtgtccctgtgaacagtgcttgcacctgaggaggacagtgaaggtgatgatccctaccct

SEQ ID NO: 527988 - DNA, 201 bp, Homo sapiens; identical to SEQ ID NO: 323026

SEQ ID NO: 527989 - DNA, 201 bp, Homo sapiens
ggccacacagtgttagagaacagaacatttcttctggaacccagcagtttctgactccaggttttggtttcctcacctgaccaggcttcataacatcctcrtgttttcacccttacctcttgtcccacaggagtctgaggggggcctctacatctgtatgaacacgtttctgggctttgggaaacagtatgtggagagaca

SEQ ID NO: 527990 - DNA, 201 bp, Homo sapiens
aaaaatgtaatgcttctgtttggccgggcgcggtggctcacgcctgtaatcccagcactttgggagggtgaggtgggcggatcacgcggtcagcagatcargaccatcctggctaacacggtgaaaccccgtctctacgaaaaatacaaaaaattaaccaagcgtggtggtgggcgtctgtagtcccagctacttgggagg

SEQ ID NO: 527991 - DNA, 201 bp, Homo sapiens
actgctgggttttttgccccagaacttgttaaaaatgtaatgcttctgtttggccgggcgcggtggctcacgcctgtaatcccagcactttgggagggtgmggtgggcggatcacgcggtcagcagatcaagaccatcctggctaacacggtgaaaccccgtctctacgaaaaatacaaaaaattaaccaagcgtggtggt

SEQ ID NO: 527992 - DNA, 201 bp, Homo sapiens
tgttgccaggctggagtgcagtggcgcgatctcggctcactacaacctctgcctcctgggttcaagtgattctcctgcctcagtctcctgagtagctaggrctacaggcacatgccaccacgcccagctaaattttttttgtatttttagtagagacggggtttcatcatgttggccaggatggtctcgatctcctgacct

SEQ ID NO: 527993 - DNA, 201 bp, Homo sapiens
ttctgttgccaggctggagtgcagtggcgcgatctcggctcactacaacctctgcctcctgggttcaagtgattctcctgcctcagtctcctgagtagctrggactacaggcacatgccaccacgcccagctaaattttttttgtatttttagtagagacggggtttcatcatgttggccaggatggtctcgatctcctga

SEQ ID NO: 527994 - DNA, 201 bp, Homo sapiens
tttttttgttttgttttgttttgttttttgagacggagtcttgttctgttgccaggctggagtgcagtggcgcgatctcggctcactacaacctctgcctsctgggttcaagtgattctcctgcctcagtctcctgagtagctaggactacaggcacatgccaccacgcccagctaaattttttttgtatttttagtagag

SEQ ID NO: 527995 - DNA, 201 bp, Homo sapiens
gaggggcagcgatagactctggggatggagcaggacggggacgggaggggccggccacctgtctgtaaggagactttgttgcttcccctgcccccggaatycacagtgctctgcttctctgtgtcgccccgcccagccccctggtgtggagggaggggtctcgtttgtgcgcgtgggtgtagctttgtgcatcctctccca

SEQ ID NO: 527996 - DNA, 201 bp, Homo sapiens
gacatggagacaggctctggcccagtacctgcctcacattccctgaaactcctgtcctgagtctgagctgttgtctggatctttgggccatcactcaagcmttcctcttctgtttccttctctgaccccctctctcctttcctagagtatcagctctttgccttcattagtcacatgggcacctctaccatgtgtggtcac

SEQ ID NO: 527997 - DNA, 201 bp, Homo sapiens
taaggtgccaatccatgggagaaaaatgcatggaatgggtgattggaagagggctgggtcctgggggagggaggaggagcaaacagtggcccaatcagtckgtccgtgtacccacaattcccattacagcgcccatgctggatgaatcagtcatcatccagctggtggagatgggattccctatggacgcctgccgcaaag

SEQ ID NO: 527998 - DNA, 201 bp, Homo sapiens
ttccgctggggcctgcaaggcttgggctaccgcctccctgcgatgcaccatgggacttgtagtctcccacgctccactctgccgttgcctttcattaactrcggctgtcgtgtgactaccgtccccggaagccgccgcgctcacctctccggctccccgcttcgtggagcactgtgggcattgtagtcactcactgccttc

SEQ ID NO: 527999 - DNA, 201 bp, Homo sapiens
tcctaatgaagtgttccgcttcttggtggaggaaaagatcaagtgcctggccacagagaaggtgaagtacacccagcgagttgactacatcatgcagctgyctgtgcccatggatgcagcccttaacaaaggtaggctgctccatcagcaaggccgtggcacggtgggaggctaaggtctaggaggaatgcttgggcacct

SEQ ID NO: 528000 - DNA, 201 bp, Homo sapiens; identical to SEQ ID NO: 323050

SEQ ID NO: 528001 - DNA, 201 bp, Homo sapiens
tctggcccttgccagaaaaagtttaccaaccccctgcctccctggaatgggtggagggtggttgtaaaggtactggaggatctgaagacataatagggtcygtgacccttgtgaggttgtgaagctcccttaaggcacatggtggctgggctgtggatttggggtatgggcagagagtgtggagagcacttccaggggcca

SEQ ID NO: 528002 - DNA, 201 bp, Homo sapiens
cctccccggtgagaaatgctctatttgttcatgaacttgcagtacacactgttcctaggaagtggtacagagcaatctatgggaccaagaactaccttagmcagtgcactatttttcatatcacagcagagaaatgttcaaggccactgagacttttattcctggaagaggatgtctgttgttgctcaaagccttggatct

SEQ ID NO: 528003 - DNA, 201 bp, Homo sapiens
ccacgctccactctgccgttgcctttcattaactgcggctgtcgtgtgactaccgtccccggaagccgccgcgctcacctctccggctccccgcttcgtgragcactgtgggcattgtagtcactcactgccttcgttgccgttctaagctaggggcgcagcccgaccgtcggactacatcccccaagtggacccttgaga

SEQ ID NO: 528004 - DNA, 201 bp, Homo sapiens
ttccgtatgcgcgattcctgtgcgcgaagttcgggtccgtagtgggctaagggggagggtttcaaagggagcgcacttccgctgccctttctttcgccagycttacgggcccgaaccctcgtgtgaagggtgcagtacctaagccggagcggggtagaggcgggccggcacccccttctgacctccagtgccgccggcctc

SEQ ID NO: 528005 - DNA, 201 bp, Homo sapiens
tgaattgcaggggtcggaattgaggtctttgcttaatgcaagcatctgtcttatttcctgccctgtagatcgccacatcacagaatcgtatctatctcacrgctgacaaccttgtgctgaacctacaggatgaaagtttcaccaggtgagagatgtggccacactgtggggtatcaccaagaacgtgggacctgagtctgg

SEQ ID NO: 528006 - DNA, 201 bp, Homo sapiens
tgtaaggccagatcaatagcattggtggccttgccttcatttctggtgctgcccctagttcctggcagcagcctgcagggaggcccacaggtggggtccamggtagggctgggcacaagccacctgagcgcaaccttggatctgacagcccagaggaggactggagcaagggagtgtggtaaggacagggccagggattga

SEQ ID NO: 528007 - DNA, 201 bp, Homo sapiens
gattacggtacagcacgaaagcgcccacgttagaggttgcacagagtacagagggggaaagagtagtcagctctgctggtgacggggtttgcagttcaagkcttcacagtgggtgagggtgcatttcagctgtgctgcgtcttgtcttccttgtcagcctgattaactctcctccccccagggtagtgccaggctgtacac

SEQ ID NO: 528008 - DNA, 201 bp, Homo sapiens
acggtgagtgtgtcagcccagcgtctctgatggggctgccttgagaaagtgctttcagttaaggcacattgaggtgagggaattcgaaccttgcttgttcsggtttctactcagattggcttctctggccggcgcggtggctcacgcatgtaatccccgcactttgggaggccaaggtgggtggatcacctgaggtcagga

SEQ ID NO: 528009 - DNA, 201 bp, Homo sapiens
cactctgttctggagaagtttgtccctaagcttgactagttcacctgttctctccttctagaccatacataaaagccgtgcctttgagttccccagacctyttcctcctccccacccacgcacacatatacaccctgggtcaggtagctcacctgtaacctgtaatgtacttctttgtgctatacctagtgcaggtcgctt

SEQ ID NO: 528010 - DNA, 201 bp, Homo sapiens
ccctcttggattaaggaagactgaagactagccccttttctggggaattactttcctcctccctgtgttaactggggctgttggggacagtgcgtgatttytcagtgatttcctacagtgttgttccctccctcaaggctgggaggagataaacaccaacccaggaattctcaataaatttttattacttaacctgaagtc

SEQ ID NO: 528011 - DNA, 201 bp, Homo sapiens
tgagctgagatcatgccactgcactccagcctgagcaacagagcaagactccgtctcaaaaataaataaataaaaaattggcttctccgatactcctcctrtcaagaatgattcctctgggttccctgaccttttgttctaatcatagctgctgctcagcgctctggatccctaagtgcgagcagaaaccatgtgttactc

SEQ ID NO: 528012 - DNA, 201 bp, Homo sapiens
ccagcacagccctaccccgccccagtatcatgcgatggtcccccacaccggttccctgaacccctcttggattaaggaagactgaagactagccccttttytggggaattactttcctcctccctgtgttaactggggctgttggggacagtgcgtgatttctcagtgatttcctacagtgttgttccctccctcaaggct

SEQ ID NO: 528013 - DNA, 201 bp, Homo sapiens
ggccccggggcatgggcacggccctgaagctgttgctgggggccggcgccgtggcctacggtgtgcgcgaatctgtgttcaccggtgagcaacctccgccygctcgccggacgcttccagtccctcccccaaaccccttgccctgtccccgcgcccctccacgggcctagcatttcctctgagcagcggcctggcctgatc

SEQ ID NO: 528014 - DNA, 201 bp, Homo sapiens
atcgtatctatctcacagctgacaaccttgtgctgaacctacaggatgaaagtttcaccaggtgagagatgtggccacactgtggggtatcaccaagaacrtgggacctgagtctggttgtttgggctctggagcctgctacagctattcatatggctcagagacattgaaccaaaattagaaaagggggtggttgacagt

SEQ ID NO: 528015 - DNA, 201 bp, Homo sapiens
tttgaggagccagccaggggtccagcacagccctaccccgccccagtatcatgcgatggtcccccacaccggttccctgaacccctcttggattaaggaaractgaagactagccccttttctggggaattactttcctcctccctgtgttaactggggctgttggggacagtgcgtgatttctcagtgatttcctacagt

SEQ ID NO: 528016 - DNA, 201 bp, Homo sapiens
cagcagggggcgcaaaagaatctggctggggcggctaaggggaagcaaggcctgggctccgaaacaggacccaagctgggaaggctggccctgagttctcsaggcccagctgtgctcttcacacaccctccatttctcccacatcacccatttttttaaggctggacagccatggctttgctgagccagattaaaaatctg

SEQ ID NO: 528017 - DNA, 201 bp, Homo sapiens
atctgatgaccccaacaggagctgcttccttggcagcagggttccttgtggctgtggggagcctgcctgtgcctgttgaggcacttctgtgcccagaagcycagtggatcgcgtggcctgctgtaggccccccagactccatttctcagtcaccaggcgtgaggagctgctagctaacaggcctcccctggggaggtgggc

SEQ ID NO: 528018 - DNA, 201 bp, Homo sapiens
ggctgaggcaggagaatggcgtgaacccaggaggcggggcttgcagtgagccgagattgcgccactgcactccagcctgggcaacagagctagactctgtytcaaaaaaaaaaaaagaaagaatcacagtcagaaagagggagtggggggaaagattagcgctttctcttggagcaggtgaaaagacggctggagaagttc

SEQ ID NO: 528019 - DNA, 201 bp, Homo sapiens
gagacagagcaagactccatctcaaaaaaaaaaaaaaaaaaaaaaaaccaaagaaaaacacggtgaaaccccgtctctactaaaaatacaaaaaaaaaaaattagctgcgtgtggtggcaggcacctgtagtcccagctactcgggaggctgaggcaggagaatggcgtgaacccaggaggcggggcttgcagtgagccga

SEQ ID NO: 528020 - DNA, 201 bp, Homo sapiens
ccagaaggcagagtttgcagtgagctgagatcacgccactgcaatccagcctgggagacagagcaagactccatctcaaaaaaaaaaaaaaaaaaaaaaaaccaaagaaaaacacggtgaaaccccgtctctactaaaaatacaaaaaaaaaaaattagctgcgtgtggtggcaggcacctgtagtcccagctactcggga

SEQ ID NO: 528021 - DNA, 201 bp, Homo sapiens
ttgaacccagaaggcagagtttgcagtgagctgagatcacgccactgcaatccagcctgggagacagagcaagactccatctcaaaaaaaaaaaaaaaaaraaaaaaccaaagaaaaacacggtgaaaccccgtctctactaaaaatacaaaaaaaaaaaattagctgcgtgtggtggcaggcacctgtagtcccagctac

SEQ ID NO: 528022 - DNA, 201 bp, Homo sapiens
ctggagctggccttcctcagtatctaccctgctttgcgaatggtaggatgatttagaggctccccaaattcaggctctaatgctgagcatttggagtggcyctttgagctcttgaaaccctcctccccagggaacagcatccacatggtgacaggtctggaccccgagaagttgatcagcctgcacacagtggagcttcgg

SEQ ID NO: 528023 - DNA, 201 bp, Homo sapiens
tatgttgcccaggctgggtcctaccttctaccctccatttaggtgtgatcacagaaaatgtctctccctgtgaggaaaatttgccctctcctccccagctrcaagacagggttgtggcctagctttgctgcaccaaaagaacacatgaatgtattacagagtagaatatggcacttagggattccttgaagggcagaagca

SEQ ID NO: 528024 - DNA, 201 bp, Homo sapiens
tgtaagacaggcaatgggctggctcatgcttatgtcaagctggaggttaaagagaggtgcgttttggggggaccagatgaggactgtgagactgtagggcycctatctcctttcccactgtcattcctgggtgttctggttgagagtttgactcttctcatgcctagtggaaagggaaggacagaatttacttttcaggag

SEQ ID NO: 528025 - DNA, 201 bp, Homo sapiens
agacatgtcagctgcttcattcactcttcaaaggcttaggtggatatgtccatcaggaccttggactacctaccacaccacttgcctcagggctccagagrtattaagtctggagctggccttcctcagtatctaccctgctttgcgaatggtaggatgatttagaggctccccaaattcaggctctaatgctgagcattt

SEQ ID NO: 528026 - DNA, 201 bp, Homo sapiens
aagctgctgcagaaggaggtgggagaggaaagcatcagacaagcaggacccttaaagagaggagggttaggagtcagggagaggaaaagggacccaaggggcctgggaccagctgagaaagacttaggaggccagaagagtaagtgaaaagaattggggtggcaggcagaggagttggtggggggtggggcagccatacct

SEQ ID NO: 528027 - DNA, 201 bp, Homo sapiens
catcttcctgttaatgatctagacaggcatgatggacccttcctgagtggctattaaatggggatgttttgagagtaagtcgggtgtgtgtgtggaggggktgagggtgtctcaatgattggcaggtgcctctggggccagagatgctaagcatccaacaatgtatggcagagtccagtacaaagttcctgtagccctcct

SEQ ID NO: 528028 - DNA, 201 bp, Homo sapiens; identical to SEQ ID NO: 323059

SEQ ID NO: 528029 - DNA, 201 bp, Homo sapiens; identical to SEQ ID NO: 323060

SEQ ID NO: 528030 - DNA, 201 bp, Homo sapiens
ccatcttcctgttaatgatctagacaggcatgatggacccttcctgagtggctattaaatggggatgttttgagagtaagtcgggtgtgtgtgtggaggggttgagggtgtctcaatgattggcaggtgcctctggggccagagatgctaagcatccaacaatgtatggcagagtccagtacaaagttcctgtagccctcc

SEQ ID NO: 528031 - DNA, 201 bp, Homo sapiens
tgaatctcaaaggtgggtctttaggatgggctacacaagattctttccttcctagcctgaggccaacagaagtgggcagtatggtccttggctagggcacrtggcagtctgcattcattcattcattcagatacgcaatatgattcattatgacagttctacatgctaaccatataggatccaataagacaaggaacgtcc

SEQ ID NO: 528032 - DNA, 201 bp, Homo sapiens; identical to SEQ ID NO: 323063

SEQ ID NO: 528033 - DNA, 201 bp, Homo sapiens
gggttactgctgacctttctctgggatggcagcttctcctgaacttctttactttctatactgatctctactcacccccactcctttcttccactcctccytctctacctcttggatttcctcttttgctttatctcattctgacttctctttcttccctatccctgctccctctcaatcaatccactgtgccctgggggt

SEQ ID NO: 528034 - DNA, 201 bp, Homo sapiens
atccatctgcgctatgtggatatttctgagaaccacctgacagacctgtctccactcaactacctcacccacctgctctggctcaaggctgatggcaatckgctgcgaagtgcccagatgaatgaactgccctacctgcagattgctagttttgcttataaccagattactgacactgaaggcatctctcatcctcgtctt

SEQ ID NO: 528035 - DNA, 201 bp, Homo sapiens
ggggagagacaccttactccacttctacctgcagtggctgcccacccccctcacggaggacatgatgaaggaagggctttctctgctctgtaagacaggcmatgggctggctcatgcttatgtcaagctggaggttaaagagaggtgcgttttggggggaccagatgaggactgtgagactgtagggcccctatctccttt

SEQ ID NO: 528036 - DNA, 201 bp, Homo sapiens
tagcttgtgacccctgaatttttattcattcaatccacaattattgagaatgtgctatgtgccaggccttgtgctgtgttttggggacatttaaagcaatmagaggctgggcatggtggttcatgcctgtactcccagcactttaggaggaaggatcacttgaggccaggagttcaggaccagcctgggcaacctagtgag

SEQ ID NO: 528037 - DNA, 201 bp, Homo sapiens
atagtgagacccagtctctacaaaaaatttaaacattagccaggtgtggtggcacatgcctggaggtacttaggaagctaaggtgagaggatcacttgagmccaggaattcaaggctgcagtgagctatgatcatgccactgcacccccaaccggggtgacatagtgagaccctgtctcaataaaaataaaataaaaacag

SEQ ID NO: 528038 - DNA, 201 bp, Homo sapiens
caaacacagtaagtacattcatgtagcatgttaaaaggagacaagtgccttggaaaaaatagatcagagtaagaggaatgggggacacaggtggcaatgtyaaatagattggttaggacaaccatcactgagaagatgacatttgagcaaagaattgaagaaggagagggaattagacatgtcagctgcttcattcactct

SEQ ID NO: 528039 - DNA, 201 bp, Homo sapiens
tatataaatatatattatatattatataattatatattatatattatatataattacatataatatataatatataattatatattatataatatatattatataataatatatataatatataatttatatatatatatataatatataattatatataatatatataattagatataatatataattatatattatata

SEQ ID NO: 528040 - DNA, 201 bp, Homo sapiens
tatatattatatataaatatatattatatattatataattatatattatatattatatataattacatataatatataatatataattatatattatatawtatatattatataataatatatataatatataatttatatatatatatataatatataattatatataatatatataattagatataatatataattata

SEQ ID NO: 528041 - DNA, 201 bp, Homo sapiens
atataattatatattatatataaatatatattatatattatataattatatattatatattatatataattacatataatatataatatataattatatawtatataatatatattatataataatatatataatatataatttatatatatatatataatatataattatatataatatatataattagatataatatat

SEQ ID NO: 528042 - DNA, 201 bp, Homo sapiens
tccgcgcctcatccgggttcccgggacgggaaagtggcgtggtaaccaggcaactactgatcaatcccctccccggctgatttgcgcatcaggtagtcgcsgctctactctcaacggtggcgagctgcagttgccaagtgccccgtccccgttgccataacagcagtacacaacccctccttcccctcgcccgcttgctaa

SEQ ID NO: 528043 - DNA, 201 bp, Homo sapiens
aagtggcgtggtaaccaggcaactactgatcaatcccctccccggctgatttgcgcatcaggtagtcgccgctctactctcaacggtggcgagctgcagtwgccaagtgccccgtccccgttgccataacagcagtacacaacccctccttcccctcgcccgcttgctaaacagtccttccctctcgggaccaagggcctc

SEQ ID NO: 528044 - DNA, 201 bp, Homo sapiens
agagctggagtcactgtgaaggacaggaaaggcctgggggtgtgggtgacatcctgaagggagggggtcctcagtggaaagtgtgaagtgggagttgagartcaaaatgagatgttcacagggataaggaaagaagcctagagttggtgggtcagaagtcatgggggtgatgggagtggcacgtgtcaatgacgatgaagg

SEQ ID NO: 528045 - DNA, 201 bp, Homo sapiens; identical to SEQ ID NO: 323066

SEQ ID NO: 528046 - DNA, 201 bp, Homo sapiens
accctccaaaagctttcacgtgttcagctacccagaagctctctggacccagtcctcttggcttttcatggaagcttcatgatcttagtattccttccccyaggaaactggggaggctgtcgctggggagggtcttaagaaccacaatcaggccgggcgcggtggctcatgtctgtaatcccagcactttgggaggctgag

SEQ ID NO: 528047 - DNA, 201 bp, Homo sapiens
ccctgctttgcgaatggtaggatgatttagaggctccccaaattcaggctctaatgctgagcatttggagtggccctttgagctcttgaaaccctcctccscagggaacagcatccacatggtgacaggtctggaccccgagaagttgatcagcctgcacacagtggagcttcgggggaaccagctggaaagcaccctggg

SEQ ID NO: 528048 - DNA, 201 bp, Homo sapiens
cttcacagacacaggtctctctgcccactgttaagaacccacctaccttctcttacccttcttctcccctaccatctgttgcccattcttctccccattayaagccatctccatattgccttctgctttagcaactctgccagtcctcactgggtgcttaaccctaaacctggtttcttctccctcttccatctcctaggg

SEQ ID NO: 528049 - DNA, 201 bp, Homo sapiens
gctgggtcctaccttctaccctccatttaggtgtgatcacagaaaatgtctctccctgtgaggaaaatttgccctctcctccccagctacaagacagggtygtggcctagctttgctgcaccaaaagaacacatgaatgtattacagagtagaatatggcacttagggattccttgaagggcagaagcaggaccagagcgg

SEQ ID NO: 528050 - DNA, 201 bp, Homo sapiens
ctctgtccttcacagacacaggtctctctgcccactgttaagaacccacctaccttctcttacccttcttctcccctaccatctgttgcccattcttctcmccattataagccatctccatattgccttctgctttagcaactctgccagtcctcactgggtgcttaaccctaaacctggtttcttctccctcttccatct

SEQ ID NO: 528051 - DNA, 201 bp, Homo sapiens
aacagtccttccctctcgggaccaagggcctctccagaactgcttctgattgagcagaaacagggtctgagcccctttgctaaggcgaattgagtgggagrgttggagactgcgctttaggctggtgtaccagagggcccaaggaaattggcccagtggggagggaaaagtagaagaaatgaatggagcagggattacgga

SEQ ID NO: 528052 - DNA, 201 bp, Homo sapiens; identical to SEQ ID NO: 323081

SEQ ID NO: 528053 - DNA, 201 bp, Homo sapiens
acgagaaggagacagaggagggggaggactacagaaaagagggggaagagttccctgaggaagtgagagcctggacaaggaggggtcctagggctgaaggvgggggttgggcaggggagagacaccttactccacttctacctgcagtggctgcccacccccctcacggaggacatgatgaaggaagggctttctctgctc

SEQ ID NO: 528054 - DNA, 201 bp, Homo sapiens
tatattatataattatatattatatataaatatatattatatattatataattatatattatatattatatataattacatataatatataatatataattatatattatataatatatattatataataatatatataatatataatttatatatatatatataatatataattatatataatatatataattagatata

SEQ ID NO: 528055 - DNA, 201 bp, Homo sapiens
atgaaaaccgatatatatattatatattatataattatatattatatataaatatatattatatattatataattatatattatatattatatataattayatataatatataatatataattatatattatataatatatattatataataatatatataatatataatttatatatatatatataatatataattatat

SEQ ID NO: 528056 - DNA, 201 bp, Homo sapiens
tagggactgtggatgaaaaccgatatatatattatatattatataattatatattatatataaatatatattatatattatataattatatattatatatwatatataattacatataatatataatatataattatatattatataatatatattatataataatatatataatatataatttatatatatatatataat

SEQ ID NO: 528057 - DNA, 201 bp, Homo sapiens
ggaagccactgaaatatttagtcttttagactcttaagcttcgttattctgggatggtgctgatgccaatcctcagtggtggcctgggggctcctgggccrggtaggggtgggttgaagcatctcctccatcccaagtggctttgatggggcgaatggtagagggttactgctgacctttctctgggatggcagcttctcc

SEQ ID NO: 528058 - DNA, 201 bp, Homo sapiens
tatgggggttataagctagggactgtggatgaaaaccgatatatatattatatattatataattatatattatatataaatatatattatatattatataattatatattatatattatatataattacatataatatataatatataattatatattatataatatatattatataataatatatataatatataattta

SEQ ID NO: 528059 - DNA, 201 bp, Homo sapiens
cgccactgcactccagcctgggcaacagagctagactctgtttcaaaaaaaaaaaaagaaagaatcacagtcagaaagagggagtggggggaaagattagmgctttctcttggagcaggtgaaaagacggctggagaagttcctgagacctgcccctgaggcccagcacacccaactttataacaaaagactgcaagaagg

SEQ ID NO: 528060 - DNA, 201 bp, Homo sapiens; identical to SEQ ID NO: 323088

SEQ ID NO: 528061 - DNA, 201 bp, Homo sapiens
atggcgtgaacccaggaggcggggcttgcagtgagccgagattgcgccactgcactccagcctgggcaacagagctagactctgtttcaaaaaaaaaaaaagaaagaatcacagtcagaaagagggagtggggggaaagattagcgctttctcttggagcaggtgaaaagacggctggagaagttcctgagacctgcccct

SEQ ID NO: 528062 - DNA, 201 bp, Homo sapiens
ctacccggcctttctccacctctcgggtggtcatgacgatgacacggctgttctcctgccacgccatctgccagaagtcattgaccgtggcctccagacarccctggctggcgatgtaggtcttagcgttctcatcagggcctagcagctggttctggatgcaagcgtggagagacgcaccccaagacagtgagccccttg

SEQ ID NO: 528063 - DNA, 201 bp, Homo sapiens
gggcagcaggggtgggggatcatctgtatggagggagtgagggagttcacaaggaggttgggagcagggggcaacctgcctgctggtggtggggaggcacytctgggaggagtagaggccttttggagaagggggaggctctgtggggggtgtggggagatggcccctcctggcgtggagggtggagacctgtgagatgag

SEQ ID NO: 528064 - DNA, 201 bp, Homo sapiens
atgaagaaggtcctaactgtgacttccaattatggcagcagccctcaaaggatgtgccctggggcagggtgtggaactgtcatgtgtcttctagctcattrtaagcattgttaaaatgcctactgctctgggaattctatactaagttcagctctaccaagaatttcagggttgagcccagaccttaccttgccatgggca

SEQ ID NO: 528065 - DNA, 201 bp, Homo sapiens; identical to SEQ ID NO: 528009

SEQ ID NO: 528066 - DNA, 201 bp, Homo sapiens
tgggtgtggtagcccggaattcaaggctgcagtgagctatgattgagctactgcactcaagtctggacaacagagcaagtcgcatctctaaaaaaacaaasaaaaaaagaaaagaaataaaataacaccctaataatcttttttattttaataaataatttccatcctctcctccaaaacatgaggttattctgaaaaaaa

SEQ ID NO: 528067 - DNA, 201 bp, Homo sapiens
tacaggagtgagccaccacacccagtttttagtcttattttctaacacagtagacattgatatatagttcccacattaacaaaagttgtttggggtgctcaatttatttatttatttatttatttatttatttatttattttattttaattttctttttgaggcggagtctcactgtgtcgcccaggctggagtgcagtgg

SEQ ID NO: 528068 - DNA, 201 bp, Homo sapiens; identical to SEQ ID NO: 528008

SEQ ID NO: 528069 - DNA, 201 bp, Homo sapiens; identical to SEQ ID NO: 528007

SEQ ID NO: 528070 - DNA, 201 bp, Homo sapiens
gatcctggcaccaggaagatcaaatggcatttgtttgtttgtttgttttgagacagagtctcgctctgttgcccaagctggagtgcaatggcacgatctcwgctcactgcaaactctgcctcccaggttcaagtgattctcctgcctcagcctcccgagtagctgggattacaggcacccgccaccacacccagctaattt

SEQ ID NO: 528071 - DNA, 201 bp, Homo sapiens
aggaagatcaaatggcatttgtttgtttgtttgttttgagacagagtctcgctctgttgcccaagctggagtgcaatggcacgatctcagctcactgcaamctctgcctcccaggttcaagtgattctcctgcctcagcctcccgagtagctgggattacaggcacccgccaccacacccagctaattttttatatttttg

SEQ ID NO: 528072 - DNA, 201 bp, Homo sapiens
ggagcgtctctcagcatggcttcacttcccttttccttcaaaccctgacgtcagggaaaggatagccctgagacagcagggtgcgggggcacagggtcagrggactcaggggagcagtgcagtaggaagtttctctcctttcccagccctgggcaaacagacctcagggagaccccaggcccaccctcagctgagcccagc

SEQ ID NO: 528073 - DNA, 201 bp, Homo sapiens
ggtgccctggatgatgtcactgaaggggagcccagggttcaaacggatttgaaggggctgtcagggcagaaagcagaactaagccctttccccgaagcacacccctttcccaggaggaaactgtagccccacaaagcccagccccacaggaaaccacgtgatggaaaaaacacaaaactccttctggggagagagtgagaa

SEQ ID NO: 528074 - DNA, 201 bp, Homo sapiens
gatgtagttggcattgatgtagtcggacccggggatgttactgtcccgtccctgcaggatcactcggctgtggtcaactgggagtgggcggagaggaggcragatggtctgggttagccagggactcaccacacctgggtcagaccctcctgagctaacaggccattctggtctcagaagccatgaggcttgcgggggact

SEQ ID NO: 528075 - DNA, 201 bp, Homo sapiens
acacctcatccatctcaccctacccgaccagagaggagaacaagtccagggagggactcccggaatggggcagggcgtgggggccactcacattgtccagbggggagacctgtaaggtacggagtttgtattcggttgtgtcatgctccccgcagttggtcacagagtagggcccataagcacgctgcatgcccacctcgg

SEQ ID NO: 528076 - DNA, 201 bp, Homo sapiens
tttactacttctccacttcctgtcccaaactaccttgactgtctccagactggccccttccagcaccacaataagcctacggcctccgatcttgtttcctscccctagtcggggccgcttgggtggcagagcatcccagtcctgtgcctgctccccaccgcttcgttcacgaggcttgaatccatcactgggcgcggccat

SEQ ID NO: 528077 - DNA, 201 bp, Homo sapiens
gaaagagaggacatgagctttagagggtctcggtgccaaaagccccctgagtgttgcggtggggaagaggaagggcagggggcagacacggagccagccaygtgaggctcacagagagagggaaggccttgaaggaggccgatccaggaaaggaggcctcccaggtgggccacagggctgcaccgtgaccgaatccagctc

SEQ ID NO: 528078 - DNA, 201 bp, Homo sapiens
tgggaatggcgggggtgcggagccctcacctctcactagtgggatcggagcagttcagcgggtacttgaggtggatgatggtgccgtcgcggtcctgcagsacaccctgctgctgagtgtagtactccaccagctctgtcagagtcgcaaacttctcccctccatacaggtcatagaaatcccctgagttctggatccgaa

SEQ ID NO: 528079 - DNA, 201 bp, Homo sapiens
ctaacgtttatattgcttataacagctcatggcacttagcagtatttacttctcagctgtcactactaccatcaggattatcatcctcacctgcagtgcaygatgatgggccctgcgtgaggcagactttcctgccgctggttgatctggtccaggaagctgaggacacccccaggctcactggggaccccatggtcgggc

SEQ ID NO: 528080 - DNA, 201 bp, Homo sapiens
tgtcatgctccccgcagttggtcacagagtagggcccataagcacgctgcatgcccacctcgggccagtatgggacgcatttgttctggaaagggagggtygggtggggatgaggcacagagcagggcactgtggcccatcccaggtcctgctctatgttctgagtgcctggcaccggcccaaacatttgttggatggacg

SEQ ID NO: 528081 - DNA, 201 bp, Homo sapiens
gcacatgcctcatagatgttcctgggagaagaaaccaacagaatgggacctcgagagaaagcggagcagccgggacacaggcctactgtgggtgcctgccyggccttgccctgactagcttgggcctggccagcaactgggtcccgggctcctcctctgtatttggcagggttgggcgagatggtacatccggagagggct

SEQ ID NO: 528082 - DNA, 201 bp, Homo sapiens
actcaggaaatgcttatgaacagaaggggtgagaaccaagcctgaacttgaagccaggtccccccagctgcaacacttgtcctctccagaaagtgaggatygggctgggcaggacaaaggggtggatgccgggcggtggcagtcagggccactcacttggacgaggtgcgggaggccttggcatgggcattcttcatggct

SEQ ID NO: 528083 - DNA, 201 bp, Homo sapiens
ttgggaatggcgggggtgcggagccctcacctctcactagtgggatcggagcagttcagcgggtacttgaggtggatgatggtgccgtcgcggtcctgcasgacaccctgctgctgagtgtagtactccaccagctctgtcagagtcgcaaacttctcccctccatacaggtcatagaaatcccctgagttctggatccga

SEQ ID NO: 528084 - DNA, 201 bp, Homo sapiens
ctccactctccggaccgagctgctcccggacccacctcacagcacagccctcagtggagtccaagtcccaccccaagggcaggtagcccaagggcggttaraggaggtgggacttgcctttgtgcagctgcggcttgtatagaaagggcgttgctgggagaggggacctgggcccgacaggtgattgccccacccgtgccc

SEQ ID NO: 528085 - DNA, 201 bp, Homo sapiens
cccgccgcctggctgccttacctcgcacatgaccttgatgtgggtgaccctgagcggggagcctgggccagccttgggctggtcactgagcacagaaagcwcgaagtctccaggctggctgaggctctcacgcacaagaaacgtccagggctcgcccttggcctgcagcagcgtctctgcctgcccgccagacatgtggcc

SEQ ID NO: 528086 - DNA, 201 bp, Homo sapiens
gctcaggggaagtggggaggcagctgggcccacccctgacctgccgcaggtagacaaaggcgcctgaggcctcctcaatccccgtcttcttgaaatgctcyaccaggtccgtgaggctgtcgaaggtctccaaaccacccactgtgtagcgtccaccctggggggagccaaattaggccattcacaggacttgagtctccc

SEQ ID NO: 528087 - DNA, 201 bp, Homo sapiens
gagtctcgctctgttgcccaagctggagtgcaatggcacgatctcagctcactgcaaactctgcctcccaggttcaagtgattctcctgcctcagcctccygagtagctgggattacaggcacccgccaccacacccagctaattttttatatttttggtagagatggggtttcaccatgttggccagtatggtctcaaac

SEQ ID NO: 528088 - DNA, 201 bp, Homo sapiens
gcggatcacttgaggtcaggagttcgagaccagcgtggccaacatggtgaaaccccatctgaactaaaaatacaaaaaaattagccgggcgtggtggcacstgcctgtagtcccagctactccagaggctgagtcaggagaactgtttgaaggcgggaggcagaagttgcagtgagccgaggtcgcgcaactgcactccag

SEQ ID NO: 528089 - DNA, 201 bp, Homo sapiens
attctatactaagttcagctctaccaagaatttcagggttgagcccagaccttaccttgccatgggcaaaggcccctaccacaaaaacaataggatcactrctgggcaccagctcacgcacatcactgacaaccgggatggaaaaagaagtgccaactttcatacatccaactggaaagtgatctgatactggattcttaa

SEQ ID NO: 528090 - DNA, 201 bp, Homo sapiens
aggcaggagaatcgcttgaacctgggaggcagaggttgcagtaagccaagattgcaccactgcactccagcctgggcaacagagtgagactgtgtcttgaaacacacacacacacacacacacacacacacacacacacacacacacacataatttgctgttgttttgggggcatggcggcacatacctatagtcctagct

SEQ ID NO: 528091 - DNA, 201 bp, Homo sapiens
gcgctacatgcttccaaatccaccacctcatttaggtctctcacaaacatgctgagagctaggtatgatattacccccattttatagatgaggaaactgaygctgagctgttactcactggcctagggcccttgactgactctagggcaagcttccagagctctgttgcccaggctggagtgcagtggcgcggttacagct

SEQ ID NO: 528092 - DNA, 201 bp, Homo sapiens
ggcaggagaatcgcttgaacctgggaggcagaggttgcagtaagccaagattgcaccactgcactccagcctgggcaacagagtgagactgtgtcttgaaacacacacacacacacacacacacacacacacacacacacacacacacataatttgctgttgttttgggggcatggcggcacatacctatagtcctagcta

SEQ ID NO: 528093 - DNA, 201 bp, Homo sapiens
gcaggagaatcgcttgaacctgggaggcagaggttgcagtaagccaagattgcaccactgcactccagcctgggcaacagagtgagactgtgtcttgaaacacacacacacacacacacacacacacacacacacacacacacacacataatttgctgttgttttgggggcatggcggcacatacctatagtcctagctac

SEQ ID NO: 528094 - DNA, 201 bp, Homo sapiens
actcctggcccttctgcgactgtgggcagagggacagtgggaaggtggtggtcccagcagggccaggtggcacccatcctgcactgcagcccccccccccsccaggccctgctctgcacgcacctgcaggacctccagcttcttcttagtggtttcaatgaactgggcgatggccacgtagatgaacttgtactgcgcctc

SEQ ID NO: 528095 - DNA, 201 bp, Homo sapiens
caggagaatcgcttgaacctgggaggcagaggttgcagtaagccaagattgcaccactgcactccagcctgggcaacagagtgagactgtgtcttgaaacacacacacacacacacacacacacacacacacacacacacacacacataatttgctgttgttttgggggcatggcggcacatacctatagtcctagctact

SEQ ID NO: 528096 - DNA, 201 bp, Homo sapiens
accaagcctgaacttgaagccaggtccccccagctgcaacacttgtcctctccagaaagtgaggattgggctgggcaggacaaaggggtggatgccgggcrgtggcagtcagggccactcacttggacgaggtgcgggaggccttggcatgggcattcttcatggctgggggataggtgatgttcccgtactccgactcct

SEQ ID NO: 528097 - DNA, 201 bp, Homo sapiens
aggagaatcgcttgaacctgggaggcagaggttgcagtaagccaagattgcaccactgcactccagcctgggcaacagagtgagactgtgtcttgaaacacacacacacacacacacacacacacacacacacacacacacacacataatttgctgttgttttgggggcatggcggcacatacctatagtcctagctactt

SEQ ID NO: 528098 - DNA, 201 bp, Homo sapiens
tattacgttgtgattggaagtctcaggacggtgggagtgtaaaaaccaggctaaattctctcttcttgcatccaggaaaccagctctaccactccctgctrtgtattgtgcttcagttcctcatccttcgactaatgggccgcaccatcactgccgtcctcactaccttttgcttccagatggtaaacgtctttcccttag

SEQ ID NO: 528099 - DNA, 201 bp, Homo sapiens
gagaatcgcttgaacctgggaggcagaggttgcagtaagccaagattgcaccactgcactccagcctgggcaacagagtgagactgtgtcttgaaacacacacacacacacacacacacacacacacacacacacacacacacataatttgctgttgttttgggggcatggcggcacatacctatagtcctagctacttgg

SEQ ID NO: 528100 - DNA, 201 bp, Homo sapiens
tcctcactaccttttgcttccagatggtaaacgtctttcccttagcagctcaggctacagctgacagcggttcaggggacaggggtaggcaggggactgtrgtatagaaattagcagacctaatttctaacccctctcccagcacttagcagtatgacttcaggtaggtggcttatcacaggcccaagtgttccatccaca

SEQ ID NO: 528101 - DNA, 201 bp, Homo sapiens
cacctttgccttacaaaccttcagacccgccctcttcctaccttgccgcgctaggccccgccctctgcgcaggtcggccaataacggggtgagctggcgcygcggggcgggcctccagccaatgcgcacgccgtgggcgggccccgagccggaattgggggtgaagcgatagcgttttgcccgcattcggggcgcgcggag

SEQ ID NO: 528102 - DNA, 201 bp, Homo sapiens
tgatggtgagagagactggaaaggaggaatcaacaggatttcatgactagataacagagaaccaatatgaagaaggaaaacactttttttttttttttgaracggagtctggctctgttgcccaggctggagtacagtgagacgatctcagctcactgcaacctccgcctcctgggttcaagcgattctcctgcctcagcc

SEQ ID NO: 528103 - DNA, 201 bp, Homo sapiens
gcatgactgcaccagagctagaaaatggacaggcaaggatccctacagatagcagagaagtaggaaatatcatctacaagtgcatgttggttttgctctaratctgtgagttgtcaatgccagccgtgctgggacatgttcatcagccagcactgaacaaccttcgcgggcacagggctgtgccaggtgcacatttagcac

SEQ ID NO: 528104 - DNA, 201 bp, Homo sapiens
caccacaataagcctacggcctccgatcttgtttcctgcccctagtcggggccgcttgggtggcagagcatcccagtcctgtgcctgctccccaccgcttmgttcacgaggcttgaatccatcactgggcgcggccatcttgcaacaataccggaagttgcgctaacgctcttaaataagaacagcgcggcttctaatcac

SEQ ID NO: 528105 - DNA, 201 bp, Homo sapiens
tgagagagactggaaaggaggaatcaacaggatttcatgactagataacagagaaccaatatgaagaaggaaaacactttttttttttttttgagacggaktctggctctgttgcccaggctggagtacagtgagacgatctcagctcactgcaacctccgcctcctgggttcaagcgattctcctgcctcagcctcctga

SEQ ID NO: 528106 - DNA, 201 bp, Homo sapiens
tgtagaagggccaagattgggaagtacctgtacatatatatacataaaatttaagcagttggaacgttttatgaaggttatagaactttaggagcgggtgrgtgggaaggattaagcaaaagctgtaagtggtgataaggaaacaggactggggctagagcagagggttagaggtctgaaccatgagaagtttgagataaa

SEQ ID NO: 528107 - DNA, 201 bp, Homo sapiens
acggggcatacagatgactaggaaattgttttctccatatcccactcctcttctctcatcttctctcattaccaccaatcatcaaagtaataaacacttgrtgtaatgcatctaccacactcccgagcccccttgctcattctaccatttcccacaccctgccttcctatctcacataccctgttgccttcagtaattcat

SEQ ID NO: 528108 - DNA, 201 bp, Homo sapiens
aaattaactgggctgggtggcatatgtctgtagtccctgctgcttgggaggctgaggtggaaggatcactggagcccggggtcctccgctcaactcaggaygttgaggctgcattgagccaagatcatacctctacactccagcatgggcaaaagagcaagattctgtctcaaaaataaataaataaattttgtttttaat

SEQ ID NO: 528109 - DNA, 201 bp, Homo sapiens
caagcgtgtgatgagtcactgtgcccgtcttatcgtcagccgtcatctcggtgcttttcacaaccaccctgttatgatcgccctccattttaaagaaggakactggggagcttcacccacggtcaccctcccacgtgcgaggcggagtcccgacccacgtccgtctgacggaaggcggagctttcacgcgaggcacgcacg

SEQ ID NO: 528110 - DNA, 201 bp, Homo sapiens
ccctcacccatgcaagaagccagcttcggctttgcccagctgtctctggatctagggtccccccaccagacagggaattcccagggcccagcctctcctcycacgtggcccacactgctgaccttgatgtagttggcattgatgtagtcggacccggggatgttactgtcccgtccctgcaggatcactcggctgtggtca

SEQ ID NO: 528111 - DNA, 201 bp, Homo sapiens
ctgggagctaaagcctgccttcaaagcatggaaccaaactgcaaactctgtaacctcctatctgtccctgaagtcccggggaacaaacagttttacaccaytggatactttaggaaccccaaaacaaccaggtttgcaagaacagtattcataggataaacaaatagcaaatgtacagccttggcttccccaaactccaca

SEQ ID NO: 528112 - DNA, 201 bp, Homo sapiens
cactcactgggcaagcaaagggctcagaggcgacacacagtgatcccagggctttatttacaagaggagaagggttggccctgcctggggcctggctgggmtatatacagggtcagggagaggtgggggggatgcagccatttaaattacaaaagaatggggcactcctaggttcaggttgtgagtctgtccatcgcgaaa

SEQ ID NO: 528113 - DNA, 201 bp, Homo sapiens
tgaggtggaaggatcactggagcccggggtcctccgctcaactcaggacgttgaggctgcattgagccaagatcatacctctacactccagcatgggcaamagagcaagattctgtctcaaaaataaataaataaattttgtttttaattagccaggcatgatggcatgcacctgtagtcccagctattcaggagaccaag

SEQ ID NO: 528114 - DNA, 201 bp, Homo sapiens
gctgcatgcccacctcgggccagtatgggacgcatttgttctggaaagggagggtcgggtggggatgaggcacagagcagggcactgtggcccatcccagrtcctgctctatgttctgagtgcctggcaccggcccaaacatttgttggatggacggatgggctggcagagaggcaggagacctgggctctcgtctcagat

SEQ ID NO: 528115 - DNA, 201 bp, Homo sapiens
ggcaagatggtctgggttagccagggactcaccacacctgggtcagaccctcctgagctaacaggccattctggtctcagaagccatgaggcttgcggggkactgtgggcagcaggggtgggggatcatctgtatggagggagtgagggagttcacaaggaggttgggagcagggggcaacctgcctgctggtggtgggga

SEQ ID NO: 528116 - DNA, 201 bp, Homo sapiens; identical to SEQ ID NO: 528010

SEQ ID NO: 528117 - DNA, 201 bp, Homo sapiens
atggaataatccatttccctggtaagttaatacagctaaactaaaactaccaccaggttacagaatagagcaacagactggaaaaaaacaatagtattagmaatctggggtgaattccaaggattagcctggctactaaggaacacagtatgggcaatgactactgtgacttattgaggcatgctaggaaacatctggaag

SEQ ID NO: 528118 - DNA, 201 bp, Homo sapiens; identical to SEQ ID NO: 528012

SEQ ID NO: 528119 - DNA, 201 bp, Homo sapiens
acttcactcgttcctttccagcatcattcctgctctcaagcgcctgagtctgggccttttctacctagtgggctacacactgctcagcccccacatcacasaagactatctcctcactgaagactatgacgtgagtgtctactaaagcagcagcagcatgactgcaccagagctagaaaatggacaggcaaggatccctac

SEQ ID NO: 528120 - DNA, 201 bp, Homo sapiens
cgatttactacttctccacttcctgtcccaaactaccttgactgtctccagactggccccttccagcaccacaataagcctacggcctccgatcttgtttyctgcccctagtcggggccgcttgggtggcagagcatcccagtcctgtgcctgctccccaccgcttcgttcacgaggcttgaatccatcactgggcgcggc

SEQ ID NO: 528121 - DNA, 201 bp, Homo sapiens
ttctgtggcttcctcggggttaggtggaaagggtggtaggttaggctctgagacaccaggtcccaggacagcagggaggagggacattgagagccccagcyggtgcagggaggggaggggatggagggtaggcagcgccggctgccagtctccctgcctccctggctgttcagggtgggagccggctcatccctgcttggg

SEQ ID NO: 528122 - DNA, 201 bp, Homo sapiens; identical to SEQ ID NO: 528004

SEQ ID NO: 528123 - DNA, 201 bp, Homo sapiens; identical to SEQ ID NO: 528006

SEQ ID NO: 528124 - DNA, 201 bp, Homo sapiens
tgaaattacaggcatgagccaccgcgcccagccgaggctgcaatttttaatattcaatacttcaaagaaaaagtaagcttatgtggactgctgcactggagtattttgagcagtcagaagactgtaaaaggagtgtgtttatgtttgtgtggtgtatgcttgcaaggagtttgatggaaggatgctgaagaggaattttgc

SEQ ID NO: 528125 - DNA, 201 bp, Homo sapiens; identical to SEQ ID NO: 528013

SEQ ID NO: 528126 - DNA, 201 bp, Homo sapiens
cctgttggctggtcacagtaagtagaaaagttgaaacaaggtcctatttagacaagccatgggggccagtatggggagtggcaagagccctaactgagctrttccctctcaggaaggagtatgcattttgacgggcctgggcttcaatggctttgaagaaaagggcaaggcaaagtgggatgcctgtgccaacatgaaggt

SEQ ID NO: 528127 - DNA, 201 bp, Homo sapiens
aaataaaaaacaatatgctatatagcagctatttgcattgcatttacattatattaggtattatgagtaatccagagatgatttaaagtgtatgtgaagakgtgcataggttacatgcaatactacaccatattatataagggacttgagcatctgtggtgtctgctgcgagtactagaaccaatccttcatggacaccaa

SEQ ID NO: 528128 - DNA, 201 bp, Homo sapiens
ggggcaagtttgtgctgtacaaatatgtcacctgttggctggtcacagtaagtagaaaagttgaaacaaggtcctatttagacaagccatgggggccagtrtggggagtggcaagagccctaactgagctattccctctcaggaaggagtatgcattttgacgggcctgggcttcaatggctttgaagaaaagggcaaggc

SEQ ID NO: 528129 - DNA, 201 bp, Homo sapiens
tttgagggtggttacccttgccatacctcatcaacaaagaatcctcagtttctctgtgctgtggatgtaactgaatgaccgagccaagcagtccccacttagattcattcttcacttcagacattcaaaaatacagtaacaagctgggtgtggtagcccggaattcaaggctgcagtgagctatgattgagctactgcact

SEQ ID NO: 528130 - DNA, 201 bp, Homo sapiens
cccccattttatagatgaggaaactgacgctgagctgttactcactggcctagggcccttgactgactctagggcaagcttccagagctctgttgcccagrctggagtgcagtggcgcggttacagctctctgcagcctcgacctcccaggttcaagccatcctagcctccagagttctaaccgggcttcgaacccagagc

SEQ ID NO: 528131 - DNA, 201 bp, Homo sapiens
cacgccatctgccagaagtcattgaccgtggcctccagacagccctggctggcgatgtaggtcttagcgttctcatcagggcctagcagctggttctggaygcaagcgtggagagacgcaccccaagacagtgagccccttggcccagcacaggccctgaaccactgccaccctcacccatgcaagaagccagcttcggct

SEQ ID NO: 528132 - DNA, 201 bp, Homo sapiens; identical to SEQ ID NO: 528016

SEQ ID NO: 528133 - DNA, 201 bp, Homo sapiens; identical to SEQ ID NO: 528017

SEQ ID NO: 528134 - DNA, 201 bp, Homo sapiens; identical to SEQ ID NO: 528005

SEQ ID NO: 528135 - DNA, 201 bp, Homo sapiens
ctcaatccccgtcttcttgaaatgctccaccaggtccgtgaggctgtcgaaggtctccaaaccacccactgtgtagcgtccaccctggggggagccaaatkaggccattcacaggacttgagtctccctccctgggtccccagccttgaattcaagcccaggcagaccctccctgccacccacactgtggtcacagacagg

SEQ ID NO: 528136 - DNA, 201 bp, Homo sapiens
ctgctggaagttgctggtttctcctacttctatggggccttcttggtagggccccagttctcaatgaatcactacatgaagctggtgcagggagagctgaytgacataccaggaaagataccaaacaggtaattgcccctcttggtccagatgtttgtgtaggtatttcactcactctgaagtgactcttctgaaagctgc

SEQ ID NO: 528137 - DNA, 201 bp, Homo sapiens
ggcgcgcggagctggggggtccctgtggggctcccggagttaagatggcgtcctcagcggagggggacgaggggactgtggtggcgctggcgggggttctscagtcgggtttccaggagctgagccttaacaagttggcgacgtccctgggcgcgtcagaacaggcgctgcggctgatcatctccatcttcctgggtaagg

SEQ ID NO: 528138 - DNA, 201 bp, Homo sapiens
ttccaaaccaaactgggatggcaccaggcacaaataacactcttcttatcttttcccccatctaggttacccctttgctttgttttatcggcattaccttytctacaaggagacctacctcatccacctcttccatacctttacaggcctctcaattgcttattttaactttggtgagtaaactaaattagcagtgacacc

SEQ ID NO: 528139 - DNA, 201 bp, Homo sapiens
atgcctgtgatcccaacactttaggaggccgaggtggaaggatcacttgagcccaggaatttgagaccggcctgggcaacacggtgggaccctgtctcacaaaaaaaaaaaaaaaaattagccaggcgcagtgccatttgctggcagtcccagttactcaggaggatgaggtgggaggactgcttgagccagggaagtaga

SEQ ID NO: 528140 - DNA, 201 bp, Homo sapiens
gaggcggaggctgcagtgagccaagatcgtgccactgcactccagcctggtagagactgagactccatctcaaaaaaaaaaaaaaaaaaaagtgtatttasaacgaagattaaaatcctggcctgacttctaaaccaatgcgatttcttctgggcctattcaattagttctaacgggtaagagaaaggaggaggaagaaca

SEQ ID NO: 528141 - DNA, 201 bp, Homo sapiens; identical to SEQ ID NO: 528011

SEQ ID NO: 528142 - DNA, 201 bp, Homo sapiens
tccctgaagtcccggggaacaaacagttttacaccactggatactttaggaaccccaaaacaaccaggtttgcaagaacagtattcataggataaacaaayagcaaatgtacagccttggcttccccaaactccacagtctcagtgcagaaagatcatcttccagcagtcagctcagaccagggtcaaaggatgtgacatc

SEQ ID NO: 528143 - DNA, 201 bp, Homo sapiens
cttgggggaactcacttgtacttctcgttttagagcacagcaagggaagagaagcagagcagggtggcactgggggtggggacggggcccacttcccacaygtctgcaatcaaaggctcaggagcatggcattgcacatatgtgacaacacatgcagtaaggacacatgtgtgccttgcacactccaggcccagataatac

SEQ ID NO: 528144 - DNA, 201 bp, Homo sapiens
ccgggcacagtggctcacgcctctaatcccaacactttgggaggccgaggcgggcggatcacttgaggtcaggagttcgagaccagcgtggccaacatggwgaaaccccatctgaactaaaaatacaaaaaaattagccgggcgtggtggcacctgcctgtagtcccagctactccagaggctgagtcaggagaactgttt

SEQ ID NO: 528145 - DNA, 201 bp, Homo sapiens; identical to SEQ ID NO: 528014

SEQ ID NO: 528146 - DNA, 201 bp, Homo sapiens; identical to SEQ ID NO: 528015

SEQ ID NO: 528147 - DNA, 201 bp, Homo sapiens
ccccatccacccagggaaggcagtggagccaaggacacagggcagggcagggaggacacccaggcagaagagctgtaccatggccacctgaggacagcacygctcacttcctcttgagggaacccttgctcttctccttgtctgctgaccgctgcttcttcactttctcctccctcttgttcttagtgtgcaggttctcat

SEQ ID NO: 528148 - DNA, 201 bp, Homo sapiens
cggggaaggtgggtcagacgcgggaaggcgggtcagacgcgggaaggcgggagttgggtcgggagagggcgccggatctgtgggcccatgagcggttgtcycctttctcgccacacggcggcagccacaatctgactaacattcttggcactcagagcccagggtctaccctgagcttgtgcgtccgagttgcgttttgta

SEQ ID NO: 528149 - DNA, 201 bp, Homo sapiens
gtagaccaaatgtcatcatccaaaccacacgggacagaggcctgcatgcgtcctgtttggcaaacagctgcccagccagtgggggagcagttcatgcttaractaccaccccctccaggtgtcttaggcacgctggtccttaggagaagggttgaccttccactccctcttgcaggtgtccttaagtttgctcgcttggtc

SEQ ID NO: 528150 - DNA, 201 bp, Homo sapiens
gaacctagagcttcagacgccctatggcgtccgcctcgacccaaccggcggccttgagcgctgagcaagcaaagggtgagaatcgtcctagtcaaggcatrggctgctggcctggggtagtcaaggcatgggctgctggtctggggaggatgcgggcggaggatgtggggcgacaaacctggctacgtccgccgggaaaat

SEQ ID NO: 528151 - DNA, 201 bp, Homo sapiens; identical to SEQ ID NO: 323098

SEQ ID NO: 528152 - DNA, 201 bp, Homo sapiens
atgtcatcatccaaaccacacgggacagaggcctgcatgcgtcctgtttggcaaacagctgcccagccagtgggggagcagttcatgcttaaactaccacyccctccaggtgtcttaggcacgctggtccttaggagaagggttgaccttccactccctcttgcaggtgtccttaagtttgctcgcttggtcaagtcctac

SEQ ID NO: 528153 - DNA, 201 bp, Homo sapiens; identical to SEQ ID NO: 323105

SEQ ID NO: 528154 - DNA, 201 bp, Homo sapiens
gctgcaattcgtgctgcccgtggccacgcagatccagcaggaggttatcaaagcctatggcttcagctgcgacggggaaggtgggtcagacgcgggaaggygggtcagacgcgggaaggcgggagttgggtcgggagagggcgccggatctgtgggcccatgagcggttgtcccctttctcgccacacggcggcagccaca

SEQ ID NO: 528155 - DNA, 201 bp, Homo sapiens; identical to SEQ ID NO: 323130

SEQ ID NO: 528156 - DNA, 201 bp, Homo sapiens
tcccccaccccccactatgaagtcaggtgtggaattttccattttcggcctcacactggcactcataatttcagattttggattttctaattaaggatggycaacctgtactgttaatcacattattattccattttgtgatgaggaagcaaactctaatggtgcagactctcgagtagcagagctggacttaaatgctgt

SEQ ID NO: 528157 - DNA, 201 bp, Homo sapiens
tacagctcttttagaatttgtctagtaggctttctggctttttaccggaaagcccctcttatgatgtttgttgccaatgatagattgttttcactgtgcaraaattatgggtagttttggtggtcttgatgcagttgtaagcttggggtatgaaggtttgggccacgcctgggcgcttccggctgcgccggatgctgtttc

SEQ ID NO: 528158 - DNA, 201 bp, Homo sapiens
tgtttgttgccaatgatagattgttttcactgtgcaaaaattatgggtagttttggtggtcttgatgcagttgtaagcttggggtatgaaggtttgggccmcgcctgggcgcttccggctgcgccggatgctgtttcctttccgctcccaggggcgttgggaacggttgtaggacgtggctctttattcgtgagttttcca

SEQ ID NO: 528159 - DNA, 201 bp, Homo sapiens
ctctgcagcacacgcagctggagagggcttctgtccctgtcagcggcagagggcgttggggctggccggggcaccttgtccctgctatggtccacatgctmacgctgtccacctgccaggtggagtgtatgtggctgtggccctccctcgtggaggtgccgtgctttaaagaggccttagtgcccgggatgggcacagtgt

SEQ ID NO: 528160 - DNA, 201 bp, Homo sapiens
ctcccccttgcacccgaggccctcgcagcagggagctcagcgaggcagagggtggggctgcacagaggggaacatcagctgcagctctgcaccaggccggyccctggggactggggcgctcctccctcaggctttctccctcagtcttggcttctccagggctctggggtgtctggagctaggcttggccctaccattctg

SEQ ID NO: 528161 - DNA, 201 bp, Homo sapiens
cggcctcccaaagtgctgggattacaggcatgagccaccgcacccggcctgtgcactttatttctattattattacattataatatataatgaaataattwtacatctcaccataatgtagaatcagtgggagccatgaacttgttttccgcaactagacggtcccatctgggggtgatgggagatagtgacagatcatca

SEQ ID NO: 528162 - DNA, 201 bp, Homo sapiens
aaagccaaggcccagagtggtgggcgggaggcagttcttccccaccgctcctcacctctctctgtctcctcccgtcccacccccaagtctgttcacacagygagcctgcagttttcaaggtggcttgtcaaggacatctcctgacatgcacgttcacctcctgaccttgttcctgctgtaaatttgtgaattaagtgggga

SEQ ID NO: 528163 - DNA, 201 bp, Homo sapiens
ggcagtttaaaaactggcaaggaacagaagggttgtgggggcagatttttatctaaagtcagggccatgatttgtgcatttgaccctgtgtaagttacacygcaacaagaaagtgaatttttaaaaatcacaaaaatactgcagatagacataaagccaaggccctagagtcagggtgctggaggctcagcagcttctctc

SEQ ID NO: 528164 - DNA, 201 bp, Homo sapiens
ctggagtgatcctcccaccccagccttctgagtagctgggcccacaggtgtgtgccaccatacccagctaatttttatttgtatttttttgtagagatggkgtctccctgtgtttcccaggcaggtcttaaactcttgggcttaagtgatcctcctgcctcggcctcccaaagtactagaattagagacatgagccatgtg

SEQ ID NO: 528165 - DNA, 201 bp, Homo sapiens
cagcagcgcaactgcgaggacatgatccagatgttccaggtgaggacggagctgccctctgctctcaggggtgggtggggcaggtggatgcttccgtggcrgctggcctggaacgcaggccctgcctcctgcttggggagccttacctggcaactggggccctcacggggctagactggggggtaaggagcagcatcagga

SEQ ID NO: 528166 - DNA, 201 bp, Homo sapiens
gaggatttctcaggctatgccatggcagctgcagaggcccagggagaggtaacctctgctcccggcctcagggccctctggctctgcctctccagcctgamgcccactcccccgctcctctccttgctctgtccccccatgtggctgtcatcctctacctgcgtctcccctcttcctttatccttttgcttttctttctcc

SEQ ID NO: 528167 - DNA, 201 bp, Homo sapiens
atggcctctgcagcacacgcagctggagagggcttctgtccctgtcagcggcagagggcgttggggctggccggggcaccttgtccctgctatggtccacrtgctcacgctgtccacctgccaggtggagtgtatgtggctgtggccctccctcgtggaggtgccgtgctttaaagaggccttagtgcccgggatgggcac

SEQ ID NO: 528168 - DNA, 201 bp, Homo sapiens
tgacccactctgttgatacactatgtgtcctgcagatgcttttacagggttaaatgataccacaagaggcagggcagcgggctcgacgagctctgttctgrtgcgggcaggaggcgggagcccggatctgtgcgactgaaggtgggagactgggccgggtggacctggtggtctggtgtgggcaggaggtgggcaatgagg

SEQ ID NO: 528169 - DNA, 201 bp, Homo sapiens
tctgctgtctggccctgtaacctgtttccttctttctctaagttcccaccctctctgtccaatccacattatggcagctggtatcctccccgttctcttcwctcaggcagtcacgaacgtcatctccaggaagtttcattttgcttccccttgcggcccctgccctttgtacccaaaacaaagagaggcagtcgactgtcc

SEQ ID NO: 528170 - DNA, 201 bp, Homo sapiens
cggatttctttgattctgagccccgtgttttccacgtgtgacatttctgaaatcaggacaggtctcagaatcaatggcacctccaatatgggagtcttccytttagtgtctgaaaatggcttttaggtgagaaaataaagtgataaggagagaatggtaagaggattgggcccctttcagcagttagccaggcttgtatgc

SEQ ID NO: 528171 - DNA, 201 bp, Homo sapiens
tgtggatgaagatttggctgtctgagaggagcccggccccaaggggcaagggaaagggatgtgatgccaggagtgctggctgtataccaagtggattcctyagatggctgataaccaagccgataggacaggagtgagagcagaggtagtgtcttgcagactccaacccaagccttgaggagggagcgggtgactgacagg

SEQ ID NO: 528172 - DNA, 201 bp, Homo sapiens
taaagatgtgcttcctccgtgtctgtcatacactgagaccaacaggctacagtgtccctgattcttggaaaagcctggagaagctggggagatgcggttcmcaatgcctcggtataggaggctgtgttgagctgacattcaaatggattctttaataataatgaaactggcgagtatttattgtgcactttggtgtcactg

SEQ ID NO: 528173 - DNA, 201 bp, Homo sapiens
ctagtgttggcctgttggcctcccgtccacggctcctccccttctctttgctttccttccctttttcccctagccacccctaactccagagaaagacaagsaacaaaagtctcggtgttgcgtcacagaggtggcgcagcttctgagggcctggggttgcagagcagttagtgagcagcttctggggtggaggctctgcag

SEQ ID NO: 528174 - DNA, 201 bp, Homo sapiens
ccctgagacccctcaacaatgcatcagcctctccccctggcctgggggcccaaccactacctggtcatctgccctctccccacgccatgggacagggtatsggtggacttcctcctggcccagagaagggcccaactctggctccttcaccccactctctgcctcctgcttcctcttctgctccagcgccccccatgaggt

SEQ ID NO: 528175 - DNA, 201 bp, Homo sapiens
gcgcgcgcagcgacctgtacttcgtgccactggagggctccaagctggccaagaagcgggccgacctggtggagaaggtgcggcgcgaggccgagcagcgmgcgcgcgaagaaaaggagcgcgagcgcgagcgggaacgcgagaaagagcgcgagcgcgagaaggagcgcgagcttgaacgcagcgtggtgagtgcgtcac

SEQ ID NO: 528176 - DNA, 201 bp, Homo sapiens
agcttgcagtgagccgagccgagatcgcggcacggcactccagcctgggtgacagagtgagactccgtctcaataaataaataaataaataaataaataaaataaagcaaggtaatgaaggtgaatgtgcttagtatgtggccagatacagagtaggtgctctgtaatattagttacagtgattgcctgctaggagtgtag

SEQ ID NO: 528177 - DNA, 201 bp, Homo sapiens
gagcttgcagtgagccgagccgagatcgcggcacggcactccagcctgggtgacagagtgagactccgtctcaataaataaataaataaataaataaataaaataaagcaaggtaatgaaggtgaatgtgcttagtatgtggccagatacagagtaggtgctctgtaatattagttacagtgattgcctgctaggagtgta

SEQ ID NO: 528178 - DNA, 201 bp, Homo sapiens
ggagcttgcagtgagccgagccgagatcgcggcacggcactccagcctgggtgacagagtgagactccgtctcaataaataaataaataaataaataaataaaataaagcaaggtaatgaaggtgaatgtgcttagtatgtggccagatacagagtaggtgctctgtaatattagttacagtgattgcctgctaggagtgt

SEQ ID NO: 528179 - DNA, 201 bp, Homo sapiens
tggagcttgcagtgagccgagccgagatcgcggcacggcactccagcctgggtgacagagtgagactccgtctcaataaataaataaataaataaataaataaaataaagcaaggtaatgaaggtgaatgtgcttagtatgtggccagatacagagtaggtgctctgtaatattagttacagtgattgcctgctaggagtg

SEQ ID NO: 528180 - DNA, 201 bp, Homo sapiens
agagttgggggattctagtctctgggtgagaagtcttagtcggaggaacaaataaatcttaaggaaaatgcagaagtggtctttcttttttattgtttttktttgtttgtttgtttttgagacagtttcgctctgtcacccaggctggagtacagtggcacaatctcagctcattgcaacctccgcctcctgggttcaaac

SEQ ID NO: 528181 - DNA, 201 bp, Homo sapiens
aattagccgggcgtggtggcgggcgcctgtagtcccagctactcaggaggctgaggcaggagaatggcgtgaacccgggaggtggagcttgcagtgagcckagccgagatcgcggcacggcactccagcctgggtgacagagtgagactccgtctcaataaataaataaataaataaataaataaaataaagcaaggtaat

SEQ ID NO: 528182 - DNA, 201 bp, Homo sapiens
atgggttgtggggggctgagccagagagggagctggggtgagggatggctggggctgtgtgtgtgcgtgtgcgtgtgtgtgtgtgtgtgtgtgtgtgtgtgagagagagagagagagatgtcccctgcagctggactataagcctggccctcaggtaggggaggaatgggagagggtagacaatggtttcttttgtgactc

SEQ ID NO: 528183 - DNA, 201 bp, Homo sapiens
ccactgtgttgctatggtagtgatccagtgggatgtcagattggttgggggggcttcgaatgtttattggacctcagcctgtggctgtccttgggactctrggctgggttttggaggttgtttctggatctgttggtggttgggagtttccccacggtgtgcaccctttcatgttgaagtctgttggaacaggtagatacg

SEQ ID NO: 528184 - DNA, 201 bp, Homo sapiens
aatgggttgtggggggctgagccagagagggagctggggtgagggatggctggggctgtgtgtgtgcgtgtgcgtgtgtgtgtgtgtgtgtgtgtgtgtgtgagagagagagagagagatgtcccctgcagctggactataagcctggccctcaggtaggggaggaatgggagagggtagacaatggtttcttttgtgact

SEQ ID NO: 528185 - DNA, 201 bp, Homo sapiens
tcttgtttagagcttttgagtattcccagaactttgttgaatctggcccaaggaattgtgagacaaaaatctactgagctgctccagagctaacctccttycttccctgaaggcaggtgggatcttgccaattcagggcccacccttagcctccagcaagactggccccacaagtacccgacccccaccccaaatctggag

SEQ ID NO: 528186 - DNA, 201 bp, Homo sapiens
atgtggctgttttgcgtagcatcgtgtgccacccctgcccctccccgatccctgtgtgcgcgccccctctgcaatgtatgccccttgccccttccccacamtaataatttatatatataaatatctatatgacgctcttaaaaaaacatcccaaccaaaaccaaccaaacaaaaacatcctcacaactccccaggaacatg

SEQ ID NO: 528187 - DNA, 201 bp, Homo sapiens
caatgggttgtggggggctgagccagagagggagctggggtgagggatggctggggctgtgtgtgtgcgtgtgcgtgtgtgtgtgtgtgtgtgtgtgtgtgtgagagagagagagagagatgtcccctgcagctggactataagcctggccctcaggtaggggaggaatgggagagggtagacaatggtttcttttgtgac

SEQ ID NO: 528188 - DNA, 201 bp, Homo sapiens; identical to SEQ ID NO: 323057

SEQ ID NO: 528189 - DNA, 201 bp, Homo sapiens
agcccggtgcccccagcccgcagcccctcgccccctcccaaggtggtagatgtacccagccatgccagtcagtctgccaggtgagcggccaggtggggcgsaggtgggcctggaaaggggacgacgacaaggcggcgacgagagagggagtagcagggaggggccttgcgctggtgtagtgttttagaaaagcacgcccct

SEQ ID NO: 528190 - DNA, 201 bp, Homo sapiens
ccaatgggttgtggggggctgagccagagagggagctggggtgagggatggctggggctgtgtgtgtgcgtgtgcgtgtgtgtgtgtgtgtgtgtgtgtgtgtgagagagagagagagagatgtcccctgcagctggactataagcctggccctcaggtaggggaggaatgggagagggtagacaatggtttcttttgtga

SEQ ID NO: 528191 - DNA, 201 bp, Homo sapiens
ttttctttttaaagtaaggtaatggcagtgcgcagtggctcacgcctgtaatcccagcactttgggaggctgaggcgggcggatcacgaggtcaggcgatygagaccatcctggctaacacggtgaaaccccgtctctagtaaaaatacaaaaaaattagccgggcgtggtggcgggcgcctgtagtcccagctactcagg

SEQ ID NO: 528192 - DNA, 201 bp, Homo sapiens; identical to SEQ ID NO: 323129

SEQ ID NO: 528193 - DNA, 201 bp, Homo sapiens
aaatacaaacaagtgcaaatgaatacagctggctatagggatttggataaagatagatacctgctgatagacagatacggatggattggctgtgagaaacygtgtaacccagtctacaccaagtaggaggataggcttaaaaactggtacatctgtgttgtttgctcacggatattttgagtctttaatcattcatgtgaa

SEQ ID NO: 528194 - DNA, 201 bp, Homo sapiens
ctatctacccatgagcttgccagcaacctccccccgctcccacatctgtcatttcctttaactgccctcgtttcccatctccattttttctttttttttttgagacggcgtctcgctctgtctcccaggctggagtgcagtggcgcgatctctgcttgctgaaacctttgcctcccaggttcaaggattctcctgcctcag

SEQ ID NO: 528195 - DNA, 201 bp, Homo sapiens
taatgcttaccattcagggttggttgtaaatattaaatgaaatcatgtatgtgaagggcttgatataaagaaggtattcaataaattcatacttcaatgtyatttcttttttctttttttttttttgagacagagtcttactctgtcacccaggctggagtgcagtggcatgatctcggctcactgcaacctctgcctccc

SEQ ID NO: 528196 - DNA, 201 bp, Homo sapiens; identical to SEQ ID NO: 323086

SEQ ID NO: 528197 - DNA, 201 bp, Homo sapiens
caccacgcctggctgggtttcaccatgttggctaggctggtcttgaactcctgaccttgtggtccatccacctaggcctcccaaagtgctggaattatagrcatgagccaccatgccccgctccatttctttatgttcctttgtaaggctccgtggaatgtgtgtgttcacaaatatcctttagggatcatgaagggtaaa

SEQ ID NO: 528198 - DNA, 201 bp, Homo sapiens
aggggaggaatgggagagggtagacaatggtttcttttgtgactctcaccatcccctatccccacatatgcctaaatttttcttttagtatccattgtagmccattccttagtgattaaaaaacaagggagaagagctcagcctggaagggatttggaaagggcttgagccaaggcccagtgggagactgaactgagtggt

SEQ ID NO: 528199 - DNA, 201 bp, Homo sapiens
agaactgagatcgaggggccgggcctcccctggaggggtcagcacgtccagcagtgatggcaaagctgagaagtccaggcagacagccaaggtattctgtyctcaggtcctcccacaggatgcccaaggcactggggctgagggtgtgtgtgtgttgtgggggaacttcctgtttggcagagggtaacggtggagctcggg

SEQ ID NO: 528200 - DNA, 201 bp, Homo sapiens; identical to SEQ ID NO: 157343

SEQ ID NO: 528201 - DNA, 201 bp, Homo sapiens
agaagccccttcatggcagggaaatgtaatggggtctgcggactggaataaaatatcataggtaaaagtgtagcagcctggagtcggggtggggactgggrgcaagggttggaaattgctctaaagtgtggaggccaaaacagcaggactggtaaagttgtgctggagtgagatgagatgtttgagaggtaattgagggca

SEQ ID NO: 528202 - DNA, 201 bp, Homo sapiens; identical to SEQ ID NO: 157344

SEQ ID NO: 528203 - DNA, 201 bp, Homo sapiens; identical to SEQ ID NO: 157355

SEQ ID NO: 528204 - DNA, 201 bp, Homo sapiens
ctggggtattggaccgattgtatgggcaccctgccacatgtctggctgtcttcaggtgagaagccccttcatggcagggaaatgtaatggggtctgcggastggaataaaatatcataggtaaaagtgtagcagcctggagtcggggtggggactgggagcaagggttggaaattgctctaaagtgtggaggccaaaacag

SEQ ID NO: 528205 - DNA, 201 bp, Homo sapiens; identical to SEQ ID NO: 157346

SEQ ID NO: 528206 - DNA, 201 bp, Homo sapiens
gaaagaaaaacaaaacattactggaaagggcgaatgtgccagaaaaggaatatcccacgttgctgggagcagcaacgtgggataacagctgaactgggatrggtggagttgatgacaggagttatgagtttttagaataagctgatgttccagtgacattaggtgacagctcagatggctttcctgccttcttgctggagc

SEQ ID NO: 528207 - DNA, 201 bp, Homo sapiens
gtcgtggaaaccaattaccgactgtatgcctacacgggtgaggcgggacagagggcccctggaagaggaggttgggggtgagggaatgccagtttatgttygtgtttacctggcagtctacagagctctctgacatttctcatgacacttgaaagaagggcttgagggagtctgggtgtgggggtggcctcctcatcctct

SEQ ID NO: 528208 - DNA, 201 bp, Homo sapiens
tgctttccccatcttttcctcgcattttttcaccatctttccctcaatctccaggagccaatgcgagactttggctccgattaagcgacggcccgagactyggggtgcgcgaggaggatcgacagagtggtgaggggacctaggagggcgggagtggcagaggtatgagagagagagaggtgagtgggaggcgaagagtga

SEQ ID NO: 528209 - DNA, 201 bp, Homo sapiens; identical to SEQ ID NO: 157332

SEQ ID NO: 528210 - DNA, 201 bp, Homo sapiens
gctttagatttgggaagcatggaggggagaggttaccgccgtacttagcagaagtgggctaagagatagaagataggaaggacgggcagatttggagcttrtagactggtctgaccaggatgggatggaagagagaggtgtgggctcaattttctttgtccctgtttagccaaagatgagacaagtcattgaaatacaaaa

SEQ ID NO: 528211 - DNA, 201 bp, Homo sapiens
aaaaggcaagctgagtagaatatagccagagataccaagaaaaaacgtgagtggacaagtggggatagtagtctttctctgcatatcaccatcattgtccyggtctttgtctctagtactgaacctggagagccgccctgcattacttccgctggcttccagttcctgttgctggacaccccggctcagctctggtacttt

SEQ ID NO: 528212 - DNA, 201 bp, Homo sapiens
gagtgacatgggaaaggagaccacagaaaaggtggggttattgtggggactgatggatctggaatcagttagaaaggtcaggggtgacactggcatggatrgtgaggttgcacttctgacgtttgcattcctcaggtgatggagagcaccccttcaaggggactgaaccgagtacacctacaatgcaggaatctgcaggaa

SEQ ID NO: 528213 - DNA, 201 bp, Homo sapiens; identical to SEQ ID NO: 157334

SEQ ID NO: 528214 - DNA, 201 bp, Homo sapiens; identical to SEQ ID NO: 157335

SEQ ID NO: 528215 - DNA, 201 bp, Homo sapiens
aagtgattctcctgcctcagcctcctgagtagctgggattacaggcacccaccacgacgccaggctaattttttgtatttttagtagagatggggtttcgycatgttggccaggctggtcttgaactcctgacctcaagtgatccgcccatctcggcctcccaaagtacagggattacaggtgtgagccactgcgcctggc

SEQ ID NO: 528216 - DNA, 201 bp, Homo sapiens
ggaggttgggggtgagggaatgccagtttatgttcgtgtttacctggcagtctacagagctctctgacatttctcatgacacttgaaagaagggcttgagrgagtctgggtgtgggggtggcctcctcatcctctttctatccctggctcagagtcggagctgcagattgccctcattgccctcttctctgagatgctcta

SEQ ID NO: 528217 - DNA, 201 bp, Homo sapiens
atctccttgggttcctaagaaatggtatctggggctagtcaagatcagaggacattagctggaaaaggcaagctgagtagaatatagccagagataccaaraaaaaacgtgagtggacaagtggggatagtagtctttctctgcatatcaccatcattgtcccggtctttgtctctagtactgaacctggagagccgccct

SEQ ID NO: 528218 - DNA, 201 bp, Homo sapiens
tggcagtctacagagctctctgacatttctcatgacacttgaaagaagggcttgagggagtctgggtgtgggggtggcctcctcatcctctttctatcccyggctcagagtcggagctgcagattgccctcattgccctcttctctgagatgctctatcggttccccaacatggtggtggcgcaggtgacccgggagagtg

SEQ ID NO: 528219 - DNA, 201 bp, Homo sapiens
gtctgggtgtgggggtggcctcctcatcctctttctatccctggctcagagtcggagctgcagattgccctcattgccctcttctctgagatgctctatcrgttccccaacatggtggtggcgcaggtgacccgggagagtgtgcagcaggcaatcgccagtggcatcacagcccagcaggtattcccacttgggagaggt

SEQ ID NO: 528220 - DNA, 201 bp, Homo sapiens
gtcagccaggacttggctcagctcctcagccaggctgggctcatgaagaggtgaggaagccggaggtacagcagctctctgctgtgccatctccttgggtycctaagaaatggtatctggggctagtcaagatcagaggacattagctggaaaaggcaagctgagtagaatatagccagagataccaagaaaaaacgtgag

SEQ ID NO: 528221 - DNA, 201 bp, Homo sapiens
cctggggtattggaccgattgtatgggcaccctgccacatgtctggctgtcttcaggtgagaagccccttcatggcagggaaatgtaatggggtctgcggmctggaataaaatatcataggtaaaagtgtagcagcctggagtcggggtggggactgggagcaagggttggaaattgctctaaagtgtggaggccaaaaca

SEQ ID NO: 528222 - DNA, 201 bp, Homo sapiens
gtgtgtctctgcttgtgcttcttcttcccatggcccttggggcatggtctccctgttctcttctgttcttcaggtggtcttgcacttcatggtgggctccsccagtgcagctgtcagccaggacttggctcagctcctcagccaggctgggctcatgaagaggtgaggaagccggaggtacagcagctctctgctgtgcca

SEQ ID NO: 528223 - DNA, 201 bp, Homo sapiens
ccagacaagcatgcccgggacgttccctcccttgacaagtacgccgaggagcgatgggaggtaagcacttgggagtgtgtgtgtctctgcttgtgcttctwcttcccatggcccttggggcatggtctccctgttctcttctgttcttcaggtggtcttgcacttcatggtgggctcccccagtgcagctgtcagccagga

SEQ ID NO: 528224 - DNA, 201 bp, Homo sapiens
gtattcccacttgggagaggtggagcaggaagacaggctgcacttgggctgcgggggacaggggtcacattatggaaggctagctctgagtctgttataayaggtggtggtgagttgtctgtgtttgaagagaaatgaaggctttgggtgtgagaataggtagacccttgaggggaaaaaaacatggagggaggaggtata

SEQ ID NO: 528225 - DNA, 201 bp, Homo sapiens
tgatgctcaaacaggtatagacaggctccaagatgtcagaggctggcagctggtgatgacatgatggaaaagaaaaaggggcatccaaatctggggaagaracagagggccgggttgtctggggcagtattctgagtccctacagtcaacccttgctccttgcagacacctgtgctgccccccaccatcaccgaccagatc

SEQ ID NO: 528226 - DNA, 201 bp, Homo sapiens
acaggtatagacaggctccaagatgtcagaggctggcagctggtgatgacatgatggaaaagaaaaaggggcatccaaatctggggaagaaacagagggcygggttgtctggggcagtattctgagtccctacagtcaacccttgctccttgcagacacctgtgctgccccccaccatcaccgaccagatccggctctggg

SEQ ID NO: 528227 - DNA, 201 bp, Homo sapiens
cccccgcgcccggagagtgcagcgtctattctcatcctcttcacttttccactcctccccttacctcccttctcttctgaattctccattctgggctcttkcctgtgaaatctttctttgctttccccatcttttcctcgcattttttcaccatctttccctcaatctccaggagccaatgcgagactttggctccgatta

SEQ ID NO: 528228 - DNA, 201 bp, Homo sapiens; identical to SEQ ID NO: 157341

SEQ ID NO: 528229 - DNA, 201 bp, Homo sapiens
atccaaatctggggaagaaacagagggccgggttgtctggggcagtattctgagtccctacagtcaacccttgctccttgcagacacctgtgctgcccccmaccatcaccgaccagatccggctctgggagctggaaagggacagactccggttcactgagggtgagtagcttctggtggccaagtcttggtcattggcca

SEQ ID NO: 528230 - DNA, 201 bp, Homo sapiens
cagcctggagtgcaatggcacaatctcagctcactgcaacctccgcctcccaggttcaagctattctcatgcctcagccacccgagtagctgggcttacakgcatgcgccaccatgcccagctaatttttgtatttttagtataaacagggtctcgccatgttggccaggttggtctctaacttctggcctcaagtgatcc

SEQ ID NO: 528231 - DNA, 201 bp, Homo sapiens
taggcgtgagccaccacacctgaccggtacttgttttttaaaaagtatgtggtttgaatcatggttataagtctttataatcagcttgattttacttttgtactgtcatattttatttacaaagcttgcaacttaagcttcatgtaggtctttataatgtgttttctcctcctaccagaaagcaataaaggagaaagagat

SEQ ID NO: 528232 - DNA, 201 bp, Homo sapiens
ataggcgtgagccaccacacctgaccggtacttgttttttaaaaagtatgtggtttgaatcatggttataagtctttataatcagcttgattttacttttgtactgtcatattttatttacaaagcttgcaacttaagcttcatgtaggtctttataatgtgttttctcctcctaccagaaagcaataaaggagaaagaga

SEQ ID NO: 528233 - DNA, 201 bp, Homo sapiens
atatacactgtactggggtcactatttatgaaagcaattggttaggacctctttttttcctctcagggaactaatgctctgaaaagggatctgggcacaamagtttcagtgagtgcttttgagcacacttttatttttatatagtaactaatggttaagattgatggtggcctggattagcaaagaggaagacagctttta

SEQ ID NO: 528234 - DNA, 201 bp, Homo sapiens
ggaattaagatacttggaatagctgtggaggaagaacctaaattgcaaagatctgctattgccagctctcaacccaagtcagtgaattgtcaacctgcatwtcctaaaaatgtcaaaatgctgcatctggttaaatgtcggggtaggggggaagctgaaggtgctcgcttcatttgccttgtttactcatcctgccctgta

SEQ ID NO: 528235 - DNA, 201 bp, Homo sapiens
agtgaattgtcaacctgcatatcctaaaaatgtcaaaatgctgcatctggttaaatgtcggggtaggggggaagctgaaggtgctcgcttcatttgccttktttactcatcctgccctgtaatgtctgtaatcctgaagatggaataaattgtaacatttagtttctatcattatttgcctctggaactcagtgcatttta

SEQ ID NO: 528236 - DNA, 201 bp, Homo sapiens
tcaggatgagcagagctgcctgacctcttgatttctgctgcaaaagacatatacactgtactggggtcactatttatgaaagcaattggttaggacctctttttttcctctcagggaactaatgctctgaaaagggatctgggcacaacagtttcagtgagtgcttttgagcacacttttatttttatatagtaactaatg

SEQ ID NO: 528237 - DNA, 201 bp, Homo sapiens
cctaagtctttcactaacacaaagtgatgattatttttcaaatttcacttaattttaacggttccctcacaactccttttccagtctccctcaggtcttayacttgatttattcattatggtacttctggtttttatttatttttgaggcagagtctcactctgtctcccagcctggagtgcaatggcacaatctcagctc

SEQ ID NO: 528238 - DNA, 201 bp, Homo sapiens
gtcaggatgagcagagctgcctgacctcttgatttctgctgcaaaagacatatacactgtactggggtcactatttatgaaagcaattggttaggacctctttttttcctctcagggaactaatgctctgaaaagggatctgggcacaacagtttcagtgagtgcttttgagcacacttttatttttatatagtaactaat

SEQ ID NO: 528239 - DNA, 201 bp, Homo sapiens
agtcaggatgagcagagctgcctgacctcttgatttctgctgcaaaagacatatacactgtactggggtcactatttatgaaagcaattggttaggacctctttttttcctctcagggaactaatgctctgaaaagggatctgggcacaacagtttcagtgagtgcttttgagcacacttttatttttatatagtaactaa

SEQ ID NO: 528240 - DNA, 201 bp, Homo sapiens
acatcataggcatttgttttacatacatattgttttggtaactgtttttctggcacttactcctaggtcctaaatacaagcatttacggaattttgtgccrtgtgactgtgtagtcttactgacatcttaacagactacaccattgtgattgatgagttttgtgtcatttgctacataggatcaagacttcaaatcccaaa

SEQ ID NO: 528241 - DNA, 201 bp, Homo sapiens
tttttataaaaattccctttagtatacgaagtcactttccatttttgaatatttattgtattttagattatgtgaattaagggtagatacacagccatttycagtagatagtcttcgtatttataccttttgacgtttctgcctcctctctttttccaatcccacgctcatttgtcaccttatttctattatttttccact

SEQ ID NO: 528242 - DNA, 201 bp, Homo sapiens; identical to SEQ ID NO: 325630

SEQ ID NO: 528243 - DNA, 201 bp, Homo sapiens
aatatttattgtattttagattatgtgaattaagggtagatacacagccattttcagtagatagtcttcgtatttataccttttgacgtttctgcctcctstctttttccaatcccacgctcatttgtcaccttatttctattatttttccacttcatccatcaaaataaccttcagtccgtgcttctttcccttcagcaa

SEQ ID NO: 528244 - DNA, 201 bp, Homo sapiens
ctgtgtaataatctattgtaagattgtatcacagtttattctccaatatatttggttaagtgctgttttccgctgttgtgactgttcaaatttctttgccygtctcccaatggcacaggtgcaagagcttcttcagcatgtactttccagcgtgtgtcattctttaaatggctgtattgactggcattcccacccgcgcta

SEQ ID NO: 528245 - DNA, 201 bp, Homo sapiens
cttcccttccagtgcagtgtctacttgctaatgatcacgtctcttaaccttagaagattgttctctgttattcgaatcagtattataggagaataagcttytctcttgcctctcacagaaagtactgaaatcccaccttatgtgatgaagtgtccgagcaatggtttgtgtagcaggcttcctgcagactgtatagactgc

SEQ ID NO: 528246 - DNA, 201 bp, Homo sapiens
acttcctctgtgattttgcaaaaccctactgtaagttttttttcaacttacaaaatgatagtcttttttttaagcccttaatgtatacccagaattttctrtacattatttgtatatgagcacctttagttttcacggccacgtgggaggcaggaatgaagtaatgttttacaagtgtggtgctcaccaggtcccacagct

SEQ ID NO: 528247 - DNA, 201 bp, Homo sapiens
tggccaagtgttgattattggagctgagtcatgggtactgttctctttactttttattgttaggtgtttagaaattttccataatatagtttcagtattaytagatcttagaatttaaaagatccttaaatcttttaaggatttattcctaacattaagattttagagatgaatgaaaaaatagactgaaaacatggatga

SEQ ID NO: 528248 - DNA, 201 bp, Homo sapiens
gatgaaacacagctggccaagtgttgattattggagctgagtcatgggtactgttctctttactttttattgttaggtgtttagaaattttccataatatwgtttcagtattattagatcttagaatttaaaagatccttaaatcttttaaggatttattcctaacattaagattttagagatgaatgaaaaaatagactg

SEQ ID NO: 528249 - DNA, 201 bp, Homo sapiens
cgaggctggcggattgcttgaggtcaggagttcaagaccagcctggccaacatggtgaaaccccatctctaccaaaaatacaaaagcctgccatcgtggtkcatgtctgtggttccagctgcgtggtaggctgcaatgggaagatcacttgagcccaggaggaggaggctgcagtgagctggcattgcaccactgcactcc

SEQ ID NO: 528250 - DNA, 201 bp, Homo sapiens
attgctgtgactgcaggaagtgggagtgtttctgttgttggctaattgaagttattaggctcagcttcagtcatgtgtaagttttgcagtgtaatacataygtagtctggtctgtatatatgaaaatttgaattaaactgcagaatgtttatgtctagttatggtttaaattttcttagtagtatataaaaggtaagagta

SEQ ID NO: 528251 - DNA, 201 bp, Homo sapiens
gctgcctacacttgaagttttgagttcgtgcctgagaccctgaggcctgcagcattgcagccatagggcaggatttctcagcctcatcactgctgacgttytgggctgaatgagtttttgtcttggggctgtgctgtgcatagcagggtgttgagcagcatcactggcctctacctactacttgtcagtagcaaacccccc

SEQ ID NO: 528252 - DNA, 201 bp, Homo sapiens
gcgtgctgctcttcctctcgcagttctgcattctgtcgggcggtggtgagtcaaaggctgggttcagcgccgggtggggctgagtggcagcagggccccgrgagctgcgaggaggccgggcccacgggcggacgctgacgcggggaggaggccgagtgccgggctccgggccgcttgtcgctgcatctggagtctggcgcc

SEQ ID NO: 528253 - DNA, 201 bp, Homo sapiens
attaaaggctccctcaggactgtggaaatggaaggattacagcgggactgatggagacttgaaatctagatctggttttgctactgggatcttgaacaaattatttatcctctttggaccttggtcctcatctttaaagcggtggggttggtctgacgacctaaagtcatttctgctttgtgattctaagtgtccaccttc

SEQ ID NO: 528254 - DNA, 201 bp, Homo sapiens
tcactgaaaataggcagatgtaaacgtattattttgcagatccaactgtttgcctaaatcaagtgatgccttacccatatttgaatgttttccataaaaartggtttttgcattgataagaaaatgaatagtacttgcttcatcagcgcatatgccaaagttggaaccatacagagagaattaggatggctcttctgcaaa

SEQ ID NO: 528255 - DNA, 201 bp, Homo sapiens
ttaaaggctccctcaggactgtggaaatggaaggattacagcgggactgatggagacttgaaatctagatctggttttgctactgggatcttgaacaaattatttatcctctttggaccttggtcctcatctttaaagcggtggggttggtctgacgacctaaagtcatttctgctttgtgattctaagtgtccaccttcc

SEQ ID NO: 528256 - DNA, 201 bp, Homo sapiens
tacttattctaaataaattcattgtaaactttaagttagaagaacaattcagacttgattattgggaagaaattctgaagaatttttatattcttttatgrtttcccttttgagtatgtaagcagaaataaattaaaaaacccaatagacctttccatatcagctcactactgttttagttataatgataactgtcaagcc

SEQ ID NO: 528257 - DNA, 201 bp, Homo sapiens
aagttgatgccctgaggatgtcagtggcttcatttctgaattagtgaattcagatgaaaagaacacgggattggaaatggagagatttgggttctagttcyagttttgccacagacttcctctgtgattttgcaaaaccctactgtaagttttttttcaacttacaaaatgatagtcttttttttaagcccttaatgtata

SEQ ID NO: 528258 - DNA, 201 bp, Homo sapiens
taaaggctccctcaggactgtggaaatggaaggattacagcgggactgatggagacttgaaatctagatctggttttgctactgggatcttgaacaaattatttatcctctttggaccttggtcctcatctttaaagcggtggggttggtctgacgacctaaagtcatttctgctttgtgattctaagtgtccaccttcca

SEQ ID NO: 528259 - DNA, 201 bp, Homo sapiens
aaaggctccctcaggactgtggaaatggaaggattacagcgggactgatggagacttgaaatctagatctggttttgctactgggatcttgaacaaattatttatcctctttggaccttggtcctcatctttaaagcggtggggttggtctgacgacctaaagtcatttctgctttgtgattctaagtgtccaccttccag

SEQ ID NO: 528260 - DNA, 201 bp, Homo sapiens
cccgccccccggcccggaagtgcgcaggcgctggcaagatggcgggaggggtgcgcccgctgaggggcctccgcgccttgtgtcgcgtgctgctcttcctytcgcagttctgcattctgtcgggcggtggtgagtcaaaggctgggttcagcgccgggtggggctgagtggcagcagggccccgggagctgcgaggaggcc

SEQ ID NO: 528261 - DNA, 201 bp, Homo sapiens
ccagctgcatgacggtgtcctgtcctcggcagcgctaccctgccaactgcacggtgcgggaccacgtccactgcttgggtaggtcagagttcaaggacatytgtcaacaaaatgtttttctccaagtttattgaagggactttaaccagaaatttgcgagtcaagttacttaattagaaacatttatcagcagctctttag

SEQ ID NO: 528262 - DNA, 201 bp, Homo sapiens
gggctccgggccgcttgtcgctgcatctggagtctggcgccctggccgcccggcccgaggccgcccctccgctccggcgacaccgagcccgccatcgcggytgcggagccctggcacggagatggagcgcttgggggctgggccggggaggcggaactggagcgcgatgtcatccttcggtccctcgttgccggctgacct

SEQ ID NO: 528263 - DNA, 201 bp, Homo sapiens
ttctttaaatggctgtattgactggcattcccacccgcgctatgtaactgttcctgatgagccatattctctccaagagtggttattcttaaatttggtcktaaagttgtctagacttcttttatattttggatattacctgtgctgtccctgaaaccctctcccagattttgattttttttttttttgcattattgtata

SEQ ID NO: 528264 - DNA, 201 bp, Homo sapiens
ctaaaaattggagatttctgcatgacctaaaaaaaaaagcataaaggcaaaagacatggcaaactaggaaaaagcgtttctagaatatgtgacaaataatmcagtaatatcagtaatatataaacacttcctaaaacccacacggaaaagatgacagtcttgtagaaaaacagtgttaggacatgagcagatggttcatag

SEQ ID NO: 528265 - DNA, 201 bp, Homo sapiens
gttagaagaacaattcagacttgattattgggaagaaattctgaagaatttttatattcttttatgatttcccttttgagtatgtaagcagaaataaattwaaaaacccaatagacctttccatatcagctcactactgttttagttataatgataactgtcaagccagttgatgtctgctggaaatgcacttgacagaaa

SEQ ID NO: 528266 - DNA, 201 bp, Homo sapiens
gcaggcgctggctcagtcaataaaggatccgggcccaacacgcacattcacagtagttcccagggcagcaggtactagacgttttctattctagtaaatayatgtagttatctctagtagtttctctttgtttttataaaaattccctttagtatacgaagtcactttccatttttgaatatttattgtattttagattat

SEQ ID NO: 528267 - DNA, 201 bp, Homo sapiens
tcgcagcgcgcctgcgtccagttcacgctccggctcccaggcgcgccccgccccccggcccggaagtgcgcaggcgctggcaagatggcgggaggggtgckcccgctgaggggcctccgcgccttgtgtcgcgtgctgctcttcctctcgcagttctgcattctgtcgggcggtggtgagtcaaaggctgggttcagcgcc

SEQ ID NO: 528268 - DNA, 201 bp, Homo sapiens; identical to SEQ ID NO: 325682

SEQ ID NO: 528269 - DNA, 201 bp, Homo sapiens; identical to SEQ ID NO: 325681

SEQ ID NO: 528270 - DNA, 201 bp, Homo sapiens
tccaagggcgtgaggggcgcgtggaaatggaacaacctcccaggctcgcatcctcctcggggacctcccagaaggctcaaccggaagaaaacccgcgaccmgcgcgaggacagcgaaagcgcaaacgccggccgccaggagtcgcagcgcgcctgcgtccagttcacgctccggctcccaggcgcgccccgccccccggcc

SEQ ID NO: 528271 - DNA, 201 bp, Homo sapiens
cgcctgcgtccagttcacgctccggctcccaggcgcgccccgccccccggcccggaagtgcgcaggcgctggcaagatggcgggaggggtgcgcccgctgmggggcctccgcgccttgtgtcgcgtgctgctcttcctctcgcagttctgcattctgtcgggcggtggtgagtcaaaggctgggttcagcgccgggtgggg

SEQ ID NO: 528272 - DNA, 201 bp, Homo sapiens
atatattcttcaccctgcttaggctctgacaccacacactaggctgtcctatatagatactttcttcatgttgctcagactctgcatctagaatatctctkgcccctctcatccactcatttatgtcctcctcaccctgcttaagctctgaaatcccttcccaggcctccccctattctctataggtatccttccccctcc

SEQ ID NO: 528273 - DNA, 201 bp, Homo sapiens
tttggtttactgagaaggatactcaaaagaataagctacatataccttcatttggtttgtaggccattttgtatgggggtatgtagggtttttgggggtttgttttttgttttcgctaccctcacttcttttactgtgcagttaaaaaataacagtagttaatcttatagctttatataaattttggaatttatatgtgga

SEQ ID NO: 528274 - DNA, 201 bp, Homo sapiens
caccgtctgttgttattttcctctgtttaaaaaatatatatctttagatttagattatgtgtttttcatcttgtgcatttaaattttaaaaattatttttycttaagccttttgtaaaggacctttaatcctaaaattgaaccgtaacagcaggaaatatattggtatggggtagatctatgttgtaattatttgtatatt

SEQ ID NO: 528275 - DNA, 201 bp, Homo sapiens
attgtagagataatgctcataatgcagtaaatatcagaataatatctacaatatcatttgtggatggtcccaggtcccagtgctctagttactttacttctttttttttttttgagatggagtcttgctctgtctctcaggctagagcagtgtgcgatctcagctcactgcagcctccacctcccaggttcaagcgattct

SEQ ID NO: 528276 - DNA, 201 bp, Homo sapiens
gtccagcaagaccttgctcttttgaagaggccatgaaaggtaccaagtaaattcttctcaaaaatcgtaattgggtgctcctgtatgttttctctagcacmccttactattttgttttctcttaggtacttataatactttgcagggtatcttcatattgtaaaataaatatgtgtttaactttactaaatgtagagactt

SEQ ID NO: 528277 - DNA, 201 bp, Homo sapiens
accaagtaaattcttctcaaaaatcgtaattgggtgctcctgtatgttttctctagcacaccttactattttgttttctcttaggtacttataatactttkcagggtatcttcatattgtaaaataaatatgtgtttaactttactaaatgtagagacttgttttccaatttgatatttttcttgctgaatatgtttttat

SEQ ID NO: 528278 - DNA, 201 bp, Homo sapiens
cacctgtaatcccagcactttgggaggccaagccagtggatcacctgaggtcaggagtttgagacctacctggccaacatggcaaaaccctgtctctactraaaataaaaaaattagctgggcgtggtggtgtgtgcttgtaatcctagctagttgggaggctgagacaggagaatcgcttgaatccaggaggcgaaggtt

SEQ ID NO: 528279 - DNA, 201 bp, Homo sapiens
atggtgaaaccctatctctacaaaaaaatacaaaaattagccaggtatggtggtgcatacctgtagtcctagctattcaggaggctgaggtgggatgatcrcttgagcccaggaggtcgaggctgcagtgggttgtgatcgtgcccctacactccagcctgggcaacagagcaagactgtctcaacaaagaaaacaaaaaa

SEQ ID NO: 528280 - DNA, 201 bp, Homo sapiens
aaaattgtttgccattagtaagttcaaattcgaaggctaggattcctttttgaagtgcctgggaaaaaaattcagctgcagagaaaaggcaccatttgttrtacattctataatgaaaactattcattttggcaaatgaaaaactaagatagaaatgaaactgaatgaatcattctagaaatagagaaatataagattata

SEQ ID NO: 528281 - DNA, 201 bp, Homo sapiens
gctcacgggtgtaatcccagcactttgggaggccgaggcaggtgggtcgcctgatgctaggagttcaaaaccagcctggccaacataatgaaacgtcatcyccactaaaaatacacaaaattagctgggcgtggtggtacgcctgtaattccagttactcaggaggctgaggcatgagaattgcttgaactggggaggcag

SEQ ID NO: 528282 - DNA, 201 bp, Homo sapiens
gcctttgattgctttcctgggttaacatatttcagaatttttgccacctaatgtagtatactcttcatgaaattaaaccagaaacccactaacgagaaagrtaattcacctacagatgctgtgagctaaaatgttgtgagttgatcttggttattctttatggccattcccttttttccaagaaaactagaccatttctag

SEQ ID NO: 528283 - DNA, 201 bp, Homo sapiens
acaacaaaaggaaagctgtgtattgtgaagtgaaatcagagtcaccttgaaatgggcatgaggtattcatcagattgcctttggaataaaagaaataatgyccgtggaatatctcagtaacacctcctcattgctaacccttttgagggcagaaattatagtttttatttatgttagtagctccaattaatatattaataa

SEQ ID NO: 528284 - DNA, 201 bp, Homo sapiens
atctccacttgttggaccactgtcggtttttaagttcataacttgatgtgaagtgatccatataataaatttttcttttggaagagctttgatatatagtrctttgagttctatgccatgtcacttaataaatctcaagtatgtaacaagtattttctacaaaatttcattgagtgctatttatactataagagagggcac

SEQ ID NO: 528285 - DNA, 201 bp, Homo sapiens
aacataaggaataaagccaagaagaaaacagggacagaactaatgggaaattcatttttcagttcaataagattatataataaaataaaaaataaaaaaawtttttttttttttttgaaacagggtctcacccaggctggagtgcagtggcatgatcatggctcactgtagccttgacctcaagcagtttacccacctgag

SEQ ID NO: 528286 - DNA, 201 bp, Homo sapiens
atggcgtgatctcggctcactgcaacctccgcctcctaggctgaagtgattctcctgcctcggcctcccgagtagctgggattacaggtgaccaccaccamgcctggctaactttttgtatttttagtagagacagggtttcaccattttggccaggctggtctcgaactcctgacctcaagtgatcctcccgcctcggcc

SEQ ID NO: 528287 - DNA, 201 bp, Homo sapiens
gtttcatctccttcctttgggcagatattccagtctttcatgatctgtgatgaattatgacataagatttaatcccttttaagcctatgtcatttgaaaaktcatatctttgttcaagttgtgatataaccaccttcttccagattgaacctatacattttttgggtactgttgtttagaagtcatctattttattaagtc

SEQ ID NO: 528288 - DNA, 201 bp, Homo sapiens
catatctgacaaacttaatgtctggcctggagacattttggactgtttttggtgggactagacttaaataaaattggaacaaggccagatgtggtgactcrcacctgtaatcccagcactttgggaggccaagccagtggatcacctgaggtcaggagtttgagacctacctggccaacatggcaaaaccctgtctctact

SEQ ID NO: 528289 - DNA, 201 bp, Homo sapiens
taatcccagcactttgggaggccaagccagtggatcacctgaggtcaggagtttgagacctacctggccaacatggcaaaaccctgtctctactaaaaatraaaaaattagctgggcgtggtggtgtgtgcttgtaatcctagctagttgggaggctgagacaggagaatcgcttgaatccaggaggcgaaggttgtagtg

SEQ ID NO: 528290 - DNA, 201 bp, Homo sapiens
ccagcactttgggaggccaagccagtggatcacctgaggtcaggagtttgagacctacctggccaacatggcaaaaccctgtctctactaaaaataaaaarattagctgggcgtggtggtgtgtgcttgtaatcctagctagttgggaggctgagacaggagaatcgcttgaatccaggaggcgaaggttgtagtgagccc

SEQ ID NO: 528291 - DNA, 201 bp, Homo sapiens
ggataaatttttttccatcacataaatcataaatgcatttgggtagatctttttctctttttatcgaatctgtttctttcaaatttcctttttgtttgggaaaaaaaaaaaaagaaaaaaatagactcgaggctgggtgtggtggctcacgcctgtaatcccagcactttgggaggccgaggtgggtggatcacctgaggc

SEQ ID NO: 528292 - DNA, 201 bp, Homo sapiens
cttgtaatcctagctagttgggaggctgagacaggagaatcgcttgaatccaggaggcgaaggttgtagtgagcccagattgagccactgcactccagctygggcaatagagcaagactctgaaaaaaaaaaaaaaaaaaaggattggaacataaataaaattaacctttgtgacctttgtgcatatggccgtagaaggac

SEQ ID NO: 528293 - DNA, 201 bp, Homo sapiens
aaatttgtaaaatagccgaacattttctgacaagtagtaattattgaataaacattgacctccttccccatgtgtttctaacctcctttgttagtaaagtttttttttttttttttttttttgtcatccaggctggagtgcaatggtgcgatctcagctcactgaaacctccacctcctgggttcaagcgattctcctgcc

SEQ ID NO: 528294 - DNA, 201 bp, Homo sapiens
tgaggcaggagaatcacttgaacccaggaggcagagattgcagtaagctgagattgcaccactgcactccagtttgggcaacagagagagactcggtctcaaaaaaaaaaaaaaaaaaagtaaaaacattgaagtagaattggcaggaatgcctttattttttaatctaaaatatttaaaatgtattgtagcgtattgaag

SEQ ID NO: 528295 - DNA, 201 bp, Homo sapiens
tcaataataataggtttgttgttttttttacattgttaaatgttccttacccctaaaggtcaatgttaagtacaacattctgaaaatacaatttggctacraagagtattcatcttctttgaagctcagtggttgatatttgtgctaataatgcaatttcctgattactgttacaagttatagctacatatgggagagact

SEQ ID NO: 528296 - DNA, 201 bp, Homo sapiens
ccttttcttctttatattgttacatttaagtgttcttgctttcagcaactcacattaatgcttggagcttatctctttctctctctctctctctctctctstgtgtgtgtgtgtatgtgtgtgtgtgtgtgtgtgtgtttccttattgtcattccattatatatccacaccaacatgggtgacgataattcaaagtcatat

SEQ ID NO: 528297 - DNA, 201 bp, Homo sapiens
agcaagactgtctcaacaaagaaaacaaaaaagaaagtaaagaaagtaaataaaatcctgtttcatcttttattaaattgcagattctgggatattcataytccatgtagacattatttaatatctgccagtctttgaatctcaactatttttgagtatttatagtttccatcaattcttaaaagaagctgtatgtacaat

SEQ ID NO: 528298 - DNA, 201 bp, Homo sapiens
cttttctgggaatgcttggaaatgactaattagcattagaaatttaaaatgttctgatatcattattttatgtatttatattttaataggatattaaggatttttttcatggtaaatttatggatatataagtaggtaatttggcttacttataatttaaggaaataaaattactagagtactctcggtagagatagcaaa

SEQ ID NO: 528299 - DNA, 201 bp, Homo sapiens
tctttccatgtactttttagtaacattactatcatacctctagtggagaggtatgatacctcaactttatacccttctttgggaaagttagagtgtttcartccacaaagttttgctttgatttgattaatttattttaataattggagaaatggagataaaatcctgattagtaacatgctattagtgattgggctatta

SEQ ID NO: 528300 - DNA, 201 bp, Homo sapiens
actttgaaaaaaaaaaaaaaaaaaaaggctcctgagctactttgaggaagatcttgaattcatagtggtactggtccacaattttgatttttctctatcamaacttagaagctgtggttcaggaatgttgaagatgagtgcttaggatcattcaggattgggtatgattaacaggatgaatatgatcaaaaaataatgggg

SEQ ID NO: 528301 - DNA, 201 bp, Homo sapiens
ttttgatcactagtgacagtttacctaatttttaattcagatcagttgtagaatttctagattcagattgaggaagtttgaagaattagtagcaaaatagrttcatttggtttttaaaaggtttcaaaattagttttacttaaatgtgctctccaaagcaagtagagtaaaagtattttgataaaatatgcatctgatttg

SEQ ID NO: 528302 - DNA, 201 bp, Homo sapiens
ctacttttcttatacacatattaataatttatgttaatggagttattatatcgcacttgccctaattctactacatggatacttaagcagtgcacttaccktggcattttggtcaactaaaatttttaatgaaatttaggtgagttgattacacattatcgcacaaattattagcagcattaatagaaaaaatatatcaga

SEQ ID NO: 528303 - DNA, 201 bp, Homo sapiens
ctgtctcccatcaaaggaagccgctgtcctaaactttatcatctttctcttatcacatgtgtttttctttttttactataatacagatatcacattctttrttgataaaacctacctcataggattgattgttttgaggttaaatgagaaaaatacatatactgagcctggccctgcaaagtgctcaaaaaatagtagctg

SEQ ID NO: 528304 - DNA, 201 bp, Homo sapiens
ggacctgcagccagtacattttttccagtagagatgccaagtatgatgactgtcaagcttgaagtgtttttaacaaaatgaatgctgtctctcttcaatgyagaacgatgttggcacattgtagatgccaggcattttgttttagaatatttaatgtgaaattataaccttggaatttaccagctgattgagatagttaat

SEQ ID NO: 528305 - DNA, 201 bp, Homo sapiens
tgggaggccaaggtgggcggatcacctgaggtcgggagttcgagaccactctgaccaacacatggagaaaacctgtctctactaaaaatacaaaattagcygggcgtggtggcgaatgcctgtaatcccagctatttgggaggctgaggcaagagaattgcttggaccggggaggtggaggttgcggtgagctgagatcgt

SEQ ID NO: 528306 - DNA, 201 bp, Homo sapiens
atatggagatttgcgttctgtttgggttcccacctcccaccctaggcagaccccctgtgcatcagccttctttcttgcgtggatgctgtcctcatcccacytcttgggcactaacatcccaacctgagccatcctcccctgcacagatattcatatattcttcaccctgcttaggctctgacaccacacactaggctgtcc

SEQ ID NO: 528307 - DNA, 201 bp, Homo sapiens
gccctccttattcagctcaggctccaaggcctcacatgccctcctcaccctgcttggattgtaactccccgtgctgggctccccctctcttgcccagtgawcacactatttatacctgccgggtaacctctgataaccaaccttaggcaatccttctatgtggacatcctcattactacttaggttatgataccctctgtt

SEQ ID NO: 528308 - DNA, 201 bp, Homo sapiens
gcagtggcgcgacctcggctcactgcaacctcctcctcctgggttcaagagattcttctgcctcagcctcccaagtagctgggattacaggcacgtgccamcatgcctggctaatttttgtattttactagagacgacgttttgccatgttggccaggctgctctcgaacttgtgacctcaggtgatctgcctgccttggc

SEQ ID NO: 528309 - DNA, 201 bp, Homo sapiens
tgaatgcactttttggaacaatcttgaacctacaaaagagttgtgaatatagtgcaaataatttattgctttttttctgaatcatttgagaataagttgcygacatgtttcctcattgcctcccaatactttggtatttccaacaaataagaatattcccttatgtaaccacaatatagctatcaaaataaaaattaacat

SEQ ID NO: 528310 - DNA, 201 bp, Homo sapiens
cctctgtgctgccttctcagatcctccacagataacattaaaggttccctcttctccagttgtgtaacacttcatactttattaaagcacatactgcattrttttaaacttgactcattttattatctctagactgtgaactgcttaataagggtgactttcttttgtattgtgtccctagatcagtgcaggtgctaaata

SEQ ID NO: 528311 - DNA, 201 bp, Homo sapiens
gtgcaatggcacaatttctgctcactgcaagctctgcctcctgggttcacgccattctcctgcctcagcctcccaagtagctgggactacaggtgcctgcyaccacgcccggctaattttttgttatgtaaatataattgttttttcctctaggttgaagaatttaggtaatctggccaggtgtggtggctcacgcctgta

SEQ ID NO: 528312 - DNA, 201 bp, Homo sapiens
ttttgctaagtgatcacatgctccgcccacttggagattggagaatttagaggatagaaatttacctcaactagaatttctgctaaataaataattaaatratactttgtgacaagatattctaattaaagaatttaagatacgaggtttttaggatgagtaaatgtagataaatacattaatcttttttttaatagcagc

SEQ ID NO: 528313 - DNA, 201 bp, Homo sapiens
ttttgccagcaagctgaatagttgtttttactattattgccagttctgtttcttcctttgtcttaatggctttttttttttatcaaaaaactctttttgayactttctccatgttgtgctttgatttctcagaacattggaaaaccaaaaaggaactggagtaaagaagagccctatgttgtgtggacaatatcctgttaa

SEQ ID NO: 528314 - DNA, 201 bp, Homo sapiens
gtagactcctttggaaaaatcattttaggttggaacctataatattgcctagaagagagaacccatccatgttgaaatgccagattagagggaagtttatraagaaaagaccatgtagaatgatttgaatgtttaccactgtctagttttggaaagaaagaccagggcattacatgcagggtccttcttggtgttggaccc

SEQ ID NO: 528315 - DNA, 201 bp, Homo sapiens
atattttattttgccagcaagctgaatagttgtttttactattattgccagttctgtttcttcctttgtcttaatggctttttttttttatcaaaaaactstttttgatactttctccatgttgtgctttgatttctcagaacattggaaaaccaaaaaggaactggagtaaagaagagccctatgttgtgtggacaatat

SEQ ID NO: 528316 - DNA, 201 bp, Homo sapiens
attcacaggcccaactttttcatcctcaaaatcctattgccgatgctcagaacctttcccaggaaactcaaggttctctctttcatagtccaaatcctatygtccacagtcagacttctacaacctcctctgaacaaatgcagcctccaatgtttcactctcaaagtaccattgctgtgttacagggctcttcagttcctc

SEQ ID NO: 528317 - DNA, 201 bp, Homo sapiens
cacgtgtacaatatcaagtctacccttcttcactacatactaccttaacccacacccagtccttcaatcccaggacaggtaacaggcaagtgagaaatctrtgttatgctttgtgtaaatatttgtctagctagatattttggtagtttggtcattacgtttaacctaattgccctgactttaagttatgttttgtctagt

SEQ ID NO: 528318 - DNA, 201 bp, Homo sapiens
ggtttgttttttgttttcgctaccctcacttcttttactgtgcagttaaaaaataacagtagttaatcttatagctttatataaattttggaatttatatrtggaatgcatacatggaatttttaaatcttattttgactgaagtacaatgttaaaggttatagtgacattagctattctttcctgttagtctcagtttat

SEQ ID NO: 528319 - DNA, 201 bp, Homo sapiens
gtgtcggggaaaggggcttatttagacacaatttctcccctcttcatggggccaagtgtcagaatctgggaggtggagttcagagtcaccaattttgttaycccatttttttttttaagagacatgttctagctctgtcatctaggctggagtgcgaggtgcgatcatagctcactgcaaccttcaactactgggctcaag

SEQ ID NO: 528320 - DNA, 201 bp, Homo sapiens
tgacattagctattctttcctgttagtctcagtttattgcgctcaatcttcctcccttcctcctaccactcacatacgttcattttcttttctgtcaaacrtactttgttttatttttgcatcatatagtaaacttttttacaaaacctttttaaagatactttgctcatgtatcttcctttaggcaatattttattttgc

SEQ ID NO: 528321 - DNA, 201 bp, Homo sapiens
gcctcctccagctgttgttgctgctggtatgcatttcattttactttattaaagaaaactagggccaatataaatctggccaacatgaacagtgctggcaraattcatactaaaaagagtgtgatttgagggttttaaaaagaggcattaaaatatgtacttttaaccttaaactttttcaatattattttcttaatgtaa

SEQ ID NO: 528322 - DNA, 201 bp, Homo sapiens
tgttagttgaacagtattttaagttaggagtagaggtggactgcctttcattttatacttgaatgaaattatgattgaaactctggatcaatcaggaaacrtgtctgccaccatttataaggttgttaatagtcacgtgtacaatatcaagtctacccttcttcactacatactaccttaacccacacccagtccttcaat

SEQ ID NO: 528323 - DNA, 201 bp, Homo sapiens
cacccgcctcggcttcccaaagtgctgggattacaggcatgaaccaccgtgaccggccgtctacttaaggcttttaacaacattttaacaaactgaaaatktttagtcagggcatattatattctgacagatgctgaatttgccacatgatttgaagatgaacatttcaagcattaggtaacaacatttttccttctttct

SEQ ID NO: 528324 - DNA, 201 bp, Homo sapiens
actaactactcctgaaaatggaggtagtaggaggtgggaaataatttttcattttgcttgggaaatttggtttgtaaacctaaaatagcccttatttctgrggaaaaaaaaaaagatgtttaaagtccagtctaaaagagaattgtgtccatgtgtcaacttgtcatattcaagttttctaattaatttagttttctttta

SEQ ID NO: 528325 - DNA, 201 bp, Homo sapiens
aaataacaatgaaaacttgaaaacaaggatcaagacctgacttaggaattcgtatttagagcagacaggaccaaacccctagaaattgagactaacagaargccaaatttataagcaagttagaaggcacatggagaagaggtagtatgtacaggtgtagaactgagacagagagagaagagagaaacaggaacaagctaa

SEQ ID NO: 528326 - DNA, 201 bp, Homo sapiens
cctaattaagaaatgggtttgacagtccctttgtacacactgctatgcaaaccccaaagggttggcggctgtccgggcgatgacactccggtcccctgcgmgaccccgggccagccaggcccgtccgccgccggcctctggggtccgtccccggctcgcgcagacctctcgcttctctcggctctgtctcctgcgctcagc

SEQ ID NO: 528327 - DNA, 201 bp, Homo sapiens
ctttaaaaaattccatgtttaaccatatgaccctgcttgcttactcatattctccctccctctccccttcctttctctctcttccagaagtcatttgcctsgtttgaaatattttgtagggattgcttattatattattttagctgatgaacctcaggacaacgtctacacacacacacatacatacacgcacacaaaatc

SEQ ID NO: 528328 - DNA, 201 bp, Homo sapiens
cagtccctttgtacacactgctatgcaaaccccaaagggttggcggctgtccgggcgatgacactccggtcccctgcgagaccccgggccagccaggcccstccgccgccggcctctggggtccgtccccggctcgcgcagacctctcgcttctctcggctctgtctcctgcgctcagctctgctcggggccggccgcctc

SEQ ID NO: 528329 - DNA, 201 bp, Homo sapiens
agccaggtggattcacatgatccaattttttaattgtcttctatgtcccactccgaataacccggatgccccagcacaatcagagagatcgttttttttawaaaaaatttcagcctccaaaggtaggaggggagtgttaggggagaaagtactttaattaaaaatcaataactcgaggtttttgggatacggtttgccatt

SEQ ID NO: 528330 - DNA, 201 bp, Homo sapiens
cagccaggtggattcacatgatccaattttttaattgtcttctatgtcccactccgaataacccggatgccccagcacaatcagagagatcgttttttttwaaaaaaatttcagcctccaaaggtaggaggggagtgttaggggagaaagtactttaattaaaaatcaataactcgaggtttttgggatacggtttgccat

SEQ ID NO: 528331 - DNA, 201 bp, Homo sapiens
tcctgtggcttatctccctgcactcttgaggtcttttcatctcttcctggaatgaccagtaacagtaaagcagtagagaaggggatttgggtgatcagctstttggacatagagtgcccaactgagaagaaacaaacaaataaaaaattaagttgccctattaaattaccaatttttttcttctctctcactgtcctgtgc

SEQ ID NO: 528332 - DNA, 201 bp, Homo sapiens
ttaaatttttgcaacggaaacttttggctccacgaacagaaaagcaagagcaaaaactcagttaaatgcgttcttcctccatctttgcctagtccaaaagraaaaaaaaagaaacagaaaaaagaaaaactgtttggaagagtagcgttgaggtttgctttttacctgtttttcctctagaacagccaggtggattcacat

SEQ ID NO: 528333 - DNA, 201 bp, Homo sapiens
gaggtaggaggatcagtttaggcccgggagcttgaggctgcagtgagctgtgatcgtgtcactgggtgacagggcgaaatcctgtctcaaaaaaaaaaaargcaaaactgtagttctaggacagatttgatataaaaaacaaaagtaaagcaggctatttgtttagtaacatcaattgctagacctctctcctgtttatgt

SEQ ID NO: 528334 - DNA, 201 bp, Homo sapiens
tagctgagcttttgtatttaaacacaagattatgcatgtgttaagggaaagaaacctagcatatgataaaatctgtaaaatattagaatcagtcatagatstaaagctgcagtaaacaataaagaacatctagtgaagtccagttttgcttaaatagttatactggatggtaagcttcttaagggcattgactataccttg

SEQ ID NO: 528335 - DNA, 201 bp, Homo sapiens
gcagtggaagtgttgacttggtccaacaagttttagaggcacagcagcagttatcttcagttttattttctgctccagatggtaatgagaatgttcaagarcagcttagtgcagatatttttcaacaagtcagtcaaattcagagtggtgtaagccctggaatgttttcctcaacagagccaacagtccataccagaccag

SEQ ID NO: 528336 - DNA, 201 bp, Homo sapiens
aaaatggtgcagctgttgtgaaaaacaggtggttcccccaaaaaagttaaacatagaattatatgatccagcaatttcacttataggtatatacccccaakaattgaaagcagggactcaaacagatactaatgcactaatgttcctagcagcattatttacaatagccaaaagaagatggagacaacccaggtgtctttc

SEQ ID NO: 528337 - DNA, 201 bp, Homo sapiens
cctagttacatttctaacaaagtaattttgagaacacaggtaaaagggatgtgatctgaaaactgtttggtgtgtagaatggggagagaaaaaaggaagcmaattaaattgaaggaggaaatatggtaaatttaatttttgagtttattattggaagaaaacacgccattttgtgcagtataagaatataagcttatcaga

SEQ ID NO: 528338 - DNA, 201 bp, Homo sapiens
gttcttagagcaaattaattcttaggaggagaaaaagattaatctgatattttcatttataatgtactactaaattgaagttgactagaagattattattraattaacaagatggaacatatctgacaaacttaatgtctggcctggagacattttggactgtttttggtgggactagacttaaataaaattggaacaagg

SEQ ID NO: 528339 - DNA, 201 bp, Homo sapiens
tgacctccttccccatgtgtttctaacctcctttgttagtaaagtttttttttttttttttttttttgtcatccaggctggagtgcaatggtgcgatctcrgctcactgaaacctccacctcctgggttcaagcgattctcctgcctcagcctcccaagtagctgggattacaggcacctgtcaccatgcctggctaattc

SEQ ID NO: 528340 - DNA, 201 bp, Homo sapiens
attttttattattgtttaatcatatcttaaaaaaaacaaacgtagggctgggcacggtggctcacgcctgtaatcccagcactttggaaggttgtggtgcrtggatcacctgaggtcaggagttcaagaccagcctggccaacatggtgaaaccccatctctactaaaaaatacaaaaaattagccagaggtggtggtggg

SEQ ID NO: 528341 - DNA, 201 bp, Homo sapiens
attgcagtaagctgagattgcaccactgcactccagtttgggcaacagagagagactcggtctcaaaaaaaaaaaaaaaaaaagtaaaaacattgaagtasaattggcaggaatgcctttattttttaatctaaaatatttaaaatgtattgtagcgtattgaagtgtccttcagataatatcccttggaacttttttttt

SEQ ID NO: 528342 - DNA, 201 bp, Homo sapiens
gtgccaagaactttacaaataagaactcctgaggtgggcatatcacttgaggtcaggagtttgagaccagcctggctaacatggtgaaaccccatctctamtaaaaaaaaaaaaaaaaaaaaaaaaaaaagccaggcatggtggcatacacctgtaataccaactactcgcgatgctgaggcaggagaatcccttgaatct

SEQ ID NO: 528343 - DNA, 201 bp, Homo sapiens
tgccaagaactttacaaataagaactcctgaggtgggcatatcacttgaggtcaggagtttgagaccagcctggctaacatggtgaaaccccatctctacwaaaaaaaaaaaaaaaaaaaaaaaaaaaagccaggcatggtggcatacacctgtaataccaactactcgcgatgctgaggcaggagaatcccttgaatctg

SEQ ID NO: 528344 - DNA, 201 bp, Homo sapiens
gcaggagaatcccttgaatctgggagacagaggttgtggtgagccaagatcactctactgaactccagcctgggtgacagagtgagactctgtctcaaaamaacaacaacaaacaaacaaacaaacaaaataagaactcagcgaattctcctgactaccctttgagatggttattattatcctactttagagatgagcaat

SEQ ID NO: 528345 - DNA, 201 bp, Homo sapiens
taaaaacttggcccagagtgaggggaatttaagtaattggtgtgatataatttaatttttttatagaacgtacgttttccaaatttaaatttttttttttkggggaaacaaggttggaaaacctgcacttgggtattattattattatttattattattatttttttgagatggagtctttgctctgtcgcccaggttgga

SEQ ID NO: 528346 - DNA, 201 bp, Homo sapiens
acttgtgttacaaaaatcctgaacaaaagtatacatcactgattttctatttttcaattctatttttgtattttccatctttaaagaacatggtttatatattttttttaaataaaattgtttgccattagtaagttcaaattcgaaggctaggattcctttttgaagtgcctgggaaaaaaattcagctgcagagaaaag

SEQ ID NO: 528347 - DNA, 201 bp, Homo sapiens
atgctggaagatctcatgatgttcaaccattcacttacactccagacccaggtatgtcaaaatgaaaaattcagaactaaaacaaataattaatttccagytttttgaaagaatatgaagatgactagccaaccaaaaagaaagttgctcactaagatgaattgatgttagtttcttttggaaatgacattattttctaag

SEQ ID NO: 528348 - DNA, 201 bp, Homo sapiens
atttattactcctccttcaataaagacaactcatagaaccggatgattgcaagttgattttaggtaagaaataagttttggtggttcttcttatagaatgmttatgtatctccacagctcagccagcaggagtgccagaaatcttaaagaaaagcttgcatagctgttcagtgaaaggagaagaagaagtgtttttaatcg

SEQ ID NO: 528349 - DNA, 201 bp, Homo sapiens
tttccatcctcccatcttccccttccatatcttgcaaaccctagtgtagagactgaagaactcaagtgcctatagggcacagacagcataatatcaattaragaaattggctgaacggtactttaggtaacttgagagtacactaaaggaggcagctccagttttccttgtggatttagtattgctggatcctgtgattca

SEQ ID NO: 528350 - DNA, 201 bp, Homo sapiens
gctttttgtaatgaaaattatttttttgacataggtcaccagaaggattatgcggcacgaataaattagaatgtcattttaagacttctgaatagaatatrccatgatggtggattttcctttttggttgtcatttagaagtaaaatcccatgtaactgactgctactttattttttcttaagccatcatgccttaaaaat

SEQ ID NO: 528351 - DNA, 201 bp, Homo sapiens
aagagcgaaactctgtctcaaaaaaaaaaaaaaaagttgaaaacacagggtaaaaaaagctaaaaacatgccctttaaaaactaacttgtggcctggcacmgtggcttgtaatcccaacactgggaggctgaggtggacagatctcttgagccaggagttcgagaccaacctaggcaacatagtaagactccgactgtact

SEQ ID NO: 528352 - DNA, 201 bp, Homo sapiens
tgaggcaggagaatggcttgaacccggaaggtggagctttcagggagcggagatggcgcctctgcactccagcctgggcgacagagtgagactcggtctcaaaaaaaaaaaaaaaaaaaagaacgtttgaaattggcatttatactttgggccctaataagattacaccattgttcagatggtataaaaagaatagtttgt

SEQ ID NO: 528353 - DNA, 201 bp, Homo sapiens
gaaaagatgtgtgaattttttaagtactttgtttggcatgcattgtacaatttactttgtgattttctgcattctatattaggagcttcaatgtttaactrtaagcctcatcaagaatcaggattggaaacatttgttcccaaatgctgttttaaatatttatttatttttcagcatacaaattataatttaatttatgaa

SEQ ID NO: 528354 - DNA, 201 bp, Homo sapiens
cacttatttgtgtgtaaatttaaaagtgcatttcctctcaaatttagatatgtcttgttctgctatttttctgtactagaaagtacttcttcagattgctrggctacttaccagaatcatcaactactaactagtaaagaaacaaactgtgttttgggatctcccatatcaaatatatttagaagtgaaatttagcaatca

SEQ ID NO: 528355 - DNA, 201 bp, Homo sapiens
ctagtccgtgaaaatgagcttcatttccttcttattcatatagctgcactcatacttttctattcaagtagctttagtagaataaaaatttggtatatgtrctctcatttgatgatgatgatgatgccactaacagttttgtgagttttcccattagttatggtggtaggtcctgagcaacccaaatgctgcctgaagtac

SEQ ID NO: 528356 - DNA, 201 bp, Homo sapiens
caaccattcacttacactccagacccaggtatgtcaaaatgaaaaattcagaactaaaacaaataattaatttccagttttttgaaagaatatgaagatgwctagccaaccaaaaagaaagttgctcactaagatgaattgatgttagtttcttttggaaatgacattattttctaagaggacagccgccagatactgctt

SEQ ID NO: 528357 - DNA, 201 bp, Homo sapiens
aacagtcagtaagaacatttgaggccgggctcggtggctcacgcctgtaatcccagcactttgggaggccgaggtgggcggatcacgaggtcaggagatcragatcatcctggccaacatggtgaaaccccgtctctactaaaaaaatacaaaaaaattagctgggcgtggtgggcgggcacctgtagtcccctgaggcag

SEQ ID NO: 528358 - DNA, 201 bp, Homo sapiens
cagcgaattctcctgactaccctttgagatggttattattatcctactttagagatgagcaattgaaggcataactcacccagagtcacaagctagtaaaytgtagaaccagaattccaacccaggtagtctcactttagcctagcctcttgactactgtgctgtactaactcccaatggtatatactatcaagttctgtc

SEQ ID NO: 528359 - DNA, 201 bp, Homo sapiens
tctgcctcccgggttgaagcgattctcctgcctcagcctccctagtagctgggactacaggcagatgccaccacgcccagctaattattattatttttttktgtatttttagtagagatggggtttcaccatgttggccaggatggtcttgatcccctgacctcatgatccacctgcctcggcctcccaaagtgctgggat

SEQ ID NO: 528360 - DNA, 201 bp, Homo sapiens
gcagtggtgtgatctcggctcactgcaacctctgcctcctgagttcaagcaattttcctgcctcaacctcccaagtagctgagattacgggcacccaccamcacgcctggataatttttgtatttttagtagagacggggtttcaccatgttggccaggctggtctcgaactcatgacctcaagtgatccacccaccttgg

SEQ ID NO: 528361 - DNA, 201 bp, Homo sapiens
gtgaaatgtctaaggagggaaactgaaatgaagtggtgtctgccaaatgaataactttacttgtggtattgcagcacagttacttcttttttaaaaaaaawtttttttaattttaagacagggtctcactctgtcacccaggctgtagcctccacctcctgggctcaagcagtgctcccacctcagccttccaagttgctg

SEQ ID NO: 528362 - DNA, 201 bp, Homo sapiens
tagattgattcatttcattttaatctccttgtgtaattcagtacctccataattgttctaatcttcttcccactgtttacaaattaccagttaattaactsgtgaaagaaaaattcacatatcagaataaaaataaatgtatactcactttataaaaatcaccactgctgtctttccttaatactagcagtggaaatgtaa

SEQ ID NO: 528363 - DNA, 201 bp, Homo sapiens
tcacaactattaataaatagaacaatacagcaacatactataataaaagttatgtgaatgtggtctctcaaaatagcttactgttctgtattcacccttcttataatgatgtaagatgatacagtgccgatgtgatgatattaagtgaggtgcatcacgtaggcattgtgacacagcattaggctactgttgaccttctgt

SEQ ID NO: 528364 - DNA, 201 bp, Homo sapiens
aatggatccaaatgaataaggctacctgcatattattagataagaccacccccaaaccatcttgtaatctacagtgttgaggttaagtgcataggctttgragtcagaacagatttggattcacatctttgctctgcttcttcatttagttgtatagctttaaacttcagttttccagtctattaaataaagaacgttgaa

SEQ ID NO: 528365 - DNA, 201 bp, Homo sapiens
tctttaaaagacaaacctatggtaagaaaaagcagatcagtagttgcctggggctggagtgggcaggattaactacaaaggaccaaaagtagctttacggratgattgaaatgttctctgtcttgaccatgtgattacacaaacatacatactttttaaaaaaactcatagaacatttaaaatgggtgcatttctatactt

SEQ ID NO: 528366 - DNA, 201 bp, Homo sapiens
agcttacttcatagtttgagagtcagactagtaaataattaattaaaaagagtatgttaggtgctctgaaagggaaagtatagtttgatgaggtgggaaayaaagaggagtccctgtgtgccaggggatcaggaagggcttttgatgggaggtgaacttgctatcaaaatcagtcctgaagtcataaaaattagtcatgta

SEQ ID NO: 528367 - DNA, 201 bp, Homo sapiens
gggctggagtgggcaggattaactacaaaggaccaaaagtagctttacggaatgattgaaatgttctctgtcttgaccatgtgattacacaaacatacatrctttttaaaaaaactcatagaacatttaaaatgggtgcatttctatacttctataaaggacacgggttatatatattctgccactgcactccagcctggg

SEQ ID NO: 528368 - DNA, 201 bp, Homo sapiens
ccgcgcctgactaattttttgtatttttttagtagagacagggtttcaccatgttagccaggatggtctcggtctcctgacctcgtgatccacctgcctcrgcctcccaaagtgctgggattacaggcgtgagccaccacgcccagccggacctagtgtgaatagagggtagataactaagtgaggattacccttgctagg

SEQ ID NO: 528369 - DNA, 201 bp, Homo sapiens
gaactttataatcttagctcttacatttaggtatttgatccattttgagctaaatttgtatattgtgtgaggtaagagcctaacagcttcattgttttgcrtgtgcatatctagttgcctgagcactatttgttgaaaagacttgtttcccccattgaatggtcttggcactcttgtcaaaaattaattgggcatagatgt

SEQ ID NO: 528370 - DNA, 201 bp, Homo sapiens
atgactgctaatggggatggcttttcttttttgaggtgatgaaaatgttctggaattaggtagtagtaatgactacataactttgggcctatactaaaaacactgaatcatgcactttaaaagggtggaactttatgttgtgtgaattatatctcaaaaaatgttgggagttggccaggctcagtggctcacacctgcaat

SEQ ID NO: 528371 - DNA, 201 bp, Homo sapiens
tccccttcctttctctctcttccagaagtcatttgcctggtttgaaatattttgtagggattgcttattatattattttagctgatgaacctcaggacaaygtctacacacacacacatacatacacgcacacaaaatctcagctgttgaagagtgggcttggaatcagacttctgtgtccagtaaaaaactcctgcactg

SEQ ID NO: 528372 - DNA, 201 bp, Homo sapiens
aaagggtggaactttatgttgtgtgaattatatctcaaaaaatgttgggagttggccaggctcagtggctcacacctgcaatcccagcacttcgggaggcygaggagggaggatcacctgaggtcaggagtttgagaccagcctggccaatatggtgaaaccctgtctctcctaaaaatacaataattagctgggcatggt

SEQ ID NO: 528373 - DNA, 201 bp, Homo sapiens
attataaacaaaagattgacaggattaggaacagtggtgaatgtttagaatttacccttttgtactttttgaacttggaactttgtaactttattacataytcacagaattaatagataagcaaaattttaaaaacaaacttgttgattaagaacattatactatttatacaacaaaatgtccctttatatattttttttc

SEQ ID NO: 528374 - DNA, 201 bp, Homo sapiens
ccttctgtagtagtttttaataggacaaaattaatcatggctttcttacatgtaatatatattagattttatcttatggttactcaattaaatatgactcwgaatttaagaattttctacttcccctatttctacctatcccacagctatggggaaaggatggtattgttaagcaaactatccctctcttaaaattttgga

SEQ ID NO: 528375 - DNA, 201 bp, Homo sapiens
taggttctagacaatacttattttttgtttttttgttttttgtttgtttctttttttagacaaggtttcacttttgtttaccaggctggggtgcagtggcrtgatctcgggtcactgcaacctctgcctcctgggttcaaccgattctcctgcctcagcctcccgagtagctgggattacaagcatgtgccagcacaccca

SEQ ID NO: 528376 - DNA, 201 bp, Homo sapiens
cagttttgttttgaaattttcctgaatcaatagattaaatttcttcttcctatgggattgatatgaattatttaaagtttctttcttgagtttctttaacygaaatagaattattttcctaatggtaaacatgaccacctctattttaaaaagttaggatcattaacaaatgtttccattgttaataaacaaaatctttct

SEQ ID NO: 528377 - DNA, 201 bp, Homo sapiens
gcacagtgagaagatttcttgtctctacaaaaaaattaaaacaggccaggcgcagtggctcacgcctgtaatcccagcactttaggaggccaaggtgggcrgataacctgaggtcaggcatttaagaccagagtgaccaacatggagaaacccattctctactaaaaatacaaaattagccaggcatggtggtgcatgcct

SEQ ID NO: 528378 - DNA, 201 bp, Homo sapiens
ggtgataacaacatctgccttcacagagctcatgatctaatggaattcaaaagcaagaatagtagttgactattacaggatcaacttaagataacactaayggtttttcaaaatgttctatgggatattcttagattacttttaaatgcctgccctgtgcatgatctgaagttttgtctcagtcaaaattaggttgtaggc

SEQ ID NO: 528379 - DNA, 201 bp, Homo sapiens
cggtgatgcacacctgtaatctcagcactttgggaggccgaggcgggtggatcacctgaggtcaggggtttgagatgaggctggccaacatgttgaaaccytgtctctactaaaaatacaaaaaaaaaattagctgggtgtggtgatgggtgcttgtaatcccagctactggggaggctgaggaaggagaattgcctgaac

SEQ ID NO: 528380 - DNA, 201 bp, Homo sapiens
atttaaaaattttctagctaattaaaatcctttgtggtacagtttaatgttattttccttttctagattaagggaaagtagataaatcttggttattatcttttttttttttttttgaaatggagtttcactcttgttgcccaggctggagtgcaagggtgcgatctcggctcactgcaactgcctcctgggttcaaatga

SEQ ID NO: 528381 - DNA, 201 bp, Homo sapiens
gtggaaaattccacacctaacctcatatgatagggtcatagtcaaaagtcaggctcacaacatgcagtttatttggtgtccccaagggtaaaaaagatccktccagctcccttcagctgtgatagatttttttaggtgtatgtgaaacagaagtgaatttcatgtttggacttgtgtcttatccccaagatatctcattgt

SEQ ID NO: 528382 - DNA, 201 bp, Homo sapiens
tttttttttttgaaatggagtttcactcttgttgcccaggctggagtgcaagggtgcgatctcggctcactgcaactgcctcctgggttcaaatgattctsctgcctcagcctccctagtagctgcgattacaggcatgtgccaccacgcctggctaattttttgtatttttagtagaaatgaggtttctccatattgctc

SEQ ID NO: 528383 - DNA, 201 bp, Homo sapiens
acaaatataaatgtattggaagggtttaaacagatggcaagtgctgtcaaaacagagtagaatttatgtttttattttttattttttgaggtggagtctcrctctgtcgccatgctggagtgcagtggcatgatctcagttcactgcaacctctgcctcccgggttgaagcgattctcctgcctcagcctccctagtagct

SEQ ID NO: 528384 - DNA, 201 bp, Homo sapiens
cagtggcgcaatctcggctcactgcaagctccgcttcccgggttcacgccattctcctgcctcagcctcccaagtagctgggactacaggcgcccgccacygcacctggctaattttttgtatttttagtagagacggggtttcaccttgttagccaggatggtctcgatctcctgacctcatgatccacccgcctcggcc

SEQ ID NO: 528385 - DNA, 201 bp, Homo sapiens
ttactttaaaaacaaaacaaaatataaaaaactgtgtttgagtaaactgatagattttactctgactgcaaaagagcacacctatgctgcttgttgcagtractaaccaccaatgttaacatcttcatattttatattcctaataacagtgatgactgagaatctatttgagtttccagctggcagaattaattgttatta

SEQ ID NO: 528386 - DNA, 201 bp, Homo sapiens
tgcagtgagccgagatcatgccactgcacttcagcctgggcgacacagtaaaactccacctcaaaaaatatatataaatcacatatgagaaattgtttggwagagattacttgagaaaaaatgcaagtgttggattgtaatgcattgacaccagcttgatgttcttagagcaaattaattcttaggaggagaaaaagatta

SEQ ID NO: 528387 - DNA, 201 bp, Homo sapiens
cacaatttctgctcactgcaagctctgcctcctgggttcacgccattctcctgcctcagcctcccaagtagctgggactacaggtgcctgccaccacgccyggctaattttttgttatgtaaatataattgttttttcctctaggttgaagaatttaggtaatctggccaggtgtggtggctcacgcctgtaattccagca

SEQ ID NO: 528388 - DNA, 201 bp, Homo sapiens
ttttatattcctaataacagtgatgactgagaatctatttgagtttccagctggcagaattaattgttattattttcctaggcgcaatttccttaaacgtrcagtttaaattcaaggctggaccactcagttattattgctattagaaaataatatatcatgtttacttttgttcttcattattttctttcctgcattgtt

SEQ ID NO: 528389 - DNA, 201 bp, Homo sapiens
aacctgaggggtgtcaaaaagatggtacatgtaggaaattaatgttatattcaagtgaaaatttgatattgtttatgtatattattcaacttttaaaaactttgcattaaagtatggaaaggaagcataagtataccattgttttaatggttatctttgatgagatcatgggcaagttgaatttttatttcttacgtgtat

SEQ ID NO: 528390 - DNA, 201 bp, Homo sapiens
caccactatgcctggcccgtttttgtgtttttagtagacacaggtttcaccatgttggccaggctggtctccagttgctgacctcgtgatccacctgcctyggcctcccaaagtgctggaattacaggcctgagcctctgcacctggccgcatgattagtgctttcaccaagtaataatttcctgatagataacctgacta

SEQ ID NO: 528391 - DNA, 201 bp, Homo sapiens
acctgaggggtgtcaaaaagatggtacatgtaggaaattaatgttatattcaagtgaaaatttgatattgtttatgtatattattcaacttttaaaaactttgcattaaagtatggaaaggaagcataagtataccattgttttaatggttatctttgatgagatcatgggcaagttgaatttttatttcttacgtgtatt

SEQ ID NO: 528392 - DNA, 201 bp, Homo sapiens
cctgtaatcccagcactttgggaggccaaagtgggcagatcacttcaggtcaggagttcgagaccaggctggccaagatggcaaaaccccggtctctaccaaaaatataaaaaattagccgggtgttgtggcgtgcctgtaatctcaactcctcgagagaggctgaggcaggagaatcccttgagtagttccccacatgca

SEQ ID NO: 528393 - DNA, 201 bp, Homo sapiens
ttgtctgtggaaggccgggcacggtggctcatgcctataatcccagcactttgggaggccaaggtgggcggatcacctgaggtcgggagttcgagaccacyctgaccaacacatggagaaaacctgtctctactaaaaatacaaaattagctgggcgtggtggcgaatgcctgtaatcccagctatttgggaggctgaggc

SEQ ID NO: 528394 - DNA, 201 bp, Homo sapiens
tttcttgaagcttgttttacaacttagaattattatccagtagctttccttaatatttttataacctcatcaacaaacagtgagtgtctcttgtaagtagygtactgccgaaccttagtcagagaagacatgacatagttttggtccatgaagggttttcaacccatttggagaagtaggaaatagatacaaagatgattt

SEQ ID NO: 528395 - DNA, 201 bp, Homo sapiens
aataaataaaaagaaaataatcaccctagtcttggccgactgaagaaagagttccttagaacacaaaagtaaaatcacttctagattaaaaaagagagagmgagagaaatagagtgagtacatgtaagtttattgcacaagagcagattttaccagctcttacattaatccttgttaagtttcatctccttcctttgggca

SEQ ID NO: 528396 - DNA, 201 bp, Homo sapiens
tgcagcaggaggatctcttgagctcaggagttggaggctgcagtgaactttgattgtgtctgtatactccaacctggatgacacagtgagaccctgactcaaataaaataaaataaaataaaataaataaagtgcatatgctcttattcaggatttctttcattggctagtggagactgtaaaagcatttaatttagattg

SEQ ID NO: 528397 - DNA, 201 bp, Homo sapiens
gcagcaggaggatctcttgagctcaggagttggaggctgcagtgaactttgattgtgtctgtatactccaacctggatgacacagtgagaccctgactcaaataaaataaaataaaataaaataaataaagtgcatatgctcttattcaggatttctttcattggctagtggagactgtaaaagcatttaatttagattga

SEQ ID NO: 528398 - DNA, 201 bp, Homo sapiens
atagcctgctacatatctaggctgtatgatttagcctgttgctcctaggctacaaatctgtacgacatgttactgaactaaatactgtagacaattgtaayacaatagtaagtatttgtgtatctgaacagacgaggtaacacgtggcatgacatcactaggagataggaatttttagtctgcattataattttatgggac

SEQ ID NO: 528399 - DNA, 201 bp, Homo sapiens
cagcaggaggatctcttgagctcaggagttggaggctgcagtgaactttgattgtgtctgtatactccaacctggatgacacagtgagaccctgactcaaataaaataaaataaaataaaataaataaagtgcatatgctcttattcaggatttctttcattggctagtggagactgtaaaagcatttaatttagattgaa

SEQ ID NO: 528400 - DNA, 201 bp, Homo sapiens
agcaggaggatctcttgagctcaggagttggaggctgcagtgaactttgattgtgtctgtatactccaacctggatgacacagtgagaccctgactcaaataaaataaaataaaataaaataaataaagtgcatatgctcttattcaggatttctttcattggctagtggagactgtaaaagcatttaatttagattgaat

SEQ ID NO: 528401 - DNA, 201 bp, Homo sapiens
caggctgtggtacagtgcaatggcacaatttctgctcactgcaagctctgcctcctgggttcacgccattctcctgcctcagcctcccaagtagctgggaytacaggtgcctgccaccacgcccggctaattttttgttatgtaaatataattgttttttcctctaggttgaagaatttaggtaatctggccaggtgtggt

SEQ ID NO: 528402 - DNA, 201 bp, Homo sapiens
tgaagacaaatagtgccagagacacttaacccatccaatctcacccagggtataggtcggtctcgttttcagacttcttcataagtccttctttctttctytcttcctttcttactttttgtttgtttgtttctaaatagtggattgatactgattgaaactaaaactttttgtaaagttttaaactttgcattaatatta

SEQ ID NO: 528403 - DNA, 201 bp, Homo sapiens
ataaattataaatgataatttatcatctaacatctaaatttataatttaagtatagttattacagaattaaaactatgacttacttcaggaatttagccarctcttttatgaaaatgttttatctctatttttcttgaagatttaaatttttttaaatgtaattcagttacaagtataggatttggtcttaaatatttgat

SEQ ID NO: 528404 - DNA, 201 bp, Homo sapiens
tagaatgtccagctgaggcaataaaagctttatttttgctttacagcttaaaacgttaaatgagattttaaaaatctatggattgtaacataagtaaaatratgctatttgggcatttttaaaaattccatttcttaggccttatattgcttgaagcatttatattctaaaacataaccaaattctgactattcattttgg

SEQ ID NO: 528405 - DNA, 201 bp, Homo sapiens
aaacgatttaataattaaagtctcaaatcaccatggttatacattttcaccagaaatagtaatcttacaatttttcatttttctgatgaagatttctgttmcaatatctgtttcctaatagattttttaaattaattagctttcctctgctttatgaccacaggttttatccctaaccgagacagctgtcttatatctgca

SEQ ID NO: 528406 - DNA, 201 bp, Homo sapiens
aatcttacaatttttcatttttctgatgaagatttctgttacaatatctgtttcctaatagattttttaaattaattagctttcctctgctttatgaccayaggttttatccctaaccgagacagctgtcttatatctgcatgccttagactgtgtggagggactccatgaagaaagaccataggttagaaaaataactca

SEQ ID NO: 528407 - DNA, 201 bp, Homo sapiens
ccatttatttttatgccattctagcctcatttattaataaaattatgtttttactttctctttcaggaaattttttaaattaatattttatatctagatcwaatgctatggaaaagtgcctttttatcatttataatttcatttttcactatttccaaaaacacataaacaaatagtttcagtaggtcccagcttttactt

SEQ ID NO: 528408 - DNA, 201 bp, Homo sapiens
gcaggaggatctcttgagctcaggagttggaggctgcagtgaactttgattgtgtctgtatactccaacctggatgacacagtgagaccctgactcaaataaaataaaataaaataaaataaataaagtgcatatgctcttattcaggatttctttcattggctagtggagactgtaaaagcatttaatttagattgaatt

SEQ ID NO: 528409 - DNA, 201 bp, Homo sapiens
atgcaccaccatgtccggctaattttgtatttttagtagagacagggtttctccatgttggtcaggctggtctcgaactccctacctcaggtaatctgccygcctcggcctcccaaggtgctgggattacaggcatgagccaccacacctggcctcaagtctttttttttcttttttttgcccaaacaaaaaggaaatttg

SEQ ID NO: 528410 - DNA, 201 bp, Homo sapiens
ggtggatcatgaggtcaggagttcaagaccagcctggccaagatggtgaaaccccgtctctactaaaaatacaaaaattagctgggcatggtggcaggctyctgtaatcccagctacttgggaggctgaagcaggagaattgcttgaactcgggtggcagaggttgcagtgagccaagatcacgccactgcactccagcct

SEQ ID NO: 528411 - DNA, 201 bp, Homo sapiens
caccccactcctggtaccagtttactgtgttagtccattttcatgctgctgataaagacataccccagattgggaagaaaaaatgttcatttggacttacrgttccacatggctggggaggcctcagaatcatggtgggaggcaaaaggcacttcttacatggtggcagcaagagaaaatgaggaagaagcaaaagtggaa

SEQ ID NO: 528412 - DNA, 201 bp, Homo sapiens
aagtataaattggtatcctttttaaggggagtataaagaagtatgtaggagtcagtgtggtctgaaaaatggaaaggttattttgctgctaaaatataggtttttttacagtgtaagtgcattgctcagaacatatcttcttccacgcttcaaaagagtttgggtaagggaacagcctgaaaaacacctgaaagagagaat

SEQ ID NO: 528413 - DNA, 201 bp, Homo sapiens
cagtttggtttactgagaaggatactcaaaagaataagctacatataccttcatttggtttgtaggccattttgtatgggggtatgtagggtttttgggggtttgttttttgttttcgctaccctcacttcttttactgtgcagttaaaaaataacagtagttaatcttatagctttatataaattttggaatttatatgt

SEQ ID NO: 528414 - DNA, 201 bp, Homo sapiens
agtttggtttactgagaaggatactcaaaagaataagctacatataccttcatttggtttgtaggccattttgtatgggggtatgtagggtttttgggggtttgttttttgttttcgctaccctcacttcttttactgtgcagttaaaaaataacagtagttaatcttatagctttatataaattttggaatttatatgtg

SEQ ID NO: 528415 - DNA, 201 bp, Homo sapiens
gagccagcaaaggccatagaaacaacaatttattaaatgtatttatggcagaaggacctaaataaactgtgagccaccttttcttctttatattgttacakttaagtgttcttgctttcagcaactcacattaatgcttggagcttatctctttctctctctctctctctctctctgtgtgtgtgtgtgtatgtgtgtgtg

SEQ ID NO: 528416 - DNA, 201 bp, Homo sapiens
gtttggtttactgagaaggatactcaaaagaataagctacatataccttcatttggtttgtaggccattttgtatgggggtatgtagggtttttgggggtttgttttttgttttcgctaccctcacttcttttactgtgcagttaaaaaataacagtagttaatcttatagctttatataaattttggaatttatatgtgg

SEQ ID NO: 528417 - DNA, 201 bp, Homo sapiens
tgttataaggttggggaagggttttgctttaaataggatgatcagggaaggcttctttgaggtgacatttgtatctgacctgataatgggttaggaactcmccatttgaggaggtgaaggaataatattgcaattgaagagaataacaagtatagagaatctgaggtaaaactgagtttagtatgttaaaagaagggaccg

SEQ ID NO: 528418 - DNA, 201 bp, Homo sapiens
actaaaaatacaaaaattagccgggcgcgatggtgcgtgcctgtaattccagctactcaggagggtgaggcaggaaaatcacttgaacctgggaggtggargttgcagtgagctgaaatggcgccactgtactccagtctgggctctgggcgacagagtgagactctgtctcaaaaaaaaaaaaaaaaaaaagtcagggta

SEQ ID NO: 528419 - DNA, 201 bp, Homo sapiens
gagctgaaatggcgccactgtactccagtctgggctctgggcgacagagtgagactctgtctcaaaaaaaaaaaaaaaaaaaagtcagggtatgggattgrcaagtccatagaaacagaaagtaaattagtggttgccagggattcaaggaatggaggttggagaatgactgctaatggggatggcttttcttttttgagg

SEQ ID NO: 528420 - DNA, 201 bp, Homo sapiens
agaatgactgctaatggggatggcttttcttttttgaggtgatgaaaatgttctggaattaggtagtagtaatgactacataactttgggcctatactaamaacactgaatcatgcactttaaaagggtggaactttatgttgtgtgaattatatctcaaaaaatgttgggagttggccaggctcagtggctcacacctgc

SEQ ID NO: 528421 - DNA, 201 bp, Homo sapiens
agtgagccaagattgtgccactgcactccagcctgggtgacagagcgagagtcagtctcaaaaagaataaaataatgttgggagtgaaaaaaataaagcarggttaggagggataagaaaatggtgggggcactattttgtagagcatgatcatagtgatttttgagcctcatttgaacagacatctaaaggaatcgaagg

SEQ ID NO: 528422 - DNA, 201 bp, Homo sapiens
agttaaaaatttccaacaacattaatttttagctatattatacttaattatataattaattttagtagctaatatttgttttaattctttctaatagcctwggtcagtggattcttggattattgcatttaatcctcagaacaaccatataaagtctagatagtatcattactcctattttacagagaggaaaacagacta

SEQ ID NO: 528423 - DNA, 201 bp, Homo sapiens
cctgtgattcaagagaagccaaaggtctgagatttttatgtaaaatctgatttttaaatgttggcaattaattttaaatgtttttttaaactgtgcaggcraaacagaacacttctgcagtccaagtacttactataggaagtacaagacctgtagaaaggaaaactgtggctgggtatggtggctcacgggtgtaatccc

SEQ ID NO: 528424 - DNA, 201 bp, Homo sapiens
aggtggctcacatatgtggtcctgacacttcaggaggccaaggcaagaggatcacttgagcccaggagtttgagaccagcctgggcgatatagtgagaccsccccccccgccatccctacaaagaaaaaataatactaagctgagcttggtggcatgcacctgtagtcccagctacttgggaggctgaggtgagagatcgc

SEQ ID NO: 528425 - DNA, 201 bp, Homo sapiens
ggagatcaggtggtgatgcatgctcgcaggcccctcaccacctgctgtgcagcctggtcgttaacaggccacagaacagtactggtccatggcccagggtkttgagactcctgttctaccttatataaagatgataacacgaatttgatgttagataaggttgttcagcagactttttctgatgaatctcacttaaagcat

SEQ ID NO: 528426 - DNA, 201 bp, Homo sapiens
tgggaggccaaggcgggtggatcactagagtccaggagttcgagaccggcctgggcaatatggcaagatcctatctctactaaaaatacaaaaatagcctrgggtggtggcacgcgcctgtagtcccaggtactccggaggctgaggcaggaggcacttgaacctgaaggtcgaggctgcagtgagacctgatctcaacac

SEQ ID NO: 528427 - DNA, 201 bp, Homo sapiens
aaagctttaaaacctattttctacctcagtggtccccaaactttttggcaccagggattggtttcatggaagacaatttttccacggactggggtgtgggsgtggggtgaggaggatgcggatgatttcagaatgaagctgttccaccccagatcatcaagcattagattcacataaggactgtgcaaactagatccctta

SEQ ID NO: 528428 - DNA, 201 bp, Homo sapiens
aagaaagctttaaaacctattttctacctcagtggtccccaaactttttggcaccagggattggtttcatggaagacaatttttccacggactggggtgtsggggtggggtgaggaggatgcggatgatttcagaatgaagctgttccaccccagatcatcaagcattagattcacataaggactgtgcaaactagatccc

SEQ ID NO: 528429 - DNA, 201 bp, Homo sapiens
taataatctctagctgattatatgaggtttgcaatatctcatgcaattagtacttaacttttctctgcctaagttttctcatctataaaacagaaacgatsataatactaccttctgcaagggggaattaaggttaatatttgcaaaatgtttagcacagtggtaaatcataataaacacattaatgtgttgtgtttcaag

SEQ ID NO: 528430 - DNA, 201 bp, Homo sapiens
atatgtgcttgccgtaatcagccccttgaaatctggaattaggtcctccaaataggctttatccaagaaagctttaaaacctattttctacctcagtggtycccaaactttttggcaccagggattggtttcatggaagacaatttttccacggactggggtgtgggggtggggtgaggaggatgcggatgatttcagaat

SEQ ID NO: 528431 - DNA, 201 bp, Homo sapiens
tgatcctaactaatgagccacttatatgtgcttgccgtaatcagccccttgaaatctggaattaggtcctccaaataggctttatccaagaaagctttaawacctattttctacctcagtggtccccaaactttttggcaccagggattggtttcatggaagacaatttttccacggactggggtgtgggggtggggtgag

SEQ ID NO: 528432 - DNA, 201 bp, Homo sapiens
accttcagtcagtagcataagtgaaacacaaatgaattttgtgtttagacttgggtctcatccccaagagatctcattatgtatatgcaaatattccaaamtctggggggaaaaaatctgaaatctgaaacacttccagacccaggcattgtggataagggatcctcaacctgtagtaattttattgcgtctctccccctc

SEQ ID NO: 528433 - DNA, 201 bp, Homo sapiens
ccaaggaaactgcaagggatgccgatttagtgttcgcctcactatgttctagatagctgatactatttaacacatttttaaattcatgaaagatgccattrtcatgatttaatttattggaaaagaaaattctttcattctgaatcaaacataagtctgagttgagtaatattgctcaaggaagtgtatcttttttcctgg

SEQ ID NO: 528434 - DNA, 201 bp, Homo sapiens
tcagaatagattataatagaaaggctcggtagagccaggttcatgagtgtgtgacctgtgcagaagtgggtgcttagaaggcccatggcttgggttaatgytctgctgttgccgtcttgaaattcttcacaatttatgaacaagggaacttcattttcagtttacacggaaccctgcaaattatgtacttggctctatctt

SEQ ID NO: 528435 - DNA, 201 bp, Homo sapiens
tgaacccaggaggcagagcttgcagtgagcagagatcgcgccgtgaacctgggaggccgagcttgcagtgagcagagatagcaccactgcactccagcctrggcgacagaacaagactctgtctcaaaaaaaaaaaaaaaaaaaaaaaatgagtataagctgttgagcttcctaaataccaaataagtcatgaaatatagt

SEQ ID NO: 528436 - DNA, 201 bp, Homo sapiens
gctggagcatctgagacacagggcactaagtccctaggctgcacacagcacaaggaccctgggcctatcccacaaaaccactttttccttctgggcctccragcctgtgatgggaggggctgccgtgaaggtgtctgacataacctgaagacattttccccatggtgttggggattaacattaggctccttgctacttacg

SEQ ID NO: 528437 - DNA, 201 bp, Homo sapiens
aaggaccctgggcctatcccacaaaaccactttttccttctgggcctccgagcctgtgatgggaggggctgccgtgaaggtgtctgacataacctgaagayattttccccatggtgttggggattaacattaggctccttgctacttacgcaaatttctgcagctggcttcaatgtctcctcaaaaaatgggtttttcttt

SEQ ID NO: 528438 - DNA, 201 bp, Homo sapiens
cgagcctgtgatgggaggggctgccgtgaaggtgtctgacataacctgaagacattttccccatggtgttggggattaacattaggctccttgctacttaygcaaatttctgcagctggcttcaatgtctcctcaaaaaatgggtttttcttttctactgcatcatcaggctgcaaattttctgaacttttatgctctgtt

SEQ ID NO: 528439 - DNA, 201 bp, Homo sapiens
ctaaatgcaaatgtctaatttattcttgaattgattcttctttttcaagggaccacagaagtttttcagtttcccgatgtatccatttgtccatttatctrtgatattgtgaatatcaaaataagaatgtacatcccttagaaacctctctagcatattttaagtcctcaataaatgttgatctctttccttgtaaacact

SEQ ID NO: 528440 - DNA, 201 bp, Homo sapiens
tttataaaattaccaccaaaagtctgaactggaatattctaactacaaacgtgttgttagtagttcagacaggagcaaataaaatggctttttttagatarcaaatgtataggtggagaaacaaattgttggtgactgccaccaggaagaaaggagaatttccccacctacctcacagttgatcgcaggtagtgatagcct

SEQ ID NO: 528441 - DNA, 201 bp, Homo sapiens
aataatccccacatgtcaagggcagggccaggtggagataattgaatcatgagggtggtttctcccatactgttctcatggtagtgaataagtctcacaakatctgatggttttataaatgggagttcccctgcacaagcactcttgcctgccaccatgtaagacatgactttgcttctcctttgctttccaccatgattg

SEQ ID NO: 528442 - DNA, 201 bp, Homo sapiens
cctatcaaagtcccatctcttaaccctgggtatcaaacaaactgtgagttttccagaatctgtttcccagttttcccctcagctttcctggtctcccatcygaactgcttctttgtgcacctcttgttctttctcttggctcccagtcttgattcctgtgatcactcttgcatcactaattgcacaagtgatttcaggtgc

SEQ ID NO: 528443 - DNA, 201 bp, Homo sapiens
aggagactggactcctgcagaaatgtcttcttgttccaaatttacatttcataactataaatttttcttaatttctgtattataatatctgctcaatgatkatcaagagtttttctttgttttaaaatatacgaaaactaagcattagtattgtttgtgatttaatatgccccttgccacctacaaaattctagcaaaaca

SEQ ID NO: 528444 - DNA, 201 bp, Homo sapiens
attctcatggtgtggcagagatggcaaggtatcgccaaatatctagtctttccactttccttaataaaagaagccctatgtcttaactaattttccagccrgctacagaactcattccccatcttcctttaagctagacttagccatatgactgagttctggccaatgagatccgtgaagatatatgtggaagtgttgcgg

SEQ ID NO: 528445 - DNA, 201 bp, Homo sapiens
aggctgaggcgggcagatcacgaggtcaggagattgagaccatcctggctaacacggtgaaacctcatctctactaaaaaaaatacaaaaaaaattagccrggcattgtggcgggtgcccgtagtcccagctactcgggaggctgaggcaggagaatggggtgaacccgggaggcggagcttgcagtgagctgagatcacg

SEQ ID NO: 528446 - DNA, 201 bp, Homo sapiens
tgagcagagatcgcgccgtgaacctgggaggccgagcttgcagtgagcagagatagcaccactgcactccagcctgggcgacagaacaagactctgtctcaaaaaaaaaaaaaaaaaaaaaaaatgagtataagctgttgagcttcctaaataccaaataagtcatgaaatatagtagaataagatagtttatgttttatt

SEQ ID NO: 528447 - DNA, 201 bp, Homo sapiens
cttgcaggctaaataactatacccctccaccaaatactagttgtgtgatcttaggcaaatcatgtatctgtttctcagatttattcttctgtgaagagggstaatgttagcaattacctttatacagggctaagttaattcatgtaaaacacttagaatgaatacttgcattcaatttaacaatcccttcaaccctttgta

SEQ ID NO: 528448 - DNA, 201 bp, Homo sapiens
tcatgtcttctcattcttttcttattttttatttatttatttatttttttgagttggaggctcgctctgtcgtccaggctggagtgcagtgctgtgatctsggctcactgcaacctccgccttccaggttcaagcgattctcctgcctcagccccctgagtagctgggattataggcgcccaccaccacgcccggctaatt

SEQ ID NO: 528449 - DNA, 201 bp, Homo sapiens
tcctgtgaactaatagggagaggtccaggtagagctatctgattgcaatgtaattctgaccctgagtgaaggaaaaaaggaaggaagactggggaagagtyccatgctgtctcacagtccaaggaaagtttggtttggcaaggccatcagggagtcattaatcaaaaaccagctgtcaggggagtcccatttgtctcccaa

SEQ ID NO: 528450 - DNA, 201 bp, Homo sapiens
gagttcgagaccggcctgggcaatatggcaagatcctatctctactaaaaatacaaaaatagcctggggtggtggcacgcgcctgtagtcccaggtactcyggaggctgaggcaggaggcacttgaacctgaaggtcgaggctgcagtgagacctgatctcaacacacacaaaagaatgactctcaggcttctttttttct

SEQ ID NO: 528451 - DNA, 201 bp, Homo sapiens
atgctccttatctggatttattgtcctttaacacatgtacaagttgagcatctctaatccaaacacccaaaatactccaaaatctaaaacttattgagtaytgacatcatgccacacctagaaaatttcacacctgacttcatgtggtgggtcatagtcaaaatgcattcaaagccttgttttatgcataaaattacctaa

SEQ ID NO: 528452 - DNA, 201 bp, Homo sapiens
agggaagttccatgtgctattttgcaaatttgatgaaaaaaacacatctctacatatacatgtaatttgtagtgtttattctaagaattagcagatacttkccaccttcacttttcaagccacttttcaaaaactttgttttactacttaatagatgattctgatctcccttttaactgacccaaaattcttcacaatctg

SEQ ID NO: 528453 - DNA, 201 bp, Homo sapiens
cagaatagattataatagaaaggctcggtagagccaggttcatgagtgtgtgacctgtgcagaagtgggtgcttagaaggcccatggcttgggttaatgcyctgctgttgccgtcttgaaattcttcacaatttatgaacaagggaacttcattttcagtttacacggaaccctgcaaattatgtacttggctctatcttc

SEQ ID NO: 528454 - DNA, 201 bp, Homo sapiens
catggcaatagatatctaatacagagttgagggaagttccatgtgctattttgcaaatttgatgaaaaaaacacatctctacatatacatgtaatttgtartgtttattctaagaattagcagatacttgccaccttcacttttcaagccacttttcaaaaactttgttttactacttaatagatgattctgatctccctt

SEQ ID NO: 528455 - DNA, 201 bp, Homo sapiens
gatttcatttactcttacttagtggcagtctgtgagaaagatttcacagatttttcccctcagggaagtagattaaggaaacatctgagaacccctcaagycaccctccgtgggtttctactctttgattgttttgaacatgaccattttcctcttaacttaccctagccggagcattatctaagactgtggttacccaca

SEQ ID NO: 528456 - DNA, 201 bp, Homo sapiens
tactcttacttagtggcagtctgtgagaaagatttcacagatttttcccctcagggaagtagattaaggaaacatctgagaacccctcaagccaccctccktgggtttctactctttgattgttttgaacatgaccattttcctcttaacttaccctagccggagcattatctaagactgtggttacccacagctggaaag

SEQ ID NO: 528457 - DNA, 201 bp, Homo sapiens
aatgtatgagagactttttttttttttaagcaggaactgcccttgtggcttgactaaagctggctataggggtgatgtcagcagcctgttaccttttctcttttttttttttgagacggagtctcactctgtcacccaggctggagtgcagtgatgcgatctcggctcactgcaacctccacctcccaggttcaagagatt

SEQ ID NO: 528458 - DNA, 201 bp, Homo sapiens
ctttttttctaatggatggaagtgaaacctcgaaagcacatggtcaagtgcctgactcttccaaaacaaaaacaaaaacaaaaaaactagcctcagcaagsaggtccgtagcctccagctgaccggattttcagtcacagaacaccggggacctaaaaaagggtcaatctcagcatcgtgcactcaacccagctccttccg

SEQ ID NO: 528459 - DNA, 201 bp, Homo sapiens
gatttgtcgctatggatttttgggacgcacccaaataaatccatagatacgtccaaagtgtccttggtgggaagaagcacccccttttagcaatcccctckatcgttgccactggcttccaaagctcttctatttctcttttatgagaaccagaaacagggagcagcctgttggtggaagaaacctgtcgtgttttttttt

SEQ ID NO: 528460 - DNA, 201 bp, Homo sapiens
aggagggcgctagtgatcagaagttagaaacaaagagcctgtctttagccagattaaagaatcctgatggtttatgattctccttaaactaacgcaccacyttaaaagttcttcctgccttggcggagactgagttgaagaaaagagaagcatttaatttccttttcatattattatacgaaatataatataatttatatt

SEQ ID NO: 528461 - DNA, 201 bp, Homo sapiens
aatcccttatcatggtaggaaattgaaaaaaaaattaagaagaagcaaaagaataataggcattagtctgaattaagggaaagagagaatgcaggagttgytggcattgggcctttgattaggaaggaagaggtcccaatcaaaatctcttgtttatattgaagattaaactctaacagtgcaatgctaaactgatagcat

SEQ ID NO: 528462 - DNA, 201 bp, Homo sapiens
ttaagggaatcccttatcatggtaggaaattgaaaaaaaaattaagaagaagcaaaagaataataggcattagtctgaattaagggaaagagagaatgcargagttgttggcattgggcctttgattaggaaggaagaggtcccaatcaaaatctcttgtttatattgaagattaaactctaacagtgcaatgctaaactg

SEQ ID NO: 528463 - DNA, 201 bp, Homo sapiens
gtttttggagcctacaaaatagtagtcatgtcaaaagtgttgttttgcctactgatcccagatttttcagaagtacttaagactgtggaatagtttaagtmtatgaggggagaactgatgcgattttgctctgagtagttaataatggttctaagataaacccattagcgctgtctccacagtgtgtgtaatgggactgag

SEQ ID NO: 528464 - DNA, 201 bp, Homo sapiens
aactgtcaggttgtcaacacagctctggtctgcaacaagggtcctcagggtgacaccaggaaccatacaccagacagccttaattccacagctggcagacyatgtaggatttataataaaatgtgcagggtcactgagtaccgtggtcaacatctcatttggggataaaggtaatgtgctttctaaaatcagaaagtatgc

SEQ ID NO: 528465 - DNA, 201 bp, Homo sapiens
tctgaaagaaatcaagggtgaaattgcgtccttgaacaaaatgtacccgtttaaatgagcataagtgtgccagagaactgtcaggttgtcaacacagctcyggtctgcaacaagggtcctcagggtgacaccaggaaccatacaccagacagccttaattccacagctggcagaccatgtaggatttataataaaatgtgc

SEQ ID NO: 528466 - DNA, 201 bp, Homo sapiens
ttttgaaacagagaaaacaggaactaaattaaatttggataaggtaacagaatcccctatgacttagtggtcctgaatataaaataatcccttgatccagatggtatctacccatgggatctgaaagaaatcaagggtgaaattgcgtccttgaacaaaatgtacccgtttaaatgagcataagtgtgccagagaactgtc

SEQ ID NO: 528467 - DNA, 201 bp, Homo sapiens
tcagatcttgtgagacttattcactatcacaagaatagcatgggaaagaccagcccccatgaattcaattacctccccctgggtccctccacaacatgtgkgaattctgggagatacaattcaagttgagacttcggtggggacacacccaaaccatatcattccatccctggcccctccaaatctcatgtcttcacattt

SEQ ID NO: 528468 - DNA, 201 bp, Homo sapiens
cacacactctccagaagaaaagccacttacaaagagaagtcacatattcagtgaactgaatggtcttttagaagatcatcagttagcccaagtatttcctyggtctctaaaaattcacttttatcttgcattgccaaatttagaatagtaataatgctgacaacatgaactaataattaaatgatgctcaaaagagacttt

SEQ ID NO: 528469 - DNA, 201 bp, Homo sapiens
atgttggcgaggctggtctcgaactcctgacctcagatgatccaccgacctcggcctcccaaagtgctgggatgacaggtgtgagccactgctcccaggctttttttttttttttttttaatcaatcacaggagcaattcctgtgaactaatagggagaggtccaggtagagctatctgattgcaatgtaattctgaccct

SEQ ID NO: 528470 - DNA, 201 bp, Homo sapiens
gtgctgggattacaggcatgagctgccctgtgttcacctttgtcaaagtttggagaccctgctgtatggtcacttagtgagtgtttttactatgccatagrcactagagatagagatataacctttaaaaaagcacttaaagccataaagttgctcaaaacttaactctgcaaagatatccaattgtcattcctttttttt

SEQ ID NO: 528471 - DNA, 201 bp, Homo sapiens
acctgaaggtcgaggctgcagtgagacctgatctcaacacacacaaaagaatgactctcaggcttctttttttctaatggatggaagtgaaacctcgaaakcacatggtcaagtgcctgactcttccaaaacaaaaacaaaaacaaaaaaactagcctcagcaaggaggtccgtagcctccagctgaccggattttcagtc

SEQ ID NO: 528472 - DNA, 201 bp, Homo sapiens
ctttaaaagttcttcctgccttggcggagactgagttgaagaaaagagaagcatttaatttccttttcatattattatacgaaatataatataatttatawtttataatatttataataaatacttagatttgagtctagcatgaaaactctggaagggaccagttagctgagcacaaataatgattttcctgaaaccaag

SEQ ID NO: 528473 - DNA, 201 bp, Homo sapiens
ttcttctgagcccttgaaactgttccaactgtctgcctattacccagttccaaagtcacttccacattttcaggtatcttttcagcagtgccccaatctastagtaccaatttactatgagtccattttcatgctgctgataaagacatacccgagactgggaagagaaaggtttaattggacttacagttccacatggct

SEQ ID NO: 528474 - DNA, 201 bp, Homo sapiens
tccatagcccaaactctttcatcactagcttcccactcaaccattttatatttataagagctcgttcctggacacattcacaaggaaatgcacatagaaarcttgaaatgtgatgaggtaacatatgtgaaaactgcattaacataacgtctgatacagaattagctcacagaatgttcacgtgttttttaataatgtacg

SEQ ID NO: 528475 - DNA, 201 bp, Homo sapiens
aagacttggcagaaccagaagcactgggaggaaagtgagctgccctatagcaccgtcaggagaaagatgacaagactgttactagatccatggaggatctrcaaaaggatgctgtaagataaagagaagtaagggagaaggaaagatattgactccaaatgtctagactatccagaacaagcacctaaagatttaatttat

SEQ ID NO: 528476 - DNA, 201 bp, Homo sapiens
tagattagttagctggagattgctgttcggacttgggatagagagctggacagtgggaaaggtggaaagggccttgcctccttggtaaccgtgaaacttcwtgttgaaatcaagttaattcattggtgaattgatgattcaggggtttgcagctgaagatctggttcaagaaagtccttgattaattagtaatgtctttca

SEQ ID NO: 528477 - DNA, 201 bp, Homo sapiens
actggtaagtgcatttttaaattttgttttaatgaataatgaatgaaatcctacatttgagcttaaaattcacaaacagtcaatactcaaatcaatttgawtcatctatttacaaaagtgccaagcattaactcactcatagtgatgtaaaattttgatgtagaaataatattacaaacatgaataccaatattagttaat

SEQ ID NO: 528478 - DNA, 201 bp, Homo sapiens
ttaagttctggggatttggcagagaacaaaacagacaaaaaccttgccctcattagtaattgagacagacagtcacaaaaaataaaaatacatgtggcatrttggctgtaataattaacaaagagaacaaatgaaaacagtgggaggaagagaaacgatctggtagtagggggagtgtacaatttgagaaagggttgcctg

SEQ ID NO: 528479 - DNA, 201 bp, Homo sapiens
ggagacttctagttttaattttgtacccatgatttttaatagctttaatactagattttttttcccctccacttaggctatgctttgtcttaaaaggtacyatgctgccctcatgtggtcagacttgaaataacacataaacgattactaaaactggtaagtgcatttttaaattttgttttaatgaataatgaatgaaat

SEQ ID NO: 528480 - DNA, 201 bp, Homo sapiens
tgtaggaacctactacatataacagtagtcagaaaaattcagacacagtataacacactgaattctagggaagatgagatgaaaatccacattatgaagcrtcagtaacaggtcagacttgccttcatcgccgcatcttgatgacaataaaatttaggaaaattatttgaactattattattattccattcattataataa

SEQ ID NO: 528481 - DNA, 201 bp, Homo sapiens
agttgtaaaattcaagtttggataagaagatcattatggagacttctagttttaattttgtacccatgatttttaatagctttaatactagattttttttyccctccacttaggctatgctttgtcttaaaaggtaccatgctgccctcatgtggtcagacttgaaataacacataaacgattactaaaactggtaagtgc

SEQ ID NO: 528482 - DNA, 201 bp, Homo sapiens
gttagagggcccatggaactccaaaatccagcaggcagtcaaattttaaagttccagagtgatctcctttgactccagatctcacatccaagtcatgctgrtgcaagatgtgggttctaatggtcttgagcacctctgcctctgtgctttgcagggtacagcctccctcctggctgctttcacggtctggcattgagtgtc

SEQ ID NO: 528483 - DNA, 201 bp, Homo sapiens
gctttgcagggtacagcctccctcctggctgctttcacggtctggcattgagtgtctgtggcttttccaggtgcatagtgcaagctgtcagtggatctacyattctggggtctggaggacagtggccctcttctcgcagctcctgtgggactctgtgtggagcctccaaccccacatttttcttctgcactgcgctagcag

SEQ ID NO: 528484 - DNA, 201 bp, Homo sapiens
ttagagcagggtgttaggagaatggccttggagatgagagatgaggggtatgtatagattaatacccctcacagagggtaaagccctacacagttttttaytggagaggagataagagagaagagagtctaggaggattcccggccttttgatctgaatgactgaaaaatagaattaccattaatgaaacttgaaagtcta

SEQ ID NO: 528485 - DNA, 201 bp, Homo sapiens
gtaataacatgtcaattagacataaatctaatcctttcaaaaattgtccacagtgtattgaagagggaacttttaattagagatctttaattaaaggaatrtatgagagactttttttttttttaagcaggaactgcccttgtggcttgactaaagctggctataggggtgatgtcagcagcctgttaccttttctctttt

SEQ ID NO: 528486 - DNA, 201 bp, Homo sapiens
tgggaggctgaggctgcaatgagccgagatcgtgccactgcactccagcctgagcaagagagatactccatctcaaaacaaaacaaaacaaacaaacaaamaaacaaaaaaaaggtaaaaaaaaaaaaacaaagaaacaaaataattccgtagcaaagtcactgaaacatgaagtagcatgattaaaaatggaagaaaacc

SEQ ID NO: 528487 - DNA, 201 bp, Homo sapiens
tataatgcatgtagtgaacccacctagctggcagacgtttgaggggtgtgtgcatactttgctgaccttccctacccgtctacactcccaactgttggcawagggaatgcctgccaaacaggcaaagtcaaacccctaaccagaggggatagtctcagtttgtctgcagtggaaacctcaacagatcattcagccttccct

SEQ ID NO: 528488 - DNA, 201 bp, Homo sapiens
aggctgaggctgcaatgagccgagatcgtgccactgcactccagcctgagcaagagagatactccatctcaaaacaaaacaaaacaaacaaacaaacaaamaaaaaaaaggtaaaaaaaaaaaaacaaagaaacaaaataattccgtagcaaagtcactgaaacatgaagtagcatgattaaaaatggaagaaaacccaga

SEQ ID NO: 528489 - DNA, 201 bp, Homo sapiens
tgacttcatatcagcatttaagtgttaactttaggtaatagcatttggattggggattggtgcacttccagttgtacaaaggatagctgtattgtgttagrtgtaattatgaccttattattggcttcagttgaagattatgtgtgatttcaggagatgtggatgggttcaagttgacaaagttgtgatggttaatattga

SEQ ID NO: 528490 - DNA, 201 bp, Homo sapiens
caatgagccgagatcgtgccactgcactccagcctgagcaagagagatactccatctcaaaacaaaacaaaacaaacaaacaaacaaacaaaaaaaaggtaaaaaaaaaaaaacaaagaaacaaaataattccgtagcaaagtcactgaaacatgaagtagcatgattaaaaatggaagaaaacccagaaggtgcataacg

SEQ ID NO: 528491 - DNA, 201 bp, Homo sapiens
ccaacagtgtggccgaatctcctgggttctcaagcctcatcttgcaagctctgtcagaaaatctgcccccgtcttcacaggatcatatacctttgaatctrtgggccttaaaagtatagttagtagtcagttcagccataacgtgacgcatacattccagaaaatcaccacctatgcagaattgagcagtagcatgacagg

SEQ ID NO: 528492 - DNA, 201 bp, Homo sapiens
ttacttagttccgggaaacacaaaggtgaagaggacatattccatattcataattgtttaaccacatgagtgaatgtctaaaggtgacaatttgcttctaktatctagtgtttatttgcagtctatttcttttttcccactatgtcaatactttaacagctgtatatggaatgcttgcaacaaacctggtgatggggaatt

SEQ ID NO: 528493 - DNA, 201 bp, Homo sapiens
ttgtgcacctcttgttctttctcttggctcccagtcttgattcctgtgatcactcttgcatcactaattgcacaagtgatttcaggtgcaattctgattakcctgcgtccacacagtgatcgatgatcctatgtgcctagaaaggacactgtgtgctgctcatgacctgcaacaggaaaaaagccatttcttgttagcagt

SEQ ID NO: 528494 - DNA, 201 bp, Homo sapiens
gacacacaataaacacataagtacatagacaaatatgtagaagcgctagggttggaaaggtaccaaatgatagccccctgaaattttatttattctatgtrattggttagtattacgaaattgaagcatgtttatatataaaagataagcttaagataaattgtcacaaaattcaaagttgagaaatcagtaaataatggt

SEQ ID NO: 528495 - DNA, 201 bp, Homo sapiens
tatgtagttctattttatttagatacatttttctggtttagaatcagggtaacactggtcttatttaagttgcagcgtattcccttcttcttgattttctyaaaggataatattggtattacttctttcttcattgtataaagttcaccaaaaagccacctgggcctgaagttttctttgtgagtcagttttcacttacaa

SEQ ID NO: 528496 - DNA, 201 bp, Homo sapiens
gtctaaaatccattcctagaattagattttcttaattaaacaatttgtgtaattttaaggatcttgaaagggcgtaccagtctatacctcatgtgcgtgcrtatgtgtgtgtgtgcgcatttggtgtggtgtggtgtgtgtgtggtatattccttttttgttctgttaatatggtgtatcgtactgatgattgattttgaa

SEQ ID NO: 528497 - DNA, 201 bp, Homo sapiens
cacgtacagcattgcctacactcaagagtctaaaatccattcctagaattagattttcttaattaaacaatttgtgtaattttaaggatcttgaaagggcrtaccagtctatacctcatgtgcgtgcgtatgtgtgtgtgtgcgcatttggtgtggtgtggtgtgtgtgtggtatattccttttttgttctgttaatatgg

SEQ ID NO: 528498 - DNA, 201 bp, Homo sapiens
gcgctagcagaggttttccatgagggccctgctcctgcagcaaacttttgcctgggcatccaggcatctccatacatcttctgaaatctaggtggaggttycccaatctcaattcttgtcttctatgtacccgcaggctcaaccccaaatggaagctgccaaggccacagcctgagctctatgttggcccctttgagccat

SEQ ID NO: 528499 - DNA, 201 bp, Homo sapiens
cttcatgaatttttgtttatcagaccccagaaatttcaggactcaaactagaatatgagaatgactatgtaaataaacaaaaactgtaggaacctactacmtataacagtagtcagaaaaattcagacacagtataacacactgaattctagggaagatgagatgaaaatccacattatgaagcgtcagtaacaggtcaga

SEQ ID NO: 528500 - DNA, 201 bp, Homo sapiens
gcggactcccgcgcccccttcaccccgacctggccgcggagccgcgagcgtgaagccgccgccttccgggtaccgagcgcgcgcctccccgggatctgtcyctgctccctcacttcctgtcccgggtctgggctgcggaagagggcccccgagagctgaccctgctcgtgggcacccgtggctctgcgatgcgtctggggc

SEQ ID NO: 528501 - DNA, 201 bp, Homo sapiens
aggaagacattagtagaattaatgataaatgttttagtctggtcaaaacttgagccacaatgagttgaagacttttctgcctggatgtaagcactgttaawccctttgtgtcctcacatatcatgcagccattgataccatatcccttttcatacaggatcaaaacagtgaaagttcataattaaagattttataaaatta

SEQ ID NO: 528502 - DNA, 201 bp, Homo sapiens
cagtagcataagtgaaacacaaatgaattttgtgtttagacttgggtctcatccccaagagatctcattatgtatatgcaaatattccaaaatctgggggraaaaaatctgaaatctgaaacacttccagacccaggcattgtggataagggatcctcaacctgtagtaattttattgcgtctctccccctcactgaaata

SEQ ID NO: 528503 - DNA, 201 bp, Homo sapiens
agaaagctttaaaacctattttctacctcagtggtccccaaactttttggcaccagggattggtttcatggaagacaatttttccacggactggggtgtgggggtggggtgaggaggatgcggatgatttcagaatgaagctgttccaccccagatcatcaagcattagattcacataaggactgtgcaaactagatccct

SEQ ID NO: 528504 - DNA, 201 bp, Homo sapiens
ttttctcagtagatactctttctgaacccaaatgaaaaattgctttaatttacaatttcaaaagcatctaaagaggaaatagactaataattctttttttycccttaggtattgcagattccgtttcttctatatttgtgtgacatgttgggcagatcaagagacagctacaaaaatgaaggttttcataatgcaatgtaa

SEQ ID NO: 528505 - DNA, 201 bp, Homo sapiens
acaaatattttaccttttttgctcatcctcagctttactgcaatttccagaaacgaaagcactcctaaggagaacattttaaatctatgtgtacaatttaygatttatcctatgaaacttcaaaatctgcaaatgaaagttgttaaaagtctgagtaatggaactgcaagacaaacaatgagtttaaagtgccgaagataa

SEQ ID NO: 528506 - DNA, 201 bp, Homo sapiens
ttagcagccctctgagatggcgtatctatcggaaggatttcaaacaccaattgctttacctgaacaaatggtgcttaccctttgaacagcagagtgaccaygtagaaggaaggaaaagggcaaaatcgcttcagttaaactgaaattaaatgaacaataaggcaactatataagtaacttctagtagcattgcctgagaga

SEQ ID NO: 528507 - DNA, 201 bp, Homo sapiens
actaatacagtctattaaaataatgataaacgttgacaaataacatttacaccaatattctaaggcactttggtgacagaatatctattaacacatgtttytcctgggaaatagcaaagcttataaaataagtacttttatccccagatggataggaaactaggcttcaactggtgatagtaccagatagttaataaatgg

SEQ ID NO: 528508 - DNA, 201 bp, Homo sapiens
ttgaatctttttcagattagcatctcaaagaagtcttattctcatgattatattttcatatgatttgttcattgaatcaaaggtcagtcatttcagagaayacttattgaacatctagtatatattaggcattgagtactcaaaatgtaaaggccagcagtagagacagcttcagtcatcatggacaatatagtttacaga

SEQ ID NO: 528509 - DNA, 201 bp, Homo sapiens
ggaggctgaggcaggagaatggggtgaacccgggaggcggagcttgcagtgagctgagatcacgccactgcactcgcctgggcgacagagcgagaatccgyctcaaaataataataataattattattatgctgtgttcagaagcctccaaggaagtacttttaatgttattaatggttttgcaaaatcaaaacaagtggg

SEQ ID NO: 528510 - DNA, 201 bp, Homo sapiens
ttgcaaagttaaaaagaggccaggcgcagtggctcatgcctgtgatcccagcactctgagaggctgaggcgggcagatcacgaggtcaggagattgagacyatcctggctaacacggtgaaacctcatctctactaaaaaaaatacaaaaaaaattagccgggcattgtggcgggtgcccgtagtcccagctactcgggag

SEQ ID NO: 528511 - DNA, 201 bp, Homo sapiens
gactcctgttctaccttatataaagatgataacacgaatttgatgttagataaggttgttcagcagactttttctgatgaatctcacttaaagcatacatkgactaaatggaaatatatcataaacttaaaatcataggttataatttattcatcttcccatacatttatccaatactttatttaatttctactgtgtcta

SEQ ID NO: 528512 - DNA, 201 bp, Homo sapiens
gggataggaggggccatagggacccagctatccccttggagatggagaaactgggggcaatagaggcaacactgtaaggtgaggagggtgcctccatggcrtccttcatgccggagcctgggagtcacagcctctttcccaacccagggttcagccgactcctacaccagccgcccatctctggactcagacgtctccctg

SEQ ID NO: 528513 - DNA, 201 bp, Homo sapiens
actagataaagcatatggaattgtgtacaattattaaataatgcatagaacatacatacacagagacacattcttctctctctctctttcacctccctttmttctcaggagatctgggaacccttccagcctgagtgacattggcaaccgacgctcccctccgccatctctaggtagcctccccccaacccacccattttg

SEQ ID NO: 528514 - DNA, 201 bp, Homo sapiens
ttcccttttcctgctgcccttaacacaactctgagtcatcctcacctgctactgatgccacaagtggaagaaatgcctagctctgcccgggctcagctctrcccagagtcctgagagactccaggcctagctctgccctccccgctcaggtactccagcgtctcattcgctcccgggggaagtcacagatgaagcacctga

SEQ ID NO: 528515 - DNA, 201 bp, Homo sapiens
aaaatgctccagcatgctttttccttgcactatttcctttaccggggaattgagagttgaggggggaagaatctcgcacctcaccagaagacaaggtgagrtctgtactgcctcactgagagctgttgtatggcccccagaaccagcagctgctgggggagcgtggcgaggagcactccccccttgagcgggacagcttga

SEQ ID NO: 528516 - DNA, 201 bp, Homo sapiens
gaggagcactccccccttgagcgggacagcttgatgccctctgatgaggccagcgagagctcccgccaagcctggacaggatcttcacagcgtagctcccrccacctggaggaggactatgcagatgcctaccaggacctgtaccagcctcaccgccaacacacctcggggctgcctagtgctaacgggcatgacccccaa

SEQ ID NO: 528517 - DNA, 201 bp, Homo sapiens
ggcccttcatcagtgccatgccttcccccaggtcacagacatgatgcagaaggctctcttcgacttcctcaaacacagatttgatggcaggtaagctgccstggcctgaggtggcctgagaaccaaggagaagctcatggcctacttccagatgcctgtagctagtcttctctaagggaagagttagtgggagctgagtaa

SEQ ID NO: 528518 - DNA, 201 bp, Homo sapiens
gtccctcatacatctttggagaaccgggctccagactttgttccctgactcatagctgccgcttgttaggttagggttagatggggagagacagggcacaraggacctgtctccccggctactcttgccttatggctctagtgtgtgacctacagagcatgctccacaagcccctgcctcacctcactgtcatcactaata

SEQ ID NO: 528519 - DNA, 201 bp, Homo sapiens
agggacccagctatccccttggagatggagaaactgggggcaatagaggcaacactgtaaggtgaggagggtgcctccatggcatccttcatgccggagcmtgggagtcacagcctctttcccaacccagggttcagccgactcctacaccagccgcccatctctggactcagacgtctccctggaggaggaccgggagag

SEQ ID NO: 528520 - DNA, 201 bp, Homo sapiens
agcgggacagcttgatgccctctgatgaggccagcgagagctcccgccaagcctggacaggatcttcacagcgtagctcccgccacctggaggaggactaygcagatgcctaccaggacctgtaccagcctcaccgccaacacacctcggggctgcctagtgctaacgggcatgacccccaagaccggcttctagcccagg

SEQ ID NO: 528521 - DNA, 201 bp, Homo sapiens
cctcctgggttcaagcgatcttcccatctcagcctcctgagtagccgggactacaggcgcccatcaccacgcccagctaatttttgcatttttagtagacrtggggtttcaccatgttggccaggctggtctcgaactcctgacctcaagtgatcggcccaccttggcctctcaaaatgctgggattacaggcatgagcca

SEQ ID NO: 528522 - DNA, 201 bp, Homo sapiens
ctagtgaaagagggcggggacatcgccttcatccccagcccccagcgcctggagagcatccggctcaaacaggagcagaaggccaggtgagagttgggccrtgagtcagtaaacacaccccaaacacttgcactgtacccacaggacacgtcaccatgcatgccatacacatgcatatccccctgaaatacacatacacgt

SEQ ID NO: 528523 - DNA, 201 bp, Homo sapiens
cctaccaggacctgtaccagcctcaccgccaacacacctcggggctgcctagtgctaacgggcatgacccccaagaccggcttctagcccaggactcagarcacaaccacagtgaccggaactggcagcgcaaccggccttggcccaaggatagctactgacagcctcctgctgccctaccctggcaggcacaggcgcagc

SEQ ID NO: 528524 - DNA, 201 bp, Homo sapiens
tccttgaccccaaagagtcacctctaccaagcctgccacaggaagtccctagggaaagtggaaggggtgtgtctcctccgtccagggtgtgtatgtggagsgcattgactctggggccatgcatggggaggctgcttctctccaaaggggcccttcatcagtgccatgccttcccccaggtcacagacatgatgcagaagg

SEQ ID NO: 528525 - DNA, 201 bp, Homo sapiens
ttacctccttgtctttctgcccaactcctctacctgcccccaggattggcaagaacacacccctcctcctcaattcccattcctctgcctgtccaggcttsgatgaatgcccttttcctccaattccttcctgtccaccattcgggagccctcaaagcctgctggagtgagcagtgggcagagctcctggtgagcactgct

SEQ ID NO: 528526 - DNA, 201 bp, Homo sapiens
tgccgcagcgtccccgtactgagggggccgggcacctgttggggcaggagctgccgtcctgtcattagcctgggggcaccaagcccattcctccccgggaycactgcggggtttgctttcggagcctccgggacgcacgggcccagacccgccctgctgtcgcctgggacccctcccccgtctgccgctcgttcccgcgcc

SEQ ID NO: 528527 - DNA, 201 bp, Homo sapiens
acagtcaagggactgctttggcatccagggcctccagtcacctcactgccatacattagaaatgagacaatcaaagcccccccagggtggcacacccatcygtttgctggggtgtggcagccacatccaagactggagcagcaggctggccacgctcgggccagagagagctcacagctgaagctcttggagggaagggct

SEQ ID NO: 528528 - DNA, 201 bp, Homo sapiens
tctcaggagatctgggaacccttccagcctgagtgacattggcaaccgacgctcccctccgccatctctaggtagcctccccccaacccacccattttggrtaggtgggtagctaagacacagggaaagaggggatcctgcccaagtgaactgtgtgggaagggtttgtggagggattggaaggggtggggagaagccagt

SEQ ID NO: 528529 - DNA, 201 bp, Homo sapiens
tagaaatgagacaatcaaagcccccccagggtggcacacccatccgtttgctggggtgtggcagccacatccaagactggagcagcaggctggccacgctygggccagagagagctcacagctgaagctcttggagggaagggctctcctcaccctgccaggaagcttcttaacatgtgacaggaccagggaccaggagca

SEQ ID NO: 528530 - DNA, 201 bp, Homo sapiens
acctctccctggcaaagcgatctgtgctcaacaatccgggcaagaggaccatcattgagcgctcctctgcccgctccagcattggtgagaagtccccaccrcctgcttctgtgcccactcaagtgccagtgagaaccttcctcctcccttttcttttttttgagatggagtctcgctctgtcacctaggctggagtgcagt

SEQ ID NO: 528531 - DNA, 201 bp, Homo sapiens
tagacagcactgaaagagctgcattctccttcctcccttctccactactgagaaggcctgacaaagcaaatgcctcacatgggcaaggctggccgtcgccrtggttcccttactgataccaggtgggatccccaaacattccctcaactccagttcacagcagacacgagccttgactcttatgttccacaacttaattcc

SEQ ID NO: 528532 - DNA, 201 bp, Homo sapiens
tgctgagaatgctgggcagaccccctgccagggcctgaaatgctgccattggtgactcaaccttttgtcttcaaaactgcaagggagaaaaaaaatctcayactagggggcaccacagcttttatcagcaatcccattagaggctaaggctgagaggcatgagagtgcaaggtaagtgtctgaaagatggtgagtgggaag

SEQ ID NO: 528533 - DNA, 201 bp, Homo sapiens
accccgcatttgcctcagcggtggaagaaaaacaagtatttactggagggaatggaaggccccaactctccttaaaaaaaaaaaaaaaaaaaaaaaaaaawtcaatcatgtcattccccactgggtccaccttcatggtggagttaaggggagggagatttcgaaaagggaacgcatagctattggttaatagcttctctg

SEQ ID NO: 528534 - DNA, 201 bp, Homo sapiens
ccaggggaggcctcttccttccagaggagtgaaatgtgcccgccttggcctctgcctgcctgtttaccatactcttctccagtcgaggaataaagccgtcrgaagctcccccagcccctgctcgctttcatcctcaccagcacctggcggtgttcagacctttcctctacacggtgggatccactagattctcatctgaaa

SEQ ID NO: 528535 - DNA, 201 bp, Homo sapiens
tccctacgacaacctgtgaggtaagcagggctggcattactcccactttagagccaaggaacagttcagaggtgaactcacttgcccaaggtaccacagcrgtgtgtggaagggacgcgacacaaggtcagggctgactccagtccccaagccctcttcctcctcactggtctgatggacagagacagcgcacagtggccc

SEQ ID NO: 528536 - DNA, 201 bp, Homo sapiens
gcagccccacatgggagttcactctgtgggtgatgagttttccccaacctctgcctctccaaaagaacttctaatttccctttcccaaagatctgcaggakagtggttggctagtatttgtgagtggctcagaagggagttcatcatagtctttgtgttcaaagaatgttctaagaactagtacattaactagctttgggg

SEQ ID NO: 528537 - DNA, 201 bp, Homo sapiens
  misc_feature (1)...(201): n = A,T,C or G
aaatgggcacagtggtagcgcctaccccacagggaggcactgaggacgcctggcctcacacagaggaagggcaataggactaaagcagttttcagggccangtgggtttaaaagtcctgcattctagtccttggcctccaactccttgggcttctactgtgaggaccaaatgacccagcactaagatccttccctgactca

SEQ ID NO: 528538 - DNA, 201 bp, Homo sapiens
aaaaaaaaaaaaaaaaaaaaattcaatcatgtcattccccactgggtccaccttcatggtggagttaaggggagggagatttcgaaaagggaacgcatagstattggttaatagcttctctgcgcctctgtcctcacctgtaaaatgggcacagtggtagcgcctaccccacagggaggcactgaggacgcctggcctcac

SEQ ID NO: 528539 - DNA, 201 bp, Homo sapiens
ggaaggaatagaaggccagcaggccagtgctgagaatgctgggcagaccccctgccagggcctgaaatgctgccattggtgactcaaccttttgtcttcaraactgcaagggagaaaaaaaatctcacactagggggcaccacagcttttatcagcaatcccattagaggctaaggctgagaggcatgagagtgcaaggta

SEQ ID NO: 528540 - DNA, 201 bp, Homo sapiens
cctgtgaggtaagcagggctggcattactcccactttagagccaaggaacagttcagaggtgaactcacttgcccaaggtaccacagcggtgtgtggaagrgacgcgacacaaggtcagggctgactccagtccccaagccctcttcctcctcactggtctgatggacagagacagcgcacagtggcccaggggaggcctc

SEQ ID NO: 528541 - DNA, 201 bp, Homo sapiens
tgtttctggaaggacatgggggcttagagtcctaaacagactgtttcccccttccagcagagaaaggagtcgaagaagccaccagccaagctgcagccccragctctagcaggctggctccgcccggaagatggaggtcaagcagaaggggcagaggatgaactggaagtccgggtcggtacctctgcagttttatgcttc

SEQ ID NO: 528542 - DNA, 201 bp, Homo sapiens
aaaggagtcgaagaagccaccagccaagctgcagccccgagctctagcaggctggctccgcccggaagatggaggtcaagcagaaggggcagaggatgaamtggaagtccgggtcggtacctctgcagttttatgcttctgtggcagcgaggagggtggggtcaggggagagggagggcagggagaggtggcagtgaacag

SEQ ID NO: 528543 - DNA, 201 bp, Homo sapiens
gtgacctggagcagcagcgccatctctgggcttcagtcttctcccagagcacaaaggactctgggtctgacctcactgtttctggaaggacatgggggctyagagtcctaaacagactgtttcccccttccagcagagaaaggagtcgaagaagccaccagccaagctgcagccccgagctctagcaggctggctccgccc

SEQ ID NO: 528544 - DNA, 201 bp, Homo sapiens
gatggggatgggcatgacctctgacatctcctgggtcctccctgccctgcctcctagttcaacgccccctttgatgttggaatcaagctgtcaggggttcwgtaccagcagcacagccaggccctggggaagtttcttcaggacatcctctgggaagaggccaaaggtgagtcctgcctggactgggtttgctcggtttcc

SEQ ID NO: 528545 - DNA, 201 bp, Homo sapiens
caccttcatggtggagttaaggggagggagatttcgaaaagggaacgcatagctattggttaatagcttctctgcgcctctgtcctcacctgtaaaatggrcacagtggtagcgcctaccccacagggaggcactgaggacgcctggcctcacacagaggaagggcaataggactaaagcagttttcagggccaagtgggt

SEQ ID NO: 528546 - DNA, 201 bp, Homo sapiens
ctctcccctccgcttctcaggactggagtgtgtgtgaaggctgacatgaagcactcatcatggggtccactgctcagaattctccctcaaggatcccaacagtgtgtgcatttttctgcagtgtgcgctaaaagtagaaattaagaactcccacaagtttaagaaacaggacattttctaaacacatgaaagaatggtaca

SEQ ID NO: 528547 - DNA, 201 bp, Homo sapiens
aaaatacaaaattagctgggagtggtggcgcacgcctgtaatcccagctactcgggagtctggggcaggagaattacttgaacccgggaggcgtaggttgmggtgagctgagatcacgccactgcatgccagcctgggctacaagagcgaaactccatctcaaaaaaaaaaaaaaaaaaaaagaaaagtacttagcatggg

SEQ ID NO: 528548 - DNA, 201 bp, Homo sapiens
tctcccctccgcttctcaggactggagtgtgtgtgaaggctgacatgaagcactcatcatggggtccactgctcagaattctccctcaaggatcccaacagtgtgtgcatttttctgcagtgtgcgctaaaagtagaaattaagaactcccacaagtttaagaaacaggacattttctaaacacatgaaagaatggtacat

SEQ ID NO: 528549 - DNA, 201 bp, Homo sapiens
ctcccctccgcttctcaggactggagtgtgtgtgaaggctgacatgaagcactcatcatggggtccactgctcagaattctccctcaaggatcccaacagtgtgtgcatttttctgcagtgtgcgctaaaagtagaaattaagaactcccacaagtttaagaaacaggacattttctaaacacatgaaagaatggtacatt

SEQ ID NO: 528550 - DNA, 201 bp, Homo sapiens
cctgggggccctaccccgagcaacagttcaatcatctctgctgggagctgcagtaggcggcagaaaggaatggttaggagggttcaaatctcggctctacyaccacttaagcagctgtgcaagaggctccacgtctccgaacctcaagtgtcctcatctgtaaagtgttgagaagaatagcaccttcttcacaaggctgtt

SEQ ID NO: 528551 - DNA, 201 bp, Homo sapiens
gtaagatcatggttcactgcagcctcaaacttcgtaggctcaagtgatcctcccacctcagactcccaaagtactgggattataggtgtgagccactgcctttttttttttttgagacagagtctggctctgttgcccaggatggagtgcagaggcgcgattttgactcactgcaacctccacctcccaggttcaagtgat

SEQ ID NO: 528552 - DNA, 201 bp, Homo sapiens
tgcatacactagctggataggaggtagcattggcccaattttgaggatgagcagatgaaggctctgagagagaaactgagtcacttgcccaaggtcttctrgtgggtacacataaagtggcagagctgagattcacacctgtatccacctgtgcccttaacagcatcatccctggggacgtccgctgaggacagccaggct

SEQ ID NO: 528553 - DNA, 201 bp, Homo sapiens
gagtctggctctgttgcccaggatggagtgcagaggcgcgattttgactcactgcaacctccacctcccaggttcaagtgattctcctgcctcagcctccygtgtagctgggactgcaggtgtgtgccaccacgcctggctaatttttgtatttttagtagcgtcggggtgtgttagtccattttcacgctgctgataaag

SEQ ID NO: 528554 - DNA, 201 bp, Homo sapiens
tgttgaccgaaaagaaggaagggagactggcaggagacgcaggagcggcgcgccccgcaaagtcagggaggttcctcggcctcacctctggactcccctcrgaatggtccgcaaggacggggccagagccccccaaatctctaagcggtggaggggagctgaacggctccagcttgggatttgggactcaggacggccgag

SEQ ID NO: 528555 - DNA, 201 bp, Homo sapiens
agacatacctgagactgggcagtttacaaaaaaaagagaggtttaatggacttacagctccatgtagctggggaggcctcacaatcatggcagaaggcaagggaggagcaagtgacatctcacatggatggcagcaaaaagggagagagagcctgtgcaggtgaactccccttcataaaaccatcagatcttgtgagactt

SEQ ID NO: 528556 - DNA, 201 bp, Homo sapiens
gggccctccttttcctgacagggtcaataaactaaatgaatcgtgcccactttctgggccagcatcttaactattggtgtttggttaataccacgttgcayctgcgtggcattttgtaggtcaccagatgcactagcgtgtttgaatcttgcagccatcctgtagggcagactgtattagtcccattctgcagaacaggat

SEQ ID NO: 528557 - DNA, 201 bp, Homo sapiens
gacctcctcccatgactcaactcccactggttaccccctacaacacatgggcattcaaaatgagatttgggtggggacacagccaaaccacatcatggggytttgccatgttggccaggctggtcttgaactcctgagctcaggtgatccgcctgcctcagcctcccaaagtgctgggattacaggtgtgagccactgtgc

SEQ ID NO: 528558 - DNA, 201 bp, Homo sapiens
agctcagatttcttcccgccccttcagcctttcttattgtgggccgcttccactcactcggtgttacagagtgcaaacccctcctggtcatttctccaaargcccccagaagatgctcaccatcatctttgattagcaaaatgcaaataaaaatcacaataagggccgggtgtggtggcttacacctgtaatcccagcact

SEQ ID NO: 528559 - DNA, 201 bp, Homo sapiens
cttctttctgccaagcactgtgctaggaactggatatacagacacaaataagaggaactttttgcccttgagaagctcgcgaataatgctagtgtcgcaarataaattatttaatggtggtttgtgtgtcctgtaggagcctgaggggctggggtggtagacacgaattgagccctagatgatgggtaggaatttgcaggt

SEQ ID NO: 528560 - DNA, 201 bp, Homo sapiens
ttaagggcatactgctagtgacatagtcgcaaaaggacaaatactgtatgattccacttagataggtcgctagagcagtcacattcacatagacagaaagragaagggtggctgccagggctggggaggggcaatggggaagggagttatttaatgggtacagagtttcaattttgcagctgaaaagagttctggagacca

SEQ ID NO: 528561 - DNA, 201 bp, Homo sapiens
gttggccaggttggtcttgaactcctggcctcaaacaggagttcacctcgatctcccaaagtgctaggattacaggctgagccatcacgcctggccttgattttttttttttttttttttttgagacaagtcttgctttgtcgcccaggctggattataatggcgtgatcttggctctctgcaacctctgactcccgggtt

SEQ ID NO: 528562 - DNA, 201 bp, Homo sapiens
ggtgatgggcctgactggctctgccacctcatagttttgggacccccatgcaagtcaaatcgcctctgtcagcttctttcctcatctgtgaaagggggacrtgttaatactacctcaggggctgtgacattaatgatgtaactaagaggcacactcaaaacgcagtcctggctaaggctcctgcccagcctgcagtcagat

SEQ ID NO: 528563 - DNA, 201 bp, Homo sapiens
ggcatcatcacaggtccaaatgaacacacgaccatcctaggaagaaacaggatagagtcaggaggtggagtcaagactcctgcgtttgtgatgtgatgtcytcccagtctagagccacccggcacctctctgcaggaacagggtgggggattcaaaggggagccgaggacctctggggcgtccacagctttgtttctgtct

SEQ ID NO: 528564 - DNA, 201 bp, Homo sapiens
cgacacttgcatttcgtcttagtctttctttacttctgaaatgatttttaattctaattctttcctgagttctgtcaccttatttctgatttttaaaaagwtgatttacactattctctcttgttttgtattgttagaatgtcacctggcttgatttgaaatagcaggttacagcttggctcggttatgtgggcatgtctt

SEQ ID NO: 528565 - DNA, 201 bp, Homo sapiens
actgtttatccttttcaggcaggatctgctgtgttcatcgacacttgcatttcgtcttagtctttctttacttctgaaatgatttttaattctaattcttycctgagttctgtcaccttatttctgatttttaaaaagttgatttacactattctctcttgttttgtattgttagaatgtcacctggcttgatttgaaata

SEQ ID NO: 528566 - DNA, 201 bp, Homo sapiens
tttaagaaacaggacattttctaaacacatgaaagaatggtacattggagcttttttttaagaaaaatcttttattataaagtaatagatcaagaaacaaraattctgccacctgcctgaaaagccctgtcattatgcccttcctaatcacagctccctcttccactataagtaaccactgccctaacttctaacccattt

SEQ ID NO: 528567 - DNA, 201 bp, Homo sapiens
gtgcgcttctagcttctgctcctccttccactggccgtcctcctcctccctaacagtggggacagaaagagaatcagcagggggccgttcccacacctcamctcctccccaacccaacaggctctgcctggggtggagaagcgattccatctttcttctttcattcatggagtttgtggcattttattcccttcaccccag

SEQ ID NO: 528568 - DNA, 201 bp, Homo sapiens
gcccttcctaatcacagctccctcttccactataagtaaccactgccctaacttctaacccattttccccccattttatcacccaaatgtgcacccctagwtactatagtttagtcttgtccattaaacatttttttggatgttttttacatctcctactttgcagattcctcctctgatttttttccttacaatttttct

SEQ ID NO: 528569 - DNA, 201 bp, Homo sapiens
catttattccttgattgaaccaccaacatcacgaccactgtcactcgctgattcaccaaaagttgggtaaagaatgaccttgtttatattaatctttcttwaatgtatgcatagctcacatactttttaaaagttttaataacaccactccattctacagggtcccaatgactactgcagggcatgtcacctggaggcaac

SEQ ID NO: 528570 - DNA, 201 bp, Homo sapiens
tcaccaaaagttgggtaaagaatgaccttgtttatattaatctttcttaaatgtatgcatagctcacatactttttaaaagttttaataacaccactccawtctacagggtcccaatgactactgcagggcatgtcacctggaggcaaccatagctaaggtggcagtgagcaggctgctgctgcaccagccctcccctgct

SEQ ID NO: 528571 - DNA, 201 bp, Homo sapiens
aaggaaatgctaaatatcagagtcactgaaaatgcatttttttccccctgtcccaattcatcaacccctgaactctattcacagaacccttggagatccayggcacccaggcaaacccacaaatacgtgaaaggcagtgagctgagggaaagcagtagagatgtggccataaaaatgagccaggacttcctcaagaatctc

SEQ ID NO: 528572 - DNA, 201 bp, Homo sapiens
ttggccaacacgctgcactgcagcagctctctgcctgcctggggggctcctgcatagagaagcttgatttggctcctcagtcacttgatcatttgacactsagacagaggggagcttctaggcccatttccccaaatggacactgacttagtttatgctttttaattcagtgaacaaacacatgctgagcacccacctgtc

SEQ ID NO: 528573 - DNA, 201 bp, Homo sapiens
  misc_feature (1)...(201): n = A,T,C or G
cttgtccgcagggtgatggtctctgaggcaccatgcctcctgcaccactgaacaccctggtcccttctgcttgctggccctgcctattccaatggatgtcnctttccccagctgtcccaccctgggagtttcaggactatcagctgcactcccatggccaccaggggcaattatgcccattcaaaggcactcattctgtct

SEQ ID NO: 528574 - DNA, 201 bp, Homo sapiens
agcagtgccaagccctgcctggtctggcttcagggcagagaggctcaaagctgctctagagcaatcatgtctggtcagctgaccactccccggcccactgyccagcggggaccctcccgtgccaccctctagggaggctgcagcagacacggggcaaggcaggcgctctcactgcacgaaaggcaggggatggactcacgg

SEQ ID NO: 528575 - DNA, 201 bp, Homo sapiens
cggcaggtctaataaccactgtaatttcaaagttgtgatgagcataagtggtattttgaggtagctaagtaaccgtgatgtgtgatgacaatatctgtgamttctactggtgacaaagtgacaggcactacaaatactactgaagtttctggcctacatccataattgaaggaaatgctaaatatcagagtcactgaaaat

SEQ ID NO: 528576 - DNA, 201 bp, Homo sapiens
agctgaccactccccggcccactgtccagcggggaccctcccgtgccaccctctagggaggctgcagcagacacggggcaaggcaggcgctctcactgcaygaaaggcaggggatggactcacggtgtgagcgttgttgatcttctttacttcccattggccttccccggtgtaagtcagcagggagatggccccatccga

SEQ ID NO: 528577 - DNA, 201 bp, Homo sapiens
tgcactcccatggccaccaggggcaattatgcccattcaaaggcactcattctgtctggctcagatgggaattctcacctccctacgcaaggaacacatcstgatttttctttgggaactccctccactgtatcaggccttggtttcttggagggcaggcagtagaggagtgtttctgaagcacttctcatgcttctcagt

SEQ ID NO: 528578 - DNA, 201 bp, Homo sapiens
ctctggaccttctcctgcagccctgtcctcttatactgagccttgtgtttacctctcaggaaatgccctgagtgtggacttctggttcaaagggccttgtytggcctattgtcttggtggtttgactgggctctgcctggggctttcactgtggctgccctctgcctttgtattgagtcatctttctacactctcttcttt

SEQ ID NO: 528579 - DNA, 201 bp, Homo sapiens
gcaggtggcacaggggaaaataccagtccaagcagccaagcagagggaatacacgagtagagacaaagaggtctgagagagcctgatgtgtgtggggaaayggcaagcagtcctggctacccttaaggttgaggagagaccccaagggagctacagctggtgttcctttcctggatgacagagcctctgatgttccaggca

SEQ ID NO: 528580 - DNA, 201 bp, Homo sapiens
tggctaatttttgtatttttagtagagacggggtttcgccatgttggtcaggctggtcttaaactcctgacttcaggtgatccgcccacctcagcatcccmaagtgctgggattacaggctgagccactgcgcccggctgatattgttaagtgtggggtatgatctctcaatctcaagtttcaaatctttgttttttaatt

SEQ ID NO: 528581 - DNA, 201 bp, Homo sapiens
ttgcggtgagctgagatcacgccactgcatgccagcctgggctacaagagcgaaactccatctcaaaaaaaaaaaaaaaaaaaaagaaaagtacttagcayggggcctgacactcagtgagcatgcaaatgtttgtcattactacttggcctcatctagttctcaaaccaaactcatacgagtaggtagcatatccattat

SEQ ID NO: 528582 - DNA, 201 bp, Homo sapiens
tgggccctgtgtcagggccttgcatacactagctggataggaggtagcattggcccaattttgaggatgagcagatgaaggctctgagagagaaactgagwcacttgcccaaggtcttctggtgggtacacataaagtggcagagctgagattcacacctgtatccacctgtgcccttaacagcatcatccctggggacgt

SEQ ID NO: 528583 - DNA, 201 bp, Homo sapiens
  misc_feature (1)...(201): n = A,T,C or G
ctatcagctgcactcccatggccaccaggggcaattatgcccattcaaaggcactcattctgtctggctcagatgggaattctcacctccctacgcaaggnacacatcctgatttttctttgggaactccctccactgtatcaggccttggtttcttggagggcaggcagtagaggagtgtttctgaagcacttctcatgc

SEQ ID NO: 528584 - DNA, 201 bp, Homo sapiens
gaaattagaaccctcatacactgctgatgggaatgtaaaagggtacagttactttgcaaaacagtttagcaattcctcaaaaagttaaacacagaattacsatatgactcagcaatttcacacctaggtatagacccaagagaattaaaaacatatgttcatgcaaaaacttatctgcaaatgttcatagcagcattattc

SEQ ID NO: 528585 - DNA, 201 bp, Homo sapiens
acttgaactcattatagtaagtaggagaagccagtcacaaaagaccacagattgtctcattctatgtacaactgatcctcaatttcatttcattataatgytgacaagattaaaaaaaaaaaaacaactcccagcgggggcccctgcctgtgtggagtctgtgtgttctccctgtgtctgcgtgggctctctcctggtact

SEQ ID NO: 528586 - DNA, 201 bp, Homo sapiens
ttatagtaagtaggagaagccagtcacaaaagaccacagattgtctcattctatgtacaactgatcctcaatttcatttcattataatgctgacaagattaaaaaaaaaaaaacaactcccagcgggggcccctgcctgtgtggagtctgtgtgttctccctgtgtctgcgtgggctctctcctggtactctggtttcctt

SEQ ID NO: 528587 - DNA, 201 bp, Homo sapiens
cctatgggccttagttcccttatctttaaataaggctaaagatagcatctgtctcaacagttgttatgaaggttaaacaagatattgaatgaaaactcacrcctgtaatcccagcactttgggaagctgaggcgggcggatcacctgaggtcgggagttcgagactagcctgaccaacatggagaaaacttgcctctacta

SEQ ID NO: 528588 - DNA, 201 bp, Homo sapiens
gcactttgggaagctgaggcgggcggatcacctgaggtcgggagttcgagactagcctgaccaacatggagaaaacttgcctctactaaaaatacaaaatyagctgggagtggtggcgcacgcctgtaatcccagctactcgggagtctggggcaggagaattacttgaacccgggaggcgtaggttgcggtgagctgaga

SEQ ID NO: 528589 - DNA, 201 bp, Homo sapiens
acccgggaggcgtaggttgcggtgagctgagatcacgccactgcatgccagcctgggctacaagagcgaaactccatctcaaaaaaaaaaaaaaaaaaaargaaaagtacttagcatggggcctgacactcagtgagcatgcaaatgtttgtcattactacttggcctcatctagttctcaaaccaaactcatacgagtag

SEQ ID NO: 528590 - DNA, 201 bp, Homo sapiens
gaaaggctggataaacgcttgattctttctgaactggttctatcactttccaaagatgactgattctcctctttatttattattaacaatttttttttttwaaaattgagacagggtctcactgtcacccaggctagagtgcaggctggtaagatcatggttcactgcagcctcaaacttcgtaggctcaagtgatcctcc

SEQ ID NO: 528591 - DNA, 201 bp, Homo sapiens
gtagtttcaaccaggttaccaaaggaccttagaaataatcagcatttaattctaaccactctcacccaccagtcagggttgatgaaccacacttctgaatgagagagagagagagagagagagagagagagagaaggcgggggggggggggggggaggaaagagggagggggagagaaaaggacggaaggaaggaggaagg

SEQ ID NO: 528592 - DNA, 201 bp, Homo sapiens
tagtttcaaccaggttaccaaaggaccttagaaataatcagcatttaattctaaccactctcacccaccagtcagggttgatgaaccacacttctgaatgagagagagagagagagagagagagagagagagaaggcgggggggggggggggggaggaaagagggagggggagagaaaaggacggaaggaaggaggaaggg

SEQ ID NO: 528593 - DNA, 201 bp, Homo sapiens
taaattcttgggatagaaaagaggacttaaaagaagtttcagtgtggaacagacatttcttaccattttccccatttcatcttttccagcacaagccctgyaggtataaagtttgacttgtgatttcagaaaggcagacagtggaagaggatggctgcaaagcagttcaagaggtacacaccaagtaagcacaggttctct

SEQ ID NO: 528594 - DNA, 201 bp, Homo sapiens
tccagtggggctaagaagtgacagcaggaggaagacaggtgggaagactattgtcaagcctccgtacccactcagccttcatccgagagcaggttattgtrttggctggaagactgacagcctagaactacaaattattcccaggttcctcccagcagagagtgattagactgccacagtcctgacaactcagagggcact

SEQ ID NO: 528595 - DNA, 201 bp, Homo sapiens
agtttcaaccaggttaccaaaggaccttagaaataatcagcatttaattctaaccactctcacccaccagtcagggttgatgaaccacacttctgaatgagagagagagagagagagagagagagagagagaaggcgggggggggggggggggaggaaagagggagggggagagaaaaggacggaaggaaggaggaagggc

SEQ ID NO: 528596 - DNA, 201 bp, Homo sapiens
gtttcaaccaggttaccaaaggaccttagaaataatcagcatttaattctaaccactctcacccaccagtcagggttgatgaaccacacttctgaatgagagagagagagagagagagagagagagagagaaggcgggggggggggggggggaggaaagagggagggggagagaaaaggacggaaggaaggaggaagggcg

SEQ ID NO: 528597 - DNA, 201 bp, Homo sapiens
ctgacacctagaaccaaagatatcactggtaaattaactcatggcagttagaatacaaccatctcaagttcttgactgcatttgtttgttcactcactcaytcattcattcattcagtaagcattcattctaagtaccttctttctgccaagcactgtgctaggaactggatatacagacacaaataagaggaactttttg

SEQ ID NO: 528598 - DNA, 201 bp, Homo sapiens
ggctcacccttggccgtccttgctgtctgggaagggtggcttggtagctaagcgtataattcccatccaaccccatcgttgcttgggaacacttggaactrcacctgggcacctcggcgccctagtctcacatgggtcagaagggaaaattcatcccgaatccgcctccttcttggtgccggttctgttgtagctgtctca

SEQ ID NO: 528599 - DNA, 201 bp, Homo sapiens
ccgctctgctgccaagctcagcatacctgaggagtcgtgtcccgcatgctcgtggctcttctcccaggtgccgttttcctctctccagataatgactttcyggtcataggagcacgatgccaggatgttgccgtacatggggtgagcccaggccacttgccacacaggaccctcatgactacaaagggagagataggccag

SEQ ID NO: 528600 - DNA, 201 bp, Homo sapiens
aggatctgccctccattgcgcacatcaaagattttgacggacctgtctgatgagcaggttgccaggcgggtgccatagtagtccatctgggcgtcgtgctrcaaagggaggacagctcgggaagcctgcaggctgggtgggtgggtgggtggggtgagggctgtcactacacagagtctagtttggaccagaatctccctg

SEQ ID NO: 528601 - DNA, 201 bp, Homo sapiens
atgcagtgacaagccacctttgtgcgtggggttaagccaggccatcacagccgtggcctttgtgaatagtttgttctagtgcgtggaccgacaagagtcamactgagctggtggggtggggtggttaggataacgcagcaggaattataagcaatatgactttatttagttcctttggaaacaaaaccccccaaataatgc

SEQ ID NO: 528602 - DNA, 201 bp, Homo sapiens
gcacaaaaatcccaagtttagaaccaaaccaaacaggttcccatgatgtgaaaggcctagctggctccctctagggtggtggtgtataactgaaggctcayccttggccgtccttgctgtctgggaagggtggcttggtagctaagcgtataattcccatccaaccccatcgttgcttgggaacacttggaactgcacctg

SEQ ID NO: 528603 - DNA, 201 bp, Homo sapiens
ctcttgcatatcttcagcaaggaacacatacaacactttatgctgtttcttctccccactagaaggtgagctccttggagccatggtctgagccatctgcmgtttcaaatcccctcaaatcatccagcacagtgctttgcaaatagaaggaactcagcgactatttgctgaatgaataagtaaatgaacaaaagctgttat

SEQ ID NO: 528604 - DNA, 201 bp, Homo sapiens
caccactccattctacagggtcccaatgactactgcagggcatgtcacctggaggcaaccatagctaaggtggcagtgagcaggctgctgctgcaccagcyctcccctgcttgggagcacacaacaaggaagcagtgccaagccctgcctggtctggcttcagggcagagaggctcaaagctgctctagagcaatcatgtc

SEQ ID NO: 528605 - DNA, 201 bp, Homo sapiens
ctgatgagcaggttgccaggcgggtgccatagtagtccatctgggcgtcgtgctgcaaagggaggacagctcgggaagcctgcaggctgggtgggtgggtrggtggggtgagggctgtcactacacagagtctagtttggaccagaatctccctgaaatcaatctgatctcaaagtatcatcaccctcaggcaggaagcta

SEQ ID NO: 528606 - DNA, 201 bp, Homo sapiens
cctacttacttccacagcttgatgaggttgtcacagccacctgatgcaaacctcttgatgtaattgggtttctgccccgatgggtggtctatgaggcttcyaggtacaacagcaggggcccagctgacggcattgcagccaatctgtaaagatgggacacatggtgactctgccttgcaagagaacactgcttctgcagac

SEQ ID NO: 528607 - DNA, 201 bp, Homo sapiens
gtctgatgagcaggttgccaggcgggtgccatagtagtccatctgggcgtcgtgctgcaaagggaggacagctcgggaagcctgcaggctgggtgggtggrtgggtggggtgagggctgtcactacacagagtctagtttggaccagaatctccctgaaatcaatctgatctcaaagtatcatcaccctcaggcaggaagc

SEQ ID NO: 528608 - DNA, 201 bp, Homo sapiens
ctgtctgatgagcaggttgccaggcgggtgccatagtagtccatctgggcgtcgtgctgcaaagggaggacagctcgggaagcctgcaggctgggtgggtrggtgggtggggtgagggctgtcactacacagagtctagtttggaccagaatctccctgaaatcaatctgatctcaaagtatcatcaccctcaggcaggaa

SEQ ID NO: 528609 - DNA, 201 bp, Homo sapiens
catctccgatcacgttaaggcagatgatcaatctgtggctgcatctgtaactcctcctgggaaaataatcctgttggagttgggggctcttcccagttgtytggttagttggcccaggaaggggcagtcctggagctggcgggtggggagccaggccccacctgtcttgtcactgctcgttctgctggccctctgtcactg

SEQ ID NO: 528610 - DNA, 201 bp, Homo sapiens
actcttgctttagggacaaactattcactcaacacactgcagaatgctctgggattgaaaacatactaagtcctttaggtaagggtgctatggagacagcraaaggaaacaggcttgtaaagaagagcaagaagcctaaatgcacagtgacgggccccacaacactgcgtgcacagccaggcacttgcttacagccttgta

SEQ ID NO: 528611 - DNA, 201 bp, Homo sapiens
tagactgccacagtcctgacaactcagagggcactgctagggagcctgccataccccgagattacaggctgataggcaaccactgcaaagccaccctggawccatgaatgatcaacagaaaggggtaatgaaaaccccaaattgcttccctcccacaaaaatgcccatgtccacacccctccagggagggtgatattaata

SEQ ID NO: 528612 - DNA, 201 bp, Homo sapiens
aaccactgcccagaggcttgtgggtgaacagagcatgtccctcctccactgaaatctcaccaaaatgagagtccaggaataaaaactcacagaaaaaaagragtaacaataacagcagctgtggatgatgatgtcaacacaggatactgttttcagcaaactgtgacagagctacagcgagaggatatggggtggcgggga

SEQ ID NO: 528613 - DNA, 201 bp, Homo sapiens
tccccaacccaacaggctctgcctggggtggagaagcgattccatctttcttctttcattcatggagtttgtggcattttattcccttcaccccagctgtaaaaaaaaccctccagaaaatgctctgcttccacagccaaagagtcagctccaacagttgggaattaggtgaacaggtgttgtgttgtttttcaaggatgt

SEQ ID NO: 528614 - DNA, 201 bp, Homo sapiens
tccctctcccctccgcttctcaggactggagtgtgtgtgaaggctgacatgaagcactcatcatggggtccactgctcagaattctccctcaaggatcccaacagtgtgtgcatttttctgcagtgtgcgctaaaagtagaaattaagaactcccacaagtttaagaaacaggacattttctaaacacatgaaagaatggt

SEQ ID NO: 528615 - DNA, 201 bp, Homo sapiens
ccctctcccctccgcttctcaggactggagtgtgtgtgaaggctgacatgaagcactcatcatggggtccactgctcagaattctccctcaaggatcccaacagtgtgtgcatttttctgcagtgtgcgctaaaagtagaaattaagaactcccacaagtttaagaaacaggacattttctaaacacatgaaagaatggta

SEQ ID NO: 528616 - DNA, 201 bp, Homo sapiens
ctcaaagagaaggccacacatccctacttacttccacagcttgatgaggttgtcacagccacctgatgcaaacctcttgatgtaattgggtttctgccccratgggtggtctatgaggcttccaggtacaacagcaggggcccagctgacggcattgcagccaatctgtaaagatgggacacatggtgactctgccttgca

SEQ ID NO: 528617 - DNA, 201 bp, Homo sapiens
ccagaaaatgctctgcttccacagccaaagagtcagctccaacagttgggaattaggtgaacaggtgttgtgttgtttttcaaggatgtcctccaacagaytgaaaacagtattttactggcaggagggagaaagaaaggtgaccttgtttcttgtgagtgtggctgagtcatggtgagtagggtaaagggtagaagtgtc

SEQ ID NO: 528618 - DNA, 201 bp, Homo sapiens
tcgaacccagtcactgtgcgcttctagcttctgctcctccttccactggccgtcctcctcctccctaacagtggggacagaaagagaatcagcagggggcygttcccacacctcaactcctccccaacccaacaggctctgcctggggtggagaagcgattccatctttcttctttcattcatggagtttgtggcatttta

SEQ ID NO: 528619 - DNA, 201 bp, Homo sapiens
gttcctcgttttgttttcaattgttgaccgaaaagaaggaagggagactggcaggagacgcaggagcggcgcgccccgcaaagtcagggaggttcctcggyctcacctctggactcccctcggaatggtccgcaaggacggggccagagccccccaaatctctaagcggtggaggggagctgaacggctccagcttgggat

SEQ ID NO: 528620 - DNA, 201 bp, Homo sapiens
tctgcgggtagcttttttccttctaattgtaaaatacacgtcacataaaatgaccttggccacttttaactgcacagtccagttgtgtgaagtacatttgkgtccctgagcagctggtctccagaactctttcagctgcaaaatgcaaactcttccagtgcacccactgtgtacctgcctcttaccagcataacaagtatt

SEQ ID NO: 528621 - DNA, 201 bp, Homo sapiens
gagagagagagagagagagagagagagagaaggcgggggggggggggggggaggaaagagggagggggagagaaaaggacggaaggaaggaggaagggcgrgagagaaagggagagggagaggaaggggggaggaagagggagcggggagagagagagagaagagagggagggggagagagagaaagggagagggagagga

SEQ ID NO: 528622 - DNA, 201 bp, Homo sapiens
tgcgtgggctctctcctggtactctggtttcctttcacacaataaagatgtgcatgttcacttcaatggtacgtctgcattgtcccagtgtgagtgtgggkgtgtgtgtgagtgctcctctggtggaatggtatcctgtccagggctggcttctgcctcatgccctaagctgccaggacaggctccaaccacctgtgaccc

SEQ ID NO: 528623 - DNA, 201 bp, Homo sapiens
taaaatatccaataatcatacagatgcatgacagcaaacgatgtggcattagtcatatgagccccccacattggttattgttggtttttgaactgtgtggkggtaggaggtaggacattgatgttcgctttgcaaacatttattccttgattgaaccaccaacatcacgaccactgtcactcgctgattcaccaaaagttg

SEQ ID NO: 528624 - DNA, 201 bp, Homo sapiens
gtcctagaagagagggagggttggcagggcccacagctggctgacttggccgcatccccaacgctggggtcctggtcagagcgggcggtggatggggcgtrtgtgtgtgtgtgtgtgtgtgtgtgtgtgtgtgtgtgtgtgagagagagagagagagagagagaaggagagtgagagacagtgctgtaaactgtcagggtg

SEQ ID NO: 528625 - DNA, 201 bp, Homo sapiens
cccttttctctaacctgtggttgggaagcaagggttatggctaccacagcccctagagggttccaccccattaatcagcaggtgtccctctctactatggkttcatctccaacccctgacctcacgtggggtctaaatccttgccttctctgccagagtcttctagccactcttttgttaaataacagctttattgagata

SEQ ID NO: 528626 - DNA, 201 bp, Homo sapiens
aggatgagcctactcccatatgactgcgctcttattaaaaggaggaagtgggacgcagagagaaacgcacatggggagaacgccacgtgaaggctgaggtygggataatgcatctgcaagccaaggaacacctaagaggaccagcaaaccaccagaagccaggggagaggcgtggaacagaccctgccttacagctgtcag

SEQ ID NO: 528627 - DNA, 201 bp, Homo sapiens
gacccttttctctaacctgtggttgggaagcaagggttatggctaccacagcccctagagggttccaccccattaatcagcaggtgtccctctctactatrgtttcatctccaacccctgacctcacgtggggtctaaatccttgccttctctgccagagtcttctagccactcttttgttaaataacagctttattgaga

SEQ ID NO: 528628 - DNA, 201 bp, Homo sapiens
ctaatgggtagttttttaaaaacacttttcaaaaccatgcaattatcagttattacgaagattagtaagattctcaggaatggtctgatggctaggaatcytcattgccagggaaacaaaggaaaaaggtcaaggttattaggtcaagcccttgggagccctgttgccaagggaacagatcgacccccgtcagggttggtt

SEQ ID NO: 528629 - DNA, 201 bp, Homo sapiens
gaacctctaaggaagcaaagggacagttgcccatctctaagtcactctcatcagaacctggtccaggttccacacctgtgccttctactactttttcccartgctttgggtcaggccctgagtgggtgccttaccttgagagaaagcagagtctgcaggcccaggcagaattcaggactctcagcatctataggaacaatt

SEQ ID NO: 528630 - DNA, 201 bp, Homo sapiens
ttgccccactggggaagattactttaagaccaagggaatcctgggctctaactttgtagcacctgaaagaggtcctgagattccaacctggcagccccatscctgtcttttctgtttgccacatgggccagatagggtcagtggtaggtttctaagctgattcaaatcccagaagctcttgcagggataggggttacaaag

SEQ ID NO: 528631 - DNA, 201 bp, Homo sapiens
ggtgacccccgcccccatggcccctttctaaccacacttaagttagataggcgtgttaggcatgccagggaagtgtttgcccctcacttccctttctgacrtatcccctgatgtaagtcttcattcaccagtgagttcttcagctcttttgtttgggggtgaggggtgagtgatgtaagtcttcattcaccgtgagttctt

SEQ ID NO: 528632 - DNA, 201 bp, Homo sapiens
aaacaattctggtttgagcacgcaccccgccccacaatccttccttctgccattttacttaatcttgctgaacctgttttcctcagccaaaaaaaaaaaaagctcgcatagtggctgaactaattatgtgaaatatgtgaaatgtgctttgcagcaggtggcttttaaactattgaccagaaaacacatacactgaaaaaa

SEQ ID NO: 528633 - DNA, 201 bp, Homo sapiens
ctcaaaaaaaaataaaaataaaaataaaaaaaaaaaagataaaaaggaacagcccctggtccaaaatcccagataaggtagaatcatttttttttttttttgaaacaccaagtgcgagtcagcctgggtttttagacctaaatctaaaaatgtattgaacacctgtatgatttcataaatattgccctgattgacgaggca

SEQ ID NO: 528634 - DNA, 201 bp, Homo sapiens
cagtcctagaagagagggagggttggcagggcccacagctggctgacttggccgcatccccaacgctggggtcctggtcagagcgggcggtggatggggcrtatgtgtgtgtgtgtgtgtgtgtgtgtgtgtgtgtgtgtgtgagagagagagagagagagagagaaggagagtgagagacagtgctgtaaactgtcaggg

SEQ ID NO: 528635 - DNA, 201 bp, Homo sapiens
gggcaacagagcgagactctgtctcaaaaaaaaataaaaataaaaataaaaaaaaaaaagataaaaaggaacagcccctggtccaaaatcccagataaggyagaatcatttttttttttttttgaaacaccaagtgcgagtcagcctgggtttttagacctaaatctaaaaatgtattgaacacctgtatgatttcataaa

SEQ ID NO: 528636 - DNA, 201 bp, Homo sapiens
ggttatggctaccacagcccctagagggttccaccccattaatcagcaggtgtccctctctactatggtttcatctccaacccctgacctcacgtggggtstaaatccttgccttctctgccagagtcttctagccactcttttgttaaataacagctttattgagataaaatatgcaactgtcgtcactatctaatttga

SEQ ID NO: 528637 - DNA, 201 bp, Homo sapiens
gaatggcttgagcccgggaggcggagcttgcagcgagccgagatcgcaccactgcactccagcctgggtgacagagcgagactccgtctcaaaaaaaaaawaaaataaaataaaataaaataaaaaattagctgggcgtggtggcgctcgcctgtagtctcagctactcgggaggctgaggcaggagaactgcttgaacct

SEQ ID NO: 528638 - DNA, 201 bp, Homo sapiens
gccgcaacagcccctgcctcgtatatgtcactttcaaccagaagatctatgtgtactgggaggtgcagctggagcggatggagtctaccaatctggtgaarctgctggagaccaagccggagtaccacagcctgctgcaggagctgggcgtgggtgagtcccagaaaagccagtggcccgagtgcccaggagacccacagc

SEQ ID NO: 528639 - DNA, 201 bp, Homo sapiens
ttttgttccccctcccacttcccacagcttccacctgccttttgctcttcccccatccccatttccctagactcctgttgaagggggtgacccagttctcytgatttttcacttggtggtaagtaaggaacctctaaggaagcaaagggacagttgcccatctctaagtcactctcatcagaacctggtccaggttccaca

SEQ ID NO: 528640 - DNA, 201 bp, Homo sapiens
ggtctcgaagctgtgcctcctgccccctcgtcctggcttctccctcatctctcctggcctcctgcttggtgctcatggcccctgctggaggagtgggccasgggctgctcggtgggggcgtcaccgagtcctctctgcttcttcctgcctgtctctgtcccgtgctgcagctctctttccaacaggagggtctccacggga

SEQ ID NO: 528641 - DNA, 201 bp, Homo sapiens
taggagctgcggaacagatggaccaaatggacgggcaagatgccgcaaacacaggcaggggcgggggcagactgagggtgaagtgagtagcaccgcagatmgggtgtgaagccgcactggctggaaggtgccactgttagcagaggagcgggggctgctcgtgggactccagagcccatcttgtctttcatgcccacagat

SEQ ID NO: 528642 - DNA, 201 bp, Homo sapiens
aggctagactggatgactggcttaacacactttatttgagagagaggttgtatcttaagtttgagattctgtgtacatcctataatgcaggatgtaccctstccaggataccctctctgagttcttcatgctcctctctccatacacgccaagctggggtcccttgtcttagctcccttttccatgcttctcacaaatgtt

SEQ ID NO: 528643 - DNA, 201 bp, Homo sapiens
ccatcacaaaacaatgaaggtaggcagttctaaacccaggcatccaggctgctcagttaccccacttagataccccaggatgctccccccacccccccagmcctgagccttaccctaggagtttaccctagggtcccagataatgagagcagagtaagccccagtatcaaatcatgccgttttccttggacacccatagat

SEQ ID NO: 528644 - DNA, 201 bp, Homo sapiens
gttgcatgtttgagaagtaatatgaaggcagagagcggataggagctgcggaacagatggaccaaatggacgggcaagatgccgcaaacacaggcaggggygggggcagactgagggtgaagtgagtagcaccgcagatcgggtgtgaagccgcactggctggaaggtgccactgttagcagaggagcgggggctgctcgt

SEQ ID NO: 528645 - DNA, 201 bp, Homo sapiens
aaaaaagaattagccagctgtggtggcgcacacttgtaattttagctactcagaagactgaggtgggaggatcgcttgagtccaggaggttgaggctgcartgagctctgatcatgccactacactccagcctgggtgacagagtaagaatctgtctctaaaaaataaacaaaaggaccggaaaagtcgaggggtgcggtg

SEQ ID NO: 528646 - DNA, 201 bp, Homo sapiens
tgggcaacaagagcaaaactctgtctcaaaacaaacaaaaaaactggtttttatgagactcatacaataggggcagaactcccagataaataaatcaaaaraggaagtggaccaggtgcggtggctcatgcttgtagttctagcactttggaggcaagaggatcacttgaagccaggagttcaagaccagcctaggcaaca

SEQ ID NO: 528647 - DNA, 201 bp, Homo sapiens
ctttcagccgcagcactccgtgctccaggtcgatgcagcactgcggggtgtagagcagtcatgccaggtcacctcagcccgccacctgcctcccggcctgytccttttgttccccctcccacttcccacagcttccacctgccttttgctcttcccccatccccatttccctagactcctgttgaagggggtgacccagtt

SEQ ID NO: 528648 - DNA, 201 bp, Homo sapiens
cctggggagtaggacagctgctgagaagcagagaggaatgcggccagctggggaaaatgggacagcaggggtcagggaggtgattggaagggcagacaccrtagtccccagctacctggcttcaagagcccccgttccccacacgcctcttcttctaaggcaaggtctttccctctggggactgactgagacagcagtcac

SEQ ID NO: 528649 - DNA, 201 bp, Homo sapiens
tgctttggcaaagcctggcagggggttagaaagccactgattccaggacaatacaagcttaagctcaagaggccagagatggggataggaagaaggcctartgaggtggatagttctagaaatcagaaagaatgctgaataggtgaagtctgagtggtgacaacctcactgtcctgtctgcctcacaggagcagttctcta

SEQ ID NO: 528650 - DNA, 201 bp, Homo sapiens
tgtcagtacaggcctggttgagtacctcttctcagactaggagaggggacagggaaccgagtgctcccaagcctttctacaaaggatttcctctcttccasgggtcagaggccaggaatatttctcagactaaatggagtaatagctgggggaataataataatagcatttagatagtgcctgctattaggcactgttcta

SEQ ID NO: 528651 - DNA, 201 bp, Homo sapiens
tttagtctctgtctcttttttttttttccttttttttttttttgagacagggtctcccccctaccacctaggctggagtgcagtggcatgatcttggttcrctgcaaccttttctgctagactgaagccattctgtcacctcagcctcctgagaagctgggactacaggcgtgtgccaccacactgggctaactttcctaa

SEQ ID NO: 528652 - DNA, 201 bp, Homo sapiens
ggggatagtcagaacatctctgggaactcctcgtgctgcagggagtgaaagtctcagcctttgccccaccccaaagagaaaggtgaggtgagcaccagggstgttgcagaaggggggacttacccaccacctgtgccgagcacaccacagtctcctgccccagctgtagctccaactgctccacctgggttgggggcccag

SEQ ID NO: 528653 - DNA, 201 bp, Homo sapiens
tgtgccttctactactttttcccagtgctttgggtcaggccctgagtgggtgccttaccttgagagaaagcagagtctgcaggcccaggcagaattcaggrctctcagcatctataggaacaatttgaaaacagaagaggctgagggttcccagtggtcactgctgccctcctcttagccgttgctccttctctgcccacc

SEQ ID NO: 528654 - DNA, 201 bp, Homo sapiens
acctgggagtcacttggtatattactattgtatttaattttttatatgctgattgcaactcactacattgttttcactcctaatgggtagttttttaaaarcacttttcaaaaccatgcaattatcagttattacgaagattagtaagattctcaggaatggtctgatggctaggaatcttcattgccagggaaacaaagg

SEQ ID NO: 528655 - DNA, 201 bp, Homo sapiens
ttttttttttttctttgagacagagtctcaccctgtcacccaggctggagtgcagtggcatgatctcggctcactgcaacctccgcctcctgggttcaagygattctcctgtctcagcctcccgagtagctgggactacaggcgcccgccaccacgcccggctaatttttgtctttttagtagtgatgtggtttcaccatg

SEQ ID NO: 528656 - DNA, 201 bp, Homo sapiens
ttggccgcatccccaacgctggggtcctggtcagagcgggcggtggatggggcgtatgtgtgtgtgtgtgtgtgtgtgtgtgtgtgtgtgtgtgtgagagwgagagagagagagagagaaggagagtgagagacagtgctgtaaactgtcagggtgcccgtgccaggtggtttgcgaggaagcgcttgtcactgtgtgggg

SEQ ID NO: 528657 - DNA, 201 bp, Homo sapiens
acttggccgcatccccaacgctggggtcctggtcagagcgggcggtggatggggcgtatgtgtgtgtgtgtgtgtgtgtgtgtgtgtgtgtgtgtgtgagwgagagagagagagagagagaaggagagtgagagacagtgctgtaaactgtcagggtgcccgtgccaggtggtttgcgaggaagcgcttgtcactgtgtgg

SEQ ID NO: 528658 - DNA, 201 bp, Homo sapiens
aataggtagaatagaataaagtaaaatagaaaatagcagagtacattgctctcagtgtaggtaagtattgttttgttagtcatatgtgcatgtgtgtactragtgccatgtaaaatgtattcctgctgtggtaagctgtggtcgaggagtttgaaagccattgctttcaaattcctctcaattatactgaccctagtcaga

SEQ ID NO: 528659 - DNA, 201 bp, Homo sapiens
ctgtcttccgtggcacaattccaagttcttgacgttagtaattgttaaaggaatggcaaactgttttgttttgaaggatctttctacagtctggtcttacycatgttcctagcaaccctgagatgattttcttccatttaccaaagcagccgggtcagtgctttctcacgttgccgtattcttcaggtattagtcagcttc

SEQ ID NO: 528660 - DNA, 201 bp, Homo sapiens
ctgggaggagctaggtgagggtcctgaacatctgacagggcagctggtgtccctcaagaaatggatgctggagggtcaggtaagaagctgactctggggarcaaggccccagggagctgggaggaaggtctcctggaggaggtagtgggagagcagtcatgggacagggccagggtggggagaagtgaaaagtcaccttgt

SEQ ID NO: 528661 - DNA, 201 bp, Homo sapiens
cgtgggcctgtcactcacatcagagttgggaagcccgcctccaagcccggaagacccgcctcctctgtaaggttaaaggaggaagaggcagagattggagrttcaggcagtgacgtaacttgctgccttaggtggccttccgctctggcggctgtcgcgacgggggttcagggaatatttactgggcctctccgctccctc

SEQ ID NO: 528662 - DNA, 201 bp, Homo sapiens
tctaggattaaagcgtcccagagttggtggtgcattttaacaggggcaaacttgaggaaggcagtgagacttagtagagctctgaataacagcatttcacmcggtgcagagctgccccacactactctgccagtttctaggacaaaaaacctaacttttccaacagtttaatatgctaaggtgtaccatgaatgagagagg

SEQ ID NO: 528663 - DNA, 201 bp, Homo sapiens
tgcctcccaggttcaagcaataatcctgcctcagcctcctgagtagctgggattacaagtgcctactaccatgcccagctaatttttgtacttttaatagwgatggggtttcaccatgttggccaggctggtctcgaactcctgacctcaggagatctgcctgcctaagcctcctaaagtgctgggattacaggcgtgagc

SEQ ID NO: 528664 - DNA, 201 bp, Homo sapiens; identical to SEQ ID NO: 299790

SEQ ID NO: 528665 - DNA, 201 bp, Homo sapiens
tgacttggccgcatccccaacgctggggtcctggtcagagcgggcggtggatggggcgtatgtgtgtgtgtgtgtgtgtgtgtgtgtgtgtgtgtgtgtgwgagagagagagagagagagagaaggagagtgagagacagtgctgtaaactgtcagggtgcccgtgccaggtggtttgcgaggaagcgcttgtcactgtgt

SEQ ID NO: 528666 - DNA, 201 bp, Homo sapiens
gctgacttggccgcatccccaacgctggggtcctggtcagagcgggcggtggatggggcgtatgtgtgtgtgtgtgtgtgtgtgtgtgtgtgtgtgtgtgwgagagagagagagagagagagagaaggagagtgagagacagtgctgtaaactgtcagggtgcccgtgccaggtggtttgcgaggaagcgcttgtcactgt

SEQ ID NO: 528667 - DNA, 201 bp, Homo sapiens
agtggtaggtttctaagctgattcaaatcccagaagctcttgcagggataggggttacaaagggctggagagctcagctcacttggtctcccgcttgatcygtccacctgctgtgcacagggagaccccagctgcccgagacgtggtgctgcaccagacatctggccgtatccacaacaagaatgtctccactcacctaat

SEQ ID NO: 528668 - DNA, 201 bp, Homo sapiens
ggcagggcccacagctggctgacttggccgcatccccaacgctggggtcctggtcagagcgggcggtggatggggcgtatgtgtgtgtgtgtgtgtgtgtktgtgtgtgtgtgtgtgtgagagagagagagagagagagagaaggagagtgagagacagtgctgtaaactgtcagggtgcccgtgccaggtggtttgcgag

SEQ ID NO: 528669 - DNA, 201 bp, Homo sapiens
ttggcagggcccacagctggctgacttggccgcatccccaacgctggggtcctggtcagagcgggcggtggatggggcgtatgtgtgtgtgtgtgtgtgtktgtgtgtgtgtgtgtgtgtgagagagagagagagagagagagaaggagagtgagagacagtgctgtaaactgtcagggtgcccgtgccaggtggtttgcg

SEQ ID NO: 528670 - DNA, 201 bp, Homo sapiens
tcctgccccctcgtcctggcttctccctcatctctcctggcctcctgcttggtgctcatggcccctgctggaggagtgggccaggggctgctcggtgggggcgtcaccgagtcctctctgcttcttcctgcctgtctctgtcccgtgctgcagctctctttccaacaggagggtctccacgggagggaaagaggaaaaata

SEQ ID NO: 528671 - DNA, 201 bp, Homo sapiens
gactggaatccctgttaggaaactcagatatgagtaaccaagaagttcgctattggaaacaaaggaagacaacttcacctactttgggacatagacagacattttgatatacgcttggatatacacacacatcgttttctcattccaaacattcattgagtatttactataagatatgttaccggaaggtatatcaatgaa

SEQ ID NO: 528672 - DNA, 201 bp, Homo sapiens
agactggaatccctgttaggaaactcagatatgagtaaccaagaagttcgctattggaaacaaaggaagacaacttcacctactttgggacatagacagacattttgatatacgcttggatatacacacacatcgttttctcattccaaacattcattgagtatttactataagatatgttaccggaaggtatatcaatga

SEQ ID NO: 528673 - DNA, 201 bp, Homo sapiens
gtgtgtgtgtgtgagagagagagagagagagagagaaggagagtgagagacagtgctgtaaactgtcagggtgcccgtgccaggtggtttgcgaggaagckcttgtcactgtgtgggggcagcagccttagtgcacctcccagcgtgtgtggcccccgccctcctctgcatccctcccaggcttcccaggactgcccagct

SEQ ID NO: 528674 - DNA, 201 bp, Homo sapiens
aagactggaatccctgttaggaaactcagatatgagtaaccaagaagttcgctattggaaacaaaggaagacaacttcacctactttgggacatagacagacattttgatatacgcttggatatacacacacatcgttttctcattccaaacattcattgagtatttactataagatatgttaccggaaggtatatcaatg

SEQ ID NO: 528675 - DNA, 201 bp, Homo sapiens
aggcccagaaggtgtggtgagagacatggtggtgtgggaagttgagttgtgtttggggtggtattgggtgatggacaaggacagcagtcagcagagccttygacccagcccaagcaggcaccccattgtgcttaggttcctatctgtggtcttgatttggctttgcttttcttgggaggaagatgaatcagaatcctggca

SEQ ID NO: 528676 - DNA, 201 bp, Homo sapiens
gaagactggaatccctgttaggaaactcagatatgagtaaccaagaagttcgctattggaaacaaaggaagacaacttcacctactttgggacatagacagacattttgatatacgcttggatatacacacacatcgttttctcattccaaacattcattgagtatttactataagatatgttaccggaaggtatatcaat

SEQ ID NO: 528677 - DNA, 201 bp, Homo sapiens
ttcaagaccagcctgaccagggtttagtagaaaccctgtctctactaaaaatacaaaattagctgggtgtggtggcgcatgcctgtaatcccagctactcrggaggctgaggcaggagaatcgcttgaacccgagaggcggaggttgtggtgagccaagatcacgccattacactccagcctgggcaacaagagcaaaact

SEQ ID NO: 528678 - DNA, 201 bp, Homo sapiens
tgcccgtgccaggtggtttgcgaggaagcgcttgtcactgtgtgggggcagcagccttagtgcacctcccagcgtgtgtggcccccgccctcctctgcatmcctcccaggcttcccaggactgcccagctgttttctcctggcattatctgcagcccagggctggcgcgcaggccagtaactgggttcagatcaaagaggg

SEQ ID NO: 528679 - DNA, 201 bp, Homo sapiens
cagctggctgacttggccgcatccccaacgctggggtcctggtcagagcgggcggtggatggggcgtatgtgtgtgtgtgtgtgtgtgtgtgtgtgtgtgwgtgtgtgagagagagagagagagagagagaaggagagtgagagacagtgctgtaaactgtcagggtgcccgtgccaggtggtttgcgaggaagcgcttgt

SEQ ID NO: 528680 - DNA, 201 bp, Homo sapiens
tctgagaacggggctttcagccgcagcactccgtgctccaggtcgatgcagcactgcggggtgtagagcagtcatgccaggtcacctcagcccgccacctrcctcccggcctgctccttttgttccccctcccacttcccacagcttccacctgccttttgctcttcccccatccccatttccctagactcctgttgaagg

SEQ ID NO: 528681 - DNA, 201 bp, Homo sapiens
gacctcctgggctcaagagatcctcccaactcagcctccggagtagctgggagggactacaggcacatggcaccatgcccagctttttttttttttttccrgacagagtgtagctcttgttgcccaggctggagtgcaatggcgcaatctcagctcaccgcaacatgtgcctcccaggttcaagcaataatcctgcctcag

SEQ ID NO: 528682 - DNA, 201 bp, Homo sapiens
ttctgttcagccttggagtggtgggtatgggtgggtacataatgggtagtagcacaatcaaggggtcacccacttagttccagttgagcttaaataagtgcagcatctcatgtagatgccatagttgggcaggaagcagccccaccatgcatggcttcctgagcactgcacaggctgccgctgggatttgtgtctatggct

SEQ ID NO: 528683 - DNA, 201 bp, Homo sapiens
cccaggagacccacagcatgctgcaggagctgggcgtgggtgagtcccagaaaagccagtggcccgggtgcccaggagacccacagcctcttacccacccyttcttggctctcagatcctgacgacctccctgtgactcgtgccctgcttcaccaaacgctctaccatccagaccagccaccacagtgtgctccctcaagc

SEQ ID NO: 528684 - DNA, 201 bp, Homo sapiens
ctgtgcctcctgccccctcgtcctggcttctccctcatctctcctggcctcctgcttggtgctcatggcccctgctggaggagtgggccaggggctgctcsgtgggggcgtcaccgagtcctctctgcttcttcctgcctgtctctgtcccgtgctgcagctctctttccaacaggagggtctccacgggagggaaagagg

SEQ ID NO: 528685 - DNA, 201 bp, Homo sapiens
gatgacagtcggccatggctcacctgttcctgccagggaatggtcagtattcacttccctgggcctggaggggggaagggatcccttctgtccagggaccrcctagggtgagccccacacaggtgctcacccatgtgtcctgactccctagctactgggcccagccactgacttgcagccaatttgattcagggagggcag

SEQ ID NO: 528686 - DNA, 201 bp, Homo sapiens
ggagctgggcgtgggtgagtcccagaaaagccagtggcccgagtgcccaggagacccacagcatgctgcaggagctgggcgtgggtgagtcccagaaaagycagtggcccgggtgcccaggagacccacagcctcttacccaccccttcttggctctcagatcctgacgacctccctgtgactcgtgccctgcttcaccaa

SEQ ID NO: 528687 - DNA, 201 bp, Homo sapiens
catggctcacctgttcctgccagggaatggtcagtattcacttccctgggcctggaggggggaagggatcccttctgtccagggaccacctagggtgagcmccacacaggtgctcacccatgtgtcctgactccctagctactgggcccagccactgacttgcagccaatttgattcagggagggcagcccccagctagtg

SEQ ID NO: 528688 - DNA, 201 bp, Homo sapiens
ttcctgaactgatggtgtctcagccaggttgtgcgtatgcaattctactgtgtacctggaaaaaggacactgggtcccctcctgcctctgaagggcccacrgatggtagtaggtaagggggtacaggccagtggatggtgtgggggtgcatggaagcaggatgggctcccagatgccacatggtagtaaaatgggtctgca

SEQ ID NO: 528689 - DNA, 201 bp, Homo sapiens
gagggagggagatgaggggtagccgtcagttctggaggagtggagatccatagctttcccctcatttcgagccctgtccttcccctgctgctgcagaacamccctctccccgtaggctctgaccttgccctgccctttacatattcttcctctggtcctcacaggccacggcactgagagtagtggctctggcctctttgc

SEQ ID NO: 528690 - DNA, 201 bp, Homo sapiens
gcatgcaccactatgcttgggtaatttttgtattttttgtagagacaaggtttcaccatgttggctaggctggtctcgaattcctgagctcaaccaaccaatccacccgcctccacctcccaaagtgctgggattataggcatgagccactgcacctggcctcacctggcaaatttttaaatttttttgtagaaatgggat

SEQ ID NO: 528691 - DNA, 201 bp, Homo sapiens
gccagagtcttctagccactcttttgttaaataacagctttattgagataaaatatgcaactgtcgtcactatctaatttgagaatattttcatcaccccraaaagaaaccctgtcccccacttgcttgtttgggccacattcttaccccaggcggctgagacatccagcagagatccgattgtattgggtgcctgtgtca

SEQ ID NO: 528692 - DNA, 201 bp, Homo sapiens
ggcatgcaccactatgcttgggtaatttttgtattttttgtagagacaaggtttcaccatgttggctaggctggtctcgaattcctgagctcaaccaaccaatccacccgcctccacctcccaaagtgctgggattataggcatgagccactgcacctggcctcacctggcaaatttttaaatttttttgtagaaatggga

SEQ ID NO: 528693 - DNA, 201 bp, Homo sapiens
aggcatgcaccactatgcttgggtaatttttgtattttttgtagagacaaggtttcaccatgttggctaggctggtctcgaattcctgagctcaaccaaccaatccacccgcctccacctcccaaagtgctgggattataggcatgagccactgcacctggcctcacctggcaaatttttaaatttttttgtagaaatggg

SEQ ID NO: 528694 - DNA, 201 bp, Homo sapiens
caggcatgcaccactatgcttgggtaatttttgtattttttgtagagacaaggtttcaccatgttggctaggctggtctcgaattcctgagctcaaccaaccaatccacccgcctccacctcccaaagtgctgggattataggcatgagccactgcacctggcctcacctggcaaatttttaaatttttttgtagaaatgg

SEQ ID NO: 528695 - DNA, 201 bp, Homo sapiens
tggcatagtgcccatcccactgaatctgttaggctgccagaccctgggttccctctgcagaacggagatcacggagtaccactgagtgcgttctcagactygccagagggctctggtgtttttgtatttctagcaatgatgaaggggcagagaagggcttaaaaaggaaggctcccttggccttccagcttgataagccct

SEQ ID NO: 528696 - DNA, 201 bp, Homo sapiens
acacagcctttttttttttttttttgagacagagtctcgctctgtcgcccaggctggagtgcagtggtacagtcttggctcactgcaagctctgcctcccrggttcacaccattctcctgcctcagcctcccgagtagctgggaccacaggcgcccgccaccatgcccggctaattttttgtagttttaatagaaacaggg

SEQ ID NO: 528697 - DNA, 201 bp, Homo sapiens
gttgctccttctctgcccaccccatccccagatccgaggacactggcacagagatgggggatagtcagaacatctctgggaactcctcgtgctgcagggastgaaagtctcagcctttgccccaccccaaagagaaaggtgaggtgagcaccagggctgttgcagaaggggggacttacccaccacctgtgccgagcacac

SEQ ID NO: 528698 - DNA, 201 bp, Homo sapiens
tctcgaactcctgacctcatgtgatccacccgcctcggcctcccaaagtgctgggattatcggcgtgagtcaccgcacacagcctttttttttttttttttgagacagagtctcgctctgtcgcccaggctggagtgcagtggtacagtcttggctcactgcaagctctgcctcccgggttcacaccattctcctgcctca

SEQ ID NO: 528699 - DNA, 201 bp, Homo sapiens
tcctgggttcaggcagttctcctgcctcagcctcccgagtagctgggattacaggtgtgtaccaccacgctcagctaatttttgtatttttagtacaaacrgggttttaccatgttggccaggctggtctcgaactcctgacctcatgtgatccacccgcctcggcctcccaaagtgctgggattatcggcgtgagtcacc

SEQ ID NO: 528700 - DNA, 201 bp, Homo sapiens
caggttcctgagctcaagtgatcctccttcctcagcctcctgagtagctgaagctgcaggtgtgcaccaccacacctggataattttttttttttttttttgagacagagtctcgctctgtcatcaggctggagtgcagtggcacgatctcggctcactgcaacctccacctcctgggttcaggcagttctcctgcctcag

SEQ ID NO: 528701 - DNA, 201 bp, Homo sapiens
ctgtttcctactggggaaatcagaaaaggtttcaaggaggaggtaacatctgagctgggcttttgcttgcagaatgcggacccagaatgattggagagcargaagagcaatccacatagaagaagcacagagcaaagacggtggccgaggaccagtgggaatttattgcgaatgttcaatagtgactgagtggttaagtgg

SEQ ID NO: 528702 - DNA, 201 bp, Homo sapiens
gagaatcgcttgaacccaggaggcagaggctgcagtgacacaagatcatgccactgcactccagcctgggtgacagagcgagactctgtctcaaaaaaaawttttttttttaaaaaaaggacgtgagtaacatgccttagaggttgggagggaggaaaggctgtttcctactggggaaatcagaaaaggtttcaaggagga

SEQ ID NO: 528703 - DNA, 201 bp, Homo sapiens
tcaaaataaataaataaaattctaaataaaatccaaatacaattttttttttttgtagaaaaaagagaaaaaagcagggtaagaagagaaagtggtggagytgagctgggcagagtggctcttttagaagcgatgacatttacacataggtcactatggagagggccatgcagacacctggaggagtgccacagacacagg

SEQ ID NO: 528704 - DNA, 201 bp, Homo sapiens
gctcacagggtgattaccccacctgagccctgctccctaagggtgcagtctgactcagacagctccaaggcacatgtactttcagacaaaccagatgtctrctgagcttctaggaaccaagcctctttgagacactttcacaaccactgcaattatatgaagaaatactgtattctaatccccatttagagggaaagaaag

SEQ ID NO: 528705 - DNA, 201 bp, Homo sapiens
tagagtatacacctacacctaggagtggaattgctggggcatcccatatacagctttgcctttttggcatattgccagagtgtttttaccagtgcacactsagacagctgcacacaggggctcctgaggttccacatcctctccaggacttggtatcagactttttctagccctggcttatcagcagatttttctctccag

SEQ ID NO: 528706 - DNA, 201 bp, Homo sapiens
agctcgctgtttgtcatccagaatccagtccacagctcctttatgttccttttgtctctgtcctttttcagggcaacgggcatgaggaggtagttgcatgygcctgggatggacagacatatatcattgatcacaaccgcaccgtcgtccgcttccaagtggatgaaaatatccgtgccttctgtgcaggtgacccccgcc

SEQ ID NO: 528707 - DNA, 201 bp, Homo sapiens
atatgactctcctcaagtcctggctctttaaaaaatgttgcatttcaaatatacagaagttataaagaataagataaccagtactcttcactcatcaccastttaaaaaataagctgttgaagctccctgtgcacttccacttccgcctgctgaaattggtgtttatcaggcccagacttctttatattctttatgcaaat

SEQ ID NO: 528708 - DNA, 201 bp, Homo sapiens
acatccagaccaaattattggtctcttgctgtttcatgacagtgtggtcctctgaagatttgttcagactccctggaactgttctttgtggtcctttttcrtggttttcaaaatgtttccattgagggcgtattacttttataatcaacaaaagagaaagtataacttcattttagaaattctcacctaaggcatttgaaa

SEQ ID NO: 528709 - DNA, 201 bp, Homo sapiens
cctgaagcagcagactgaccctgtgcctgcccttgtgcctgcagggggtggagcaggggctgggccgccagcagtgaggtgctcacaaggggtgctggctrtcaggtccaccctagggccccaccaccaggagctgcacatcacactgcagcgcgtgggggagcaggtgagggtgactgcccacccacccgccttcccctg

SEQ ID NO: 528710 - DNA, 201 bp, Homo sapiens
agtgagctgagatcatgccaccgcactctagcctgggtgacagagcgagactccgtctcaaaaaaaaaaggcattgcccgcaccaagcttggcatcctgasggtggggaggggaagtggctggggaccgcagtgctatagctgctgagactgagcactcctaacacccgaccctcactggccatgctgggaccggctgtga

SEQ ID NO: 528711 - DNA, 201 bp, Homo sapiens
cagttgccggcctaaaccaccaacagtgggcatagttaaatatacccagaatactggtattggctgtcaccttagagtcatctgggtaggggagcctctcrtgtaccttctgacacttccaggtagcctcaaggtcactcaggtggggccatcctcccacgcactccagaagtcacagcatagacagtgtgggaggagagg

SEQ ID NO: 528712 - DNA, 201 bp, Homo sapiens
tgttccaacccatgacgcctagcactgtccccaaagcagcagtgaatccgcaagcaggtgtagggctgtcctagcaggtctgcactgaggacatcccccayagtgggcatcctgagggatggcacccacggggcatgggccacatagctgagcggctgcagaattctgtccctcacagctcttgctataactgcagttgcc

SEQ ID NO: 528713 - DNA, 201 bp, Homo sapiens
acccacctcgctccccttctccaccctccacgcgtgaccccacctcgctccccttctcctccaccctccacgcatgaccccactttgttccaacccatgaygcctagcactgtccccaaagcagcagtgaatccgcaagcaggtgtagggctgtcctagcaggtctgcactgaggacatcccccatagtgggcatcctgag

SEQ ID NO: 528714 - DNA, 201 bp, Homo sapiens
gtagaaagactgaaattttactttgcagtggcagcagcaataaaagcttaaaaacggttctgaataattcggtttgggatctacctaccctccctctttgyagactacagaaagaaagaccccacctccttttgaatctaggcccccctctttctttcctcccttcctctcccctccacctacctgaggctgagcaggcag

SEQ ID NO: 528715 - DNA, 201 bp, Homo sapiens
agatggaagtcccagttggttatcacctcatcccagaagccacgtgctagcatgtctgtcactagctgttggacacacaggccactcccagggggctaacmggggtaagaatagcaggaggcggggcccagcagggccatcttggaggctgctcccacgcttgggcacagatcagagtctgaacctaccaggcacttagtc

SEQ ID NO: 528716 - DNA, 201 bp, Homo sapiens
aaatggtgatggatatcctcgcctaatctgaactcattctgcaaaagaaacagccgtatttaaggcgctgggctgatacgaggctccaaaaaggttatgtycgttaaaaactctataaatctctgcttgaaaatggttggagtgtgtatttgtgtgcatgagtgtttatgtatgttttaaacctgggtttcatgtctcacc

SEQ ID NO: 528717 - DNA, 201 bp, Homo sapiens
ctctgaagacctgatcttaattggaaatgaactagaccttgcgtgtggagagagaattcgactggagaaggtgagaccaccgagcttctctggatattcarggactcagccaccaagtatgtaatctccacgccccagctcacacggaggagggaccctcgccgaccccgtctcaggtggaggccaacaaagctgaggctc

SEQ ID NO: 528718 - DNA, 201 bp, Homo sapiens
gcctgcccttgtgcctgcagggggtggagcaggggctgggccgccagcagtgaggtgctcacaaggggtgctggctgtcaggtccaccctagggccccacsaccaggagctgcacatcacactgcagcgcgtgggggagcaggtgagggtgactgcccacccacccgccttcccctgcagaggtcgtgaagaaggtgaatg

SEQ ID NO: 528719 - DNA, 201 bp, Homo sapiens
gtgcctgtaatcccagctactaaggtgactgaggcaggagaatcgctggaaccctggaggcagaggttgcagtgagctgagatcatgccaccgcactctarcctgggtgacagagcgagactccgtctcaaaaaaaaaaggcattgcccgcaccaagcttggcatcctgagggtggggaggggaagtggctggggaccgca

SEQ ID NO: 528720 - DNA, 201 bp, Homo sapiens
aagttgagtatgattggattttttcttatcagtaaaatttaagatgatctccaacatctaataaaaacactgtaggccgtgcgtggtggctcacgcctgtwatcccagcactttgggaagccgaggcgggcagatcacctgaggtcagtttgagaccagcctagccaacatggtgaaaccccatctctaataaaaatacca

SEQ ID NO: 528721 - DNA, 201 bp, Homo sapiens
agccgccagtggaaggtgacctctgaagacctgatcttaattggaaatgaactagaccttgcgtgtggagagagaattcgactggagaaggtgagaccacygagcttctctggatattcagggactcagccaccaagtatgtaatctccacgccccagctcacacggaggagggaccctcgccgaccccgtctcaggtgga

SEQ ID NO: 528722 - DNA, 201 bp, Homo sapiens
caggcaggtctcaacctggctgccactgcccacttgccaccctcatcctagagggagcacccagagggtccagcctcgctccccttctcctccacgctccrcgcgtgaccccacctcgctccccttctcctccaccctccgcacgtgaccccacctcgctccccttctcctccaccctccgcgcgtgaccccacctcgctc

SEQ ID NO: 528723 - DNA, 201 bp, Homo sapiens
tcatcctagagggagcacccagagggtccagcctcgctccccttctcctccacgctccacgcgtgaccccacctcgctccccttctcctccaccctccgcrcgtgaccccacctcgctccccttctcctccaccctccgcgcgtgaccccacctcgctccccttctcctccaccctccgcgcgtgaccccacctcgctccc

SEQ ID NO: 528724 - DNA, 201 bp, Homo sapiens
ggtcgcgctggctggggagggctgtgtgcagagcccctgctgtaactgatgacaacagtcagggtctgtggtcaagcctgtgacatcctttctttcagtcrtcacgaccccgcagactgtcctccggataaacagcattgagattgctccgtgtttgttgtgattaccgagttaatacttacaaaaggataaaaataaact

SEQ ID NO: 528725 - DNA, 201 bp, Homo sapiens
tggttgcctggctcttgagaattttgcagtcgttaaaagaatacaggagagcctcaatcattgcaatattagtagaactgtaaactgcgccaagagacacratggtatgatttgtgctttttctctctatgttatgctttgatagaaagggttttgtttttttttgtttatttgttttctttgagacagagtctcgctctg

SEQ ID NO: 528726 - DNA, 201 bp, Homo sapiens
aacatgcgtgtccgctgagtttgttatatgatatactttgtctctagacatttaagttgagtatgattggattttttcttatcagtaaaatttaagatgawctccaacatctaataaaaacactgtaggccgtgcgtggtggctcacgcctgttatcccagcactttgggaagccgaggcgggcagatcacctgaggtcag

SEQ ID NO: 528727 - DNA, 201 bp, Homo sapiens
attgttttttataacaggaaacccagtgggagtgcacatgtcatgctgaaacaaactctaaaaatacttattttattatttgtcactatctaacatgcgtrtccgctgagtttgttatatgatatactttgtctctagacatttaagttgagtatgattggattttttcttatcagtaaaatttaagatgatctccaacat

SEQ ID NO: 528728 - DNA, 201 bp, Homo sapiens
aatagtaaacactggttgacaggcatttccctgggtgctaatttacctcaccgaccattcaaaactgcatggtctaggccaggcatggtggctcacactgrtgacccaccacattgggaggccaaggtgggggattgcttgaactcaggagttcaagactagcctgggcaacatggtgagacctcagagacctcatctcta

SEQ ID NO: 528729 - DNA, 201 bp, Homo sapiens
ggccatgctgggaccggctgtgaacagtagccatctaatacctaacacagccctttcaggcgggtgcttgttttcccatttgctcagttgtagacaccagracacagaattgtctggggttccgagccagttctgcctggcactcacctgggtgtgaaggaagagcaggcacctacctaggaggaggtggaggtggagcag

SEQ ID NO: 528730 - DNA, 201 bp, Homo sapiens
ccctctgggcacaggcgtgcagggggaacgcgtcctgccccaggggtgggatatggggttgggatacggggggctcctcattgcaaagtcctctcctttcrcttcctggggtttgcacacttctggtctgctggctcctcattctcatgagaatgaaccaggtggagggtttcgcccaccctagagttgtagaaacctagc

SEQ ID NO: 528731 - DNA, 201 bp, Homo sapiens
ctagcctgggtgacagagcgagactccgtctcaaaaaaaaaaggcattgcccgcaccaagcttggcatcctgagggtggggaggggaagtggctggggacygcagtgctatagctgctgagactgagcactcctaacacccgaccctcactggccatgctgggaccggctgtgaacagtagccatctaatacctaacacag

SEQ ID NO: 528732 - DNA, 201 bp, Homo sapiens
acggtgcagaagagaggggactgtgacctgggtcagagcagagataacaggaactgagcacggagcccctctgggcacaggcgtgcagggggaacgcgtcytgccccaggggtgggatatggggttgggatacggggggctcctcattgcaaagtcctctcctttcgcttcctggggtttgcacacttctggtctgctggc

SEQ ID NO: 528733 - DNA, 201 bp, Homo sapiens
aaacattggctgctggaactgctgctgggactccagggatcctctgcagtggggagatgtgggagtctttcttgcttctcaaagaagcggcaaaacattckgagcataggaagaagttgtaagtgagcatgtgggtaggttgtgcctactacccctgtgtcctgtgtgagaggttagcaccttcctgccagcgtgttcttc

SEQ ID NO: 528734 - DNA, 201 bp, Homo sapiens
atcattagccactcttgccatgatcctcgctttccagaacactggaaatcaagatcctcgagtggaatcttcttatatgttaaataccgtttgagattccrtgcgagtgaaacaagtctgccaagagtttcaccctcggtgctggtgcttctggtgttgacagtgtttccagggcaggcactctgtcgtcccttctgtgtg

SEQ ID NO: 528735 - DNA, 201 bp, Homo sapiens
tggttctggtctcaggcgcttgtagatgatgtggctaactgatctcaacacatataaccagtagctgtaagtgacgttcttgtagttttgctcacctaggygtttctgtgggcaggctgtcatgcagtggttcataccatgtaccaggagcagcagctgtgcatttagcatcataaagggcagtttgcatttgtagtatta

SEQ ID NO: 528736 - DNA, 201 bp, Homo sapiens
catccaagatggaagtcccagttggttatcacctcatcccagaagccacgtgctagcatgtctgtcactagctgttggacacacaggccactcccaggggkctaacaggggtaagaatagcaggaggcggggcccagcagggccatcttggaggctgctcccacgcttgggcacagatcagagtctgaacctaccaggcac

SEQ ID NO: 528737 - DNA, 201 bp, Homo sapiens
gtgatggaagtacacagtcacagtctctaggactacctaaaggaaatcctgtgggagaggaaggagactgtttgttccctggggacccaaaaacaaagctwgaagcaaattaggtacagaagcctgctaagtttttaatagtgggatggatttgccaatgggttgactgagtagtgtgcgagagaagagtcaaaactgatg

SEQ ID NO: 528738 - DNA, 201 bp, Homo sapiens
gtaggcaggaaagtttttacaaaagcagtgggacttactccattctacctacctacatgaaaccacccctccaatgctatgttcaagtacagactcacgcrttaggagagaaagacacacagtgaagcgagtagagacaaggtgaccaaaacagtgagcagctggggccttgaagagtgagcaaaggagacgtgatggaag

SEQ ID NO: 528739 - DNA, 201 bp, Homo sapiens
cgaggctgcgggaagatggcggcggccatggcagcatcttccctgacggtcaccttagggcggctggcgtccgcgtgcagccacagcatcctgagaccttyggggcccggagcaggtgagacctgggatatgggaggaagggaggacgcagagcgagcgctgctccctgcggtctcgccacgtatgtgcctgggtccgacc

SEQ ID NO: 528740 - DNA, 201 bp, Homo sapiens
gttactaagtaaaagaagccaacctgaaaaggggacatcttgtatgtttcccactatgacattctggaaaaggcaaatctaaggagacagtaaaaagttasatggggggtaagaggattgggggagaaaaggataaataggtggagctcagaggatttttagggcagtgaaactattctgtatgatataatggtagataca

SEQ ID NO: 528741 - DNA, 201 bp, Homo sapiens
gctccccttctcctccaccctccgcgcgtgaccccacctcgctccccttctcctccaccctccgcgcgtgaacccacctcgctccccttctccaccctccrcgcgtgaccccacctcgctccccttctcctccaccctccacgcatgaccccactttgttccaacccatgacgcctagcactgtccccaaagcagcagtga

SEQ ID NO: 528742 - DNA, 201 bp, Homo sapiens
ggggcccggagcaggtgagacctgggatatgggaggaagggaggacgcagagcgagcgctgctccctgcggtctcgccacgtatgtgcctgggtccgaccyggtgccttgtgtgttgatcgcatttgtggtgaatatagcacgggttttggagtcgggggaacccaggttcagattttgattccttcagttagtagcctga

SEQ ID NO: 528743 - DNA, 201 bp, Homo sapiens
cctccaccctccgcgcgtgaccccacctcgctccccttctcctccaccctccgcgcgtgaccccacctcgctccccttctcctccaccctccgcgcgtgamcccacctcgctccccttctccaccctccacgcgtgaccccacctcgctccccttctcctccaccctccacgcatgaccccactttgttccaacccatgac

SEQ ID NO: 528744 - DNA, 201 bp, Homo sapiens
cctccaccctccgcgcgtgaccccacctcgctccccttctcctccaccctccgcgcgtgaccccacctcgctccccttctcctccaccctccgcgcgtgamcccacctcgctccccttctcctccaccctccgcgcgtgaacccacctcgctccccttctccaccctccacgcgtgaccccacctcgctccccttctcctc

SEQ ID NO: 528745 - DNA, 201 bp, Homo sapiens
gccaccctcatcctagagggagcacccagagggtccagcctcgctccccttctcctccacgctccacgcgtgaccccacctcgctccccttctcctccacsctccgcacgtgaccccacctcgctccccttctcctccaccctccgcgcgtgaccccacctcgctccccttctcctccaccctccgcgcgtgaccccacct

SEQ ID NO: 528746 - DNA, 201 bp, Homo sapiens
ttcttaatgtcctttagcctattttgaagtcaatgatcacacttaaaaaaaaaaagtttttgatttatttcgagacagggtcttgctctcttgcccaggcwggagtggagtggcgcgatcatagctcactgcagcctcgaattcttgggcttaagtgatcctcccacctcggcttcccaaagtgctgggattacagacatg

SEQ ID NO: 528747 - DNA, 201 bp, Homo sapiens
ccagtggacacttcggttgcttttaccatttggctattgtgaataacactgctatgaacatgggtgtacacgtatctgttttagaccctgcttttaattcytttttttttttttttttttttaagatggatcctcgctctgtcgcccaggctggagtgcagtggtgtgatcttggctcactgcaacctctgcctcccaggt

SEQ ID NO: 528748 - DNA, 201 bp, Homo sapiens
tttcttaatgtcctttagcctattttgaagtcaatgatcacacttaaaaaaaaaaagtttttgatttatttcgagacagggtcttgctctcttgcccaggmtggagtggagtggcgcgatcatagctcactgcagcctcgaattcttgggcttaagtgatcctcccacctcggcttcccaaagtgctgggattacagacat

SEQ ID NO: 528749 - DNA, 201 bp, Homo sapiens
attctgtgatttaaagtgggaaaaaaaatctccaaaccgcacagcctcttcccattcattaaagcctgaactttattgaaaccaaagaagactgcagctgygacccccgctggtgccgtaaggtccttgccctgtgtcctcagaggctagatgtgcattacagagttactgagagttttagagaaaaatgatagtcacact

SEQ ID NO: 528750 - DNA, 201 bp, Homo sapiens
gagtgctgttggtgtactctggtgttggtgaccgctcccttcctgtctgcacggcaggctgccctgggctcgtccagtcaccttctaccccagacctgtaktcgctttttctccaagaagccctgatttcttttagcggaaactggtttcaggccgtggtggggtcgcggctggtgctcattcagagtcgtcgtttccagg

SEQ ID NO: 528751 - DNA, 201 bp, Homo sapiens
gtgtgtgtctgtggtctgaagccatttctaagtgtgtctcaccatgctcaggaggaaaagaggcctttgtggaccctctggagagacactttgctggtgcrgggcaaggctgcgtcatgccagcccgtcttgctggcagcaggtgcagctgtgggtttttggaagtgagtggccacaagcccggtaatggcagagatgccc

SEQ ID NO: 528752 - DNA, 201 bp, Homo sapiens
ggattgtatgtggcggtgcccagcctctgtgtgtgtctgtggtctgaagccatttctaagtgtgtctcaccatgctcaggaggaaaagaggcctttgtggrccctctggagagacactttgctggtgcggggcaaggctgcgtcatgccagcccgtcttgctggcagcaggtgcagctgtgggtttttggaagtgagtggc

SEQ ID NO: 528753 - DNA, 201 bp, Homo sapiens
caggtcctttgtaagaaaagtttttagcaccaaaactaacccaaagtaactagattaaatgtgtgccataaaactttatttttttttcctccccaggttcwcctccatttctcaatgtgaaagctttacatcattaagatgagttgaatatagatttcaattaatgttcttcctaagtgataaggatgtagacttataagc

SEQ ID NO: 528754 - DNA, 201 bp, Homo sapiens
atcctaaggtttttgaggtaattcttggctttgctcaccctcccttgggaaggctgtcaacttcataaaaagactctagctgtatcttttgtcagcttackgtcagagactatgggatctgccttaatttagctaaatttgatcttaccagagaatacaaccttgaattttttgtttagttcttttcaaaagctcagtttc

SEQ ID NO: 528755 - DNA, 201 bp, Homo sapiens
tacagttctcaggagcacttccgtagagattaagcctcatgactcttgggtgagattgccacattttattaagtaaatattgacatgctaagaagtggtckttttttgtgcagtagaaaaagagagtgagatttactaactgctctttctttctttttaccagacttagaaatggctgttgcgtattggaaattagtgtta

SEQ ID NO: 528756 - DNA, 201 bp, Homo sapiens
ctgaacccctttatatacttgctgtgtcaagcatataaaaagaaatcgttatcaagcttctggtgagcagagaataaatcagtgtttcacaaactatggaytggagacagccctgaaactcggcattcatattctattagacatcttcagtagcagagatttatatagaagtcgtgaaataatcaccaccttcccgtgtgg

SEQ ID NO: 528757 - DNA, 201 bp, Homo sapiens
cccgcctcagcctcccaaagtgctgagattacaggcgtgagccaccacgcccggccggtcactttaaaaaaatagaattctgaacccctttatatacttgctgtgtcaagcatataaaaagaaatcgttatcaagcttctggtgagcagagaataaatcagtgtttcacaaactatggattggagacagccctgaaactcg

SEQ ID NO: 528758 - DNA, 201 bp, Homo sapiens
gagcatccggggccactgtgagcccacagccccctagacatgccagcacacacacaccagggctcccgacctggccgtgctagggcgaaagaactgggtarcttgggctggttcattctgtgaaacacaaatggtgtggacctcaagtcatttgggttcttgaagtgtaaatgttggattgatgtgtgactcagtgctttg

SEQ ID NO: 528759 - DNA, 201 bp, Homo sapiens
cacacacaccagggctcccgacctggccgtgctagggcgaaagaactgggtaacttgggctggttcattctgtgaaacacaaatggtgtggacctcaagtmatttgggttcttgaagtgtaaatgttggattgatgtgtgactcagtgctttggagataaaaacggtgctctaacgggttttctgtttgcttgctttcctt

SEQ ID NO: 528760 - DNA, 201 bp, Homo sapiens
tggaacacagcctacggctgtctgctttggcaacagacccacaggcctgagatggcagagatggctgctgtctggaacattaagagacaaagttggctgartgaaggcttctgatcttcttcatccgttcttaatctgagttctaccttccccttgtgaggactttgcagatgggcttaagccatctgtgaaacccctgaa

SEQ ID NO: 528761 - DNA, 201 bp, Homo sapiens
gaatacaaccttgaattttttgtttagttcttttcaaaagctcagtttcaggaaataatgtagtgaatatgtattccatttattcctctagaatctagatyggggtcggcaaactacagcccacaggctagctgtctgtttttgtaaattgagttttattggaacacagcctacggctgtctgctttggcaacagacccac

SEQ ID NO: 528762 - DNA, 201 bp, Homo sapiens
aataacttctgtttaagtgggattaaaccagatttagaaaaaaaccttttgagaagtgtttagttatgtactttgcatttaaactaacatattacctaacktttattaatctgcttttcacattaatcttacataaatataactcttcttttattgcctaaaagtggtgaacactattcaacatgattaaaggaggtcact

SEQ ID NO: 528763 - DNA, 201 bp, Homo sapiens
tttttgtaaaacgttagcatccagtggattctagggtctgtttggatttagagaagttagtgtatcactttcttttccagtgttgcttttatcaggttacwttatttatttatttatttatttatttatttattgagatagagtctcgccctgtcgcccaggctggagtgcagtggcacgatctcagctcgctgcaatctc

SEQ ID NO: 528764 - DNA, 201 bp, Homo sapiens
tgttaccaatttttctttttttttttttttgtcacccaggctggagtgcaatggcatgatcttggctcactgcaacctccacctcctgggttcaagcgatyctcctgcctcagccccccgagtagctgggactataggcgtgagccaccccgcccagttaatttttgtatttttagtagagacggggtttcgccatgttgg

SEQ ID NO: 528765 - DNA, 201 bp, Homo sapiens
atttttctttttttttttttttgtcacccaggctggagtgcaatggcatgatcttggctcactgcaacctccacctcctgggttcaagcgattctcctgcytcagccccccgagtagctgggactataggcgtgagccaccccgcccagttaatttttgtatttttagtagagacggggtttcgccatgttggccaggctg

SEQ ID NO: 528766 - DNA, 201 bp, Homo sapiens
tggcacagacaaacctactgcactgccagtcgtataaaaagcatagcgcatccagttatgtgcagtatataatacttgataatataaaggcttatgttacyagcttatttactcaactttttattattttcgagtgtactcctacttgtttgtttgtttgtttgttttttgagatggagtcttactctgtcacccaggatg

SEQ ID NO: 528767 - DNA, 201 bp, Homo sapiens
atagcgtggaagttcagggcagcaactcagtgtgaatttagcagaaaggaatttctagatggcatgacagaacttgggtaagtcaactattcttagcttaratgttttcagaaatgaaaatacttctaacattatttttcagcaacctgtacatactaatttcatatctgcttattttctttgtgtatctttaaaatttct

SEQ ID NO: 528768 - DNA, 201 bp, Homo sapiens
tgtttgtttgtttgtttgttttttgagatggagtcttactctgtcacccaggatggagtgcagtggcacgatcttggctcacagcaaactccgtctcctgrgttcaagcgattctcatgcctcatgcccggctaatttttgtatttttagtagagacgggatttcaccatattggccaggctggttttgaactcctgactt

SEQ ID NO: 528769 - DNA, 201 bp, Homo sapiens
gcggaacgctgtggacaagaagaagctggagcggctgtacggcaggtacaaaggtaagaggagactgcagcaaagccggacggatgtcggcctccgcgagyggcctgcgcgctgcacttccagggttctggtgccggggcaggtctccgggctgccgttgcttctcctccccacgctcagcgctcggcgctcagctgcaga

SEQ ID NO: 528770 - DNA, 201 bp, Homo sapiens
gggtctctctatgttgcccagactggtctcaaactcctggcctcaagcgatcctccctcctccacctctcaaagcactgggattacaggaatgagccaccrtacctggcccagccgccacccttgatgtggatggtgcttacgctcaccctcatctgcagtacagccatgcgtcactcagagacagggacacgttctgaga

SEQ ID NO: 528771 - DNA, 201 bp, Homo sapiens
ttgtgcgacatcacagggcgcatgtttgcaaacctgggtggcatagcctattgcacgcctagcagtatggcacagcccatggctccggggatacaaacctrgacagcgtgtgactgtactgaagacagtaggcaaccgtaacacggtggtgaggatttgtgtatccaaacacactgaagcatagaaaaggggcagtgaaaa

SEQ ID NO: 528772 - DNA, 201 bp, Homo sapiens
gaacattaagagacaaagttggctgaatgaaggcttctgatcttcttcatccgttcttaatctgagttctaccttccccttgtgaggactttgcagatggkcttaagccatctgtgaaacccctgaaattttatgcaaagctgcctgcacgtgtgagggccatatatgttttcctggagggcggacctgtgactcctcaga

SEQ ID NO: 528773 - DNA, 201 bp, Homo sapiens
tctgtgcggtgagtctgacgctgcacagcctgtcagggaaaagctgctgctgggaggcttggtgtcttggcgtgactgtgtctgttaatacagtatttttktcaagcacttctatttaggctgaaatattgatgatgagaaggttaagaacaacagcaaatcatgaagatgatctgaagtgagggtaaaccttagtgtttt

SEQ ID NO: 528774 - DNA, 201 bp, Homo sapiens
ttggacaaaggcttttccaaaaattgtgggtttttttcttctgttgtatccatttgagtcctgcatgctgtgaaatgctgagaacagaagcattaaattgktttttctcgggcgtggtttcctttcgattctcctcagctgcagggatgtctgcctataggtgtcagcatccacgtcattgtcccaggatgagagaacagc

SEQ ID NO: 528775 - DNA, 201 bp, Homo sapiens
tctgtataaactatggagatccacagtacttttttgtttttgagatttaaagttctaagggattgtcaatagatatcaaaatattaatcattggacaaagkcttttccaaaaattgtgggtttttttcttctgttgtatccatttgagtcctgcatgctgtgaaatgctgagaacagaagcattaaattggtttttctcgg

SEQ ID NO: 528776 - DNA, 201 bp, Homo sapiens
tcgaattcacataccatattttctttcatttaaagcctacaactcagtggttttagtatattcccagagctgggcggctgccaccagtatctgtctcagarcgttttgaattccttttagcaagggagatgttgcccccccatcttctcttacatcatcacttagagccttaggccgcgcctgggaaaggaagttgggaaa

SEQ ID NO: 528777 - DNA, 201 bp, Homo sapiens
agcagatgaacatcccacacaaagatccgcaggtccagacaggttgccacttggctctgtcaccttgccggagactgcagggctgagctggggccactccsgggcctcctcagaacgtggcttcttggcagtcacgggaagctcctctcaggctggggttcctggagactctgcaaccccagcagcccccgtgttgtctcc

SEQ ID NO: 528778 - DNA, 201 bp, Homo sapiens
aggcatgatcttggcgttgagggagttgatgccccagcaggggagacaggcaccagatgcacaattgtttgaccacagttgggacaaaggctaaggcacgrgttccaggaacttgtaggatgcggctgtgggagtggtgtcagatgctgagggtgtgagttgaactgtggagaatttctctggaaattagccagagaaaaa

SEQ ID NO: 528779 - DNA, 201 bp, Homo sapiens
ttttaaatctaacttgctgtaatgaagagatccctaaataaggtagcttaagtttatatgagtttgtttttcgcttgtatgatgggacagaggtaacagtrgcccaggctggcagggcgactgccattctgcaagtcactgagaaatgcggtctttccatctttccattacctcgtctctgccatcttgtcacctcatgcc

SEQ ID NO: 528780 - DNA, 201 bp, Homo sapiens
atgcacggccagtagtcacaggtggaaaacgcagccttttctaggcagcaagttaagcaggagtaagattatgaaatgatttgtatcctgcaaggagattkcagtcagttcctgggtgcattgtcgctgattccagaagtcattcttgaccagccatgaaaccagaggcgccatcccattctgccggaggacagccagcgg

SEQ ID NO: 528781 - DNA, 201 bp, Homo sapiens
ccagataattggaacttttaaagctacagtaattaagactacatggcatcaagcgccagatcagataaatagaccagagaccagtggagcagaatggagcrctcagaaagaagtccgtgtatggggggacttctggtttatgacagagctagacttcagtggagaaagacggtttttcaataaatgatactgggagaatta

SEQ ID NO: 528782 - DNA, 201 bp, Homo sapiens
caccgagcatccggggccactgtgagcccacagccccctagacatgccagcacacacacaccagggctcccgacctggccgtgctagggcgaaagaactgrgtaacttgggctggttcattctgtgaaacacaaatggtgtggacctcaagtcatttgggttcttgaagtgtaaatgttggattgatgtgtgactcagtgc

SEQ ID NO: 528783 - DNA, 201 bp, Homo sapiens
cggagttttactgtgttgcccgggctggtctcaaactgctggtctcacacagtcctctcacttcaggctcccaaagtgctgggattacaggcgtgagccayggtttcagctgaaggttgcacttttgatctgttctgttggtgtgtttcccagcatgcattcattttctaggggtgactactgtttgtagtatcttttttc

SEQ ID NO: 528784 - DNA, 201 bp, Homo sapiens
ggggtggggaagggagcaatggggtggtcccacttgggaagagccgcaggagggagcaccccctgctggcaagaataccaatgacctgaggaacatgcctyctgctccgcgggggtccatttagctcccttcctgagcagctggtgtgactgcctggggcactcaccgagcatccggggccactgtgagcccacagccccc

SEQ ID NO: 528785 - DNA, 201 bp, Homo sapiens
gctggtgagagagaacaggtgctgagacgcgtctcggccccacactggttactgaattacagtacctgctgtgcaaggccctggggcctgttgggccctcrctttgcctcttgggtgacagtagcggtgtctgctgcgtcttggctcaggagcctgccgcatgcggcacctagggacaccagcagtgtcgagacctccagc

SEQ ID NO: 528786 - DNA, 201 bp, Homo sapiens
ttaagaatgattggaaccccagtcattcttaaatgagagttcttgtttgtgtgggtaatagtcatcaatattgaccatattagaaattaaaatagtattaraatatttctatagttaattagcaataaaaacccattacatttttgcaaatatcttaatgtctggcttgataaaagataggctctcgaatctcgcgttcat

SEQ ID NO: 528787 - DNA, 201 bp, Homo sapiens
ctaggcagcaagttaagcaggagtaagattatgaaatgatttgtatcctgcaaggagattgcagtcagttcctgggtgcattgtcgctgattccagaagtyattcttgaccagccatgaaaccagaggcgccatcccattctgccggaggacagccagcggctgctttgtggacaccgcaggaagttcctcgggacacggc

SEQ ID NO: 528788 - DNA, 201 bp, Homo sapiens
aattcaatgtttcttcatttaaaaaaaaaaaaaaaaactcatagaaaactaagaataagaggggcagttcttaatctggccaaaaggaaaaaattcctatrgaaaacattatacttactggaattgtaagccaccttctctttgagacagaacaaaacccaaatgactgtttctattcagtattaaacaggagatcatagc

SEQ ID NO: 528789 - DNA, 201 bp, Homo sapiens
aagaggcctttgtggaccctctggagagacactttgctggtgcggggcaaggctgcgtcatgccagcccgtcttgctggcagcaggtgcagctgtgggttkttggaagtgagtggccacaagcccggtaatggcagagatgcccagacctcttgctgttctgtccatgaaagtgaaagaagtggtcttccaccgcccaacc

SEQ ID NO: 528790 - DNA, 201 bp, Homo sapiens
gtagaattcagcttattaaatgcatattttagaaagaaggaaaggctgaaaatcagtgagcaaagccttccatctcaagaaatagaaaaagaatatagaargaaggaattaatatttttaaagaagcactaatttacaagaataattaaatagaaaagaagttgtcattaggaaggatcaataaagctagaagcttgttat

SEQ ID NO: 528791 - DNA, 201 bp, Homo sapiens
ggtgccgtaaggtccttgccctgtgtcctcagaggctagatgtgcattacagagttactgagagttttagagaaaaatgatagtcacacttcatgcagagygaactggatagagatcagaatgtattttgtataaaatgttaattctcataatttttgaagcttagactgcctgtttgttacagtatagatgctgttgttt

SEQ ID NO: 528792 - DNA, 201 bp, Homo sapiens
cataaaattaactattttaaagtgtacaattcagtggtgtttagtacgttcacaaatttgtggaaccactacctctatctagtcctaaaacatttttgtcrccccgaacgataactgtacccattagcagtcactcccaactcctcccttgccccagcccctggctaccactcacctttctctctatatagatgtgcccat

SEQ ID NO: 528793 - DNA, 201 bp, Homo sapiens
cagctgggttggcttctgagaacaggacttaccctgggcttcaggaacatctgatggctgaggttagtgtgcttggaggctgcaggacgaactgtcgatgyttcttagcagagatggtcacagagggcagcagggacaggactggaagggacctgcagcctgcagaccccgcctggcccccgctggcttctggctggtcca

SEQ ID NO: 528794 - DNA, 201 bp, Homo sapiens
ggaaactgggcctgtctacctttagaagtcttcgattctcagagagcatttgtctaatacaataaaaactggcattaatacaaacctcaaaaacgtgagcrtatcttccaggcttcatggattcttgacatgtaattgttttgttcagaaaagtttatagaattcacataattctgtataaactatggagatccacagtac

SEQ ID NO: 528795 - DNA, 201 bp, Homo sapiens
gtcggggtcgggccccaaggtcggcgcaggcggcgcgctggatgtgggaggccgagcccagcgagctgcgcggggcgttccgcgtggatccgagggaggarcgcgccgcgggcccgcgagccggagcggtggcgtcggaggcgcgggaccgcggggagcgcgggtttgacccggagccgcgagggacgaccgggagtgagc

SEQ ID NO: 528796 - DNA, 201 bp, Homo sapiens
ccaaaactgattaattaggggggaattgtgtgcatatccaaataacttaatatacaaatccttttaaaaagagtttccccagatttataaaattagactaygtacagttctcaggagcacttccgtagagattaagcctcatgactcttgggtgagattgccacattttattaagtaaatattgacatgctaagaagtggt

SEQ ID NO: 528797 - DNA, 201 bp, Homo sapiens
gtgctgttggtgtactctggtgttggtgaccgctcccttcctgtctgcacggcaggctgccctgggctcgtccagtcaccttctaccccagacctgtattygctttttctccaagaagccctgatttcttttagcggaaactggtttcaggccgtggtggggtcgcggctggtgctcattcagagtcgtcgtttccaggct

SEQ ID NO: 528798 - DNA, 201 bp, Homo sapiens
acaactaaaacagctttgaggcatacaggaactctacagataaggaggaccatttcataatgataaagggcttatctcaccaagaaggcagtcacacttaygtttttatgtatttgttgaagagtcccaatgtatttaaagcaaaaataagcaactacaaagagaaagatacaaatccatgatcaaagtgaggaattttca

SEQ ID NO: 528799 - DNA, 201 bp, Homo sapiens
aacacaaatggtgtggacctcaagtcatttgggttcttgaagtgtaaatgttggattgatgtgtgactcagtgctttggagataaaaacggtgctctaacrggttttctgtttgcttgctttcctttaggagcttggcccgttcttatagatgattttgtagaatatgcacggccagtagtcacaggtggaaaacgcagcc

SEQ ID NO: 528800 - DNA, 201 bp, Homo sapiens
ctgtggacaagaagaagctggagcggctgtacggcaggtacaaaggtaagaggagactgcagcaaagccggacggatgtcggcctccgcgagcggcctgcrcgctgcacttccagggttctggtgccggggcaggtctccgggctgccgttgcttctcctccccacgctcagcgctcggcgctcagctgcagaatccactt

SEQ ID NO: 528801 - DNA, 201 bp, Homo sapiens
gcgttaggaaatttctgcatgattttttaatatttacaaaatactaaggtagagccatagcgccgcctgtgggaccgcagagcatgctgcgtagctcgcgygtcaggcgaaccagcgtccggcagcgtcccgccgaatgacgttgcggtggcactggcaacacggcatgtgtcctctgcagggcgctgcgtttttatacac

SEQ ID NO: 528802 - DNA, 201 bp, Homo sapiens
ctgctcagacccatctttatcagaggaccagcgtcaccgaaaatagtcatccaggaaaatcggaaagaagcgcagtatatgcttgaaaatgagaaaacacraacctcaatagactccattgactcaggagtagaactaactacctcacctaaaaatgtgcctactcacactaacctggaactggagccgaaggccgacatg

SEQ ID NO: 528803 - DNA, 201 bp, Homo sapiens
cattttatttatttatttatttatttgagacagagtctcgctgtgtcaccaggctggagtacagtggcacgatctcggctcactgcaacctccacctcccrggttcaagtgagtctcctgcctcagcctcgcgagtagctgggactacaggtgtagaggtgcatgccaccacgcccagctaatttttgtatttttagtaga

SEQ ID NO: 528804 - DNA, 201 bp, Homo sapiens
tgcatgccaccacgcccagctaatttttgtatttttagtagagacgggatttcactatgttggccaggatggtctcgatctcttgacctcatgatccaccygcctcaggctcccaaagtgctgggattacaggcgtgagccaccgccaccagcctgttcacccatttttaagccagattgttggggagtttttttgctgtt

SEQ ID NO: 528805 - DNA, 201 bp, Homo sapiens
gcatgccaccacgcccagctaatttttgtatttttagtagagacgggatttcactatgttggccaggatggtctcgatctcttgacctcatgatccacctrcctcaggctcccaaagtgctgggattacaggcgtgagccaccgccaccagcctgttcacccatttttaagccagattgttggggagtttttttgctgtta

SEQ ID NO: 528806 - DNA, 201 bp, Homo sapiens
ctgtttcaaagtatatgtaattacagaggctttgaaaaagacagtattcatgtgctagagcccaatccagaagacttaagttaaaccaatgtcaatgtcartgtctccttagaagtgttaagacaggttggcttgttctgatgtttattgcagtttgaatggagaggcacagtgaggttaggggtaactcagttaactggt

SEQ ID NO: 528807 - DNA, 201 bp, Homo sapiens
gatctcagctcactgcaacctccacctcctggattcaagcaatcctcgtccctcagcctcccaagcagctgggactacaggtgtgtgccaccaggcccagytaatttttcgtattttcagtaaggatggcatctcaccatgttgcccaggctggtctcaaacgccttagctcaggtaatccacccaccttggcatcccgaa

SEQ ID NO: 528808 - DNA, 201 bp, Homo sapiens
tctactaaaaatacaaaaattagccgggtgtgatggtgggcatctgtaatcccagctactcgggaggctgaggcaggagaatcacttgaacccgggaggcmgagatttcagtgagccaagatcacacaactacactgcagcctgggcaacagagtgagactctgtctcaaaaaaaaaaaaaaaaaaaaggaaaaagaaaaa

SEQ ID NO: 528809 - DNA, 201 bp, Homo sapiens
gacttgattggtctaagttgccagaggtatcgggtaactggtcattgttttgttttgtttgttttattcttcctttttttttggagtcacactacatgtayagtattgctcacgttagcagttttctgtaaggagggcaagtgtcaggataataggtggactttttactcacctattttaccacaatctcaccctgcaggt

SEQ ID NO: 528810 - DNA, 201 bp, Homo sapiens
gtgttgcaaagataaaaaaaaaaaaagttatatttttagtatcccaaacaaccactgaagtttatccagaccgttaatgaaacccatttttctttgcaacrtcacctttgtccagaatgaattacttggctcctagaacttaagattcaaaaagcaaaaccaaaaatcccagatcttttaatgcatccttccagtctcaag

SEQ ID NO: 528811 - DNA, 201 bp, Homo sapiens
ggcacatatgcagtggtagggctttcttgacacatgcattccagaataatctagtaatttgcaattattcacctgttatgtcctctcgtttttcaaaagasctacattcaatgtggatttagattatgctaataaacacagcattcttatctgtgtgtagatcatctcaaaacaaaatctgtaactgagcacggtggctta

SEQ ID NO: 528812 - DNA, 201 bp, Homo sapiens
cagcactttgggaggctgaggtgggcggatcacctgaggtcaggtgatcgagaccagcctggccaacatggcaaaaacctgtctctacttaaaacacacamaaaaaggccaggtgcagtggctcatgcctgtaatcccagtactttgagaggccgaggcaggcagatcaggaggtcaggagatcgagaccatcctggccaa

SEQ ID NO: 528813 - DNA, 201 bp, Homo sapiens
ccacagcccggtccacatggtgagaccctgtctctacaaaaaataaaaattatgccaggcgcggtggctcacatctgtaatcccagcactttgggaggccraggtgggtggatcacgaggtcaggagttccagaccggcctggccaacatggtgaaaccctgtctctactaaaaatacaacaaattagctgggcatggtgg

SEQ ID NO: 528814 - DNA, 201 bp, Homo sapiens
tgatttctgagggatctgctccatgtctattctgttatctgcatgaaaacaaaatgtatgccaatttcagtatgtcaataatcaaggttttaaatgtttgraagaaaatacaaacaagattgctgatctgttctgtattagtgacattctggtacttctagatttgcaataaatttatggattttttatttaaagagaccg

SEQ ID NO: 528815 - DNA, 201 bp, Homo sapiens
gttcccgttaacaaattacggcctctgcttgctggaaatgaaatatagtttaagaccaaacattttactaataaacaaattttaagtatatatatatatawaacttgaacttcataaatgtgaagattaccacttctttttatggccagtccttatcagaagtgtttcagtacagaatatacaaaatggcatttaaaaatg

SEQ ID NO: 528816 - DNA, 201 bp, Homo sapiens
ttcggacaccgtctggtagtgatgttgggggggctacttgtcagcaccgggatggtggccgcctccttctcacaagaggtttctcatatgtacgtcgccaycggcatcatctctggtaagtgttcctctttggctcagaagttgtctagacacttagtttgaagaacaaggaaggggaaggaggaaattaaagccaaacta

SEQ ID NO: 528817 - DNA, 201 bp, Homo sapiens
tgttttaagctttttttttttgcttgtttttaaagccaaaacaaaaaacaaccaagcactcttccatatataaatctggctgtattcagtagcaatacaaragatatgtagaaagactctttggttcacattccgatattaaaatagtgacatgaactggcaaagtggttttaaaagctttcacgtgggataaatgatttt

SEQ ID NO: 528818 - DNA, 201 bp, Homo sapiens
gaggcagaggttgcagtgacctgagattgcaccatcgcactccacctggggcaacaagaataaaactctgtctaaaaaaaaaaaaaaaaaaaaaaaaaaamcctaaagtgaactcaagtgaaaataatacagttccttcctaccgaagaatattaccttttcaaagaagtatgcatcgaaatgtcccaggttttaggtcct

SEQ ID NO: 528819 - DNA, 201 bp, Homo sapiens
aagatctacagcagggccttctactcctgcgcagctggcatggccctggctgctgtgtgcctcgccctggtgagaccgtgtaagatgggactgtgccagcrtcatcactcaggtgaaacaaaggtagtgagccatcgtgggaagactttacaggacatacctgaagactttctggaaatggatcttgcaaaaaatgagcac

SEQ ID NO: 528820 - DNA, 201 bp, Homo sapiens
agccctcttgatttaaatatgaggaaactgaaggccaaagaattgaagctaaaggtcagatggtaaattagtggtcgattcaggactggaagctgtgtctrtagtccagattgaccctggccttttttttttttttttgagatggagtctcgctctatcacccaggctggagtgcagtggcgcagtctcagctcactgcaa

SEQ ID NO: 528821 - DNA, 201 bp, Homo sapiens
actgagctatatggacttcaggggacctgggaatctgttctcaagtgcccaagggtttttgtttgatcttcaccaaagatgatgataatttctcttttgcwgtatttgcagccaaaagatagcatttttacaaagtaagacgaatttctgtagccagtatttctcacatcagtgtctgaggatccagggctgtaggggaag

SEQ ID NO: 528822 - DNA, 201 bp, Homo sapiens
acctccggggttcaagcaattctcctgcctcagcctcccaagtagctggggttacaggcacccaccagcacacctggcctttttttttttttttttttttttttagtagagatggggtttcactatgttggccagactgctctcaaactcctgacctcatgatccacccatctcggcctcccaaagttctgggattacagg

SEQ ID NO: 528823 - DNA, 201 bp, Homo sapiens
cgtgcctcagcctcctgggtagctgggataacaggctcgtgctactactaatttttgtatttttagtagagacagtgttttgctatgttggccaggctggkcttttttttttttttttttttttgagacggagttttgctctttttgcccaggctggagtgcaatagcacgatctcggctcaccacaacctctgccttcca

SEQ ID NO: 528824 - DNA, 201 bp, Homo sapiens
gctgcagtgagctatgatcgtgccactgcactccacgtctctctagggtctttatcaaattttatcactatatgttttgtttcaaggtggtcctgagcccyccattaaaactcttaagaccttctgggcacatttctgggttagaacaactgtgccaatttgaccttggtcttagtagctactgagtcctgactgcttgtc

SEQ ID NO: 528825 - DNA, 201 bp, Homo sapiens
ggagtctgacaaatcgtgttgaatttgaacaaatagtaaaataattcctgcactgactttgcatgaaatgtgttatggtttggttttgttttttcttgagrcagggtctcactctgtcacccagtatggagtgcagtggtgcaatcttggctcactgcatcgtctgcctcccaggctcaaacaatcctcccatctctgcct

SEQ ID NO: 528826 - DNA, 201 bp, Homo sapiens
gaccttatattatttcttcttcactcctgcctattcaagcaatcatggctctgaaggagcgcattggctggagatacagcctcctcttcgtgggcctactrcagttaaacattgtcatcttcggagcactgctcagacccatctttatcagaggaccagcgtcaccgaaaatagtcatccaggaaaatcggaaagaagcgc

SEQ ID NO: 528827 - DNA, 201 bp, Homo sapiens
atatagtcactgtctaagaagcaacatcaaaaagttgctgatggccgggcacagtggctcacacctgtaagcactttgagaggtcaaggtgggtggatcasttgaggtcaggagttcaagaccaggctggccaacatggcgaaaccccatctctactgaaaatagaaaaattagccaggcacagtgttttgcacttgtaat

SEQ ID NO: 528828 - DNA, 201 bp, Homo sapiens
agggttctctcttctgttccattggtcagtgtgtctgtttttatgccagtaccatgctgttttgattactgttgtgttgtcatatattttgaggtctgttmgtgtgatgcctccagctttgttctttttttcaggatggctttggctattcatgatcttttgtggttccatacaaattttaggatttttttcttctatttc

SEQ ID NO: 528829 - DNA, 201 bp, Homo sapiens
gccaaaacaaaaaacaaccaagcactcttccatatataaatctggctgtattcagtagcaatacaagagatatgtagaaagactctttggttcacattccratattaaaatagtgacatgaactggcaaagtggttttaaaagctttcacgtgggataaatgattttctttttttcttttctttcttcctatggtcttgtc

SEQ ID NO: 528830 - DNA, 201 bp, Homo sapiens
catacctatagtcctagccacttgagaggctgagtagggtcacttgagcccaggagtttttttgtttttgttttttgagacggagtctcgttcttgtcackcaggctggagcgcagcggcacaatctcagctcactgcaacctctgcctcctgggttcaagcagttctcccaccgcagcctcccgagtagctggaagcaca

SEQ ID NO: 528831 - DNA, 201 bp, Homo sapiens
ctactacagttaaacattgtcatcttcggagcactgctcagacccatctttatcagaggaccagcgtcaccgaaaatagtcatccaggaaaatcggaaagwagcgcagtatatgcttgaaaatgagaaaacacgaacctcaatagactccattgactcaggagtagaactaactacctcacctaaaaatgtgcctactcac

SEQ ID NO: 528832 - DNA, 201 bp, Homo sapiens
tacatcttctataacacatgacttgattggtctaagttgccagaggtatcgggtaactggtcattgttttgttttgtttgttttattcttcctttttttttggagtcacactacatgtacagtattgctcacgttagcagttttctgtaaggagggcaagtgtcaggataataggtggactttttactcacctattttacc

SEQ ID NO: 528833 - DNA, 201 bp, Homo sapiens
cttgctggaaatgaaatatagtttaagaccaaacattttactaataaacaaattttaagtatatatatatatataacttgaacttcataaatgtgaagatwaccacttctttttatggccagtccttatcagaagtgtttcagtacagaatatacaaaatggcatttaaaaatgtgtttcctgttgcttttagttatacag

SEQ ID NO: 528834 - DNA, 201 bp, Homo sapiens
actcttcggccttgccttcaaagggcttagaaggattaaagcaagtgacggtcaaaggctgtcatagaagtatagactattagggcaggaagagatctaarctcatcagagtctagttcaactcccttttttacatttaccttgattttacattgacattgaaaatggggaagtgaagtgatttgcctaaattccatcatc

SEQ ID NO: 528835 - DNA, 201 bp, Homo sapiens
gaaaatggggaagtgaagtgatttgcctaaattccatcatccgtaaagcaggggttgatgggcaggatgactcagctcgcctcaccagttagatccctacmcagctgaaaaatatccctacccgtcagataaattcacatggccacagaccaaagtggacagataaacttttatattctggaacttacagaggcttctgca

SEQ ID NO: 528836 - DNA, 201 bp, Homo sapiens
acattcatactgctgagtataataaatttccacagaacttataacaaaatctggatccatatttcttcttgatggcttctcctgggtcttgagtccattaytgaccttatattatttcttcttcactcctgcctattcaagcaatcatggctctgaaggagcgcattggctggagatacagcctcctcttcgtgggcctac

SEQ ID NO: 528837 - DNA, 201 bp, Homo sapiens
gccgggcatggtggcgcatgcctgtaatcccagcttcttgggaggctaaggcaggagaatcacttgaacccgggaggtggaggttgcagtgagctgagatygtgccatggcactccagcctaggcaacaagagcgaaactccatctccaaaaacaaaaacaaaaagtccaccatcttctaaacagctgtcatagaatagat

SEQ ID NO: 528838 - DNA, 201 bp, Homo sapiens
tagctaacatactgaaacctcatctctactaaaaatacaaaaatcaaccgggcatgatggtgggtgcctgtaatcccagctactcgggaggctgaggcagragaatcgcttgaacccgggaggctaaggttgcagtgagccaagatcgtgccactgcacttcagcctaggtgacatagcaagactccatctcaaaaaaatt

SEQ ID NO: 528839 - DNA, 201 bp, Homo sapiens
aggtgggtggatcacgaggtcaggagttccagaccggcctggccaacatggtgaaaccctgtctctactaaaaatacaacaaattagctgggcatggtggygggcgtctgtaatcccagctacttgggaggctgacgcaaagaattgcttgaacctgggggatggaggtggcagtgagccgaaatcatgccactgcattcc

SEQ ID NO: 528840 - DNA, 201 bp, Homo sapiens
aatattttagtccatggaggcagagaccatctcttggtcttttcactgtagtgcccctatagtgaaagcgaggacctggcacctgataggtattttgttgmaaaaataaatacaagctgtgtacaaggtacaggcagggtccggggacatggggttgtacaaagagaaatagacctcagattttgtgagcatataatttat

SEQ ID NO: 528841 - DNA, 201 bp, Homo sapiens
tttgagacggagttttgctctttttgcccaggctggagtgcaatagcacgatctcggctcaccacaacctctgccttccaggttcaagtgattctcctgcytcagcctcccgtgtagctgggattacaggcgtgcgccaccacacccggctaattttgtatttttttttagtagagacagggtttcaagactatactttca

SEQ ID NO: 528842 - DNA, 201 bp, Homo sapiens
ctgaataaactactctcctgaataaaacaacatccaacccaggtcattgaaatgaaattggccagtcaaaaaaaaaaagacttcaatcatttttaaaattyctaattttcagaaatatgaataaatagtttttgttaaaccctttgtaaaataccaaggttcccgttaacaaattacggcctctgcttgctggaaatgaaa

SEQ ID NO: 528843 - DNA, 201 bp, Homo sapiens
gggtaactggtcattgttttgttttgtttgttttattcttcctttttttttggagtcacactacatgtacagtattgctcacgttagcagttttctgtaargagggcaagtgtcaggataataggtggactttttactcacctattttaccacaatctcaccctgcaggtgatggtcaatgcttgctgctccatctttatt

SEQ ID NO: 528844 - DNA, 201 bp, Homo sapiens
ggagtcacactacatgtacagtattgctcacgttagcagttttctgtaaggagggcaagtgtcaggataataggtggactttttactcacctattttaccrcaatctcaccctgcaggtgatggtcaatgcttgctgctccatctttattcatcgttaatgttaatttatgacaactcagggggaaaaacataacaagcct

SEQ ID NO: 528845 - DNA, 201 bp, Homo sapiens
catggctctgaaggagcgcattggctggagatacagcctcctcttcgtgggcctactacagttaaacattgtcatcttcggagcactgctcagacccatcwttatcagaggaccagcgtcaccgaaaatagtcatccaggaaaatcggaaagaagcgcagtatatgcttgaaaatgagaaaacacgaacctcaatagactc

SEQ ID NO: 528846 - DNA, 201 bp, Homo sapiens
actggtcattgttttgttttgtttgttttattcttcctttttttttggagtcacactacatgtacagtattgctcacgttagcagttttctgtaaggaggrcaagtgtcaggataataggtggactttttactcacctattttaccacaatctcaccctgcaggtgatggtcaatgcttgctgctccatctttattcatcg

SEQ ID NO: 528847 - DNA, 201 bp, Homo sapiens
catagttcatcaccacctgctacattttgtagagcatcttatcagccatagaaataggacaatctataaaactttggggagggtgggggaggaaatgacamagtgtctgtcaaaaacaggcataatctaaaacaaggtggatgtagcaaatctctgtcactgcttgagaactttgagcttgtggcagttttgcagacttac

SEQ ID NO: 528848 - DNA, 201 bp, Homo sapiens
tggagtcacactacatgtacagtattgctcacgttagcagttttctgtaaggagggcaagtgtcaggataataggtggactttttactcacctattttacyacaatctcaccctgcaggtgatggtcaatgcttgctgctccatctttattcatcgttaatgttaatttatgacaactcagggggaaaaacataacaagcc

SEQ ID NO: 528849 - DNA, 201 bp, Homo sapiens
gcataatctaaaacaaggtggatgtagcaaatctctgtcactgcttgagaactttgagcttgtggcagttttgcagacttacatgacttcagcactttacracatattttttactatgaatgttcaatacaatttaatatttataactgatttctgagggatctgctccatgtctattctgttatctgcatgaaaacaaaa

SEQ ID NO: 528850 - DNA, 201 bp, Homo sapiens
tattgctcacgttagcagttttctgtaaggagggcaagtgtcaggataataggtggactttttactcacctattttaccacaatctcaccctgcaggtgayggtcaatgcttgctgctccatctttattcatcgttaatgttaatttatgacaactcagggggaaaaacataacaagcctagtttggttacaggtacacac

SEQ ID NO: 528851 - DNA, 201 bp, Homo sapiens
tgagcttgtggcagttttgcagacttacatgacttcagcactttacgacatattttttactatgaatgttcaatacaatttaatatttataactgatttcwgagggatctgctccatgtctattctgttatctgcatgaaaacaaaatgtatgccaatttcagtatgtcaataatcaaggttttaaatgtttggaagaaaa

SEQ ID NO: 528852 - DNA, 201 bp, Homo sapiens
ctagtttggttacaggtacacacaagcttgaatatttctctgcactgaaatgaaagtggcatagttcatcaccacctgctacattttgtagagcatcttaycagccatagaaataggacaatctataaaactttggggagggtgggggaggaaatgacaaagtgtctgtcaaaaacaggcataatctaaaacaaggtggat

SEQ ID NO: 528853 - DNA, 201 bp, Homo sapiens
taatctaaaacaaggtggatgtagcaaatctctgtcactgcttgagaactttgagcttgtggcagttttgcagacttacatgacttcagcactttacgacrtattttttactatgaatgttcaatacaatttaatatttataactgatttctgagggatctgctccatgtctattctgttatctgcatgaaaacaaaatgt

SEQ ID NO: 528854 - DNA, 201 bp, Homo sapiens
taaagattgagtacattcatactgctgagtataataaatttccacagaacttataacaaaatctggatccatatttcttcttgatggcttctcctgggtcktgagtccattattgaccttatattatttcttcttcactcctgcctattcaagcaatcatggctctgaaggagcgcattggctggagatacagcctcctct

SEQ ID NO: 528855 - DNA, 201 bp, Homo sapiens
actcccaaggatagcggatttccaagcctttggcaagatacctacttatttatttgtttagaggcagggtctcactcccatcatgggagtgcagtagcgtsatctctgctcattgcagcctcgacctcccgggctcaagcgatcctcccacctcattttttaatttttttgtagagacacagcctcactatgttgcccggg

SEQ ID NO: 528856 - DNA, 201 bp, Homo sapiens
tcttcgtgggcctactacagttaaacattgtcatcttcggagcactgctcagacccatctttatcagaggaccagcgtcaccgaaaatagtcatccaggamaatcggaaagaagcgcagtatatgcttgaaaatgagaaaacacgaacctcaatagactccattgactcaggagtagaactaactacctcacctaaaaatg

SEQ ID NO: 528857 - DNA, 201 bp, Homo sapiens
tcccaggctcaaacaatcctcccatctctgcctgccaagtagctgggactacaggtgcacaccaccatgcctggctaatttttgtattttttgtagagacrgggtttcaccatgttgcccgggctagtcttgaactcctgggctcaagcgatcctccgtcctcaacctcccaaagtgctgggattacaggcatgagccact

SEQ ID NO: 528858 - DNA, 201 bp, Homo sapiens
ccagctccttctcgcaggagatggtttctaccccgggaatgagatttctcagtgatctgattgtttttgcaaatcatggtaagataggtgtcttgcttgtwaaaaagatgccaagtgcttatgctgaaatctctaaaccatgcatctccccatgtcccaagcaccgttatgtggcatttttggggtcaacaatacatccgg

SEQ ID NO: 528859 - DNA, 201 bp, Homo sapiens
ggactacaggcacccaccaccacgcctggctaatttttgtatttttagtagagatggggtttcaccatgttggccaggatggtctcaatctcttgacctcrtgatccgcctgccttggcctcccaaagtactaggattacaggtgtgagccaccgcacccgccaacccaggctttttctgtcaccttgccttctctcatgc

SEQ ID NO: 528860 - DNA, 201 bp, Homo sapiens
ggctggagtgcagtggcgcagtctcagctcactgcaacctccacctcccagattcaagtgattctcctgcctcagcctcctgagtagctgggactacaggyacccaccaccacgcctggctaatttttgtatttttagtagagatggggtttcaccatgttggccaggatggtctcaatctcttgacctcgtgatccgcct

SEQ ID NO: 528861 - DNA, 201 bp, Homo sapiens
cttctaacttggtgagttggtttattattttacatgtttaaaagtttgattgtgggatgtgggttgttttttaaaaaatatgtgttggggcctttttttgkgatgggaggcggaggagaccactgaacatcttcacattttggagaggttattcccaaaaatattcgctctgacagttaggaatgcccagggccaccggga

SEQ ID NO: 528862 - DNA, 201 bp, Homo sapiens
ccaagtcaaaataactttgaaaaaaagtgttttatctggctgggcgcagttgttcatgcctgtagtcctagcatttgggaggccaaggtgggcagattgcytgagccccacgagtttgagaccagcctgggcaatgtagtaatcaccccatctctaaaatacctttttttttttcttcaacagaaaattattattcaagtt

SEQ ID NO: 528863 - DNA, 201 bp, Homo sapiens
cgttgcccaggctggtctcgaactcctgacctcaagtgatccgcctacctctgccttccaaagtgctggatttacaggcgtgagccaccgtacctggcctratttttgtattttttttgtagagacaggaattcaccatgttgcccagcctggtctggaactcctgggctcaagcgattcacccacctcagtgtccccaag

SEQ ID NO: 528864 - DNA, 201 bp, Homo sapiens
aaacggggtttcaccatgttggccaggctggtcatgaactcctgacctcaagtgatccacccaactcggcctcccaaagtgctaagattacaggcatgagycatgtcatttttttttcagtagaatcttatatgaaattattgagccttttcaaatgattctatctttaaaagttcctgataaatggaaacttactgccag

SEQ ID NO: 528865 - DNA, 201 bp, Homo sapiens
aagcacaagaacagtagtttccaaacatctctcaaaacccaaaaacatcgcgccattgcactctagcctgggcgacagagcaagactctgtctcagaaaargaaaataaaactcaaaaacgttggcagatcatgtcagtttctaaattttcttttctaattttattgatttgtaatatccaaaaattagggagaattgcct

SEQ ID NO: 528866 - DNA, 201 bp, Homo sapiens
gatgtgcaataaactaatattagacgtttgagggaagcaaatcagcaatctacttgattaccattctggctgtgcagtatggaattaatgtcattttttgttttttttttttagatcagaggtttatgaacttgatttcttgactttcctgatagctggagcgtctcaaatgattgtacacatttcttagtctcaatttta

SEQ ID NO: 528867 - DNA, 201 bp, Homo sapiens
tagacaaaacaattacttagacaaagcacagtttaatcattctaccttttggtaatataggttctcaaattttctgtgtactctttcaatgaacatcctcatatatatatatatattgtgctgagagcagtatagtatagtggttaagagctcagttgtgtgatctgggggaagttattaaatctccttgtgcctcagttt

SEQ ID NO: 528868 - DNA, 201 bp, Homo sapiens
agacaaaacaattacttagacaaagcacagtttaatcattctaccttttggtaatataggttctcaaattttctgtgtactctttcaatgaacatcctcatatatatatatatattgtgctgagagcagtatagtatagtggttaagagctcagttgtgtgatctgggggaagttattaaatctccttgtgcctcagtttt

SEQ ID NO: 528869 - DNA, 201 bp, Homo sapiens
tctggagaattaagacttaatgagagcgagtgaagaaagaagcaagttatgctgaggttttgggaattttgtggctttctttcgttttcttttcttttagycacatttcgttttcatttttccagctacataaacattgcaggtataagttgaaaatgagaagtctgttttggccactgtaaataaaagcatctgttttaa

SEQ ID NO: 528870 - DNA, 201 bp, Homo sapiens
taattcagactttcttatcctttcaagcatcactttcaagttgtgagttttttaaaaatatcagttaccatcaaaacttaagacacaagtaggccaggtgyggtggctcactcctgtaaatcccaacactttggaaggccgaggcgggcagattatttgaggccaggggttcaagaccagcctggccaacaaagtgaaacc

SEQ ID NO: 528871 - DNA, 201 bp, Homo sapiens
tcttgaacagtcttccaaactgatctaccccatccgccatatatctcagttgttcctggctcaccaaagaattctaaatccttgttgtctaggaatatgaracagtaatgaaaggcttggaccgtaatgctccctcggtgcctcctcagaatactcctcaagaagctcaacaagtagatatgtggaagaaatatatacagt

SEQ ID NO: 528872 - DNA, 201 bp, Homo sapiens
ctctgtcattgaaaatgatgcactacttttaatagattaaatataagcaagtcttagtaagttttgcaaaattatttgtatgcatataatggtcttattcatttatttatttatttatttatttatttatttattttgagacaaagtctcactctgctgcccaagctggagtgtgtggtgcgatttctgctcactgccacc

SEQ ID NO: 528873 - DNA, 201 bp, Homo sapiens
ggcaattcctcccaattacctgttaaagctgaatacataatattccatgatgcgaatgcatcataatttattaaactatttccccactggtggacatttgrtttttaaactgtttttgctactacaaagtttacagtaagtaatcttgtacaattacctctctattctgttgcttttatttttattttatttttttagatg

SEQ ID NO: 528874 - DNA, 201 bp, Homo sapiens
agaagggcaaaatctgtatttgggtgtttttacctattggacaattacccataccaattcatgattttaagcttttttttttaaatcttcgatttggtgayggtgattttaagcttttctaccatgtctctgaatctttctctttagataggacctacctgtgaatttgagtctttttgttttgttttgttggacagttgg

SEQ ID NO: 528875 - DNA, 201 bp, Homo sapiens
tctgtcattgaaaatgatgcactacttttaatagattaaatataagcaagtcttagtaagttttgcaaaattatttgtatgcatataatggtcttattcatttatttatttatttatttatttatttatttattttgagacaaagtctcactctgctgcccaagctggagtgtgtggtgcgatttctgctcactgccacct

SEQ ID NO: 528876 - DNA, 201 bp, Homo sapiens
ttttgaaagtaacagaaaaattaataagaaactatagggatgaatttgcaaagttggttaaaaattggtcaaaaattcagactgatgctctaaaaaaatartattaattctatatttttctgtttctcttcagattaaagctaaaaattatgacaaggttgaaaaggtgagtcctcaaatactttgaattttatattgaag

SEQ ID NO: 528877 - DNA, 201 bp, Homo sapiens
ctgtcattgaaaatgatgcactacttttaatagattaaatataagcaagtcttagtaagttttgcaaaattatttgtatgcatataatggtcttattcatttatttatttatttatttatttatttatttattttgagacaaagtctcactctgctgcccaagctggagtgtgtggtgcgatttctgctcactgccacctc

SEQ ID NO: 528878 - DNA, 201 bp, Homo sapiens
cagatttaaatagaggctacagtgtactcattgtatttgtgctatagtttagattgtattacttggtggggagggaaattactggataatagcaggaacaytgtgtgtgttttatttttgtgtgtgtggttgtgtatgtggtatgtatgtttgtgtgtttgtatgtatgagagagattgtgccttatgtggagtctggtag

SEQ ID NO: 528879 - DNA, 201 bp, Homo sapiens
tgtcattgaaaatgatgcactacttttaatagattaaatataagcaagtcttagtaagttttgcaaaattatttgtatgcatataatggtcttattcatttatttatttatttatttatttatttatttattttgagacaaagtctcactctgctgcccaagctggagtgtgtggtgcgatttctgctcactgccacctcc

SEQ ID NO: 528880 - DNA, 201 bp, Homo sapiens
caagcaattcttgtgcctcagccttccaggtagcagggattacaggcacacaccaccacgcccagctaatttttctgtttttagtagagactgggtttcamcatgttagcctggctggtcttgaactcctggccgcaagtaatctgcctgcctcggcctcccaaagtgctgggattgtagatgtgagccaccacacctggc

SEQ ID NO: 528881 - DNA, 201 bp, Homo sapiens
cgcctggaatcaacagctgaaagccttgccatatttgctttatctccccatgctgatagattgagaacagagtctttgtcactcacactagagtgctgtgrcgccatcacagctcaccatagcttcgacctccctgcgctctgtgatcctgccacctcagcctcctccgtagctgggagtacaggcgcgcgccaccatgcc

SEQ ID NO: 528882 - DNA, 201 bp, Homo sapiens
ttcttttgcacactcaacttgtccaaacctttttggtggttcttatatcttttccttaagtctgaaaggcaatttagacatctgattatcaacaaggaagycatcttcatatagccttttctttaactttttaataatacatttcaaacatgtaagaaaaacagtataatatatgaagtacctgtcatagagcttcaattt

SEQ ID NO: 528883 - DNA, 201 bp, Homo sapiens
aaaggcaatttagacatctgattatcaacaaggaagtcatcttcatatagccttttctttaactttttaataatacatttcaaacatgtaagaaaaacagwataatatatgaagtacctgtcatagagcttcaatttatggctaatcttgtttcctccatgacttcatttgcttctctcacccccattacttcgaagcaaa

SEQ ID NO: 528884 - DNA, 201 bp, Homo sapiens
tgtgcctcagccttccaggtagcagggattacaggcacacaccaccacgcccagctaatttttctgtttttagtagagactgggtttcaacatgttagcckggctggtcttgaactcctggccgcaagtaatctgcctgcctcggcctcccaaagtgctgggattgtagatgtgagccaccacacctggcctgtataaatt

SEQ ID NO: 528885 - DNA, 201 bp, Homo sapiens
tcttttaaaatctccttcccttaggtgattctaatgcagagccaggattgagaatcactaaagggctggctcatttgatgtattaaggagacatgtatacrtcttattgtgattatgcttggttggatatcagattctatgctcttcagtttgtctcttttacagattatatggtataccttacctgatttggtaggttaa

SEQ ID NO: 528886 - DNA, 201 bp, Homo sapiens
cagagtcgcgaaattagccccgcccactgccccggaagttaatgcggaagccacacacctcctcctcggccggcaggggcgcagccattttaattcatatytgagtgggcggtggcgattggtgttggcggtctggctcagctgggcagggggtaactttactgatttgggggtggtttttagtttaatttttcttttcta

SEQ ID NO: 528887 - DNA, 201 bp, Homo sapiens
agaagtaaacccattgaaagaattctttattttgttatgtatcccaagggccactacaatgtctgacacatactaggcactgagtgaatatttctcagacraataagaaaaattcaaacaaaccagaagggtatatggcagagtaagtgtatgtgttgtttgcatgtctccctgctcaccatcactttttattttccatgt

SEQ ID NO: 528888 - DNA, 201 bp, Homo sapiens
aggcatgcaccaccacatctggctatacatagttatttaatttattttcagtcttatgtaactatagtctagtagctgactcattatatatctttgtgtayatgtgcagtagggtgttaatagaagtggaattcagaatcggacatttatattaaacgttgatcagtttctttttttctttttttttgagacggagtcttg

SEQ ID NO: 528889 - DNA, 201 bp, Homo sapiens
ctgtatgatataggaaatggatatctatattgatttacttgaccaaatggcaaattattttaaataagaatttagatattttaaaaataatgccatctttygctttgtaaacaaatagtcaaaaagatcatctagacaaatacgtgatcatttgcaaatgctacattatttaactcgttaaaagttttcagttgttagcaa

SEQ ID NO: 528890 - DNA, 201 bp, Homo sapiens
tgctggctactattttaggcatttttttcaaaaattaaatttctataataaaagtaaaactaccttaccaaaggatttggggaatattgaaagaaaagggraaaaaaaatcagcctctaattctactgcttatcttccaaggatgaccagtctaagcatttgaatatattttaaaaatctctttaattgcagatttctttt

SEQ ID NO: 528891 - DNA, 201 bp, Homo sapiens
acaagcttcccagttagcataccagcactgctgactcaatctctagaggatggacatatggtatgtgtttctggcagctagttttgggaattgaggctttkcagggcagtaattgaatcttactgctgtcagtaaattttatagtttgcagaatatttcctatacttgcctggacaataaagtgattagtctcctggcttg

SEQ ID NO: 528892 - DNA, 201 bp, Homo sapiens
aactgagctaatcaatctgaatacataaatacacatgccaaataagctctagcattaaaaggaagttccttggctgggcatggtggcttacacttgtaatcccagcactttgggaggccgagatggaaggattgcctgagcccagtagtttgagaccagcctgggcaagatggtgagagcccgtctctaaagagaaaaaaa

SEQ ID NO: 528893 - DNA, 201 bp, Homo sapiens
catgtgcccacacccagctaattttttgtatttttagtagagacagggtttcaccaaattggccaggctggtctcgaactcctgaccttgtgatccgcccrcctcggcctcccaaagtgctgagattacaggcgtgagtcaccgcgcccggcccaagctcctcagtttttaagaatgtgaagcaatcctttacaaaatgtt

SEQ ID NO: 528894 - DNA, 201 bp, Homo sapiens
gagacagagtctcgctctgtcgcccaggctggagtgcaatagcatgatctcagctcactgcaacctctgcctcgccatttcaagcaattctcctgcctcargctcccaagtagctgggattacaggcgcacaccaccacacccagctaatttttttgtatttttagtagaaacggggtttcaccatgttggccaggctggt

SEQ ID NO: 528895 - DNA, 201 bp, Homo sapiens
agggtttcaccgtgttagccaggatggtctcgatctcctgacctcgtgatccgcccgcctcggcctcccaaagtgctgggattacaggcgtgagccaccgygcccggccggtttttagtatttatttccctattctgttgtacgaataacactggccatcctttattgagttcctaccaggcactgtgctagataattcat

SEQ ID NO: 528896 - DNA, 201 bp, Homo sapiens
tcatatctgagtgggcggtggcgattggtgttggcggtctggctcagctgggcagggggtaactttactgatttgggggtggtttttagtttaatttttcytttctagcttcccatcgacggtcagtgcgcacgttgtaatcagctgaggccatgtcaggagacggagccacggagcaggtgaggaaggagagtggtgggg

SEQ ID NO: 528897 - DNA, 201 bp, Homo sapiens
ctgtatcctcaaggttattgcatgattattctctagtagtccctttttcaggtttaggattcttctgttctgcattttcaggatgtctcccgtgctaagcyagcagctataattccggacccagttgtagctccttctatagtgcctgttctgaaagatgaagtggatagaaaaccagaataccctaaaccagacactcag

SEQ ID NO: 528898 - DNA, 201 bp, Homo sapiens
gaggcaggagaatcacttgaacccgggaggcggaggttgcagtgagccaagatggtgccattgcactccagcctgggcaacaagagcgacactctgtatcaaaaaaaaaaaaaggaatgctgctatgtgcagattacctgaacagctggtggaaactttcttcactgatagatttggtttctttacttaggaatgggttag

SEQ ID NO: 528899 - DNA, 201 bp, Homo sapiens
gctcctccagtggcctttgggggaattagctcatctatgaatagaactcttctatacagactactgagtcataagaaaacaaatctggcacctgaacctgytcaggccacagggagagattaatatttacaaagccccagtaacagcccttgctgataaaaccactgttatatcatctcttaatctttctgtgacatgtga

SEQ ID NO: 528900 - DNA, 201 bp, Homo sapiens
gataaaattaagtcattggtaatatgtatgtcttgataactagtccagtttttgctctactcctttgatttggggtccctgcctgttccccattaacatcrcctgaaaaatgatattaggattatagattattatttcagaagcaaaactggattttgatagtttttgatagtaataagtttttgggatgcataagcatgg

SEQ ID NO: 528901 - DNA, 201 bp, Homo sapiens
gttcctgttgcatattttgtaagatataatgaagaaatattacagcttgttaaatccataaagttccttgagggatttgtattcttaaaacagtgctcctycagtggcctttgggggaattagctcatctatgaatagaactcttctatacagactactgagtcataagaaaacaaatctggcacctgaacctgttcaggc

SEQ ID NO: 528902 - DNA, 201 bp, Homo sapiens
cactctttgacaaaaactgactttagttcagtccctggttgtcttacacaaagtcacttgtctacttctctgcctcccagtggccacggcattgagactgctctgtctcacccactttggtttggtaaagccctagaagtattttcagtgtccagaacaaagcagcagacatggaagatctttatgtgcaagtcacttgat

SEQ ID NO: 528903 - DNA, 201 bp, Homo sapiens
actctttgacaaaaactgactttagttcagtccctggttgtcttacacaaagtcacttgtctacttctctgcctcccagtggccacggcattgagactgctctgtctcacccactttggtttggtaaagccctagaagtattttcagtgtccagaacaaagcagcagacatggaagatctttatgtgcaagtcacttgatt

SEQ ID NO: 528904 - DNA, 201 bp, Homo sapiens
ttttcaatatgtttattgagtggaaacaggtattctattcatgactcaaactttattgtgtttgaaaactattggaaagtcctagctttcccctccctacyatgatttttttcatttaagaagcttactagtgagtatagttagtaaagataattttcaggattttgtcaaatataaaatcatttactgtaaatgatgcct

SEQ ID NO: 528905 - DNA, 201 bp, Homo sapiens
aaaactaaggatttaggtagagtgtattagcctttcaatacctgcttattaaacagttgttttcatacttttcaaaggtgtgtagaagttttgtaaataarttttctgataggataaactagattccctatgatctcttatttatttatcattgttttgagacagagtctcactcttgcccaggctggagtgtagtggcgc

SEQ ID NO: 528906 - DNA, 201 bp, Homo sapiens
cattatttagaattatgttgatgtataacataagagaaagatttatactttttttttttggagtcaggttcttactctgtcacccaggctggagtgcggtsgcttgaactccgctcactgtaacctgtaacctccaccgtgtgggctgaagtgttcctcccacttcagcctcctgagtagccaagaccacagttgcaggcc

SEQ ID NO: 528907 - DNA, 201 bp, Homo sapiens
aggaacgcgaggagataagcagaatgcctaaactgttttggccctgaaagcaactgccaaactgggaagacttgagcttcaattttaaacgcttcaggacytcaggcagcaaaagtcaaaacccaaggcctgcccaaggtacagtgtccaatgggatatcctttccccttaaactatgtgctccaaaagctacactcagga

SEQ ID NO: 528908 - DNA, 201 bp, Homo sapiens
agaaaactaaagttttttttcttaaatcacataaatggttggaaacaaaaagataaatgaccttcaaaggaatggcagtaaggttggtaacttcacagcarcaagggaagctagaagacagtggaattgactcttcagtttgctgaaagaaaatagctgtcaacttgaaagttctgtacccagagtcatgttaataaaata

SEQ ID NO: 528909 - DNA, 201 bp, Homo sapiens
gttctgtacccagagtcatgttaataaaataccattgtggaagttacgcatgcatttttgaacatgtccaattgtaggtataacttaaatacatatattamattacaagctcatttattaagtatccaggtttctcttcatatttgcttcctagcctaaagtcactctgttccaatgaaagttttcataagtgaaaggact

SEQ ID NO: 528910 - DNA, 201 bp, Homo sapiens
caagctcatttattaagtatccaggtttctcttcatatttgcttcctagcctaaagtcactctgttccaatgaaagttttcataagtgaaaggactcttaytggaatttgaattggtggtctgtttttagcttcacttttttcagggcaaaaatgattatgagttttatttttatgtttattataagtagaattataaatc

SEQ ID NO: 528911 - DNA, 201 bp, Homo sapiens
gtatggaattaatgtcattttttgttttttttttttagatcagaggtttatgaacttgatttcttgactttcctgatagctggagcgtctcaaatgattgyacacatttcttagtctcaattttaattaacctttagaaagatctatgccactcagcaattttgaggagagacaggggagatgacctaatgggaggtagag

SEQ ID NO: 528912 - DNA, 201 bp, Homo sapiens
tttattgaaaaattcaccattctgatttgaacatgccacctttattatttgctgattttccatttgctgttctttctgagcctgtagtttcatatatgggwagagccaatagtcccttataaactttacagctttagttccttgagcaagctattcataaagttcttatatgttaggaaagcatcctaattttaattttga

SEQ ID NO: 528913 - DNA, 201 bp, Homo sapiens
tggaggcggagtctcactcttgctcaggctggagtgcagtggtgcgatcccagctcactgcaacctccacctcccgggttcaagcgattctcctgcctcascttcccaagtagctaggactacaggcatgtgcccacacccagctaattttttgtatttttagtagagacagggtttcaccaaattggccaggctggtctc

SEQ ID NO: 528914 - DNA, 201 bp, Homo sapiens
ttaacttttttttttgagacgtagtctctgtcacccaggctggagtgcagtggtgctatctcggctaactgtaagctccgcctcctgggttcacgccattctcctgctttagcctcccgagtagctgggactacaggcgcccaccaccatgcccggctaattttttgtgtttttagtagagatggggtttcaccatgttag

SEQ ID NO: 528915 - DNA, 201 bp, Homo sapiens
ccctaaacccagaataattaaagtattgattgtatttcttttcttgcagagaaatctgggcccgatttctagcatttgaaagtaatattggtgatctagcyagtatactcaaagtggagaaaagacggtttacagcattcaaagaagagtatgaagggaaagaaacggctttactagtagatagatacaagttcatggatt

SEQ ID NO: 528916 - DNA, 201 bp, Homo sapiens
ctatggggtgaatgtttgcttgagtatgagtttcaagagaaatttcctttccttctcaagttttattttacctatcagcagtacttttatacctgtttaarattatttttaaatttctgcacagtgattagaattgtttttaagagatgccatagcaatttattatcatctttcttgtatactatatatccctaaccagaa

SEQ ID NO: 528917 - DNA, 201 bp, Homo sapiens
caacctccgcctcccgggttcaagcaattctccggtctcagcctcccaagtagctgggattacaggggcctgccaccacgccccgctaatttttgttttgktgttgttgttgttgttgttgtttgtttgttttgttttcaagacggagtctggctctgtcgcccaggctgcagtgcaatggcatgatctcggctcactgca

SEQ ID NO: 528918 - DNA, 201 bp, Homo sapiens
tttacttaacatgattttaatttgttttaattcttacatattttgtcatatgtaggtataattttaatattctttcaagtgttttttatctgacatttcayggaaatctgtactttactttctttacttgtaggacaaatctgttgcctttaagatttttgagctggggctaaaaaaatatggagacattccagagtatgt

SEQ ID NO: 528919 - DNA, 201 bp, Homo sapiens
aggctgcagtgcattggcgtggtcatagctcaccacagcctcaacgtcctggcctcaaggactcctcccacctcagcctcccaaagtgctgagattacagktgtgacccactgtgcccagccttaaattatattatttcagtcattaacatgatagtgtctgtcacctcttcacatcccaccttcccattaacaacctcct

SEQ ID NO: 528920 - DNA, 201 bp, Homo sapiens
gcttacatcgtcttaaatctttcaatctaccatctttctccccctctattcatacttttgtgttatcactttaactgatccctactttaatttaatttcartatggctcctaatataacacccttctaatttatcatgaaagtagctatttggagaaagagaattatctttttttttttttttgtctgttttacctgcatg

SEQ ID NO: 528921 - DNA, 201 bp, Homo sapiens
ttgtaacttattactttcaattttattactttaattttactgaatttttaaactttaaattttattattaaaccggtttgctcctagcaacttggtagcaraaaacaaatagttggtttgtataatggcataataggttgaagtctgcatctagatttttttcccccacataccagaatccacaacagtttgaaaaaaaaa

SEQ ID NO: 528922 - DNA, 201 bp, Homo sapiens
aaggatatatgcagaaataggaatgaaagaatttgaaatctggggaccctaggatattctgcttgcagcttccttattactaggaccttagccaaacaatktaacgttttttctttccaactatttattataaaaattttcaaacaaatttgaaagaataatatatagtcaatacctgtgcacctctacataggctcaata

SEQ ID NO: 528923 - DNA, 201 bp, Homo sapiens
atagtaaaaagcttacatcgtcttaaatctttcaatctaccatctttctccccctctattcatacttttgtgttatcactttaactgatccctactttaayttaatttcaatatggctcctaatataacacccttctaatttatcatgaaagtagctatttggagaaagagaattatctttttttttttttttgtctgttt

SEQ ID NO: 528924 - DNA, 201 bp, Homo sapiens
ctgaatagcgagaaatactcattataaaaccagggttgaggctcaactctgctttttctgttggtcatagtaaaaagcttacatcgtcttaaatctttcartctaccatctttctccccctctattcatacttttgtgttatcactttaactgatccctactttaatttaatttcaatatggctcctaatataacaccctt

SEQ ID NO: 528925 - DNA, 201 bp, Homo sapiens
tcagatgaagatgaagaaaagggagccgttgtcccccctgttcatgacatttacagagcacggcagcagaagcggattcggtagggttttaaacgcctctrcagaaaactcctgtccaggattccttttgcctcaagtggtatgtttaaaagagacaacgctttgttacaaggttcttggaaacaaagttgtattgtcatt

SEQ ID NO: 528926 - DNA, 201 bp, Homo sapiens
tctgtttttagcttcacttttttcagggcaaaaatgattatgagttttatttttatgtttattataagtagaattataaatctcacttgattggtttagtrccacaagtttacagtttgggcattaaacaagtagtttcttaaatgctgaatttcagttaaatttttacccaagtatatcacttcaattttattgttaaat

SEQ ID NO: 528927 - DNA, 201 bp, Homo sapiens
ttaaattatactatgtttagaggctgcaaaggtaatcctttacattaaaaaatgttaaatagttttgacaatattatacatctaatttctgtatgcataaygcatattgtgttttatttgtacattttttgcaaattttaacattttgggggtttttggaatacggttttgagaattgatgaaaatatagatatgtgttta

SEQ ID NO: 528928 - DNA, 201 bp, Homo sapiens
aatgacagcaccataagggtctgttcttagagcaggaatatcaatataatcttcatttcattcttgcctactaaagccttcatggcagctttccatatagyatttgaacttaattctttacctttggtggcatcactttggaaaatatcacaaatataattagaggaggtaaaatgaaatacaaacatttcaaactataaa

SEQ ID NO: 528929 - DNA, 201 bp, Homo sapiens
agattttaaagtggggatgtttatgttcagagaaaaataccaatgaattactccgaagagaaacttaccgttcaaaatcagctgtaattttctttctcttrttaaaaaaaaaaaaaaatccctaatctgtcatgagattagagataaaaaagaaaatgttgagttattttttaaaaatcccaactctctcctttgtgaaat

SEQ ID NO: 528930 - DNA, 201 bp, Homo sapiens
gacagaaaaattgtctcaatccttccagtgaaaatagttttggtcaacagttattgtgtgcatttcttcctactcagtatatattttttggatttcacttyttaaatgtactatggatatatttccattcagtattatacatcattgcttttaaagttcctgtgggtgtgtatatatctatatctcatcccattgtttaga

SEQ ID NO: 528931 - DNA, 201 bp, Homo sapiens
gacagcttctctgcatctcaaattcagtttaagatgattgtcttaagtcctaggaaagtctatgtgctatactttagagtagaaaagatgcagggaacaarttaggaatgcgactgcaattcatttattcgtttgttcacattgtgaacaactaccataagaactcactttagatggatcctagccctgcctctgctatgt

SEQ ID NO: 528932 - DNA, 201 bp, Homo sapiens
cttgacagtgtttcttttaccccgccaaatatactgtacccagaaataggttactagtttgagaaatatttgagacaaagctaatctggagaattaagacytaatgagagcgagtgaagaaagaagcaagttatgctgaggttttgggaattttgtggctttctttcgttttcttttcttttagccacatttcgttttcat

SEQ ID NO: 528933 - DNA, 201 bp, Homo sapiens
aggtaaaacctgagaagttgcatgagtttgattcctagaaatgtttttaccatgagtaaaatttgtttttactaaatgggaatcctaagataccacattgycagcgtctagcttatccaatgacatacagtttctaaattgacttattttgtacagaaaaaagattgcttattttatatgaattttttaaatgaaaaaatg

SEQ ID NO: 528934 - DNA, 201 bp, Homo sapiens
cattagttccaataatttatctgaggatagttttagttccaaaagatacgtgatgaccaattaatgcttgggaaataattgtggaagttaacaaaggcctrgaaatatgaagtattcaaaagtattgggaaaagatctgtgtttcctcatcatgttatacttgttttactctccctaagataaccactgattttttttttt

SEQ ID NO: 528935 - DNA, 201 bp, Homo sapiens
tatgtatttaagaatattattctgagaaaaggctcataggtttcactagactgcagaaagattctgtggcaccaaaggagcaaccaactagagagcatagttttttttttttttgagatggagtctcctctgtcacccaggttggagtgctgtggcgtaatctcggctcactgcaacctctgcttcccaggttcaagcgtt

SEQ ID NO: 528936 - DNA, 201 bp, Homo sapiens
taccattaatctcagattaaataccttattcttgggacatagtctttactcctaagacaatgaaaagtctaaggtgtttaccccaaccatctaattggatsggactcaaattctaaacttcatctcccttagttgctgaggtatctatttaactctttctgccttccagctttgttttctgctggtctgtttgtattcttc

SEQ ID NO: 528937 - DNA, 201 bp, Homo sapiens
taatttttgtatttttaatagagatggggttttactatgttggccaggctggtctcgaactcctgacctcgtgatctgcccacctcgggctcccaaagtgytgggattacaggtgtgagccaccaagcctggcctctttctttctttttttttagagacagtgtctcactgtcacccaggctggagtgcagtggtgcagcc

SEQ ID NO: 528938 - DNA, 201 bp, Homo sapiens
cttttagatattgtacaaatgtacaaatgaaacattgtaaagactgtagattctttcatcttcctctgaagaatgttttattttagcaggaagttaaataytactgtcagattacttggactttgtggaggcttagttttatactatgaagacaggtctgttttagttttaccattaatctcagattaaataccttattct

SEQ ID NO: 528939 - DNA, 201 bp, Homo sapiens
ctcttgaacttctggcctcaagcggtcctcatgccttggcctctcaaagtgctgggattacaggcatgagctaccatgcctggcctaaaatttcttttaatttttttttttttcaagaagtaaacccattgaaagaattctttattttgttatgtatcccaagggccactacaatgtctgacacatactaggcactgagtg

SEQ ID NO: 528940 - DNA, 201 bp, Homo sapiens
ctcttgactgtggtttacatttccctatttcctgtttaaattttttcttttagatattgtacaaatgtacaaatgaaacattgtaaagactgtagattctktcatcttcctctgaagaatgttttattttagcaggaagttaaatattactgtcagattacttggactttgtggaggcttagttttatactatgaagacag

SEQ ID NO: 528941 - DNA, 201 bp, Homo sapiens
tggagcatcatccaaatccccaactacttgctaatttatgcttcattaatcactatatttctaatttgtgctttattaatcactatattaatcactatttmgtgatttctaatcactaaactcctttgaatagtttctagctcagcaatttttacttaacatgattttaatttgttttaattcttacatattttgtcatat

SEQ ID NO: 528942 - DNA, 201 bp, Homo sapiens
acaaaccagaagggtatatggcagagtaagtgtatgtgttgtttgcatgtctccctgctcaccatcactttttattttccatgtggctacctgccatgcctttttttttttttttaagtgactacaaattccataatttatttaattggtccttttttatatgtatttatttaattttaacaaatagagacagggttttgt

SEQ ID NO: 528943 - DNA, 201 bp, Homo sapiens
tgcaggctggagtgcagtggcgccatctctgctcactgcaagctctgcctcccaggttcacgctattctcttgcctcagcctcctgagtagctgggactayaggtgcccaccaccacgcccagctaattttttgtgttttttagtggagatggggtttcaccctgttagccaggatggtttctgttctcctgacctagtga

SEQ ID NO: 528944 - DNA, 201 bp, Homo sapiens
cttgatgatttataattttttacattttagaaatagatgaatggcgtgtttttttaatttttaagctgaattttgcttctagtcattcccagtatattaargcagatgacttgtggcttacatgaacgttatagaaatatgagaataatatagaaatattatagaaatatgagcttaatggtcattagctcatctagaatt

SEQ ID NO: 528945 - DNA, 201 bp, Homo sapiens
taattagtagaaaattattaaatgctaggatacccacaagtataaaaatttgtgcataatgtctgcatgatagataatccacatattaatagtaaagtctmttctctagtcacactggcctccttgatgttccttaaatttattccagacattcctcccttagggcttttgtctacattagctcttttatctgttctaaag

SEQ ID NO: 528946 - DNA, 201 bp, Homo sapiens
tgttcaaatctttgtttttttgagacggagtctctgtagcccaggctagagtgcagtgccacgatctctgctcactgcaggctccacctcccgggttcacrccattctcctgcctcagcctcccgagtagctgggactacaggcgcccgccaccactcccggctaattttttttttttgtatttttagtagagatggggtt

SEQ ID NO: 528947 - DNA, 201 bp, Homo sapiens
ttaaatatgacttcatagcccattatccattaccattcattcatccactcatttgttcattcatgaattcatttagttcaaataatatagaggtggagatrgggagaaatcactggggtgggggtggatgtcaggaagtaagcaaatgtaagactgcagctctagtatagaagagatgatgaacataaacaagtcttagga

SEQ ID NO: 528948 - DNA, 201 bp, Homo sapiens
tgcttatttatgaccatatgttgatactcacttcttctgtaccaccttagagtcgcatgaagtatgaaaaggttcacagtatatataacagacttctggcrattgaggatattgaccctaccttggtgagtaactttacaaatctttttttccacctttacagtcttatctaacaaaaaataatttaaatttatatacaat

SEQ ID NO: 528949 - DNA, 201 bp, Homo sapiens
aatttattccagacattcctcccttagggcttttgtctacattagctcttttatctgttctaaagatatttttccagatagctgctttgctagctgctttrctttcttcagatctacaaaaatgttaacttctcattgagatctactgtgaccactctgtttaaaattgccacttctatcccctgcagaactccttatcct

SEQ ID NO: 528950 - DNA, 201 bp, Homo sapiens
tctggtagtaactttgtagacccccccaccatctgtatatttttataggtttttatgtggatataggtaaaaaaaaaaaaaagtaggccgggcttggtggytcatgcctgtaatcccagcactttgggaggctgaggcgggcagatcactcgaggtcaggagtttaagaccagcctgcccaacctggtgacaccctgtctc

SEQ ID NO: 528951 - DNA, 201 bp, Homo sapiens
catattagagcttcaattattcctccattttagtctgaatttactgatagtattatacttagcaccctttctaaacctttttattgaagtgaggttttaartcaatattttaacaaggattataggactcataaagacctttctgtaaaagttatacatttacatttttcatttcccttgatatttaagacagtataatct

SEQ ID NO: 528952 - DNA, 201 bp, Homo sapiens
tattagagcttcaattattcctccattttagtctgaatttactgatagtattatacttagcaccctttctaaacctttttattgaagtgaggttttaagtyaatattttaacaaggattataggactcataaagacctttctgtaaaagttatacatttacatttttcatttcccttgatatttaagacagtataatctaa

SEQ ID NO: 528953 - DNA, 201 bp, Homo sapiens
gcacctgtaaccccaactgcttgggaagctgaggcaggagaattacttgagccctggaggcggaggttgcagtgagccaagatcatgccactgcactgcarcctgggcaacagagttagactttgaaaatgtcttttttcaggttcttccatccacgttattttttcagggaagatgaggacattatcttcctaaattgct

SEQ ID NO: 528954 - DNA, 201 bp, Homo sapiens
aaccaattgagccatgaatgttaactagtgattttgatacttctggctaaattactcacttttctcaaaaagcaaataccctgctgtatttttcttacccmaaaattacagattattctttgaaaggtaatgtttggcatgctgttgacaagttatttacagagtttagatgtttattaagtaaagtaggctgagtctata

SEQ ID NO: 528955 - DNA, 201 bp, Homo sapiens
ttttttaaatccatgagtaccaagacttcaggaagtttaaatcgaaaatagttctggtctgggcacagtggctcacgcctgtaatcccagcactttgggargccaaggcagccaatcacctgaggtcaggagttcgagaccagcctggccaacgtagtgaaacaccatctttactaaaaatacaaaaattagctgggcacg

SEQ ID NO: 528956 - DNA, 201 bp, Homo sapiens
cctggcactcaccattggcaccagctctgtgcccacccctggaggaccagggaggatatgggagtgcaaggctgggctcccaagaaagcactgacctggaycccaccctcagcgggagctttgacagagtagttctccaggcaggggacctaggtgacagcccagagctgtacctgtgcaaaggcctcaggctaggccctc

SEQ ID NO: 528957 - DNA, 201 bp, Homo sapiens
cctcgcacttgccaagaagacgatcatccgtcggcgctgcacgcgggcctaggctggacacaagaggctccccagcagaaagggtctttcggcaaaaaaaraaaaaaggggctctgtcccccggcgccgggaatcccctcctctggcactgagctccactcgcgcccggcgtccggattccgttgtaaacagctgttcagg

SEQ ID NO: 528958 - DNA, 201 bp, Homo sapiens
gatcaggagttctaggtcaggagttcaagaccagcctggccaacatggtgaaaccccatctctactaaaaatacaaaaagattagctgggcatggtgatargtgcctgtaatcccagctactcaggagactgtggtaggagaatcacttgaatccaggaagtggacgccgagatcacgtcattgcactccagcctgggcaa

SEQ ID NO: 528959 - DNA, 201 bp, Homo sapiens; identical to SEQ ID NO: 528870

SEQ ID NO: 528960 - DNA, 201 bp, Homo sapiens
gtcacctccacgttgggtctggccatcccaacaaccaaccaaccaataaagggtgactgaagacctaaaccaaaagttcttctttagcagaaactataggytgtaaagctatcatgttagccatatacatctacattacagcaatcaatcctggcctctttattttttttatttttatttttttgagagaggcttgtctca

SEQ ID NO: 528961 - DNA, 201 bp, Homo sapiens
agactacttaaaatcaaacttatcaatgacaggtatctgatcatgatagataaaagctacagttctaagatatgatcaggacatgttaccgatgtacatayagaggaattattcactgcatacaaattatagggttgtggggattttgttttgtgagagttctcaaatttaccaatttcataaatgaaaacttggtaagga

SEQ ID NO: 528962 - DNA, 201 bp, Homo sapiens
gtacggccttgaacaagtcacttaaatcttgcagggtcagtgtttctccatatgcaaaaagaagagacttaagggtgtgctatgaaatataagaatcctcygaattttaaacaagtgcattctcagtgttttgggcatacttggaaaaaaacagcttgcaccaagtactaagaacctcaccattaggaagaagaaaatttt

SEQ ID NO: 528963 - DNA, 201 bp, Homo sapiens
tgctttctttcaactcccacatcctcaccacctgcttctttgtttcatcaccaataaatagtgcaggcttccagagctcggggccttcgcagcctccataytagcattggcccccggacccactttatgcactcttaaacttgtctttttcattcttttgactccactggacttcgtcacctccacgttgggtctggccat

SEQ ID NO: 528964 - DNA, 201 bp, Homo sapiens
caaccaatagagtttttgattcaataaaaaaatggttaagtgccaggcactagggacacagagaataacccacagtcttcgcctttgcgatgaaaccaacractatagtgcagtgtgatagtttcaaagaagtgaatgaaacaaggcaatgaaaacacaagatgaggcagctagatcctactgagtaggcagactttcaca

SEQ ID NO: 528965 - DNA, 201 bp, Homo sapiens
gaaaatgctaaaccgtcacagctgtagatcatgtgcttgatacactgctttctttcaactcccacatcctcaccacctgcttctttgtttcatcaccaatraatagtgcaggcttccagagctcggggccttcgcagcctccatattagcattggcccccggacccactttatgcactcttaaacttgtctttttcattct

SEQ ID NO: 528966 - DNA, 201 bp, Homo sapiens
aacgttctggacattattctaaaatgttaatttcccatgcaattgaaaatccacaagtagctaggctgccagctgaggaactgctattattcctaaatgcyacattggcaatgttatattattagaacctagctcacggccacatgcacaaggaggtctcataaaaccgtcacctgaaaacaatgacaatattgcatctaa

SEQ ID NO: 528967 - DNA, 201 bp, Homo sapiens
aatcacggctcactgcagccttgacttccccagctcaagtgatcctcctgtccccgcctcccaagtagctgggactacaaccacgtgcatgctcagctaattttttttttttttttttgagacagggtcttactttgtcacccagacgggagtgcagtggcgtgatctcggctcactgcagcctccacctcccaggctcaa

SEQ ID NO: 528968 - DNA, 201 bp, Homo sapiens
ccattatctcaagtagcagaacatgttccatatgctgcaaagaaaatgctaaaccgtcacagctgtagatcatgtgcttgatacactgctttctttcaacycccacatcctcaccacctgcttctttgtttcatcaccaataaatagtgcaggcttccagagctcggggccttcgcagcctccatattagcattggccccc

SEQ ID NO: 528969 - DNA, 201 bp, Homo sapiens
ggaggatcctcgcacttgccaagaagacgatcatccgtcggcgctgcacgcgggcctaggctggacacaagaggctccccagcagaaagggtctttcggcaaaaaaaaaaaaaaggggctctgtcccccggcgccgggaatcccctcctctggcactgagctccactcgcgcccggcgtccggattccgttgtaaacagct

SEQ ID NO: 528970 - DNA, 201 bp, Homo sapiens
gaggatcctcgcacttgccaagaagacgatcatccgtcggcgctgcacgcgggcctaggctggacacaagaggctccccagcagaaagggtctttcggcaaaaaaaaaaaaaaggggctctgtcccccggcgccgggaatcccctcctctggcactgagctccactcgcgcccggcgtccggattccgttgtaaacagctg

SEQ ID NO: 528971 - DNA, 201 bp, Homo sapiens
tcccaggataagtattcttgccttaagggcataactacacacaatttcagataatgtagcttagtactggtttgacattaatttggaatcatgccatcagrctgacaagatgccaaaggcgaagccatcaaccaaagaatggctgaacctataaaagttaaaattgtttaaaaaaattaaaaccaatcaaccaactgttgg

SEQ ID NO: 528972 - DNA, 201 bp, Homo sapiens
aggatcctcgcacttgccaagaagacgatcatccgtcggcgctgcacgcgggcctaggctggacacaagaggctccccagcagaaagggtctttcggcaaaaaaaaaaaaaaggggctctgtcccccggcgccgggaatcccctcctctggcactgagctccactcgcgcccggcgtccggattccgttgtaaacagctgt

SEQ ID NO: 528973 - DNA, 201 bp, Homo sapiens
gtagctaggctgccagctgaggaactgctattattcctaaatgctacattggcaatgttatattattagaacctagctcacggccacatgcacaaggaggyctcataaaaccgtcacctgaaaacaatgacaatattgcatctaaccaaagtcaaatttgcttacagtgaggtctctgcactctttgggggctggaggagt

SEQ ID NO: 528974 - DNA, 201 bp, Homo sapiens
aaatttgcttacagtgaggtctctgcactctttgggggctggaggagtctgactttattgctttttgtaaggcttcatcagcaccttccacagcatcttcraggccttcctcagaatcattggattttgattttcctgcttcatttacattggacttgtcaaggttttcagacattctcaattaagtttattcactttcct

SEQ ID NO: 528975 - DNA, 201 bp, Homo sapiens
taatttagcaaccaccttacctgttttctggtaattcaactggtttaatctgaaagtctccatttactacaatttcatgggctagagccatgttggtgacrcctctcgctgtctctagaagttcttctactgtcacaaagcgaggaggactagctgtaacagaaactcactgtaagagatttgcttccctggatctgaatt

SEQ ID NO: 528976 - DNA, 201 bp, Homo sapiens
aaggcaatgaaaacacaagatgaggcagctagatcctactgagtaggcagactttcacaaaagatttttagagcttttatttgatttttaggttgttcctygttcaggaatattttttagcaataatgtacaaaaggaaaaatacgtttgaatatattggtatcaactgaaggaaacattttcaaaactgggaaatgacag

SEQ ID NO: 528977 - DNA, 201 bp, Homo sapiens
ccctccccaatattttaatctctcagaaacttggatctttcttaaaatcaatggcatttttataattataatgggcagtgtttcctctttcttatgacagyacatttttaaaaggtgcaccttacaaccaatagagtttttgattcaataaaaaaatggttaagtgccaggcactagggacacagagaataacccacagtc

SEQ ID NO: 528978 - DNA, 201 bp, Homo sapiens
gcaacaatatactctgcctgtgacaataaatcatgactaatctaataagcccatcacagcagttcattcccttttagccaacttaagctctccaggttcasttatagcaagggtagcatgtgactaaattctgattaacaaaatattagcagatgtctgtttcatgactccaggggaagatgttcctctccaacaaaagga

SEQ ID NO: 528979 - DNA, 201 bp, Homo sapiens
ttccctgttactagtaagtttcctaagatgtttataattaggtagtctaagataacaatttaggctgggcgttgtgacttacgcctgtaatcccagcactwttggaggccgaggcaggcagttcacctgaggtgaggagttcgagatcagcctggccagaggttgcagtgagccgagatagtgccactacactccagcctg

SEQ ID NO: 528980 - DNA, 201 bp, Homo sapiens
cttcacttagctgcacactcaagcaatcccaaaacgctttatgtacaatctcctttactctcttcttcaagctggggcagtgaaaaaagaaaggagggggrcaaaaaccaaaatatttgagtttcaaatcactttcaaaagcacaaatactatgggtttagggtaagatcaatcccagtgatttggaccaaggaaagattt

SEQ ID NO: 528981 - DNA, 201 bp, Homo sapiens
aatctgtaacccttgtcccaaccctgtgctcacagcagagacctgtgctgtgttgactcaaggtttaatggatttagggctatgcaggatgtgctttgttaaaaaagtgcttgaaggcagtatgcttgttaaaagtcatcaccattctctaacctcaagtacccagggacacaatacactgcggaaggccctccagcaggg

SEQ ID NO: 528982 - DNA, 201 bp, Homo sapiens
tgcaggtccaggttggccagcagagggcgggagcgccacagcccccacacctgcctctgcagcttccctcagggtttgcgctagtgtgtcagagctttgarggagtctggtgtgaaataacccctctatctcagagccgttcctcctgagcaaggatgcagtatagcgccctcactaagaacacagacaggcctgggtgta

SEQ ID NO: 528983 - DNA, 201 bp, Homo sapiens
tactttaaactcagtagctacaaatttacagagtttgggggaaatgtctgtaaactgttaattccatattttgtaaatccttatttatgctctatgtgttyaataatgcttccttacctgatgcccagataatgaggtcttagctttatcttttgggtttatagccctgtacctacctagcactacaggagaaataggaag

SEQ ID NO: 528984 - DNA, 201 bp, Homo sapiens
taattatatgtaatttataactatccaaataagggcttctcaattgctacgtaatattgcacatattttacttcttattcaacaaacctacagaaaaacaygtttacaaatcatttacaatagctacttaagcttccatttaagccctaggtagcaattaaatggatagaagaaaaaactgttaatggtgaaaaaagaaaa

SEQ ID NO: 528985 - DNA, 201 bp, Homo sapiens
gcctagcaactccactcttaaagtattactctgtgttataatttaaaacagtaaatgttctctttttgctacttacgttttaatttgtagaattccaaatrtgattttagagttactttaaactcagtagctacaaatttacagagtttgggggaaatgtctgtaaactgttaattccatattttgtaaatccttatttat

SEQ ID NO: 528986 - DNA, 201 bp, Homo sapiens
ggcagactttcacaaaagatttttagagcttttatttgatttttaggttgttccttgttcaggaatattttttagcaataatgtacaaaaggaaaaatacrtttgaatatattggtatcaactgaaggaaacattttcaaaactgggaaatgacagtgttctactaagcaagataatttagcaaccaccttacctgttttc

SEQ ID NO: 528987 - DNA, 201 bp, Homo sapiens
cctggccaatcctggcatctttaaatgcaatagatgacataatgttagtagcaatagtagtaacaacaactaatgttcattaagcatttattacctgtgamgcactgttctaagtgccttataggaattcatttaatctttactgctaccctaagaaatattgtattttcctcattttaaagacaggaaaacagaagcttt

SEQ ID NO: 528988 - DNA, 201 bp, Homo sapiens
cagcactttgggaggctaaggtgggcgggtcacctgaggtcaagagttcgaccagcctggccattgtggtgaagccccgtctctactaaaaatacaaaaaktagccaggtgtggtggcgcacacctgttgtcccagctactcgggagcctgaggcacaagaatcacttgaacccaggaggtggaggttacagtgagctgag

SEQ ID NO: 528989 - DNA, 201 bp, Homo sapiens
ctggccattgtggtgaagccccgtctctactaaaaatacaaaaagtagccaggtgtggtggcgcacacctgttgtcccagctactcgggagcctgaggcayaagaatcacttgaacccaggaggtggaggttacagtgagctgagatcatgccattgcactccagcctgggcgacagagccagactctgtccccaaacaaa

SEQ ID NO: 528990 - DNA, 201 bp, Homo sapiens
atgctgggggatcttcacttagctgcacactcaagcaatcccaaaacgctttatgtacaatctcctttactctcttcttcaagctggggcagtgaaaaaaraaaggaggggggcaaaaaccaaaatatttgagtttcaaatcactttcaaaagcacaaatactatgggtttagggtaagatcaatcccagtgatttggacc

SEQ ID NO: 528991 - DNA, 201 bp, Homo sapiens
tacttcaaactggtgttttcatcaaaaaaccatttataatttaggaattcattgtttttaatttctattctcatagcctactcacattccttttgcttgtsaattaagttttcttttcaatgcttaacaactctagatgtagtcccaacattttgtgcttttccttcttcaaattagactattctcctactaaattttagt

SEQ ID NO: 528992 - DNA, 201 bp, Homo sapiens
tccagcccttggcacaagcctggcacttagtaaacattaccaaacttcttctacttctacctctaccctgtcctttctcaacctgccccggccccagcacyacctcagactcctctgcctggggctggatgaatcaactgcatggggcattcacttaactaatctggtcaggcaacccaaccaacccagagactgctgttt

SEQ ID NO: 528993 - DNA, 201 bp, Homo sapiens; identical to SEQ ID NO: 528925

SEQ ID NO: 528994 - DNA, 201 bp, Homo sapiens
cgtggcttgaatggaatccagggctcagggcgtggcctctggaatgtgtctagacttgctggctccttgcttctagcactcctaggctcatagatctattktatcttaaactagaacatgtttcccattatctcaagtagcagaacatgttccatatgctgcaaagaaaatgctaaaccgtcacagctgtagatcatgtgc

SEQ ID NO: 528995 - DNA, 201 bp, Homo sapiens
ctttatcagatccagatccaagacttctgttatctggtttctcagtctagtatgaccaggcagcaagaaagataagagagtctacaagagaacacagctamgtttaatcaaaattctttagacatcatttctaattatatgtaatttataactatccaaataagggcttctcaattgctacgtaatattgcacatatttta

SEQ ID NO: 528996 - DNA, 201 bp, Homo sapiens
tagttctggtctgggcacagtggctcacgcctgtaatcccagcactttgggaagccaaggcagccaatcacctgaggtcaggagttcgagaccagcctggscaacgtagtgaaacaccatctttactaaaaatacaaaaattagctgggcacggtggtgcgtgcctataatcccagctactcaggaggctgaggcacgaga

SEQ ID NO: 528997 - DNA, 201 bp, Homo sapiens
tattacaggtatgagccaccatgcctggccaatcctggcatctttaaatgcaatagatgacataatgttagtagcaatagtagtaacaacaactaatgttyattaagcatttattacctgtgacgcactgttctaagtgccttataggaattcatttaatctttactgctaccctaagaaatattgtattttcctcatttt

SEQ ID NO: 528998 - DNA, 201 bp, Homo sapiens
gcctcagccgcccaaagtgctggtattacaggtatgagccaccatgcctggccaatcctggcatctttaaatgcaatagatgacataatgttagtagcaayagtagtaacaacaactaatgttcattaagcatttattacctgtgacgcactgttctaagtgccttataggaattcatttaatctttactgctaccctaag

SEQ ID NO: 528999 - DNA, 201 bp, Homo sapiens
tgaaaatgttttggaggtggctggtggcaatggttgcacaacaatgtggatgcacttaatgccactgaactggacaactagaaatggttaaaatggtaaaytttatgttatgtgtattttaccacaacaacaaaaaaaacacagtggaaaagaggactaaactactgctatatgtgctacaacgtgaaaaaacattggtga

SEQ ID NO: 529000 - DNA, 201 bp, Homo sapiens
tagctgcttccaccctaccagtgagtcctccactatgccccagcttccaggtccaggccttaatattacggctcttcaggctacaaaactctgcctagcgraggttgcagtgagcagagatcgtgccactgcactccagcctgggtgacagagtgaggagactctatctcaaagaaaacaacaacaacaacaagaaaaaac

SEQ ID NO: 529001 - DNA, 201 bp, Homo sapiens
gatcttaaccttgtatcaatctggcttcctttcaacctgggggaaagtgaactctgtcagggaagccccatctggctttcagcagccctcctgcacccctrcttttctaagcttggtaatgcagggggcactctgagggatacagagagagagctggaggatctcacacatcatctgataaaaactgcacctgtcaggtcc

SEQ ID NO: 529002 - DNA, 201 bp, Homo sapiens
tggtacatgaattatatcagaataaagctattctttttattttttattttatttatttacttatttatttttattttttgagacagagtctcgctctgtcscccaggctggagtgcagtggtgcaatcttggctcactgcaagctccgcctcccaggttcaagcaattctctgcctcagcctcccaagtagctggggctac

SEQ ID NO: 529003 - DNA, 201 bp, Homo sapiens
cacctgcctcagcctcccaaagtgcttataggcatgagccaatgcgcctggcctagcaactccactcttaaagtattactctgtgttataatttaaaacartaaatgttctctttttgctacttacgttttaatttgtagaattccaaatgtgattttagagttactttaaactcagtagctacaaatttacagagtttgg

SEQ ID NO: 529004 - DNA, 201 bp, Homo sapiens
actgcaacctctgcttcccaggttcaagtgattctcttgcctcagcctcccagttacaggcacacaccaccactcccggctaatttttgtatttttagtaraaacagggtttcaccatgttggccaggctggtctcgaactcctgacctcacctcaggtgattcacctgcctcagcctcccaaagtgcttataggcatgag

SEQ ID NO: 529005 - DNA, 201 bp, Homo sapiens
tttcactcttgtcccctaggctggagtgcaatggcacaatctcggttcactgcaacctctgcttcccaggttcaagtgattctcttgcctcagcctcccarttacaggcacacaccaccactcccggctaatttttgtatttttagtagaaacagggtttcaccatgttggccaggctggtctcgaactcctgacctcacc

SEQ ID NO: 529006 - DNA, 201 bp, Homo sapiens
agaatgtattttacttcaaactggtgttttcatcaaaaaaccatttataatttaggaattcattgtttttaatttctattctcatagcctactcacattcyttttgcttgtcaattaagttttcttttcaatgcttaacaactctagatgtagtcccaacattttgtgcttttccttcttcaaattagactattctcctac

SEQ ID NO: 529007 - DNA, 201 bp, Homo sapiens
ccaactagcaatgtgactcagggcaaatcatttaacctctttgggtttcagttttctcgtttgtagaataaatgagcttgctaagatcttatccagctatrttctacttcaatgactaaacagatacttgtaaaatgacatttgtaatttatcagatttctggatctcacgtagtagttagttggaatatttttgtcctac

SEQ ID NO: 529008 - DNA, 201 bp, Homo sapiens
agatttgcttccctggatctgaatttctactaaaataagaaaacagtggttctggtaccagacaataatttcagttattgcgtctattaaaatgtttgttytggcattttcaaacagcaacagaatgttacttcatattcattttgtacccttgaatcctaaaagcagagatcatttattaacactcaaaacatctggctt

SEQ ID NO: 529009 - DNA, 201 bp, Homo sapiens
tcgaaaagccaaaactattttgaaaaagaaaaataaagctagaggactgacactgatttcaagacttattataaaactataacaagacagtgtatttttascataaggatatatagaaattcagggcagaaaatccagaaatagactaatatacacacacatatgtatataggtggtcaacagacaaggataggccgggca

SEQ ID NO: 529010 - DNA, 201 bp, Homo sapiens
ctcgaaaagccaaaactattttgaaaaagaaaaataaagctagaggactgacactgatttcaagacttattataaaactataacaagacagtgtatttttmgcataaggatatatagaaattcagggcagaaaatccagaaatagactaatatacacacacatatgtatataggtggtcaacagacaaggataggccgggc

SEQ ID NO: 529011 - DNA, 201 bp, Homo sapiens
aaattttttttaacttttaagttcaggtgtacatgtgcaggtttgttatacaggtaatctcgtgtcacgggggcttgttgtagagattattttgtcacccrgttattaagtctagtactcattatttttcttgatcctctccctcctcccactctccagtagaccccagtgtctcttattcccctctatgggtatattatt

SEQ ID NO: 529012 - DNA, 201 bp, Homo sapiens
aactcagaattcttcctcacaacattctcagcatttccaaagaatatgaataagaatacagaataaataaatctggctttgttgatattgctaaaatatartaaatatccaaaatcaaagcccaatatatcttttcaattaaaaaaattttttttaacttttaagttcaggtgtacatgtgcaggtttgttatacaggtaa

SEQ ID NO: 529013 - DNA, 201 bp, Homo sapiens; identical to SEQ ID NO: 18794

SEQ ID NO: 529014 - DNA, 201 bp, Homo sapiens; identical to SEQ ID NO: 18791

SEQ ID NO: 529015 - DNA, 201 bp, Homo sapiens
gagtttaggatgcagattgccaaggatcaattcctggagtagacagctgtccccagggaccatcaccatcttccccacagcgtttcttttcttttcttttytatttattttttttacgagagggtttattcataagactgccaagtgaggaggctggagaacaggtctcacatccccctctccatagagagggcttaggga

SEQ ID NO: 529016 - DNA, 201 bp, Homo sapiens; identical to SEQ ID NO: 112872

SEQ ID NO: 529017 - DNA, 201 bp, Homo sapiens
agaagtgacagagaacaatctaaagcctcccggaaagcaagcacattcccatgactgcctcccccatgttaaagacagtcctgggtcctaccatgccagcrcccccacccgtgtggctgagggaaggagaagggaaaggctgcacagatgggaatctgatctgagagtttacaggctcatcgaatggactctaaggacctt

SEQ ID NO: 529018 - DNA, 201 bp, Homo sapiens
actgcttcttcaagtcttccttcaaaacacaaaatcactgcacttccttacaaagaaggatcagagaaaacagctgcttgcagtaaaatgtagcccttccycctggttgtgcaggagtggctgctggccttcctggagtctttctgaaatggcttccaagtttcttttcttttttctttttttgagacagagtctcactct

SEQ ID NO: 529019 - DNA, 201 bp, Homo sapiens
taaaataagccagacccaaaaggacaaagattgtataattccactcatattaagtacccggattagtccaattcacagagactcaaagtagaatggtggcygccaggggccagagggcgggggcaatgggaattactgtttggtgtgtttggtgggaagacagtttcacagaaggaaaaatgaaaatgttttggaggtggc

SEQ ID NO: 529020 - DNA, 201 bp, Homo sapiens
taatcccagcactttgggaggctaaggtgggcgggtcacctgaggtcaagagttcgaccagcctggccattgtggtgaagccccgtctctactaaaaatayaaaaagtagccaggtgtggtggcgcacacctgttgtcccagctactcgggagcctgaggcacaagaatcacttgaacccaggaggtggaggttacagtga

SEQ ID NO: 529021 - DNA, 201 bp, Homo sapiens
gtaaaatgatgcagctgctttggaaatcagtttggcagttcctcaaaatgttaaactttagagtcaccatgtaacccagcaattctaatcctaggtacgtwaccaagagaggtaaaaacatatgtccatgcaaaaacttgtactggaatattcacagaagcataatttataataacaacccaaatgtttgtcaactgatga

SEQ ID NO: 529022 - DNA, 201 bp, Homo sapiens
tcagcagcacagactggagcctcatacattgctggtgggatggtaaaatgatgcagctgctttggaaatcagtttggcagttcctcaaaatgttaaacttwagagtcaccatgtaacccagcaattctaatcctaggtacgttaccaagagaggtaaaaacatatgtccatgcaaaaacttgtactggaatattcacagaa

SEQ ID NO: 529023 - DNA, 201 bp, Homo sapiens
accataattcaaagtctagtcacgagctttagaaatgtaagttctcgtgtcatctattcatctaaagatgactgggatctactaattaaattcacaaggamctgatccaataaacaaaggtcctaagtgggagatattaactggaataacaattgatgtttgtcatctgaatatagcatcttttagtggtcaactaggtga

SEQ ID NO: 529024 - DNA, 201 bp, Homo sapiens
aaggggcactatttccttaatgtcctttagtttcttaacttcctcatctcgagcaggtgcacacagtgtccccatcatgccaataatgaattctgccagcytggaaatgtctagcgccccattctctgcttcctgctttatcagatccagatccaagacttctgttatctggtttctcagtctagtatgaccaggcagcaa

SEQ ID NO: 529025 - DNA, 201 bp, Homo sapiens
gccaacgtagtgaaacaccatctttactaaaaatacaaaaattagctgggcacggtggtgcgtgcctataatcccagctactcaggaggctgaggcacgasaattgcttgaatccaggaggtggaggttgcagtgaaccaagatcacgccattgcactccagcctttgcaacagagtgagactctgtctcaaaaaaaaaaa

SEQ ID NO: 529026 - DNA, 201 bp, Homo sapiens
tggaggggcaggccaccccttcaaaaataatcaatgtcttaccatctgaaatttatgaaaacaacagaaatacatcacatcaagtcctctgggtgaatttttttttttttttttttttgagacggagtcttgctctgtcacgaggctggagtgcagtggcgcgatctcggctcactgcaacctccgcctcccgggttcaag

SEQ ID NO: 529027 - DNA, 201 bp, Homo sapiens; identical to SEQ ID NO: 112869

SEQ ID NO: 529028 - DNA, 201 bp, Homo sapiens
gtcaggtcccagcaggtgttgcagctctgttagtggaggcttcctgcttccttaaaaccaagtgggcggccaaggtcacagctgtggtttgctcttcactrgggcagggggatgcagctccagttcaccctgagctctcggtcatgactcctgggccatctggcttcaccctctcttctgctgataatattctccgtaacc

SEQ ID NO: 529029 - DNA, 201 bp, Homo sapiens
gaggattagtaaaagaggaaggcctctttgcagttgagataagaggaaggcatctgtctcctgctcatccctgggcaatagaatgtcttggtgtaaaaccyaattgtatgttctatttactaagataggagaaaactgccttagggctggaggtgaggtgctagcggcaatactgctctttaatgcacccagaagtttgta

SEQ ID NO: 529030 - DNA, 201 bp, Homo sapiens; identical to SEQ ID NO: 18789

SEQ ID NO: 529031 - DNA, 201 bp, Homo sapiens
ggctttttattagttgctgatcagaatagcaataacacttgacactgtgctttggagcagttaataaaaggtctgcctgggcctcccaaagtgctgggatyacaggcatgagccaccgtgcccagcctaaaacaggcctaaaacaggcggatcatgaggtcaagagatcgagaccatcctggctaacacgctgaaaccccg

SEQ ID NO: 529032 - DNA, 201 bp, Homo sapiens; identical to SEQ ID NO: 18792

SEQ ID NO: 529033 - DNA, 201 bp, Homo sapiens
ataatgtatgcagttgggtgggctttttattagttgctgatcagaatagcaataacacttgacactgtgctttggagcagttaataaaaggtctgcctggrcctcccaaagtgctgggatcacaggcatgagccaccgtgcccagcctaaaacaggcctaaaacaggcggatcatgaggtcaagagatcgagaccatcctg

SEQ ID NO: 529034 - DNA, 201 bp, Homo sapiens
ctgcccgcctcagcctcccaaagtgctaggattacaggcgtgagccaccgcgcccggctggaatgagatttttaaaaacaccaggactgagaatccatccrcccaaccaagagccaacaaagtagtagttactttaaacattcacttatccatgagactactgaagaaatccaagaggcttggtgatactgacctcactct

SEQ ID NO: 529035 - DNA, 201 bp, Homo sapiens
ttagaatcttggccagtatgtgcatactataggcctattaagtcaaacttattaatagcttttcttcacagagaaaaaagttcatatatacctactgactrcatttgatcagtaagatatcatgtcagtgtccttcttacctgaagtacatttatggctgggtcatatcgtgacataaataatcacattttgtagcttgct

SEQ ID NO: 529036 - DNA, 201 bp, Homo sapiens
tggtggtgcatgcctataataccagctactcgggaggatgaggcaggagaatctcttgaacccaggaagcagaggttgcagtgagctgagattgcaccttkgtacttcagcctgggcaacaagagtgaaactccttctcaaaaaaaaaaatagcatgacctcatgcatgcatccccaactttgtcgggcctctgcagaatg

SEQ ID NO: 529037 - DNA, 201 bp, Homo sapiens
caattcctcaaggcaagcaaccattggtaccagcgctccccaccctgcccatggcttaccccccagcccgagccacttcttctctcgcctcctaaatgctscctcacatctactatgtgccccatgccaaaatttaaacttaagggcataaatctaattacgttccccctcttgcttcaaatccttcaatggctccctact

SEQ ID NO: 529038 - DNA, 201 bp, Homo sapiens
gagcatgctaacagggaatggagggccgcgggacctctaagcccgggatctccaattcctcaaggcaagcaaccattggtaccagcgctccccaccctgcycatggcttaccccccagcccgagccacttcttctctcgcctcctaaatgctgcctcacatctactatgtgccccatgccaaaatttaaacttaagggcat

SEQ ID NO: 529039 - DNA, 201 bp, Homo sapiens
tgaggcaggagaatggcgtgaacctgggaggcagaggttgcagtgagccgagatcgcgccactgcactccagcctgggcgacagagcaagactccatctcaaaaaaaaaaaaaacccttacaaggaaaaaggcaggcaactgccatctcccagtcacgcatccccaggaacttggctgtattatatcctgcctcagagaca

SEQ ID NO: 529040 - DNA, 201 bp, Homo sapiens; identical to SEQ ID NO: 18790

SEQ ID NO: 529041 - DNA, 201 bp, Homo sapiens
atcaattttttacaagccagccatttttcctttttcaatattctgcatcggttacatcagaattctactcttttttttttttttcttgagatgaagtttcrctcttgtcccctaggctggagtgcaatggcacaatctcggttcactgcaacctctgcttcccaggttcaagtgattctcttgcctcagcctcccagttac

SEQ ID NO: 529042 - DNA, 201 bp, Homo sapiens
taaagacaagtttcgccatgttgcccaggctggtctcgaactcctgagcttaagtaagtgatccgcctgcctcagcctcccaaaatgctgggattacaggygtgagccacagcagccggcccagaatctgtatttctaacaagtctccagttgatgctgatggctccaaacaccacagtttgagaagtactggcctagaag

SEQ ID NO: 529043 - DNA, 201 bp, Homo sapiens
actctgtcaccaacaggagtacagttgcacaatcatggctcaccccagcctcaacctctcaggctcaaatcatcttcccaccttagcctcccaagtagccrggactacaggcacatgccaccatgtctggttattttttctatttttttaaagacaagtttcgccatgttgcccaggctggtctcgaactcctgagcttaa

SEQ ID NO: 529044 - DNA, 201 bp, Homo sapiens
ctcgtgctccagcccctcagagggcacatccctgctgcctgccttccccaaacgtacccatgatcctgcgaatggggtcatcgggactggccacggcctgratctggcccttgagcacggtctccttgtccgtggtgaagggagaggacccacacagggagaggcagctgctcacctccaggcacaccttctccccgatgg

SEQ ID NO: 529045 - DNA, 201 bp, Homo sapiens
ctctgaaaagatgctgttagttacataagtggacggacatttatggagggcaagattgcaactgtcagccaaacagctactatagaatgagcacagtaaarccagggtacagattacccatagtacttattatgttgttggaaactgcttgttaatttgtcttcctggtcgctagcctgcaagctccatgaggacagagac

SEQ ID NO: 529046 - DNA, 201 bp, Homo sapiens
atctttactaaggtgtcctgagatgcctatacactctgaaaagatgctgttagttacataagtggacggacatttatggagggcaagattgcaactgtcasccaaacagctactatagaatgagcacagtaaagccagggtacagattacccatagtacttattatgttgttggaaactgcttgttaatttgtcttcctgg

SEQ ID NO: 529047 - DNA, 201 bp, Homo sapiens; identical to SEQ ID NO: 112871

SEQ ID NO: 529048 - DNA, 201 bp, Homo sapiens
aatttccagggaggtctcatttcaaaatgtcatcaacaagaaccacatggacctctgtgagagggatgattaaactagcctgagtttgaatgaaaggattatgtgtacccaacctgtaacaaacaccaaggaggtaaagtggcagagggtcttgtatgagcaacagccctttcctgataactttgtggaccggcggttcct

SEQ ID NO: 529049 - DNA, 201 bp, Homo sapiens
caccttggcctcccaaatgctgggattacaggcatgagtcatcacacctggccctatcacccttattcttttttttttttttttttttgagacagactttmgctcttattgcccaggctggagtgcaatggcacaatctcggctcaccacaatctccacctttcaggttcaagcgattctcctgcctcagcctcccaagta

SEQ ID NO: 529050 - DNA, 201 bp, Homo sapiens
gactttcgctcttattgcccaggctggagtgcaatggcacaatctcggctcaccacaatctccacctttcaggttcaagcgattctcctgcctcagcctcycaagtagctagcatcacaggcatgcaccaccatgcctggctaatttcgcatttttagtaaaggcggagtttctacatgttggtcagcctggtctcgaact

SEQ ID NO: 529051 - DNA, 201 bp, Homo sapiens
gcctcgaggggtgagctccacccgcccgcggaccccgcctcttcctcgcctgcccccgacatcccgggatgggatccgacgggaagaggcgaagagatgcstgcgacttggaccgcgcgcctcccggacgggccccgccagcctccgccccagctcccgctctcacctgccacggagtcggcgttctccctcctgccgctc

SEQ ID NO: 529052 - DNA, 201 bp, Homo sapiens
gctctgcaggaatatagctggtttctctcatgaccttcctctagagctctgcttttcactgttagttggttatgaaagcaattcagtgggtagcaaccaattttttttttaatggaataagaatagagtagaaacaatcaggctgcattaaacacagttagggtcagttccagtttgagaagttttcgtttctgttacacg

SEQ ID NO: 529053 - DNA, 201 bp, Homo sapiens
aaaaaatatatctatgtatcaaaatgataagagtgattatgcctctgagaggtaaaattatgagtaaatgtcttccttttacttttctgcattttacaaattttttttttttttttttaaatccatgagtaccaagacttcaggaagtttaaatcgaaaatagttctggtctgggcacagtggctcacgcctgtaatccca

SEQ ID NO: 529054 - DNA, 201 bp, Homo sapiens
gatcctcgcacttgccaagaagacgatcatccgtcggcgctgcacgcgggcctaggctggacacaagaggctccccagcagaaagggtctttcggcaaaaraaaaaaaaaggggctctgtcccccggcgccgggaatcccctcctctggcactgagctccactcgcgcccggcgtccggattccgttgtaaacagctgttc

SEQ ID NO: 529055 - DNA, 201 bp, Homo sapiens
agcaagggcagaacacttcaaccacatacatgcagctctgcaggaatatagctggtttctctcatgaccttcctctagagctctgcttttcactgttagtyggttatgaaagcaattcagtgggtagcaaccaattttttttttaatggaataagaatagagtagaaacaatcaggctgcattaaacacagttagggtcag

SEQ ID NO: 529056 - DNA, 201 bp, Homo sapiens
ctttgttaaaaaagtgcttgaaggcagtatgcttgttaaaagtcatcaccattctctaacctcaagtacccagggacacaatacactgcggaaggccctcyagcaggggcctctgcctaggaaagccaggtattgtccaaggtttctccccatgcaatagcctgagatatggcctcctgggaagggaaagacctgatcatc

SEQ ID NO: 529057 - DNA, 201 bp, Homo sapiens
cacagaacgcctacagggaacaagcaagggcagaacacttcaaccacatacatgcagctctgcaggaatatagctggtttctctcatgaccttcctctagrgctctgcttttcactgttagttggttatgaaagcaattcagtgggtagcaaccaattttttttttaatggaataagaatagagtagaaacaatcaggctg

SEQ ID NO: 529058 - DNA, 201 bp, Homo sapiens
ctaggaaagccaggtattgtccaaggtttctccccatgcaatagcctgagatatggcctcctgggaagggaaagacctgatcatcccccagcccaacaccygtaaagggtctgtgctgaggaggattagtaaaagaggaaggcctctttgcagttgagataagaggaaggcatctgtctcctgctcatccctgggcaatag

SEQ ID NO: 529059 - DNA, 201 bp, Homo sapiens
tagaaccactcaaagatattctataggctggaaaccatagaagtcacccaacatgactccatggtaggagcggtcactgaagcctgcacgcgtgcagatgyggactcgtgctgggtaagaaaatgatgcattacactgagcacagaacgcctacagggaacaagcaagggcagaacacttcaaccacatacatgcagctct

SEQ ID NO: 529060 - DNA, 201 bp, Homo sapiens
attgtatgttctatttactaagataggagaaaactgccttagggctggaggtgaggtgctagcggcaatactgctctttaatgcacccagaagtttgtatmcgtgcacatcaaggcacagtacctttccttaaacttatttatgacacagagacctttgttcacaggtttcctgctgaccctctccccactattacactat

SEQ ID NO: 529061 - DNA, 201 bp, Homo sapiens
acaccatctttactaaaaatacaaaaattagctgggcacggtggtgcgtgcctataatcccagctactcaggaggctgaggcacgagaattgcttgaatcmaggaggtggaggttgcagtgaaccaagatcacgccattgcactccagcctttgcaacagagtgagactctgtctcaaaaaaaaaaaaaaagaaaaaaaag

SEQ ID NO: 529062 - DNA, 201 bp, Homo sapiens
ccaagacttcaggaagtttaaatcgaaaatagttctggtctgggcacagtggctcacgcctgtaatcccagcactttgggaagccaaggcagccaatcacstgaggtcaggagttcgagaccagcctggccaacgtagtgaaacaccatctttactaaaaatacaaaaattagctgggcacggtggtgcgtgcctataatc

SEQ ID NO: 529063 - DNA, 201 bp, Homo sapiens
taattttttgtagagatggggtctcactatgctgcccagatagtctcgaactcctggttttaagtgatcctccccttaagggctggttttcaatctgtcgrtaactggctattacaaaacaacccaggcagcaggatgagtagcaacttgctggccacaggtctacttacaggcactttcctgcctccctatgaaggttgt

SEQ ID NO: 529064 - DNA, 201 bp, Homo sapiens
tggcagttggtcattccaacttcatggctctgcttctaatataacatccctgtctaaaatgcagacatacatgtgtacactttaaaaaaaaaaaaaaaaaraaaaagaacagatcgtctatgagacccaaatcactcacgctcagaggacatgtcaggaattctggtcactgaagttccttgaaaaataatgctcaaacac

SEQ ID NO: 529065 - DNA, 201 bp, Homo sapiens
aataatccatttagaatcttggccagtatgtgcatactataggcctattaagtcaaacttattaatagcttttcttcacagagaaaaaagttcatatatamctactgactgcatttgatcagtaagatatcatgtcagtgtccttcttacctgaagtacatttatggctgggtcatatcgtgacataaataatcacatttt

SEQ ID NO: 529066 - DNA, 201 bp, Homo sapiens
aaccatttaatttgcttatatcgcacgcatccattcaacccccactgtgtctaaaaagagagccgaggggaggaggatcctcgcacttgccaagaagacgrtcatccgtcggcgctgcacgcgggcctaggctggacacaagaggctccccagcagaaagggtctttcggcaaaaaaaaaaaaaaggggctctgtcccccg

SEQ ID NO: 529067 - DNA, 201 bp, Homo sapiens; identical to SEQ ID NO: 528947

SEQ ID NO: 529068 - DNA, 201 bp, Homo sapiens
atgaaacgagggattgtgcacggcaggccttctacaaatggtaactctaattaaagggctctaggatgcggccacgaaccatttaatttgcttatatcgcrcgcatccattcaacccccactgtgtctaaaaagagagccgaggggaggaggatcctcgcacttgccaagaagacgatcatccgtcggcgctgcacgcggg

SEQ ID NO: 529069 - DNA, 201 bp, Homo sapiens
agaggaattattcactgcatacaaattatagggttgtggggattttgttttgtgagagttctcaaatttaccaatttcataaatgaaaacttggtaaggaytgcataaaattgcataaagatgcaatttggtggacaacacgtcttcacctcaatttgttaagagaacctgggttgtaataagagccatgaaaaatggtaa

SEQ ID NO: 529070 - DNA, 201 bp, Homo sapiens
ttgtggaggggcaggccaccccttcaaaaataatcaatgtcttaccatctgaaatttatgaaaacaacagaaatacatcacatcaagtcctctgggtgaatttttttttttttttttttttgagacggagtcttgctctgtcacgaggctggagtgcagtggcgcgatctcggctcactgcaacctccgcctcccgggttc

SEQ ID NO: 529071 - DNA, 201 bp, Homo sapiens
gtcactgtatctgggaggctgggcgttggtttcagacatacctgggccccagttctggctctttactagctgtgtaacttcagtgtcctcctctgtaaaayacagctacctacctgctcggtttggggggagatgaaacgagggattgtgcacggcaggccttctacaaatggtaactctaattaaagggctctaggatgc

SEQ ID NO: 529072 - DNA, 201 bp, Homo sapiens
tgtggaggggcaggccaccccttcaaaaataatcaatgtcttaccatctgaaatttatgaaaacaacagaaatacatcacatcaagtcctctgggtgaatttttttttttttttttttttgagacggagtcttgctctgtcacgaggctggagtgcagtggcgcgatctcggctcactgcaacctccgcctcccgggttca

SEQ ID NO: 529073 - DNA, 201 bp, Homo sapiens
gtggaggggcaggccaccccttcaaaaataatcaatgtcttaccatctgaaatttatgaaaacaacagaaatacatcacatcaagtcctctgggtgaatttttttttttttttttttttgagacggagtcttgctctgtcacgaggctggagtgcagtggcgcgatctcggctcactgcaacctccgcctcccgggttcaa

SEQ ID NO: 529074 - DNA, 201 bp, Homo sapiens
ggtgaatttttttttttttttttttttgagacggagtcttgctctgtcacgaggctggagtgcagtggcgcgatctcggctcactgcaacctccgcctccygggttcaagtgattctcctgcctcagcctcccaagtagctgggactacaggcgtgtgccaccacacccagctaatttatgtatttttagtagagacaggg

SEQ ID NO: 529075 - DNA, 201 bp, Homo sapiens
cattccctcttaaaaacttgcatttttggactcacttcaaaatgcttaaggtactcttcataaaagacgtgagttgaggcaaccactgggaatgcctgaaratattgccaccctttcatttaagaggcttgctccttgccagggatctgaaatgacttcaccacacacatttagcaaactgaatcccctcaagcttgtggg

SEQ ID NO: 529076 - DNA, 201 bp, Homo sapiens
gcacacttgtagtctcagctactagggaggttgaggtgggtgaatcacttgagcccaggagttcaaggccagcctgggcaacatagagtgatccggtcttaaaaaaaaaaaaaaatgtaaagatacatgtaacttaccctggagtttatcttacgtgatacaaagctaaagttgttgctaaattttgttattttgttacag

SEQ ID NO: 529077 - DNA, 201 bp, Homo sapiens
caatagtagtaacaacaactaatgttcattaagcatttattacctgtgacgcactgttctaagtgccttataggaattcatttaatctttactgctacccyaagaaatattgtattttcctcattttaaagacaggaaaacagaagctttctaactacacatattggagtcaggcctgacaaatgcatgatagactgtgct

SEQ ID NO: 529078 - DNA, 201 bp, Homo sapiens
cacacttgtagtctcagctactagggaggttgaggtgggtgaatcacttgagcccaggagttcaaggccagcctgggcaacatagagtgatccggtcttaaaaaaaaaaaaaaatgtaaagatacatgtaacttaccctggagtttatcttacgtgatacaaagctaaagttgttgctaaattttgttattttgttacagc

SEQ ID NO: 529079 - DNA, 201 bp, Homo sapiens
acacttgtagtctcagctactagggaggttgaggtgggtgaatcacttgagcccaggagttcaaggccagcctgggcaacatagagtgatccggtcttaaaaaaaaaaaaaaatgtaaagatacatgtaacttaccctggagtttatcttacgtgatacaaagctaaagttgttgctaaattttgttattttgttacagca

SEQ ID NO: 529080 - DNA, 201 bp, Homo sapiens
tagtagaaacagggtttcaccatgttggccaggctggtctcgaactcctgacctcacctcaggtgattcacctgcctcagcctcccaaagtgcttataggcatgagccaatgcgcctggcctagcaactccactcttaaagtattactctgtgttataatttaaaacagtaaatgttctctttttgctacttacgttttaa

SEQ ID NO: 529081 - DNA, 201 bp, Homo sapiens
ggaataccttagggcattgattttaaaccttattttggtacagactactaagagaacttaatgaaagcttccacgaccttattcctaaaaacatgcatatmcaaatgttgatatacttttttggttattactagatcccctaaatcttgatcataggtcccaggataagtattcttgccttaagggcataactacacacaa

SEQ ID NO: 529082 - DNA, 201 bp, Homo sapiens
tgcaatttatactccaccctcctatttctcagagcacttcagagactggagtgtcactgaggctggagaaagacaggaacgttctggacattattctaaawtgttaatttcccatgcaattgaaaatccacaagtagctaggctgccagctgaggaactgctattattcctaaatgctacattggcaatgttatattatta

SEQ ID NO: 529083 - DNA, 201 bp, Homo sapiens
caaagaatggctgaacctataaaagttaaaattgtttaaaaaaattaaaaccaatcaaccaactgttgggagaagctaaagcagggcttgcatgtctcacwtaatgtaaaagagtcttggaacatgtccagggtccagggtctaaaacccctcatggccttgggaacaccaagctctgtgctaaagggcagaaggctgccc

SEQ ID NO: 529084 - DNA, 201 bp, Homo sapiens
ttttgtttttgtttgactctgccccattgaatcttaggtttccgccttttcttcacatctgtccctggaggccgtgagaaggaagagtctccccaaccccsccgaaagcgacagccctccagctccaggtgagaactcacacctctcctcacgtcccctccttttttctcctcttctgtcttggtgggttccctggaatag

SEQ ID NO: 529085 - DNA, 201 bp, Homo sapiens
gcattcctaaagtaggtgtcaaggatacaacctgtttgagtccatatgggctgctataacaaaataacataaactgggtagcttataaacaaaataaatgkatttctcacattttggaggctgagaagtccaagatcaaggcaccagcagattcagtgtctggggagagccctcttcccagtacagatggcgccttcctac

SEQ ID NO: 529086 - DNA, 201 bp, Homo sapiens
gggtaccctctcgttgcagcagtgaggacagtgacgaggagtggcggcggtgccgggaggcagctgtgtcggcgtccgacatcctacaggagtcagccatycacagccctggaacagtggagaaggaggcaaagaagaaaaggaagttgaaaaagaaagccaagaaggtggccagtgtcgactcggctgtcgctgccacca

SEQ ID NO: 529087 - DNA, 201 bp, Homo sapiens
gcagcagtgaggacagtgacgaggagtggcggcggtgccgggaggcagctgtgtcggcgtccgacatcctacaggagtcagccatccacagccctggaacwgtggagaaggaggcaaagaagaaaaggaagttgaaaaagaaagccaagaaggtggccagtgtcgactcggctgtcgctgccaccacccccaccagcatgg

SEQ ID NO: 529088 - DNA, 201 bp, Homo sapiens
gctgagattacaggtgtgagccactgtgctcggcttctagttttttttgtttgtttgtttgttttttggggttttttttttttttgcatttttttttttttgagatggagtttcactcttgttgcccaggctgcagtgcaatggcacgatctcagctcactgcaacctctgcctcctgggttcaagtgattctcctgcctc

SEQ ID NO: 529089 - DNA, 201 bp, Homo sapiens
gagacaggatctcgctatgttgcccaggctggtcttgaactcctggcctcaagccatctgcccaccttagccttccaaagttctgggactacaggcgtgcmccaccacacctggctaatttttgtatttttttttagagacagggttctgtcatgttgcccaggctggtcttaaactcctggcctcaagctatcctcccgc

SEQ ID NO: 529090 - DNA, 201 bp, Homo sapiens
ttgccatgttgcccaggctggtctcgaactcctgggctcaagtgatcctcccttctcaaccttcaaagtgctgagattacaggtgtgagccactgtgctcrgcttctagttttttttgtttgtttgtttgttttttggggttttttttttttttgcatttttttttttttgagatggagtttcactcttgttgcccaggct

SEQ ID NO: 529091 - DNA, 201 bp, Homo sapiens; identical to SEQ ID NO: 329736

SEQ ID NO: 529092 - DNA, 201 bp, Homo sapiens; identical to SEQ ID NO: 329737

SEQ ID NO: 529093 - DNA, 201 bp, Homo sapiens
ggaggtcacaaggctgctacgcccagaagccagtattggaagccaggttggcctcactcccaagcctgaactcactacctgcctctctctgcggccacctyctggtgacctggaccaagggaggacagcgagaggcagctctggggctgtgtcctgactccagctaacccagggtaccctctcgttgcagcagtgaggaca

SEQ ID NO: 529094 - DNA, 201 bp, Homo sapiens
  misc_feature (1)...(201): n = A,T,C or G
gctatacctgcaaactgaacccagccatgggcacagggctcagccagctccaaggacaaggtgtcccccccaccctggggacaaggcatttccaagccccmcctccctctccaagttcaaggactgggctggcaaacccagactgcccatgagaccctgatggtgatgaaggcttgctcgagagttgggccaaaaaannnn

SEQ ID NO: 529095 - DNA, 201 bp, Homo sapiens
gtgttaggtcagtgtctctcaaccttggcgctactgacatctttgactagcatttgtcgtgggggtctatccttcttcccattataggatgtttaccaacrtccctggcctctacctactagatgatagtagcactcaccccaccagttgtgacatccaaaaatgtctccagacattgccaaatgcccctgatggccacca

SEQ ID NO: 529096 - DNA, 201 bp, Homo sapiens
tctactccctctccccgggttgcttttcctgaacagggcttggggggcacctttggcatacaggaagggaggttagggaaagcacccagggcattgctgcrtctgcctcgagggcattgctgagagccttgttctctgctgtgcacagtggcatctccatctgcactcaccagacacatgcttcctggccttgtgcctcta

SEQ ID NO: 529097 - DNA, 201 bp, Homo sapiens
ggaccaggagctcctgagggcagaggcggggcagcttcagcacctggcacctgggaggaggggctggcatctgggggtgctgactctgctcctttgttttytttgtttgtttgcttggttgggtttttttgttattgtttcttttttaaatttttttattttgtgtcttcttaaaattttttttttgtttctctttatctt

SEQ ID NO: 529098 - DNA, 201 bp, Homo sapiens
ctggtgtgagaaacagtttttagaaaatgagagaagggatccccaagaggccaaggcccagagaaacttttgttcttctctccttagcccacatagacttmacagaatcgtctgagaaaggagagctttttcacccctggctttctagaattttctttgtctgcatttgtgaatataccacacatgatggtgtctctgagc

SEQ ID NO: 529099 - DNA, 201 bp, Homo sapiens
aaagaaaaagaaaagaagtagaagctcatggccagggatggtggctcacacctgtaatcccagcactttgggaggccgaggcaggtggatcacttgagccragttccagaccagcctaggcaacatggtgaaacctcgtctctataaaaaaaagaatacaaaaattagttgggcatggtagtgagcgcctgtgaggctgct

SEQ ID NO: 529100 - DNA, 201 bp, Homo sapiens
aagccaggagagccctgcctgccttccctgttagcttcggcctccctgggctcaggcgttagagccccaggctctggcacagagtagccacccaggaaatkcctgtgtgagtaggtgatggggtcagtacaaatggcatgtgggtcactagctggaaggagttggggcaggaaggagtggcccggtgggtacattggtgac

SEQ ID NO: 529101 - DNA, 201 bp, Homo sapiens
ttttctcctcttctgtcttggtgggttccctggaatagccaagcagactccagtcaggaccaggccaaggcagtggccctgtcaggcagctggagaaatcrtgagctcagcgggagggaaagccctcttggcggcagctttggatgtttactgcttttgagcacctgtcttgggccagacacctcacttgatcatagttgc

SEQ ID NO: 529102 - DNA, 201 bp, Homo sapiens
ctcgatctcttgacctcgtgatccgcctgcctcagcctcccaaagtgctgggattacaggcgtgagccaccgcgcccggccttgactccatcttaaaagtkcatctatctggagttcacccacttctcaccacatcaattactgcagcagactccgtgttcctgcctttgccccaacagtctcacgctgcacagcagccaa

SEQ ID NO: 529103 - DNA, 201 bp, Homo sapiens
ggtgaggagagagtcactgggactcggcttccttccccgagagacctccagggactgggtgtagtgcagattgaaagcatgggcaggtgcagtagggaggktatttcattattccagtcggggaagctgaggtacccaaatgtcttttgattctgcctccttgggtctatcctcactgccccacactgggaaggctgccgt

SEQ ID NO: 529104 - DNA, 201 bp, Homo sapiens
aaaagaaagccaagaaggtggccagtgtcgactcggctgtcgctgccaccacccccaccagcatggccacagtccagaagcagaagtcaggtgagctcaayggggaccaggtgtcgcttgggaccaaaaagaagaaaaaggcaaagaaggccagcgagacctctccattcccaccagcaaagagtgctacagctatacctg

SEQ ID NO: 529105 - DNA, 201 bp, Homo sapiens
ccttagcctggtgtgagaaacagtttttagaaaatgagagaagggatccccaagaggccaaggcccagagaaacttttgttcttctctccttagcccacawagacttcacagaatcgtctgagaaaggagagctttttcacccctggctttctagaattttctttgtctgcatttgtgaatataccacacatgatggtgtc

SEQ ID NO: 529106 - DNA, 201 bp, Homo sapiens
tagagacagggtttcaccgtgttggccaggctggtctcgaacttatgacctcaggtgatccgcccaccttggcctcccaaagtgctgagattacaggcatragccaccacacccagcctagattacattcttgagtgcgtctagtaatagccaccaggagttgagaattttctttttgcccctgttctaaacactttgtat

SEQ ID NO: 529107 - DNA, 201 bp, Homo sapiens
atggggtttcaccatgttgaccaggatggtctcgatctcttgacctcgtgatccgcctgcctcagcctcccaaagtgctgggattacaggcgtgagccacsgcgcccggccttgactccatcttaaaagtgcatctatctggagttcacccacttctcaccacatcaattactgcagcagactccgtgttcctgcctttgc

SEQ ID NO: 529108 - DNA, 201 bp, Homo sapiens
ttctgagacagaatgatgggccagagccccgcagcctgaatcccacagggttcccctcaattggagaaagtagaggaggtgtttaggaaggcagctgcatwtcagcctgtgggagcagttttcctttgtgactctctggcttcaggctgaacagggcctgcttggcattgcactgagtcacagagatgtttctgcagtaga

SEQ ID NO: 529109 - DNA, 201 bp, Homo sapiens
actgtggaaatataggtcactattttatttatgtaacctctagagacagctcttaaatccagtgatgaactcgtcactcaaaccactttaattttagggtrgcatctactttgacttatttttctgacaattaattcaaaccaagacactatggcaggatctggggatacagaggtaaaaagaggcagaccacgtattcaa

SEQ ID NO: 529110 - DNA, 201 bp, Homo sapiens
ggctggagtgcagtggcgtgatcttggctcactgcaacctccgcctcctgggttcgagcgattctcctgcctcagcttctcaagtagctgggactacaggygtgcaccaccacacccagctaatttttgtattttttagtagagatggggtttcaccatgttgaccaggatggtctcgatctcttgacctcgtgatccgcc

SEQ ID NO: 529111 - DNA, 201 bp, Homo sapiens
atggtgagtggttatacttaatagaagctatcatttattaagcacctaatgtgtgtctggaggtgggcgaaacagttttggtatattcttttttttttttytttttttgagataggaactctctctgccacctaggctggagtgcagtggagcaattatagctcaatgcagcctcaacctcccggacccaagcagtcctcc

SEQ ID NO: 529112 - DNA, 201 bp, Homo sapiens
gtgattctcctgcctcagcctccctagtagctgggattacaggcgcctgccaccacgcccagctaattttttgtatttttagtacagacagggtttcaccrtgttggccaggctggtctcaaactccagacctcaggcaatccacctgcctcggccttccaaagtgctgggattacaggtgtgagccaccgcgcctggtct

SEQ ID NO: 529113 - DNA, 201 bp, Homo sapiens
ggtgcccaccaccaggcccagctaatttttttttatatttttattagagacagggtttcaccgtgttggccaggctggtctcgaacttatgacctcaggtratccgcccaccttggcctcccaaagtgctgagattacaggcatgagccaccacacccagcctagattacattcttgagtgcgtctagtaatagccaccag

SEQ ID NO: 529114 - DNA, 201 bp, Homo sapiens; identical to SEQ ID NO: 329752

SEQ ID NO: 529115 - DNA, 201 bp, Homo sapiens
catctccatctgcactcaccagacacatgcttcctggccttgtgcctctagagaaatgtggtttatttttatgttagagagcctgtgaaggctgaagcttytcttgatgacagtcatcatctgcatcgtcatcatagctaccatttgctgagcagctacttgtggctaggccgtgtgccacaagtgcttgatatccatttt

SEQ ID NO: 529116 - DNA, 201 bp, Homo sapiens
gtattcccattttatagatgagaaaaacaaaggctcagggagagaaagtgacttgcccggcatcacacagcttggtggcagagccaggactcaactgaacygtctccctctgtaatactgtttctgttccctgacggtacctcaccttcatcacactgtagtcatgatggaagagatgctcttcttccaagtgattatgtg

SEQ ID NO: 529117 - DNA, 201 bp, Homo sapiens
ctctgctgtgcacagtggcatctccatctgcactcaccagacacatgcttcctggccttgtgcctctagagaaatgtggtttatttttatgttagagagcytgtgaaggctgaagcttttcttgatgacagtcatcatctgcatcgtcatcatagctaccatttgctgagcagctacttgtggctaggccgtgtgccacaa

SEQ ID NO: 529118 - DNA, 201 bp, Homo sapiens
cacagcagccaaagatgttctgtcaaaacccaggtcagtttatgtcccttctctgctcatttccagagctcctcctcctcaaagtccaggtcctcccattrgcccacgtcagggcccttcatgatctggcccctctgagttctccatctctgctgctcccggtttactgggcaggctctggtcacactgacctccttgctg

SEQ ID NO: 529119 - DNA, 201 bp, Homo sapiens
aagaacattatcatgtgggtcctgttgttacctttatcctccaggtgaggaaacaggctgtcagcaaggagacaggtgtgcctgaagtcacatcatcatcrcagctaccatttactgagcaactgtttgtggccaggctctgtgctaagtgcttgatgtccattttctcatttaatccttctgatgaccctgagaggtagg

SEQ ID NO: 529120 - DNA, 201 bp, Homo sapiens
caatctacatacctccacgtgtccttgcagactgcaagccagagtagtatattcaaggctctgagaattcctgtagtgaagagacctgtgtaactgtttarcccagcattttccaaacttgtttggccacagtgcctttgtttcatggaaaaccagtcaacaacctgcggaacaggtctggggatacactggtctagatct

SEQ ID NO: 529121 - DNA, 201 bp, Homo sapiens
atgagccttcccaaagtgtgaaccagctattcttctgagacagaatgatgggccagagccccgcagcctgaatcccacagggttcccctcaattggagaawgtagaggaggtgtttaggaaggcagctgcatttcagcctgtgggagcagttttcctttgtgactctctggcttcaggctgaacagggcctgcttggcatt

SEQ ID NO: 529122 - DNA, 201 bp, Homo sapiens
cttctgagacagaatgatgggccagagccccgcagcctgaatcccacagggttcccctcaattggagaaagtagaggaggtgtttaggaaggcagctgcakttcagcctgtgggagcagttttcctttgtgactctctggcttcaggctgaacagggcctgcttggcattgcactgagtcacagagatgtttctgcagtag

SEQ ID NO: 529123 - DNA, 201 bp, Homo sapiens
agaaaatgagagaagggatccccaagaggccaaggcccagagaaacttttgttcttctctccttagcccacatagacttcacagaatcgtctgagaaaggrgagctttttcacccctggctttctagaattttctttgtctgcatttgtgaatataccacacatgatggtgtctctgagccgaccagattatggaaactca

SEQ ID NO: 529124 - DNA, 201 bp, Homo sapiens
ggatagtgcttggtccatgcccagcaggacagggctttgctgcttctgaaagtctggtgttctgtatctggggctgtgggttcctgtgtctagctgctcargaaatcttgagaagcattccactctggggtgtaaaccagtatgagtttgaaattcaagcgtttgtacctgagttggggagagaattgcaaggcatacttt

SEQ ID NO: 529125 - DNA, 201 bp, Homo sapiens
ctcttaaggttcctgggtgctgtgggaagctgaaaggtaggcctcttccaggtagctcctcctctcacctccggcattgccatcagcgcagtctgccctcrgtctgtgtgaagtcttaaaccaactggaagacacttgaaagggtggggagggagggaggtgccaagagtggaggcaccaaggaatgggtgatgctgccaa

SEQ ID NO: 529126 - DNA, 201 bp, Homo sapiens
aagctgcagtttgtcaacacacatctggaacctggccccaggaagccaaggctggggtggcagtttcctgcgcgccaaaggagctgccaaacagtgctgtrttttcttccccagtattttttcttccctttttttcctgccccgtaggttgcagaggtactatagtaaagtaaaaggttaggataagggtcctggaatcca

SEQ ID NO: 529127 - DNA, 201 bp, Homo sapiens
atggagatcatgttcagctggggggcctctgtggtctccccagctgtcaagggctgcctccctctgttctgacctcatcgttattctggcagagtatactstgaagcgctggcttattttggaggggatgcaaagttttctcccacctaccctgtggggcagactcaaacataattctttgcttttttcttccccctttgc

SEQ ID NO: 529128 - DNA, 201 bp, Homo sapiens
cggcggcgtcctgaaccgcctgaaggcgcggcggcaggcgccccaccacgcggccgacgacggcgtcggggcagcggtcacggagcaggagctgctggcgmtggacaccatccggcccgagcacgtcctgcgcctcagccgggtcaccgagagtgagtgccgcgcgggccgcgccctcccctcgcgccgtgccccggctcc

SEQ ID NO: 529129 - DNA, 201 bp, Homo sapiens
tcaaaacacatagccgtggcatttcctgctcatttaaaactgtgccacattaaaacaaaaataaagtttcagtttgtgtacagactccgacatgtgaatcmtgcttttgacattctcgtgaattaagaatgatttcagagtttcagaaatgcgtttcctgcacaaaaggcaaccatcctaagctttttcgttgataggagg

SEQ ID NO: 529130 - DNA, 201 bp, Homo sapiens
gaattcccatttcctaaaagagttttaatttgattctagatatttggatgcccccgtttcccaatactgtttgggttgagactgtccttaccagacctgarcgtatctttagacattcttgttagttttattgaaacagtgtgaaaaagcttcttttcttctgaaccagttttcatttggggctctgaaagtacagatgct

SEQ ID NO: 529131 - DNA, 201 bp, Homo sapiens; identical to SEQ ID NO: 329705

SEQ ID NO: 529132 - DNA, 201 bp, Homo sapiens
ggctgccatggtgtctgctgagctgctatagcaggcagcccagggctgttcaggtgcacctcaggttgccgattgcagctctagtaatttggggatggaartttggggggagtaggccttggtccaccctgtgcgaaagggaattcccatttcctaaaagagttttaatttgattctagatatttggatgcccccgtttcc

SEQ ID NO: 529133 - DNA, 201 bp, Homo sapiens
ctgctgttttccctgcaggagtgtgcactcacctagttaggcctatcttggcctgcccatcactcctggcgtgcagtctcctaaccctgtggcagcagcarcattccctggatggatcgaaggctgccatggtgtctgctgagctgctatagcaggcagcccagggctgttcaggtgcacctcaggttgccgattgcagct

SEQ ID NO: 529134 - DNA, 201 bp, Homo sapiens
ctgcttcctccgccctggccccatggcagccctcccccattgcagcctgcccggcctccctccctctttgggtcgggagcgttgccccttagtgtgcagakgggttcttcctcaaaacacatagccgtggcatttcctgctcatttaaaactgtgccacattaaaacaaaaataaagtttcagtttgtgtacagactccga

SEQ ID NO: 529135 - DNA, 201 bp, Homo sapiens; identical to SEQ ID NO: 329710

SEQ ID NO: 529136 - DNA, 201 bp, Homo sapiens
ggtgggcaatctggcttgagttgtgctgtatcctcttccttgttagcttgccttagtctcactggagaccatttgcggatagtgcttggtccatgcccagyaggacagggctttgctgcttctgaaagtctggtgttctgtatctggggctgtgggttcctgtgtctagctgctcaggaaatcttgagaagcattccactc

SEQ ID NO: 529137 - DNA, 201 bp, Homo sapiens
tgagatgtggggcagggtgttgacgacagcatctggttctgacttgaacccctcttcccaagctggctagaatatgtagatacttgcaagaaaagatgatrtatagtgttataagttttacccatgaagccaaatcagcctggagggcaatattatgcatataaaccgagtagttttggcattggtgggttcaaagaactt

SEQ ID NO: 529138 - DNA, 201 bp, Homo sapiens
tcccctctgtaaagtcactttcttctgatggccagtgtcactatgatgtcagtgaggtctggggatgaggacagtgtgtcctgaaattcacaggactgackcctcaccccagtgcacgaggattcctgtggcatcaggtgctgctgtacctggtgtaggagcctaatcattgaaccattgtgttactcacattccatgtca

SEQ ID NO: 529139 - DNA, 201 bp, Homo sapiens
ccggccgggggccgaggtcccctaataaatgggcccctgggccctcagcctggaacccccggccatcagtgaagttcccgctcagccaggctcccccagcyctctggcaggccagaagccttacctgcttcctccgccctggccccatggcagccctcccccattgcagcctgcccggcctccctccctctttgggtcggg

SEQ ID NO: 529140 - DNA, 201 bp, Homo sapiens
tacagatacccatagtatcagtgtggtttgtaaacttactttgcagtgtttctcatctgatttgctacttagagcctgcaaatttgataaggccccgattkcacccctacctggtggtatttatgctatcataatctcatactgaccaaggcacctaaaggctcaagttcatgggtaattttgttgttgttgttttgtggg

SEQ ID NO: 529141 - DNA, 201 bp, Homo sapiens
cacccctacctggtggtatttatgctatcataatctcatactgaccaaggcacctaaaggctcaagttcatgggtaattttgttgttgttgttttgtgggktttttttttgtgttgtttgttttgagacacagtcttggtctgtcacccaggctggcgtgcagtggcacaatcttggctcactgcaacctctgcctcctgg

SEQ ID NO: 529142 - DNA, 201 bp, Homo sapiens
gctcactgcaacctctgcctcctgggttcaagagcttctcctgcctcagcctcccaagtagctgagattacaggtgcccaccaccatgcctagctaatttytgtatttttaatagagacgggatttcaccatgttggtcaggctggtgtcagacgcctgacctttgattcgcctgccttggtctcccaaagtgctgggatt

SEQ ID NO: 529143 - DNA, 201 bp, Homo sapiens
gctggagtgcagtggcgcagtcttggctcagtgcatcctccgtctcctgggttcaagtgattctcctgcctcagcctctcgagtagctgggattataggcrcctgccaccatgcccggctaattttttgtattttttgtagagacagagtttcaccatgttggtcaggctggtctcgaactcctgaccctgtgatccacct

SEQ ID NO: 529144 - DNA, 201 bp, Homo sapiens; identical to SEQ ID NO: 329673

SEQ ID NO: 529145 - DNA, 201 bp, Homo sapiens
gccccatggcagccctcccccattgcagcctgcccggcctccctccctctttgggtcgggagcgttgccccttagtgtgcagatgggttcttcctcaaaamacatagccgtggcatttcctgctcatttaaaactgtgccacattaaaacaaaaataaagtttcagtttgtgtacagactccgacatgtgaatcctgcttt

SEQ ID NO: 529146 - DNA, 201 bp, Homo sapiens
ctcccgccacgctcacgtagctctggtggggaaggactctcctgggctggaccgcattcctgtgagtccggccacgctaggatgcccttcggccggtcggytccccagctctgccggacctgtttgggtagagggccccgttcagctgaactggatcctcctgagccggccgggggccgaggtcccctaataaatgggccc

SEQ ID NO: 529147 - DNA, 201 bp, Homo sapiens
ttatctttactctccagtatggttaaagaggtctgggcaattgcctgaacaaacaagactttactttagatcccaagacaggcagacctattgctgaatcrtttgcgagttaatacccagaaggtctccggagaaggctccctgccctgtgttccttgcactcattccaatctaggtttccttgggttgtcagggttgtgt

SEQ ID NO: 529148 - DNA, 201 bp, Homo sapiens
atggcagccctcccccattgcagcctgcccggcctccctccctctttgggtcgggagcgttgccccttagtgtgcagatgggttcttcctcaaaacacatmgccgtggcatttcctgctcatttaaaactgtgccacattaaaacaaaaataaagtttcagtttgtgtacagactccgacatgtgaatcctgcttttgaca

SEQ ID NO: 529149 - DNA, 201 bp, Homo sapiens
tccggacagtcggggctacgtgagtaccattactacctgaggggagaacattctgtttgttcacagagaagagtgttttcggttgggttttgggttggctktagaggagggaggaggcaaagtcgggcttacagagatttattttccagggtggagttcacagtgggagacaaacctgtttcaaacttccggatgatcgaa

SEQ ID NO: 529150 - DNA, 201 bp, Homo sapiens
aaatggcatgtaatcattaactcaaaactgatcagaggtagtattatctttattctccagtatggttaaagactcaaaatggcatgtaatcattaactcaraactgatcagaggtagtgactgttaattatctttactctccagtatggttaaagaggtctgggcaattgcctgaacaaacaagactttactttagatccc

SEQ ID NO: 529151 - DNA, 201 bp, Homo sapiens
gcctgtggtcccagctactcaggaggctgaggtggaaggatggcttgagcctgggagatcaaggctgcagtgagccgtgatcactgcattgcactccagcraaggtgacagagtgagaccctatctcaaaataaatcaataaatataaacaacagattatcctcacactgaatcactacctttctgcagcacttgttctga

SEQ ID NO: 529152 - DNA, 201 bp, Homo sapiens
aagggaagatggggaccaaacgagagagaaagaacagcccttgtcagtttctgcaactttggcctagccacctcaggttcgcatcctttgtgaatagttarggaaaattcaagtcatttatgagggtgtgaatagaatcctgtgactagtgatgcctgtagttgccttgctggcatcactgattggtcctctcagaatccc

SEQ ID NO: 529153 - DNA, 201 bp, Homo sapiens
agaatcaaggccagaggacttcttttccattccctgcaggatagagagttgattggataaagtgttgagatagatccagcaggaaggaatggggctgttgyagattttggggcaggagtgagaaggtggaaatactgtttgaggaagagtggcctagacctggggagggcaccagagggagaaggctgctgccgtgtagcc

SEQ ID NO: 529154 - DNA, 201 bp, Homo sapiens
aattacaggcttgagccactgcgcccggccggtctgaaggttttaataatacaggccatccttttagatgcctcctgtgggaagacagtgcctaagggagwtaaaaggaggcctgtgaccatccctgggacgctgatcagataaagcacctctcctgtgcactgttagtcatggttttccattgtgttttagtcattggcc

SEQ ID NO: 529155 - DNA, 201 bp, Homo sapiens
tgtacagcctttgggccaaaatgcccttctagcttctccaaagaagatccgagtttatttcattctatgttttaagaggtaaaaggacataacaagtgaargaagttttgggctaaagtaggctatgtctccttatgtattactcaatactgttttgcagagaaaacatttttcaagcatgtgcttcctgaagacacctca

SEQ ID NO: 529156 - DNA, 201 bp, Homo sapiens
atggacctggattcaaatccctgttccctcctcttactgtttgagggactttggacatgttacctgacttctctgaacttgagcttcctgatctgtaaaayagagacagtaacacctcgaagggttgttgtaaggagtctggactatggcaagtgtcctgctatatagcaagtgcgcagtaaacactggccattcttcttg

SEQ ID NO: 529157 - DNA, 201 bp, Homo sapiens
aataactttctgataagtgtcaacttttgtagcctcattcttttaggttggtgctagcgcttcaacttggttaactgcagacctagtctgaatagaatagrccatgtcagaggcccagttcccagcttgtgtttcaggtttcacccttaggatatggcataagctctcaaactattaaaaaaggctaatagcttagtgttg

SEQ ID NO: 529158 - DNA, 201 bp, Homo sapiens
gcgccgtgccccggctcccggagccttcagcggacccggccacttgaccagcgcgggggtccccgccagaccccctcggccggccgggccgcgcttcccgmtgccccgccggccgggctttgctcccgccacgctcacgtagctctggtggggaaggactctcctgggctggaccgcattcctgtgagtccggccacgcta

SEQ ID NO: 529159 - DNA, 201 bp, Homo sapiens
cttgggagaaaggccgtatgggggccagggatggaagagacagtgtgtggccacagaaattcctgtccatccaccaccagtgctgctccctgtgtgggctytagggcgagtggccccgaaccttggcccagtgctttgtcccaggccagagtcttggcaatgccacatgctggcagctttctcactgagaaggtcctagct

SEQ ID NO: 529160 - DNA, 201 bp, Homo sapiens
tgggtctgtggtgttctcatctctaagccacatatcacagtacctgggacattgcaaggactccaggcctactacaggtatgtggatttggattagactcaagagttgtcatttcaatataagacggaactgtttcaagaaggtcagctgaagatactgtaaagtatcttggttttcagtctctctagtttttacatttaa

SEQ ID NO: 529161 - DNA, 201 bp, Homo sapiens; identical to SEQ ID NO: 329723

SEQ ID NO: 529162 - DNA, 201 bp, Homo sapiens
agactcaagagttgtcatttcaatataagacggaactgtttcaagaaggtcagctgaagatactgtaaagtatcttggttttcagtctctctagtttttayatttaaggatcttgattcacttgtaatattccccacattgaggctgggtgcggtggatcacacctgtaattctagcacttcgggaggctgaggcaggcag

SEQ ID NO: 529163 - DNA, 201 bp, Homo sapiens
gtattaaaaacaggaaagtaggccagacatggtggctcacacctataatcccagcactttgggaagccaacatgggtggatcacctgaggtcaggagttcragaccagcctggccaacatggtgaaacccccatctctactaaaaatacaaaattagctgggcgtggtggtgcatgcctgtaatcccagctacttgtgagg

SEQ ID NO: 529164 - DNA, 201 bp, Homo sapiens
ataatgcacagggtactgaggtcatgaaagctgtcccatttctttctctatttaaatatgtttctgttagtcgtccaaggtcattgaaaatgaacaaaatsaataaagggaaatgaaatgcaggtatacttgcacggtaagaaaaccctcaaaaataatactaggcaagtgaaaggtaagacctgttttcccttctctttc

SEQ ID NO: 529165 - DNA, 201 bp, Homo sapiens
caggagaatcacttgatcccgggaggtggaggttgcagtgagccgagatcgcaccactgcactccagcctgggccatggagtgagactccatctcaaaaaraaaaagcttcctaaccagagtctaatagacattgcatccagtctttaaaaatgtacattcctgcatcttaatatggtttctcccaatgactgtttttaca

SEQ ID NO: 529166 - DNA, 201 bp, Homo sapiens
ttttagtagagatggggtttcaccatgttggccaggctggtctcgtactcctgacctcaagtgatccactcgccttggccttccaaagtgctgggattacrggtatgagccacggcgcccggccgctggttttttttcaattatccagcccaaaatgtcagccttgctgttctttttgacccacttcccttcgtcttgtct

SEQ ID NO: 529167 - DNA, 201 bp, Homo sapiens
gacaaaagctgagtttgtctacagtaggcccatatcaagaaatattaacaggagcctatttcatccagctaaaaacactattggctttaaatatatatgtaacaattatattgtttgtttgtaacatatgaagaagttaagtaacaggcaacaggagcacaatggatgggagggaaatatatgaatatgtggaattcagct

SEQ ID NO: 529168 - DNA, 201 bp, Homo sapiens
agacaaaagctgagtttgtctacagtaggcccatatcaagaaatattaacaggagcctatttcatccagctaaaaacactattggctttaaatatatatgtaacaattatattgtttgtttgtaacatatgaagaagttaagtaacaggcaacaggagcacaatggatgggagggaaatatatgaatatgtggaattcagc

SEQ ID NO: 529169 - DNA, 201 bp, Homo sapiens
cagacaaaagctgagtttgtctacagtaggcccatatcaagaaatattaacaggagcctatttcatccagctaaaaacactattggctttaaatatatatgtaacaattatattgtttgtttgtaacatatgaagaagttaagtaacaggcaacaggagcacaatggatgggagggaaatatatgaatatgtggaattcag

SEQ ID NO: 529170 - DNA, 201 bp, Homo sapiens
tcagacaaaagctgagtttgtctacagtaggcccatatcaagaaatattaacaggagcctatttcatccagctaaaaacactattggctttaaatatatatgtaacaattatattgtttgtttgtaacatatgaagaagttaagtaacaggcaacaggagcacaatggatgggagggaaatatatgaatatgtggaattca

SEQ ID NO: 529171 - DNA, 201 bp, Homo sapiens
tttgatggactccgtgatataaaatatatcacaatgtctgtgaatataatgtctgacaattttactatgtttaccaactttgtacttttttttttttttttggccttattgtattggctagaccctgtagtccagtgttgaatcaaaatgtatgagtagacatccatgccctgttcttagggaatagctaaaattaaaaga

SEQ ID NO: 529172 - DNA, 201 bp, Homo sapiens
aatatggtaaaaccctgtctctactaaaaatacaaaaattagcagggtgtggtggcgggtacgtgtaatgccagctacttgggaggctgaggcaggagaaycacttgaacccaggaggcggaggttgcagtgagcaagatcatgccattgcactccagcctgggcgacagagtgagactccatcataaataaataaataaa

SEQ ID NO: 529173 - DNA, 201 bp, Homo sapiens
ttgttctgccttgccataagggagcatttaacaagtccttcgtacaaccactgtaaacaacaacttagcaaaaattatcaaatgtaagtagtaatgataaygatgggcatattatatcctttaaatgtaataactcagtcctttaaacaatccactatgctttccaactcataaaaagtcacaagagaccatcattctcac

SEQ ID NO: 529174 - DNA, 201 bp, Homo sapiens
tgaaataatgttttgcggatttaaccttgttgcatgtcccagagttttttgtttgtttgttttgttttgttttttattaaactgaggagtgatattctcttatatggatagaccataatttgtctattcctccccctagttgaggacatccaagttccagtttttgactattatgaatatacatgctatgaacattctttt

SEQ ID NO: 529175 - DNA, 201 bp, Homo sapiens
tgtatcctcagcccacaatagacgctcagtaaaaaattattattgaagattttcataattatatacatttattgtctatttaaccaatctcttattgaccrttctcttatcagcttttacccccattattccattgaaacaccattgttgtagagtttgactaaatataaaccacaaatataattcgctttttattgtatt

SEQ ID NO: 529176 - DNA, 201 bp, Homo sapiens
gcaaaaacctctcccttttagtacagttggaatttcctaattactctactgaatttttatgacaaccgcttttgtgttcctccgtttataaaatttacacrtctagggtgatttttctaaaatcctgaacttatgccacaaagtagtttttggtgtctgccaaaaggtaaactttttctcagtccctcatctcgttctctt

SEQ ID NO: 529177 - DNA, 201 bp, Homo sapiens
gggcaccatggctcccttccaccttccatactcaagaatacctacctgcttggcctacctactagcaactcttgggctaaataattgttcaaaaaaaagamcaggaagaaaggaggaagagcaaaagtagttttattttacacacatattagcattaccattgctcttcattccttcctgtagaattgagttttcatctga

SEQ ID NO: 529178 - DNA, 201 bp, Homo sapiens
tttttgagacaaggtctcactttgttgcccaggctggagtgcagtggtgtgatcacagctcactgcagtcacaaccccccaggctcaagcgatcctcccayctcagcctcccaagtagctaagactacaggtgcacaccaacacacatggctaaattttttttattttttgtagagacagggtctggctatgttgcccagg

SEQ ID NO: 529179 - DNA, 201 bp, Homo sapiens
catctaccatggcttctgttcagaagggagttactaaaccaatcccaaactcaagggagtagggaataacctccatgcttgaaagtaagagtatccaaaaraaagagtgaattacattaattgaatttcaaaagtttaacttattttatagcattatctgtatctaatcatgagtaaacatcagacaaactcacattgata

SEQ ID NO: 529180 - DNA, 201 bp, Homo sapiens
ttttggttgtgtggttggagtcctaaatttttaaactaaaattaagatttcaggcatttggagctaattatattatgtatacagacaggtgtgcaatttayggaaatactggttgcgttgcatccaacattatctgagatcagagcagcccccaggctcccatgacttagaatacttgaatgcagaaagcacatttattgg

SEQ ID NO: 529181 - DNA, 201 bp, Homo sapiens
tcttccagcaaggctcactcacatggctgttggctggaggcctcagttccacagttctttgccctttgagcctctccatagggctgcttgagtgtcctcayaacaaagtagctaactttccacagagcaaatgattcaagagaaagagcaaggaagaatttgcagtgcctttcgtgacctacttttgggagtcatctacca

SEQ ID NO: 529182 - DNA, 201 bp, Homo sapiens
catgttgtatgaaaataaaggctgacttcttcctttccttctagttttttccatgccttgttgcacaggctaggacctctgttaccatactgaataagtgrtgagagccaacatccttaccttttcccaatgttagggggaaaacattcagtattgtaccagtaagtttgatgttagttataggttgccaatttttaggat

SEQ ID NO: 529183 - DNA, 201 bp, Homo sapiens
gaaaagcaagtatctattgcttagcatatgtaaagttgtagtctatatttatggggccattgcttaaagattataaattatgtaaatacattaataaattytaagtttcatttgacattccattgaatctcgcacccagtcttgcgtatgcctgcccagttttcagcctcttaacgggagactcaagcacattggtattgt

SEQ ID NO: 529184 - DNA, 201 bp, Homo sapiens
tccatttattgagaataatgacaagaagcttgggtaaagcttttaaacagatttgtagtatattcacagcagtgtctagtcatttgaaaagtagttagaakacattgggagatactttctcaatgtagaaaccatgctgtgtactccccacacagatccgcagacaactcaaagtggtggaggctcaaggcttgagagaac

SEQ ID NO: 529185 - DNA, 201 bp, Homo sapiens
aaatactagggcattgtggcatgcacctgtagtcccagccactcgggaagctgaggtgggaggatggcttgagcccaggaatttgaggctgcagtaagccrttgattgcaccgctacacttcagcttaggtgacagagcaaaaccctgtctcttaaaaaaacaaaaatcatgtttattgttgtcctggatgtaaatagcag

SEQ ID NO: 529186 - DNA, 201 bp, Homo sapiens
ctgcagatcgtatctatgtttattcatttcattcaaattcatcaaaatatttattgggagctgttccaggctcaggggaaatagccgtgaagaagatagaygcagcccctgctctcctggagcgcacattctacagagggaaacagacagtgaacaccaaataaataggatcatttcagatcataataactgatacaaaga

SEQ ID NO: 529187 - DNA, 201 bp, Homo sapiens
atgaaataatgttttgcggatttaaccttgttgcatgtcccagagttttttgtttgtttgttttgttttgttttttattaaactgaggagtgatattctcttatatggatagaccataatttgtctattcctccccctagttgaggacatccaagttccagtttttgactattatgaatatacatgctatgaacattcttt

SEQ ID NO: 529188 - DNA, 201 bp, Homo sapiens
ataaaactgtattctgaactatcttctgagagacatttcagtgttacattaaaagtttttgcctttggtaattactggttcatttgctttaaagcagcatstcattttcttggcttaagagaaagattactttttgtgcagggataatgggcttataaatctagtataaaacatatttaaccagttttcccaattttgttt

SEQ ID NO: 529189 - DNA, 201 bp, Homo sapiens
gtctcaaaaaaaaaaaaaaaaaaaaaaactgtacgccaggcccggtggctcacacctgtaatcccagcactttgggaggccaaggcgggcagatcacgaggtcaggagatcaagaccatcctggccaacatggtgaaaccccgtctctactaaaaatacaaaaattagctgggtgtggtggtgcgtgcgcctgtagtccca

SEQ ID NO: 529190 - DNA, 201 bp, Homo sapiens
tttttaatcaggttttgcttcatgtttcgaagctttcgttattgagtgtatatgcatgtagcattgtttttatatatttttatataacatacatgtcatatgtattatatatattatatgtatgaattatatatctcttaaatgtatctgtgttatatatacataaacagaaacaaggtcttgctccatctgtcaggctag

SEQ ID NO: 529191 - DNA, 201 bp, Homo sapiens
gtttttaatcaggttttgcttcatgtttcgaagctttcgttattgagtgtatatgcatgtagcattgtttttatatatttttatataacatacatgtcatatgtattatatatattatatgtatgaattatatatctcttaaatgtatctgtgttatatatacataaacagaaacaaggtcttgctccatctgtcaggcta

SEQ ID NO: 529192 - DNA, 201 bp, Homo sapiens
ttactgtcttgctgctttggggctacaatgaccaacttgaatagttgcaactaagccttgatgggccacaaacccaaaaatatttgctatctggtactttycagagcaagtttgctgaccccgatctagacaaaatggacttctgtcctcgtagaccttacctacaagaagctacattatgactagtgtacaggaaatgat

SEQ ID NO: 529193 - DNA, 201 bp, Homo sapiens
gctgggctcagtggctcacgcctgtaatcccagcactttgggaggccgaggcgggtagatcatggggtcaacagatcgagaccatcctggccaacatggtraaaccccgtgtctactaaaaatacaaaaattagctgggcgtggtggcacacgcctgtaatcccagctattcaggaggccgaggcaagagaatcgcttgaa

SEQ ID NO: 529194 - DNA, 201 bp, Homo sapiens
aaccccgtctctactaaaaatacaaaaattagccagatgtgatggcacacacctgtaatcgcagctacttgggaggctgagacaggagaattgcttaaacscgggaggcggagtttgcagtgagccgagatcgcaccactgcactccagcctgggtgacagagcaagactccatctcaaaaaaaaaagaaaagaaaaaaaa

SEQ ID NO: 529195 - DNA, 201 bp, Homo sapiens
gagtctcgctctgttgcccaggctggagtgcagtggcgcgatcttggctcactgcaagctccgcctcctgggttcacgccattctcctgcctcagcctccsgagtagctgggactacaggcacccaccaccatgcctggctaatttttttttgtatttttagtagagacggggtttcatgtattagccaggatggtctctc

SEQ ID NO: 529196 - DNA, 201 bp, Homo sapiens
tttttttttttttttttttttttgaggtggagtctcgctctgttgcccaggctggagtgcagtggcgcgatcttggctcactgcaagctccgcctcctggrttcacgccattctcctgcctcagcctccggagtagctgggactacaggcacccaccaccatgcctggctaatttttttttgtatttttagtagagacggg

SEQ ID NO: 529197 - DNA, 201 bp, Homo sapiens
gtcgaagaattccatccactgacgccaacctgccatctggcggtaagggcttcaaactccgaagacagccttcagagccaaagcggagctgctgctgaccraacctcagcctctcagacttgatgatgaagtaggtggtcctgaaagttaacaggagggctggggtccctgccaccagttttcacctagccagtcttgagt

SEQ ID NO: 529198 - DNA, 201 bp, Homo sapiens
tgccgcccttctggaaagagtgttgctactgaataaataatgcacagggtactgaggtcatgaaagctgtcccatttctttctctatttaaatatgtttcygttagtcgtccaaggtcattgaaaatgaacaaaatgaataaagggaaatgaaatgcaggtatacttgcacggtaagaaaaccctcaaaaataatactagg

SEQ ID NO: 529199 - DNA, 201 bp, Homo sapiens
aatgtctgtattgccaaactatctcttgattcttttgataaggagcttagaacccttccttcttggtgtcgggcagatgtgcctaatgctttattttgacrgaggatatgcactcagcatctgagcatcccataaatactccagagaggaacacaattaggatacagcgtggtgctgggagactgagcgttggttgagtct

SEQ ID NO: 529200 - DNA, 201 bp, Homo sapiens
ggtagctggaagtggtagagaactggaaaggaggagagagaatgtgggataattgctgtggaatggaagaaggcctaagacgcatgcccagcagacaaagygtagaatcttcatggccgtccacatagttttgtaatttttcctccagcgaagccaccacccaaccattgggtagaggaagcaggtggagaggctgttggg

SEQ ID NO: 529201 - DNA, 201 bp, Homo sapiens
aagtgcttggccaagacaccctagatctgttggcataacagacagccacttagcttgtaggctacatgataaatgttttgttggagttctaggatagcaargagatggagagatgaggaagatacccctattacagaggaagagttacagcgaggcccctacactcaaagaacttaaaattctcatgggtaagtcagacat

SEQ ID NO: 529202 - DNA, 201 bp, Homo sapiens
tgaatgagcaggaaagagacaccccctccttccaaaaagcgatatgacttcttagcagaattccagagctttgagtgagagagggacacagtgactttgcygtaactcctggattttgctggttgcctgtgggctagaaggagttggagctggtggcttggcagaaggcaggaaggacactgcttgggcgtactcagcctt

SEQ ID NO: 529203 - DNA, 201 bp, Homo sapiens
ttcatggaacatagccatgcttgtttgtttattatctatggcagggacgtccagtcttttggcttccctgggccacattggaagaagaattgtctcaggcygcatataaaatacaccaacgatagctgatgagcttaaaaaaaaaaatcgcaaaaacagctcagtgttttaagaaagtttatggatttgtgttgggccaca

SEQ ID NO: 529204 - DNA, 201 bp, Homo sapiens
ggagacattttcagacaaaagctgagtttgtctacagtaggcccatatcaagaaatattaacaggagcctatttcatccagctaaaaacactattggcttyaaatatatatgtaacaattatattgtttgtttgtaacatatgaagaagttaagtaacaggcaacaggagcacaatggatgggagggaaatatatgaatat

SEQ ID NO: 529205 - DNA, 201 bp, Homo sapiens
aaacagagggacagggaaactttgccatagatgggaacagttgggctcttaactgtggagacttgaagtggggcaggtgagctcagagcaaactcttcacrggaatttctacttttgctgggcatagggtgacagcagccaaggtgcaagaatccatgggtggagctgcaaagcaaaggaatctcttaaaaatcttgatct

SEQ ID NO: 529206 - DNA, 201 bp, Homo sapiens
ttaagagacatggtgtcactatgttgttcgggatagatttgaacacctgggctcaagtgatcctcctgcctcaacctccagagtagctgggagtactgtakattgacaccaccatgcccagcagaagcacctttattttgtttgctgggatctttgattttttttttaacataatgttgactttatcaaaatatttttcta

SEQ ID NO: 529207 - DNA, 201 bp, Homo sapiens
ctgcctcagcatcccaaagtgctgggattacaggcatgagccacggcacctggctgcatactcacttttgaggtatgtttttgctagatgtagatttcagwtgttttttctttcagcactttactgtgtcattctgttttatcctggccttcgttgtttttgttgagtggcgtcatcctccttcatattgttaccctatat

SEQ ID NO: 529208 - DNA, 201 bp, Homo sapiens
tattttgagctgttcatattctttttctttctgttaaaatggtgcattacaaccattgagagtttaatactgaaatattaaaccaatctggcactcctaarataaatttctcttggtcattatgcattattattttttatatattgctggatttgatttactaaaattttttcaaggatttttctctccatgtagttttct

SEQ ID NO: 529209 - DNA, 201 bp, Homo sapiens
cctaaatcagaaacccttctttttttttttccaaaatcggaaacacttctggtcagcatttcagataaggggtactcagcatgtactggtagttgttgatycctctctcctccccgcctcctgtttaaggcagtatctactgattctttttctttggaagatgggaattttgccatcctcctcctcccacctccttgtgca

SEQ ID NO: 529210 - DNA, 201 bp, Homo sapiens
cagtggtaagtcactcgctcctgtccaagccacctcccaaatatccctccttctctattgctgttatatgacttctagggcttcatcttccttcatggagrtgagacatggactctagactttgattagatcacagctctgccacttgctagctagttaaccctgggcagtttattttatgtatttattttttgagatgga

SEQ ID NO: 529211 - DNA, 201 bp, Homo sapiens
catgtatgtcactgagctcgtgaactctctctcagaggcttggatctctcctcctctttccatggaccttggggtagaggaaaggaccaactgtcctcagrtactcaagccagcaacctcagcatccttctcaaatccctcctaactcaccatctcctcccctcagccagtggtaagtcactcgctcctgtccaagccacc

SEQ ID NO: 529212 - DNA, 201 bp, Homo sapiens
gcccagaattcctgccctccctgcaccaggtcccctcgttcatcttcttacctccagggacactttgcttcggtctccttcggccttgtcatccctttgtmtgtccagatcccagggttctgaggtagactcctgcccatttgcattttgtctcctcttgcttgatgtcatgtaactccagttgcaaccacagcagggatt

SEQ ID NO: 529213 - DNA, 201 bp, Homo sapiens
tcatctctcctgtgcttcctccatgtttttgttgctcacttcctccccagcacacaccaagcagcacccgttccacacctgggtttttggcacatgctatwctctctcagggccctttcttttccttgtctccttggcaaattcctgattgtctgtgcaaactcaggtacatgttagtggctctaaaagttgcagactcca

SEQ ID NO: 529214 - DNA, 201 bp, Homo sapiens
tatccatttaagaaagggccctctgggactccttcccatcctcacatctgagccctcatcctatcttgccggggctattgagctgatttcagaaccagttrttctgtggcctggctctgccacttggagtcagttctcctcattgttgctgtgtgagcttcattaaagacaagtttgatcccctcagtgaaaaccacggca

SEQ ID NO: 529215 - DNA, 201 bp, Homo sapiens
atatccatttattgagaataatgacaagaagcttgggtaaagcttttaaacagatttgtagtatattcacagcagtgtctagtcatttgaaaagtagttasaagacattgggagatactttctcaatgtagaaaccatgctgtgtactccccacacagatccgcagacaactcaaagtggtggaggctcaaggcttgagag

SEQ ID NO: 529216 - DNA, 201 bp, Homo sapiens
tggcttgcctttgatttttttagtcaactccttcgatggattgaagtttttaatcttcatataatctgactgatccttgttttcctttatgtttagctgcrttaggtttttggttgctgttttagaaatcattacctgttcccagctcatgaaaatattctcctcttatttcttttaaaaatattatttgttcaacaattt

SEQ ID NO: 529217 - DNA, 201 bp, Homo sapiens
ttttagaccatccatgtcattgcatctagctgtgaatgatccactctcatggctggtttgtgcgtgtgagtgtcagagtccgagttgtgcgggtaagggggcagtgaagaatacccacaatataattatccattctgctgttgatagacatttgggtagctgtttccaatttagagttattacaaacagtactgctctaaa

SEQ ID NO: 529218 - DNA, 201 bp, Homo sapiens
aacataaagccagttgggaatttttcacagctcaagctaaaatgtctaagtgtgtggtgtcatgagtatgttaaaattactgctatctttttgtgttcttyactttagtggtattaaaaacaggaaagtaggccagacatggtggctcacacctataatcccagcactttgggaagccaacatgggtggatcacctgaggt

SEQ ID NO: 529219 - DNA, 201 bp, Homo sapiens
cactgcagagcaaccaaatgcagtcagggactgcaaaggggagctttcttgtgtaagatccacatttttacagcttttccccagtgggtatttcccagttsgagtggcacagggtagctagtacttaagcagaaagcttgtgttgagtgcagagtttaggactgctagagcagccagaaaaagaggaggcaaatcgcagaa

SEQ ID NO: 529220 - DNA, 201 bp, Homo sapiens
caaaggactacgccgactctattcatgcaatttttgtagagaccagcgcaaaaaacgcgataaacataaatgaactctttatagaaattagtgagtatctytgtgccttatccatttcctctgtaaaagccgcttaacacagaatgatcttcctggttagaattcctgtcttacttagagcagtctagtctctgatattgt

SEQ ID NO: 529221 - DNA, 201 bp, Homo sapiens
tcgtttatgatatcacaaaagaagtaagactatatagttttctttagattgttttgaaaactcttttggttgcttagatctccagttgctctcttttttgkgtgttacaggagacattttcaacattaaagaattgggtgaaagagcttcgacagcatggcccacctaatattgtagttgccattgcaggaaataaatgtg

SEQ ID NO: 529222 - DNA, 201 bp, Homo sapiens
catttgctttaaagcagcatgtcattttcttggcttaagagaaagattactttttgtgcagggataatgggcttataaatctagtataaaacatatttaaycagttttcccaattttgtttatttttccccctcctctgcagtttcgtgccttagcaccaatgtactatcgagggtcggctgcagctataatcgtttatga

SEQ ID NO: 529223 - DNA, 201 bp, Homo sapiens
gtatttacctgcctgaaacaacaaacatttgttatctcacattttctgtgtatcaggaatccaagtggcctagctcatatggttctgtcccactctgatgrtgttgcaatcaagatgtcaggcagggctgcagttatctgaaggatcctcttccagcaaggctcactcacatggctgttggctggaggcctcagttccaca

SEQ ID NO: 529224 - DNA, 201 bp, Homo sapiens
tttgtgttctctgtatacttttatatcacctgggaattagtttttttaatctttattctaattcttaaacattttacttattctatgagatcaggtaggawctctagttcaatgttcaatagaaatggtaatactaggtattatcctaatcttagggggtagcttctaccatcataccattatgtttgctataggtttttt

SEQ ID NO: 529225 - DNA, 201 bp, Homo sapiens
tctccttcggccttgtcatccctttgtatgtccagatcccagggttctgaggtagactcctgcccatttgcattttgtctcctcttgcttgatgtcatgtractccagttgcaaccacagcagggattttcaaagctgaggctttttttcagacatgcatgtctctggtccctcttccaggattccaggaacccccttcct

SEQ ID NO: 529226 - DNA, 201 bp, Homo sapiens
atgggagatggaccaggtagaaacactggagggaggctctcaggcatgaactgcccagaattcctgccctccctgcaccaggtcccctcgttcatcttctyacctccagggacactttgcttcggtctccttcggccttgtcatccctttgtatgtccagatcccagggttctgaggtagactcctgcccatttgcatttt

SEQ ID NO: 529227 - DNA, 201 bp, Homo sapiens
cttttgtgttcctccgtttataaaatttacacgtctagggtgatttttctaaaatcctgaacttatgccacaaagtagtttttggtgtctgccaaaaggtraactttttctcagtccctcatctcgttctctttcaggatacaggtgtaggtaaatcgagtattgtgtggcggtttgtggaagacagttttgatccaaaca

SEQ ID NO: 529228 - DNA, 201 bp, Homo sapiens
aacctctcagaaatcaacagaaatgcattgtggggttgaggggagaaaggttggccacttgagctgtgacgtggggttgggaaaaaactcctgattcaaaygtgaatgagcaggaaagagacaccccctccttccaaaaagcgatatgacttcttagcagaattccagagctttgagtgagagagggacacagtgactttg

SEQ ID NO: 529229 - DNA, 201 bp, Homo sapiens
catccttccacctcaggtagctgagatcacagatgcacactatcacacctggctaaattttgtattttttagtagagatagagttgcaccatgttactccrgctggttttcttttttttttttttttttttttttttttttttttgaggtggagtctcgctctgttgcccaggctggagtgcagtggcgcgatcttggctc

SEQ ID NO: 529230 - DNA, 201 bp, Homo sapiens
cacccccagcccaatccccaaaccccattcatatccatttaagaaagggccctctgggactccttcccatcctcacatctgagccctcatcctatcttgcsggggctattgagctgatttcagaaccagttattctgtggcctggctctgccacttggagtcagttctcctcattgttgctgtgtgagcttcattaaagac

SEQ ID NO: 529231 - DNA, 201 bp, Homo sapiens
cgtgctttctcactgcagtctcctggcctctcatactgatttgataaaagctggtcttccccaagctgtgtcctgacttcccatgtttctcacctccctcsgacacctcaccttcacctgtataatgtgacctccaagcccatgcctccaacccatgatttgcacctagtctcctacagaactccgtctttgttcctcctc

SEQ ID NO: 529232 - DNA, 201 bp, Homo sapiens
tcactgttttggaggctacttgccatggcataaatttatataaatattgccaggaattcattgtatcagagttgaagttttaaaactaaggattctgatasttgtctaagctcatgattcatcagaaagtcatcctgtctattcaacttgcacttttcttgaagattatcacttgaatctcaagaaaaatatttcaaggcc

SEQ ID NO: 529233 - DNA, 201 bp, Homo sapiens
ggccggggtggctggaggacccacagcaagaaccaggagagacggcagggtggttggtgagccagcagggaccagtccacagggccctggagtccggaggrggagccgacatcacttactgcagaacacatccctgcttctcagttgaagctcctctgtcttctctagttcccttcctgcttcataaccgtgctttctcac

SEQ ID NO: 529234 - DNA, 201 bp, Homo sapiens
agccgagatcgcaccactgcactccagcctgggtgacagagcaagactccatctcaaaaaaaaaagaaaagaaaaaaaagtttttgaagaatggaagtgamgtagttggtggtggtgagggacggtgggtagaaaagaaccagaatgggcatgagggacagcaaggaccgtgaggcgggagggcaagggaggttggaagag

SEQ ID NO: 529235 - DNA, 201 bp, Homo sapiens
ggtgggaggtacacaggagctctatcatctttgcagcttttctataaatctaaaattattcgagtataaaaagtttattaaacttttttttttttttttttacttcagtgaaacctgtcaaattgcatctgcaaaattgttgtgtctgagaaagttaaagctcactcccttcccttttctcatcttggtttaggtcgaaga

SEQ ID NO: 529236 - DNA, 201 bp, Homo sapiens
ccaccccactccaccacaagagcacccattccccaacctactgctcagatggtggaactcctgaaagagaagttaccacttccgcaactgctgctcactcytcagccctccgtcatctcagctcctccctgccatgccactaaaaccaccttcccctggtaccagtttccatctaatagccaaagtcaaatggccttttct

SEQ ID NO: 529237 - DNA, 201 bp, Homo sapiens
ctaaggcaagcagattgcttgaggtcaggagttcaagaccagcctggccaacatggcgaaacctggtctctactaaaaatataaaaattagccgggcgtggcggtacacgcctctaatcccagctactcgggaggctgaggtgggagaatcgcttgaacctaggaagcttaggttgcagtgagccgagatcatgccactat

SEQ ID NO: 529238 - DNA, 201 bp, Homo sapiens
aaatccacaagacacccagacaccaccttggctagaagtgctctctcaaataagaagagagaaaagtgaagggtgtagcttcatgcatcttggtgaggcamgccccatcctgagtgtccactgttccctttttgccagtagctcccaatctgccagatgcctgtggctcctgagctgcctctagtccactctctgcaccag

SEQ ID NO: 529239 - DNA, 201 bp, Homo sapiens
acatctacaaatgcagtattttagagctgttaaaaagaaggcagcaggccaggcacagtggctcacatcagtaatcccagcactttgggaggctaaggcargcagattgcttgaggtcaggagttcaagaccagcctggccaacatggcgaaacctggtctctactaaaaatataaaaattagccgggcgtggcggtacac

SEQ ID NO: 529240 - DNA, 201 bp, Homo sapiens
gatcacctgaggtcaggagttcaagacccagcctggccaatatggtaaaaccctgtctctactaaaaatacaaaaattagcagggtgtggtggcgggtacrtgtaatgccagctacttgggaggctgaggcaggagaatcacttgaacccaggaggcggaggttgcagtgagcaagatcatgccattgcactccagcctgg

SEQ ID NO: 529241 - DNA, 201 bp, Homo sapiens
tgggtgatttaaggattctcttgaaattgtcattatgcttcacggagcagtgaagtgaaacctgttcattctcatgcattgttggtaggagaatatagtggcacagcctcttcagagagtaatttggcagcatctgtcaaaatttaaattgcacattcttcctgcatttgtgctagatagacactggaatacaatgtatgt

SEQ ID NO: 529242 - DNA, 201 bp, Homo sapiens
cagatgaaaatagatcctggtgctattctttcaggcatatcaagtaaaagacatttaaatggtttttgtccttcctgaaagtagtaggttgagatctgaasccttacacattcctgtactggtagtaataataaattaataaattcatattgaaatggaaggttttttcagttctctggttctatggataagtaaagttga

SEQ ID NO: 529243 - DNA, 201 bp, Homo sapiens
acgtccagtcttttggcttccctgggccacattggaagaagaattgtctcaggctgcatataaaatacaccaacgatagctgatgagcttaaaaaaaaaaatcgcaaaaacagctcagtgttttaagaaagtttatggatttgtgttgggccacattcaaagctgtcctgggccacataacaggccgcaggttagacaagc

SEQ ID NO: 529244 - DNA, 201 bp, Homo sapiens
ctcttgcttgtccacttctcattggttctgcaacaggagtagttgctctgagatgcaaacctgccttcagcctgcctgatgcaccatcacacagcccagarctgcacaggagatgctcatggggccaagccacaggccaggggtgctgaccaggatgccctgcatggagaagacaggagaggagcaccacctgatgagcac

SEQ ID NO: 529245 - DNA, 201 bp, Homo sapiens
gtgtatacattcctggacatagttttttaggaatattttcccatgataacatctctttaaataacaggttttgtgttttacaagggaggctaatgtctgtrttgccaaactatctcttgattcttttgataaggagcttagaacccttccttcttggtgtcgggcagatgtgcctaatgctttattttgacggaggatatg

SEQ ID NO: 529246 - DNA, 201 bp, Homo sapiens
tctgaaaatgccagccattgagttcaatgtcctgattggagtgatttgggtacaacttggccaaaaaacaagagtacaatttggcaaaaaaaaaaaaaaaagtataacttcgtacttggttccagaagtcttatttttcattagaaaagaagacacacccatctttgggctctactggccagactgggatgctttgagaag

SEQ ID NO: 529247 - DNA, 201 bp, Homo sapiens
ttccaggagagctaaacaagtctactgcagttaaagaaaagaaatgtttaaaataccttgcaacaagttttttcattgagagcacgtactctgaccaaagwtcatgactacttggtgtgcatgaagaaagtcatatttttagaatgccatgataaatggagaagtatatgaaaagcattctagctttaggaaataatgcta

SEQ ID NO: 529248 - DNA, 201 bp, Homo sapiens
tattacctattttaaaaattaaagaatacagttacagtttggaaataactgaaatagttcatcacacacagagttggctgaactgacagaagcctgctacrtagacttgctgagaactctccctttccctcaccgcagttgataccttgtggattttgtatgttagtcttaagttgtcccttttgtcccttcctgcccatc

SEQ ID NO: 529249 - DNA, 201 bp, Homo sapiens
tcagaaacggcttgtgtggaatggggacactcttagtatgctgttatgccgtcacctcattccctttgcctcagcagttctgcttctaggtctttgtcgtrcagataaactcacatcatttctaaaccaattaaaaattctccaaggttggcacttgcagcattgttgatgagtgggggtctgattatatccatcatggtg

SEQ ID NO: 529250 - DNA, 201 bp, Homo sapiens
tgtttataaaaacacttgtacaaaaatgtttatagcaggcttgttcattatagccaaaaacttgaaacaacttaaatctctcaacataagaatgggcaaartgcgatatagtcacgcaattgaataccatctggcaataaaaaaacactgtagatgaatttcaaaaccattgttaaatgaaagaagctagacacaatagag

SEQ ID NO: 529251 - DNA, 201 bp, Homo sapiens
agaaggtggtataaatgctgtcaatttttttttaacccaagtattttggtggggaaaagcaagtatctattgcttagcatatgtaaagttgtagtctatayttatggggccattgcttaaagattataaattatgtaaatacattaataaattctaagtttcatttgacattccattgaatctcgcacccagtcttgcgta

SEQ ID NO: 529252 - DNA, 201 bp, Homo sapiens
ttactcagaggtaactcaggagttcaaagtttactaacatatgttaaaaagcaagtggacttgttactttttacacgaagcagaaactttgggtctctcaraaggtcctaatctgtcttaacggcaaaaacctctcccttttagtacagttggaatttcctaattactctactgaatttttatgacaaccgcttttgtgtt

SEQ ID NO: 529253 - DNA, 201 bp, Homo sapiens; identical to SEQ ID NO: 332200

SEQ ID NO: 529254 - DNA, 201 bp, Homo sapiens
cccctctcctcttcctttttggggtctttgtagcgcaccccgacccacacaagcctcctctcctgccccaccgttataagtcgccgcgcttcattccctaktcctttcacccaacccccttgcttttcctctttccgggacacctgagactcctctacggccggacccccacccactgaaggtgtttgtttctttgccccc

SEQ ID NO: 529255 - DNA, 201 bp, Homo sapiens
tccaggcctctggggcagggatatggagtggaaccgtgggcacccagggtgaggcagaggtgatcggggtagggcctggcgagagaccgcagtggagcagrggcaggtccatggggcaggggcagagatgggtccatggcacagatgtggctgtgccatgtggggtcagagatgggtccatgggggacagggacatggccg

SEQ ID NO: 529256 - DNA, 201 bp, Homo sapiens
ccgtggggagagatgtgcccgtggtggtagagatggggctggggcatcgaggatgggactggagtaaagctgacatggggaaagtcaggtagggccacagkggcagaaatgggtgagagctatcagatggagccacaggccccaggaatttgctgggtgtaaaaatggaaggtgggggtcggaggcactggcagagatgcc

SEQ ID NO: 529257 - DNA, 201 bp, Homo sapiens
cctctttccgggacacctgagactcctctacggccggacccccacccactgaaggtgtttgtttctttgccccccttttttttccgcatccgtttctcatstggatccccatttaccctccctgcgacggctcgcccctcctcccaggcttttaccttccagccacgcccccaccatccctgcgcccccctgcgcccgcgc

SEQ ID NO: 529258 - DNA, 201 bp, Homo sapiens
ccctcgagccacgctccttcccgctccctctcggcaccctcccgccctttgtcgtcccaggacacctggggcctccatcctggactcaaccaaggccccgrcccctagaggccccacctgccccgaaagccagcatcgccttctccatctgacctcccatccttcctcctagcccccctctcctcttcctttttggggtct

SEQ ID NO: 529259 - DNA, 201 bp, Homo sapiens; identical to SEQ ID NO: 332204

SEQ ID NO: 529260 - DNA, 201 bp, Homo sapiens
cccacacaagcctcctctcctgccccaccgttataagtcgccgcgcttcattccctagtcctttcacccaacccccttgcttttcctctttccgggacacytgagactcctctacggccggacccccacccactgaaggtgtttgtttctttgccccccttttttttccgcatccgtttctcatctggatccccatttacc

SEQ ID NO: 529261 - DNA, 201 bp, Homo sapiens; identical to SEQ ID NO: 332247

SEQ ID NO: 529262 - DNA, 201 bp, Homo sapiens; identical to SEQ ID NO: 332205

SEQ ID NO: 529263 - DNA, 201 bp, Homo sapiens
gggagggaggaagcggcttgccggagagccagggcgcagtgggcggcagggctgagcggccggtgatggggaccccacatcccaggcagtgccgggtaagsgggttgcacatgagggtccctgattggggaggaggagggcatgaaggggtggggccatggccacctgctgtccgtcctgtgtccccgggctcttctccct

SEQ ID NO: 529264 - DNA, 201 bp, Homo sapiens
aacaccgagcgcctgggaggccagctcgctgcgcagctcccggcacagcggcctcagccacttctaagcacaaccagaggcccaacgactaagccagcccmccctgggctgggcccaggtgcgcggcgcagagcctttgggaataaaaagccattctgcgagcccaggcaggaccgtgtgtcccgtcggggcttcggcatc

SEQ ID NO: 529265 - DNA, 201 bp, Homo sapiens; identical to SEQ ID NO: 332206

SEQ ID NO: 529266 - DNA, 201 bp, Homo sapiens
tctctccatagggcctgttttactatgatgtaaaaattaggtcatgtacattttcatattagactttttgttaaataaacttttgtaatagtcaaaaatgytttttcagatgttctgaatatacaatattagctctcattccaattttttctaacatgaattttcctggttgacattgatttcaaagggttttatgtatta

SEQ ID NO: 529267 - DNA, 201 bp, Homo sapiens
caaagctcaccctcctgagttgaaaaaatttacggacaagaagttttcattgaaattaaatggtggcagacatgtccaaggaatattgcggggatttgatycctttatgaaccttgtgatagatgaatgtgtggagatggcgactagtggacaacagaaaaatattggaatggtggaaatacgaggaaatagtatcatcat

SEQ ID NO: 529268 - DNA, 201 bp, Homo sapiens
gaggtcgatgacgccaggcacaagatgctgggcctaccgcggtagcgtgagggaagccgtgcgttctgttccaaggcatctgtgagcccatggagtatacmccatgagcaaagctcaccctcctgagttgaaaaaatttacggacaagaagttttcattgaaattaaatggtggcagacatgtccaaggaatattgcgggg

SEQ ID NO: 529269 - DNA, 201 bp, Homo sapiens
tacaccatgagcaaagctcaccctcctgagttgaaaaaatttacggacaagaagttttcattgaaattaaatggtggcagacatgtccaaggaatattgcrgggatttgatccctttatgaaccttgtgatagatgaatgtgtggagatggcgactagtggacaacagaaaaatattggaatggtggaaatacgaggaaat

SEQ ID NO: 529270 - DNA, 201 bp, Homo sapiens
tgctatgttttcctgattttttttttttaatggggtctcactctgtcgtccaggctgcagtggagtgatgtgatcacagctcactacagcctcaaattccygggctcaagcaatcctcctgtctcaacctcctgaatagctgagactacaggtgttcacagccatgcccagctaatttttattttttgtagagacgggtct

SEQ ID NO: 529271 - DNA, 201 bp, Homo sapiens
gggtctcactctgtcgtccaggctgcagtggagtgatgtgatcacagctcactacagcctcaaattcctgggctcaagcaatcctcctgtctcaacctccygaatagctgagactacaggtgttcacagccatgcccagctaatttttattttttgtagagacgggtctcactacgttgcccagattggtcctgaactcct

SEQ ID NO: 529272 - DNA, 201 bp, Homo sapiens
gtgatgtgatcacagctcactacagcctcaaattcctgggctcaagcaatcctcctgtctcaacctcctgaatagctgagactacaggtgttcacagccaygcccagctaatttttattttttgtagagacgggtctcactacgttgcccagattggtcctgaactcctgggctcaagcaatcctcccgccttggccttcc

SEQ ID NO: 529273 - DNA, 201 bp, Homo sapiens
atcacagctcactacagcctcaaattcctgggctcaagcaatcctcctgtctcaacctcctgaatagctgagactacaggtgttcacagccatgcccagcyaatttttattttttgtagagacgggtctcactacgttgcccagattggtcctgaactcctgggctcaagcaatcctcccgccttggccttccaaagtgct

SEQ ID NO: 529274 - DNA, 201 bp, Homo sapiens
agcaatcctcctgtctcaacctcctgaatagctgagactacaggtgttcacagccatgcccagctaatttttattttttgtagagacgggtctcactacgytgcccagattggtcctgaactcctgggctcaagcaatcctcccgccttggccttccaaagtgctgggattataggcatgagctaccacacccagcctgct

SEQ ID NO: 529275 - DNA, 201 bp, Homo sapiens
cctgtctcaacctcctgaatagctgagactacaggtgttcacagccatgcccagctaatttttattttttgtagagacgggtctcactacgttgcccagaytggtcctgaactcctgggctcaagcaatcctcccgccttggccttccaaagtgctgggattataggcatgagctaccacacccagcctgctatggtttgg

SEQ ID NO: 529276 - DNA, 201 bp, Homo sapiens
caacctcctgaatagctgagactacaggtgttcacagccatgcccagctaatttttattttttgtagagacgggtctcactacgttgcccagattggtccygaactcctgggctcaagcaatcctcccgccttggccttccaaagtgctgggattataggcatgagctaccacacccagcctgctatggtttggataaggt

SEQ ID NO: 529277 - DNA, 201 bp, Homo sapiens
gctgggaagcagaaagcacagtccacagccagagccaggggagggtcctggacccccgcccagcccccttcagcccagggaaagagaggcctcgcgcacgrgaaactcagcgccctgccccatctcccccagtgccccctttttgtgtattcccttacccctcaccttctgaccgtgctccctgctcttgcaggctgtgcc

SEQ ID NO: 529278 - DNA, 201 bp, Homo sapiens
tgactctgccgggagctgaaacccaggactccaggggtgagtctgctgggaagcagaaagcacagtccacagccagagccaggggagggtcctggaccccygcccagcccccttcagcccagggaaagagaggcctcgcgcacgagaaactcagcgccctgccccatctcccccagtgccccctttttgtgtattccctta

SEQ ID NO: 529279 - DNA, 201 bp, Homo sapiens
ggcaacttccaaggccccagatggaggcagctgggccctgtagcctcacggtgggagtagagaacccagctcagcccatgcagaggggatggggcacaaargaaccctgcccagggccctgaggacctcaatccctcaattcctccttccccaacctcttctgtttattggattcctcctgatccttttctgggctccaag

SEQ ID NO: 529280 - DNA, 201 bp, Homo sapiens
aggaagccacatggtcaagcaggcactcacgggcacacggcgagaggggctggtggtgcttgggcacccccacaccccggcaggaactccagggtgctctyggagcctgctaccctgcctggagggatcctcaagctttctactggagccagtctggcatctgctccctaagaggggaaactgaggcacgggggaaggaaa

SEQ ID NO: 529281 - DNA, 201 bp, Homo sapiens
ctacgggcatccttcaccctctccttcctcttgcagatgtggacgaatgtcagcagaacccaaggctctgtaaaagctacggcacctgcgtcaacaccctyggcagctatacctgccagtgcctgcctggcttcaagttcatacctgaggatccgaaggtctgcacaggtagaggccccaggaagacgccgtgaggctgga

SEQ ID NO: 529282 - DNA, 201 bp, Homo sapiens
tccttcaccctctccttcctcttgcagatgtggacgaatgtcagcagaacccaaggctctgtaaaagctacggcacctgcgtcaacacccttggcagctayacctgccagtgcctgcctggcttcaagttcatacctgaggatccgaaggtctgcacaggtagaggccccaggaagacgccgtgaggctggacgggagctg

SEQ ID NO: 529283 - DNA, 201 bp, Homo sapiens
tgtctccaggcatctcagggccatcctaaacccctgatcacccgtctttgtcccaaccctgagactcgggacactccacaggaggccactttggaagctcrgaacatccccctgcccatctggcatcttatttgcataaaacaaaagggggctggcactcaggatatttcatgggctcatgacatggcgtgtggtggcgca

SEQ ID NO: 529284 - DNA, 201 bp, Homo sapiens
ccccaaccctgggccccacctggtacctggggtccctaatcacaactgcccctctcccctcagagctgaccctgatgatccaggagcggggggacaagaaygtcactatgggtcagagcagcgcacgcatgaagctgaattgggctgtggcagctggagccgaggatccaggtagcagcggtggtctggagggggagcccg

SEQ ID NO: 529285 - DNA, 201 bp, Homo sapiens
ttcacctacatttccccttcgaacacaggtgaggccttggcctggcctgccctgccccaaccctgggccccacctggtacctggggtccctaatcacaacygcccctctcccctcagagctgaccctgatgatccaggagcggggggacaagaacgtcactatgggtcagagcagcgcacgcatgaagctgaattgggctg

SEQ ID NO: 529286 - DNA, 201 bp, Homo sapiens
ccctgacttggtgtctgggccggcaggttcgggaagaataccggaagtgggcctgcctagttgctggggggagcaagtactcagaattcacctccaccacrtctggcactggccacaatcagacccgggtaaggggctgcgcctggggcgggtgtgggcaggaaggcaccagggctagcggggctcaggcctctgggctct

SEQ ID NO: 529287 - DNA, 201 bp, Homo sapiens
cccggctggaccatcgctctcgccctctaacccacaatctgctccctgcccagtgcaatgctgtcattttcgtgactaccgtctggaagctcactcagaarttttctgaaatcaatccagacatgaagaaattaaagaaggcgaggtgagaggagaggctggaaggacttggaggcggggccggggtgaggggcatgaagc

SEQ ID NO: 529288 - DNA, 201 bp, Homo sapiens
ccctcccttccctcctagctgctggttggactttgagcagggcttcctctggagcttcttgggacctgtgaccttcatcattttggtaagtacccactctycctccaccgaagcccgagcgccacaggcccaggcccggctggaccatcgctctcgccctctaacccacaatctgctccctgcccagtgcaatgctgtcat

SEQ ID NO: 529289 - DNA, 201 bp, Homo sapiens
cgccccagatagtgagtgcagcgagatggggcaggaggaaggcggggtgctgggcctggggctcacaggcagtgccacacacaatgtccggccgccctcckttccgctcctggcttcctggggcactgatgggacccctcccttccctcctagctgctggttggactttgagcagggcttcctctggagcttcttgggacc

SEQ ID NO: 529290 - DNA, 201 bp, Homo sapiens
ctgaggctagatgagaaaagagcaagggtcctccggaaggagctggggtactgaggggggaggctcagggggaccccaggcaacagctgatgactcactgrgaggaaggcgtttcaccatattcataacctgctcatctgcacggggcccacctgctgtgcccaggcctctccacgcttccataacccagcgtccaccact

SEQ ID NO: 529291 - DNA, 201 bp, Homo sapiens
gcagcgcccctgggtctgtgtttttattgcactttcctgctggcttccagctgcaccgccagttccggggagggccctgggccagcggctgtccgcccccsctccttcataaagtcctggcctcgggacagcctgcacagctgcctagcctgtggagacgggacagccctgtcccactcactctttcccctgccgctcctg

SEQ ID NO: 529292 - DNA, 201 bp, Homo sapiens
ccccacaccccggcaggaactccagggtgctcttggagcctgctaccctgcctggagggatcctcaagctttctactggagccagtctggcatctgctccmtaagaggggaaactgaggcacgggggaaggaaaggggcaaaaagtgagtgctgggaccctgagagccgctgtgcttaatataacgcatagaaggacatgg

SEQ ID NO: 529293 - DNA, 201 bp, Homo sapiens
ttatgggccccttgtttctctctccacctctctctatcaccatgtaatttctgtctctctgtctgtctctatctctccgtgtctctgtctcctctgtcttmtctttctctagctgtcttctttctcctctctgtctccctctctctctccagcttgtctcctttctcctctctgtctccgtctctgtccctctatctctct

SEQ ID NO: 529294 - DNA, 201 bp, Homo sapiens
atgggccccttgtttctctctccacctctctctatcaccatgtaatttctgtctctctgtctgtctctatctctccgtgtctctgtctcctctgtcttctmtttctctagctgtcttctttctcctctctgtctccctctctctctccagcttgtctcctttctcctctctgtctccgtctctgtccctctatctctctgt

SEQ ID NO: 529295 - DNA, 201 bp, Homo sapiens
gaacatgccttgggagggggaaccccctgagtgctgggaaccgccactccacgtgcaccccaacaggcggctacagcgtcttcctgtgggaggggggcccgggggtgaaatatcaccactgggttccaggacagaccgccagggccagtggcagttgtgggtgtggtgtgtgtgcacctgtgtccctgaggaagcgtggag

SEQ ID NO: 529296 - DNA, 201 bp, Homo sapiens
atcccagcacttttggaggccaaggcgggaggatcacttgaggccgggagttcaagaccagcctggccaacatggtgaaaccccgtctctacaaaaatacmaaaaaatcagccgggcttggtggcgggtgcctgtaatcccagatactctggagactgaggcagaggaattgcttgaacccgggaggtggaggttgcagtg

SEQ ID NO: 529297 - DNA, 201 bp, Homo sapiens
tgcagcattctgtgtctggctgactctgccgggagctgaaacccaggactccaggggtgagtctgctgggaagcagaaagcacagtccacagccagagccwggggagggtcctggacccccgcccagcccccttcagcccagggaaagagaggcctcgcgcacgagaaactcagcgccctgccccatctcccccagtgccc

SEQ ID NO: 529298 - DNA, 201 bp, Homo sapiens
ttcaccctctccttcctcttgcagatgtggacgaatgtcagcagaacccaaggctctgtaaaagctacggcacctgcgtcaacacccttggcagctatacstgccagtgcctgcctggcttcaagttcatacctgaggatccgaaggtctgcacaggtagaggccccaggaagacgccgtgaggctggacgggagctgggg

SEQ ID NO: 529299 - DNA, 201 bp, Homo sapiens
tgtggacgaatgtcagcagaacccaaggctctgtaaaagctacggcacctgcgtcaacacccttggcagctatacctgccagtgcctgcctggcttcaagytcatacctgaggatccgaaggtctgcacaggtagaggccccaggaagacgccgtgaggctggacgggagctggggatggagctgaggcacgtcctccaaa

SEQ ID NO: 529300 - DNA, 201 bp, Homo sapiens
gacgaatgtcagcagaacccaaggctctgtaaaagctacggcacctgcgtcaacacccttggcagctatacctgccagtgcctgcctggcttcaagttcawacctgaggatccgaaggtctgcacaggtagaggccccaggaagacgccgtgaggctggacgggagctggggatggagctgaggcacgtcctccaaagcag

SEQ ID NO: 529301 - DNA, 201 bp, Homo sapiens
ttcataacctgctcatctgcacggggcccacctgctgtgcccaggcctctccacgcttccataacccagcgtccaccactccaaggggggcactaatgccrggaggaatgagctgggggcacagacaggagacaggaccctctccaggctgggacaggacctgacccccttcttcctgtcctcagatgtggacgagtgcag

SEQ ID NO: 529302 - DNA, 201 bp, Homo sapiens
cagagccaggggagggtcctggacccccgcccagcccccttcagcccagggaaagagaggcctcgcgcacgagaaactcagcgccctgccccatctccccsagtgccccctttttgtgtattcccttacccctcaccttctgaccgtgctccctgctcttgcaggctgtgcccggtggtgccctcagaactcctcgtgtgt

SEQ ID NO: 529303 - DNA, 201 bp, Homo sapiens
tgcagcgcccctgggtctgtgtttttattgcactttcctgctggcttccagctgcaccgccagttccggggagggccctgggccagcggctgtccgccccmcctccttcataaagtcctggcctcgggacagcctgcacagctgcctagcctgtggagacgggacagccctgtcccactcactctttcccctgccgctcct

SEQ ID NO: 529304 - DNA, 201 bp, Homo sapiens
ctgggaggggttagccccgcccactcccggggctcagtcgggtaggcgggccctggaggcatgaggccccgcccctgtccgggatctggccccgcccacckgggggtcgggttgtctctttaaagggcgctggctttggagctgcctggccacaccccgagtgcccgctcgcttctgagcgttgttgggggtgggccctgg

SEQ ID NO: 529305 - DNA, 201 bp, Homo sapiens
gaggggctcctggcgtcatcgtggtggactggctgagcctgagctgggtcatcttgggagggaggatagagcatgggaggaggacaacgggagtaggcagmgagtgtgtctgttccccaggccccgccgtggcgggcatcctctccatccagaacatgacgacattgctggccaatgcctccttgaacctgcattccaaga

SEQ ID NO: 529306 - DNA, 201 bp, Homo sapiens
ggggtgagtctgctgggaagcagaaagcacagtccacagccagagccaggggagggtcctggacccccgcccagcccccttcagcccagggaaagagaggsctcgcgcacgagaaactcagcgccctgccccatctcccccagtgccccctttttgtgtattcccttacccctcaccttctgaccgtgctccctgctcttg

SEQ ID NO: 529307 - DNA, 201 bp, Homo sapiens
aagcacagtccacagccagagccaggggagggtcctggacccccgcccagcccccttcagcccagggaaagagaggcctcgcgcacgagaaactcagcgcyctgccccatctcccccagtgccccctttttgtgtattcccttacccctcaccttctgaccgtgctccctgctcttgcaggctgtgcccggtggtgccctc

SEQ ID NO: 529308 - DNA, 201 bp, Homo sapiens
ggcgggtggatcacgaggtcaggagatcaagaccatcctggctaacacagtgaaaccccgtctctactaaaaacacaagaaattagccaggcatggtggcyggcatctgtagtcccagctactctggaggctgagtcaggagaatggcgtgaacccgggaggcggaggttgcagtgagccgatattgcgccactacactcc

SEQ ID NO: 529309 - DNA, 201 bp, Homo sapiens
ctgagtcaggagaatggcgtgaacccgggaggcggaggttgcagtgagccgatattgcgccactacactccagcctgggcaacagagcgagactccatctaaaaaaaaaaaaaaaaatcacttaaaagctcctggcttgcagaatgcactctatcagcaatggctaatggggattttattgtaattctgatctgatgcgcc

SEQ ID NO: 529310 - DNA, 201 bp, Homo sapiens
atggcgtgaacccgggaggcggaggttgcagtgagccgatattgcgccactacactccagcctgggcaacagagcgagactccatctaaaaaaaaaaaaaraaatcacttaaaagctcctggcttgcagaatgcactctatcagcaatggctaatggggattttattgtaattctgatctgatgcgcccccaggatgggta

SEQ ID NO: 529311 - DNA, 201 bp, Homo sapiens
gtgtgggcagcgtgatgtggaccccacaaatggattcagagggctgggtgccgtgactcatgcctggaatcccagcactttgggaggccaaggtggaaggwtcacttgaggtcgggaattcgagagcagcctgaccaacatggtgcaaccctgtctgtactaaaaatacaaaaattagccgggcgcagtggcacgcacctg

SEQ ID NO: 529312 - DNA, 201 bp, Homo sapiens
ctgtgtctggctgactctgccgggagctgaaacccaggactccaggggtgagtctgctgggaagcagaaagcacagtccacagccagagccaggggagggycctggacccccgcccagcccccttcagcccagggaaagagaggcctcgcgcacgagaaactcagcgccctgccccatctcccccagtgccccctttttgt

SEQ ID NO: 529313 - DNA, 201 bp, Homo sapiens
ccctgtctgtactaaaaatacaaaaattagccgggcgcagtggcacgcacctgtaatcccagctactcaggaggctgaggcaggggaatcgcttgaacccrggaggcagaggtcgcagtgagctgagatcacatcattgcactccagcctgggcaacagagagagacgctgtctccaaaaaaaaaaaaaaaaacaaaaacg

SEQ ID NO: 529314 - DNA, 201 bp, Homo sapiens
ctgatgctccagcgattctgtcacccgccaccccctagaatgtcatcaaattggtggatgaactgatggaagctcctggagacgtagaggccctggcgccwcctgtccggcacctcatagccacccagctgctctcaaaccttgaagatatcatgaggatcctggccaagagcctgcctaaaggccccttcacctacattt

SEQ ID NO: 529315 - DNA, 201 bp, Homo sapiens
atcgcttgaacccgggaggcagaggtcgcagtgagctgagatcacatcattgcactccagcctgggcaacagagagagacgctgtctccaaaaaaaaaaamaaaaacaaaaacgcactcagagggttggatgaaggaggcggctccagcctggactagccggcaagagacagcatcactggggaccatcgtcccaggcccg

SEQ ID NO: 529316 - DNA, 201 bp, Homo sapiens
tggaagcccagacacggaatcccgaataaccaaaaggacactgtctgtgaaggtatgacctggccctagaagctccccacccccagcacacacactgacamgctcccgcctaatgagccgcttgtcttgttccctacagatatgactttctccacctggaccccgccccctggagtccacagccaggtgagtggcccccac

SEQ ID NO: 529317 - DNA, 201 bp, Homo sapiens
cccagacacggaatcccgaataaccaaaaggacactgtctgtgaaggtatgacctggccctagaagctccccacccccagcacacacactgacacgctcckgcctaatgagccgcttgtcttgttccctacagatatgactttctccacctggaccccgccccctggagtccacagccaggtgagtggcccccacagggac

SEQ ID NO: 529318 - DNA, 201 bp, Homo sapiens
agcagaacccaaggctctgtaaaagctacggcacctgcgtcaacacccttggcagctatacctgccagtgcctgcctggcttcaagttcatacctgaggayccgaaggtctgcacaggtagaggccccaggaagacgccgtgaggctggacgggagctggggatggagctgaggcacgtcctccaaagcagccgaggagga

SEQ ID NO: 529319 - DNA, 201 bp, Homo sapiens
cccaaggctctgtaaaagctacggcacctgcgtcaacacccttggcagctatacctgccagtgcctgcctggcttcaagttcatacctgaggatccgaagstctgcacaggtagaggccccaggaagacgccgtgaggctggacgggagctggggatggagctgaggcacgtcctccaaagcagccgaggaggagggggaa

SEQ ID NO: 529320 - DNA, 201 bp, Homo sapiens
ggcagctatacctgccagtgcctgcctggcttcaagttcatacctgaggatccgaaggtctgcacaggtagaggccccaggaagacgccgtgaggctggaygggagctggggatggagctgaggcacgtcctccaaagcagccgaggaggagggggaagatccgcaggttcccacaaggtcaaggacctgctaagcccctg

SEQ ID NO: 529321 - DNA, 201 bp, Homo sapiens
aatcccgaataaccaaaaggacactgtctgtgaaggtatgacctggccctagaagctccccacccccagcacacacactgacacgctcccgcctaatgagmcgcttgtcttgttccctacagatatgactttctccacctggaccccgccccctggagtccacagccaggtgagtggcccccacagggacgaggcggcggg

SEQ ID NO: 529322 - DNA, 201 bp, Homo sapiens
tggaaacaaggtctggctctgttgcccattctggagggctgtgacatgatcatggctcgctgcagcctcaatctcccaggctcaagtgaccctcccacctsagcctcccaagtagctgggaccaaaggcatataccaccatgcctggcttatttatttatttaatatatttatagatgggggtcttgctatgttgcccagg

SEQ ID NO: 529323 - DNA, 201 bp, Homo sapiens
gtccgggcagccctagcctgtcccacatcatcccgcactctccccacccctgctattgccctgcatcgcgggggcactggcttagggaggggtcttggtcyatgcccatgaagctgggctctcagagctagtgtggatgggagagcagcatcctgctagggccaccaggatgctgagaatttggccagcgagcggccgttc

SEQ ID NO: 529324 - DNA, 201 bp, Homo sapiens
ggcctgagccaccaccctcaccataggatgcctctgtgtggattggaaaagggaggagacagtggtgccttccagatgcttccgtgccaggaaacatggcrgaccctcagccctgaaagctgctcacagctacgggcatccttcaccctctccttcctcttgcagatgtggacgaatgtcagcagaacccaaggctctgta

SEQ ID NO: 529325 - DNA, 201 bp, Homo sapiens
cccccactgttcaccccagcctggtgcccactgtccgggcagccctagcctgtcccacatcatcccgcactctccccacccctgctattgccctgcatcgygggggcactggcttagggaggggtcttggtccatgcccatgaagctgggctctcagagctagtgtggatgggagagcagcatcctgctagggccaccagg

SEQ ID NO: 529326 - DNA, 201 bp, Homo sapiens
atcctctcctgtagtcagtcctggtctggaccactcaaggacagagatggaagcttgaaccccattcagcagggcccacaggtctctgtccctggtggaakgacaagggatgagaggacagatacatctgccacccctcacccatcggcacctgtgccctctctagccacaggcccccgctcacggccagttctgcttaga

SEQ ID NO: 529327 - DNA, 201 bp, Homo sapiens
tggtctgatgctccagcgattctgtcacccgccaccccctagaatgtcatcaaattggtggatgaactgatggaagctcctggagacgtagaggccctggygccacctgtccggcacctcatagccacccagctgctctcaaaccttgaagatatcatgaggatcctggccaagagcctgcctaaaggccccttcacctac

SEQ ID NO: 529328 - DNA, 201 bp, Homo sapiens
gagaagatgcctcccgaccacctttctggccgtttagccctcatccatttccccatccaaggctccaccctaacccaccctggtaattcctgggcctgaasgcaccgtcaatgaccaaagcttgggaggatgctgtggccaggtgtgggcagcgtgatgtggaccccacaaatggattcagagggctgggtgccgtgactc

SEQ ID NO: 529329 - DNA, 201 bp, Homo sapiens
atgcagcgcccctgggtctgtgtttttattgcactttcctgctggcttccagctgcaccgccagttccggggagggccctgggccagcggctgtccgcccyccctccttcataaagtcctggcctcgggacagcctgcacagctgcctagcctgtggagacgggacagccctgtcccactcactctttcccctgccgctcc

SEQ ID NO: 529330 - DNA, 201 bp, Homo sapiens
ggcatgtcccctgcatttggttctcaggaaggccccaccctggcctttgcccggaatccttaggctgggacacagatggctgggacaccccagcttggagytgcccaggaaggcagaggagaaggggaggacttggctgcttccagccacatctggacaacagaaggcctgagccaccaccctcaccataggatgcctctg

SEQ ID NO: 529331 - DNA, 201 bp, Homo sapiens
caaagtccaggacctgggcagagactccaagacaagctcagccgaggtcaccatccaggtaagggcaggacgctgggggaccccaggacagtgtagaatcrgctagcggaggcttccatgtggccagagagagtgcccaacccaagcaggggcctctagtcagagacacacatgcgcataacatacacacaccacatacag

SEQ ID NO: 529332 - DNA, 201 bp, Homo sapiens
ggaatgagctgggggcacagacaggagacaggaccctctccaggctgggacaggacctgacccccttcttcctgtcctcagatgtggacgagtgcagctcygggcagcatcagtgtgacagctccaccgtctgcttcaacaccgtgggttcatacagctgccgctgccgcccaggctggaagcccagacacggaatcccga

SEQ ID NO: 529333 - DNA, 201 bp, Homo sapiens
tgggccagcggctgtccgccccccctccttcataaagtcctggcctcgggacagcctgcacagctgcctagcctgtggagacgggacagccctgtcccackcactctttcccctgccgctcctgccggcagctccaaccatgggaggccgcgtctttctcggtaagtactttggggccccgctgggaggggcgaggaagct

SEQ ID NO: 529334 - DNA, 201 bp, Homo sapiens
ccttgtgcctgtgggtctccagtgtgtcccctggtagggggtgacatccaggtccttcaggcaacccctgtggtctgatgctccagcgattctgtcacccrccaccccctagaatgtcatcaaattggtggatgaactgatggaagctcctggagacgtagaggccctggcgccacctgtccggcacctcatagccaccca

SEQ ID NO: 529335 - DNA, 201 bp, Homo sapiens
ccttgcttggagaagatgcctcccgaccacctttctggccgtttagccctcatccatttccccatccaaggctccaccctaacccaccctggtaattcctsggcctgaaggcaccgtcaatgaccaaagcttgggaggatgctgtggccaggtgtgggcagcgtgatgtggaccccacaaatggattcagagggctgggtg

SEQ ID NO: 529336 - DNA, 201 bp, Homo sapiens
attacttacaggcaagagccatcatcatccctggccaccttctaatgcactatctacattacttattcgttaggtttatgtcataatctgcctctcccacytttttttttttttttttttttttttttgagatggagtttcactcttgtcatccaggctggagtgcagtggctcattctcggctcagtgcaacctccacct

SEQ ID NO: 529337 - DNA, 201 bp, Homo sapiens
gtttaaatttctacaaagagactggggatggggatgtggagcttcctgtccatccctcacctcagcactgttcactgtgtccaaatctaagatgccagccrgagaactaagatcaagtgtggtcttcaggaatggcttgctccagctgcagcatagcctgtgcagtgcaacttaagattttttccaaaagatactaagcag

SEQ ID NO: 529338 - DNA, 201 bp, Homo sapiens
ctggcctgccctgccccaaccctgggccccacctggtacctggggtccctaatcacaactgcccctctcccctcagagctgaccctgatgatccaggagcrgggggacaagaacgtcactatgggtcagagcagcgcacgcatgaagctgaattgggctgtggcagctggagccgaggatccaggtagcagcggtggtctg

SEQ ID NO: 529339 - DNA, 201 bp, Homo sapiens
caggagcggggggacaagaacgtcactatgggtcagagcagcgcacgcatgaagctgaattgggctgtggcagctggagccgaggatccaggtagcagcgrtggtctggagggggagcccgtgggagagagatggaggtgctgggatggggccagggtgaggttcagaatagaacaactgactgggcgcggtggctcacgc

SEQ ID NO: 529340 - DNA, 201 bp, Homo sapiens
accctcaccataggatgcctctgtgtggattggaaaagggaggagacagtggtgccttccagatgcttccgtgccaggaaacatggcggaccctcagcccygaaagctgctcacagctacgggcatccttcaccctctccttcctcttgcagatgtggacgaatgtcagcagaacccaaggctctgtaaaagctacggcac

SEQ ID NO: 529341 - DNA, 201 bp, Homo sapiens
cccatctgcccacaggacgtgatgcctgggccacggcaggagctgctctgtgccttctggaagagtgacagcgacaggggagggcactgggccaccgaggkctgccaggtgctgggcagcaagaacggcagcaccacctgccaatgcagccacctgagcagctttgcgatccttatggctcattatgacgtggaggtaagt

SEQ ID NO: 529342 - DNA, 201 bp, Homo sapiens
gcaccgccagttccggggagggccctgggccagcggctgtccgccccccctccttcataaagtcctggcctcgggacagcctgcacagctgcctagcctgyggagacgggacagccctgtcccactcactctttcccctgccgctcctgccggcagctccaaccatgggaggccgcgtctttctcggtaagtactttgggg

SEQ ID NO: 529343 - DNA, 201 bp, Homo sapiens
tccagctgcaccgccagttccggggagggccctgggccagcggctgtccgccccccctccttcataaagtcctggcctcgggacagcctgcacagctgccyagcctgtggagacgggacagccctgtcccactcactctttcccctgccgctcctgccggcagctccaaccatgggaggccgcgtctttctcggtaagtac

SEQ ID NO: 529344 - DNA, 201 bp, Homo sapiens
gcgcccacacaaaccaagcagaatgagcgctggaggcacctggctgtgccaggcgttcgttcattcttctgaggctagatgagaaaagagcaagggtcctscggaaggagctggggtactgaggggggaggctcagggggaccccaggcaacagctgatgactcactgggaggaaggcgtttcaccatattcataacctgc

SEQ ID NO: 529345 - DNA, 201 bp, Homo sapiens
gaacctgcattccaagaagcaagccgaactggaggagatatatgaaagcagcatccgtggtgtccaactcagacgcctctctgccgtcaactccatctttytgagccacaacaacaccaaggaactcaactcccccatccttttcgccttctcccaccttgagtcctccgatggggaggcgggaagagaccctcctgccaa

SEQ ID NO: 529346 - DNA, 201 bp, Homo sapiens
cagggtcctcctcagggtccccaacccccaccagggtccccagcctccccacccaccatccccactcctgcagctttctagccagaggcttcagcccgtaragtccagctgtctggattctggtcccagctctgtgaccttgggcaaattacttaatctctccatgcctcagttccctcatctgtaaaatgaagatcatag

SEQ ID NO: 529347 - DNA, 201 bp, Homo sapiens
tgtcctggacggcgggaagtcccaggtctcctaccgcacacaggatggcaccgcgcagggcaaccgggtgaggctgcgccacagggtcgagggtgcagccyggggggctgcgtgggcaccgcattgggttcccaagacaaagcagcacatggcagctgcttgagtccctggatactggccgtgcccctggctggcctccca

SEQ ID NO: 529348 - DNA, 201 bp, Homo sapiens
ccaggcaagaccacaccattgtggacacagtgctgatggcgccccgctcggccaagccggccctgctgaagcttacagagaagcaggtggaacagagggcyttccacgacctcaaggtggcccccggctactacaccctcactgcagaccagggtaggagggcgggtccgctgtgccactgcctcgcacctcccgcctgtg

SEQ ID NO: 529349 - DNA, 201 bp, Homo sapiens
ctgaagaccctgcacttcttgctgtcttacatcctggcccctgaaggggagaagacaggcaggagggacagggcagcaggtgccagcctgacccctccgcygcctgaaccttccaccctcgacccaggcaagaccacaccattgtggacacagtgctgatggcgccccgctcggccaagccggccctgctgaagcttacag

SEQ ID NO: 529350 - DNA, 201 bp, Homo sapiens
ccatcatcatcagggacccaggtaggcagagcctgggggtcggcttaagcaggaggagagggaagactggggggtctctcaactaggtctgtcagacttascaaatccaaacacaggacgcccaggtaaatctgaatttcaggtaaacaacatacacgttggtaggataagtatgtcccatgcaatatttggaacatactt

SEQ ID NO: 529351 - DNA, 201 bp, Homo sapiens
gatggactttgccttcccgggcagcaccaactccctgcacaggatgaccacgaccagtgctgctgcctatggcacccacctgagcccacacgtgccccacygcgtgctaagcacatcctccaccctcacacgggactacaactcactgacccgctcagaacactcacactcgaccacactgccgagggactactccaccct

SEQ ID NO: 529352 - DNA, 201 bp, Homo sapiens
tgtgagccaccacgcccggctgacagttttatttcttttttcttttctttttttttttttttttttgagacggagtcttgctctgtcaccaggctggagtkcagtggcgtgatctcggctcactgcaacctctgcctcccgggttcaagtgattctcctgcctcagcctcctgagtaactgggactacaggcatgcgccac

SEQ ID NO: 529353 - DNA, 201 bp, Homo sapiens
ggcgcggtggcttacgcctgtaatttcagcactttgggaggccgaggtgggcggatcacaaggtcaggagatcgagaccatcctggctaacatggtgaaaycccgtctactaaaaatacaaaaaattagccgggcgtagtggcgggtgcctgtagtcccagctactcaggaggctgaggcaggagaatggcgtgaacccaa

SEQ ID NO: 529354 - DNA, 201 bp, Homo sapiens
ccggacactgaccaccagcggaacccttagcacccacatggaccaacagttcttccaaacttgaccgcaccctgccccacccccgccacgtcccactaggsgtcctcccgactcctctcccggagcctcctcagctactccatccttgcacccctgggggcccagcccacccgcatgcacagagcaggggctaggtgtctc

SEQ ID NO: 529355 - DNA, 201 bp, Homo sapiens
cattcgttcctttgaccatttcttcaacaaatgctaatgtgaagtgcttgctatgaagtggcccctggactagagcaggcaaaagcaaatcaacccagtcyctgccctcatataggtgactgtccagccccccacccggtaccagcgatagcaggtacccatctccatccgctccagtgtccaagaccctgatcttgggtg

SEQ ID NO: 529356 - DNA, 201 bp, Homo sapiens
agaccaagttccggtgagtcccggggtgcccgggttgggtgggggagccgctcctaccgggactccaggagccgaagcccccaggccgatcaggcctccayttcagggctatctagctcacagcgccctctttgtccccacaggcagcagcccaatgccgggaaaaagtgagtagaagactcgtgggtgagagggccccca

SEQ ID NO: 529357 - DNA, 201 bp, Homo sapiens
tacagcagcatcaccaccacccacaccagcgccaccgagcccttcctagtgggtgagcactgagggctaggggatcccggctctcctgggacagggagctrgcagagggagaagggcagaccccaagccaggtcatctaatgcctcctcctccacagatgggctgaccctgggggcccagcacctggaggcaggcggctcc

SEQ ID NO: 529358 - DNA, 201 bp, Homo sapiens
atagctggtggaaatgaatctagggttggggcagccagggaatgggtgctgcccccagtgaccccctgtccttctggccagatgttcagggaccggcgctrcaacacccaggcggagctgctggccgcgggctgccagcgggagagcatcgtggtcatggagagcagcttccaaatcacagaggtgcctggtgtggggact

SEQ ID NO: 529359 - DNA, 201 bp, Homo sapiens
tttgagccactggagagccccgtggacctgtacatcctcatggacttctccaactccatgtccgatgatctggacaacctcaagaagatggggcagaaccygggtacggcagggccagagtggaggacagcagggcaggagggggacaggtgggcgtctgcttgggaggccaggactcaggacagctgcacccacccagaa

SEQ ID NO: 529360 - DNA, 201 bp, Homo sapiens
agatgtggatgagttccggaataaactgcagggagagcggatctcaggcaacctggatgctcctgagggcggcttcgatgccatcctgcagacagctgtgkgcacggtgggcactgggaagggtgctgccagcctaggccaggggtgagcacttctgggcaagggcctgagctgccccctggcctgctctggtgccaggct

SEQ ID NO: 529361 - DNA, 201 bp, Homo sapiens
atggggcacagctggctcactggtgccccctcctaccccagggcatctgtaatggacgtggccactgtgagtgtggccgctgccactgccaccagcagtcrctctacacggacaccatctgcgagatcaactactcggcggtgaggctaagacctacgaggtgtgggcgtgggaacagggcaggcacagggcagggtgggc

SEQ ID NO: 529362 - DNA, 201 bp, Homo sapiens
cccgcgttccccgtcctacacgacgccgtgatgcgtgtcagcaggcagcctgctcagtgggcacgccccgccttgccttccccagagggacattggctggygcccggacagcacccacctgctggtcttctccaccgagtcagccttccactatgaggctgatggcgccaacgtgctggctggcatcatgagccgcaacga

SEQ ID NO: 529363 - DNA, 201 bp, Homo sapiens
aggcctcagtttccccatcctcaaagtgggaagaatcctagagctgttcagattcatggagatgcttagcctgagacctggccttctctcccgcagaagcytcacacctatttccctgtctcctcactgggggtgctgcaggaggactcgtccaacatcgtggagctgctggaggaggccttcaatgtgagggcagctcag

SEQ ID NO: 529364 - DNA, 201 bp, Homo sapiens
ccacagctctgctcccacaggccctccctgccaggtgggcagcctggactacaggcacagatgtagctctcatctcccttccttgtccctctctgcagacygaggacgctgctccatgggccagtgtgtgtgtgagcctggttggacaggcccaagctgtgactgtcccctcagcaatgccacctgcatcgacagcaatgg

SEQ ID NO: 529365 - DNA, 201 bp, Homo sapiens
ggagagggaagactggggggtctctcaactaggtctgtcagacttagcaaatccaaacacaggacgcccaggtaaatctgaatttcaggtaaacaacatasacgttggtaggataagtatgtcccatgcaatatttggaacatacttatccttttttttgcaaaatgggctgggtatactggctcacacctgtaatcccag

SEQ ID NO: 529366 - DNA, 201 bp, Homo sapiens
agagggaagactggggggtctctcaactaggtctgtcagacttagcaaatccaaacacaggacgcccaggtaaatctgaatttcaggtaaacaacatacamgttggtaggataagtatgtcccatgcaatatttggaacatacttatccttttttttgcaaaatgggctgggtatactggctcacacctgtaatcccagca

SEQ ID NO: 529367 - DNA, 201 bp, Homo sapiens
ggagaggatagtggacaggagcaggtgtgcccagaggggtccccaggggttgggatgggggccaggggagctctgagcctgtgggtgggtgggcatggcctgtgtgtgtgtgtgtgtgtgtgtgtgtgtgtgtgtgtgtgtccctgtgggggggaaactgcctgtgctgcagtgtgatggcattcagggtggcagtcacac

SEQ ID NO: 529368 - DNA, 201 bp, Homo sapiens
cacgttggtaggataagtatgtcccatgcaatatttggaacatacttatccttttttttgcaaaatgggctgggtatactggctcacacctgtaatcccarcattttgggaggccaaggtgggaggatcacttgagcccaggagttctagaccagcctgggcaacatagtgagacctcgtctctacaaaaaataaacaaat

SEQ ID NO: 529369 - DNA, 201 bp, Homo sapiens
cagggaatgggtgctgcccccagtgaccccctgtccttctggccagatgttcagggaccggcgctgcaacacccaggcggagctgctggccgcgggctgcyagcgggagagcatcgtggtcatggagagcagcttccaaatcacagaggtgcctggtgtggggactggggtgggggctccccatgctcagcctggctattt

SEQ ID NO: 529370 - DNA, 201 bp, Homo sapiens
ggcctcctgtccccagactctcgcctgactgctggtgtgcccgacacgcccacccgcctggtgttctctgccctggggcccacatctctcagagtgagctrgcaggagccgcggtgcgagcggccgctgcagggctacagtgtggagtaccagctgctgaacggcggtgaggcatggtggctgccaggctgcggggtgcag

SEQ ID NO: 529371 - DNA, 201 bp, Homo sapiens
cctctgactggcctatctgcccaccccaggacccttcccgcagctgggcagccgtgccgggctcttccagcacccgctgcaaagcgagtacagcagcatcwccaccacccacaccagcgccaccgagcccttcctagtgggtgagcactgagggctaggggatcccggctctcctgggacagggagctagcagagggagaa

SEQ ID NO: 529372 - DNA, 201 bp, Homo sapiens
cgagactctgtctcaaaataaataaataaataacataaggagggaatccccatctctccaggtgaaggtgcaggtgggaaagtgcttgcctttgctgagcrcctccccattcatgtgcccacatctgtccccccagcaaaccgctgcaagaaggccccagtgaagagctgcacggagtgtgtccgtgtggataaggactgc

SEQ ID NO: 529373 - DNA, 201 bp, Homo sapiens
ggatcacgaggtcaggagatcgagaccatcctggctaacacggtgaaaccccgtctctactaaaaatacaaaagattagccaggcgtgatggtgggcaccrgtagtcccagctactcgggaggctgaggcaggagaatggcgtgaacccgggaggcggagcttgcaatgagccaggattgcgccactgcactccagcctgg

SEQ ID NO: 529374 - DNA, 201 bp, Homo sapiens
agccctgcaaggcctggccccagtgagacacatagggtacctcagctgtgtcaggaacccacccaagtcccttgagcgctaaagcccccatccagcctgaragggtctcccaccccattctccaccccacttctttgcctcccctcttctgaggtctcacccacctccctgggcctctctcctggtcattctctgctaggt

SEQ ID NO: 529375 - DNA, 201 bp, Homo sapiens
gggtgcagccctgcaaggcctggccccagtgagacacatagggtacctcagctgtgtcaggaacccacccaagtcccttgagcgctaaagcccccatccascctgagagggtctcccaccccattctccaccccacttctttgcctcccctcttctgaggtctcacccacctccctgggcctctctcctggtcattctctg

SEQ ID NO: 529376 - DNA, 201 bp, Homo sapiens
cataccgcacaccagcctgggtgataaagcgagacttggtctcaaaaaaaaaaaaaaaattctccttctagttgaaacgagccaggggcactggggtctgyggcgtcttccccctgtgacactctctctccctcccacctctgcccaggctgaaggagccctggcccaacagtgacccccccttctccttcaagaacgtca

SEQ ID NO: 529377 - DNA, 201 bp, Homo sapiens
accgcacaccagcctgggtgataaagcgagacttggtctcaaaaaaaaaaaaaaaattctccttctagttgaaacgagccaggggcactggggtctgcggygtcttccccctgtgacactctctctccctcccacctctgcccaggctgaaggagccctggcccaacagtgacccccccttctccttcaagaacgtcatca

SEQ ID NO: 529378 - DNA, 201 bp, Homo sapiens
gcacaccagcctgggtgataaagcgagacttggtctcaaaaaaaaaaaaaaaattctccttctagttgaaacgagccaggggcactggggtctgcggcgtsttccccctgtgacactctctctccctcccacctctgcccaggctgaaggagccctggcccaacagtgacccccccttctccttcaagaacgtcatcagcc

SEQ ID NO: 529379 - DNA, 201 bp, Homo sapiens
ccagggccctgtctctggcggctgggcgcccttggtcacattgttggtgctcagagcctcagttcccacagctgtgcagcgagaggaagctgacggcaccraccatggctgtggaggcctcatgtgtcaattgttgctgttctgcaggaggaagaggatggcagggccacgccccagcccatgggccaggctgctcctggc

SEQ ID NO: 529380 - DNA, 201 bp, Homo sapiens
aggctgcagagtggaaggtaggtaggatggaggcagagatggagggaaggagattccaggaaagtgaggaagagatgacttctaccccaggctagcggcaycctggctcccacagctctgctcccacaggccctccctgccaggtgggcagcctggactacaggcacagatgtagctctcatctcccttccttgtccctct

SEQ ID NO: 529381 - DNA, 201 bp, Homo sapiens
tcctctctccattgtacaaacgggaaactgagtctcggagaggttaagtaaagcaagggagacctcacagctggtgacagagcccagacttcccccaggtytctggcgggtccgggggtctctcctccccagctgtgccgaggctgcactcgctcatctggaaaggcttcagccgcgcaagggtttcacctgccgcggcct

SEQ ID NO: 529382 - DNA, 201 bp, Homo sapiens
ggtaggatggaggcagagatggagggaaggagattccaggaaagtgaggaagagatgacttctaccccaggctagcggcatcctggctcccacagctctgytcccacaggccctccctgccaggtgggcagcctggactacaggcacagatgtagctctcatctcccttccttgtccctctctgcagaccgaggacgctgc

SEQ ID NO: 529383 - DNA, 201 bp, Homo sapiens
tcctagcatggttgctggagggatgctctgtggtgcctgtcatgcagggggctgaccacctccatctcaccccctcccaccgcctttccttagtgccctaygggctgtccttgcgcctggcccgcctttgcaccgagaacctgctgaagcctgacactcgggagtgcgcccagctgcgccaggaggtggaggagaacgtaa

SEQ ID NO: 529384 - DNA, 201 bp, Homo sapiens
actgccctccgggctccttctggtggctcatccccctgctcctcctcctcctgccgctcctggccctgctactgctgctatgctggaagtactgtgcctgmtgcaaggtgagcacccagggtgcctcccaaggccccacatcccagggtccccaccccaacagggcccccaccctccaccagggtccccagtccccgcctg

SEQ ID NO: 529385 - DNA, 201 bp, Homo sapiens
ctatgaacctcatgcctcggtgtgcgtggcctgctggccaggcatcccctgatcctagcatggttgctggagggatgctctgtggtgcctgtcatgcaggsggctgaccacctccatctcaccccctcccaccgcctttccttagtgccctacgggctgtccttgcgcctggcccgcctttgcaccgagaacctgctgaag

SEQ ID NO: 529386 - DNA, 201 bp, Homo sapiens
catggggaatgaattcagtgcttcccaagtgaacctgaccacagaacctttacagagcacccggcaggatgagagttccacggcgcaaactttgggaaccytctgcccccatccccctctatgcccttgtgtgccatgcttacaccctgctaccacctggatattctggtgtctggggaggcactgtcacccctcttgacc

SEQ ID NO: 529387 - DNA, 201 bp, Homo sapiens
gcagtcgctctacacggacaccatctgcgagatcaactactcggcggtgaggctaagacctacgaggtgtgggcgtgggaacagggcaggcacagggcagkgtgggcaggaggggctaagcctgatgccacaggagctggccaagggcaagaggtttggggagcgggggtctggcagaggcccacccaacacagtgcctgt

SEQ ID NO: 529388 - DNA, 201 bp, Homo sapiens
taggagggcgggtccgctgtgccactgcctcgcacctcccgcctgtgtggccctgtgacccacctctgaccacctccgaacccccacccagacgcccgggrcatggtggagttccaggagggcgtggagctggtggacgtacgggtgcccctctttatccggcctgaggatgacgacgagaagcagctgctggtggaggcc

SEQ ID NO: 529389 - DNA, 201 bp, Homo sapiens
gatattctggtgtctggggaggcactgtcacccctcttgaccattggcatggggcggggtggctggaagggcttacctgggccagggcagctgtctcaggyctcaccctcacccaccttgtctcctaggcctgcctggcacttctcccgtgctgcaaccgaggtatgggcctggcatcgcaggggcagcaggggctctgac

SEQ ID NO: 529390 - DNA, 201 bp, Homo sapiens
cctggctgccctgatgccagcatgcccagacctccctccctctgccactgacagcactcttcctgtattccccgctccctagtgcccagcgagccagggcrtctggccttcaatgtcgtctcctccacggtgacccagctgagctgggctgagccggctgagaccaacggtgagatcacagcctacgaggtctgctatggc

SEQ ID NO: 529391 - DNA, 201 bp, Homo sapiens
tctgactgctctttctctgagctggggtggagggaagctgaacctggaacggcagaggctggaggctctggggtcccacctgaagaggttgggctgtgcgrgtctagggaggggtgccgtgctgaggaccccatcctgcaggtcacatggtgggctttaaggaagaccactacatgctgcgggagaacctgatggcctctg

SEQ ID NO: 529392 - DNA, 201 bp, Homo sapiens
gctaggtgcagctcatcaaaggtaatggggaaggctgaggaccgtctggctggacctgaggaggcagcaggccagggggtggccagggtgtgccagcaccragtgtgccagtgccactgtctcagtccccaccttctgtccttctggcttgagtgggaagtcccaggtttgaaatcacagcttgtttctagctgtgctacc

SEQ ID NO: 529393 - DNA, 201 bp, Homo sapiens
cttctgaggtctcacccacctccctgggcctctctcctggtcattctctgctaggttttgcctaacaaggcccctttgggctgggatcctagggcctctgstggcctgagatgcctttgggggaacaaggaagtggcacttccctgggcaggcacattcaaagcagcatgaccaggatgcaggatgttgcctaaacatgag

SEQ ID NO: 529394 - DNA, 201 bp, Homo sapiens
gtacccaacctgtacccaaaccacagctagtcctgggtgggtgataactaggtctcgatggcagcttagggacgaggaggatcaggccaggggtgggagtracactgcactactgtgtgcccccacctgatccccccaggtgagctgcatcggctcaacatccccaaccctgcccagacctcggtggtggtggaagacctc

SEQ ID NO: 529395 - DNA, 201 bp, Homo sapiens
tgggagcggccacggaggcccaatggggatatcgtcggctacctggtgacctgtgagatggcccaaggaggaggtgctgcccaccccgggggcaggagtgrccaggggaggggtaaagagggggccgcagaggctgaaggcatcttccctgctcagggccagccaccgcattccgggtggatggagacagccccgagagcc

SEQ ID NO: 529396 - DNA, 201 bp, Homo sapiens
tgggaggcacctgacttgggcaggggcatgcacccagcaggggtacatggtcacgctgtggagacacgcagcctcccctcctcgagatcagatacgttttstggaccctgagttcctgggtgatgtccaggtcagggaagtgggggaggtaggtttctaggctctgatgctcctgagcaggggagcccccaccacacccgt

SEQ ID NO: 529397 - DNA, 201 bp, Homo sapiens
gccagttagttcctatcagccctcagcctcccaactgggagaaagcctgccaggaagatgggagaggagggagatactcagggtacagtgtggagatgggktggggagcaaatgttctcatgtggaatgttccctgagctgccaagggagaaaggggcagaccaactccctcccgcttctgttcctccagagaccctcctg

SEQ ID NO: 529398 - DNA, 201 bp, Homo sapiens
gcctacgaggtctgctatggcctggtcaacgatgacaaccgtaagaaccagatccttctttcctgcccacagggagaacagccatggaaggggaggggacmaagctggagggagctcttggtcactccctggacctgctgtgcagggcactcgaggccttcatcctggtcagcggataagcctgaggcatctttagggttt

SEQ ID NO: 529399 - DNA, 201 bp, Homo sapiens
ggtgaaggcgcgcaacggggccggctgggggcctgagcgggaggccatcatcaacctggccacccagcccaagaggcccatgtccagtgagtggtgggcasggaggtgaggggcagaccgggcaggggggcagggggcagcagccagggccctggctcactcccctgccctgcagtccccatcatccctgacatccctatc

SEQ ID NO: 529400 - DNA, 201 bp, Homo sapiens
ttgggaccaggctgggacctgggtgaccctctgaagcactctctctgccccaggacctattgggcccatgaagaaagtgctggttgacaaccctaagaacyggatgctgcttattgagaaccttcgggagtcccagccctaccgctacacggtgaaggcgcgcaacggggccggctgggggcctgagcgggaggccatcat

SEQ ID NO: 529401 - DNA, 201 bp, Homo sapiens
caccaccaggtctccagagacgcgggtgggcaggtctgagttgaatgcgctgggtagagcgccctgggtgttgaagtgggtctctggcgccccctggtggygaagggggatctgagtggttgcccggccccaacctgacccgttagatgaactggaccggagcttcacgagtcagatgttgtcatcacagccaccccctca

SEQ ID NO: 529402 - DNA, 201 bp, Homo sapiens
tacacacacgcatgcacacatgcacgcacacacgtgcacacacatgcatgcacacatgtacacagacatgcatgcgcacacgtacacacatgcatgcacaytccctgctcctctcactcttgttttgtcctgccctaggcctccctcccatctgggaacacgggaggagcaggcttccgctgtcctgggccctggggtccc

SEQ ID NO: 529403 - DNA, 201 bp, Homo sapiens
aaagcctgagcaggaggcacagaacccaggcggtgggacacagtctggcccaggaagggaccaagagtcttggtgggaggcacctgacttgggcaggggcmtgcacccagcaggggtacatggtcacgctgtggagacacgcagcctcccctcctcgagatcagatacgttttctggaccctgagttcctgggtgatgtcc

SEQ ID NO: 529404 - DNA, 201 bp, Homo sapiens
ggggagcccccaccacacccgttcctgtgcctggtgagagcacggctttgcaaggacttccactcttccccaggaggccctgccgtgggtgaggcagatcscagagtaggggccccctcaccagaccctgggtcctctggggcggaggggtgtggctggggtgccctgctgactggctgtgggtacagccgaggaggtggt

SEQ ID NO: 529405 - DNA, 201 bp, Homo sapiens
ccagttagttcctatcagccctcagcctcccaactgggagaaagcctgccaggaagatgggagaggagggagatactcagggtacagtgtggagatggggyggggagcaaatgttctcatgtggaatgttccctgagctgccaagggagaaaggggcagaccaactccctcccgcttctgttcctccagagaccctcctgg

SEQ ID NO: 529406 - DNA, 201 bp, Homo sapiens
accccaatgctaaggccgctgggtccaggaagatccatttcaactggctgcccccttctggcaagccaatggggtacagggtaaggcggggggctgagggycacgacaggtggatgggcggtctggcaccagcactcacagaagaggtgggccgtccgaggccagggccccctgagagagagcagacagtggaacctagca

SEQ ID NO: 529407 - DNA, 201 bp, Homo sapiens
ctggcaagccaatggggtacagggtaaggcggggggctgagggtcacgacaggtggatgggcggtctggcaccagcactcacagaagaggtgggccgtccvaggccagggccccctgagagagagcagacagtggaacctagcacaggtggtcagagggaaacccggtctgtgctgggaaagagggaagacccattcctga

SEQ ID NO: 529408 - DNA, 201 bp, Homo sapiens
tcgacgtgcccgcaggcactgccaccctcggccgccgcctggtaaacatcaccatcatcaaggagcaaggtgggtctgggtggggagagtggggaaggcaracgggggctcgggggcactggttcctcctgcttaagtggaattgcgacctggccacgtggcctgggctagtcacttaacctctgcaagccttggtttctc

SEQ ID NO: 529409 - DNA, 201 bp, Homo sapiens
cctgtagtcccagctagtcaggaggctgaggcaggagaatcacttgaacccagaaggcgcaggttgcagtgaaccgagatcgtgttaccgcactccagacwgggtgacagagccagactccgtctaaaaataaataaataaaaaggattattttatacattattttatctagcagcccgagatcagaggtgcctagcagaa

SEQ ID NO: 529410 - DNA, 201 bp, Homo sapiens
gccatcgacgtgcccgcaggcactgccaccctcggccgccgcctggtaaacatcaccatcatcaaggagcaaggtgggtctgggtggggagagtggggaargcagacgggggctcgggggcactggttcctcctgcttaagtggaattgcgacctggccacgtggcctgggctagtcacttaacctctgcaagccttggtt

SEQ ID NO: 529411 - DNA, 201 bp, Homo sapiens
aattttgtctgttagagggggtcctgctggtggcttgaaatagaccacgacagaaatgtttacaccacagaaattggcaaacgctacacgtcaagcaccasagaccagagccgttgttatttttttatttaattcaatgtatatgtagaaacatgctctcactctgtcgtcccggtgaaatgcagtgatgccatcgtggct

SEQ ID NO: 529412 - DNA, 201 bp, Homo sapiens
tttacagagcacccggcaggatgagagttccacggcgcaaactttgggaaccctctgcccccatccccctctatgcccttgtgtgccatgcttacaccctrctaccacctggatattctggtgtctggggaggcactgtcacccctcttgaccattggcatggggcggggtggctggaagggcttacctgggccagggcag

SEQ ID NO: 529413 - DNA, 201 bp, Homo sapiens
cagtgaaccgagatcgtgttaccgcactccagactgggtgacagagccagactccgtctaaaaataaataaataaaaaggattattttatacattattttrtctagcagcccgagatcagaggtgcctagcagaacagttatttctccagtcctggaagggaggcagggtgggcaacccctatgcgtgcccttgccttgtg

SEQ ID NO: 529414 - DNA, 201 bp, Homo sapiens
ttgagtccagccctggctctgccacttactcagcagagtcccttggaggactggtgacatatgtccacgccagtcatgctgacgctcagggctccgcaggyggcaattcagcagtggctggctttgccttgcttccccagcccctgggtgccatccaggggatgcacggccgtcctgctgtgtcaggggtggtgttgggac

SEQ ID NO: 529415 - DNA, 201 bp, Homo sapiens
agaagggtgagctggtggggccgggcgcagggagggggcgtgtggccagagctcggtggggaggacaggcaccacctccccctgcctcctcctctccagamtgccctccgggctccttctggtggctcatccccctgctcctcctcctcctgccgctcctggccctgctactgctgctatgctggaagtactgtgcctgct

SEQ ID NO: 529416 - DNA, 201 bp, Homo sapiens
aaagcaagggagacctcacagctggtgacagagcccagacttcccccaggtctctggcgggtccgggggtctctcctccccagctgtgccgaggctgcacycgctcatctggaaaggcttcagccgcgcaagggtttcacctgccgcggccttcccgctccggccgtgcgcatctacccccgcccccaacacacaccccgg

SEQ ID NO: 529417 - DNA, 201 bp, Homo sapiens
tggtgcacaagaagaagggtgagctggtggggccgggcgcagggagggggcgtgtggccagagctcggtggggaggacaggcaccacctccccctgcctcytcctctccagactgccctccgggctccttctggtggctcatccccctgctcctcctcctcctgccgctcctggccctgctactgctgctatgctggaagt

SEQ ID NO: 529418 - DNA, 201 bp, Homo sapiens
tggggagcgggggtctggcagaggcccacccaacacagtgcctgtctgccccgcctttccccgccaagatccacccgggcctctgcgaggacctacgctcstgcgtgcagtgccaggcgtggggcaccggcgagaagaaggggcgcacgtgtgaggaatgcaacttcaaggtcaagatggtggacgagcttaagagaggta

SEQ ID NO: 529419 - DNA, 201 bp, Homo sapiens
caagggcctgagctgccccctggcctgctctggtgccaggctcacaggccctgagggaaagcctgggagcctgcaaccccttcaccctgagacaagctcaractctgtgagtaggtctcagttacaatctgagttcagatgtgcctggagccacggtcccctggcctgagcagtcacagcctggtttcgtatcagctacca

SEQ ID NO: 529420 - DNA, 201 bp, Homo sapiens
gcgggaggggagagctgagccaagcacccagggaccctgaggaatgaagcaggactcctgtgccccatatcccttgtggggtttcccgaggcacacaggakagcggaagtgtccagtggccccggtcctgctcccccgacgcaccccaccatggtctctctcattccagcaaaaagaggtgcggtcagctcgctgcagctt

SEQ ID NO: 529421 - DNA, 201 bp, Homo sapiens
tatcgtcggctacctggtgacctgtgagatggcccaaggaggaggtgctgcccaccccgggggcaggagtggccaggggaggggtaaagagggggccgcakaggctgaaggcatcttccctgctcagggccagccaccgcattccgggtggatggagacagccccgagagccggctgaccgtgccgggcctcagcgagaac

SEQ ID NO: 529422 - DNA, 201 bp, Homo sapiens
gagcccttcctagtgggtgagcactgagggctaggggatcccggctctcctgggacagggagctagcagagggagaagggcagaccccaagccaggtcatytaatgcctcctcctccacagatgggctgaccctgggggcccagcacctggaggcaggcggctccctcacccggcatgtgacccaggagtttgtgagccgg

SEQ ID NO: 529423 - DNA, 201 bp, Homo sapiens
aggcctcaggcctgttcctgctctcctccagccctggggctgaaggctccatctctggtcctgcccgtgactggcctccctcctctgcctggcccttccargatgtctgctggacactttgttccagaaccacttttttttttcttgggacagagtcttgctctgccacccaggctggagtgcaatggcaccatcttggct

SEQ ID NO: 529424 - DNA, 201 bp, Homo sapiens
gcttccttatgtacagcgatgacgttctacgctctccatcgggcagccagaggcccagcgtctccgatgacactggtgagtggagacctgggacccacaasaggacagtgggggtcttgggtacagagtgagtccactgggtccagagagggcaaaggggccagcaactagaggacatggaggttaaggcagccttggaca

SEQ ID NO: 529425 - DNA, 201 bp, Homo sapiens
gagaggatagtggacaggagcaggtgtgcccagaggggtccccaggggttgggatgggggccaggggagctctgagcctgtgggtgggtgggcatggcctgtgtgtgtgtgtgtgtgtgtgtgtgtgtgtgtgtgtgtgtccctgtgggggggaaactgcctgtgctgcagtgtgatggcattcagggtggcagtcacaca

SEQ ID NO: 529426 - DNA, 201 bp, Homo sapiens
gcagatcacctgaggtcagaagttcaagaccagcctgggcaacatggcaaaaccccatctctactaaaaaatacaaaaattggctgggcgcggtggttcaygcctgtaatcctagcactttgggaggccaaggcgggtggatcacgaggtcaggagatcgagaccatcctggctaacacggtgaaaccccgtctctactaa

SEQ ID NO: 529427 - DNA, 201 bp, Homo sapiens
gaggcaggagaatcacttgaacccaggaggcagaggttgcagtgagccaagatcgtgcataccgcacaccagcctgggtgataaagcgagacttggtctcaaaaaaaaaaaaaaaattctccttctagttgaaacgagccaggggcactggggtctgcggcgtcttccccctgtgacactctctctccctcccacctctgc

SEQ ID NO: 529428 - DNA, 201 bp, Homo sapiens
tctgaaaatgacatacccatattactaggttagaaaacaaagagctagccaaggcgtggtggctcacacctgtaatcccagcactttgggaggccgaggcrgggggattgcttgaattcaggatttgagaccagcctgggaaacatggcaagaccctgtctctacagaaaacacaaaaattagctgggtgtgatgcacgcc

SEQ ID NO: 529429 - DNA, 201 bp, Homo sapiens
agatggacgcgggcatcatctgtgatgtgtgcacctgcgagctggtacaacgcagccccgcagggcgggaggggagagctgagccaagcacccagggaccmtgaggaatgaagcaggactcctgtgccccatatcccttgtggggtttcccgaggcacacaggagagcggaagtgtccagtggccccggtcctgctccccc

SEQ ID NO: 529430 - DNA, 201 bp, Homo sapiens
gcacccacctgagcccacacgtgccccaccgcgtgctaagcacatcctccaccctcacacgggactacaactcactgacccgctcagaacactcacactcraccacactgccgagggactactccaccctcacctccgtctcctcccacggtgagtgacctcagccaaccctgcctctcccactaacccttcctctcttcc

SEQ ID NO: 529431 - DNA, 201 bp, Homo sapiens
ggcagaattgcttgcacctagaaggcggaggttgccgtgagctgagatcgcgccactgcactccagcctgggcaagaagagcgaaactctgtcttgaaaawaaataaaataaaataggccaggcgcggtggcttacgcctgtaatttcagcactttgggaggccgaggtgggcggatcacaaggtcaggagatcgagacca

SEQ ID NO: 529432 - DNA, 201 bp, Homo sapiens
tgaacctcatgcctcggtgtgcgtggcctgctggccaggcatcccctgatcctagcatggttgctggagggatgctctgtggtgcctgtcatgcagggggstgaccacctccatctcaccccctcccaccgcctttccttagtgccctacgggctgtccttgcgcctggcccgcctttgcaccgagaacctgctgaagcct

SEQ ID NO: 529433 - DNA, 201 bp, Homo sapiens
gggagccacaacagggaagaaagggccctgcccgcccgcagctggcggtcactggggagaacagacaagagaaagcgtggaggatggcatagctcagagtrgggattgtaggcggcagaccacactccgtagtaacccccagtgttgtgggatattaatgtgcattacataggcaaggagttatgtgatcaaataggtttg

SEQ ID NO: 529434 - DNA, 201 bp, Homo sapiens
gcccacacgtgccccaccgcgtgctaagcacatcctccaccctcacacgggactacaactcactgacccgctcagaacactcacactcgaccacactgccsagggactactccaccctcacctccgtctcctcccacggtgagtgacctcagccaaccctgcctctcccactaacccttcctctcttccagctcctggagc

SEQ ID NO: 529435 - DNA, 201 bp, Homo sapiens
cgctgcagggctacagtgtggagtaccagctgctgaacggcggtgaggcatggtggctgccaggctgcggggtgcagccctgcaaggcctggccccagtgwgacacatagggtacctcagctgtgtcaggaacccacccaagtcccttgagcgctaaagcccccatccagcctgagagggtctcccaccccattctccacc

SEQ ID NO: 529436 - DNA, 201 bp, Homo sapiens
gggctaggggatcccggctctcctgggacagggagctagcagagggagaagggcagaccccaagccaggtcatctaatgcctcctcctccacagatgggcygaccctgggggcccagcacctggaggcaggcggctccctcacccggcatgtgacccaggagtttgtgagccggacactgaccaccagcggaacccttagc

SEQ ID NO: 529437 - DNA, 201 bp, Homo sapiens
ctgggtccccacctcaccagggtcccctctctgacagggtctccaccctccatcagggtcctcctcagggtccccaacccccaccagggtccccagcctcyccacccaccatccccactcctgcagctttctagccagaggcttcagcccgtagagtccagctgtctggattctggtcccagctctgtgaccttgggcaaa

SEQ ID NO: 529438 - DNA, 201 bp, Homo sapiens
agaagaaggggcgcacgtgtgaggaatgcaacttcaaggtcaagatggtggacgagcttaagagaggtaggggcaggggctgagggttggggttgctgagmgcctaggcagcgggcatccaacggggcaagggtgtcatcacctggacgggggcttgcagtctgggctaaggtcacacagtccggacaggaactccagagc

SEQ ID NO: 529439 - DNA, 201 bp, Homo sapiens
ggggagcaggagccacatgattggatttgttttgagataattactcaggctgcagagtggaaggtaggtaggatggaggcagagatggagggaaggagatwccaggaaagtgaggaagagatgacttctaccccaggctagcggcatcctggctcccacagctctgctcccacaggccctccctgccaggtgggcagcctg

SEQ ID NO: 529440 - DNA, 201 bp, Homo sapiens
tcctccttcaggagtggccagacctgcaactgctccaccggctctctgagtgacattcagccctgcctgcgggagggcgaggacaagccgtgctccggccrtggggagtgccagtgcgggcactgtgtgtgctacggcgaaggccgctacgagggtcagttctgcgagtatgacaacttccagtgtccccgcacttccggg

SEQ ID NO: 529441 - DNA, 201 bp, Homo sapiens
catctgtgatgtgtgcacctgcgagctggtacaacgcagccccgcagggcgggaggggagagctgagccaagcacccagggaccctgaggaatgaagcagractcctgtgccccatatcccttgtggggtttcccgaggcacacaggagagcggaagtgtccagtggccccggtcctgctcccccgacgcaccccaccatg

SEQ ID NO: 529442 - DNA, 201 bp, Homo sapiens
aaaaccttcccttccattctcaagggaagaatctcggtcagaccctactcaccactggggacttctgagaaggcccagggcaggcgggcagtggagccatytggccctgacaaggagggcaccccctgccacgaggctgtggggaagcttctgctcctcagagctgggctgcattcccagccaccctgcccttgctgtacg

SEQ ID NO: 529443 - DNA, 201 bp, Homo sapiens
gcaacatccatctgaaaccttccttctccgacggcctcaagatggacgcgggcatcatctgtgatgtgtgcacctgcgagctggtacaacgcagccccgcwgggcgggaggggagagctgagccaagcacccagggaccctgaggaatgaagcaggactcctgtgccccatatcccttgtggggtttcccgaggcacacag

SEQ ID NO: 529444 - DNA, 201 bp, Homo sapiens
ggagtttgtgagccggacactgaccaccagcggaacccttagcacccacatggaccaacagttcttccaaacttgaccgcaccctgccccacccccgccaygtcccactaggcgtcctcccgactcctctcccggagcctcctcagctactccatccttgcacccctgggggcccagcccacccgcatgcacagagcaggg

SEQ ID NO: 529445 - DNA, 201 bp, Homo sapiens
ccaccacgcatgtctaattttgtgtttttagtagagacggggtttctccatgttggtcaggctggtctggaactcccgacctcaggtgatccgcccgcctyggcctcccaaagtgctgggattacaggcgtgagccaccgcgcccggcccaagagggctctttcttccttcatgggccagggacctgcccagaccattcct

SEQ ID NO: 529446 - DNA, 201 bp, Homo sapiens
gctaaggtgggagaatcacttaaacccaggagttcaagaccagcctaggcaacgtggtgagaccatgtctatacatataatttaaacattagctgggcatrgtagtgcatacttgtggacccagctacttggaaggctgaggcaggaagatcacttgaggccaggaggttgaggctacagtgagccatgttcatgccactg

SEQ ID NO: 529447 - DNA, 201 bp, Homo sapiens
tggctggcgcccggacagcacccacctgctggtcttctccaccgagtcagccttccactatgaggctgatggcgccaacgtgctggctggcatcatgagcygcaacgatgaacggtgccacctggacaccacgggcacctacacccagtacaggacacaggactacccgtcggtgcccaccctggtgcgcctgctcgccaa

SEQ ID NO: 529448 - DNA, 201 bp, Homo sapiens
ggtgccacccagctcagccctccaatggctggcaggtatatggcattatgatctttcctctctccaaagatgctaaatttctgtgggttttttgttgttgktgctgctgttttttttttttttttttttttttgagacagagtttcactcttgtcgcccaggctggagtgcaatagcacaatcttggctcactgcaacctc

SEQ ID NO: 529449 - DNA, 201 bp, Homo sapiens
aattttgtatttttagtagagacagggtttcaccatgttggccaggctggtctcgaactcctgacctcaggtgatctgcccgcctcagcctcccaaagtayacatctgtaatcacacctgggattacaggtgtgagccactgagcccggcccaaagatgctaaatttctacctggaaggcctggagcttcctctgtattcc

SEQ ID NO: 529450 - DNA, 201 bp, Homo sapiens
agcaattctcctgcctcagcctcccaagaagctgggattacaggggcccaccaccaagcccagctaatttttgtatttttagtggaaatagagtttcaccrtgttggccaggctggtcttgaactcctgagctcaagtgatcctcccgcctcggcctcccaaagtgtgggattacaggtgtgagccaccacgcccggctga

SEQ ID NO: 529451 - DNA, 201 bp, Homo sapiens
cctgagctcaagtgatcctcccgcctcggcctcccaaagtgtgggattacaggtgtgagccaccacgcccggctgacagttttatttcttttttcttttctttttttttttttttttttgagacggagtcttgctctgtcaccaggctggagttcagtggcgtgatctcggctcactgcaacctctgcctcccgggttcaa

SEQ ID NO: 529452 - DNA, 201 bp, Homo sapiens
gctgaggcaggaggatcacgagtctgggagtttgaggctacagtgagctatgattatgccactgcactccagcctgggtgacagagtgagactcaaaaagaaaaaaaaaaagaaggtttaagaaacaagtttcttaaatttaagttacagtggctcacacttgtaaccccagcactttgggaggccaaggcgggtggatca

SEQ ID NO: 529453 - DNA, 201 bp, Homo sapiens
tggcccttccaggatgtctgctggacactttgttccagaaccacttttttttttcttgggacagagtcttgctctgccacccaggctggagtgcaatggcrccatcttggctcactgcaaccgctgcctcccaggttgaagtgattctcctgcctcagcctcccgagtagctgggattacaggcactcgccaccacgccca

SEQ ID NO: 529454 - DNA, 201 bp, Homo sapiens
cactttgttccagaaccacttttttttttcttgggacagagtcttgctctgccacccaggctggagtgcaatggcaccatcttggctcactgcaaccgctkcctcccaggttgaagtgattctcctgcctcagcctcccgagtagctgggattacaggcactcgccaccacgcccagctaatttttctatctttagtagag

SEQ ID NO: 529455 - DNA, 201 bp, Homo sapiens
caggaggttgaggctacagtgagccatgttcatgccactgtacttcagcctaggcaacagagtaagaccctgtctaaaaaaataataataattaatttttwaaaaatcaaacaaaaaaacaaagaaacaaaacctggctcagtgcagtagctcatgcatgtaatcccaacactgtgggagggcacagtgggaggatcactt

SEQ ID NO: 529456 - DNA, 201 bp, Homo sapiens
agatagcactttaaaagattattttgtacattgagaggccgaggcaggtggactgcttgaggtcaggagttcaagaccagcctggctaacatggtgaaacmgtttctactaaaaattagacaggcatggtggctcatgcctgtagtcccagctagtcaggaggctgaggcaggagaatcacttgaacccagaaggcgcagg

SEQ ID NO: 529457 - DNA, 201 bp, Homo sapiens
gcgcagccagatgtccccccaaggcctgcgggtccgtctgcggcccggtgaggagcggcattttgagctggaggtgtttgagccactggagagccccgtgkacctgtacatcctcatggacttctccaactccatgtccgatgatctggacaacctcaagaagatggggcagaacctgggtacggcagggccagagtggag

SEQ ID NO: 529458 - DNA, 201 bp, Homo sapiens
tgtcctgctccatctgtcatccagccaccatagcagccgccagctgtgcccactgcttcccctccattccatccacaggacccccgcctgcccacaggcgstaaccacctgccctaccatcagtgctgatgcctaactctgcctctgccctcccagggggcggggctggggctggggcaggagaggggccaggccagctga

SEQ ID NO: 529459 - DNA, 201 bp, Homo sapiens
caccatagcagccgccagctgtgcccactgcttcccctccattccatccacaggacccccgcctgcccacaggcgctaaccacctgccctaccatcagtgstgatgcctaactctgcctctgccctcccagggggcggggctggggctggggcaggagaggggccaggccagctgagcagttgagggggtggggctggcag

SEQ ID NO: 529460 - DNA, 201 bp, Homo sapiens
tcctttcacatccggcggggggaagtggtacgcctctgtgggggcagcggggtgggggataggcacagcgccccacaccgagtggaatcgtttaaaacagyggtcaagagcgtggcccctggagtcaggcaggcctgggtgcagatccctgggcctagccgctcggatgagcctaggttgctcctctgcttgttggtttcc

SEQ ID NO: 529461 - DNA, 201 bp, Homo sapiens
aggccttcggacagaggtcacctccaagatgttccagaagacgaggactgggtcctttcacatccggcggggggaagtggtacgcctctgtgggggcagcrgggtgggggataggcacagcgccccacaccgagtggaatcgtttaaaacagcggtcaagagcgtggcccctggagtcaggcaggcctgggtgcagatccc

SEQ ID NO: 529462 - DNA, 201 bp, Homo sapiens
gccatcctgcagacagctgtgtgcacggtgggcactgggaagggtgctgccagcctaggccaggggtgagcacttctgggcaagggcctgagctgcccccyggcctgctctggtgccaggctcacaggccctgagggaaagcctgggagcctgcaaccccttcaccctgagacaagctcagactctgtgagtaggtctcag

SEQ ID NO: 529463 - DNA, 201 bp, Homo sapiens
gcggcctggctttgccactcatgccgccagcatcaaccccacagagctgggtgagggcggggctgggcgccacagctctgggcagtgcccttcgggccctstgttccagatctgggatcacagcatgcctcttctctgggtgtggggtgcaggcacagggctcagccaccttttgccctgtgctgatggtgctatgaacct

SEQ ID NO: 529464 - DNA, 201 bp, Homo sapiens
ttgccactcatgccgccagcatcaaccccacagagctgggtgagggcggggctgggcgccacagctctgggcagtgcccttcgggccctctgttccagatstgggatcacagcatgcctcttctctgggtgtggggtgcaggcacagggctcagccaccttttgccctgtgctgatggtgctatgaacctcatgcctcggt

SEQ ID NO: 529465 - DNA, 201 bp, Homo sapiens
tgaggggcagaccgggcaggggggcagggggcagcagccagggccctggctcactcccctgccctgcagtccccatcatccctgacatccctatcgtggaygcccagagcggggaggactacgacagcttccttatgtacagcgatgacgttctacgctctccatcgggcagccagaggcccagcgtctccgatgacactg

SEQ ID NO: 529466 - DNA, 201 bp, Homo sapiens
actcttcctgtattccccgctccctagtgcccagcgagccagggcgtctggccttcaatgtcgtctcctccacggtgacccagctgagctgggctgagccrgctgagaccaacggtgagatcacagcctacgaggtctgctatggcctggtcaacgatgacaaccgtaagaaccagatccttctttcctgcccacagggag

SEQ ID NO: 529467 - DNA, 201 bp, Homo sapiens
gtgaggcctcgccatgtctgtccatttgtcccctggctgccctgatgccagcatgcccagacctccctccctctgccactgacagcactcttcctgtattycccgctccctagtgcccagcgagccagggcgtctggccttcaatgtcgtctcctccacggtgacccagctgagctgggctgagccggctgagaccaacgg

SEQ ID NO: 529468 - DNA, 201 bp, Homo sapiens
cttccagctcctggagcctcgggcttctgtctgctgtccccaccgcccattctccaacatacacacacgcatgcacacatgcacgcacacacgtgcacacacatgcatgcacacatgtacacagacatgcatgcgcacacgtacacacatgcatgcacactccctgctcctctcactcttgttttgtcctgccctaggcct

SEQ ID NO: 529469 - DNA, 201 bp, Homo sapiens
ttccagctcctggagcctcgggcttctgtctgctgtccccaccgcccattctccaacatacacacacgcatgcacacatgcacgcacacacgtgcacacacatgcatgcacacatgtacacagacatgcatgcgcacacgtacacacatgcatgcacactccctgctcctctcactcttgttttgtcctgccctaggcctc

SEQ ID NO: 529470 - DNA, 201 bp, Homo sapiens
tccagctcctggagcctcgggcttctgtctgctgtccccaccgcccattctccaacatacacacacgcatgcacacatgcacgcacacacgtgcacacacatgcatgcacacatgtacacagacatgcatgcgcacacgtacacacatgcatgcacactccctgctcctctcactcttgttttgtcctgccctaggcctcc

SEQ ID NO: 529471 - DNA, 201 bp, Homo sapiens
ccagctcctggagcctcgggcttctgtctgctgtccccaccgcccattctccaacatacacacacgcatgcacacatgcacgcacacacgtgcacacacatgcatgcacacatgtacacagacatgcatgcgcacacgtacacacatgcatgcacactccctgctcctctcactcttgttttgtcctgccctaggcctccc

SEQ ID NO: 529472 - DNA, 201 bp, Homo sapiens
ggctggggctggggcaggagaggggccaggccagctgagcagttgagggggtggggctggcagactcacggggctcactctcttttggcacaagcagggcstgcaccctgctggaggatgtgcggtaggtgctgggcagcctggacagggtgttgcagggtgagtgagttgtccagccagcggtcagtgtagacatgccag

SEQ ID NO: 529473 - DNA, 201 bp, Homo sapiens
agttgagggggtggggctggcagactcacggggctcactctcttttggcacaagcagggcctgcaccctgctggaggatgtgcggtaggtgctgggcagcmtggacagggtgttgcagggtgagtgagttgtccagccagcggtcagtgtagacatgccagctgagggagggaggtcagggggcagcactgtgactcccac

SEQ ID NO: 529474 - DNA, 201 bp, Homo sapiens
tcttctgaggtctcacccacctccctgggcctctctcctggtcattctctgctaggttttgcctaacaaggcccctttgggctgggatcctagggcctctsctggcctgagatgcctttgggggaacaaggaagtggcacttccctgggcaggcacattcaaagcagcatgaccaggatgcaggatgttgcctaaacatga

SEQ ID NO: 529475 - DNA, 201 bp, Homo sapiens
tggctcactcccctgccctgcagtccccatcatccctgacatccctatcgtggacgcccagagcggggaggactacgacagcttccttatgtacagcgatkacgttctacgctctccatcgggcagccagaggcccagcgtctccgatgacactggtgagtggagacctgggacccacaagaggacagtgggggtcttggg

SEQ ID NO: 529476 - DNA, 201 bp, Homo sapiens
aatggggatatcgtcggctacctggtgacctgtgagatggcccaaggaggaggtgctgcccaccccgggggcaggagtggccaggggaggggtaaagaggsggccgcagaggctgaaggcatcttccctgctcagggccagccaccgcattccgggtggatggagacagccccgagagccggctgaccgtgccgggcctca

SEQ ID NO: 529477 - DNA, 201 bp, Homo sapiens
atctgggatcacagcatgcctcttctctgggtgtggggtgcaggcacagggctcagccaccttttgccctgtgctgatggtgctatgaacctcatgcctcsgtgtgcgtggcctgctggccaggcatcccctgatcctagcatggttgctggagggatgctctgtggtgcctgtcatgcagggggctgaccacctccatct

SEQ ID NO: 529478 - DNA, 201 bp, Homo sapiens
tcgtcggctacctggtgacctgtgagatggcccaaggaggaggtgctgcccaccccgggggcaggagtggccaggggaggggtaaagagggggccgcagasgctgaaggcatcttccctgctcagggccagccaccgcattccgggtggatggagacagccccgagagccggctgaccgtgccgggcctcagcgagaacgt

SEQ ID NO: 529479 - DNA, 201 bp, Homo sapiens
tctggccttcaatgtcgtctcctccacggtgacccagctgagctgggctgagccggctgagaccaacggtgagatcacagcctacgaggtctgctatggcytggtcaacgatgacaaccgtaagaaccagatccttctttcctgcccacagggagaacagccatggaaggggaggggacaaagctggagggagctcttggt

SEQ ID NO: 529480 - DNA, 201 bp, Homo sapiens
cctggtgacctgtgagatggcccaaggaggaggtgctgcccaccccgggggcaggagtggccaggggaggggtaaagagggggccgcagaggctgaaggcrtcttccctgctcagggccagccaccgcattccgggtggatggagacagccccgagagccggctgaccgtgccgggcctcagcgagaacgtgccctacaag

SEQ ID NO: 529481 - DNA, 201 bp, Homo sapiens
cccctgccaggtgagttgcctcccccagccccagagctgcccccatcatgcccaccacccacccacaggctgatgctcttcctctactgcccccaggctcsgccttcactttgagcactcccagtgccccaggcccgctggtgttcactgccctgagcccagactcgctgcagctgagctgggagcggccacggaggccca

SEQ ID NO: 529482 - DNA, 201 bp, Homo sapiens
gagtgagctggcaggagccgcggtgcgagcggccgctgcagggctacagtgtggagtaccagctgctgaacggcggtgaggcatggtggctgccaggctgyggggtgcagccctgcaaggcctggccccagtgagacacatagggtacctcagctgtgtcaggaacccacccaagtcccttgagcgctaaagcccccatcc

SEQ ID NO: 529483 - DNA, 201 bp, Homo sapiens
ggtgcggggcccaggtcccacgggtgggaggtggtcaaggtagggggtccatggagcttctcagacacctctccctccctccctccctccctccctccctycctcccttcctccctccctcttttcctccctttccttcctcccttcccaaagcctttagaccccccaaaatgtgggccctagtgggaaggggaggtcatg

SEQ ID NO: 529484 - DNA, 201 bp, Homo sapiens
cccttctggcaagccaatggggtacagggtaaggcggggggctgagggtcacgacaggtggatgggcggtctggcaccagcactcacagaagaggtgggcygtccgaggccagggccccctgagagagagcagacagtggaacctagcacaggtggtcagagggaaacccggtctgtgctgggaaagagggaagacccatt

SEQ ID NO: 529485 - DNA, 201 bp, Homo sapiens
tctccttctagttgaaacgagccaggggcactggggtctgcggcgtcttccccctgtgacactctctctccctcccacctctgcccaggctgaaggagccytggcccaacagtgacccccccttctccttcaagaacgtcatcagcctgacagaagatgtggatgagttccggaataaactgcagggagagcggatctcag

SEQ ID NO: 529486 - DNA, 201 bp, Homo sapiens
gtgatgtgtgcacctgcgagctggtacaacgcagccccgcagggcgggaggggagagctgagccaagcacccagggaccctgaggaatgaagcaggactcmtgtgccccatatcccttgtggggtttcccgaggcacacaggagagcggaagtgtccagtggccccggtcctgctcccccgacgcaccccaccatggtctc

SEQ ID NO: 529487 - DNA, 201 bp, Homo sapiens
agggcggggcacacccagttgttggtcaaacccaggtcaaagcactttgaaatacagagatatatgggctgtctctagaaagaggtgtgaggattgagackgggttggctgttggggctggggtctggatcttgggggacaggcacacgaggcttcctttttgctccatgcctttggtattctgagtcctgtgtcatattg

SEQ ID NO: 529488 - DNA, 201 bp, Homo sapiens
aatacagagatatatgggctgtctctagaaagaggtgtgaggattgagacggggttggctgttggggctggggtctggatcttgggggacaggcacacgargcttcctttttgctccatgcctttggtattctgagtcctgtgtcatattgcctgatcagaagagagctcgtaaatgcacggcagtaagggctttagcttc

SEQ ID NO: 529489 - DNA, 201 bp, Homo sapiens
ggggcctgagaataggagcgaaggaggctgtgtctagaggaaagaggagacacccacccaggactgaggcacccagaggatgcactgaggccccagaggtrtagtcaagagggttataggaatttggagaagagaggcactgctgacgtgtcacttgctctctgagtgtcactagtggacaaatcactggagccagctcct

SEQ ID NO: 529490 - DNA, 201 bp, Homo sapiens
taactaggggagaggggtctctctggacctgtgcctggcagggggcatcctgggatctgtttccagagggcagaaggccagagcctgggcccaggatgctsccccacggggcatgccccagccaaccctgaggatctctgggtacagaggctgcctggctccctgggtccccagcctgagggcttgccacggggtggccta

SEQ ID NO: 529491 - DNA, 201 bp, Homo sapiens
ggccttccacgacctcaaggtggcccccggctactacaccctcactgcagaccagggtaggagggcgggtccgctgtgccactgcctcgcacctcccgccygtgtggccctgtgacccacctctgaccacctccgaacccccacccagacgcccggggcatggtggagttccaggagggcgtggagctggtggacgtacgg

SEQ ID NO: 529492 - DNA, 201 bp, Homo sapiens
tttccttcacccccacccctcctcgggccgtgcctccttctggcaccaccctctgactggcctatctgcccaccccaggacccttcccgcagctgggcagycgtgccgggctcttccagcacccgctgcaaagcgagtacagcagcatcaccaccacccacaccagcgccaccgagcccttcctagtgggtgagcactgag

SEQ ID NO: 529493 - DNA, 201 bp, Homo sapiens
ccgtgcctccttctggcaccaccctctgactggcctatctgcccaccccaggacccttcccgcagctgggcagccgtgccgggctcttccagcacccgctrcaaagcgagtacagcagcatcaccaccacccacaccagcgccaccgagcccttcctagtgggtgagcactgagggctaggggatcccggctctcctggga

SEQ ID NO: 529494 - DNA, 201 bp, Homo sapiens
gccccgccttgccttccccagagggacattggctggcgcccggacagcacccacctgctggtcttctccaccgagtcagccttccactatgaggctgatgrcgccaacgtgctggctggcatcatgagccgcaacgatgaacggtgccacctggacaccacgggcacctacacccagtacaggacacaggactacccgtcg

SEQ ID NO: 529495 - DNA, 201 bp, Homo sapiens
tgtagacatgccagctgagggagggaggtcagggggcagcactgtgactcccactgagaccctagcccctgcatctctggctgactgcggcctcctgtccscagactctcgcctgactgctggtgtgcccgacacgcccacccgcctggtgttctctgccctggggcccacatctctcagagtgagctggcaggagccgcg

SEQ ID NO: 529496 - DNA, 201 bp, Homo sapiens
ccgcccattctccaacatacacacacgcatgcacacatgcacgcacacacgtgcacacacatgcatgcacacatgtacacagacatgcatgcgcacacgtwcacacatgcatgcacactccctgctcctctcactcttgttttgtcctgccctaggcctccctcccatctgggaacacgggaggagcaggcttccgctgtc

SEQ ID NO: 529497 - DNA, 201 bp, Homo sapiens
tctcttccagctcctggagcctcgggcttctgtctgctgtccccaccgcccattctccaacatacacacacgcatgcacacatgcacgcacacacgtgcayacacatgcatgcacacatgtacacagacatgcatgcgcacacgtacacacatgcatgcacactccctgctcctctcactcttgttttgtcctgccctagg

SEQ ID NO: 529498 - DNA, 201 bp, Homo sapiens
ccagcccatgggccaggctgctcctggcagccttgatcagcgtcagcctctctgggaccttgggtgagtccacgttgccctgcagccccctcctggcaggrtcatcccttgggcaggcattgcccttgcacggggatctcacggtgtctcacctaaacacgcttggccattcagcaactgaccactgcccaccttcagggc

SEQ ID NO: 529499 - DNA, 201 bp, Homo sapiens
gagggctggagggggcctcccggggcagggcataggccactgcagggatggcacggaacagggcagcggaaaaggcaggagtccgaggcccagggccctgyctctggcggctgggcgcccttggtcacattgttggtgctcagagcctcagttcccacagctgtgcagcgagaggaagctgacggcaccgaccatggctgt

SEQ ID NO: 529500 - DNA, 201 bp, Homo sapiens
cgttgtttctaacattggctcctacttttaaaactttctaaacaaatgaagccaaacactcttgggtgcctcgccaaccctctaactgccattttgtagcytctgcgtggaggctgccatggaggttaaaggcagggcctgcagagcagggccctgtcctggccctcccagtgctgtccgcgggatggggaagttccacag

SEQ ID NO: 529501 - DNA, 201 bp, Homo sapiens
ctgcgtgggcaccgcattgggttcccaagacaaagcagcacatggcagctgcttgagtccctggatactggccgtgcccctggctggcctcccaaggacaygtccacctgctcctgccaccctgtggcaggggagtctcacctgcccagggtgccagtgacacgctggatgaggctccattgctgccagggactcaggcca

SEQ ID NO: 529502 - DNA, 201 bp, Homo sapiens
tggacgggggcttgcagtctgggctaaggtcacacagtccggacaggaactccagagctgggagggaccacagaacccagatagaggacaccgaatcccakaaaagggtaaaagcctgagcaggaggcacagaacccaggcggtgggacacagtctggcccaggaagggaccaagagtcttggtgggaggcacctgacttg

SEQ ID NO: 529503 - DNA, 201 bp, Homo sapiens
cagagctgggagggaccacagaacccagatagaggacaccgaatcccagaaaagggtaaaagcctgagcaggaggcacagaacccaggcggtgggacacastctggcccaggaagggaccaagagtcttggtgggaggcacctgacttgggcaggggcatgcacccagcaggggtacatggtcacgctgtggagacacgca

SEQ ID NO: 529504 - DNA, 201 bp, Homo sapiens
gagttgtgtgccttccagacttgcattctcaacctcacaaagctgtctcttttgtccttgtctgtctccaggctccccccaaccccccaaatatatcaacytaaagcacagagatactgttcttgtgggaagccttgaagggaaaaagcctgtcctggcctcaccaccaagagcttgactcagatccttggtgtgaggcaa

SEQ ID NO: 529505 - DNA, 201 bp, Homo sapiens
ccgtgcaagccccaacatacctccttcccttcgggccagatgccatggattgctaactgaggtgtggctgggcccctccttccccatctgggactcatttytttgaaattatatgatacagaggactgcctgtccttagggatccagcacttccgaccttcgttctgtattttcatccatgtctcctgaaatgctgctgtg

SEQ ID NO: 529506 - DNA, 201 bp, Homo sapiens
gtgtgacagagtgagaccctgtctcaggaaaaaaaaaaaaaaaaagatgatgcagaaagatgaacaaagaattgggtttgaaatttttttgtaattcagcrttggtgtcccctccccaccttctcctgccccttggcagacttttattgcaagcctagcccttttgttagctgctcttctgctgcctgtccgtctgacatt

SEQ ID NO: 529507 - DNA, 201 bp, Homo sapiens
tactgttcttgtgggaagccttgaagggaaaaagcctgtcctggcctcaccaccaagagcttgactcagatccttggtgtgaggcaaactctggacctagwtacacccgttcctgacactctggggataagacaaaaagggaatggccctctctgaccatcttctgtaactttcaagaaaccaaaaatcttgaagtgtctt

SEQ ID NO: 529508 - DNA, 201 bp, Homo sapiens
ctaacggtgatgttctcctcctcaggttgagaagcacaatgttagataatggaaacagattcctttgggagaataaagaacaagttacctaacaacatatsaggaccttagcttcctcatctggaaagtgaaggggattggattaggttaggtacttccatgttttgtgattttgtgtggtctcttccagtcagaaagttc

SEQ ID NO: 529509 - DNA, 201 bp, Homo sapiens
gtggtgccctgccaggttgaatgaatagctgcagtgttctgaggaatggggaatttggcctgtcccagcatcaggagggactttctggaaagggggctaaractgagtctaggttcagtgtggggaactgggtggccttcctggcaccttccttttggagccgtggcgtggtgtgccatgtctgtgtaagtggagcctgcg

SEQ ID NO: 529510 - DNA, 201 bp, Homo sapiens
agccaacctaaaggaaaaaaataaaataaagggataaaatacttcctgtgattttgccccatcatctcttttcttccagagacgtgactcaacaacctcarctgagcctggcagcacacacaccccacactcctttccatctccaggttcacaaaagccacaagaagccacggggaggctcctggcctcttactttaccta

SEQ ID NO: 529511 - DNA, 201 bp, Homo sapiens
taagacacccttgtgttggttaagctgctgtgctgtgcattggccattagaaatgtgtacttgctgaagagtcattttttatgaggaaaaacttcccccctgtacccccaaagaaaaagacttaattatatcactctagacccggggaataaggacccattttgcagttaaaaactgctttgaggccagccgcagtagctc

SEQ ID NO: 529512 - DNA, 201 bp, Homo sapiens
tgaacgaaagataaaggagggaatggatatgaactacattatccaaaggaagaaagaatttcggaaccctaggtaagtttcccttgagcctgcagagtttrttgagttattaatgttggactaaggactaagacgtccccaaggaggtggtgaggaaaagcccagagcccaaaccatcacccagacttgtcattacactga

SEQ ID NO: 529513 - DNA, 201 bp, Homo sapiens
ggcaggtctcaaattcctgacctcaagtgatccacccacctcagccttccatagtgctgggattacaggcatgggaatcccatgggattacacccagcccttttttttttttttttttttttaaatcaaacggctacagtttggtgctgccacctcaatttgttctaaaggctagcagtttacccaccattgcttgtgcaa

SEQ ID NO: 529514 - DNA, 201 bp, Homo sapiens
ttaaaaccagttgagtggtctcaagcccttaacctctgtaagcctgtttcttctctgaaatcacagtaataaagcgtcgtaagatggttgggaagaaccaraggtgacttatgcaaaagctttataaactgtaaagttcctgccagtgttttttgttggctaaatccaatttttttttgttgtagaccaaggagagaagca

SEQ ID NO: 529515 - DNA, 201 bp, Homo sapiens
ttccacttaaaaccagttgagtggtctcaagcccttaacctctgtaagcctgtttcttctctgaaatcacagtaataaagcgtcgtaagatggttgggaaraaccagaggtgacttatgcaaaagctttataaactgtaaagttcctgccagtgttttttgttggctaaatccaatttttttttgttgtagaccaaggaga

SEQ ID NO: 529516 - DNA, 201 bp, Homo sapiens
tccacctccttggttcaagcgattctcctgcctcagcctctcgagtagctgggattacaggtgtgcaccaccacacccggctaattttgtatttttcagtmgagatggggtttctccatgttggtcaggctggtcttgaactcctgacctcaggtgatacacctgcctcggcctcccaaagtgctgggattacaagcgtga

SEQ ID NO: 529517 - DNA, 201 bp, Homo sapiens
agtagacgtggagccggcacctctggtctggattccacttaaaaccagttgagtggtctcaagcccttaacctctgtaagcctgtttcttctctgaaatcmcagtaataaagcgtcgtaagatggttgggaagaaccagaggtgacttatgcaaaagctttataaactgtaaagttcctgccagtgttttttgttggctaa

SEQ ID NO: 529518 - DNA, 201 bp, Homo sapiens
ttcctgacactctggggataagacaaaaagggaatggccctctctgaccatcttctgtaactttcaagaaaccaaaaatcttgaagtgtcttgaatcaaatgtagattgtacttggaatagtcggataacaaaagtcccccttggaaatagctccctgcatttacattgaagtctagttggttgtaacatgttccatgtaa

SEQ ID NO: 529519 - DNA, 201 bp, Homo sapiens
ccgtggaaagggcagtagacgtggagccggcacctctggtctggattccacttaaaaccagttgagtggtctcaagcccttaacctctgtaagcctgtttyttctctgaaatcacagtaataaagcgtcgtaagatggttgggaagaaccagaggtgacttatgcaaaagctttataaactgtaaagttcctgccagtgtt

SEQ ID NO: 529520 - DNA, 201 bp, Homo sapiens
ctccctggctcaattaatcctcccacctcagcctcccaaacagctgggactacaggtgtgtgcatcacacctagcaattttttttaatttttttgtagagraaaggttttgccatattgccccggctggtcttgaactcctgggctcaagtaatctgcccacattggcttcccaaagggctgggattagagctgtgagcca

SEQ ID NO: 529521 - DNA, 201 bp, Homo sapiens
actccagcctgggcaacagagcgggactccatctcaggaaaaagaaaaaaaaaaagaaagaaaaaaagaaaccttctgtggttgggagcagagccttcccrtcagcaagtggtctaagcaaaggcaaccccagcgtgtcccagagggccccaccaacttccgcccatttttctgataaattgagtgtttccattcccaggc

SEQ ID NO: 529522 - DNA, 201 bp, Homo sapiens
cccctcattggccaagggcactgtggatgttttgtgggaggcagcatggcaccgtggaaagggcagtagacgtggagccggcacctctggtctggattccmcttaaaaccagttgagtggtctcaagcccttaacctctgtaagcctgtttcttctctgaaatcacagtaataaagcgtcgtaagatggttgggaagaacc

SEQ ID NO: 529523 - DNA, 201 bp, Homo sapiens
atgcatgcctctcatgtcattgcccaaaatattaaagagatgtatattcaaatgtcaagatgtcataaaactaatcatttttactgtcctggcagaaaacttttttttttttttttttttgagacactcactctgttgcccaagctggagtgcagtggcacaatctcagctcactgcaacctctgccttccaggttcaagt

SEQ ID NO: 529524 - DNA, 201 bp, Homo sapiens
aaactaatcatttttactgtcctggcagaaaacttttttttttttttttttttgagacactcactctgttgcccaagctggagtgcagtggcacaatctcrgctcactgcaacctctgccttccaggttcaagtaattctcctgcctcagcttcctgagtagctgggatacaggcacgcgccaccatggccggctaatttt

SEQ ID NO: 529525 - DNA, 201 bp, Homo sapiens
gaccttgtgatctgcccgcctcagcctcccaaagtgctgggattacagatgtgagccaccacgcccggcctatggctgaccattcttaagtgaaactggctttttttttttttttttggaaacgaagtctcgctctgtcacccaggctggagtgcagtggcgcaatctcagctcactgcagccttcacctcccagttcaag

SEQ ID NO: 529526 - DNA, 201 bp, Homo sapiens
actgcagccttcacctcccagttcaagcgattctcctgcctcagcctcccgagtagctgggattacagatgtgaaccaccgtgcctgactaatttttgtattttttttttttttttttggtagagttggggtttcaccatgttggtgaggcaggtctcaaattcctgacctcaagtgatccacccacctcagccttccata

SEQ ID NO: 529527 - DNA, 201 bp, Homo sapiens
caaatatatcaacctaaagcacagagatactgttcttgtgggaagccttgaagggaaaaagcctgtcctggcctcaccaccaagagcttgactcagatccttggtgtgaggcaaactctggacctagatacacccgttcctgacactctggggataagacaaaaagggaatggccctctctgaccatcttctgtaactttc

SEQ ID NO: 529528 - DNA, 201 bp, Homo sapiens
ttggggccgggcgcagtggctcacgcctgtaatctcagcactttgggaggctgaggcaggcagatcacgaggtcaggagatcgagaccatcctggctaacraggtgaaaccccgtctctactaaaaatacaaaaattagccaggcgtggtggcgggcgcctatagtcccagctactctggaggttgaggaaggagaatggc

SEQ ID NO: 529529 - DNA, 201 bp, Homo sapiens
tgtggagttgaccaggctgggagtctgaagttaaaacataacagctgaaggtaggtgtggaacctaaacttgacagaagacaaactgacagtgtttggggkgtgtgtgtgtgtgtgtgtgtgtgtgtgtgtgtgtgtgtgtgagtgacagagagaggtcagtgcttgagcaccttctgtggaccaggctgactattagact

SEQ ID NO: 529530 - DNA, 201 bp, Homo sapiens
tggagttgaccaggctgggagtctgaagttaaaacataacagctgaaggtaggtgtggaacctaaacttgacagaagacaaactgacagtgtttggggtgkgtgtgtgtgtgtgtgtgtgtgtgtgtgtgtgtgtgtgtgagtgacagagagaggtcagtgcttgagcaccttctgtggaccaggctgactattagacttg

SEQ ID NO: 529531 - DNA, 201 bp, Homo sapiens
ggataacaaaagtcccccttggaaatagctccctgcatttacattgaagtctagttggttgtaacatgttccatgtaacaacatcaggagccgtgctgagycacgtgggctttgtaaatttagccagatttttcaaatagagaaactgtttcccttcctcctccctaccttgtcttcagtctacaaggccaattctatagc

SEQ ID NO: 529532 - DNA, 201 bp, Homo sapiens
ttgatccaagtaacctgaagctgagactcccagaagccccacctcactcctgtggttccacagcccacagggagccaccgcgtgtctggtacaccctcccrtcagccgtgcaagccccaacatacctccttcccttcgggccagatgccatggattgctaactgaggtgtggctgggcccctccttccccatctgggactc

SEQ ID NO: 529533 - DNA, 201 bp, Homo sapiens
gggttgcgctctggtgtttgaaggtctgctgagggaaaggctaaggcagcctgaggcagacctgaagccgcgcgcagaattccacagaagtttaccttcayataacgaaggaccttttgtgatctccggccacaagtgggttgagctgtttcataaggtagtgagctccctgtttctagaggtttttcaggcaagtttttt

SEQ ID NO: 529534 - DNA, 201 bp, Homo sapiens
ccaaaggtgcgtctggcacacggggctggagggtgatggggacacccagggtcctttgcttgttccatgggatttgacctgcagccacagaaaggtccacstggtggcacggctcgttgaaagcacagtccctgtctcttttgtttgagtccctattgttctgaaatagtccaataaagagattccggtggccggcctggt

SEQ ID NO: 529535 - DNA, 201 bp, Homo sapiens
gttctgtgagcacttaggtggaggcagagcccactcaactgggactcctgaaaggttgggcattgccctttagtcctgcctttcccaggtcacttgctcargtagtttgatgcctgccttcctgtgttgatgtttgtgcaaatgccggttgaggtgctgcgatacagctgtgtgtaagccttggcacttggtgttggacac

SEQ ID NO: 529536 - DNA, 201 bp, Homo sapiens
tgggagggaggtgaggaatgaaaaattacctaccgggtacagtgttcactttctgggtgatgggtacactgggagcccaaaccttacttatcattacacartaatatatccatgtaacagacctgcacatataccaccaaatctaaaataaaatacttttttttaaattataaaataaatcgttcatcacatgttttttct

SEQ ID NO: 529537 - DNA, 201 bp, Homo sapiens
ggtgaggtgctttgttttcaccttccttaggaactgggtgaaaagccctcagcctgttctggctgtgtgttgttgctcatgtctctgggctgcgggttccrtgccctctggctaatgtagacagatgcctggtgactagacatccaggatgagctcattactttaaccaactgagaatttctacctgaaggccagtgggtg

SEQ ID NO: 529538 - DNA, 201 bp, Homo sapiens
tgtgacctccgatggcggcccctcattggccaagggcactgtggatgttttgtgggaggcagcatggcaccgtggaaagggcagtagacgtggagccggcmcctctggtctggattccacttaaaaccagttgagtggtctcaagcccttaacctctgtaagcctgtttcttctctgaaatcacagtaataaagcgtcgta

SEQ ID NO: 529539 - DNA, 201 bp, Homo sapiens
gtttgggctgaaatgtagctttgttgaaaatagtagtttcaaatgaaaccattttttcctgggtatttagttaaaggcttctgtgcattgggagtgttctkggtagtggaggtgacatggatttagccagctaataaggtagctggtccagcatctgctcctgatctttgaccttcatagcatcagcgttagcgttcagtg

SEQ ID NO: 529540 - DNA, 201 bp, Homo sapiens
agtctggggtgggccgcttcggggtctgctccctagactcccgctggcctgcagggggaagggaaagagggcaccgctcattggtggatcgtgatcctgayttctgctttatctccagatgctcagaagagaaagagcaagtgggattcggctatcccagtgacaacgatagcccagcccaccatcctcaccaccacagcc

SEQ ID NO: 529541 - DNA, 201 bp, Homo sapiens
tttgtgggcctcaggttcaggactgaatgagagtcctcttgttgcgagttgagggtgtactctgggcatgccatgccctttttttgtactaagagggtagaaaagcaaagaccagactagttggcaaattggaacccaactacccagtttatttatttcttaggcgtagaaggaataatttagggggaactgaagagccaa

SEQ ID NO: 529542 - DNA, 201 bp, Homo sapiens
atattcaaaacccttaattttggacattctgctttaagcatatgaagtttttttgtttgttttttggtttttttttttttttttttttttttttttgaggkggagtctcctctgtcgcctggagtgcagtggtgccatcataacttactgcagccacaacctccctggctcaattaatcctcccacctcagcctcccaaac

SEQ ID NO: 529543 - DNA, 201 bp, Homo sapiens
agggtctccctggcttgtttgggcgacagacagcacgtggatctgggcctgggctcagccttgctactttgagaagcacctttggagtctggggtgggccrcttcggggtctgctccctagactcccgctggcctgcagggggaagggaaagagggcaccgctcattggtggatcgtgatcctgacttctgctttatctcc

SEQ ID NO: 529544 - DNA, 201 bp, Homo sapiens
gtgtcatcacccggcgatgctctgagcctctcagcagggcctgtgtgctgagcagacctgctgggttcacggcgctcgtctgctgcttttgccctcggagrcttgtttgctacattgtgcccccctttcctccccgccaattgcagagccttggggggctttgtccgttttgggtcatgggggccctttgtagcctgaagg

SEQ ID NO: 529545 - DNA, 201 bp, Homo sapiens
acagctgaaggtaggtgtggaacctaaacttgacagaagacaaactgacagtgtttggggtgtgtgtgtgtgtgtgtgtgtgtgtgtgtgtgtgtgtgtgwgagtgacagagagaggtcagtgcttgagcaccttctgtggaccaggctgactattagacttggtgatttttgtgagtacacagagtagagtagtttgtct

SEQ ID NO: 529546 - DNA, 201 bp, Homo sapiens
agctgaaggtaggtgtggaacctaaacttgacagaagacaaactgacagtgtttggggtgtgtgtgtgtgtgtgtgtgtgtgtgtgtgtgtgtgtgtgtgwgtgacagagagaggtcagtgcttgagcaccttctgtggaccaggctgactattagacttggtgatttttgtgagtacacagagtagagtagtttgtcttc

SEQ ID NO: 529547 - DNA, 201 bp, Homo sapiens
gtgagccacgcccgggctgtgggaataagatggcggggaagaagaatgttctgtcgtctctcgcagtttacgcggaagattcagagcccgagtctgatggygaggctggaatcgaggcggtgggcagcgcggctggtaaggcccaagtgcgaagctggaagggggaatcgggtgtctgcccggaatgctgtaccctcgctg

SEQ ID NO: 529548 - DNA, 201 bp, Homo sapiens
ccctgccagctgttgtcacggtcaccaccagcgccagcggctccaagaccaccgtcatctctgctgtgggcaccattgtgaagaaggccaagcagtgacckgaggggccaccctaggacttgaaaggaccgtgcagcccagtgaccactgcccagtgggaggcgccactttgtatatttcaggactgggacctactcccca

SEQ ID NO: 529549 - DNA, 201 bp, Homo sapiens
cttttgtttttgtcttttcgtttttccttgtatcttttttttttttttttggagacaatcttgctctttcaggctggagtgcagtggcgcaatctcggctyactgcaacctccacctctcaagtagctgggattacaggcatgcaccaccatgcccggctaatttttgtatttttagtggagaggaggttttaccatgttg

SEQ ID NO: 529550 - DNA, 201 bp, Homo sapiens
aatttttgtatttttagtggagaggaggttttaccatgttgtccaggctggtcccaaactcctggcctcaagtgatctgcgcacctcagcctcccaactcscccagcctgtttttccttgtgtcttgattggaattgaatgagggggctgaagaggtgggcctagtcttttctcccaggagcagccttcctttcctaggtg

SEQ ID NO: 529551 - DNA, 201 bp, Homo sapiens
acttctatctagttttcccgaatgtgttcctttatttgccagttacttcctaggaattatcttgtttcaagccctggactgaggaggggctcccctcctctttttttttttttttttttggagacggggtctggctttgtcacccaggctggaggggctggagtgcagtggtgcaatctcggctcactgtaagctccgcct

SEQ ID NO: 529552 - DNA, 201 bp, Homo sapiens
cgtctcaaaaaaaaaaaaaaaaaagaattgtatggtataggagttatatctcaataaagctgctgtaagaaaaatttattttatttatttatttatttttwttttttttgagacagagtctcactctgtcgcccaggctggagtgcagtggtgcgatctcagctcactgcaacctccctcctggggttcaagcaattcttc

SEQ ID NO: 529553 - DNA, 201 bp, Homo sapiens
attttcaatatgtgctatcagagctttccttgaagtaacaggctttggtcttgagaaaatgtctgccaaatacccaagtccagataactagtttgtcattmtttcaaataaaaatggtgtttcctgaagaaaactgtcagttcaactggtgactcaaataatcacaaacggtagtccatccttttccgtggcttcagtaac

SEQ ID NO: 529554 - DNA, 201 bp, Homo sapiens
tattattctaaaacagaaatcatgggtcagtgattcagtagttgtttgagaactgtttttattgctctgaaaatgtccgttaagttgttagccttatgggrtcttgagccatgttgagggtgggttagtattcagagtaagatgattcagccctggcatggtggggaggagttcaagctctggaatgagactggggttttc

SEQ ID NO: 529555 - DNA, 201 bp, Homo sapiens
tgccagcacagctgttgcaggtagattgcagagctgccctgcctcctgccacacacatggagccagggtctccctggcttgtttgggcgacagacagcacrtggatctgggcctgggctcagccttgctactttgagaagcacctttggagtctggggtgggccgcttcggggtctgctccctagactcccgctggcctgc

SEQ ID NO: 529556 - DNA, 201 bp, Homo sapiens
ttttttttttggtagagttggggtttcaccatgttggtgaggcaggtctcaaattcctgacctcaagtgatccacccacctcagccttccatagtgctggrattacaggcatgggaatcccatgggattacacccagcccttttttttttttttttttttttaaatcaaacggctacagtttggtgctgccacctcaattt

SEQ ID NO: 529557 - DNA, 201 bp, Homo sapiens
acaccagctcctcccacttctggctcggcctgaccatcctcaagcagctgcggcctccagaccgcttccctcaccccaagcagaggggctgtggggcctgrgcatgctggtggccctctggaggtgctggctgctgggccaggaacgtgggagctggtgcaaggggatagttggggtttctcattcttaacccttgattga

SEQ ID NO: 529558 - DNA, 201 bp, Homo sapiens
cctgccgccccacagggcttctgtctgctgtgagcactgttgtccctttggctccctctcagggctttggcatttcctaggatgcccgggtgagacgtccrgggaacagttcttctttggaaatcatatttgtggtgtgttttaatgggctttggtcggttgccagcgctgtcaagagggaattcagggcactcagctggg

SEQ ID NO: 529559 - DNA, 201 bp, Homo sapiens
ttcagggcactcagctgggagcgtgtcttggtctctgcttcccctagtgccctgggcttgtcctctgtctttgcaacccctcctccccctctccgctggcrtatgcatgctgctcagggagtcagcatgtggcctctgctggcactttgctctgtccccaggcaggaacatgcctcacagccctggagtctggggctcttt

SEQ ID NO: 529560 - DNA, 201 bp, Homo sapiens
ctcctagcagcctggcttccagccatgccaggcctgccgccccacagggcttctgtctgctgtgagcactgttgtccctttggctccctctcagggctttrgcatttcctaggatgcccgggtgagacgtccagggaacagttcttctttggaaatcatatttgtggtgtgttttaatgggctttggtcggttgccagcgc

SEQ ID NO: 529561 - DNA, 201 bp, Homo sapiens
gttcgtatgtttggtcaagatctgtcccactgacaaactgtgcaactgtgtggacattttctgggataaaataagctttataaagaaagaacctggagacractcaggaatgaacaaatcctgagacacattggatttccagcctttcagattgtgccatatctcctgactagaaaggcgagaggcctggctgaggccaac

SEQ ID NO: 529562 - DNA, 201 bp, Homo sapiens
ctgaaggtaggtgtggaacctaaacttgacagaagacaaactgacagtgtttggggtgtgtgtgtgtgtgtgtgtgtgtgtgtgtgtgtgtgtgtgtgagwgacagagagaggtcagtgcttgagcaccttctgtggaccaggctgactattagacttggtgatttttgtgagtacacagagtagagtagtttgtcttcat

SEQ ID NO: 529563 - DNA, 201 bp, Homo sapiens
tggaggtgacatggatttagccagctaataaggtagctggtccagcatctgctcctgatctttgaccttcatagcatcagcgttagcgttcagtggaatgrcgggctcgctttggagaatgccttaccgtgtgtgatcctttgtgtcaggctgacctcatctggataaggaacaggactgggtagaatggatcactggcag

SEQ ID NO: 529564 - DNA, 201 bp, Homo sapiens
cctcatgttcatgctgcacatgtagctggtgaccaggggctgggacggtggaggggtgggcttctgtcatacacccccccaccccctctgctcctcttcayaggacaagatccagaagctttatgaacgaaagataaaggagggaatggatatgaactacattatccaaaggaagaaagaatttcggaaccctaggtaagt

SEQ ID NO: 529565 - DNA, 201 bp, Homo sapiens
tctgtgcagccctactgggccagtggtagcttctcagaaagagctttgctaagaaactgaggaaccctcagaatgtaaaataaattacagaaatgaaaaartcacaggcattatatgtatacattttctatcctaatctatttctaaaatgctgattcagtagcttcttccctgacagaatgtgcagccctgactggaggt

SEQ ID NO: 529566 - DNA, 201 bp, Homo sapiens
ctggtcattaaacatttaccagcacactgctgactctttccttaaaagttaaccattgtgggccaggcacagtggctcatacccataatcccagcactttrggaggctgaggctggaggatggcttgatccaacagttcaagaccagcctgggcaacataacgagaccccatctttacaaaaacttttaagattagtcagg

SEQ ID NO: 529567 - DNA, 201 bp, Homo sapiens
gcggctggtaaggcccaagtgcgaagctggaagggggaatcgggtgtctgcccggaatgctgtaccctcgctgggcgggagggaacaagatggtcattgtrctccaagcaccggaccccgaagaatggtccagggtccggggtgagatagagcattagagactgtggactaagaatgaagaatctccttcccgttatttcg

SEQ ID NO: 529568 - DNA, 201 bp, Homo sapiens
cacatttttttaaattgatgtgtaacaatattttttatattcaaaacccttaattttggacattctgctttaagcatatgaagtttttttgtttgtttttkggtttttttttttttttttttttttttttttgaggtggagtctcctctgtcgcctggagtgcagtggtgccatcataacttactgcagccacaacctccc

SEQ ID NO: 529569 - DNA, 201 bp, Homo sapiens
ttatacacaaggccattttgtttactttgggacccaaaacttagggaaccctgaattctgtttctcctgtagcctaggcaggtcagccttagacgagacgrgtggccccaagcacctctgagtttccaaaatcttgcaagtattttagagacatatgcagtggtggctggagctggtttacagacatatgcagtggtggct

SEQ ID NO: 529570 - DNA, 201 bp, Homo sapiens
gagaatctgtctcaaaaaaaaaaacaaaaaaaaactgcttggaaaccagctgtaactttcaagatgacctagtaaaatttaggaaatttatgcccaattawaatctaaaacagtaatattcttgaaaatatagtgtgagctgttccatatttgagctgattctgtgattggatagaactgtatgtagccactaaaatcttg

SEQ ID NO: 529571 - DNA, 201 bp, Homo sapiens
atggttagctccatcccttgctctcccgttttgttttagtattagtggaagaaactggattggatatcagatctgtttgaaaatgtattttcacatggatyattttttattaatctttgaattgaaatttgggggaaaagatagtggattattttatttaacccagatatcaatgggtgttttatgttgatttttccctgt

SEQ ID NO: 529572 - DNA, 201 bp, Homo sapiens
cccttcctgaggacgcctgtggcactggccacagtaggtaagcctggatcccccgaggtggttctccactctcccatcgaaagccagggcagtgacctgtsggggagtttgggtgagagataagcagttaacccttgatgccctcgataaaccagcgcggaccagccacctgtgagcctccccataaaagacacattctaa

SEQ ID NO: 529573 - DNA, 201 bp, Homo sapiens
agggtctactctatgtcaggccatgttcaagggggctgggtacaggcctgaatgagacagacccacccctgccttaagaggcttatgccacagcaaagaagatggaacgtcacgccagtaacgccagcatcgatgagtgttggtgatgacggagttgctgggtacaggggagctttggcaagcagggtcatctaatctggc

SEQ ID NO: 529574 - DNA, 201 bp, Homo sapiens
ggtccagggtccggggtgagatagagcattagagactgtggactaagaatgaagaatctccttcccgttatttcgattaatttgcctaaacttactgaaasactccgtgccggctatagtgatagacagagggatggacgaagagggagcggctgctcagccactgcctgtttcccctgggctcgttgtttgatgagggag

SEQ ID NO: 529575 - DNA, 201 bp, Homo sapiens
tttgccggcacagtgcctcagatgtttcccttctggagaatctatatttaacccccactgcagggggaggctgcaggtagatcttgccctgggccagtgcycgccttccttgctaagactgctctttctagaggtggctctgccatgacactctggtgtcttggccctcttcattggcactgggtcatgctgatgccgtct

SEQ ID NO: 529576 - DNA, 201 bp, Homo sapiens
agtagcagtcactaaagagcggggtgggagggacccaaaaaaggtgaagctgggaagattgtggaaatgccttttgtgctcaggctccccttctcagcccyacatcacggctgacagcctcgtcattcctgcctgctccttgactgatgtgcttcgctgttcctcattcactcatgtgcatttcaagttttactgtggaat

SEQ ID NO: 529577 - DNA, 201 bp, Homo sapiens
acccatggccccatagttcaaagtcagtcacagctctcctcgggcttgcagaacaaaacactcagtagtgataatcttctctgcctagtatttagggtatrtgggacttggagcctgcacgtaaaacaagcccagggagccgttaagtgtttgggtttcagttgtggagggaagggaggatctgggtcctagagtctttct

SEQ ID NO: 529578 - DNA, 201 bp, Homo sapiens
gcttccagtgagaatccactgacaacagtgaaaatcaacacatgaagtcatgtttttaggatggccccaggctcgactcctgtctcagtgtatttgcagtyggcataggcttatcctgcagcagctggactggcagagtctgggagccttgtccccagccctccttggcactgtgttctttacagtaactgaaactccagg

SEQ ID NO: 529579 - DNA, 201 bp, Homo sapiens
ggtatctgatgcctatggggaggatgacttttctcgtctagggggtgatgaagatggttatgaagaagaagaagatgagaacagtagacagtcggtaggtraatctcccagatccagagctactgaaagcacaatttcatttgtcagattttggaactgtgccaacagtgttccatttcatggttagctccatcccttgct

SEQ ID NO: 529580 - DNA, 201 bp, Homo sapiens
cagaacagtgaaatccagaaaacgtctaagaagcctttgctctcaggtttctgcaggacatgtggatgtagctgtcatgggacactgtttgcattagggawtggaggaagcttttctttggagggagtataaagccagtgtaaagggagctgagagccagagagaggcttccttgagcctggggcctctctgggatcccca

SEQ ID NO: 529581 - DNA, 201 bp, Homo sapiens
ggctcagccttgctactttgagaagcacctttggagtctggggtgggccgcttcggggtctgctccctagactcccgctggcctgcagggggaagggaaaragggcaccgctcattggtggatcgtgatcctgacttctgctttatctccagatgctcagaagagaaagagcaagtgggattcggctatcccagtgacaac

SEQ ID NO: 529582 - DNA, 201 bp, Homo sapiens
gttttcaccttccttaggaactgggtgaaaagccctcagcctgttctggctgtgtgttgttgctcatgtctctgggctgcgggttccatgccctctggctratgtagacagatgcctggtgactagacatccaggatgagctcattactttaaccaactgagaatttctacctgaaggccagtgggtggattcatacgagt

SEQ ID NO: 529583 - DNA, 201 bp, Homo sapiens
cagcaagaatacacttattttaattaacaatagcacagatatagcatagggcagtgggttttttagttaatttatggcgtactttgtttatccattggccracctgaaggaaatgaaactcacctatctttctatcacagatgaatgtgctagatgaatgatttgggttgtatctgatcatggttcacaaaaattatgtta

SEQ ID NO: 529584 - DNA, 201 bp, Homo sapiens
ttctatcagcgcaaactctgagactgccaaatttttagagtctgtgaaaattttagggctgattcaatccagactccttcattatacaaataggaaatggyggccattacggttgtgagtttacaagattacatagctggacagttgcagaactggccctagaattcaggacttggtatttactgagcagtcttatttcca

SEQ ID NO: 529585 - DNA, 201 bp, Homo sapiens
actgtttcaatcttggagcagcgactgactttgacagaggataagctgaaagactgccttgaaaatcagcaaaagcttttcagtgctgtccaacagaaaakctgaataaaaaattcattttcatttgttgggcagaggcccaataaatgaacaaatgtacatacactcaggaaggtagtacaagatactccatacaacaca

SEQ ID NO: 529586 - DNA, 201 bp, Homo sapiens
tgtgtgtgtgtagtgatttaaaaatctcagaacatcaggaataaaaagggctttaaaaggcattcaattgaatttcctgatttgatgtttgtatatctttmacaatatctctgacaaatgaccttcccaagtctattttagaaccttcaataatgggaaacactttggcttagatattttctgccttttatctgttttctt

SEQ ID NO: 529587 - DNA, 201 bp, Homo sapiens
tccttgaggtaggcagaacaaccattcctctcaaaaatatttatgtcttcatccccagaatctatgaaaatgtttccttacatggcaaagagggctttgcmaatgtgattaagttaaggctttttttttttttttttttttttttttttaagaaacagagtctcgttgcccaggctggaagtacagtggctcgatctgggc

SEQ ID NO: 529588 - DNA, 201 bp, Homo sapiens
gcctctcacacctctccctcactccttctgctaatttgttggtgggtttaggagaaattgggtaagcacagcctaacaccttctactctcctgcctttggragtagccattcttcactgtttttctctgatattccttgtggggagacctgcccttgtctagtgttgcctgtgactcattctgggcatccgttctagaaag

SEQ ID NO: 529589 - DNA, 201 bp, Homo sapiens
ccttacagcccacactcctcactgtcgttatggtctctgtgggacattattgctcaggagatgttgattatcacctatggccatgagcctaagaagaatayaagaagataggcagaaggtcagacttttagtcactaggtttttcttgtaaaggtttcagccagtttttggctctagccatctcagaattatttctgtata

SEQ ID NO: 529590 - DNA, 201 bp, Homo sapiens
agcattacatcacatatctacatatttacttttctccttcacccactagagtataaccatgatagcagggcctctttattcactccttgaggtaggcagarcaaccattcctctcaaaaatatttatgtcttcatccccagaatctatgaaaatgtttccttacatggcaaagagggctttgccaatgtgattaagttaag

SEQ ID NO: 529591 - DNA, 201 bp, Homo sapiens
ggttccaccctgttcgagcttcctggcaactttgtttatctactcaagcctcagcaatggcagacgcccctcccccagccttgctgctgccttgcagttcratctcagactgctgtgctagcagagagcaaggctccatgggcgtgggaccctccaagccatgtgcaggatataatctcctggtgtgctgtttgctaagac

SEQ ID NO: 529592 - DNA, 201 bp, Homo sapiens
ttacaattgagaaaaataattttgattttaaaataaactattgctcaccttaaatgtattgaaaacttttgatttagagagcagcagttttctctaagacrttttattattaatatttagttaagtgttaagatctattcatttatcctacaaagtgctatgactatttttatgtatttattcatcaaggaaaatgacagt

SEQ ID NO: 529593 - DNA, 201 bp, Homo sapiens
aggacatacggtattaacactcagattcttgctttttatatataaaaatataaaataatatatattttaaatttctgatccatttttatgtccctttattrtttttccagacatagcacacattgctgctatcataaaatttttttacttccaaggctgtttttatcctctggaagcaactcttagaaatattatttgtgg

SEQ ID NO: 529594 - DNA, 201 bp, Homo sapiens
actggtctcaaattcctggactcgagtgattcacctgccttggcctcccaaagtgctgagattacagtgagccattatgccaggccccatctacgtttatrgatgtatgtctggggattgccttttatttttcttttcttaaaaatatttagaaagaactcattctcatagatttctttagatttccctatttttccccca

SEQ ID NO: 529595 - DNA, 201 bp, Homo sapiens
atatatccaaagaatttatagtaatgtggtcaataagattacctttccgtgacacagtctcatttttaaagttattctggctctctaactggaagcttagwgctatgtgatgccaaaatactcgttttagtgagccatatagagttttgttgttgtggaaacagtgctcttgtttacaacctattgctaataaggcactgg

SEQ ID NO: 529596 - DNA, 201 bp, Homo sapiens
tgggcatggtggcatgcacctgtagtcccagctactttggaggttaaggtgggaggatcacctgagcctgggaggcctatgctgcggtaagttgagacggwgccactgcacttcagcctgactaatggagtgagaccttgtctcaaaaaaaaaaaacgaaagaagaaacttgtccaaccagttttcaaaacataatataaa

SEQ ID NO: 529597 - DNA, 201 bp, Homo sapiens
ttatgctgtcgttgtctaaagagtgttaagttttgttctggtatgaaattaactttctgcttgcccaaagagataaagagattctgttgaggcttggattyagcctgtgtagggtggatctagtgtagtctttactcatgggctgtagtgccactggcccttctagaatttcaaatgaatacctggagtattcagaaaagg

SEQ ID NO: 529598 - DNA, 201 bp, Homo sapiens
gggtgaattcatttgggcaagttcagagctggaggttcctgcaggatatccaaaaggggatgcccagcaagcagttgtactcatgggtggagattccaggraggaattctgggcacatagatggtaaattcccgaacaagtaattttcatggcatgcttcatctttttacatatttttcatctgctttttgtctctcagca

SEQ ID NO: 529599 - DNA, 201 bp, Homo sapiens; identical to SEQ ID NO: 26560

SEQ ID NO: 529600 - DNA, 201 bp, Homo sapiens
actttgggcagccgaggcagaaggattgcttgagcccaggagttcaagaccaacctgggcaatatagtgagaccccatttcttcttttattctttattatwtagagacagtgtctcgctatgttgcctaggctcgtctaaaactcctgggctcaagcgattcgcccagctcggcctcccaaaatgctaagacctcatttct

SEQ ID NO: 529601 - DNA, 201 bp, Homo sapiens
gacatttaaaaaacagaacatacatgataactaacaagtaaatgaggaaaaacacaacattttcaaagatctcttgccatttagaaacagaaaacacattwatattttttcagatacaatctttaaaatagagaaaggagagaaaatattagagactggaaagagactatttgcaaattagttggatccttgcttttgaag

SEQ ID NO: 529602 - DNA, 201 bp, Homo sapiens
gcaaagcaaactcaaggtggcaatgccctaaacaagatcttgtagagataagctcagagcctatgcatttgtgtgcacacgtgcacacacacacacactcrcacagcttaagccatttgtaagaaaatatttagagccataagaaaaatgtattgggagtaaccatttctggttagtatgaaatattgctaatgtttatag

SEQ ID NO: 529603 - DNA, 201 bp, Homo sapiens
tttggttaaggtaaaggaatccttgacctcagctaagagttttacaaccagctagtttgtgtatgttaagatgtttgtcaatgagtttatattttaattastaccatgaagtctgctatctcatagctgaaacagagccagttctaaattttgggaactcaaatagttattttcttttgctcattttacacttaactatac

SEQ ID NO: 529604 - DNA, 201 bp, Homo sapiens
acatagtctttgtccttttgtgtctggctcattttacttagcatgttttcaagatgtatccatgttataacatgtatcagaattccattcctttttatggytgaattatatttcattgtatgtttataccacattttgtgtatacgttcatctatcgttgtttctagcttttggctattgtgaataatgttgctatgaaca

SEQ ID NO: 529605 - DNA, 201 bp, Homo sapiens
tccttcattatacaaataggaaatggtggccattacggttgtgagtttacaagattacatagctggacagttgcagaactggccctagaattcaggacttrgtatttactgagcagtcttatttccactactttttactgcttcctcctactactgaagagctgttggcttcagagttcctcttactaatgatttgtgtct

SEQ ID NO: 529606 - DNA, 201 bp, Homo sapiens
cccttgcctagcagtgagatgctgtggctgctgcagtttaggtcaggggcctggctgaaaccagttaccctgactaagaaggaggggtcatacaaacataygttctaggcatggggataggggacacttcttacaagaagcaggtatggggtatggcacagaggtggtcagcaggggaaaactgtggcccctgtagccatc

SEQ ID NO: 529607 - DNA, 201 bp, Homo sapiens
aacatttgaacatctgagacacatatattgtggccaactaaattctgttgcctgatgtttttcaagcatttatgacaattttccccataggttatcttgastatcaatatgattttctaaatgggaaaattgctgagtcctagatacaatgtaaggtgaaaatgccttggcaacttgggaacactgacacaaagtagcgtt

SEQ ID NO: 529608 - DNA, 201 bp, Homo sapiens
gcttcctatattattgttaggaaatcatttttcatccagtaaaacaatggaactagatttttaaaatagatgatagatctttgtctgctaagtttttttaraaaaaatattaaatacatttttcactcagctgcctgaaaatgaaaatcttttatcccttttaaaactacatctgaaaatatcttatttttttctttgggg

SEQ ID NO: 529609 - DNA, 201 bp, Homo sapiens
tatgacattacaaattctctaatagatctcaaaaatagtatttattgtagaggaattctacagaggactagtccattttgagtctatcttgtaccagaaascattctaattattcaagggtcctttcagtgttaatcccatagcagagaagcctcctagatctctcattaggagtttcagtgacaaaaacgaagtgagggt

SEQ ID NO: 529610 - DNA, 201 bp, Homo sapiens
gtggtggcacatgcctgtaatccaagctacttggttgggaggctaaggcaggggcatcacttgaacccaggagggggaggctgcagtgagctgagattgcrccactgcactccagcccggcaacagagcaagactgtcaaaaaaaaaaaatggaagaaaaaaagaaatattatttgttgtaattcttatcaaaatcaatgt

SEQ ID NO: 529611 - DNA, 201 bp, Homo sapiens
tccctcacatctagtcattagcaagtctcatagaccctacagtatatcttgattttgactctttttcctccttccaaggctcgcagtctagtccagaccastgctttctcctgactgcgtgattgcagtagcctcctaatagatctgtcccttgccccttgtagcttctccacacaacagctagagtgatgttttctgctt

SEQ ID NO: 529612 - DNA, 201 bp, Homo sapiens
tttctcatctcattaaatggcactaaaactcacttcagtgcccaggccaaaattctagcatcttctctttttctctccctcacatctagtcattagcaagyctcatagaccctacagtatatcttgattttgactctttttcctccttccaaggctcgcagtctagtccagaccactgctttctcctgactgcgtgattgc

SEQ ID NO: 529613 - DNA, 201 bp, Homo sapiens
caccacactgtacagtcagaacctctccctgggctccaggcggggtatatccatcttcctacttgacattttcacttgtatgtctaattggcatctcaaawctactatgtccaccccaacctgtatcacttcagatctccttttctggtctttctcatctcattaaatggcactaaaactcacttcagtgcccaggccaaa

SEQ ID NO: 529614 - DNA, 201 bp, Homo sapiens
tagtcccagctacttgggagactgagggaggagaattgcttgaacccgggaggcaaaggctgcaatgagccgagatcatgccgctgtactccagcctggasgacagagtaagacttcgtctaaaaaaaaaaaaaaaaaaaaaaaaagaaatacatgaaactgagtaacttataaagaaaagagttttgattggctcacagt

SEQ ID NO: 529615 - DNA, 201 bp, Homo sapiens
aaaagtcatttcacatatttgcacatagttttgggggttgctaatatagatagctactatcatctattaaatgtatgttgtgtagtaaacttaaaaagaasgtccttttatttcaaagtagttgggtctgaaaatctctgctttttaagtggagttcttagtctgtttaaatttatgtaatcagtcctgtgattggattta

SEQ ID NO: 529616 - DNA, 201 bp, Homo sapiens
aggtgggtcattttattttatttttaatattcctttttaggtaaattacattgattttctaaagtgaaaaccttttatttctggggtgaattcaaccttaycaaaatgatcttttcttatacgttgatagaattggtaggctaacatttagcttaaaattttttttatccatagtaatgaatataccaatatattttaatt

SEQ ID NO: 529617 - DNA, 201 bp, Homo sapiens
aataaaaataaataaataaatacaatgatatatttgtctgtgtttccacttgaatttaagctccccaattagagatttctgtctgctttgttacttaggaytccccctttttgccacaatgccttacatgttgctggggtcacatatctgttgagttaattcataatgctcagagttgaaatggagaggaagactgtgacc

SEQ ID NO: 529618 - DNA, 201 bp, Homo sapiens
tggcacacctggccttcatggactgtctttatcttaccggtaccttaaggttctgagggattttttttaaaaaatcagttttcttactgtttggagtgaaygattaatgtgaaactctgcagaggccgtcctcaaggaatgttctttgatgaataagttggttaaatttaatgaataaggatttcatcttcttggcaactt

SEQ ID NO: 529619 - DNA, 201 bp, Homo sapiens
gttgactcttgttcaattggccagttgctgacttggcacacctggccttcatggactgtctttatcttaccggtaccttaaggttctgagggatttttttwaaaaaatcagttttcttactgtttggagtgaatgattaatgtgaaactctgcagaggccgtcctcaaggaatgttctttgatgaataagttggttaaatt

SEQ ID NO: 529620 - DNA, 201 bp, Homo sapiens
caaaaagaccactctggctactatatggagattgtactattagtagggaaatcacttagggggattatagtaataccagcagatgatgttggttcaaactrggataatggtcttcaaattagtgtgatggtctgggcaagatggaaatttgggaattattagcatataaatggtatttagtgtcatgggaatgaatgagat

SEQ ID NO: 529621 - DNA, 201 bp, Homo sapiens
taagcaaaaacgtgacggttgatttaactaagcaaaatagaatgcctaagtttcaccctgaataataataatagctgctattggccctgcgcagtgactcrtgcccgtaatcccagcactttgggaggccgaagctggcagatcacttgaggtcaggagttcaaaaccagcctggccaacatgatgaaaccccgtctctac

SEQ ID NO: 529622 - DNA, 201 bp, Homo sapiens
caatgagctgatggttaaagggaattccaagaatcactggtgaccactaggacttcaaatcgatctgtgttcttgtttcttacagtattcatgtttataaytctagcagcattgctgcattaataatttaagaaattaaaaattaatgggatgtctacaacttgccacagtgcttggcttatagtaggtgttcagtacgtt

SEQ ID NO: 529623 - DNA, 201 bp, Homo sapiens
acggtagtaaacaaaatagtgaaaatccttgttcttacattccagagagacagacaaacaagtaggaaaatggagcaggtcagatggcagtaagcactgtrgagaaagagctgggttagaagggggcgcgtaatttttttttcttttttttttttcttttttttttttttgagacacggtctcactcttgttacccaggct

SEQ ID NO: 529624 - DNA, 201 bp, Homo sapiens
gaacggtagtaaacaaaatagtgaaaatccttgttcttacattccagagagacagacaaacaagtaggaaaatggagcaggtcagatggcagtaagcactrtagagaaagagctgggttagaagggggcgcgtaatttttttttcttttttttttttcttttttttttttttgagacacggtctcactcttgttacccagg

SEQ ID NO: 529625 - DNA, 201 bp, Homo sapiens
tatttaggaagtgaggatgatatggtttgctaacttactggatgtgggagaggaagcaggagttgagtgtgacttccaggcttctggcttggacacaggcrgatgtcacgctgaccagccaaggtagcaaaatacaggatgaggtgcaggtgtatgggagatcagtgtgaacatttgaacatctgagacacatatattgtg

SEQ ID NO: 529626 - DNA, 201 bp, Homo sapiens
tgagtggcaggatacctcaccaaagtacttgggcattgtgctttcttttggagaagagccagtgacacatttacgctgggatttacatgcttggagttacrctcttagcaaggtaataagcacaatatgtaggtgactggcaggggacaaaagattagagcagagagaccagttaagaggcttttgcagtaacctaggtga

SEQ ID NO: 529627 - DNA, 201 bp, Homo sapiens
gctgagaaatctgaatatattccaatggtagtgaaaactattgaagagaagtgacatgttataatggatggcaatgtagcagggaattttaagggagaagkaactagtttggggtccaagaggagaagcatgttccaaaacccttaactttgggaatttagaactagcttttttactatcttctgcacagcataacttcag

SEQ ID NO: 529628 - DNA, 201 bp, Homo sapiens
catccctttgtagatctgaggtaagctttagactgtctccccagaatgatacacatcagtatgtataaccaaaaattcagtttattaacttcctaacgccygttcatggatccttcaagggcccttggatccctattgaaaaccctgtgcctttgatttgatttgtatcactcattatcggggtccagaattttcttgtta

SEQ ID NO: 529629 - DNA, 201 bp, Homo sapiens
atattaataataaaaatactattcatagttttctaatagtctaaaatttgtttttattttctctgtggtcttctgcttttctgtttatatttaaaaggcaytgtggccaaacaataaaaaaagaaccttgggaaggatattaaaggaatagacagcataaaacagcagacaagatgtctgagatttttctcatttgctttt

SEQ ID NO: 529630 - DNA, 201 bp, Homo sapiens
aacagttgttttcactatagtgtgtaataaagttttatatttgtttcttgaaggcccagaagtaaaactaaaaaatagtgttgatagtaataggaaatgakaaattaaatctaaggcctctggtgactgtgaagtctaaactagctttatattttaggtgtgtttagggaggtcatgtgatggctgtcatgagaataaggc

SEQ ID NO: 529631 - DNA, 201 bp, Homo sapiens
ttgcagtgagctgagattgcgccactgcactccagcctgggcaacagaatgagactccatctcaaaaaaaaaaatctgtatacaagtggttaacattttcwaaaatattcaagcttctgctaagtactagaaatgatccaagggatacagtgatgagaagagtaaacatagtagtctagtgagggagacagacaatagaca

SEQ ID NO: 529632 - DNA, 201 bp, Homo sapiens
aaagagggctttgccaatgtgattaagttaaggctttttttttttttttttttttttttttttaagaaacagagtctcgttgcccaggctggaagtacagkggctcgatctgggctcactgcaacctccacctcccaggttcaagtgattgtcctgcctcagcctcctgagtagctgggactacgggtgcatgccgcaaca

SEQ ID NO: 529633 - DNA, 201 bp, Homo sapiens
ttaaaactacatctgaaaatatcttatttttttctttggggtttgttgaacagtgtgaaagataactatagatctttgccttattcacttagcatgttgtrtaaaagattcttgttgaatttgttatggaacagataatgaggatggatcccttactctgaatgcccttcaaagtgtaatggcacagttcacaaaagaagt

SEQ ID NO: 529634 - DNA, 201 bp, Homo sapiens
atatgaaattctgggttgaaaattcttttctttaagaatgttgaatattggcccccactcccttctggcttgtagagtttctgccgagacatctgctgttmgtctgatgggcttccctttgtgggtaacctgacctttctctctgcctgcccttaacattttttccttcatttcaactttggtgaatctgacaattatgta

SEQ ID NO: 529635 - DNA, 201 bp, Homo sapiens
ttctttcaagtcaaattaatttacaataaacatgcagttatgttatagaaaaaaatccaagggtctacagtcttttgatattctatcaatcaaaatagttraagatgtcctacatgaaggcattacatgagatgctgagggagataccaagctggctgcctgacctcaagaaacaaacaacctagccagacagaagtaact

SEQ ID NO: 529636 - DNA, 201 bp, Homo sapiens
ttttttgaagggttttttgtgtctctatctccttcagttctgctctgatcttagttatttcttgccttctgctagcttttgaatgtgtttgctcttgcttytctagttcttttaattgtgatgttagggtgtcaattttagatctttcctgctttctcttgtgggcatttagtgctataaatttccctctacacactgctt

SEQ ID NO: 529637 - DNA, 201 bp, Homo sapiens
tgacctacattttgctggaattgctcagactgctgtgtggagaatagactgtcaaagccaggccagaagcagggagaccttgttaggaggctgagcagtcmaggtcctggcttggatcaaggtggtggctgtgaaaattgagatgtggttggattttagataaagttggaagttacaactggcagtacgagctgtcacatc

SEQ ID NO: 529638 - DNA, 201 bp, Homo sapiens
taagctttttgatgtgttgctggattcagtttgccagtattttattgaggatttttgcatcgctgttcatcagggatattggtctaaaatattcttttttygttgtgtctctgccaggctttggtatcaggatgatgctgtcctcataaaatgagttagggaggattccctcattttctgttgattggaatagtttcagaa

SEQ ID NO: 529639 - DNA, 201 bp, Homo sapiens
tcgtggtggataagctttttgatgtgttgctggattcagtttgccagtattttattgaggatttttgcatcgctgttcatcagggatattggtctaaaatwttcttttttcgttgtgtctctgccaggctttggtatcaggatgatgctgtcctcataaaatgagttagggaggattccctcattttctgttgattggaat

SEQ ID NO: 529640 - DNA, 201 bp, Homo sapiens
catccttcgggtaactatctcatcacagcttcttcagatggtacccttaagattctggacctcttagaaggaaggctcatctatacacttcaaggacatayggtattaacactcagattcttgctttttatatataaaaatataaaataatatatattttaaatttctgatccatttttatgtccctttattgtttttcca

SEQ ID NO: 529641 - DNA, 201 bp, Homo sapiens
tctaaatatacaatcatgtcacctgcaaacagggacaatttgacttcctcttttcctaattgaataccctttatttctttctcctgcctgattgacctggycagaacttccaacactatgttcaattggagtggtgagagagggcatccctgtcttgtgccagttttcaaagggaatgcttccagtttttgcccattcagt

SEQ ID NO: 529642 - DNA, 201 bp, Homo sapiens
aattgtatctatgagatgggtttctaagtatcttattgtgtgttataagtgccttttaatatcatactaagtgtgagcttctggacattttcaagagcttwcaaaaactaagtggcattgtatttttataaccccattgagaagactaagtaagaaatgaaatgtcctatcaattttattttgtcatgcttcaaacaataa

SEQ ID NO: 529643 - DNA, 201 bp, Homo sapiens
ttgtggttttgatttccatttctctgacagccagtgatgatgagcattttttcatgtgtctgttggctgcataaatgtcttcttttgagaagtgtctgttyatatcctttgcccattttttgattgggttgtttttttcttgtaaatttgtttaagttctttgtagatgctggatattagccgtttctcagatgggtagat

SEQ ID NO: 529644 - DNA, 201 bp, Homo sapiens
tggatctgaccatggtaactaggatttccctgttttcctcagacttttatgtacctggcataagagaatttggtgcagtggtagatacgtggagactgggrccaactagcttgttagagtagaaagcccagtgcatgtagaatcaattactcttctgtccatatctctgcagaccccaaatgagtggaagaaacagaaaat

SEQ ID NO: 529645 - DNA, 201 bp, Homo sapiens
ccacaaagctgcgatcacctccttggacctcagccccaacggcaagcaacttggtaagtcttattcttgttttgcttttgtaatgagactaaactccatgrgccggaaacctttcctcctgtccgggcagggtccctaggagaacggctaagggcctgtatgagggttgagagcacccggagacgagggcccagcgcggcg

SEQ ID NO: 529646 - DNA, 201 bp, Homo sapiens
aaccagactttccttcagtgtgtgtgtgtgtgtgatatttttctccggagcagcagttcccttctttcttacacattttgatgagaagacagtagagccaytctaagcgatggcgatagctcttaatgacagtaaagcatcaaaatagttattctaggagaattgcagaatattgtaagcagggattataattggttaaaa

SEQ ID NO: 529647 - DNA, 201 bp, Homo sapiens
ggtggaaattgttggagggattagtaagggaataacatgatttgatttgtacctcaaaaagaccactctggctactatatggagattgtactattagtagrgaaatcacttagggggattatagtaataccagcagatgatgttggttcaaactaggataatggtcttcaaattagtgtgatggtctgggcaagatggaaa

SEQ ID NO: 529648 - DNA, 201 bp, Homo sapiens
tgtcctcaggacctcctgatgctgtgtcatgtttaaaaaaaaaaaaaaaggaaaattagagcagtccttctaacttaataattattggggtactacttttycattcgtgccaagctttatcaatcttccaggctgggctgggagtgatatctactgcaggccagcagtgtcttcgggtgtctggtcaccattctaacctgt

SEQ ID NO: 529649 - DNA, 201 bp, Homo sapiens
tgagtttgttcttggagcccaagcttattcagtgtcgcacagagatggtgcccattagtgtaagaggaggtgaataggtagtttctctagactaacctttrttataatctaatttaacaaaggttaatttaaataaataaggtataccatatatttggaaatacattcatgcttttaaaatgtaaatagtatagtcttttt

SEQ ID NO: 529650 - DNA, 201 bp, Homo sapiens
taacattacatttttttctaagcactctacaatccagatttagtgattctcattgacctacttcctattattggagccattctagggctacatgcatatartaaaatttgttttttaggcaagagttagatctacctttcatttgtttatttgttcattctttgtcaagtcagttatttccaccattgattgcatttttcc

SEQ ID NO: 529651 - DNA, 201 bp, Homo sapiens
gagcccaaatgaactttgtatgttggcaaaagaacataggtttcagtgactttatatagccaggccctatgtttctctaacagtgatactaattgtgttcraatttataacattacatttttttctaagcactctacaatccagatttagtgattctcattgacctacttcctattattggagccattctagggctacatg

SEQ ID NO: 529652 - DNA, 201 bp, Homo sapiens
ctttcaataatttcagcttttattttagattcagggagtacatgtgcaggtttgttacatgggtttactccatgatgctgagatttggggtacaattgatkccatcacccaggtagtgagcattgttctcaatagtttttcaaacctttccccgctcctttcctccctcttctagtagtccccagtggctattgttgccat

SEQ ID NO: 529653 - DNA, 201 bp, Homo sapiens
tatttctttccataatttagtaccctcctttgagaacacaattaaaaaaaaatcctttccttattgtcaaagtggcagtgttcttaaaccagatcatgagrttgcccctgctcaaaatctagagtagtttcccatcgcaggttttttttttctttcaataatttcagcttttattttagattcagggagtacatgtgcagg

SEQ ID NO: 529654 - DNA, 201 bp, Homo sapiens
ttttgcatccaaaagaacagaaggtgagccaacagataagtaaaattcttcatcagcttcactgtgatgatcatttatgtttctacttcacatttttttcragtcaggtgtatttttggaactaacatcagttgccagaattttctgacgaacttcatgggcctgaactgatctgttggtggcttcacttggttctacaac

SEQ ID NO: 529655 - DNA, 201 bp, Homo sapiens
cagatttttgcctactgttgtgatgcagtggtaattcatttcttattgaagaattgctataaacaggactctcctctgattttaccacccaccaattagayggatgcctggaaattcttcgacttctcgtgacagttgaagtcacttcttcagacacaagtttgttcttggactcactagaaaagcgcttctttttagatt

SEQ ID NO: 529656 - DNA, 201 bp, Homo sapiens
tggatagttgggcttctagctttgatctattgtgaatagtattgccacaaacattgcacatgtcttttgctaaccatacataagaatttctgtgggtataktcctagaagtggaattgctgaatcaaatactaagtatatattcagcttcaatagatatttcaaaatagattttcaaagtggttataaccactagtagtat

SEQ ID NO: 529657 - DNA, 201 bp, Homo sapiens
gatcccactttcttgaggaagaaaacacatggacaaattctgatgttaggaatattttaagtatatatcttcaatattatttatccaggaccaaagtaagycctgatgcaggaaatgagtgagtttcacagctttctgagcccctactcgacccaggaagccccgctggaacctcctctctcttgggcccagggccagctt

SEQ ID NO: 529658 - DNA, 201 bp, Homo sapiens
tatgatgtcagtttagttaaatattttgggtacatttttaatttgtagccaaaataaaaccctgacattatgacattacaaattctctaatagatctcaaraatagtatttattgtagaggaattctacagaggactagtccattttgagtctatcttgtaccagaaagcattctaattattcaagggtcctttcagtgtt

SEQ ID NO: 529659 - DNA, 201 bp, Homo sapiens
gtctgataggcctctcaaacataacacgtccaaaatttattctttaccacttctccataaaatttgcatcagcatagctacatcataacacagcacattgyttagctttatttttcttcctaacccttgtcacctagcattacatcacatatctacatatttacttttctccttcacccactagagtataaccatgatagc

SEQ ID NO: 529660 - DNA, 201 bp, Homo sapiens
gaagtatttctaatacttacaattttgttgatagaaattacatatataaaatttatttattcagtgttttcaaaattttcaaagattaagaattttagccyttccatttaggattctgctaattctttccaaggcaaatcactgccacagttgatcctgctagtcagtgcaaaactaatcgtaagaacaaatgggaagaac

SEQ ID NO: 529661 - DNA, 201 bp, Homo sapiens
cccctgccaccccaccccacaacaggccctggtgtgtgatgttccccttcccaggaaagcttttactttgaggtccctgagctcagtctaatccatacccmctgtctcacgtattaagatgccacccaggtaacatttcacatgctgttgcagagcagattccctattgtgttatttgtccttcagaggtgctaaacttac

SEQ ID NO: 529662 - DNA, 201 bp, Homo sapiens
ttctcattgttcagttcccacctatgagtgagaacatgcggtgtttggttttctgtccttgcaatagtttgctgagaatgatggtttccaccttcatccaygtccctaaaaaggacatgaactcatcctttttatggctgcatagtattccatagtgtatatgtgccacattttcttaatccagtctattgttgttggaca

SEQ ID NO: 529663 - DNA, 201 bp, Homo sapiens
tgtgctgcacccattaactcgtcatttacattaggtatatctcctaatgctatccctccccacttccccatcccacgacaagccccagtgtgtgatgttcsccaccctgtgtccaagtattctcattgttcagttcccacctatgagtgagaacatgcggtgtttggttttctgtccttgcaatagtttgctgagaatgat

SEQ ID NO: 529664 - DNA, 201 bp, Homo sapiens
ctggtcccggcctagttctttccatgtctttcaatttctttgcttttactttctgagattgtcaggccacacaatcatatatcctgaaacataaataaaattatgttgctttcagccaaccaaccaaccaactcatcacttaaatgtcaaattgacttcaattgacttttgcaatggaagattttttttagtgtaatttga

SEQ ID NO: 529665 - DNA, 201 bp, Homo sapiens
gctggtcccggcctagttctttccatgtctttcaatttctttgcttttactttctgagattgtcaggccacacaatcatatatcctgaaacataaataaaattatgttgctttcagccaaccaaccaaccaactcatcacttaaatgtcaaattgacttcaattgacttttgcaatggaagattttttttagtgtaatttg

SEQ ID NO: 529666 - DNA, 201 bp, Homo sapiens
agtgcactccagcctgggcaacagggcaagactccgtctcaaaaaaaaaaaaaaaaaaaaaactcttataaaaaagtcaaggttatgaaattttctagacrgggaacaactttagtattatgaataaataattgttaagtaccaaattgtgttttaaagactctacttcaaattaataaatatggatccctcactaagcca

SEQ ID NO: 529667 - DNA, 201 bp, Homo sapiens
tgctggtcccggcctagttctttccatgtctttcaatttctttgcttttactttctgagattgtcaggccacacaatcatatatcctgaaacataaataaaattatgttgctttcagccaaccaaccaaccaactcatcacttaaatgtcaaattgacttcaattgacttttgcaatggaagattttttttagtgtaattt

SEQ ID NO: 529668 - DNA, 201 bp, Homo sapiens
catgtcagtgcactccagcctgggcaacagggcaagactccgtctcaaaaaaaaaaaaaaaaaaaaaactcttataaaaaagtcaaggttatgaaattttytagacagggaacaactttagtattatgaataaataattgttaagtaccaaattgtgttttaaagactctacttcaaattaataaatatggatccctcact

SEQ ID NO: 529669 - DNA, 201 bp, Homo sapiens
gtgctggtcccggcctagttctttccatgtctttcaatttctttgcttttactttctgagattgtcaggccacacaatcatatatcctgaaacataaataaaattatgttgctttcagccaaccaaccaaccaactcatcacttaaatgtcaaattgacttcaattgacttttgcaatggaagattttttttagtgtaatt

SEQ ID NO: 529670 - DNA, 201 bp, Homo sapiens
agtgctggtcccggcctagttctttccatgtctttcaatttctttgcttttactttctgagattgtcaggccacacaatcatatatcctgaaacataaataaaattatgttgctttcagccaaccaaccaaccaactcatcacttaaatgtcaaattgacttcaattgacttttgcaatggaagattttttttagtgtaat

SEQ ID NO: 529671 - DNA, 201 bp, Homo sapiens
cttgtgtctctaatgccaagcaggaaatttgatacaatattgtggatcaaaataagctgttactaatctctatttttaaagctttattgttaaaaaaaaaagtttctgtaaaggaatatactggtggccatataaacatagttttaaaatattgttctcaaattccttactctttattctttttatattgtcacttatata

SEQ ID NO: 529672 - DNA, 201 bp, Homo sapiens
tgtatatacacagattaatccaaagcttgaggtaatcgatttgcagatctctactccccctgttatggatatcctttcttttgattctaccacagtaagtygggtttttttttttttttttgacacttaagtggcatttaatcatttggcataatccattttcctttaaaaaatgttgggggaggagataaaacgtggcct

SEQ ID NO: 529673 - DNA, 201 bp, Homo sapiens
gtaataaataagtgagaattgaacaagatttgtgtgaggaaaagtcaagaaagccgtttcagtcccagagctgaggggagagaaggggaagaggaggcagyggcatatttgtcaggtgcgaagagggaaggcaagctgtcttcatgagggagccaggaggagcaaagcactgtggcctgcaggtacatagtgtgctccagg

SEQ ID NO: 529674 - DNA, 201 bp, Homo sapiens
ttatcttcactctgccagcattagttgctagcaactgatgtgttttattagacttattgcatgagtagtatgcataaattaggatgagaaattgatatccrtagtcttcttggccatgagaaagcattaccaagtactttttttctttatttccctttatttctcagggacctgtctttactgtttcattttcaaaaggtg

SEQ ID NO: 529675 - DNA, 201 bp, Homo sapiens
atgagttaggttttccccctgtagcgagaaggagcaaacaggaggtttatgagatgtgctgcctccttgtgaggtagtcagtagactaaaattgcacattyctggcctagaaaatatcatagatcattaaaaatctttggtccaccttttgagactcactgtctctcccagtacccttcaagttttgcaaagcctcattac

SEQ ID NO: 529676 - DNA, 201 bp, Homo sapiens
cctgcagaggagggacatgacgtgacttgtgtcttaacaggttcactctgcctgctgtaagaggacaggctggggatgttgatgggggtggacaaagagaytaattaggaagctaatgaaatactcagacgggaggcaatactggcttgacccagggaggtagcagaggaggtggtgataagcgatcggattctgggtgta

SEQ ID NO: 529677 - DNA, 201 bp, Homo sapiens
gctgtaggcagaatccaggctatgtcttccagtttctctctctctctctctcttagtgttcctcaggtcatgcgttatctatagttccaggaggtccagtygctccatgttcagggctcctcagactcagtttgcctctcttggactgattatatcatagagctgtatgtgttacagtattaacaccttgtccccataggt

SEQ ID NO: 529678 - DNA, 201 bp, Homo sapiens
tgacttttatttttaaacacagctatgctttcctggtaaatatcctcagttagttgggttggaaatcttgggggcaaggctcaaaagaaagcccaagtccrtgatacaaactgtgtggctgtaggcagaatccaggctatgtcttccagtttctctctctctctctctcttagtgttcctcaggtcatgcgttatctatag

SEQ ID NO: 529679 - DNA, 201 bp, Homo sapiens
aatttgtaagaaacaaaaaactggagacggtaacatttcttttcagaaaatagtgttccagacagagcctctaagtaactgcagctgattttggtcaaatyaatgagtgagaaagcttgagttgactcaaggaagttattggtacttaaggtgacacaaagacgggtggccatttggacattgtgtgacagacaaagagca

SEQ ID NO: 529680 - DNA, 201 bp, Homo sapiens
ggcatgaaatatcaaattctctctatgtgaaatagccccctcccgggttcttcctacttatctaactacagatccttcgtagtactcctggcctaggcackccatcttaattaaaaacatgagaacagtacctctctctcttttttttgatgggaaagaagcccagtttttacacaaggtatcttgaccctacccatgttg

SEQ ID NO: 529681 - DNA, 201 bp, Homo sapiens
atgaggtctcgccatgttgtccaggtttgtcttgaactcctgagttcaagccatcctccagcttcagcctcccaaaggactgagattacaggcatgaaccrccatgcccatcctgacttttatttttaaacacagctatgctttcctggtaaatatcctcagttagttgggttggaaatcttgggggcaaggctcaaaaga

SEQ ID NO: 529682 - DNA, 201 bp, Homo sapiens
caccaacactccctgctaatttttgtatttttagtcgagatggggtttcaccatgttggccaggctggtctcaaactcctgacctcaggtgatccacccgyctcggcctcccaaagtgctggggttacaggcgtgagccactgcacctggccaatttttaaaatcttatttagtaaatttattgagtacctgttatatacc

SEQ ID NO: 529683 - DNA, 201 bp, Homo sapiens
tactaattaaacatcaattaagtagtaaatcatagaatgatgggttagaaaattatgaaaggatgctaaaattagtgtgtgacagtttggtgaggaagacratatttatatagtcttgtctctccatctattagtctgttcacacacttctataaagaaccgcctaagactgggtaatttataaaggaaaaaggtttaatt

SEQ ID NO: 529684 - DNA, 201 bp, Homo sapiens
gagcattctcatttacatgcctgtggttcccataaaaatagccaccatttttcacatactactaaacattttactactaagcatgcatgtagattctcacwttccacaaattagccttaaaggggtaaggtaacttcctcacagacacacagcaaggaaatgatgggggcaagcaaggctccgattaaacaacctcagagg

SEQ ID NO: 529685 - DNA, 201 bp, Homo sapiens
aggggcatcacttgaacccaggagggggaggctgcagtgagctgagattgcaccactgcactccagcccggcaacagagcaagactgtcaaaaaaaaaaaatggaagaaaaaaagaaatattatttgttgtaattcttatcaaaatcaatgtgtatctttcaatggccattaaatgaatcttctcctgctgtctttatcag

SEQ ID NO: 529686 - DNA, 201 bp, Homo sapiens
acacaccagtagcaataagcaaacattgtgcccagatattggtttctaaataccattatccattaaaagaaatcagagcttttggaggggaaaaaaaaagscccatttcagggctggagtgggagaagtacatcttagaacatcgtgtaattctagaaaataagggagtatttgaagaatggaaatatatcaaaaggacac

SEQ ID NO: 529687 - DNA, 201 bp, Homo sapiens
tagaacaaaagcctcataagggcagggatcttgccagtctcattcacagctatattcctactacccacagcagtgcccagtgccaggtactgacaagtgcycagggaatctttgaatgaatcagtgggtgaaaatttttcccacaaactccacaaggacagggaccatgtctgttttacctacagcttatggcaacacaca

SEQ ID NO: 529688 - DNA, 201 bp, Homo sapiens
attttagggctgattcaatccagactccttcattatacaaataggaaatggtggccattacggttgtgagtttacaagattacatagctggacagttgcaraactggccctagaattcaggacttggtatttactgagcagtcttatttccactactttttactgcttcctcctactactgaagagctgttggcttcagag

SEQ ID NO: 529689 - DNA, 201 bp, Homo sapiens
ttaataaatttttacttactgtaaaatcagggtaaactacccagcatggaaaatttttccttgaaaggttattttcttgacttttttttttttttttttttcttttctgaggcgagtcttgctctgtcgcccaagctggagtgcagtggcacaatcgcagcttactgcaacctctgcctcctgggttcaggtggttttcct

SEQ ID NO: 529690 - DNA, 201 bp, Homo sapiens
tgcagtgctgccattactgctcattgcaaccttgacttcctgggttcaggtgattctcctacctcagactctgagtagctgggactacaggcatgcaccamcatgcctggataattttttgtatttttagtagagacagggtttcaccatgttgcccaagctggtctcaaactcctcagctcaagtgatccacctgccttg

SEQ ID NO: 529691 - DNA, 201 bp, Homo sapiens
tcctagcctatcgtagtccttctgccttggcctctcgaagcactgggattacaggcatgagccaccgtgcctgggcttgatacttacgcagtattgaaaartactaggcccatggtaccaattcagtaaaggtttctgttgttgttattgccagtcctcaaagacatgtgaaatttgaataaattaaattcaatttcttca

SEQ ID NO: 529692 - DNA, 201 bp, Homo sapiens
tcacctgagccctggaggtcgaggctgaaataagccgagattgcaccactgctttccagcctgggtgaccctgtctcaaaaaaaaaaaaaaaaaaaaaaaagaattccctcattcttttgagtgaataccagtaaagtttaaggaattcagtagtagttcagctaacttctcatatgcctcttaaactctcgaatgtccat

SEQ ID NO: 529693 - DNA, 201 bp, Homo sapiens
tgggtatacatacagaggggaagaaagcagatgtgcttcataagatggtatgaagagttcatggtccagtggtggagacaaataattaacaagtaaacacraatccatttgttggaacaacatgatgaaacaaaggaaaatagtcaaagctgtgaaggaaaggaatagaatgcttttttcttttttttttttgagaccaag

SEQ ID NO: 529694 - DNA, 201 bp, Homo sapiens
tcctgttatataatttgggctattttcaaggacatgtgaatcagttttactagaaataagttcaagaatttcctcattctgggctgggcacagtggatcaygcctgtaattctagcactttgggaggtgaaggcaggaggattgcttgagcccaggggttcaagaccagcctgggcaacatggcgaaaccctgtctctaca

SEQ ID NO: 529695 - DNA, 201 bp, Homo sapiens
tgctgggaatgtgtttttatagaaaatgtattctgaagataagaaatagccaaaggaaaatttgaattttttataaaagtgtctgtctgtctgtctgtctrtctatctatctatctatctatctatctatctatctatctatctatctattgagacagtctcactttgtcacccaggctggagtgcagtggtgcgatcttg

SEQ ID NO: 529696 - DNA, 201 bp, Homo sapiens
gttggtttagggtctcaattttaattaataaaatacttggtttttatttgcttgtccttttgaattcctgttttaataattttaaaatgagcacaaagaaygttgaagttcagattaatctcttctgaatgatgtttttttcctctgtgatgagttgtttctgacttttttccttttgtatttgtaatgttgattaagatg

SEQ ID NO: 529697 - DNA, 201 bp, Homo sapiens
tgagtgctgggaatgtgtttttatagaaaatgtattctgaagataagaaatagccaaaggaaaatttgaattttttataaaagtgtctgtctgtctgtctrtctatctatctatctatctatctatctatctatctatctatctatctatctattgagacagtctcactttgtcacccaggctggagtgcagtggtgcgat

SEQ ID NO: 529698 - DNA, 201 bp, Homo sapiens
tcattttctaataacaagaaggaatattatcaagttgttcatgtaagggaaaattttttatggaagtaaattataggagatactttattcgttgtcgttgtattgaatcatctatatataagtcttttatcaaagggtaatcgtaatgtaagacaatttatgaaaagtcccaataatgtgaaatttggtcttcaaaatatt

SEQ ID NO: 529699 - DNA, 201 bp, Homo sapiens
tgaacctgtgaggcagagcttacagtgagccgagatcgtgccactgcactccagcctgggcgacagagcaagactctgtctcaaaaaaaaaaaataataawaaaataagtgagctgaactcacctgaagtggtttacttctgtgggttaagaagttctagtcagtgttcatagtcgtttcgttttgataattgttgaacca

SEQ ID NO: 529700 - DNA, 201 bp, Homo sapiens
ttcattttctaataacaagaaggaatattatcaagttgttcatgtaagggaaaattttttatggaagtaaattataggagatactttattcgttgtcgttgtattgaatcatctatatataagtcttttatcaaagggtaatcgtaatgtaagacaatttatgaaaagtcccaataatgtgaaatttggtcttcaaaatat

SEQ ID NO: 529701 - DNA, 201 bp, Homo sapiens
gcgtgaacctgtgaggcagagcttacagtgagccgagatcgtgccactgcactccagcctgggcgacagagcaagactctgtctcaaaaaaaaaaaataawaataaaataagtgagctgaactcacctgaagtggtttacttctgtgggttaagaagttctagtcagtgttcatagtcgtttcgttttgataattgttgaa

SEQ ID NO: 529702 - DNA, 201 bp, Homo sapiens
agggagtaataaataagtgagaattgaacaagatttgtgtgaggaaaagtcaagaaagccgtttcagtcccagagctgaggggagagaaggggaagaggasgcagtggcatatttgtcaggtgcgaagagggaaggcaagctgtcttcatgagggagccaggaggagcaaagcactgtggcctgcaggtacatagtgtgct

SEQ ID NO: 529703 - DNA, 201 bp, Homo sapiens
tttgacagaggataagctgaaagactgccttgaaaatcagcaaaagcttttcagtgctgtccaacagaaaagctgaataaaaaattcattttcatttgttrggcagaggcccaataaatgaacaaatgtacatacactcaggaaggtagtacaagatactccatacaacacaaccatgtgctatttatcatggcatttctt

SEQ ID NO: 529704 - DNA, 201 bp, Homo sapiens
atgcatacaccaaaggtttctcttccaactctgttgattcattgttccctttgaataagtcttctcttcttcctctttgatgtgtagaatgagaatactaratactaatatttgtcagagtggacagtagcaagttatataaaaagatggtaaaatatgaactacagagatgtcaattgcttgtccagaaaaatatttcaa

SEQ ID NO: 529705 - DNA, 201 bp, Homo sapiens
tagagcagctaaaaaatgtacatatacctggttttcacctccagagagtccatttccattggtctgggataagcccctagcatcagtcttttaagaacccmcatatgattctgttttacagccagtgttgaaaaccactaatttaagtgaatatttttatcctgtagttatcacctcagggcctttggaggcatctgacag

SEQ ID NO: 529706 - DNA, 201 bp, Homo sapiens
tgttcttacattccagagagacagacaaacaagtaggaaaatggagcaggtcagatggcagtaagcactgtagagaaagagctgggttagaagggggcgcrtaatttttttttcttttttttttttcttttttttttttttgagacacggtctcactcttgttacccaggctggagtgcagtgctgccattactgctcatt

SEQ ID NO: 529707 - DNA, 201 bp, Homo sapiens
atggcgtgaacctgtgaggcagagcttacagtgagccgagatcgtgccactgcactccagcctgggcgacagagcaagactctgtctcaaaaaaaaaaaawaataataaaataagtgagctgaactcacctgaagtggtttacttctgtgggttaagaagttctagtcagtgttcatagtcgtttcgttttgataattgtt

SEQ ID NO: 529708 - DNA, 201 bp, Homo sapiens
agaatttagctgaaagggcaagtaaatatgtaggaaggagagagcctatattaagttaagatgaggaactagaaaccagttaggcaccagcacaataaacrtaaggcactcctatcttggtttcttctgtgtttcctgttgagactggatccagtgcttggtttagcctacggctgagaggacagccttttagaaaggagg

SEQ ID NO: 529709 - DNA, 201 bp, Homo sapiens; identical to SEQ ID NO: 26561

SEQ ID NO: 529710 - DNA, 201 bp, Homo sapiens
gtttttaagctttaaagtatgtaaattttcaagcatacatgaaaatagaatgaatagcatcactcccctgcctcatattcccgtcaatcagcttcaacagytgtcaggattctgcccatcttgtttcatctacacctcccctcactttttcccctggagtatttttagaaaaaatcctacatatcatttccccccataaat

SEQ ID NO: 529711 - DNA, 201 bp, Homo sapiens; identical to SEQ ID NO: 26557

SEQ ID NO: 529712 - DNA, 201 bp, Homo sapiens
tataaccaaaaattcagtttattaacttcctaacgcccgttcatggatccttcaagggcccttggatccctattgaaaaccctgtgcctttgatttgattkgtatcactcattatcggggtccagaattttcttgttaaagaaaatttctgacaaaagtttaaatcgttgaatttgtgtaaggtcatatgcgttataacaa

SEQ ID NO: 529713 - DNA, 201 bp, Homo sapiens
agtaagtgacagcatggatttgaacacagtgagtctaatttcacagggtgttcttttaaccaccacactgtacagtcagaacctctccctgggctccaggsggggtatatccatcttcctacttgacattttcacttgtatgtctaattggcatctcaaaactactatgtccaccccaacctgtatcacttcagatctcct

SEQ ID NO: 529714 - DNA, 201 bp, Homo sapiens
tttcattttctaataacaagaaggaatattatcaagttgttcatgtaagggaaaattttttatggaagtaaattataggagatactttattcgttgtcgttgtattgaatcatctatatataagtcttttatcaaagggtaatcgtaatgtaagacaatttatgaaaagtcccaataatgtgaaatttggtcttcaaaata

SEQ ID NO: 529715 - DNA, 201 bp, Homo sapiens
ctggctgctgctcatgcactgctgcctgcactgttattctcagtcacataaaaggcatgctgcccttgtggtaaagtcaaactaattcatacaatttttttcctcaaaattatgtcttctttttgaaaactatttcctaccatggaaatatgcttaatatgtctaagtttttttgagggagtagtggtagctatccatccc

SEQ ID NO: 529716 - DNA, 201 bp, Homo sapiens
tgagatgtctctactaggtgaggtttatgggaatgtttgtcatttgccaaagtcttagctaatatattatgatgcttttctcttgactttctatcttgaargagtgcagtgctctcagccggggatatggtgcgttgtttcagaggccccgcctttcttggtatagtaatcccaagatctactggcaaaactttgatctga

SEQ ID NO: 529717 - DNA, 201 bp, Homo sapiens
tctctgtttttgttttatagtccttttgcttccagatgatttttctgcattcttggaatacatttcatattttgtagatctacagtcattttctgtttcayctgtcaaagcataacttgtatccagtactgttttatcagagggctgagatgtctctactaggtgaggtttatgggaatgtttgtcatttgccaaagtctt

SEQ ID NO: 529718 - DNA, 201 bp, Homo sapiens
taatattatcttcattctttgagcttcctgtagatctagaacaatccagatttttcctcttagccaagtctgcctcatcactttccaatggctcactcagbaaacaactggaaatttcatcatgaccaatgatacctccagaacctttagcatttaaaaacttctgtactctttggctgtctttagttgctgtcttctgcc

SEQ ID NO: 529719 - DNA, 201 bp, Homo sapiens
cggccaacacagcgaaaccccgtctccaccaaaaaaatacaaaaaccagtcaggcgtggcggcgcgtgcctgcaatcgcaggcactcggcaggctgaggcrggagaatcaggcagcaaggttgcagtgagccgagatggcagcagtacagtccagcttcggctgggcatcagagggagactgtggaaagagagggagaggg

SEQ ID NO: 529720 - DNA, 201 bp, Homo sapiens
cccccacctccctcccggacggggcggctgccgggcggagacgctcctcacttcccagacagggtggctgcggggcggaggggctcctcacttctcagacrgggcggctgccaggcggaggggctcctcacttctcagacggggcggctgccgggcggaggggctcctcacttctcagatggggcggctgccgggcggagg

SEQ ID NO: 529721 - DNA, 201 bp, Homo sapiens
cgcggttaggagctggagaccagcccggccaacacagcgaaaccccgtctccaccaaaaaaatacaaaaaccagtcaggcgtggcggcgcgtgcctgcaakcgcaggcactcggcaggctgaggcaggagaatcaggcagcaaggttgcagtgagccgagatggcagcagtacagtccagcttcggctgggcatcagaggg

SEQ ID NO: 529722 - DNA, 201 bp, Homo sapiens
gggctcctcacttcccagaaggggcggccgggcagaggcgccccccacctcctggatggggcggcggccgggcagaggcgccccccacctccctcccggayggggcggctgccgggcggagacgctcctcacttcccagacagggtggctgcggggcggaggggctcctcacttctcagacagggcggctgccaggcggag

SEQ ID NO: 529723 - DNA, 201 bp, Homo sapiens
ccgggcagagacgctcctcacttcctagacgggatggtggccgggcagagacgctcctcacttcccagacggggtggcagccaggcagaggctgcagtctyggcactttgggaggccaaggcaggcggctgggaggtggaggttgtagctagctgagatcatgccactgcactccagcctcggcaacattgagcactgagt

SEQ ID NO: 529724 - DNA, 201 bp, Homo sapiens
ggccctattttccccttggtctgaaatgttcttcaccacctcactctttatttggctgactccctgtccttcacacctccacttaaaatgcccctgatcaytctatctaaattaagattccacccccacacaaaataaaacttcctgctttatctttcatgcctcttagcacaatttaaaatgatataaagccaagcacag

SEQ ID NO: 529725 - DNA, 201 bp, Homo sapiens
cagtgaacaaaacttcttaatttttgcacagtacaaattatcattcttttcctctatacttattaacgttaatgtcttttttctttcttttttttttttaattgatcattcttgggtgtttcttgcagagagggatttggcagggtcataggacaatagtggagggaaggtcagcagataaacaagtgaacaaaggtctct

SEQ ID NO: 529726 - DNA, 201 bp, Homo sapiens
caacatagccctttcatacttttgttaggttttacaagagttaaaccattttatttaaactattttatatgtttcaaagtctgtattgtgattaagtattractataattaaatcaaatgagttataaatattaaactgtttatttccaggagaggaaaattctcagaatttaaagctcatacagctccagttcgaagtgt

SEQ ID NO: 529727 - DNA, 201 bp, Homo sapiens
tgagaacatgggtcttggagttctggatgggatggaagtgagtgagtcataaggaaagcaagttgtcctgtgggttgcaatcagagatttgagaagtgctyatgttctgctggtgacaagatcctcagaatgggttgctgaggaggcaggagaaaaaaggtctttggagaggccctattttccccttggtctgaaatgttc

SEQ ID NO: 529728 - DNA, 201 bp, Homo sapiens
ttcggtggggacacagccaaaccatattatgctacaagttactaattaattccaaagggaaaaatagtaactttacatggtagaggtaggatcacctaaaycaagcaatcaaagtaaacatcaacactattaggacaaagagacatcatgtgcaccctaatatgatgcactgctaagggtacaacataacttttgtgatat

SEQ ID NO: 529729 - DNA, 201 bp, Homo sapiens; identical to SEQ ID NO: 26558

SEQ ID NO: 529730 - DNA, 201 bp, Homo sapiens
tagctccaacaaagaggaaatctctctgagcacttcagacattgagttgagacaccagaaaggccaggtctttaggaatcaggaccacacctgaaagaaakggccatgccctaggactaatttccaagctcaagcagacccatgctaccaaagaacaaaaggaagtgtacaagaacaaaaaggagccacctataatttaat

SEQ ID NO: 529731 - DNA, 201 bp, Homo sapiens
tctttctaaatcatgtcttagtagggacagagcaataatggtggatcgtggcaacgggaaggaagatgatgtgtcagttatctattgctgtatgacagtcrcaaaaccttagtacttactacagaaacaatgatttgtcacattttgtgggttgtctggatggttgttttgcttatatggtgcaggctgagattactcatg

SEQ ID NO: 529732 - DNA, 201 bp, Homo sapiens
tctttgcaagaaagaaaacatgcaaggtgatgatctccttggctttcttcctgggagcacttttcctgctgcacagcagagaggtagagcagcctcagagwaacagcctggctgagctcaggatgtgcagagtgggaaactgtgagactaccagggatctctcactgctagactgagagctgaatgatactaatgaccatg

SEQ ID NO: 529733 - DNA, 201 bp, Homo sapiens
ctgaggcagagcctggtggctgtatgaggaaaagcacaggtgagggtgggtggggatgtaggaggggccccagggaggctggccaggtcaagagcagcgcygacttgtgccctgggtgagaggagatgccagtgtagtgccctcctctctttgacctacattttgctggaattgctcagactgctgtgtggagaatagact

SEQ ID NO: 529734 - DNA, 201 bp, Homo sapiens; identical to SEQ ID NO: 143522

SEQ ID NO: 529735 - DNA, 201 bp, Homo sapiens
ccagctaatttttgtattttttagtacagacagggtttcaccatgttggccaagctggtctcgaactcctgacctcaagtgatccacccacctcggcctcycaaagtgctgagattataggcatgagccaccgtgcctggagggaaagcgaggtataagtagttgcttcagaagaaatcaaacacatatgaaccatggtaa

SEQ ID NO: 529736 - DNA, 201 bp, Homo sapiens
agccttaattatagtctcctccctacactgacagtttctcttttgcttctgcacaacaaatcagacataattgtaaaggggatttatttctgctttggcakgaagcacaattgcattcaatatttttgtgtgtactttgcatgtgattgtaatttaaaaacctggagaaatactggaagccaaaaaaagtagtgtttaaag

SEQ ID NO: 529737 - DNA, 201 bp, Homo sapiens
tggttagaaaactaaaataaaattactttttcaactatttacctttccattaatatagtggtaaataagccttaattatagtctcctccctacactgacartttctcttttgcttctgcacaacaaatcagacataattgtaaaggggatttatttctgctttggcatgaagcacaattgcattcaatatttttgtgtgta

SEQ ID NO: 529738 - DNA, 201 bp, Homo sapiens
tggctgagctcaggatgtgcagagtgggaaactgtgagactaccagggatctctcactgctagactgagagctgaatgatactaatgaccatgcagggctrgatgtctaggtctctagctccaacaaagaggaaatctctctgagcacttcagacattgagttgagacaccagaaaggccaggtctttaggaatcaggacc

SEQ ID NO: 529739 - DNA, 201 bp, Homo sapiens
aggcaggagggataccttgagcccaggagtttgagaccagcctggggaacatagtgggacccctatcttcaaaaaattaataaaaataaataaataaatamaatgatatatttgtctgtgtttccacttgaatttaagctccccaattagagatttctgtctgctttgttacttaggactccccctttttgccacaatgcc

SEQ ID NO: 529740 - DNA, 201 bp, Homo sapiens
cttagtcttggtctttgctgttatctcaggcacttctgctagtctccagttgtgcatctaagtatatgtttttgttctttgttttttaaactattttctasattttgtttaatccagccatatcttgggatttctgcctttgcttttccctggtagtgttgactttcagttcttggctataatctttgtcttttccaactt

SEQ ID NO: 529741 - DNA, 201 bp, Homo sapiens
agacaaagagtttcaactttaaatgttcactatgtcatttagtgtccaactttacggataggttgactatctaaataggcatttttagtcattaaaaaaaatctagtcaccaggaggatccctataactcaaaataacttgtttgtaaaagaaaatttgtttacttacccattagtaagttcctgcatattcattataaga

SEQ ID NO: 529742 - DNA, 201 bp, Homo sapiens; identical to SEQ ID NO: 143518

SEQ ID NO: 529743 - DNA, 201 bp, Homo sapiens
cgaaaattgttatattttgaaagtacttattacattatttttattttagtatcttgatgctcctgtcaaaagggaaatgaggcttttaaaaataaagtacyttaattctttattgactttttgccctaaattgctaggtgtgacccagcaatcttttaggaagagattttacagtggtgctttatttatatcaataatcca

SEQ ID NO: 529744 - DNA, 201 bp, Homo sapiens
cccacttctcttgcccaggctgctttttaaaaatatttttttattttttacttatttttaaattttctctttttatttatttttggttttcttgttagccmcctgttatatgggagaacgaaaattgttatattttgaaagtacttattacattatttttattttagtatcttgatgctcctgtcaaaagggaaatgaggc

SEQ ID NO: 529745 - DNA, 201 bp, Homo sapiens
atttttcgaaagggattctcctaaacccacccacttctcttgcccaggctgctttttaaaaatatttttttattttttacttatttttaaattttctcttyttatttatttttggttttcttgttagccacctgttatatgggagaacgaaaattgttatattttgaaagtacttattacattatttttattttagtatct

SEQ ID NO: 529746 - DNA, 201 bp, Homo sapiens
ccaaggctgtggaactctcctacgagttctgctgatcaggaaatttaagaatttatcttaaaaatgcaaggaaaaaagactgccttggcaattgtgaatgstgctttcaatctcctagcaccgagcctggcacttaggcagctttcagtaagtgggtgaatgaatgactgaatgaatgaatgaatggctcagctgaggaat

SEQ ID NO: 529747 - DNA, 201 bp, Homo sapiens; identical to SEQ ID NO: 26559

SEQ ID NO: 529748 - DNA, 201 bp, Homo sapiens
gaactgatctgttggtggcttcacttggttctacaacaaactgcagagaggcttctttcttccttgaagaaagtggaactgactttggatgtgatttctgkcactctttgcttggtgactgaatacaagtgtcttttattttgcgtgttgaattaagcactgattttgtagaatttgtgctaaaatcattggcaagacttt

SEQ ID NO: 529749 - DNA, 201 bp, Homo sapiens
gctaaaatcattggcaagacttttttcttcaaaacagtcttgtaagatttccagaacattctggccttgctctgtgttaatgtcacgtgccctggaaggtygacaaaatcttcttctgtagccatttttgagatgatccagacccgacacagccatgttccggccccgctgagccagcgcaggtgtctgaggtggaagccc

SEQ ID NO: 529750 - DNA, 201 bp, Homo sapiens
aaagggcttttctttaaattttcaatgtgtatctctttcttttagttcaatgatagataattggttagaaaactaaaataaaattactttttcaactattyacctttccattaatatagtggtaaataagccttaattatagtctcctccctacactgacagtttctcttttgcttctgcacaacaaatcagacataattg

SEQ ID NO: 529751 - DNA, 201 bp, Homo sapiens
taaactcccatctaggtagattgtaatctgggacatagctgcttgctgccaagcaaggtataaggactttattttaatagtgcattctgaagacatagatkctcataaagtagttagactttttaaaagaatatctccaaagggcttttctttaaattttcaatgtgtatctctttcttttagttcaatgatagataattg

SEQ ID NO: 529752 - DNA, 201 bp, Homo sapiens
tagctgtatactacccattaatggcttcaaaattaataggtttctctagagattataataaagattaaagacaaagacagacagtagacttgtagcctcakctgtcttttccgaggtgactgaattaatcatttggatatttcagttgatagctacatggtatatttttcaagtcttctgataaaaatgcaatttccaatt

SEQ ID NO: 529753 - DNA, 201 bp, Homo sapiens
agctacatcataacacagcacattgcttagctttatttttcttcctaacccttgtcacctagcattacatcacatatctacatatttacttttctccttcmcccactagagtataaccatgatagcagggcctctttattcactccttgaggtaggcagaacaaccattcctctcaaaaatatttatgtcttcatccccag

SEQ ID NO: 529754 - DNA, 201 bp, Homo sapiens
tctttattcactccttgaggtaggcagaacaaccattcctctcaaaaatatttatgtcttcatccccagaatctatgaaaatgtttccttacatggcaaaragggctttgccaatgtgattaagttaaggctttttttttttttttttttttttttttttaagaaacagagtctcgttgcccaggctggaagtacagtggc

SEQ ID NO: 529755 - DNA, 201 bp, Homo sapiens
agtgaatctgtgggcaagcagcaagtaaaataaatgtgttctgatttactttaattacagatgacttaacatcacctaactaagttggacggtgtttatcrttactgaactataattagaaataaatttaaatgaaattatgttttagatggtagacagatggagttaaccagtgttaaaggtgttaataataaatgtata

SEQ ID NO: 529756 - DNA, 201 bp, Homo sapiens
acatcataacacagcacattgcttagctttatttttcttcctaacccttgtcacctagcattacatcacatatctacatatttacttttctccttcacccmctagagtataaccatgatagcagggcctctttattcactccttgaggtaggcagaacaaccattcctctcaaaaatatttatgtcttcatccccagaatc

SEQ ID NO: 529757 - DNA, 201 bp, Homo sapiens
aagcaatctagccatccatctgcagtgctataggtacggtttgccatggattggattgtgacagaatgagtagtgatgacatttcagtggcatctggctgkcatgtggaatttcgcaccccctccccttctccactaagtgtgtagcttatggcaccacttagaacgctgtgtggcctcttccctggttttggtgctttag

SEQ ID NO: 529758 - DNA, 201 bp, Homo sapiens
tgttgctgggtcaggctgacccaggccatgcaaagccactctcaaacaaatttttcacgtatacccctaaaaattctattaaacactgacttttcttcatygtggaattagagttcaattgcactctacaaaatgctgagccttgtgactgaattttttttttgtgaccttaaggtagtcagcctctgtgtacacagttta

SEQ ID NO: 529759 - DNA, 201 bp, Homo sapiens
ctgacttttcttcatcgtggaattagagttcaattgcactctacaaaatgctgagccttgtgactgaattttttttttgtgaccttaaggtagtcagcctytgtgtacacagtttaaattatctgtaaacatgcatggctgcttaaattaagtataaaacatgacttgcttttgtaaaacactttgaggccctgtgatata

SEQ ID NO: 529760 - DNA, 201 bp, Homo sapiens
taggtaaccaaatagtagatgaggaaaatgtctcttacttattagttatcccaactaacagaatgttttaataatagaattagaatatcatcatttgcaawctccaggaattaatagatatagacattgagtcactatgacattcatgagaaatgaccaaacattattaatctgccttctaatcagagaataggccaccac

SEQ ID NO: 529761 - DNA, 201 bp, Homo sapiens
taattctttattgactttttgccctaaattgctaggtgtgacccagcaatcttttaggaagagattttacagtggtgctttatttatatcaataatccagyatagttaggctgttcattcctcataatagagtacataacagaaaagtgggactttcacattttcatatttaggcacgttccaatttaattccaaaaatac

SEQ ID NO: 529762 - DNA, 201 bp, Homo sapiens
attcatttgggcaagttcagagctggaggttcctgcaggatatccaaaaggggatgcccagcaagcagttgtactcatgggtggagattccaggaaggaaktctgggcacatagatggtaaattcccgaacaagtaattttcatggcatgcttcatctttttacatatttttcatctgctttttgtctctcagcagttgca

SEQ ID NO: 529763 - DNA, 201 bp, Homo sapiens
ccatgcccctgcccaacatgctgggggtccagaagccacctcggggtgactgagcggaaggccaggcagggccttcctcctcttcctcctccccttcctcrggaggctccccagaccctggcatgggatgggctgggatcttctctgtgaatccacccctggctacccccaccctggctaccccaacggcatcccaaggcc

SEQ ID NO: 529764 - DNA, 201 bp, Homo sapiens
gtggccgggaccctgagcctctgcgcagagccacccgccccgacgtacttaggcggcatagccctgagacctctggccagcgccaggcaggcagcgggggyggcagaggcctgggcctgagtcttctggctctgcctctccctggggacaggagggagcctgggggtgtgggtggggagccggccggccgtgacccagcgc

SEQ ID NO: 529765 - DNA, 201 bp, Homo sapiens
tccccagaccctggcatgggatgggctgggatcttctctgtgaatccacccctggctacccccaccctggctaccccaacggcatcccaaggccaggtggrccctcagctgagggaaggtacgagctccctgctggagcctgggacccatggcacaggccaggcagcccggaggctgggtggggcctcagtgggggctgct

SEQ ID NO: 529766 - DNA, 201 bp, Homo sapiens
ctcggggtgactgagcggaaggccaggcagggccttcctcctcttcctcctccccttcctcgggaggctccccagaccctggcatgggatgggctgggatyttctctgtgaatccacccctggctacccccaccctggctaccccaacggcatcccaaggccaggtgggccctcagctgagggaaggtacgagctccctgc

SEQ ID NO: 529767 - DNA, 201 bp, Homo sapiens
ggtctccagacccctggctgcgcataggacagaatccccatccccggcattgccacagaccattaattctgggctctcatgctctcaggaagcctcacccrggcccctggctcctgctgcacagccaggagggggttggattccggttccggtgacactgtcgggggctgctcctcacccccaggtgtgcacctggcacag

SEQ ID NO: 529768 - DNA, 201 bp, Homo sapiens
aggagaaacggccacccgtagctggagccatccttcccggagcctcgggcagatgcccagcaggatccactcgattcctgcaccaagagctctggacagcstcaccccccctgtgcccccaggctgtggccccagctgtttgtgcctggcgagggtctggctagctggaagagggggccagcggaggagagagtgggcgcc

SEQ ID NO: 529769 - DNA, 201 bp, Homo sapiens
cagccgccatgccggaacggagggagctgtgtccagcctggccgctgccgctgccctgcaggatggcggggtgacacttgccagtcaggtgaggctggctstaccctggggggccctggaagggtcctgggcacctccttgcatgtcctggggttactgctggcccatgagtgggtggttgtgaagggagctgtgtgggca

SEQ ID NO: 529770 - DNA, 201 bp, Homo sapiens
ccactccctagcagctgcccccacagggtgctggggacccaactgagctggtgaccagcctcccccgcccacagcaatatgccagccgccatgccggaacrgagggagctgtgtccagcctggccgctgccgctgccctgcaggatggcggggtgacacttgccagtcaggtgaggctggctctaccctggggggccctgg

SEQ ID NO: 529771 - DNA, 201 bp, Homo sapiens
gtcaacaccgccggcagttactggtgccagtgttgggaggggcacagcctgtctgcagacggtacactctgtgtgcccaagggagggccccccagggtggsccccaacccgacaggtaaacagccctggctgtgcctggcctggggaggcgggcaggcagtggacattgccgtgtggctgttaggcatggtggggggcact

SEQ ID NO: 529772 - DNA, 201 bp, Homo sapiens
cccactccctagcagctgcccccacagggtgctggggacccaactgagctggtgaccagcctcccccgcccacagcaatatgccagccgccatgccggaayggagggagctgtgtccagcctggccgctgccgctgccctgcaggatggcggggtgacacttgccagtcaggtgaggctggctctaccctggggggccctg

SEQ ID NO: 529773 - DNA, 201 bp, Homo sapiens
cctccgctggcgacgggacattattacttttggtacgcgctgtgacacttcaaactcgtaccgtgagtaataatgcgccgtccacggcaccgcatcgaaarcgccgctgagacctcagccttgacctccctcagcgtggccgggaccctgagcctctgcgcagagccacccgccccgacgtacttaggcggcatagccctg

SEQ ID NO: 529774 - DNA, 201 bp, Homo sapiens
gtgggcaggacccctcccgcaggcatggccgcctgacaccccgtttcctgcagatgtggatgaatgcagtgctaggaggggcggctgtccccagcgctgcrtcaacaccgccggcagttactggtgccagtgttgggaggggcacagcctgtctgcagacggtacactctgtgtgcccaagggagggccccccagggtggc

SEQ ID NO: 529775 - DNA, 201 bp, Homo sapiens
ccagcgctgcgtcaacaccgccggcagttactggtgccagtgttgggaggggcacagcctgtctgcagacggtacactctgtgtgcccaagggagggcccyccagggtggcccccaacccgacaggtaaacagccctggctgtgcctggcctggggaggcgggcaggcagtggacattgccgtgtggctgttaggcatggt

SEQ ID NO: 529776 - DNA, 201 bp, Homo sapiens
agacctctggccagcgccaggcaggcagcgggggcggcagaggcctgggcctgagtcttctggctctgcctctccctggggacaggagggagcctgggggygtgggtggggagccggccggccgtgacccagcgcctggctctgcccgcaggagtggacagtgcaatgaaggaagaagtgcagaggctgcagtccagggtg

SEQ ID NO: 529777 - DNA, 201 bp, Homo sapiens
ccagcagctcggccgcatcgactccctgagcgagcagatttccttcctggaggagcagctggggtcctgtgagtgcccccaccctccagagccctcctccygggtctgggcccagtgggcctagaggggctacccaggcttgggggtcgggggcgaccaaaggccaaggggccagtcagatctagctgggcggggaggctg

SEQ ID NO: 529778 - DNA, 201 bp, Homo sapiens
tgcacagcctggcctcgcaggcactggagcatgggctcccggaccccggcagcctcctggtgcactccttccagcagctcggccgcatcgactccctgagygagcagatttccttcctggaggagcagctggggtcctgtgagtgcccccaccctccagagccctcctcccgggtctgggcccagtgggcctagaggggct

SEQ ID NO: 529779 - DNA, 201 bp, Homo sapiens
caagaaagactcgtgactgcccagcgccccaggctggactgagcccctcacgccgccctgcagcccccatgcccctgcccaacatgctgggggtccagaarccacctcggggtgactgagcggaaggccaggcagggccttcctcctcttcctcctccccttcctcgggaggctccccagaccctggcatgggatgggctg

SEQ ID NO: 529780 - DNA, 201 bp, Homo sapiens
gcgtcaccccccctgtgcccccaggctgtggccccagctgtttgtgcctggcgagggtctggctagctggaagagggggccagcggaggagagagtgggcrccaccgtggggctgtcccaccggtggaggctccagcggagatgagctgggcaggcctcgcggagcaagtgcaaactgcacccgcgtcctgggggcatctg

SEQ ID NO: 529781 - DNA, 201 bp, Homo sapiens
caaatgggtgactctgtgggccccccttggaccctggagacgcccttgttctccctctccccagcctcatgcagagtggctgaagccccatcccaaagccyccaaaaccacagtgggtcctagaaggccccactttttgtctcatacgtccacaccaagaagcctgtctgagaacccccactttccaaatggtgcctagcc

SEQ ID NO: 529782 - DNA, 201 bp, Homo sapiens
gctagctggaagagggggccagcggaggagagagtgggcgccaccgtggggctgtcccaccggtggaggctccagcggagatgagctgggcaggcctcgcrgagcaagtgcaaactgcacccgcgtcctgggggcatctgcggggagacttaggggtcatgctttgtgccccaggccacccagaggagaaggccaccccgc

SEQ ID NO: 529783 - DNA, 201 bp, Homo sapiens
gcaggcggaggtcccacagcagcaccgaaagctggtcccgggccccttcccagcccccagacatcagggtgaccaggactgtgcataggcactaacccacractcctctccaaccagcagcccccaggaccggggaggcacaggtggcccccaccacccggaggagcagctcctgcccctgtccgggggatgactgattct

SEQ ID NO: 529784 - DNA, 201 bp, Homo sapiens
atagactggggtgcaaactcacccctgccctgctgtgaggagggccctggaaccaggcaggacaggagaaacggccacccgtagctggagccatccttccyggagcctcgggcagatgcccagcaggatccactcgattcctgcaccaagagctctggacagcgtcaccccccctgtgcccccaggctgtggccccagctg

SEQ ID NO: 529785 - DNA, 201 bp, Homo sapiens
cctgcggagggccctgcagtgcctcggaaggaacccacccagcctttgggaagcacccgtgagaggccctgggtgggaccctgcagcatggcaggggctcrccaggtctccagacccctggctgcgcataggacagaatccccatccccggcattgccacagaccattaattctgggctctcatgctctcaggaagcctca

SEQ ID NO: 529786 - DNA, 201 bp, Homo sapiens
gtttgcatagactggggtgcaaactcacccctgccctgctgtgaggagggccctggaaccaggcaggacaggagaaacggccacccgtagctggagccatycttcccggagcctcgggcagatgcccagcaggatccactcgattcctgcaccaagagctctggacagcgtcaccccccctgtgcccccaggctgtggccc

SEQ ID NO: 529787 - DNA, 201 bp, Homo sapiens
gcggccctcagcacctgtcggggactccctgggggctcctgctgagggtcctgccccggccacatgttcccatcattcttgggtcctgctctgggactccwgggctgaccccctctccacccccgcagccgtagggtgtgtgctgtccgggctcacggggaccctgtctccgagtcgttcgtgcagcgtgtgtaccagccc

SEQ ID NO: 529788 - DNA, 201 bp, Homo sapiens
ccctctccacccccgcagccgtagggtgtgtgctgtccgggctcacggggaccctgtctccgagtcgttcgtgcagcgtgtgtaccagcccttcctcaccwcctgcgacgggcaccgggcctgcagcacctaccggtgagtgccccaccacaccgagctcacccagccccagcctcccaagtcggccacacatcagcatgt

SEQ ID NO: 529789 - DNA, 201 bp, Homo sapiens
ctggaagaggaccagcgggcttcctggggcctgtggagcaggtgagggctatgtccctcggcgcccggtgttaggagggcgactgttccccaatcttccakcaacgctcctgctgcttttcttgaaccccgagcaaagcaccaccttgccgcagagcacccactccctagcagctgcccccacagggtgctggggacccaa

SEQ ID NO: 529790 - DNA, 201 bp, Homo sapiens
ttctgccacggcagccccctctagtggacacttggagccctgccgcggaggcgggggctggaggcttgtggagcccttcccaggggtcctccctagacccyggtggagcagagagggcgggggccggcccagggtcactgcccttctgcacccacagaagctgcagctggtgctggccccactgcacagcctggcctcgca

SEQ ID NO: 529791 - DNA, 201 bp, Homo sapiens
ctgtctccgagtcgttcgtgcagcgtgtgtaccagcccttcctcaccacctgcgacgggcaccgggcctgcagcacctaccggtgagtgccccaccacacmgagctcacccagccccagcctcccaagtcggccacacatcagcatgtcaggggcgaggcgggggtgaatcctgggacccaagatgggaaactgaggccag

SEQ ID NO: 529792 - DNA, 201 bp, Homo sapiens
gagtgcccccaccctccagagccctcctcccgggtctgggcccagtgggcctagaggggctacccaggcttgggggtcgggggcgaccaaaggccaagggrccagtcagatctagctgggcggggaggctgtggggagcagtgatctctgaccttcgcctcatccaaccctaggctcctgcaagaaagactcgtgactgcc

SEQ ID NO: 529793 - DNA, 201 bp, Homo sapiens
acctgtcggggactccctgggggctcctgctgagggtcctgccccggccacatgttcccatcattcttgggtcctgctctgggactcctgggctgaccccytctccacccccgcagccgtagggtgtgtgctgtccgggctcacggggaccctgtctccgagtcgttcgtgcagcgtgtgtaccagcccttcctcaccacc

SEQ ID NO: 529794 - DNA, 201 bp, Homo sapiens
gagcagtgatctctgaccttcgcctcatccaaccctaggctcctgcaagaaagactcgtgactgcccagcgccccaggctggactgagcccctcacgccgycctgcagcccccatgcccctgcccaacatgctgggggtccagaagccacctcggggtgactgagcggaaggccaggcagggccttcctcctcttcctcct

SEQ ID NO: 529795 - DNA, 201 bp, Homo sapiens
tgccctgctgtgaggagggccctggaaccaggcaggacaggagaaacggccacccgtagctggagccatccttcccggagcctcgggcagatgcccagcargatccactcgattcctgcaccaagagctctggacagcgtcaccccccctgtgcccccaggctgtggccccagctgtttgtgcctggcgagggtctggcta

SEQ ID NO: 529796 - DNA, 201 bp, Homo sapiens
gacccccagtggcactaacgtgggatcctcagggcgctctcccagcaaagcagtggccgcccgggcggcgggatccactgtccggcagaggtaaggaaccstgcagttcgttcgcttccagactcggagataggacccagaacctcgctgattctggggtggagaccctagcatgtgaagattgacaaaggcaaaatgagc

SEQ ID NO: 529797 - DNA, 201 bp, Homo sapiens
tagatacctgaaagaagcaagagagcaaatcacacaatggtttggggacgaataggcctcctaggcaaaaggagtgggtaagtatgaagattctgaggtcratgaggttggctttgaggagcaacagaagcaccatgttagaaccaagtgtgtaactggttagttttgaaaaccattgtgttgaggtatagaagggagaga

SEQ ID NO: 529798 - DNA, 201 bp, Homo sapiens
atcatgatcaaaggagtaaaagcaggaatttaggtggattctagcaaagaaagttttttttttttgattccttaactgtgtaataatggtagcatatgttrtaatgctattctaataatttccagaaaaggccatttgtaacattttcctctctttcaggaaaaatgccagctgtgggacaaggagtgcaggccgcacaac

SEQ ID NO: 529799 - DNA, 201 bp, Homo sapiens
tgtggcgattctacacagaagattcacctgggctcaaagtgtaagtcttaggaacagtccttgtgtttctgtccagtggcagcagagcagcagtggcagcrctctgtctctgtcaccagtagcgtttgccttgatgcgatttactgtacacaacagcctcatttgtgccaggcggactgggtttggtttgcctgtttatca

SEQ ID NO: 529800 - DNA, 201 bp, Homo sapiens
ccggtctttcgggggctccgtaactttctatccgtccgcgtcagcgccttgccaccctcatctccaatatggtatggcggcccttccatgatccccgcctytcccagaagccctgactcctcctgctttgcgccgtgcttttcctctgtagctcccttgcttcccccagcctcgggtgtgggtgtctaggccggggttctg

SEQ ID NO: 529801 - DNA, 201 bp, Homo sapiens
gctacttaacccttttcttcaggctgtttgctttccagtccatcgttcgctctgctgttactcttctgcgtagtttctgttacttgttgctgaactaaaamaaacaaacaaacaaaaaaaaaaaaccggggggataccaaagctcttagtggtcatttcagcctaacctttctttttcctttttttttttttgggatggaa

SEQ ID NO: 529802 - DNA, 201 bp, Homo sapiens
gaactaaaaaaaacaaacaaacaaaaaaaaaaaaccggggggataccaaagctcttagtggtcatttcagcctaacctttctttttccttttttttttttkgggatggaatctcactctgtcgcccaggctggagtgcagtggcacgatctcggctcactacagcctctgcctccagagttcaagcaattctcctgcctca

SEQ ID NO: 529803 - DNA, 201 bp, Homo sapiens
agccacctgttggctgcagggtcttagatattttgcttaaccttttctgaggccaatttgcctcatttataaaatggaaaaatcgtgactgcttttcaggrttattgtatgcattggcatcaggtaggcacttagttcattgtggttatcatgatcaaaggagtaaaagcaggaatttaggtggattctagcaaagaaagt

SEQ ID NO: 529804 - DNA, 201 bp, Homo sapiens
cagcctaacctttctttttcctttttttttttttgggatggaatctcactctgtcgcccaggctggagtgcagtggcacgatctcggctcactacagcctytgcctccagagttcaagcaattctcctgcctcagcctcctgagtagctgagactgcaggcacgtgccaccacacccagctaattttttgtatttttagta

SEQ ID NO: 529805 - DNA, 201 bp, Homo sapiens
ctaatagtatattattactaaaagtaagcatgctttctcttcttatttctagtggccctgttccagtattggttatgagtcttctgttcatcgcttctgtrtttatgttgcacatttggggcaagtacactcgttcgtagattcagttacatccatctgtcatctgaagaaggaggaaaaaacccaacatttcttggacca

SEQ ID NO: 529806 - DNA, 201 bp, Homo sapiens
attactaaaagtaagcatgctttctcttcttatttctagtggccctgttccagtattggttatgagtcttctgttcatcgcttctgtatttatgttgcacwtttggggcaagtacactcgttcgtagattcagttacatccatctgtcatctgaagaaggaggaaaaaacccaacatttcttggaccaaaagtatagtgac

SEQ ID NO: 529807 - DNA, 201 bp, Homo sapiens
aaaatcgtgactgcttttcagggttattgtatgcattggcatcaggtaggcacttagttcattgtggttatcatgatcaaaggagtaaaagcaggaatttrggtggattctagcaaagaaagttttttttttttgattccttaactgtgtaataatggtagcatatgttataatgctattctaataatttccagaaaaggc

SEQ ID NO: 529808 - DNA, 201 bp, Homo sapiens
cagaaatgtaaaattatcctgaatgattttgagttccctgtcattgggatgttcatgaggagtgtatcaggctgtggtttaacttatatgggctttgagtrctgtccccttcccaccctgggttttagagatttttcgtgcaggaatggaaaacatgtcctgtgggtgcggttccttgggaatggttctgcttaatgagaa

SEQ ID NO: 529809 - DNA, 201 bp, Homo sapiens
cagatgggctccagggtcagagctaggttcagccacctgttggctgcagggtcttagatattttgcttaaccttttctgaggccaatttgcctcatttatraaatggaaaaatcgtgactgcttttcagggttattgtatgcattggcatcaggtaggcacttagttcattgtggttatcatgatcaaaggagtaaaagca

SEQ ID NO: 529810 - DNA, 201 bp, Homo sapiens
ctcccccttttcttttattcttaaagaagtcaaaacgatctgctcttgaaaatagtgaagagcattcagcgaagtacagcaactccaataattcaggtaastggttatagatggtagtggggcccaggacacagagatcaggatcaggagtctctagttggtcaagaggtcttgagttctgctggccagaaactgggcaat

SEQ ID NO: 529811 - DNA, 201 bp, Homo sapiens
taatggtgcccatttaatgacagatgctgtgctatatctccttgaaagctaagactatttccagatgactggggtgcagttttttttggggaaaaaaaaaagagtcatatgataatcagccgagaaatagcccatgtagtttcctagcttgctgggcagattatggcgtaatgtaattggaggaaacgattggcctgagat

SEQ ID NO: 529812 - DNA, 201 bp, Homo sapiens
agaaagttctaggttaatggtgcccatttaatgacagatgctgtgctatatctccttgaaagctaagactatttccagatgactggggtgcagttttttttggggaaaaaaaaaagagtcatatgataatcagccgagaaatagcccatgtagtttcctagcttgctgggcagattatggcgtaatgtaattggaggaaac

SEQ ID NO: 529813 - DNA, 201 bp, Homo sapiens
taagctaaaaattcagtcccttcgtcaccctatccacattccaagagctcagtagtcccttgtgcatagtggctaccatattggatatcaagccttaggtyactgctctcttcaaactgctgaactggttgagaaagactgagcttaacggatagaacctgctagccctgcagccattggggttttgtgactactgagtcc

SEQ ID NO: 529814 - DNA, 201 bp, Homo sapiens
gctgcccttcacccagctctgctggctttgggccataatgtcccatctttggaaatcagagccagattgaatgatccctgggggccttccagtttttctartttatgaatctgtgaagtagagcccacatagagaagggaaggtttcaccctagttaccaagcagttttgacttagccctgaagggccacgggaatgggag

SEQ ID NO: 529815 - DNA, 201 bp, Homo sapiens
tgccagttagaggaattctgacaataatagcttctttggatctgaagtaggagagaaaaaaacatttaaatttaatgtcttcttcactgaagcatcttagsaaatttcttcagccttgtcaataaatatattctcctccaaccctgacagtctggcctttaggattcaggagttagtactagacctcgctcttcccctaag

SEQ ID NO: 529816 - DNA, 201 bp, Homo sapiens
cctgacagtctggcctttaggattcaggagttagtactagacctcgctcttcccctaagccagagagcctatgcagcaaagatagtatgattttaaaatcyaacattagttcttgtatgtacactgactttctggaaagatatacaggagactggtaatgttggtttcctccatggaagtaggtgggagacttcactgtgt

SEQ ID NO: 529817 - DNA, 201 bp, Homo sapiens
agagctcctttactttactttcatcttctgttttcccagtctccccagcacagaaagtactgatgagtagtaaaatgaccaaaagctcccttgtcaaaggmaaaaaggtgcatttatcattgataacataccaggctcttacccaagctcagatgatctcaatctttattactcaggattccttatttaatttattttatt

SEQ ID NO: 529818 - DNA, 201 bp, Homo sapiens
tctggatattaaccccttatcagacctatgatttgcaaatattgtgtcccatttcttgagttgtcttttactccgtttttctttgttgcaccaatgttttwtttatttatttatttatttttctttttttcttttggagacaggggctcgttctgttgcttaggctggagtgcagcagcacaatctcagctcactgcaacc

SEQ ID NO: 529819 - DNA, 201 bp, Homo sapiens
gggttttgccatgttggccaggctggtcttgaacttctgacctcaagtgatccacccacctcagcctcccaaagtattgggattacaggcgtgagccaccktgcccggctgcaccaaagttttaaattttgatgaagtttaattttttttcttttattgcctgtgcttttggtgtcatatccaagaaatcactgccaaatc

SEQ ID NO: 529820 - DNA, 201 bp, Homo sapiens
ttttcagtgtctaatcaaacttctgccttcttgtttggtgagtatacgtctttcttttattctcagtgctgatgatagagtcacagtattttttctgggtraacatggacagaaaagctggaaaacagaatggggagatacagtggatttcaggtcagactgaaattgtgtagggctaatctcttagatcataggctattt

SEQ ID NO: 529821 - DNA, 201 bp, Homo sapiens
ccaggaagtccaacattgaaaaaataggagtttcagtaaaagaaagcagaaggcatggaggggaagaaataatgacctaacaatacaataaaaggccaaakaacttaaggagattagtttttagtttgaaaggactgagtgctcaccatgagggatgaaaacagacacatgaaagtcacaaactgaggtcatagagaagat

SEQ ID NO: 529822 - DNA, 201 bp, Homo sapiens
tgataaaaaatacaatataaaatttactctctgaaccatttttaagtgtacagttcagtggtgttaactatcttcacattattgtataacaggtctctagrgcttacaacctgaaactctatacccatagaataatgactccccatttctccctccccacagctccgggcaatcactattctactttgtttctgtgatctt

SEQ ID NO: 529823 - DNA, 201 bp, Homo sapiens
gaatgtgttgagagaaggcttggatggagactttcaagttgaatagaaaaccaaaaaaaaaaaaaaaaaaagactacaagttgctgtaaaggaaaagtaarcatggctctagctcagttgtgaatattatttacttaaggtaaatgtgaatattgtaccaaatcgaattataatataatgatgtcaggaggattagggaca

SEQ ID NO: 529824 - DNA, 201 bp, Homo sapiens
tactgtatgaaatgacttatggacgaccgccagactcggtgcctgtggactccttccctcctgccccgtccatggctgtgggtcagtatggggttgggaasggtcttctgggccctagtagtgtgcagagccactcatcccctttccagagtccaggaaagacccagaggaagttgctgtcctccacagccagaaattctt

SEQ ID NO: 529825 - DNA, 201 bp, Homo sapiens
tggattcaagcgattctcctgcgtcagcctcccgagtagctgggattacaggcgactgccaccatgcctggctaattttttttgtatttttagtagagacrgggtttcaccatgttggcccggctggtcttgaactcctgacctcaggtgatccacccgccttggcctcccaaagtactgggattacaggccccagccact

SEQ ID NO: 529826 - DNA, 201 bp, Homo sapiens
ttaagctgggtaagctagctttttgctttggtctccttcagtgactttagatgggttaatgaaagcagatttgacaagagaattacaaaattgtactgtgytcttaagtgatgatgtaaaggcttccttggtccatgtcaaagaaaagtcattttgagtcattttcctgtgtatttggttatataaatgcaattatatttg

SEQ ID NO: 529827 - DNA, 201 bp, Homo sapiens
gtatgtgggagaaatgttttctcaaaatggggatgtgtatacatttgttatagcatattatgaatttactaagattttcttgattgtagtttactgtagawgtataagaagaaaataagttacttccaaaatatttgtaaagtctgcacagaaaaatatggaagagaaattattgtatgtatacttatactcttgccttta

SEQ ID NO: 529828 - DNA, 201 bp, Homo sapiens
tcaaaacactacttcttgtctcttacagattgttagaagatacagtgactttgatttgcttaacaacagcttacaggtaaatgttttgaaattctaattayacacattgattacttggggtgtctaaaaaactggctggagtccgggcacggtggctcaacgcctgtaatcccagcacttggggaggccaatgcgggtgga

SEQ ID NO: 529829 - DNA, 201 bp, Homo sapiens
gcacacaccaaagaggaccccttctcttgtggagtttaccacatccattatctgtctcctgttttcctttgttcctacagtttatgtcccttcctccatcygaagaaggaggaactagctggtaactgaataacttgaaaatgccatgtgttcagggaatatcactacattcgtatgcaattaaaccaccacagtgctact

SEQ ID NO: 529830 - DNA, 201 bp, Homo sapiens
acatgattctatgaattagatttttttttttttgagacagagtcttgctctgtcacccaggctggagtgcagtggtgcgatctcggctcactgcaagctcygcctcccggattcacgccgttctcctgcctcagcctcccgaatagctgggactacaggcgcccgccaccacgcccggctaattttttgtattttttagta

SEQ ID NO: 529831 - DNA, 201 bp, Homo sapiens
ctcaggtaagagtcagtgggtctacatcattggggtgaaccagctcagtccatggactagtgaggactcccacctttccaaattgcagaaagagcctggcytcaggacttccccgggttgccagctatgtctggcaggttggagggtcttgggagtcagcaggacttgggttccagttcccagccagctgcatcctagcta

SEQ ID NO: 529832 - DNA, 201 bp, Homo sapiens
agctatgccaccttggatagctcattcgatctcgctgagctgagatctaccacctagggtggctgtgaggattaatgagaagtattgggttaggggcttarcaaaattcccagcacatgatcagtactggttttaagttaattatctcttttcctccctcacttaagtcagaaatcacgtggtcctggtgcaagtgcattt

SEQ ID NO: 529833 - DNA, 201 bp, Homo sapiens
ctccctcacttaagtcagaaatcacgtggtcctggtgcaagtgcatttccagtttgaaaaacttcagcaccagacctcagtgatttgccagaatgcccacrtgctagggcttgacacagcagcctccctggcatgccaagatagggggtgttgtgtcaagaggaggggcagaaaggagtgggccctttggggaagtggcag

SEQ ID NO: 529834 - DNA, 201 bp, Homo sapiens
cctgcctcggcctcccaaaatgctgggattataggtgtgagccactgtacctggcctcaactaggatctttaccattcataaaacagatggttttagtggyttggtttattgatcttcagcttctcatcagtgacccgaccctttttatagacttttaaactttatttatttatcaccagaataactattcaaatgtaatg

SEQ ID NO: 529835 - DNA, 201 bp, Homo sapiens
gaacccgggaagcagaggttgcagtgaagtgagatcatgccactgcatgccactgcatgtcactccagcctgggtgacaaagtgagactctgtctcaaaamaaaaaaacaaaaaaacaaaaaaaccaagaaagaaaacctaatcttactggaccatcatgatatttgtggtctgttgtgactgaaatgtcattatgcagtg

SEQ ID NO: 529836 - DNA, 201 bp, Homo sapiens
agttttataactgaggttattcttcccttctctttttaaggaatatattattcgagtgcaaagaggaatttctgtggaaaacagctggcaggtaagcatctttttttttttttttgtcaattagaaaaatatttaaatgcgtgactaaaaccctgacttggggcctctgaaagtctggaaaaatcagaacatgcataaata

SEQ ID NO: 529837 - DNA, 201 bp, Homo sapiens
agcttttagcaccctgagaaagggggaaatggatcccattttagaagtcataagagcttaagtgtttgggataccagagggggagtaatagagtttttcctttttttttttttccttaaactagaagtcattcttatcagtgccttcctttgcaagcaccaagtatgtacagggggaagttaaagttgactcctcttcaga

SEQ ID NO: 529838 - DNA, 201 bp, Homo sapiens
gcttttagcaccctgagaaagggggaaatggatcccattttagaagtcataagagcttaagtgtttgggataccagagggggagtaatagagtttttcctttttttttttttccttaaactagaagtcattcttatcagtgccttcctttgcaagcaccaagtatgtacagggggaagttaaagttgactcctcttcagaa

SEQ ID NO: 529839 - DNA, 201 bp, Homo sapiens
caccatcttattttaaatgcaacatcagattagcagccatctagggagacagcatacaacgaagggaaagaagcaggctgttgaaatgttgggaactgggyagagagagaaagaactcagtctctgttccttagacttgagaaggaacccaggccctgccccttccagtgttgagaccttgagtccgtcatttcttttttt

SEQ ID NO: 529840 - DNA, 201 bp, Homo sapiens
gcagtggtgcaatctctgctcactgcaagctccacctcccaggttcacgccattctcctgcctcagcctcctgagtagctaagactacaaggcgcccgccrccatgccctgctaattttttgtattttaagtagagatgggatttcactgtgttagccaggatggtgatctcctgacctcgtgatccgcccaccttggcct

SEQ ID NO: 529841 - DNA, 201 bp, Homo sapiens
atagtccccatgtgagtgtgggtgtgtgtgagcgcaccctgacatgggatgggttccggccacctgagaccctaaactggaaacatggcataaataattamcttgttaagttggcaaaatctcaccaatgctaagcattataattgcttaagtaattttccatttcttctggattctttaattacattttaatatctatat

SEQ ID NO: 529842 - DNA, 201 bp, Homo sapiens
aaactggaaacatggcataaataattaacttgttaagttggcaaaatctcaccaatgctaagcattataattgcttaagtaattttccatttcttctggaytctttaattacattttaatatctatataattgctttaagtaatgaatgttaagtgcaaaaatacaccaagttaacaacagctaccctccaaaataataat

SEQ ID NO: 529843 - DNA, 201 bp, Homo sapiens
ccagcatgtctgcatagtccccatgtgagtgtgggtgtgtgtgagcgcaccctgacatgggatgggttccggccacctgagaccctaaactggaaacatgrcataaataattaacttgttaagttggcaaaatctcaccaatgctaagcattataattgcttaagtaattttccatttcttctggattctttaattacatt

SEQ ID NO: 529844 - DNA, 201 bp, Homo sapiens
aaagagctctttgtttcacctgacggtttgaaagaactgatgggatgtctgggcagagcaatacatttaaaaaagtgaaatgaagcttgacaaactgggtrtgttgaagcttggaagccacaaagttcaaaacagatactttatgaaattcactctcacatccccacaatgaaagaaaaggagccagaatattgggatttg

SEQ ID NO: 529845 - DNA, 201 bp, Homo sapiens
ctgacatagcagggacattataattgcagctgttggcaaaagagctctttgtttcacctgacggtttgaaagaactgatgggatgtctgggcagagcaatacatttaaaaaagtgaaatgaagcttgacaaactgggtatgttgaagcttggaagccacaaagttcaaaacagatactttatgaaattcactctcacatcc

SEQ ID NO: 529846 - DNA, 201 bp, Homo sapiens
aaaaatctgaccttccagatggcttacaggcaaggatttttaacggtggggtaaatttcaggaaaacagaagctacaggcaaaattataaatcagtacacygaggttgcacattggtttaagcttaaaagggcgggacatcttgggggtagggggtgctcacaggtagattcagagatctgacttgcagttgatcttagtt

SEQ ID NO: 529847 - DNA, 201 bp, Homo sapiens
gtctgctcacccagtgcaataaaatcagatacccacaccaaggctgttgcagtgacagaaaggaaggcatttattgcagagtgctgtgcaaggaggaccargcagcaaaatgctcaaaaatctgaccttccagatggcttacaggcaaggatttttaacggtggggtaaatttcaggaaaacagaagctacaggcaaaatt

SEQ ID NO: 529848 - DNA, 201 bp, Homo sapiens
aggatgttacaaaggatacagatgaaaagatgcatagggcaaggtgtgggggaaggagcttccatgccttccctgggcacatcacccttcaggaacctccrcatgttcagctatcaggaagctctccaaaccctgccctcttgggccttttatggagacgtcattggataggcatgattgacaaccatatagaaatgttgt

SEQ ID NO: 529849 - DNA, 201 bp, Homo sapiens
ctggagatagcgtcagaccccacaggttggggctcagtccccaaaactacctgctctttctgacaccatttgcaaggatgggactccagaacttttgaccrgccagcttcaagtaggagttcccaccgttaatttgctggagcagctcacagaattcagggaaacatgtttactggtttattataaaggatgttacaaagg

SEQ ID NO: 529850 - DNA, 201 bp, Homo sapiens
attcctgtgaatttgatagcacccagcctgaaggggagtcttgaggatttagaaggaaagcacatgtgaggccccagcacaatgcctggcagagtgagagygcctggcagagatgagaggttcccagcaaatattggctcctcctttcttttatctccttaatgttttgttgatgaaattgactcagcctgcaatctgacc

SEQ ID NO: 529851 - DNA, 201 bp, Homo sapiens
agagaaaaaaagaggaatcttgtataattagagtcaatgttgggaaaacttggaggtgagtgggaggggcattcctgtgaatttgatagcacccagcctgaaggggagtcttgaggatttagaaggaaagcacatgtgaggccccagcacaatgcctggcagagtgagagtgcctggcagagatgagaggttcccagcaaa

SEQ ID NO: 529852 - DNA, 201 bp, Homo sapiens
tatctccttttgcttcttaaatgaaccagttgttccagatgtgcgaggagctgcttctgccactcagagcttgctggctgtgcctggaagggttcctacargctgtgtgaagggagaatcattggcagggagttggtatatgagttgatcccatattcattattaataactaacacagcacccaggagctgccaagagcat

SEQ ID NO: 529853 - DNA, 201 bp, Homo sapiens
tgattgtcccccttttcctccacagggatatctgcattacctccacctcctccacctccaccaccaccagcagctcccttgcctcctgcgagcaccgaggyacctgcccagctctcgtctcaggctgtgaatggcatgagccgaggggccttgctcagctccatccagaatttccaaaaaggaactttgaggaaagccaaa

SEQ ID NO: 529854 - DNA, 201 bp, Homo sapiens
gtggagtttaccacatccattatctgtctcctgttttcctttgttcctacagtttatgtcccttcctccatctgaagaaggaggaactagctggtaactgmataacttgaaaatgccatgtgttcagggaatatcactacattcgtatgcaattaaaccaccacagtgctacttgactctgcataaccagatcctgtattt

SEQ ID NO: 529855 - DNA, 201 bp, Homo sapiens
agccaaaacctgtgatcacagtgctccgaagatcggctgaagcttcctgtttacacttggagggaaaagttcttttttattcctactcacccctacccccyaaactaccctcttcctgggaaagtaattgctgagccagtacagccacaaacagtactattttgcagatgctcatgtaagcagcttttcgagagaaataat

SEQ ID NO: 529856 - DNA, 201 bp, Homo sapiens
caatctctgctcactgcaagctccacctcccaggttcacgccattctcctgcctcagcctcctgagtagctaagactacaaggcgcccgccgccatgccckgctaattttttgtattttaagtagagatgggatttcactgtgttagccaggatggtgatctcctgacctcgtgatccgcccaccttggcctcccaaagtg

SEQ ID NO: 529857 - DNA, 201 bp, Homo sapiens
cttaagtaattttccatttcttctggattctttaattacattttaatatctatataattgctttaagtaatgaatgttaagtgcaaaaatacaccaagttaacaacagctaccctccaaaataataattatcttgtttttattaatctttcttaaattatatataggtaatatttatttcaatgtttattattagacatgt

SEQ ID NO: 529858 - DNA, 201 bp, Homo sapiens
acgtttgccatgttttaaaaggctcacaatcgtgtttacaaaccagtgctgtggttaatttgagtatatcctagtttcgaagtgagaataatcagcttgtrattcagactaatattttactgtctgttactatttgattaaatgacactaaaatctgaataatgacttgtgtcccccctttctctctctctctttgctgtt

SEQ ID NO: 529859 - DNA, 201 bp, Homo sapiens
ttaagtaattttccatttcttctggattctttaattacattttaatatctatataattgctttaagtaatgaatgttaagtgcaaaaatacaccaagttaacaacagctaccctccaaaataataattatcttgtttttattaatctttcttaaattatatataggtaatatttatttcaatgtttattattagacatgtt

SEQ ID NO: 529860 - DNA, 201 bp, Homo sapiens
taagtaattttccatttcttctggattctttaattacattttaatatctatataattgctttaagtaatgaatgttaagtgcaaaaatacaccaagttaacaacagctaccctccaaaataataattatcttgtttttattaatctttcttaaattatatataggtaatatttatttcaatgtttattattagacatgttt

SEQ ID NO: 529861 - DNA, 201 bp, Homo sapiens
tcagcactttgggaggccgaggtgggcggatcacctgaggtcaggagctcgagaccagcctgaacaacatggagaaaccccgtttctactaaaaatacaarattagctgggcatggtggcgcatgcctgtaatcctaactactcaggaggctgaggcaggagaattgcttgaacccaggaggtggaggttgcggtgagccg

SEQ ID NO: 529862 - DNA, 201 bp, Homo sapiens
aagctattaatgaggtgcaatgtgaggccaaaaagacgctttagtcttagagcttgattggttgtgtgacataggctgtcaggacctagttctaaatttcttttttttttttttcaaggtggagtctctctttgtcacccaggctggaatgcagtggtgcgatctcggctcactgcaacctccacctcctgggttcaggcg

SEQ ID NO: 529863 - DNA, 201 bp, Homo sapiens
gagggccaggcgcggtggctcacgcctgtaatcccagcactttgggaggccgaggtgggtggatcacgaggtcaggagatcgagaccatcctggctaacayggtgaaatcccgtctctactaaaaatacgaaaatattagctgggcgttgtggctggcgcctgtagtcccagctacttgggaggctgaggcaggagaatgg

SEQ ID NO: 529864 - DNA, 201 bp, Homo sapiens
aggccgaggtgggtggatcacgaggtcaggagatcgagaccatcctggctaacacggtgaaatcccgtctctactaaaaatacgaaaatattagctgggcrttgtggctggcgcctgtagtcccagctacttgggaggctgaggcaggagaatggggtgaacccaggagacagagtttgcagcgagccgagatcacgccac

SEQ ID NO: 529865 - DNA, 201 bp, Homo sapiens
ctttggaaggccgaggtgggtggatcacatgaggtcaggagtttgagaccagcctggccaacataatgaaaccccatctgtactaaaaatacaaaaattakctgggcgtggaggtgcatgcctgtaatcccagctttttgggaggctgaggcacgagaattgcttgaacccgcctcttgggaggtggaggttgcagtgagc

SEQ ID NO: 529866 - DNA, 201 bp, Homo sapiens
agtttggggtttgaggggggcaggtcattgttacaacagaagtaaatttggcatctatagaaatcaattatgatttttgaaagatttatctaaatatatcwatatagcatctctttaatgttagtcatttattagaaagatcctttatcctgatttgcttaaacctttcaataaattgcactttaaaggattataaataat

SEQ ID NO: 529867 - DNA, 201 bp, Homo sapiens
tgaggcaggagaatggggtgaacccaggagacagagtttgcagcgagccgagatcacgccactgcactccagcctaggcgatagtgcgagactccgtctcaaaaaaaaaaaaaaaaagccaacagaggttacactctaccaaaaacaagggaattatgtacaaaaaatgaatgtaggggatacaaaatggggtttagtatg

SEQ ID NO: 529868 - DNA, 201 bp, Homo sapiens
acaaaacaaaacaagaatgccataggccagaagcctagtagataagagcctagcaggcccagacctagggcaggcaggcaggaatgcagacaccaagacamattggatccaggagctcttacagcattacctgcgggggctgaggggagctggaggacaagtgagagcacctttaggaaggagggatgcaggaactggtac

SEQ ID NO: 529869 - DNA, 201 bp, Homo sapiens
accgcgcccagccggacttcatttttttaaggagtatgtagacataactagtctgatcagatattagcatatatattttggtagccctttattattattaktagtagtagtagtatttgagacagagttttgctctgttgcccaggctggagggcagtggtgcaatcttggcttactgcagcctccgcctcctgggttcaa

SEQ ID NO: 529870 - DNA, 201 bp, Homo sapiens
agggagaggggaggaacacaatagaggaaaagtctgccaagtagaggccacaagggaaacagaggcatcaggaaattattagagaagtagtacaaggtagrtgaagggtagctggttttcccaggaagatgatgagtctgtttggttttagacaccttgagtaatactgaaaagggagtgttacttgtcataatagatgac

SEQ ID NO: 529871 - DNA, 201 bp, Homo sapiens
tggcgaggctttataagcggtaaagcactatcaggtataaactacgaatgtcttgcaatcagataattctagctgttcttgcttgtagtttatgttttaascaataattttgaggtgagagagctggcagtttgtagaaaacccagtttgcaagaatgagtggagagaaagggaagtttcaaatctgcagaggaagaggtg

SEQ ID NO: 529872 - DNA, 201 bp, Homo sapiens
aaaatgtctttcaagttcagaattttacttctgtgtagtgtttacatctctttcaagagaacaaacacttttatgaatgatatcttgaatccttcctccarttatctttgaaatatatttagctttctgtcagcatgtagtttctaaaccatttcttttgagtcatcggtaacgccagtgttgccagcattcccccacccc

SEQ ID NO: 529873 - DNA, 201 bp, Homo sapiens
tcaagtaattctcctgcctcagcctcccaggtagctgggattacaggcgcccaccaccatgcccagctacttttttgtagttttagtagacacagggtttygccatgttggccaggctggtctcgaacttctggcctcaggtgatccgcccgccttggcctcccaaagtgctgggattacaggcgtgagccaccacaccca

SEQ ID NO: 529874 - DNA, 201 bp, Homo sapiens
gccattctcctgcctcagcctcctgagtagctaagactacaaggcgcccgccgccatgccctgctaattttttgtattttaagtagagatgggatttcacygtgttagccaggatggtgatctcctgacctcgtgatccgcccaccttggcctcccaaagtgctgggattacaggcgtgagccacagcgcctggccgagtc

SEQ ID NO: 529875 - DNA, 201 bp, Homo sapiens
agcagagaatggttatgtcacctggtagcaggggtaaggggtgtcatgggactgccagtaataatttaagaaagtgagttactcttgaaattatgtttttatgtaactttagtaaaaataaaagcacattaaaaaaataaagttttaaaattactatgcctggccagatgtggtggctcatacctgtaatcccagcacttt

SEQ ID NO: 529876 - DNA, 201 bp, Homo sapiens
ggatctggggccagctcacctctcacgtccccgtcatcgccaactccaccctctacatcaggttagtgatggagtaaagtgacatgccaccttcctgtccrccaacaggaggagcgggctgtgcctcttcctgccttggcccaacaatttcaggggttagatagcagcagctttctcaagagagatcagtgggagtgcaaa

SEQ ID NO: 529877 - DNA, 201 bp, Homo sapiens
aagtgagttactcttgaaattatgtttttatgtaactttagtaaaaataaaagcacattaaaaaaataaagttttaaaattactatgcctggccagatgtrgtggctcatacctgtaatcccagcactttgggaggccgaagctggtggatcacttgaggtcaggagtttgagatcagcctggccaacatggtaaaaccct

SEQ ID NO: 529878 - DNA, 201 bp, Homo sapiens
atgccaccttcctgtccaccaacaggaggagcgggctgtgcctcttcctgccttggcccaacaatttcaggggttagatagcagcagctttctcaagagaratcagtgggagtgcaaattagcagtgtcatttgggagagctgaggggctagatttccaagctcggctttcacagggaatggaccggtttcagggccacta

SEQ ID NO: 529879 - DNA, 201 bp, Homo sapiens
cctttattattattattagtagtagtagtatttgagacagagttttgctctgttgcccaggctggagggcagtggtgcaatcttggcttactgcagcctcygcctcctgggttcaagcaattctcctgcctcagcctcctgagtagctgggattacaggcacccaccaccttgcctgcctaatttttgtgtgtttagtaga

SEQ ID NO: 529880 - DNA, 201 bp, Homo sapiens
tttcaggggttagatagcagcagctttctcaagagagatcagtgggagtgcaaattagcagtgtcatttgggagagctgaggggctagatttccaagctcrgctttcacagggaatggaccggtttcagggccactagccacccccgggctccagcttgctgtctttgctgaaaagcttcatgcagagcttctcagattgg

SEQ ID NO: 529881 - DNA, 201 bp, Homo sapiens
ctcaggaggctgaggcaggagaatctcttgaagtcaggaggtggaggtttcagtgagccaaaatcgcaccactgcactccagcctgggtgacatagtaaaytccatctcaaaaataaaataaaatatgcttaatacagtattttatcaattctaaatgcagtttttcacaatttttatatcactgaaattaggatgcatct

SEQ ID NO: 529882 - DNA, 201 bp, Homo sapiens
attaggatgcatctaaaatctgcattgtcttaggtttaatgaaatatgataggtcaagatttttgtgttgattcttatttgtggatgacatgagtgtaactttttttttttttttttttaaagattgcaggcctaagtctacctcttcctcccaaaaaattgattggtaacatggatcgtgaattcatagctgaaaggcag

SEQ ID NO: 529883 - DNA, 201 bp, Homo sapiens
ttaggatgcatctaaaatctgcattgtcttaggtttaatgaaatatgataggtcaagatttttgtgttgattcttatttgtggatgacatgagtgtaactttttttttttttttttttaaagattgcaggcctaagtctacctcttcctcccaaaaaattgattggtaacatggatcgtgaattcatagctgaaaggcaga

SEQ ID NO: 529884 - DNA, 201 bp, Homo sapiens
aagtctaattgagggccagctgttgtgcagggaaaacaggtatctcctggtcctgagaagtttgtgttgagaatctatctcacacatatatcccccttactttttttttttttttttttttttgagacagaatctcactctgttggccaggctggagtgctgtagcgtggtcttggctcactgcaacctcagccccccagt

SEQ ID NO: 529885 - DNA, 201 bp, Homo sapiens
agttagatgtattgaaacagacaaaaatattaacatcagaaaaagctcttgccaattagaggatcttcttaatcctcagcaattaagtttggggtttgagsggggcaggtcattgttacaacagaagtaaatttggcatctatagaaatcaattatgatttttgaaagatttatctaaatatatcaatatagcatctcttt

SEQ ID NO: 529886 - DNA, 201 bp, Homo sapiens
caattatgatttttgaaagatttatctaaatatatcaatatagcatctctttaatgttagtcatttattagaaagatcctttatcctgatttgcttaaacytttcaataaattgcactttaaaggattataaataatccatttaaaaattcaagtacacacatcagtgttggttactatgcagagaatgtcattgtgtata

SEQ ID NO: 529887 - DNA, 201 bp, Homo sapiens
gcattaaactggagggaggtgtggtttaatcaggacatttctcatcatggccagtgtccatgagacaccaacatgtcctgtgggtagtgagggaagtgatrgctggggccttaaccacaccagctctggtggcttctcaggcgtgtgatggcagccctctgggtgtgtgtgcccatcagcccagaaagcacctgactaggg

SEQ ID NO: 529888 - DNA, 201 bp, Homo sapiens
ttcctggttctttctttccacaagtgtttagagagggccttctggaggccagctgctgtcctaggcactgtaatgaaaagaggaaaccaagcccctgcccygtggatgtgacattctactgttccacagacactgaagcgtctgtcgccaaaccagcaaccattaataataatgtaataatgtgggccgggcagtggctca

SEQ ID NO: 529889 - DNA, 201 bp, Homo sapiens
acaacaaatcatatcttgtctaattgtgagctggttaagaagtttttagatccaaacaactattccgcaaactatactggtaagcgaaggaatctgtgaaytatggtcacatggctaaagaggcactgtcccttgctggagataacgtatgtgggagaaatgttttctcaaaatggggatgtgtatacatttgttatagca

SEQ ID NO: 529890 - DNA, 201 bp, Homo sapiens
ctgggcgtggaggtgcatgcctgtaatcccagctttttgggaggctgaggcacgagaattgcttgaacccgcctcttgggaggtggaggttgcagtgagcygagattgcgccactgcactccagcctgggcgacacagtaagactctgcctcaaacgaaaacaaaacaaaacaagaatgccataggccagaagcctagtag

SEQ ID NO: 529891 - DNA, 201 bp, Homo sapiens
gccgaggtgggtggatcacatgaggtcaggagtttgagaccagcctggccaacataatgaaaccccatctgtactaaaaatacaaaaattagctgggcgtrgaggtgcatgcctgtaatcccagctttttgggaggctgaggcacgagaattgcttgaacccgcctcttgggaggtggaggttgcagtgagccgagattgc

SEQ ID NO: 529892 - DNA, 201 bp, Homo sapiens
tgaggttttacagaaggctttggagttgcatttacgttaccaattaggaacggggctatccctgggctttgtttctcagagaagccttggggcaggagcgygagggtccacaaagccaaagtgaagggtgaacacgctgctactctttcttccacagacattggaaagtgtggatgtccactgctttggccacttactgta

SEQ ID NO: 529893 - DNA, 201 bp, Homo sapiens
gtgattactttgctaatatgtggcaaaaaacatcagtgacacctccaagagtaggtttccccctgttttttcctttttaccctggagtaacacgttttgasagccatgcttgggagatgcagctcagggcctccttaccaggctgcagagctggctattggtgttcagtggtgacggaaaagacaagtggtcggctgggca

SEQ ID NO: 529894 - DNA, 201 bp, Homo sapiens
caccccacttgcctatcactgctctagttcaccaggacattgcagggctatatctaagcatctctcttactgggtaagccactgattatttatatggcagyggaaatatttactgctttttctgggatcctgttgtgtgttcctattaataaacagctaaatatatttggaggagagactgaactagagatgttttctagt

SEQ ID NO: 529895 - DNA, 201 bp, Homo sapiens
agcatattatgaatttactaagattttcttgattgtagtttactgtagatgtataagaagaaaataagttacttccaaaatatttgtaaagtctgcacagraaaatatggaagagaaattattgtatgtatacttatactcttgcctttattgtcttccctgacagaacagagagtaagtaatctacaataggccagacgc

SEQ ID NO: 529896 - DNA, 201 bp, Homo sapiens
aatacaaaaattagccaggcatagtggcacatgcctgtaatcctagctactcgggaggctgaggcaggagaatcgcttgaacccgggaggtggaggttgcrgtgagccgagatagcaccactgcactctagcctaggcaacagagcaagactctgtcttaaaaagataataataataataattaatccacaataacgcata

SEQ ID NO: 529897 - DNA, 201 bp, Homo sapiens
ctgttcataaatacccataaacatgtctttgtgaactctcagaacctcactgacctgaagcccattcttaggctttggatcttagggtaagaatcactgcyggaaaaacttttttaggccaggcacggtggctcttgcctgtaatcatagcactttgagaggctgaggtaggtggatggcttgagttcaagaccagcctag

SEQ ID NO: 529898 - DNA, 201 bp, Homo sapiens
agcagccacaaaagcaaagatgaagcaaagtactaaagggcccctctgcctgggagagcagggcacaggggagaggctggtcaggtcctccctggggcttwgggaactcggagtggttaacagaggagccagcattttagagaaaacgttctaaatcagtatgcctcagccttttctaacttgcaaactcctttcatagta

SEQ ID NO: 529899 - DNA, 201 bp, Homo sapiens
taatcccagctactcaggaggctgaggcagaagaatcacttgaactggggaggcagaggttgcagtgagccaagatctcagcactgcactccagcctgggygacagagcaagactccgtctcaaaacaaaacaaacaatgtgaatatggaaaaacagacccagtttggaaaacaactttcacacaaacttttctagcaaaa

SEQ ID NO: 529900 - DNA, 201 bp, Homo sapiens
ttacagatgccgtaagtcaatcatatgcgttggttgtaatcttgataactatgttgaacaccagaccactgtgtccaagcacctggtactgtagtaaagaytcttgcggtccctgcagagttggcgtggcctgcttgctgatgggcacttgcagcatgatatcctcaccctttgtttgtgacctctgtgctctcctggtct

SEQ ID NO: 529901 - DNA, 201 bp, Homo sapiens
aattatatttggtcaactagtaaacatttgaaaagaaacaagaacagcttaaaataactctctggaatctctttagggtttatagttttggagtttacttyccaaaaaaaaaaaatacttgggcattactttatctctttgactttgagagttttagtgatagatttggttagtggaattagataagattacagttaagtc

SEQ ID NO: 529902 - DNA, 201 bp, Homo sapiens
ggctttggagttgcatttacgttaccaattaggaacggggctatccctgggctttgtttctcagagaagccttggggcaggagcgcgagggtccacaaagmcaaagtgaagggtgaacacgctgctactctttcttccacagacattggaaagtgtggatgtccactgctttggccacttactgtatgaaatgacttatgg

SEQ ID NO: 529903 - DNA, 201 bp, Homo sapiens
ggcttccttggtccatgtcaaagaaaagtcattttgagtcattttcctgtgtatttggttatataaatgcaattatatttggtcaactagtaaacatttgraaagaaacaagaacagcttaaaataactctctggaatctctttagggtttatagttttggagtttacttcccaaaaaaaaaaaatacttgggcattactt

SEQ ID NO: 529904 - DNA, 201 bp, Homo sapiens
aatatttcttgatgaagattaaaaatcagccaaaggaacggctagtgttaagctgggtaagctagctttttgctttggtctccttcagtgactttagatgrgttaatgaaagcagatttgacaagagaattacaaaattgtactgtgctcttaagtgatgatgtaaaggcttccttggtccatgtcaaagaaaagtcattt

SEQ ID NO: 529905 - DNA, 201 bp, Homo sapiens
gtcagtttttaagtttgtgttttgcgcttaacaaagcagtactgaagaattcgaacaatatgcaagactttggggtctgctaagggcaagaccaggcacawcttcactgggctagagaagggatggaacctgggtcagcctctttctatcaacaatgcagactgtcgtattttaaaaactcacatcttgcagctggccatc

SEQ ID NO: 529906 - DNA, 201 bp, Homo sapiens
cttttaatacttaatgaaccttggttaaagccccatcaaagcatttggatggtaataactttcagaaacaccattccttcttcatctatctttttcactamatctaaactgaagtgctactttcctgccttttccgtgaataatttcttcatttactgtttctttttaagtatagcctttactatgccaacgttatcaaat

SEQ ID NO: 529907 - DNA, 201 bp, Homo sapiens
ctttagagctttggaagcaggaggatgtaaagagaagtatggcctgcatgagtgtgatgcagaagctagagccaggcaacttgaagccagtcttgaggacycaggcaggtgtcagacgtcagatcaagactgaagtgagacttgtaagaaacaagagaggccaggcatggtggctcacacctgtaatcccagcactttgga

SEQ ID NO: 529908 - DNA, 201 bp, Homo sapiens
atatacattttcacattattaataatttttaaaataaactttacattttagaataattttagatttacatagaattgcagtgggctgcgtgcagtggttcrtggttgtattcccagcactttgggaggtcgagatgggcggatctcttgagccaagagtttgagaccagcctgggtggagatggcaaataccttgtcacta

SEQ ID NO: 529909 - DNA, 201 bp, Homo sapiens
gtaatcccagcactttggaaggccgaggtgggtggatcacatgaggtcaggagtttgagaccagcctggccaacataatgaaaccccatctgtactaaaawtacaaaaattagctgggcgtggaggtgcatgcctgtaatcccagctttttgggaggctgaggcacgagaattgcttgaacccgcctcttgggaggtggag

SEQ ID NO: 529910 - DNA, 201 bp, Homo sapiens
gaaaagaaccctgaatgttgagtcagtaaaccagggcttgagtcctagctctgccacattcccgctatgaccttggacaaataatttctgttctttgaggctgtcttttaaaagacgtctcgctctttattagatagatggcatacatggcgaggctttataagcggtaaagcactatcaggtataaactacgaatgtctt

SEQ ID NO: 529911 - DNA, 201 bp, Homo sapiens
gtggtggctcatgcctgtaatcccagcactttaggaggccaaggcaggtggatcacaaggtcaggagatccagaccatcctagctaacacggtgaaacccygtctctactaaaaatgcaaaaaaattagccgagcgtggtggcgggcgtctgtagtcccagctacccaggaggcggagtttgcactggagcgcgccactgc

SEQ ID NO: 529912 - DNA, 201 bp, Homo sapiens
aaaagaaccctgaatgttgagtcagtaaaccagggcttgagtcctagctctgccacattcccgctatgaccttggacaaataatttctgttctttgaggctgtcttttaaaagacgtctcgctctttattagatagatggcatacatggcgaggctttataagcggtaaagcactatcaggtataaactacgaatgtcttg

SEQ ID NO: 529913 - DNA, 201 bp, Homo sapiens
aaagaaccctgaatgttgagtcagtaaaccagggcttgagtcctagctctgccacattcccgctatgaccttggacaaataatttctgttctttgaggctgtcttttaaaagacgtctcgctctttattagatagatggcatacatggcgaggctttataagcggtaaagcactatcaggtataaactacgaatgtcttgc

SEQ ID NO: 529914 - DNA, 201 bp, Homo sapiens
gaggccacatcagggagatcctgctgcctgtcctttcgttccatctgctttactggagccctggagccctttggacagtgtatttattgacaccacctacrttttcaaagagactcatttaaagtgacagtggaaaatccatgtccatttacttggacagtggaaaatccatgtactgaaccccaccctcaactcccaaac

SEQ ID NO: 529915 - DNA, 201 bp, Homo sapiens
aagaaccctgaatgttgagtcagtaaaccagggcttgagtcctagctctgccacattcccgctatgaccttggacaaataatttctgttctttgaggctgtcttttaaaagacgtctcgctctttattagatagatggcatacatggcgaggctttataagcggtaaagcactatcaggtataaactacgaatgtcttgca

SEQ ID NO: 529916 - DNA, 201 bp, Homo sapiens
gcaagaatgagtggagagaaagggaagtttcaaatctgcagaggaagaggtgtgggagcccgccctctgaaggtctgcttaaaattcaactcgcaaaacasatgaataagagaaaaggcatacaagtttatttaataagagaaaaggcatacaagtttatttaatatgtatacacaggagccttcagaatgaagacccaaa

SEQ ID NO: 529917 - DNA, 201 bp, Homo sapiens
gagtgcaaattagcagtgtcatttgggagagctgaggggctagatttccaagctcggctttcacagggaatggaccggtttcagggccactagccaccccygggctccagcttgctgtctttgctgaaaagcttcatgcagagcttctcagattggagcctgtcttggtacatgcttagctgaacaacacaaatgcgccgt

SEQ ID NO: 529918 - DNA, 201 bp, Homo sapiens
tttcccatatgttttgataggtactgaagtttcttcatgacaagggattcccttatgggcatcttcacgcctccaatgtgatgctcgatggggacacttgycggctgctggaccttgagaattccttattgggcctgccttccttctaccgatcttatttttcacaattcaggaaaatcaatgtaagttgctaaagtaatg

SEQ ID NO: 529919 - DNA, 201 bp, Homo sapiens
aaagcatgatccttcacatttagctggggatctagtcagtttaaaagaagacaagaaaaacatttgccttgctttcctttttaaaacggctttatggccttaagtaagtttcactgcccaattcagcctctagggaggggctcacagggcctcagggaggggcccagtgcttccgccttgaggatgcttgcccaggatctc

SEQ ID NO: 529920 - DNA, 201 bp, Homo sapiens
aagcatgatccttcacatttagctggggatctagtcagtttaaaagaagacaagaaaaacatttgccttgctttcctttttaaaacggctttatggccttaagtaagtttcactgcccaattcagcctctagggaggggctcacagggcctcagggaggggcccagtgcttccgccttgaggatgcttgcccaggatctct

SEQ ID NO: 529921 - DNA, 201 bp, Homo sapiens
atgctttctgatacgtatcccaggaacatgcttaaatgcaggtgacttctttttctttttgcatatcaactgcttgaggatacagctggtaacttttaatrcttaatgaaccttggttaaagccccatcaaagcatttggatggtaataactttcagaaacaccattccttcttcatctatctttttcactaaatctaaac

SEQ ID NO: 529922 - DNA, 201 bp, Homo sapiens
agcatgatccttcacatttagctggggatctagtcagtttaaaagaagacaagaaaaacatttgccttgctttcctttttaaaacggctttatggccttaagtaagtttcactgcccaattcagcctctagggaggggctcacagggcctcagggaggggcccagtgcttccgccttgaggatgcttgcccaggatctctg

SEQ ID NO: 529923 - DNA, 201 bp, Homo sapiens
gcatgatccttcacatttagctggggatctagtcagtttaaaagaagacaagaaaaacatttgccttgctttcctttttaaaacggctttatggccttaagtaagtttcactgcccaattcagcctctagggaggggctcacagggcctcagggaggggcccagtgcttccgccttgaggatgcttgcccaggatctctgg

SEQ ID NO: 529924 - DNA, 201 bp, Homo sapiens
gtatattataagttaaaaaaataacatttttaaaaaacaacaactatgaagagaagttgtaatattttcttctagtccttagtgaattgctctgggcaccycacttgcctatcactgctctagttcaccaggacattgcagggctatatctaagcatctctcttactgggtaagccactgattatttatatggcagcggaa

SEQ ID NO: 529925 - DNA, 201 bp, Homo sapiens
tgggctagagaagggatggaacctgggtcagcctctttctatcaacaatgcagactgtcgtattttaaaaactcacatcttgcagctggccatctctggcrcccctagcctctgtagaatcctgcctggtcagggagtctgtgtgcagatattggcccctctgctgctttcttacgtgttctttgttcttttccaaaggca

SEQ ID NO: 529926 - DNA, 201 bp, Homo sapiens
ctgtgtcttcctatttgctccctgagacccactcagtgcaaagcataggaggtcattctcttccaaatctttcctggatcagggcagccgccaaggtactrtggttgaaagggcttctcttccagtaccgattacactcaaagctggcatgaataacctaagcctgatgtcagcagaatgagaaactaaatacttaataca

SEQ ID NO: 529927 - DNA, 201 bp, Homo sapiens
tgtgaggaaaggttgaacatttaataattatgtccattacatggcaagctgttctcttaggtcagtttttaagtttgtgttttgcgcttaacaaagcagtwctgaagaattcgaacaatatgcaagactttggggtctgctaagggcaagaccaggcacatcttcactgggctagagaagggatggaacctgggtcagcct

SEQ ID NO: 529928 - DNA, 201 bp, Homo sapiens
aggatattaacactattatcctcaaaactcagacattttatctcttccaccacacttttgcctgagctatgagagtgcacacaccaaagaggaccccttcwcttgtggagtttaccacatccattatctgtctcctgttttcctttgttcctacagtttatgtcccttcctccatctgaagaaggaggaactagctggtaa

SEQ ID NO: 529929 - DNA, 201 bp, Homo sapiens
ccaagtgctttatagtaattctataattatttttcttttttcttttctttttttttttgaaacagagtctcactctgtcaccaagctggagtgcagtagcrtgatcttggctcactgtagcctcaaccttctgggcttaagcggtcctcccacttcagcctcctgagtaactaggaccacagcctcatgccaccacatgtg

SEQ ID NO: 529930 - DNA, 201 bp, Homo sapiens
gacccagtttgtttcacgtaaccagaattccagggaaaaacagcactttcctttcactcattaaataatttgtcttttctccaccccagttgcttaatgtmagtttctccatctgaggaggacactgtgaatctttatgttgcagaattctatagaagggtaggaagattcatgccagctactgtggaaagggctgagatt

SEQ ID NO: 529931 - DNA, 201 bp, Homo sapiens
ttttttttgaaacagagtctcactctgtcaccaagctggagtgcagtagcgtgatcttggctcactgtagcctcaaccttctgggcttaagcggtcctccyacttcagcctcctgagtaactaggaccacagcctcatgccaccacatgtggctaattgtgtcctttttttgggagggtggggtggggggcacggagtctg

SEQ ID NO: 529932 - DNA, 201 bp, Homo sapiens
catattctgttctttatgaagcccactagcattttaacatttaatgtgattttctaactctattattccttccgtatttacttattagttggcattctacwctaaagagcttctcttctcccttttaaaaaaatttatattagtatgtactcaaggatttttattctacccattgtgtttctttttggggtgatgaaaatg

SEQ ID NO: 529933 - DNA, 201 bp, Homo sapiens
cagagtctcactctgtcaccaagctggagtgcagtagcgtgatcttggctcactgtagcctcaaccttctgggcttaagcggtcctcccacttcagcctcytgagtaactaggaccacagcctcatgccaccacatgtggctaattgtgtcctttttttgggagggtggggtggggggcacggagtctggctccgtcaccc

SEQ ID NO: 529934 - DNA, 201 bp, Homo sapiens
agtgctttaaaacctgatttttttttcattaatggtgtaccatgagcatctttagttgttagtaaatatagcatcattattatgggctgtatagaattatmattggctataccttagtttactcaatcttctattgacatttagatcacctccagctttttgctcttattttttaaaaaagaaaaaagccataatgaacaa

SEQ ID NO: 529935 - DNA, 201 bp, Homo sapiens
agcgtgatcttggctcactgtagcctcaaccttctgggcttaagcggtcctcccacttcagcctcctgagtaactaggaccacagcctcatgccaccacaygtggctaattgtgtcctttttttgggagggtggggtggggggcacggagtctggctccgtcacccaggctggagtgcagtggtgcgatctcggctcactg

SEQ ID NO: 529936 - DNA, 201 bp, Homo sapiens
ccagcctgggcaacagagcagactccgtctcaaaaaaaaagaaagaaaagaaaagaaaactcaccagtaatcccagtcaaacagaagtatgaaccaaaatrttcagttgttactttttaagaatttttatgataaaaaagtaaattatatatgtagtgctttaaaacctgatttttttttcattaatggtgtaccatgagc

SEQ ID NO: 529937 - DNA, 201 bp, Homo sapiens
agtctcctgagtagctgggactacaggcgcgtgccaccatgcccggctaatttttttgtatttttagtagagatggggtttcaccatgttggccagggtgrtctcaaactgctgacctcaagtgatccacctgcctcggcttcccaaagtgctgggattacagttgtgagctaccgtgcccggccatgttcattttttata

SEQ ID NO: 529938 - DNA, 201 bp, Homo sapiens
cctgcctcggcttcccaaagtgctgggattacagttgtgagctaccgtgcccggccatgttcattttttataaagacgaggtctcactatgttgtcccggytggtctcgaattcctgggctcaagggattagataattctttctctctctgtttctctctttctggtcaactttgttgaagtaaaatttacatacaatgaa

SEQ ID NO: 529939 - DNA, 201 bp, Homo sapiens
cgagatcgtgccactgcactccagcctgggcaacagagcagactccgtctcaaaaaaaaagaaagaaaagaaaagaaaactcaccagtaatcccagtcaamcagaagtatgaaccaaaatattcagttgttactttttaagaatttttatgataaaaaagtaaattatatatgtagtgctttaaaacctgatttttttttc

SEQ ID NO: 529940 - DNA, 201 bp, Homo sapiens
tctcactctgtcgcccaggctggagtgcagtgatgtgatcttggctcactgcaacctctgcctccccggttcaagcgattctcctgcctcagcctcctgastagctgggattacaggctcctgccaccacgcctggctaatttttgtatttttagtagagacggggtttcaccatgttggccaggctggtcttgaactcct

SEQ ID NO: 529941 - DNA, 201 bp, Homo sapiens
gagtagctgggattacaggctcctgccaccacgcctggctaatttttgtatttttagtagagacggggtttcaccatgttggccaggctggtcttgaactsctgacctcaaatgatctaccctcctcggcttcccaaagagctgggattacaggcatgagccacagcacctggccacattttcataaatatctgtgtttat

SEQ ID NO: 529942 - DNA, 201 bp, Homo sapiens
gtgtgaagatttttgacactgtcctgatcagcccgcagacagttattgcaaagtggtgttaaacttttcatcagcaagtggatttgccagcgtgttctgtrgaactaaaatgtgtatctgttcatttcaagtggccgtgttggagtctacgctgtcttgtgaagcctgtaaaaatggcatgcctaccatctcccggctctt

SEQ ID NO: 529943 - DNA, 201 bp, Homo sapiens
ctccctctctgaagatatgtgtctgcatggcatgtgtactgtggtcacttccacagttggttatgaaattggagctagtgtctcaggatgacacagcaacmttctcagagtaggaaggatagatttatatgtacgttatcctaagtgatggtgaccattattaaaaccagtagggacttctagcttgacttcagcctatag

SEQ ID NO: 529944 - DNA, 201 bp, Homo sapiens
aatagcaggttcatttttaggtgtcagttatccccatgatctgcccatgtaggaaatatgcaccaagtagtgaaaggtatagttgggacaggccttgcccrtcagcccttgcagcgttgctgtatctctgggaggctgagttgaaatggcgggtggggtaaggagggaggtggactcactgattggaaaactgtggagggt

SEQ ID NO: 529945 - DNA, 201 bp, Homo sapiens
cacatgctagagatagaatggtgaaccagacagctcctgcatccatggagcttttgttctgttggattccaaggtcttttttttttcattgtgagacaggktcttgctctgtcacccaggctagagtacaggaccacagctcacggcaacctcagtctcctggctcaaggaatactcctgcctcagcctcctgagtagctg

SEQ ID NO: 529946 - DNA, 201 bp, Homo sapiens
aggtggcatttttcttcaggaatcttctcagtgacctgtttggttttgtttcaaaatatattgactaaaaaacaaagtttaacttgtcttatatctgaatsagtttggggaaaatgtaactttcccatatgttttgataggtactgaagtttcttcatgacaagggattcccttatgggcatcttcacgcctccaatgtga

SEQ ID NO: 529947 - DNA, 201 bp, Homo sapiens
cagcatctgacagagtctcagagagctgcaaggtcacaggagacgaggcaactaactgtggcacaggaacattctttaaggcaaggctttttctgaactcgggtgtttattctgtcctgagagaaccattcattgattctaaaatataaaattcgagttgcaaatgtccatgtgcctggaagctgagggaagttttagaca

SEQ ID NO: 529948 - DNA, 201 bp, Homo sapiens
gccaaaaaaagaaaagatatataatagggaaaattgggaaataacctaaatgtcctacaattaggggctagtttaataatttatggtacatctatttgatratataattaaaagtgaaattgataaagacattgtagtaatatggaaaatgatttagatttgtgcttaggtataaaaaaataaggtaatgtgtaaaacaac

SEQ ID NO: 529949 - DNA, 201 bp, Homo sapiens
tggcccagataccctagtaacacagtgggaagggggtcacactgggccacctgcaaatccctttgcatttgttaatgaacatggaatggtggattgggccrggggctggaggatgtggtgcagggaagggagacctcatgggctaaaggtgtcttaatctgctttcatcctagtctgagagtgcacgtggttcaagaaaga

SEQ ID NO: 529950 - DNA, 201 bp, Homo sapiens
tccaatcaggacaattcctttctacttacttgaacatttttatgttactgaactctagaataaattttatcctcttctgaggcaagaaaaatagcagaaarctattctatttagaaatatctaccgcatatattatttgcgatatttttgcaaattagcattcgcaaaagtaatttcttaaaaatgcaatattgcccatag

SEQ ID NO: 529951 - DNA, 201 bp, Homo sapiens
gtggtcacttccacagttggttatgaaattggagctagtgtctcaggatgacacagcaacattctcagagtaggaaggatagatttatatgtacgttatcytaagtgatggtgaccattattaaaaccagtagggacttctagcttgacttcagcctatagtttcaagcttctctcccactaaatgctttagcagccctgt

SEQ ID NO: 529952 - DNA, 201 bp, Homo sapiens
cactttgtgtttgctattttcttagcagggaagaaaacagttacaaagctggccattgtgctggctgctctaaatatactgtcttctttcatattcaccaygactctgaaggtgtgatttagcaggtgaggaaactgaagcacagagaagttaggctgcaaagctaataagcagtcgttgggcttcgttccagatctctgt

SEQ ID NO: 529953 - DNA, 201 bp, Homo sapiens
ttcagctatactcattcattcaacaaaaatgtattaaatgcctactatgtgccaggcacatgctagagatagaatggtgaaccagacagctcctgcatccrtggagcttttgttctgttggattccaaggtcttttttttttcattgtgagacaggttcttgctctgtcacccaggctagagtacaggaccacagctcacg

SEQ ID NO: 529954 - DNA, 201 bp, Homo sapiens
ggtgtgatttagcaggtgaggaaactgaagcacagagaagttaggctgcaaagctaataagcagtcgttgggcttcgttccagatctctgtgactggaaartgtgtgccctcccctgctggggacttgtggctgtgctatggaggagggatggcacattgtggctgatcatgacacagtgaccagctcctccttcaggttc

SEQ ID NO: 529955 - DNA, 201 bp, Homo sapiens
ttacatgttaaaatctttactgaaaatggatctctccttgaacttttgatatttggaaactgcattcctgcatggcttatttattcagctatactcattcrttcaacaaaaatgtattaaatgcctactatgtgccaggcacatgctagagatagaatggtgaaccagacagctcctgcatccatggagcttttgttctgt

SEQ ID NO: 529956 - DNA, 201 bp, Homo sapiens
agaagagaagcatgcatgatcatgacgctcatctcactgcagggatcaaagcgtgtttgcaatgtgtgcttcatctcttcttttgctaaagttaaagcacrtgattctatgaattagatttttttttttttgagacagagtcttgctctgtcacccaggctggagtgcagtggtgcgatctcggctcactgcaagctccgc

SEQ ID NO: 529957 - DNA, 201 bp, Homo sapiens
tgatcaactgtccttgtttaataatagaactaagcacactcctcatatccattctgctcttcagaggtaaaaccttcatggcttttctgaagtgagcgtcrtgcttgtaaataaataaaaatagtatctaactggctcagaggacaaagaacatgaagaaagtgactcattaggtggctcaaaaagcgactcattggttat

SEQ ID NO: 529958 - DNA, 201 bp, Homo sapiens
tcttcagaggtaaaaccttcatggcttttctgaagtgagcgtcatgcttgtaaataaataaaaatagtatctaactggctcagaggacaaagaacatgaakaaagtgactcattaggtggctcaaaaagcgactcattggttattctataaatacgtttgccatgttttaaaaggctcacaatcgtgtttacaaaccagtg

SEQ ID NO: 529959 - DNA, 201 bp, Homo sapiens
taattttggaaaccataactctcaaagtcccgttgctgcaaaaatgttgattcctagttactctgatgaagaggaaagagtgttaggcacttgagctcttrcttacagggagacaacttactggcttttataactgacggtagggaaaaacagttcttttgtaagcatcctttataattctcgagctgtgacaggagtaca

SEQ ID NO: 529960 - DNA, 201 bp, Homo sapiens
aatttatttcatgtggctgaaaagaagatgcgtttggctttattcatctgccaaaatttaggttaatacggtaatgattcttcagatgcctttaaaaaccyttaacattttcatttgttttggggcagtttttgcatattattagattgcagaaaaattgaaacaaaacaaaggtaggttctagcactgaaaatctgcaga

SEQ ID NO: 529961 - DNA, 201 bp, Homo sapiens
aattttggaaaccataactctcaaagtcccgttgctgcaaaaatgttgattcctagttactctgatgaagaggaaagagtgttaggcacttgagctcttgsttacagggagacaacttactggcttttataactgacggtagggaaaaacagttcttttgtaagcatcctttataattctcgagctgtgacaggagtacag

SEQ ID NO: 529962 - DNA, 201 bp, Homo sapiens
ggcagcaggcagttgttcccaggtttgtcacaggccaaatggtaactttcatttggcccttgttgcccctgccccctcttcctccattgttagccatgtgytgtagctgaagccccaacggacctttcaggaagcttgtggaccatggaaagggccaaaaggaaaagccaaaaacaatcaatggggcagactgagtgagac

SEQ ID NO: 529963 - DNA, 201 bp, Homo sapiens
aacctggtgacataaagccaggaacattttcccacaatccaccttagcataaaacataacaatttcattcatcagttgttattgtgtagaaccaatgaacrtgttggtcatttgtctgtatttagtctttatttgtattgctatatttgagcattccaagattgcagagcatgagcgtgtgtatttgtgtgattctttaat

SEQ ID NO: 529964 - DNA, 201 bp, Homo sapiens
tagcataaaacataacaatttcattcatcagttgttattgtgtagaaccaatgaacatgttggtcatttgtctgtatttagtctttatttgtattgctatmtttgagcattccaagattgcagagcatgagcgtgtgtatttgtgtgattctttaatttcagctgccttaggtttgagtaaaagatgtaaagaaaggtaag

SEQ ID NO: 529965 - DNA, 201 bp, Homo sapiens
ttaaagggaaagacaaggaatttttcttttggtgaccaaaacagtaccctgatattcccttccatgttttcaggctgaccttggcccagacaagtatttgwcagataaagattttcagtgtctaatcaaacttctgccttcttgtttggtgagtatacgtctttcttttattctcagtgctgatgatagagtcacagtatt

SEQ ID NO: 529966 - DNA, 201 bp, Homo sapiens
taataggtcctcatagtaaacattggcagggttcatttctgctacatatacggtcttttatggggctttaaaaccgtggttgttttcatttgcttgtacctttttttttttttgaaaggcccactatgcattataatttccaagcaataaatctaggaaccagcaagaaacctggagctatcagctagtgggacttttttg

SEQ ID NO: 529967 - DNA, 201 bp, Homo sapiens
ccagcccctttccaggaaaaggctgtggggcagagttggttcattaggaactctgagatttaccaaagcatgatccttcacatttagctggggatctagtsagtttaaaagaagacaagaaaaacatttgccttgctttcctttttaaaacggctttatggccttaagtaagtttcactgcccaattcagcctctagggag

SEQ ID NO: 529968 - DNA, 201 bp, Homo sapiens
tatttttaggtatgatggcttgctttggggaaaaggggttctgtttctgtgacccaccttggagaaggagggattcaagtttctctggctagccttggggracaatggtactgagaaggctggagggcctcttttccgtttcccagcccctttccaggaaaaggctgtggggcagagttggttcattaggaactctgagat

SEQ ID NO: 529969 - DNA, 201 bp, Homo sapiens
tcttgggggtagggggtgctcacaggtagattcagagatctgacttgcagttgatcttagttgcagaagctctaagaattttggggtcagtagaaaaatgmtaacttgctagggggagtgactttctccaagcctctcaagaagaaacttagaacaaaggacggtgggattgataataggtacagtttagtcttcttttcc

SEQ ID NO: 529970 - DNA, 201 bp, Homo sapiens
tattagattgcagaaaaattgaaacaaaacaaaggtaggttctagcactgaaaatctgcagatgaaacgacagtaaataatgactacttagcagagcaagragtaatcactaattctaagtgaaatattaaggactgtaagtggccaggcaggtggccagtgagctaagcagaagtcctgcaagctgaattctatgagaat

SEQ ID NO: 529971 - DNA, 201 bp, Homo sapiens
tatgcagtgcataactatatatactttgtggaataattgaatcaagccaatgaacatattatcacttcatgtagttatcatttctttgtggtgagaacatytaaaatccactgttttagtcattttgatatatgcattattattgactacaatcaccatggtgtgcagtagatcaccacagcatattcttcgtgtcttact

SEQ ID NO: 529972 - DNA, 201 bp, Homo sapiens
tttcatcataatgtcctgtgtgtataaactggaggctgctctaggtctgtgtttcatgcttgcttaataattattacctggggaagctattaaaacttctyattttggccgggcgcggtggttcacgcctgtaatcctggcactttgggaggctgaggtgggcggatcacctgaggtcaggagttagagaccagccgggcc

SEQ ID NO: 529973 - DNA, 201 bp, Homo sapiens
ccaatgaacatgttggtcatttgtctgtatttagtctttatttgtattgctatatttgagcattccaagattgcagagcatgagcgtgtgtatttgtgtgwttctttaatttcagctgccttaggtttgagtaaaagatgtaaagaaaggtaagtgattttctattgtaagactttaacccatacctgtcacacttggtga

SEQ ID NO: 529974 - DNA, 201 bp, Homo sapiens
tacattttacatttaagtacataattcattttggtagtacaatgtgtgaatacaatgcctgaatcttaggttgaggttcatttcattgctgagtgtccaaytgctctgacacgtgaaagtaatacaacacatgaatcttaggttgaggttcatttcattgctgagtgtccaattgctctggcatcatttgttgaaaaggct

SEQ ID NO: 529975 - DNA, 201 bp, Homo sapiens
tcacacttggtgaaaaggatgtacttacctgagtattgtgttggtgattctgagccagtcgtccatacaaacttaagtagggtagctttacctgttacttwtcacaactcagtagcagtgtaggggaaaccacctggcagaatgtctccctggagtagccctgggagggacagagacagcatctgacagagtctcagagag

SEQ ID NO: 529976 - DNA, 201 bp, Homo sapiens
attctgtggccttgttgaactcaattaattaattaatgactgggtctctctcttttgccaaggctggagtgcgggtgccaacatggctcacggcagtcatkaccttccgggctcaagcattccctctgcctcctgagtagctgggactacaggcatgtgccactatgcctggctaatttttttatttttgtagagacgagg

SEQ ID NO: 529977 - DNA, 201 bp, Homo sapiens
ttttgacttgactattggcaagtaagtcttataacctttcagggaatagtgtcgagtcctttaggtttattttgtattgaaaataaagagatagatgtttmtaaatactcacaaattactttccctaggaagcattcatgatttctacagccccagcccatgtgcctacccacaccttaatcttgattagtttgtcctgta

SEQ ID NO: 529978 - DNA, 201 bp, Homo sapiens
caattttattggtcttttcaaataatcagctttttatttcttgacttttctctatttctttgttttcaattttattgatttctgctctttatttttccttyttctgcttgctttgagtgtattacgctcttctttttctaggttcttgaggtgaagtttaggttattgatttgatagtttttctcttttctaatataagca

SEQ ID NO: 529979 - DNA, 201 bp, Homo sapiens
attgattctaaaatataaaattcgagttgcaaatgtccatgtgcctggaagctgagggaagttttagacacctgcccagtttccctctccttgcccactgyggtacagcacgacattctagtttctcctgatgcttcgtcaaagacatttagtgcagttatgtcctgttccttggttgggccacaatggagagaatagtac

SEQ ID NO: 529980 - DNA, 201 bp, Homo sapiens
ttttagctataaacttttagctttaagacaagtatgataagagtctttcctgtccccagttgtttggttaaattgtgtgtgattgatattactatggaggrtatctaggaatttgttccccagctcaacccagggcaaatagtgtatgcaaattacttgttttctttctagaaattcacaccttctcccctgtagctatgg

SEQ ID NO: 529981 - DNA, 201 bp, Homo sapiens
atgaagtatttgtaaaatgtattccttcctccctccatctcttcactccctgacaacatttgtgcaaagcgttaaacacattagagggcgttattgcaagyaagctcatttctgtccatagttcctttcatttatcaagtttgtttaaccttgggaaacatatatatatatatatatatatatatatatatatattttttt

SEQ ID NO: 529982 - DNA, 201 bp, Homo sapiens
aatataaaattcgagttgcaaatgtccatgtgcctggaagctgagggaagttttagacacctgcccagtttccctctccttgcccactgcggtacagcacracattctagtttctcctgatgcttcgtcaaagacatttagtgcagttatgtcctgttccttggttgggccacaatggagagaatagtacttgagaaggat

SEQ ID NO: 529983 - DNA, 201 bp, Homo sapiens
gcaagcaagctcatttctgtccatagttcctttcatttatcaagtttgtttaaccttgggaaacatatatatatatatatatatatatatatatatatatwtttttttttttttttaataccaatggggttcttgctgtgttgcccaggctggtcttgaactcctgacctcaagtgatcctcccacctcagcctcccaaag

SEQ ID NO: 529984 - DNA, 201 bp, Homo sapiens
atgtccatgtgcctggaagctgagggaagttttagacacctgcccagtttccctctccttgcccactgcggtacagcacgacattctagtttctcctgatrcttcgtcaaagacatttagtgcagttatgtcctgttccttggttgggccacaatggagagaatagtacttgagaaggatttctctgtaagaataccatgg

SEQ ID NO: 529985 - DNA, 201 bp, Homo sapiens
tcctttcatttatcaagtttgtttaaccttgggaaacatatatatatatatatatatatatatatatatatatttttttttttttttttaataccaatggrgttcttgctgtgttgcccaggctggtcttgaactcctgacctcaagtgatcctcccacctcagcctcccaaagtgctgggattataggtgtgaaccactg

SEQ ID NO: 529986 - DNA, 201 bp, Homo sapiens
tagtttctcctgatgcttcgtcaaagacatttagtgcagttatgtcctgttccttggttgggccacaatggagagaatagtacttgagaaggatttctctstaagaataccatggcagagagacccctctgccccctgctttgcattgctaacagttattagcattttgtatttctttaatgcaacctaataggaaattat

SEQ ID NO: 529987 - DNA, 201 bp, Homo sapiens
tcttgaactcctgacctcaagtgatcctcccacctcagcctcccaaagtgctgggattataggtgtgaaccactgcacccagctgggaaaccacctataayagaaatgatttaggatttgtgaacttggtagggaaaaattctgtggtttggaaaactgagtcaccagaaggatgaagggaacacaaggtcaccaccagaa

SEQ ID NO: 529988 - DNA, 201 bp, Homo sapiens
tggagagaatagtacttgagaaggatttctctgtaagaataccatggcagagagacccctctgccccctgctttgcattgctaacagttattagcattttrtatttctttaatgcaacctaataggaaattattattcgagacagactcctctgggaaatgcataacccaggaggcactgattccttgctgagaatcctga

SEQ ID NO: 529989 - DNA, 201 bp, Homo sapiens
agtagagacagggtttcaccatgttggccaggctggtcttgaactcctgacctcaggtgatctatctgcctcagcctcccaaagtgttgggattacaggcrtgagccactgcactcagccatcttgcagcacttccacacattataataaaatataagagcagttattttctgggcatctattctatgtggttatgtattt

SEQ ID NO: 529990 - DNA, 201 bp, Homo sapiens
ctaataggaaattattattcgagacagactcctctgggaaatgcataacccaggaggcactgattccttgctgagaatcctgagtggtctgtcattttacmtaagatcacatccttcaaacattgtgtatgttggagcagcgaaagaactgttcaccccttatgaataactgacattcaggaagcccaactccatcatgca

SEQ ID NO: 529991 - DNA, 201 bp, Homo sapiens
gtgcccagccagaagttggttttttttgcagcctaatttatgggctggtgatactcaatccctgtatatcatctgttttgaggactatcccatgagaaagrtttctcgtaataagaatataaatccgagtacctgactataattactaggaagaaatctaagattctggggctgaggtttatttcatgtgaaaagatagtt

SEQ ID NO: 529992 - DNA, 201 bp, Homo sapiens
ttctgttacactacgtggccctgaatatcaagtccagattccactgcccttttctggctattgggtgggagggtgctggggaagggcactggcacctactyacccccaagtgggcagagctcactccttcgggcccacttggtgttgcagtcaagagactcagttccaaaaaccttcagcagaggtctcccctcctcctgg

SEQ ID NO: 529993 - DNA, 201 bp, Homo sapiens
ttaagaactcatacagtactaggtatgttggtccctctgagaaaaacatgtggactctcaccagtccgttgtgctcaggactgagcagcagcgtgtgtgcrgggcagctgtggaggtgaatactgattgtcccccttttcctccacagggatatctgcattacctccacctcctccacctccaccaccaccagcagctccc

SEQ ID NO: 529994 - DNA, 201 bp, Homo sapiens
ctagggaacagtggaaagagccacccatgggtacttagcttccatatggattgtgatcttgagattgttcaatatatagatttttttttcttttttgagayggagtttcaccgttgttgcccaggctggagtgcaatggcgcgatctcggctcactgcaacctccacctcctggattcaagcgattctcctgcgtcagcct

SEQ ID NO: 529995 - DNA, 201 bp, Homo sapiens
agtgctctacagggctaaggaaaatgcctttctagagtgtaaccaagagaaggaaagtttatttcaaactcacacttactgtaagttaccaaatggagcaktgagttgttacaaggattccattcctgccttcacttgtttttttgttcacggaagagaaaagatagcacagataggactggggctctagggacagcttga

SEQ ID NO: 529996 - DNA, 201 bp, Homo sapiens
ccctagccaggattgcacatttgtgtgactttagtctggtctgagtgtttaagttaaaatgctttgtaactcctagaaggttgtctattctgacagttgtyggttctctgcttttttctgtacctgccccacatgctgttgttgtctttgatctctactccccctccccacccccaggcctccagcatggtagagagtcag

SEQ ID NO: 529997 - DNA, 201 bp, Homo sapiens
ttttaaacctacaaggctactaaactaatttaatataaacacctgattaccaaactccaagaaacaactaagttctattgttatcggaattgtttcagaawgtattctaagcacaagttctttagctcttcgggcccaactcctttaaggatctcatcacagggactgcttccctgttcataaatacccataaacatgtct

SEQ ID NO: 529998 - DNA, 201 bp, Homo sapiens
tgtttgttttttgagcaagggtctcactctgttgcccaggctggagcgcagtggcactatcccagctctgtgcagccgtgaccttctgggttcaagtgatscttgcgctccagcctcctgagtagctgggattacaagtgcacaccaccatgcccagctaattttttcattgtttgtagagagggggtttcactatgttga

SEQ ID NO: 529999 - DNA, 201 bp, Homo sapiens
tcagtgtttgttccctgcagtcattccatggggctgcgatccaggaattcaatgactgctcgcactgggggcgcctggtacaactgagctctgtgggaagyacaggatggacttgaaggctgtgctctccatttcctgtctccagcttgtttatcagcactttctgagcatgcagtttttccacatgtgtcagtcagttcc

SEQ ID NO: 530000 - DNA, 201 bp, Homo sapiens
acaattgaacccttggttcctgcttcatcagatatttattgagcatctactgtgtgccatgtgctatgtatgcagccaggaggaaagaataatttccccasttcctactccatgacagttacacagggagattgacaggtgatggctgtggcagagtaaatgttagggagcaccttggggaaggaggcgggggcatggatg

SEQ ID NO: 530001 - DNA, 201 bp, Homo sapiens
aagaataatttccccacttcctactccatgacagttacacagggagattgacaggtgatggctgtggcagagtaaatgttagggagcaccttggggaaggrggcgggggcatggatgatccacacctaaagttgaaggaaggcttcccagaagagttcattcctacacggagatctgaggggtgagtagaaggtagccagg

SEQ ID NO: 530002 - DNA, 201 bp, Homo sapiens
aacatctgggctgagtctgggccagatggaaaatgctgagggagtgggggcaggccagtctttaggggccatggtaggcaaatctcagagtgcagagagaycccacacactgtgggagataaagccagaaaggtaggttaaagccagaggttggttgaacactcggtttatgtttggtcttgatttgggcaaggaagtggg

SEQ ID NO: 530003 - DNA, 201 bp, Homo sapiens
gcaggccagtctttaggggccatggtaggcaaatctcagagtgcagagagaccccacacactgtgggagataaagccagaaaggtaggttaaagccagagrttggttgaacactcggtttatgtttggtcttgatttgggcaaggaagtggggaaccagtaaaggcttctaagcaaaggagtagatgtttaggactgaaat

SEQ ID NO: 530004 - DNA, 201 bp, Homo sapiens
ttcataatttcttaatgcaaagaactttaaagaacttcctttctcattgtcttcttaaaagggggaaacattttcatgataaatgaacagaaaaagaggayggatttttttttcccagtaaacaggcactcggagactttccacaatagaaccatgttgttgctgtacactggcttttatttctagtatatatttaaggct

SEQ ID NO: 530005 - DNA, 201 bp, Homo sapiens
gagccaccacacctggccctgcagatcttttctttaaaaaataaaataatttagggtagaaaatggcagttcttgtagggatgactgaccacaaaagacartgactcacaggagacccatagaggcagatgtggtagagtaaaaaactgtagcattgtcttgcgtaattttttgactgttctgtgttcttgtcattttagc

SEQ ID NO: 530006 - DNA, 201 bp, Homo sapiens
actactctagacccatagttctttttagttagatgtattgaaacagacaaaaatattaacatcagaaaaagctcttgccaattagaggatcttcttaatcytcagcaattaagtttggggtttgaggggggcaggtcattgttacaacagaagtaaatttggcatctatagaaatcaattatgatttttgaaagatttatc

SEQ ID NO: 530007 - DNA, 201 bp, Homo sapiens
gctctgtcaccagactagagtgcaggtcgcaatctcagctcactgcaacctccacctcccaggttcaagcgattcttctgcctcagcctcccaagtagctrggattacaggtatgcaccaccatgcctggctaatttttgtatttttagtagagatggggtttcaccacgttgactaggctggtcttgaacacctgacctc

SEQ ID NO: 530008 - DNA, 201 bp, Homo sapiens
atcatgacgctcatctcactgcagggatcaaagcgtgtttgcaatgtgtgcttcatctcttcttttgctaaagttaaagcacatgattctatgaattagatttttttttttttgagacagagtcttgctctgtcacccaggctggagtgcagtggtgcgatctcggctcactgcaagctccgcctcccggattcacgccgt

SEQ ID NO: 530009 - DNA, 201 bp, Homo sapiens
acaaggtcaggagatccagaccatcctagctaacacggtgaaaccctgtctctactaaaaatgcaaaaaaattagccgagcgtggtggcgggcgtctgtartcccagctacccaggaggcggagtttgcactggagcgcgccactgcactccagcctgggcgacagagtgagactccatctcaaaaaaataaaataaaata

SEQ ID NO: 530010 - DNA, 201 bp, Homo sapiens
tggccaggctggtctcgaacttctggcctcaggtgatccgcccgccttggcctcccaaagtgctgggattacaggcgtgagccaccacacccagccaagtkatttctttatggacagtttttacacagaaaggtggagggagagtaatatttttaggtatgatggcttgctttggggaaaaggggttctgtttctgtgacc

SEQ ID NO: 530011 - DNA, 201 bp, Homo sapiens
tactggcacatgcctgtagttccagctactcaggaggccaagatgggaggattgattgagcccaggacttccagggcagcctggacaacataacaagactycatctctttaaaaaataggggaggggcaggaggcatattcaaagaaagactcacttatagctgtttgggtgctacccaagcaaccatttctattctttga

SEQ ID NO: 530012 - DNA, 201 bp, Homo sapiens
gctcacctggggaaagtttgacccaggacaaaggtgaaatggcctcaaaactgtccatttcctcttgctttgattccatgctcagtaaaacttttttttttaagtcattcatctttctaggtgcctggttaataagaaagacaattgaagggctgtttgccctgaaaacaaatattctcacttatctcttggcatcttgtg

SEQ ID NO: 530013 - DNA, 201 bp, Homo sapiens
taatcatcgtgaataccttcttatccagtgtgagtggactccagcttaggtccattttacagttgaaactgacactctagtaggattaagagactttgacygaggtcacacaagttagggcggtgctagagccaggagtgtaacttgttctgtatttgttcatttaccccattgatgtattgagtgcctgctttcttcagg

SEQ ID NO: 530014 - DNA, 201 bp, Homo sapiens
agtgactttgatttgcttaacaacagcttacaggtaaatgttttgaaattctaattacacacattgattacttggggtgtctaaaaaactggctggagtcsgggcacggtggctcaacgcctgtaatcccagcacttggggaggccaatgcgggtggatcacctgaggtcaggcgttcaagaccacctgaccaacatggag

SEQ ID NO: 530015 - DNA, 201 bp, Homo sapiens
aatttttatatttttttgtagagacgggttttgccatgttgcccagtctagtcttgagctctggggctcaagtgatctgcccgccttagcctcccataacrgtgggattacaggcatgagccacccacacccagccctttttttaaaaaatgggtttgtaagagtattttgggaaagctgagtaagcagaggaccctaaat

SEQ ID NO: 530016 - DNA, 201 bp, Homo sapiens
attcctagcactgtcttttctgcaaaaggttgttttctgcctcaggaaggtcactttttccaggactttaaaattctttatcctggtttatttcatggtartatcaccaactagtatttatactctattcatagaactgattggttttaaaggtcccaatttacacacacacaaatattccctcccaccctcctttgggat

SEQ ID NO: 530017 - DNA, 201 bp, Homo sapiens
tgaacctgggaagcggaggttgtggtgagccgagatcgcaccattgcactccagcctgggcaataagagtgaaactctgtctcaaaaaaaaaaaaaaaaacaaaactggttggaaatggcaatatcagaaacaagaaattagcacatttccctgtcaaagaaaataaattcatactttatacagatgatgtaaagtattcc

SEQ ID NO: 530018 - DNA, 201 bp, Homo sapiens
ggcttaaatgatccttcttgggcttcagtgatccacccgcctcagccccccaaatagctgagactacaggtgtgcgccaccacagctagctattttgtgtgtgtgtgtgtgtgtgtgtgtgtgtgtgtgtgtgtattttttgtagagacagggtttcaccatgttgcccaggctggtcttgaactcctgggctcatgcaat

SEQ ID NO: 530019 - DNA, 201 bp, Homo sapiens
aaatattttatttagatcagtatattactaaaaattgtttgggatctgaactatatatatttttaaattgtgttcagaggaatacaacttaaggccctgaraaacagcatcttcagacaacttgtagaattaccgtttttatgataattctcacttgtatttctcactaacttctcactaacatgtgttttgtcattggca

SEQ ID NO: 530020 - DNA, 201 bp, Homo sapiens
cttaaatgatccttcttgggcttcagtgatccacccgcctcagccccccaaatagctgagactacaggtgtgcgccaccacagctagctattttgtgtgtgtgtgtgtgtgtgtgtgtgtgtgtgtgtgtgtattttttgtagagacagggtttcaccatgttgcccaggctggtcttgaactcctgggctcatgcaatcc

SEQ ID NO: 530021 - DNA, 201 bp, Homo sapiens
accttcatgatagtttgaattgcattagttattatcccagttttgtagttgaagaaaatgaggtgcaaaaagagtaagattgaaggtttctatgaggctartgaactttgttttgtttttttgagactgagtctcactctgttgcccaggctggagtgcagtggtgtgaagttggctcaccgcaaccttcacctcccgggt

SEQ ID NO: 530022 - DNA, 201 bp, Homo sapiens
agcactcaaatgctagaagggacttctgaggtaattgggtagctcaccttcttcactgatggcagcacttgatcatctaaagacacaggagcattagtcayggaaggaaaacagacctgacttaaaatgtaaggcctcctgttttttagtagagcctgcatgaacagaaatgaccttaaatcctgcccactgctctggacc

SEQ ID NO: 530023 - DNA, 201 bp, Homo sapiens
gcgattctagtgcttctgcctcccgagtagctgaggctacaggtgctcgccaccatgcccagctaatctttgtatttttagtagagacgggtttcgccacrttggccaggctggtctcgaactcctggcctcaggtgatccacccgccttagcctcccaaagtgctgggattacagtcacaagccactgtgcccagcccat

SEQ ID NO: 530024 - DNA, 201 bp, Homo sapiens; identical to SEQ ID NO: 334916

SEQ ID NO: 530025 - DNA, 201 bp, Homo sapiens
aggaaaccgggccgccgggggcggggagaaggcgggccggcccgggagccgctcactttccctgggggggacctacgcggagacctcggctatcctggccytccgaggcccacgaggaggcgcggcccaacgccggggcctggagcattgaggccggaccctcgcgagacagcagagcctggcctgacgctggaaaccaca

SEQ ID NO: 530026 - DNA, 201 bp, Homo sapiens
tgcgccgccaggggtgagagggaggaaaccgggccgccgggggcggggagaaggcgggccggcccgggagccgctcactttccctgggggggacctacgcrgagacctcggctatcctggccttccgaggcccacgaggaggcgcggcccaacgccggggcctggagcattgaggccggaccctcgcgagacagcagagcc

SEQ ID NO: 530027 - DNA, 201 bp, Homo sapiens
cctggggggcgcctcctactctaacgtaggacccccctcccgtgtcctggaagtttctgggcctgcccccgccatctgcctttgcctactgaaacttctcycctcctcctttccccctccccctccctccttcccatttgaggggtttcttgagctaagcaggtgggagcggggcacctagtcctcctccccactggctgc

SEQ ID NO: 530028 - DNA, 201 bp, Homo sapiens
aatatttgctcagaggctgggcaacagcgcccctcctgggtcacaaagagctcagggacagtgcgctgcctagcacctggggggcgcctcctactctaacrtaggacccccctcccgtgtcctggaagtttctgggcctgcccccgccatctgcctttgcctactgaaacttctcccctcctcctttccccctccccctcc

SEQ ID NO: 530029 - DNA, 201 bp, Homo sapiens
agcacctggggggcgcctcctactctaacgtaggacccccctcccgtgtcctggaagtttctgggcctgcccccgccatctgcctttgcctactgaaactyctcccctcctcctttccccctccccctccctccttcccatttgaggggtttcttgagctaagcaggtgggagcggggcacctagtcctcctccccactgg

SEQ ID NO: 530030 - DNA, 201 bp, Homo sapiens
aattctggaagaaggaatatttgctcagaggctgggcaacagcgcccctcctgggtcacaaagagctcagggacagtgcgctgcctagcacctggggggcrcctcctactctaacgtaggacccccctcccgtgtcctggaagtttctgggcctgcccccgccatctgcctttgcctactgaaacttctcccctcctcctt

SEQ ID NO: 530031 - DNA, 201 bp, Homo sapiens
agggaaaaatgtcgccatgaaggccgagaaccgctgccgccgccgacccccgccggccctgaacgccatgagcctgggtccccgccgcgcccgctccgctycgactgccgtcgccgccgaggcccccgttgatgccgctgagctcccccaacgccgccgccaccgcctccgacatggacaagaacagcggctccaacagct

SEQ ID NO: 530032 - DNA, 201 bp, Homo sapiens
aacatttattaaagagttactataatttcagagaactatcttttgtgatcttcatctgcctggcacatggtttattaatttcttttttttttttttgagayggagtctagctctgtcacccaggctggagtgcactggtgcaatctcagctaactgcaacctctgcctcccgggttcaagcgattcttctgcctcagcctc

SEQ ID NO: 530033 - DNA, 201 bp, Homo sapiens
agaagtgggtgatggggccgggcgcagtggctcacagctgtaatcccagcactttgggaggccaaggagggtggatctcctgaggccaggagtttgagacrggcctggctaatgtggcaaaactctgtctctactaaaaatacaaaaattaaccgggcgtgatggcaggtgcctgtaattccagttacttgggaggctgag

SEQ ID NO: 530034 - DNA, 201 bp, Homo sapiens
gttttaccatgttggccaggctggtctagaactcttgacctcaggcgatccacctgcctcagcctcccaaagtgctgggattacagacatgaaccactgcrcctggcctttttttttttttttttttttaaactaggctttattgctattgcttttttcctttgaactttattttgaaatacagagttgaaagaatagtat

SEQ ID NO: 530035 - DNA, 201 bp, Homo sapiens
aagtagtaaccccttaccctcctgatctgggttgggctcattacagggccattgcttcattggcagccattcgtagcaatcactatcaaagtaggcctcasccttgtggcagggaggcacatgaatgagccacacagttgtacttttcttttttgagaaagagtctcactctgttgcccaggctggagtacagtggtgtga

SEQ ID NO: 530036 - DNA, 201 bp, Homo sapiens
ggtgcttaaagctgtggaactaagtgagatagattaaggagtgagtgttccaaaaacggattaggttcaagaactgaacctctgagtctggataagaaacsagcagaagagagcacagtcagggcgggaggaaaattgctgaaaggtgttgcagaaggtgatcagttttgtcaagtgttgctgataggttaagaataggac

SEQ ID NO: 530037 - DNA, 201 bp, Homo sapiens
catgcccggctaatttttttttttttttttggatttttagtagagacaggatttcactgtgttagccaggatggtctcaatctcctgacctcgtgatccgyccacctcggcctcccaaagtgctaggattacaggcatgagccaccgcgcctggccatttttaaaaaggatatgactcaatctgatccaatatgcttttat

SEQ ID NO: 530038 - DNA, 201 bp, Homo sapiens
gaatctcctttgcttgaggtgatgtgaaatggagttaaggaaagcaaagcaagagaatgtggctgagttagctggggttctgcatcccctgagttttccttttttttttttttttgagacggagtctcactctgtcgcccagactggaatgcagtggcacgatctccgctcactgctagccccgcctcccgggttcacgcc

SEQ ID NO: 530039 - DNA, 201 bp, Homo sapiens
tataggcgcccgtcaccacgcccagctaattttttgtatttttaatagaaacagggtgtctctatgttggccaggctggtttcgaactcctaacttcaggygatccacctgcctcagcctcccaaagtgctgaacgtgagccaccacacccagctggcttggtcttaaacttctaaactcaagcaatcttcctgtcttggc

SEQ ID NO: 530040 - DNA, 201 bp, Homo sapiens
ttcttatatcaagagcagagctacagaccttattttaagaccattgttaaattattttctaggaaatcatgctaaattaccccattttcaccccagagaaraggctgtatttgaaaattcctatttagctacaccatcatgagctttgaatgttgcatttctttgatcttgctggcattcttatagatgaacagcacagcc

SEQ ID NO: 530041 - DNA, 201 bp, Homo sapiens
aaattcaggccaggtgtggtggctcacgtctataatcccaacactttgggaggccaaggtgggcagatcacttgagctcaggagttcaagaccaggctggrcaacatggtgaaacctcatctctttaaaaattcaaaaaattagctaggtgtggtggcacgtgcctgtggtcccggctactcgggaggctgaggtgggagg

SEQ ID NO: 530042 - DNA, 201 bp, Homo sapiens
agtctcactctgtcgcccagactggaatgcagtggcacgatctccgctcactgctagccccgcctcccgggttcacgccattctcctgcctcagcctcccragcagctgggactacaggcgcccgccaccacgcctggctaattttttgtatttttagtagagatggggtttcaccatgttagccaggatggtctctatct

SEQ ID NO: 530043 - DNA, 201 bp, Homo sapiens
ggtggagggcagttggctaagtgaatgtatcagcttcttaagacgttcttttgtgtttcttgctttcagatggaaagaactccagtggatccaagcgttayaatcgcaaacgtgaactttcctaccccaaaaatgaaagttttaacaaccagtcccgtcgctccagttcacagaaaagcaagacttttaacaagatgcctc

SEQ ID NO: 530044 - DNA, 201 bp, Homo sapiens
gtggcacgatctccgctcactgctagccccgcctcccgggttcacgccattctcctgcctcagcctcccgagcagctgggactacaggcgcccgccaccamgcctggctaattttttgtatttttagtagagatggggtttcaccatgttagccaggatggtctctatctcctgacttcgtgatccacctgccttggcctc

SEQ ID NO: 530045 - DNA, 201 bp, Homo sapiens
tgggaggcagaggatgcagtgaacagagatcgtaccactacactccagcctgggtgacagagtgagaccccatctcaaaaaaaaaaaaaaaaattgaattmtgtaaatgggtttacaagggttatctttcctttgcagacccagaagtccacattcccctcgagaatctacagcagtttcctgccttcaattcttatacct

SEQ ID NO: 530046 - DNA, 201 bp, Homo sapiens
ctcagctaggactgcaggtgtgtgccaccacattgggctaatttttaaattttttgtagagatggggtcttgctatgttgcccaggctggtcgcaaactcrtggactcaagtgatcctcttgctttggcttcccaaagtgttgagacaaccggcatgagccaccaagtccagcgctgaaactttgctttctaattgttact

SEQ ID NO: 530047 - DNA, 201 bp, Homo sapiens
gagttggaggctgcagtaagccgagatcatgccactgcactccagcctgggtgacaaaagtaagatcctgtctcaaaataaatttaaaaattagctgggtktggtggtgcacacctgcagtcctagctgggaggctgagttggaaagatgctaagctgaggttgaggctgcagtgtgctatgatggcaccactgctttcca

SEQ ID NO: 530048 - DNA, 201 bp, Homo sapiens
ggaaagatgctaagctgaggttgaggctgcagtgtgctatgatggcaccactgctttccaccctgggggaataaaacatgctgggcatggtggctcatgcytgtaatcccagtactttgggaggccgaggtgagtggatcacttgaggtcaggaggtcgagaccagcctggccaatgtggcgaaactccatctctactaaa

SEQ ID NO: 530049 - DNA, 201 bp, Homo sapiens
agctgaggttgaggctgcagtgtgctatgatggcaccactgctttccaccctgggggaataaaacatgctgggcatggtggctcatgcctgtaatcccagyactttgggaggccgaggtgagtggatcacttgaggtcaggaggtcgagaccagcctggccaatgtggcgaaactccatctctactaaaaatacagaatta

SEQ ID NO: 530050 - DNA, 201 bp, Homo sapiens
ctgaccttgtgatccgcccgcttcggcctcccaaagtgctgggattacaggcgtgagccaccgcgcccggctgagggattttaagattagggaaatgatarcatgtctgtgctcatgggatggtcctggtgagaggcaaagtgatgtggggaaaagggagagaattgctgagcaatgtccttgagtccttgagatctagtg

SEQ ID NO: 530051 - DNA, 201 bp, Homo sapiens
cagtctcgaagcctgttgcactctgttcatgactagacaagaatcacatatgtatggcgtgctatgtgcctagcactgtgctaattctcccaacaaccacrttaaatgggtgtacctcacgttacagatggggaaactgaggtccagggaggtaaaagtgatttgcccaaagacacccacttggtgtataccaagactggt

SEQ ID NO: 530052 - DNA, 201 bp, Homo sapiens
ccatgtgtaattaatttttctcaacccaaagtaagattgagtcccctttgagatgcattagagcagtccaacccagaatggcacacactgctctgctgtascatcatgtcagggcttcctggactcagtacacctctcagtttgtcttttaaaaaacagctgaatctttactacctatttagttctccttgttaaagaaac

SEQ ID NO: 530053 - DNA, 201 bp, Homo sapiens
agaaacatttttattttttattttttgagacggagtctcgccctgtcacccaggctggagtgcagtggcacgatctcagctcactgcaagctctgcctccyggggttcacgccgttctcctgcctcagcctcccgagtagctgggactacaggtgcccgccaccatgcccggctaatttttttttttttttttggattttt

SEQ ID NO: 530054 - DNA, 201 bp, Homo sapiens
cagctcactgcaagctctgcctcccggggttcacgccgttctcctgcctcagcctcccgagtagctgggactacaggtgcccgccaccatgcccggctaatttttttttttttttttggatttttagtagagacaggatttcactgtgttagccaggatggtctcaatctcctgacctcgtgatccgcccacctcggcctc

SEQ ID NO: 530055 - DNA, 201 bp, Homo sapiens
aaatttacacagtacttttcagtggctttgctctaaaggggagcagagatgtgaggcggtgcttgaagggaatatgagcttgagggattttttttctttctttttttttttttttttgagatggagtctcgctctgtccccccaggctggagagcagtggcgcaatctcggctcactgcaacctccgctcttgggttcacg

SEQ ID NO: 530056 - DNA, 201 bp, Homo sapiens
tttttgtatttttagtagagacggggtttcaccgtgttagccacggtggtctcgatcttctgaccttgtgatccgcccgcttcggcctcccaaagtgctgrgattacaggcgtgagccaccgcgcccggctgagggattttaagattagggaaatgatagcatgtctgtgctcatgggatggtcctggtgagaggcaaagt

SEQ ID NO: 530057 - DNA, 201 bp, Homo sapiens
tcccaatggtattatattaaactaacaaaaaattagaagccacctaaatatacaacaatgggggattggttacattattctgtaagtatgtggccaagaarggtacagcaattaatcatgcttctgaagactagggatgcataaaaatgctcacagagtagtaagcagaaaacaatatatcttctatgcttgtcattttat

SEQ ID NO: 530058 - DNA, 201 bp, Homo sapiens
ttctgggaaaatacttaagattctattctagaggtgttttgaaagacattgtggagaaagtattatggcctgcccagtatgccttaggagtacctgaaacrgcaagaattacacaagaacagaattccctgggtcttttatcttccacaacagagattcttgaagcatcacaaccactggttgttaggtcccactttgaga

SEQ ID NO: 530059 - DNA, 201 bp, Homo sapiens
gacataatcacctaagcctctgtgtaaagagactcccaatggtattatattaaactaacaaaaaattagaagccacctaaatatacaacaatgggggattrgttacattattctgtaagtatgtggccaagaagggtacagcaattaatcatgcttctgaagactagggatgcataaaaatgctcacagagtagtaagcag

SEQ ID NO: 530060 - DNA, 201 bp, Homo sapiens
aacggttctagaaagcaacctagggatgtgtaaatggctttaatgaccatattttatctgtcagttccactttttgagaatttgacataatcacctaagcytctgtgtaaagagactcccaatggtattatattaaactaacaaaaaattagaagccacctaaatatacaacaatgggggattggttacattattctgtaa

SEQ ID NO: 530061 - DNA, 201 bp, Homo sapiens
gaggctggtggatcgcttgagctcaggagtttgagacccgtctgggcaacatggcaaaaccccgtctatatcaaaaatataaattaagccaagaatggtgyatatgcctggagtcccagctacttggggggctgaggcaggaggattgcttgaacccaggagttggaggctgcagtaagccgagatcatgccactgcactc

SEQ ID NO: 530062 - DNA, 201 bp, Homo sapiens
taattttattttttgaggcagagttttgcacttgttgcccaggctggagtgcaatggtgcgatcttggctcactgaaacctctgcctcctgggttcaagcrattttcttactccagcctccctagtagctgggattataggcgcccgtcaccacgcccagctaattttttgtatttttaatagaaacagggtgtctctatg

SEQ ID NO: 530063 - DNA, 201 bp, Homo sapiens
ctaatgggaagataaaagtaatttgtagaacaagaataaatgttcgtgggttttaaaaaaacaccaccaccaccacaaaactaaagcatttcattatgggkgtgtgtgtgtgtgtgtgtgtatgtatatatatatatgtaaatgtatagaaaaacttctgttagaaggcaggggaggaaataaaaaaatattaaatgtata

SEQ ID NO: 530064 - DNA, 201 bp, Homo sapiens
tcaagaccaaccaaattttgtctctacaaaaaatacgaaatttagccaggtgtggtagtgtgtacctgtagtcccagctacttgggaggctgaggtggggrgatggcttgagcctaggaggcaaaggttgcagtgagcccagattgggccactgcactctagcctgggcaacacagccagaccctctcaaaaaaaaaaaga

SEQ ID NO: 530065 - DNA, 201 bp, Homo sapiens
gccaaggtttttagttcattgccagtttagtctttttgacccatgtgtaattaatttttctcaacccaaagtaagattgagtcccctttgagatgcattakagcagtccaacccagaatggcacacactgctctgctgtagcatcatgtcagggcttcctggactcagtacacctctcagtttgtcttttaaaaaacagct

SEQ ID NO: 530066 - DNA, 201 bp, Homo sapiens
aatcctttgcttgtgaagcagcccaggggtatttaacatgaactctgctgctcattattatgggaacctcctccagggattgttacctctcattctaatayggctggacaaattgagtcatctgatgggtaggagggaagttaactgcctgtcggagctttatgcagcatggagttggttgagggcagattatgtcatgga

SEQ ID NO: 530067 - DNA, 201 bp, Homo sapiens
cagtggcacgatctcagctcgctgcaagctccacctcccggagcttcatgccattctcctgcctcagcctcccgagtagctgggactacaggcgcccaccmcctggctaattttgtttttgtatttttagtagagatggtgttgcaccgtattagccaggatggtcttgatctcctgacttcatgatccacccgccgcggc

SEQ ID NO: 530068 - DNA, 201 bp, Homo sapiens
gatactttaccgctaagtacttaggagatacatgccaaagaaagtgggatattcgcctatagaaccacagtgatcacattagagaaattccactgccacartaatatctaatatggtgcatatttatatctccacatttgtctcagcgtccttcattttcaactcagggcagaatcctgttactccctgcatttagttgtc

SEQ ID NO: 530069 - DNA, 201 bp, Homo sapiens
actcatcagctctttcaggaatgaatgcgagaataggtctcccatcccccagggagggcattaatctgttcatgaggggtccacccccatgacccatacayctcccattaggtccccacttccagcattggggatcagattttaacatgaggcttgggagggtcaaatgtctaaaccgtaggagacccaaactcctagaga

SEQ ID NO: 530070 - DNA, 201 bp, Homo sapiens
ttagtagagacggggtttcaccgtgttagccacggtggtctcgatcttctgaccttgtgatccgcccgcttcggcctcccaaagtgctgggattacaggcrtgagccaccgcgcccggctgagggattttaagattagggaaatgatagcatgtctgtgctcatgggatggtcctggtgagaggcaaagtgatgtggggaa

SEQ ID NO: 530071 - DNA, 201 bp, Homo sapiens
agaatctcctttgcttgaggtgatgtgaaatggagttaaggaaagcaaagcaagagaatgtggctgagttagctggggttctgcatcccctgagttttccttttttttttttttttgagacggagtctcactctgtcgcccagactggaatgcagtggcacgatctccgctcactgctagccccgcctcccgggttcacgc

SEQ ID NO: 530072 - DNA, 201 bp, Homo sapiens
aaaggtgcagtgacctgagatcgcaccactgcactccagcttgggcgacagagcaagactccatctccaaataaataagtgaataaataaataataaatamaaatttaaaaaaggaagtgggcagtggaccacaggatctaagccaaatctgaggggttggatcattgatttggaggtcctagtgggggtaaagaattgtt

SEQ ID NO: 530073 - DNA, 201 bp, Homo sapiens
agcaaacagaatgtggagaatgtggcgtttttttgttttttgtttgcttttttttttttggacgaagtctcgctctgtcgtccaggctagagtgcagtggygtgatctcggctcactgccagctctgcctcctggattcacggcattctcctgcctcagcctcccgagtagctgggactataggtgcccgccaccatgccc

SEQ ID NO: 530074 - DNA, 201 bp, Homo sapiens
gaatgtggagaatgtggcgtttttttgttttttgtttgcttttttttttttggacgaagtctcgctctgtcgtccaggctagagtgcagtggcgtgatctyggctcactgccagctctgcctcctggattcacggcattctcctgcctcagcctcccgagtagctgggactataggtgcccgccaccatgcccagctaatt

SEQ ID NO: 530075 - DNA, 201 bp, Homo sapiens
actgtgttagccagggtggtctcgatctcctgacctcgtgatccgcccgcctcagcctcccaaagtgctgggattacaggcatgagccaccacacccggcscagaatgcggcgttatttttaagcttggttgttaatataaaaaaggaagttatctgactggatggtataccaccagttgtatttaattatttttaattta

SEQ ID NO: 530076 - DNA, 201 bp, Homo sapiens
ttttgagacagggtcttgtggtgtcgcccaggctggagtgcagtggcatgattgtggcccactgcagccttgacctactgggctcaaattatcctcccacytcagccttccaagtagatgggaccacaggcatgcatcactaagcctggctaatttttaaattttttgtagagacatgggatccctgtgttgtctagactg

SEQ ID NO: 530077 - DNA, 201 bp, Homo sapiens
atctgttacagttctgtgcataagaaggatctcaagaggtgagattgagacatttactcagttagatcccaatctcttcactccttgccctgctacatatragtgtccatgtttcagtgttgttgccacagagtcacatcagtatgttgttggtgataccattacgatgcagctgatgaagagggagaaaggggtgttggt

SEQ ID NO: 530078 - DNA, 201 bp, Homo sapiens
ccatcctagtgttttttttttttttttttttttgaaatggagttttgctcttgatgccaggctggagtgcaatggtgtgatcttggctcactgcaacctcygcctctcgggttcaagcgattctcctgcctcagcctcccgagtagctggtatttcaggcacctgccactgcacccggctagtttttttttttattttcag

SEQ ID NO: 530079 - DNA, 201 bp, Homo sapiens
ctcacagttctgcaggctgtacaggaaacatggctggggagccctcagggaacttacagcgggagaacgggaagcaggcacatcttaggaggaagactgcrtaagaggaaatgctacatacttttttttttttttgagctgaggtcgcgccactgcactccagcctgggtgacagagtgagactctgtctcaaaaaaaaaa

SEQ ID NO: 530080 - DNA, 201 bp, Homo sapiens
gtgagacaaggttgcgtcactgcattccagcctgggcgacagagcgagactttgtctcaaaaaaaaaaaaaaaatcacacctgttaaagaagggaatgtarttcttctattcacgtactaatgggaagataaaagtaatttgtagaacaagaataaatgttcgtgggttttaaaaaaacaccaccaccaccacaaaactaa

SEQ ID NO: 530081 - DNA, 201 bp, Homo sapiens
gaattggacctagatttgaatcttgtttcggcctttgaccttaagtaacttaacagctttgagatttagcctctcctttataaggaagaggaaaggtttttttttttttttttttttttttttgagatgtagtctcgctctgccacccaggctagagtgcggtggcgtgatctcggctcactgcaacctctgcctcccggg

SEQ ID NO: 530082 - DNA, 201 bp, Homo sapiens
aattggacctagatttgaatcttgtttcggcctttgaccttaagtaacttaacagctttgagatttagcctctcctttataaggaagaggaaaggtttttttttttttttttttttttttttgagatgtagtctcgctctgccacccaggctagagtgcggtggcgtgatctcggctcactgcaacctctgcctcccgggt

SEQ ID NO: 530083 - DNA, 201 bp, Homo sapiens
ttgcttgtgattacagcatgaatcagcagcagaaacttgctgactggtattctgacctctaggccgagccacctgttagaactagagctagaaatgaagaygccaagtaatttaactgtgaaaaacttgtggcccttaatttggtaatggggggaggctgagatatacctactgctacttggtggagacctttccattagg

SEQ ID NO: 530084 - DNA, 201 bp, Homo sapiens
ttgcctgggctaattgcctgaacatttatataacattccttttcttgattatattcctacagcttcattccagtagtgttaataggtatttctgagaacaygcagcagtaaatatcctgtgaatatagctcagaggagagaaggtgggttagaaagtggggaaagtcatttagagggagcaaagaaagagaggcaagagag

SEQ ID NO: 530085 - DNA, 201 bp, Homo sapiens
tttgtttttttttcccccatgcttttgtttggctgctgtaatttttaagtatttgagtttgaacagattagctctggggggagggggtttccacaatgtgrgggggaaccaagaaaattttaaatacagtgtattttccagcttcctgtctttacaccaaaataaagtattgacacaagagatctcttcctgccaaggttt

SEQ ID NO: 530086 - DNA, 201 bp, Homo sapiens
aaaccacttagagaaattaaaagaatttcagggcccgttggctggattccttggtttatatggcttcattggaagtctagtgggtgctcttgacaggaacrctttggatttattaatgataggctttcaaatcatagtaaaactgtgtgtcagccactatggtaggcattttacagaagttttctttcttaatcctcatga

SEQ ID NO: 530087 - DNA, 201 bp, Homo sapiens
agctcactgcagtcttgaactcctgggctcaagtgatcctcctgcctgagcctcccagagtgctgggattccaggtgtgagccactgtacctggccaagaragatactttttgatgcttacgtctgatttctcaggcattcttgttttgttttgttttgttttagatggagtttcgctcttgttgcccaggctggagtgca

SEQ ID NO: 530088 - DNA, 201 bp, Homo sapiens
aatttaaaaattaggtcgggcctgatggctcacgcctgtaatcccagcactttgggaggctgaggctggtggatcgcttgagctcaggagtttgagacccrtctgggcaacatggcaaaaccccgtctatatcaaaaatataaattaagccaagaatggtgcatatgcctggagtcccagctacttggggggctgaggcag

SEQ ID NO: 530089 - DNA, 201 bp, Homo sapiens
ctcggcctcccaaagtgctgggattacaagcatgagccaccatgcccagccaggaagaggaattctttttttttttttttttttgagacaaagtcttgctytgtcacccaggctggagtgcagtggcacgatctcagctcgctgcaagctccacctcccggagcttcatgccattctcctgcctcagcctcccgagtagct

SEQ ID NO: 530090 - DNA, 201 bp, Homo sapiens
caaagtgctgggattacaagcatgagccaccatgcccagccaggaagaggaattctttttttttttttttttttgagacaaagtcttgctctgtcacccaggctggagtgcagtggcacgatctcagctcgctgcaagctccacctcccggagcttcatgccattctcctgcctcagcctcccgagtagctgggactacag

SEQ ID NO: 530091 - DNA, 201 bp, Homo sapiens
ttagccaggatggtcttgatctcctgacctcgtgattcacctgcctcggcctcccaaagtgctgggattacaggtgtgagccaccatgcctggcctaattyttctatttttagtagagatggggtttcaccctgttggccaggctggtctctaactcctgacctcaagtgatccacccaccttggcctccccaagtgctgg

SEQ ID NO: 530092 - DNA, 201 bp, Homo sapiens
gcacatgaatgagccacacagttgtacttttcttttttgagaaagagtctcactctgttgcccaggctggagtacagtggtgtgatcttggctcactgcarcctctgcctccagggttcaagcaattctcatgcctcagcctcctgagtagctgggattacaggcacccgccaccacgcctggctaatttttgtattttta

SEQ ID NO: 530093 - DNA, 201 bp, Homo sapiens
gccgaggcgggcggatcacaaggtcaggagatcaagaccatcctggctaacacagtgaaaccccgtctctactaaaaaattagctgagcgtggtggcaggygcctgtagtcccagctactccggaggctgaggcaggagaatggcgtgaaccagggagatggaccgtctcaaaaaaaaaaaaaaaagaaaaaaatgatcat

SEQ ID NO: 530094 - DNA, 201 bp, Homo sapiens
tataaaatcatctgagaatgacatagcataaaaacttaagttttattaaaaaaaaatgaagtctttttaatgcgttctttgttggaagttactggtagatwacttctagaccctttttaggcctttatgcatacatattaagtttttttataaatgggaatatagtgatttgtcacttttttctatttaatgtagaacccc

SEQ ID NO: 530095 - DNA, 201 bp, Homo sapiens
actaaaaaattagctgagcgtggtggcaggtgcctgtagtcccagctactccggaggctgaggcaggagaatggcgtgaaccagggagatggaccgtctcaaaaaaaaaaaaaaaagaaaaaaatgatcatacatgtacctacattgtaaacaattttagaaagatatgttgagtataaggatgtacggggatagagatga

SEQ ID NO: 530096 - DNA, 201 bp, Homo sapiens
cagatatgggtggatttttgaaccaggctgaaatgatagatgctgtaaaagactgataaattttatttttattttatttatagatatataatataatatgwatatatatatttttttttgagacagagtctggctctgtcacccaggctggagtgcagtggcatgatcttggctcactgcaacctctgcctcccgggtttg

SEQ ID NO: 530097 - DNA, 201 bp, Homo sapiens
aagaaaacagttcatggatttagacttctgcctgctgagtctttgggttctttccagagctggagctcagaactgaggctgaggtcctagtgcagtgcctyatgaaccagggctgctaatggcctgcatttgatttctaagtgaatagatgacaatttctgctgagggtttattggtagatcctgacagtctagctttttc

SEQ ID NO: 530098 - DNA, 201 bp, Homo sapiens
tcccgagtagctgggactacaggcgcccgccaccatgcctggctgattttttttgtatttttagtagagacggggtttcaccatgttggcaggctagtctygaactcccgagctcaagtgatctgcccgccttacctcccaaagtgctgggattacaggcgtgagccactgtgactggccaagaaaaccacttttagtgtc

SEQ ID NO: 530099 - DNA, 201 bp, Homo sapiens
tttcaccatgttggcaggctagtctcgaactcccgagctcaagtgatctgcccgccttacctcccaaagtgctgggattacaggcgtgagccactgtgacyggccaagaaaaccacttttagtgtccacagaattttcgttaatgaacataccatcatgtcattaaccctttatttgagatggaatctcactttgtcgcct

SEQ ID NO: 530100 - DNA, 201 bp, Homo sapiens
cctccacctcctcggttcaaacgattttccttcctcagcttcctgagtagctggcatttcaggcacctgccaccacgcccggctaatttttgttttttttktgtgtgtgtgttgtgctttttttgtttttgtttttgttttgagatggagtctcactctgttgccaggctggaatgcagtggtgcaatcccggctcactgc

SEQ ID NO: 530101 - DNA, 201 bp, Homo sapiens
tgagatagattaaggagtgagtgttccaaaaacggattaggttcaagaactgaacctctgagtctggataagaaaccagcagaagagagcacagtcagggygggaggaaaattgctgaaaggtgttgcagaaggtgatcagttttgtcaagtgttgctgataggttaagaataggactgaaagttgaccattcgatttgaa

SEQ ID NO: 530102 - DNA, 201 bp, Homo sapiens
tactcttttttttttttttttttttttttgagacggagtcttgctctgtttcccaggctggagtgcaatggtgtgatctcggctcactgcaacctccaccycctcggttcaaacgattttccttcctcagcttcctgagtagctggcatttcaggcacctgccaccacgcccggctaatttttgttttttttgtgtgtgtg

SEQ ID NO: 530103 - DNA, 201 bp, Homo sapiens
tttagagagtggatcttactatgttgtctaggctgctcttgaactcctggccttaagcaatcctctcatcttggcctcccaaagtgctgggattacaggcrtgagccaccacacctggccatgttacatggttttgaggaagagtgtcttagcctgaaggaatagcacatgcaagggacgggaggtggtagtgcgtttatt

SEQ ID NO: 530104 - DNA, 201 bp, Homo sapiens
gagtagctgggattacaggcgtgcaccactatgcctggctaatttttgtattttcattagagacggggttccaccgtgttgtccaggcttgtctcaaactyccagcttcaagtgatcaacctgtctcggcctcccaaagtgttgggattacaggcgtgagccaccacgcccagcttcagttgcactttcaaagccactgat

SEQ ID NO: 530105 - DNA, 201 bp, Homo sapiens
tgctataaaaagctggtgattgtacttaccaagaaataattttttctaagtttaaaaaaaattactcagataatattacaggtctgcagacaggtactttwgtatagttatatcagaatcttagagggtgaggcctgagcataggaattccgtaaaagctcatctgtgtgattcctatgaactggcaagattgagaatcat

SEQ ID NO: 530106 - DNA, 201 bp, Homo sapiens
tgcagttctgcacatgcgtagctttgccatagatccctcaaaagatagaaggtaaccagtccttttggtcagtgttggaactggtttagagtggtctgttyaaagcaattgataagtaagtttatttttgtactctattcccagatgtatgttaaggatttggttctccaactgtgaattctcaactaatttttctggggc

SEQ ID NO: 530107 - DNA, 201 bp, Homo sapiens
gtccggccggccggccggcggggctcgcgcaacctccctcgcctccccttcccccgcagcctccgccccgccaggcccggcccggactcccgagccccggyctcctcgtcctcggtcgccgctgccgccgggcttaacagccccgtccgccgcttctcttcctagtttgagaagccaaggaaggaaacagggaaaaatgtc

SEQ ID NO: 530108 - DNA, 201 bp, Homo sapiens
aggtgtgagccatggtgcctggctggtttgagcttttctgatattacatacaatgctgtaacaataaacgcgtgactaaagttttgactacatctctgggyttcttagatttcttatatcaagagcagagctacagaccttattttaagaccattgttaaattattttctaggaaatcatgctaaattaccccattttcac

SEQ ID NO: 530109 - DNA, 201 bp, Homo sapiens
ctgcttaactgaaaaaggagcatacgaaggactgtggcagatcattaaatacattatttgtgatatgcatctttttttttttttttttttttttttgagayagggtctcgctctgtcgcccaaactggagtgcagtggcacaaggcacaatctcggctcactgcaacctctgcgtcccaggttgaagcaattcttgtgcct

SEQ ID NO: 530110 - DNA, 201 bp, Homo sapiens
agctgtaaatggacctggagattttaatggctttgaaaattgaggtgatttgaagccttcagtaaaaccacttagagaaattaaaagaatttcagggccckttggctggattccttggtttatatggcttcattggaagtctagtgggtgctcttgacaggaacgctttggatttattaatgataggctttcaaatcatag

SEQ ID NO: 530111 - DNA, 201 bp, Homo sapiens
aaatcatttgataacttgtgtactggatactattgtaggggctggggatacagcatcagttttaactggtctctggttctaggacctctgattcaggtggwatttatctgttacataaaatgagccatttctcttcactttgagaggggaagattgtcttggttatactgcacctagccaaagcagcttccttggagctgg

SEQ ID NO: 530112 - DNA, 201 bp, Homo sapiens
cgcgatcttggcttgctgtaagctccgcctcccgggttcacgccattctcctgcctcagcctcccgagtagctgggactataggcgcctgccaccacgccyggctaattttttgtatttttagtagagacagggtttcaccgtattagccagtagggtctcaatctcctgacctcgtgatccgcctgcctcagcctcccaa

SEQ ID NO: 530113 - DNA, 201 bp, Homo sapiens
gaccattgttaaattattttctaggaaatcatgctaaattaccccattttcaccccagagaaaaggctgtatttgaaaattcctatttagctacaccatcrtgagctttgaatgttgcatttctttgatcttgctggcattcttatagatgaacagcacagccagtactccaagttgctgctggcctctaaggagcaggtg

SEQ ID NO: 530114 - DNA, 201 bp, Homo sapiens
gggattacaggcatgagccaccatgcccggccattgacagttctttagagcagttgatacggatctttcttatgtaattacagcagtttgtactgagaaayaagcaagaattgagctttggtaaggagggttccgaagtcaaggaacatgaaataattgtggaggtgaggtgagaagagagggggatcctgaaaattaact

SEQ ID NO: 530115 - DNA, 201 bp, Homo sapiens
actggagggtactactcactgcttcctccgacagctcgatgtttttaggggtcccaggaagggcagaaaaacttaaccagaaagtcggaattcccaatttkagggtctcagtaagaatctcttgtgccttctgtgcagtgttctttacccatttcctaaggaacaaacagcttatggtttactaccttgtgggtttcattg

SEQ ID NO: 530116 - DNA, 201 bp, Homo sapiens
tttgccaccccagagaaattgatgacgcctgaaagtgaaattctgaggaactcttccaagatacagtggggtgtacaacctgtatcctttagaatcttgarttggtacagggtggctaattagatggagaagtcagtctcgaagcctgttgcactctgttcatgactagacaagaatcacatatgtatggcgtgctatgtg

SEQ ID NO: 530117 - DNA, 201 bp, Homo sapiens
caccacctggctaattttgtttttgtatttttagtagagatggtgttgcaccgtattagccaggatggtcttgatctcctgacttcatgatccacccgcckcggcctcccaaagtgctgggattacaggcgtgagccacggcacccaaccaggaagagaaaatttcttaagagacaattgaatgacaagttgaagtgcttg

SEQ ID NO: 530118 - DNA, 201 bp, Homo sapiens
tcctgggctcaagtgcccctcttcagcctcctgagtggctgagagtgcaggtgtgcattaccgttgcctagctttgtatttatttttaaagactgtattastccattctctcattgctattaagaactacctgagactgggtaatttatgaaaaagagtggcttaattgactcacagttctgcaggctgtacaggaaacat

SEQ ID NO: 530119 - DNA, 201 bp, Homo sapiens
gcgcgatctcagctcactttaacctctgccttcccggtttaagcaattcttctgcctcagcctcctgagtagctggattgcaggtgtccaccaccacaccrgcctaatttttgtatttttagtagagatgggtttcgccatgttggccaggctggtctcaaactcctgacctcatgaggaacttaaaaaaaaaaaaaatag

SEQ ID NO: 530120 - DNA, 201 bp, Homo sapiens
aacctctgccttcccggtttaagcaattcttctgcctcagcctcctgagtagctggattgcaggtgtccaccaccacaccggcctaatttttgtatttttrgtagagatgggtttcgccatgttggccaggctggtctcaaactcctgacctcatgaggaacttaaaaaaaaaaaaaataggggtgtgtggggccccttcc

SEQ ID NO: 530121 - DNA, 201 bp, Homo sapiens
agtgagcatttctgtaagcattatgaaactgtttccttgccagtgtggtaataagtgaagaaatgaagacagccttcttgctgagtgccagtttactttcttttttttttttttttgagacagagttttgctcttgttgcccaggctggagtgtagtggtgcagtctcggccttgccgcaacctccacctcccgggttcaa

SEQ ID NO: 530122 - DNA, 201 bp, Homo sapiens
ttattgttggttttactggttggtttgagcttttctttttctgtgtgtggttttttttgttttttttttttttgagacagagtttcgcttttgttgcccargctggaatgcagtggcatgatcttggctcactgcgacctctgcctcctgggttcaagcgattctcctgcctcagcctcccaagtagctgggattacaggc

SEQ ID NO: 530123 - DNA, 201 bp, Homo sapiens
gatcaatgtttgcttttttttttttgaggggatgatttgtaattttccagacctgactcagggctcactcatctctcttgttaaggacaccccttggaacrtgacgaatataatcaggtctctggttccctttcagactttctgctgacccctctgtcacccactgccagtcagggcagtccctcattctgcgttgggagt

SEQ ID NO: 530124 - DNA, 201 bp, Homo sapiens
gtgagcatttctgtaagcattatgaaactgtttccttgccagtgtggtaataagtgaagaaatgaagacagccttcttgctgagtgccagtttactttcttttttttttttttttgagacagagttttgctcttgttgcccaggctggagtgtagtggtgcagtctcggccttgccgcaacctccacctcccgggttcaag

SEQ ID NO: 530125 - DNA, 201 bp, Homo sapiens
gcctcagtgtgtgttcccctctatgtgtccatgtttcatcatttagctcccacttagaagtgagaacatgtgtgcgatatttggtttttctttttctttcttttttttttttttttttttttttgagacagagttttgctctcgttgcccaggctggagtgcagtggcgtgatctcggctcatcacaacctctgcctccaa

SEQ ID NO: 530126 - DNA, 201 bp, Homo sapiens
gtgtggtaataagtgaagaaatgaagacagccttcttgctgagtgccagtttactttcttttttttttttttttgagacagagttttgctcttgttgcccrggctggagtgtagtggtgcagtctcggccttgccgcaacctccacctcccgggttcaagctattctcctgcctcagcccccggagtagctgggattacag

SEQ ID NO: 530127 - DNA, 201 bp, Homo sapiens
ctgagtgccagtttactttcttttttttttttttttgagacagagttttgctcttgttgcccaggctggagtgtagtggtgcagtctcggccttgccgcarcctccacctcccgggttcaagctattctcctgcctcagcccccggagtagctgggattacaggcatgcgccaccatgcccagctaattttttgtattttt

SEQ ID NO: 530128 - DNA, 201 bp, Homo sapiens
tcagtgtgtgttcccctctatgtgtccatgtttcatcatttagctcccacttagaagtgagaacatgtgtgcgatatttggtttttctttttctttctttyttttttttttttttttttttgagacagagttttgctctcgttgcccaggctggagtgcagtggcgtgatctcggctcatcacaacctctgcctccaaggt

SEQ ID NO: 530129 - DNA, 201 bp, Homo sapiens
agaacatgtgtgcgatatttggtttttctttttctttcttttttttttttttttttttttttgagacagagttttgctctcgttgcccaggctggagtgcrgtggcgtgatctcggctcatcacaacctctgcctccaaggttcaagtgattctcctgcctcagcctcctgagtagcaggaattacaggcatgccccacca

SEQ ID NO: 530130 - DNA, 201 bp, Homo sapiens
ttcaagaccaggctgggcaacatggtgaaacctcatctctttaaaaattcaaaaaattagctaggtgtggtggcacgtgcctgtggtcccggctactcggraggctgaggtgggaggatcgcttgagcctgggaggcagaggatgcagtgaacagagatcgtaccactacactccagcctgggtgacagagtgagacccca

SEQ ID NO: 530131 - DNA, 201 bp, Homo sapiens
gcaccactgcactccagcttgggcgacagagcaagactccatctccaaataaataagtgaataaataaataataaataaaaatttaaaaaaggaagtgggyagtggaccacaggatctaagccaaatctgaggggttggatcattgatttggaggtcctagtgggggtaaagaattgttggagtcaggactaaacctgggg

SEQ ID NO: 530132 - DNA, 201 bp, Homo sapiens
caggcagtggactctggccaggaaccaggctcttgtcccatccccctgggccgatagaactgccagggaggttaagggaaggtcaggtattatgaggcagwtattttgaggttggtggtatgaagcactgccctggcattcttcctgttattctggtaccagaaaccaggttactagtggtaatctgccttgaagaatgcc

SEQ ID NO: 530133 - DNA, 201 bp, Homo sapiens
gatgaagaaactatgttcagagtcccatagacagtaggtggcaaaactaccagagcagtctgtctccaaagtcctaaccaacaccacaagcccatctgatscaagcctgaccacagcaaatccttcctgcctttggccttcactgtgggggtggcctgccaatttgccctgctggaggtaccaaggccacttaccgaggcc

SEQ ID NO: 530134 - DNA, 201 bp, Homo sapiens
agacagtaggtggcaaaactaccagagcagtctgtctccaaagtcctaaccaacaccacaagcccatctgatgcaagcctgaccacagcaaatccttcctscctttggccttcactgtgggggtggcctgccaatttgccctgctggaggtaccaaggccacttaccgaggccttgccggccaccacggttggcaaataac

SEQ ID NO: 530135 - DNA, 201 bp, Homo sapiens
ttgaacccggcaggcggaggttgcaacgagcactgcagtccagcctgagtgacaaaccgactccgtctcaaaaaaaaaaaaaaagtaaataaataaaataytatatgatcttcctagggaagctcggctactgatctatagcattagacccacaactccggtggcaagcatctgatcacacttaccaaggatcacacttac

SEQ ID NO: 530136 - DNA, 201 bp, Homo sapiens; identical to SEQ ID NO: 196084

SEQ ID NO: 530137 - DNA, 201 bp, Homo sapiens
tcccccagccccgcaagagagggacgcaataaatggccagcaaataatctgctgacagactgagctgctgcggagttcaagacacacggctcccaaaggtscacagcgggagaccctcgagctcctacgacccaccctctcccgggcagggctccctccccgatctgcaaaccgccttctccaagcgcatgccggacaaaa

SEQ ID NO: 530138 - DNA, 201 bp, Homo sapiens; identical to SEQ ID NO: 33608

SEQ ID NO: 530139 - DNA, 201 bp, Homo sapiens
ctctgccagctccaggcttctacaggacctccatggctatccccctcacccactcaggctttggtggtcacttgttcacaccctcctctgctatagttgcyacaactctgactactaagcctttttttttcttgatttagattctaagtaaaagtccctggaaagcgggaacatacaaggtgatatatgaaggggtcaccc

SEQ ID NO: 530140 - DNA, 201 bp, Homo sapiens; identical to SEQ ID NO: 196086

SEQ ID NO: 530141 - DNA, 201 bp, Homo sapiens
acctttactaaaataatttgtgtactcatttcatattcatcaatgccagagcttctgagaagcaggaacaaagtgccatcacaaacactgctctctgtacytcggctcccccgagagtggacatcacagcctattggggaattgggtaagaaccatgacccccaggtcccaactagacagagtgtaggcagccccactcac

SEQ ID NO: 530142 - DNA, 201 bp, Homo sapiens
atgaagaaactatgttcagagtcccatagacagtaggtggcaaaactaccagagcagtctgtctccaaagtcctaaccaacaccacaagcccatctgatgsaagcctgaccacagcaaatccttcctgcctttggccttcactgtgggggtggcctgccaatttgccctgctggaggtaccaaggccacttaccgaggcct

SEQ ID NO: 530143 - DNA, 201 bp, Homo sapiens; identical to SEQ ID NO: 196087

SEQ ID NO: 530144 - DNA, 201 bp, Homo sapiens
acagtaggtggcaaaactaccagagcagtctgtctccaaagtcctaaccaacaccacaagcccatctgatgcaagcctgaccacagcaaatccttcctgcstttggccttcactgtgggggtggcctgccaatttgccctgctggaggtaccaaggccacttaccgaggccttgccggccaccacggttggcaaataactc

SEQ ID NO: 530145 - DNA, 201 bp, Homo sapiens
gggtgacagagcaggatctcgtctctaattaaaaaagaaaagaggccgggcgcggtggctcatgcctgtaatcccagcactttgggaggccaaggcgggcratcacgaggtcaggagatcgagaccattccggctaacacggtgaaatgccgtctctaccaaaaaatacaaaaaattagccgggcgttgtagcgggcgcct

SEQ ID NO: 530146 - DNA, 201 bp, Homo sapiens
cactccagcctgggtgacagagcaagactccgtctcaaaaaaaaaaaaaaaaaaaaaagaaatttcttctgcctccttcctccccatgctccctagtagtytctcagcttgcctggaactgtgtctcctcctcctttccctaggaaagacagcaacttttcactggtcttccggtccccaccctcatcccctcctctcatt

SEQ ID NO: 530147 - DNA, 201 bp, Homo sapiens
gcaggcctcctggatcagcctcaacccagggacatccttgacccactcacttcccaggacagacacttgatgacatcggattcaaggaagcagccagtggsgtggacaggcccacatgaggaagctagagtcctgggtctgggcctcagctctacctgtgggctttcatctccccaccagtaagtaccatgggggcatgga

SEQ ID NO: 530148 - DNA, 201 bp, Homo sapiens
tcctagggaagctcggctactgatctatagcattagacccacaactccggtggcaagcatctgatcacacttaccaaggatcacacttaccaaggagaagmagcgaccactgcgaatctgtctccaaaaaggagagagaaaacgcgaagcatcctttttaaaccttacgaagtgcccggaagtcctggaatgtctattgcg

SEQ ID NO: 530149 - DNA, 201 bp, Homo sapiens
caggcctcctggatcagcctcaacccagggacatccttgacccactcacttcccaggacagacacttgatgacatcggattcaaggaagcagccagtggcstggacaggcccacatgaggaagctagagtcctgggtctgggcctcagctctacctgtgggctttcatctccccaccagtaagtaccatgggggcatggaa

SEQ ID NO: 530150 - DNA, 201 bp, Homo sapiens
ctccagcctgggtgacagagcaagactccgtctcaaaaaaaaaaaaaaaaaaaaaagaaatttcttctgcctccttcctccccatgctccctagtagtctytcagcttgcctggaactgtgtctcctcctcctttccctaggaaagacagcaacttttcactggtcttccggtccccaccctcatcccctcctctcattct

SEQ ID NO: 530151 - DNA, 201 bp, Homo sapiens
ccatgggagtgtgtccctgctcccagagcgatcagaaggagatctgcagtgtctcttcccagttttggaggaggcctaggagaatctacatgggcccccaytgaactcacacttggaagaacaccaggactctaggaggatgagagtgactctcatggacccatgtatggtacaacccatggaacagacccaggctccaag

SEQ ID NO: 530152 - DNA, 201 bp, Homo sapiens; identical to SEQ ID NO: 196080

SEQ ID NO: 530153 - DNA, 201 bp, Homo sapiens; identical to SEQ ID NO: 196081

SEQ ID NO: 530154 - DNA, 201 bp, Homo sapiens
ccttaacaaatcctgcaaaacaagatattaatctattagtacagcaaaaccctaaactttttcaacgaggggcctcatgctatcgcctggggttggagtamagtggcactggagtataggtttgagtataggtcactcctgggctccagcgattctccttcctccagctacctatcatcatgcctggctactttttagcca

SEQ ID NO: 530155 - DNA, 201 bp, Homo sapiens
atggtagttggagaggccgaagccgtacacgtggccctcatgggagatggcaaaggtgaaataggcaccacaaaaggcatcctggaatctcacgtggcccyggcttcccctggatttcagcatcacacacttggggaccaggagtcgttctgcaggcaaagggaaagccacggtcagtgacagacagacacacatggcttc

SEQ ID NO: 530156 - DNA, 201 bp, Homo sapiens
cgatcttctgacaggcgtgagccaccttgccccgcagaaagctaattataatagcagaatctgcaccgaaagcaagggagactacgtgggtcagagaacamtccccagtctccatccaagccctcctccatgcccaagccgtccgccagtgaataagttcagctcccgggcaaatccactgcagaaacggactcttccctc

SEQ ID NO: 530157 - DNA, 201 bp, Homo sapiens; identical to SEQ ID NO: 196082

SEQ ID NO: 530158 - DNA, 201 bp, Homo sapiens
tgccaccatgcccggctaattttgtatttttagtagagacggggtttctccatgttggtcaggctggtcttgtactcccgacctcaggtgatccgccagtytcagcctcccaaagtgctgggattacaagtgtgagccaccacaccaggccgccagaaggttttttttttgttttttttttgagacggagtctcgctctgt

SEQ ID NO: 530159 - DNA, 201 bp, Homo sapiens
taaacactccaattaaaagacatagactgtcatactgaaaaacccaacatgttacctacaagaaataaaattttaaaataaggccaggcacggtggctcakgcctgtaattctagcactttgggaggtcagggcaggcggactgcctgagctcaggagtttgagaccagcctgggcaacatggtgaaaccccatctctact

SEQ ID NO: 530160 - DNA, 201 bp, Homo sapiens
aaacactccaattaaaagacatagactgtcatactgaaaaacccaacatgttacctacaagaaataaaattttaaaataaggccaggcacggtggctcatkcctgtaattctagcactttgggaggtcagggcaggcggactgcctgagctcaggagtttgagaccagcctgggcaacatggtgaaaccccatctctacta

SEQ ID NO: 530161 - DNA, 201 bp, Homo sapiens
gctgctggagaggctgaggcacgagaatcgcttgaacccggcaggcggaggttgcaacgagcactgcagtccagcctgagtgacaaaccgactccgtctcaaaaaaaaaaaaaaagtaaataaataaaatactatatgatcttcctagggaagctcggctactgatctatagcattagacccacaactccggtggcaagca

SEQ ID NO: 530162 - DNA, 201 bp, Homo sapiens
agattgtgccactgcactccagcctgggcgacagagcgagactccctctcaaaaaaaaaaaaaaacaaaaaacaaaaaattggatactgtatccttggttyctgagaagtcacaaaagaatgttatttaataagtgatcatgctgctgcactccatctagagaccctaagaatcttttcacaaataccaactcctttgtcc

SEQ ID NO: 530163 - DNA, 201 bp, Homo sapiens
tgtgcattcctagctaaatgccaaattccaaagcctttagtacaaaaacagcagactttctgcaaaacaggtcgacttttaaaagaggtatgagggctggscgtggtggcttatgtttgtaatcccagctacttgggaggctgaggttgcagccaagattgcgccactgcactacagcctgggcgacagagcaagactctc

SEQ ID NO: 530164 - DNA, 201 bp, Homo sapiens
ctctcctaaaagaaaagaaataatgattagactcctgaagatcctacttcaacttaaaatctagtatactagatatgtttcctgcatggtttgtctccccwgtcattgtccacaggactctgggaagctgtaggaatatgcaggcgcagacacgaggcccagcttcatcttcaacgttgtggaaagggactgtacatcatg

SEQ ID NO: 530165 - DNA, 201 bp, Homo sapiens
actgtaaggcccaaggctaggccagccccagaacaaggtcctccaactcctgccctgagcaagtgcccccagacccacctgaggccacctttaccacaggyacatccagctgcacctgcacaggcaccatgctcttcttcatgggctccaacagtccaatcacaccgttattgtcctagaagggagggacagggcacttat

SEQ ID NO: 530166 - DNA, 201 bp, Homo sapiens
tatatgatcttcctagggaagctcggctactgatctatagcattagacccacaactccggtggcaagcatctgatcacacttaccaaggatcacacttacyaaggagaagaagcgaccactgcgaatctgtctccaaaaaggagagagaaaacgcgaagcatcctttttaaaccttacgaagtgcccggaagtcctggaat

SEQ ID NO: 530167 - DNA, 201 bp, Homo sapiens
tagagtgcaatggtgcgatctcggctcatgcaacctctgcctcctgggttcaagtgattctcctgcctcagcctctcgagtagctgggattacaggcaccyaccaccacacccagctaatttttgtatttttagtagagacgaggtttcaccagtttggccaggctggtctcgaactcctgatctcagtgatccaccccgc

SEQ ID NO: 530168 - DNA, 201 bp, Homo sapiens
cccagctactcaggaggccaaggcaggagaatcacttagcataatcacttgaacccgggaggcagaggcaatggagtgcgccactgcactccagcctgggmaacagagcgactccatctccaaaaaaaaaaaaaaaaaaaaagacttcaatccagattcagtgctctagaaggctgtttcctgcatggtttgtctccccag

SEQ ID NO: 530169 - DNA, 201 bp, Homo sapiens
aggctggtcccaaactcctaatctcaagtaatccacctgcctcagcctcccgaagtcctgggattacaggcgtgagccactgcgtacagccgattacatgtttttttttttttttttttgaagcagagttttgttcttattgcccaggctggagtgccatggcgcaatctcggctcaccacaacctctacctcccaggttc

SEQ ID NO: 530170 - DNA, 201 bp, Homo sapiens
cttgcagtgagtcgagatcacgccactgcactccagcctgggtgacagagcaagactccgtctcaaaaaaaaaaaaaaaaaaaaaagaaatttcttctgcytccttcctccccatgctccctagtagtctctcagcttgcctggaactgtgtctcctcctcctttccctaggaaagacagcaacttttcactggtcttccg

SEQ ID NO: 530171 - DNA, 201 bp, Homo sapiens
cctttactaaaataatttgtgtactcatttcatattcatcaatgccagagcttctgagaagcaggaacaaagtgccatcacaaacactgctctctgtaccycggctcccccgagagtggacatcacagcctattggggaattgggtaagaaccatgacccccaggtcccaactagacagagtgtaggcagccccactcacc

SEQ ID NO: 530172 - DNA, 201 bp, Homo sapiens
gcaaggtctcagctcagtacaacctccatctcccgggttccagcaattctgcctcagcctcccacaggtgcacaccaccatgcccagttattttgtatttytagtacagacagggtttcaccgcgttggccaggatctctagatgttgtgatccgcctgccttagcctaagtgctgggattacgggtgtgagccaccaagc

SEQ ID NO: 530173 - DNA, 201 bp, Homo sapiens; identical to SEQ ID NO: 196088

SEQ ID NO: 530174 - DNA, 201 bp, Homo sapiens
cctgacctaaccggttatgttatctatagattccagacatcgtatggaaaagcactgtgaaaatccctgtcctgttctgttccgttctgataaccagtgcrtgcagcccccagtcacatatcccctgcttgctcaatcaatcacgacctcttcatgcagacccccttagagttgtaagcccttaaaagggacaggaactgc

SEQ ID NO: 530175 - DNA, 201 bp, Homo sapiens
ccttaaaagggacaggaactgctcactcggggagctcagtttttggagacgtgaatcttgccaaagctcccagctgaataaagcccttccttctttaactsggtgtctggggggttttgtctgcggcttatcctgctacactactgcttggctttgggtgaggaggtgtagcaaggataaaggagactaacccttttttac

SEQ ID NO: 530176 - DNA, 201 bp, Homo sapiens
ctactcgggaggctgaggcaggagaatcgcttgaacccaggaagtggaggttgtggtaagccgagtttgcaccattgcactccagcctgggcaacaagagwgaaactctgtccctccaccaaaaaaagaggcacccttgttttagatagacagctgtatgccaaggcaaacatctcatcagttcatcagaataatctgtag

SEQ ID NO: 530177 - DNA, 201 bp, Homo sapiens
cctcatcccctcctctcattctccaagtcattcgtgatcaataaatatgtgtgtgtgtatatatatacatatatatatttatttttttttgagacagggtytcactctgttgcccaggctgtaggtgcagcagcacgtacacggctcactgcaacctccacctcctaggctcaagcgaccctcctgcctcagcctccagag

SEQ ID NO: 530178 - DNA, 201 bp, Homo sapiens
aaatatgtgtgtgtgtatatatatacatatatatatttatttttttttgagacagggtttcactctgttgcccaggctgtaggtgcagcagcacgtacacrgctcactgcaacctccacctcctaggctcaagcgaccctcctgcctcagcctccagagtagctgggactacaggcatgtaccaccacgcttggctaattt

SEQ ID NO: 530179 - DNA, 201 bp, Homo sapiens
agcctgagggaaggtggggtgggtggtgacagatccacccacagatgtggggaaggacagtggcgacaactccctgctgcggtggagacggcacctgagtsctctttgagtcccagaggcttcctctccaaaatggaagacttgaggccctgcactgggctggcaatcgccagggaagggcaggggatggagggccacctt

SEQ ID NO: 530180 - DNA, 201 bp, Homo sapiens
tctttgagtcccagaggcttcctctccaaaatggaagacttgaggccctgcactgggctggcaatcgccagggaagggcaggggatggagggccaccttcttttttttttttttttttttttctgaggtggagtctcgctctgtcgcccagtctggaggcaatggcgcgatatcggctcactgcaagctccgcctcccagg

SEQ ID NO: 530181 - DNA, 201 bp, Homo sapiens
tcacagctgtaatcccagcactttaggaggctgaggtgggcggatcacgaggtcaggagttgagaacagcctggccaatatggtgaaacctcatctctacyaaaaatacaaaaattagccaggtgtggtgctacacgcctgtagtcgcagctacttgggaggctgaggcaggagaatcgcctgaacctgggaggcggaagt

SEQ ID NO: 530182 - DNA, 201 bp, Homo sapiens
gcctgcacagcctctactgcacaaatgggtcttgtatacagacttctctcactgctctgggtgtgttttcctttatttgcttttcttttcttctttttgasatggagcctcactctgttgcccaagctggagttcagactcacgatctcagctcactgcaacctccgcctcccaggttcaagcgattctcccgcctcagcc

SEQ ID NO: 530183 - DNA, 201 bp, Homo sapiens
gtggtggcgggggcctgtaatcccagctactcaggaggccaaggcaggagaatcacttagcataatcacttgaacccgggaggcagaggcaatggagtgcrccactgcactccagcctgggcaacagagcgactccatctccaaaaaaaaaaaaaaaaaaaaagacttcaatccagattcagtgctctagaaggctgtttc

SEQ ID NO: 530184 - DNA, 201 bp, Homo sapiens
tatatagttttaaattacatgatttccggccaggcgcggtggctcacgcctgtaatcccagcactttggaaggccgagggtggtggatcaccggaaatcakgagttcaaaaccagcctgaccaacatagcgaaaccccgtctccactaagaatacaaaaattggccgggcgtggtggcacgtgcctgtaatcccagctgct

SEQ ID NO: 530185 - DNA, 201 bp, Homo sapiens
caggcggaggttgcaacgagcactgcagtccagcctgagtgacaaaccgactccgtctcaaaaaaaaaaaaaaagtaaataaataaaatactatatgatcytcctagggaagctcggctactgatctatagcattagacccacaactccggtggcaagcatctgatcacacttaccaaggatcacacttaccaaggagaag

SEQ ID NO: 530186 - DNA, 201 bp, Homo sapiens
caaatcggccaggcacgatggctcacgcctgtaatcctaaaaatataaaaataaaaatgacccaaatcacaaaaatacgagaaagcataattacgaaacgyaatgcttccaaattatgaaaatcttcggcctggcgtggcggaccacaaggtcaggcgttggagaccagcctggccaacatggtgaaatcccgtctctact

SEQ ID NO: 530187 - DNA, 201 bp, Homo sapiens
ctgaacacctactgacagctttgcttcacctctaccttgcaagtcaatagaaattcattcatttcctgcccagcactgcagttacccaaacccacctgagwatatggattgaaaacatactaaaaccactggttcagaaaaaaatcactttactcaggtgagatctatgtagttacagcaggacacggatgggactgggca

SEQ ID NO: 530188 - DNA, 201 bp, Homo sapiens
aagattgtgccactgcactccagcctttggagacgcagtctccaaaaaaaaagaaactagcaaggatagatttgaacaacactaatacaacaacaataatwcactttcaagtagcccatagatcaaagaatagaaaaggaactcaaaaatattttgaaatgaattaaaatgaaaacaaaacataccagaatttgtgtgttg

SEQ ID NO: 530189 - DNA, 201 bp, Homo sapiens
gatcaggattcaaacccagtctagtactcctaagataggcaaccaatactgtctgcctacacaaagaacaaggccagaagtgcctgtttggaaagtctaaraaaggggtattgcaagctgaagtttagcagagtgggacctgaacacctactgacagctttgcttcacctctaccttgcaagtcaatagaaattcattcat

SEQ ID NO: 530190 - DNA, 201 bp, Homo sapiens
ttcaagcaatcttctgcctcagcctcccaagtagctgagactacaggcgagcaccaccacacctggctaatttttttttttttgtatttttagtagaggcrgggtttcaccatattggccaggctggggaagattcttatactacaagtgaactggtttaatatcaattgaatgtggactattgtaagttaaaaatgtata

SEQ ID NO: 530191 - DNA, 201 bp, Homo sapiens
tctcctaaaagaaaagaaataatgattagactcctgaagatcctacttcaacttaaaatctagtatactagatatgtttcctgcatggtttgtctccccartcattgtccacaggactctgggaagctgtaggaatatgcaggcgcagacacgaggcccagcttcatcttcaacgttgtggaaagggactgtacatcatgg

SEQ ID NO: 530192 - DNA, 201 bp, Homo sapiens
aaaagaaaagaaataatgattagactcctgaagatcctacttcaacttaaaatctagtatactagatatgtttcctgcatggtttgtctccccagtcattrtccacaggactctgggaagctgtaggaatatgcaggcgcagacacgaggcccagcttcatcttcaacgttgtggaaagggactgtacatcatggggcaga

SEQ ID NO: 530193 - DNA, 201 bp, Homo sapiens
gggtgtgttttcctttatttgcttttcttttcttctttttgagatggagcctcactctgttgcccaagctggagttcagactcacgatctcagctcactgyaacctccgcctcccaggttcaagcgattctcccgcctcagcctccctagtgctgggactacaggcgcaagccaccacgcctggctaactgcttggtattt

SEQ ID NO: 530194 - DNA, 201 bp, Homo sapiens
tggagttcagactcacgatctcagctcactgcaacctccgcctcccaggttcaagcgattctcccgcctcagcctccctagtgctgggactacaggcgcargccaccacgcctggctaactgcttggtatttttagtaaagacggggtttcaccatgtcggccaggctggtcttgaactcctgacctcaggtgatctgccc

SEQ ID NO: 530195 - DNA, 201 bp, Homo sapiens
tttgtatttttagtagagacagggtttcaccatcttggccaggctggtcttgaattcctgatctcatgagccacccacctcatcctcccaaagtgctgggyttacaggcgtgagcctccgcgcccagccttaatttttgtacttttagtagagatggggtttctccatgttggccaggctgatctcgaactcctgacccgc

SEQ ID NO: 530196 - DNA, 201 bp, Homo sapiens
cacgtgtgaactactgcgcccagccccagttgtttgtctcaagagtctcactctgtcatccaggctggagtgcagtggcaggatctcggctcactgcaacytctgcctcagcctcccgagtagctgggaccacagatgtgcaccaccatgcccagctaatttttttttttgagacggagtctcactctgttgcctaggctg

SEQ ID NO: 530197 - DNA, 201 bp, Homo sapiens
tgggaggctgaggtgggagaattgctggaacccgggaggtggaggttgcagcaagccaagatggctccattgcactccctcctggagacagagtgagattmgatctcaaaaaaaaaaaagctgggcatggtggctgacgcctgtaaacccagcactttgggaggccgaggtgggcggatcacgaggtcaggagatggagac

SEQ ID NO: 530198 - DNA, 201 bp, Homo sapiens
cccttgagaggctaagtagggactcttatccctattttatagaaaaggaaactgagatcaagagaatacaagtgccttgctcagattcccacagtcattaygggtatcatttacgtggaacttaccatctgcctgatattcttctcattaactcatttaacttcacagcaacctaatgaagtaggtttacaggtaggtaga

SEQ ID NO: 530199 - DNA, 201 bp, Homo sapiens
acctcatctctactaaaaatacaaaaattagccaggtgtggtgctacacgcctgtagtcgcagctacttgggaggctgaggcaggagaatcgcctgaaccygggaggcggaagttgcagtgagcaagatcatgaaaagcaaaatactcaaggacttttaatataaccaccaacacagtgtgccttctggccaagcagagtc

SEQ ID NO: 530200 - DNA, 201 bp, Homo sapiens; identical to SEQ ID NO: 196089

SEQ ID NO: 530201 - DNA, 201 bp, Homo sapiens
accccaatggagtcatcaagtacttgtttttgtttgtttgtttgtttgtttttttgagacagcatctcactctctgttgcccaggctcaagtgcagtggcmcaatcacggctcattgcaggtttgacctcttgagctcaggtgatcctcccacctcagcctctagaatagctgggactacaagtgcgcatcacagtgtcca

SEQ ID NO: 530202 - DNA, 201 bp, Homo sapiens
gccctcagaggcttcatcagctctgttctttgtccttgactaataagactgtatgctggcccccgctggacacagataagaccacacggttctccagctgyttgcccatcatctccacagggctccaggcgtcctcatcctgccctgtgcccagctggtagttggtgcccatgccccaggcgaaaacacgacctgcaagag

SEQ ID NO: 530203 - DNA, 201 bp, Homo sapiens; identical to SEQ ID NO: 196079

SEQ ID NO: 530204 - DNA, 201 bp, Homo sapiens
ttttttggtttggtattaaaagatccaccctgcctctattgtactatgcagcatttaaaaataatccagtgactcccaaaacagaaatacccaaacaaaaytcaaacaaaacttttccttacttcttgacagatttgaagcctttgttacagtcacactgacagctggttggcacctcaggacatcttgacatcacttaag

SEQ ID NO: 530205 - DNA, 201 bp, Homo sapiens; identical to SEQ ID NO: 196083

SEQ ID NO: 530206 - DNA, 201 bp, Homo sapiens
ccccaatggagtcatcaagtacttgtttttgtttgtttgtttgtttgtttttttgagacagcatctcactctctgttgcccaggctcaagtgcagtggcamaatcacggctcattgcaggtttgacctcttgagctcaggtgatcctcccacctcagcctctagaatagctgggactacaagtgcgcatcacagtgtccag

SEQ ID NO: 530207 - DNA, 201 bp, Homo sapiens
gcctgagggaaggtggggtgggtggtgacagatccacccacagatgtggggaaggacagtggcgacaactccctgctgcggtggagacggcacctgagtgstctttgagtcccagaggcttcctctccaaaatggaagacttgaggccctgcactgggctggcaatcgccagggaagggcaggggatggagggccaccttc

SEQ ID NO: 530208 - DNA, 201 bp, Homo sapiens
caagcatctgatcacacttaccaaggatcacacttaccaaggagaagaagcgaccactgcgaatctgtctccaaaaaggagagagaaaacgcgaagcatcytttttaaaccttacgaagtgcccggaagtcctggaatgtctattgcgcgtgcgcagaagcatgcgcagttagagaatcagaaactcactgaggcttctgg

SEQ ID NO: 530209 - DNA, 201 bp, Homo sapiens
tcaggtgatctgcccaccttggcctcccaaattgctggggttacagtcgtgagccaccgagcccggcctctctggctgttttcttaaccaggcagtgagtrtctgggctgggaataaggagttggcttttggcatcatgcttccccaccccgccccacacaacacagcttccatcttcaaggagcatacagtctctgggag

SEQ ID NO: 530210 - DNA, 201 bp, Homo sapiens
atcctgtggccgtgtgattgctctgtgcccattatcctgtggccgtgtgattgctctgtgcccattatcctgtggccgtgtgattgctctgtgcccattaycctgtggccgtgtgattgctgctgtgcccattaccctgtggccgtgtgattgctctgtgcccattatcctgtggccgtgtgattgctctgtgcccattat

SEQ ID NO: 530211 - DNA, 201 bp, Homo sapiens; identical to SEQ ID NO: 352031

SEQ ID NO: 530212 - DNA, 201 bp, Homo sapiens
gaccgttgacacttctgccgaagacgtggccttcttcctggacgtctggtgggaggtgatgaagcacaagggtcacccgcaggaccccctgctctcccagyttagtgcaatggcccataagtacctgcctgccttagatgagttcccccatcctccaaagaggcttaggtcagacccagacgcgtgccccaccatgcccct

SEQ ID NO: 530213 - DNA, 201 bp, Homo sapiens
gagctcttgggggcatgacagactgaggaaggagtagcatctctcactcctgggaaaggggagatgactcaggaatgaggaatagggagcagtgtttgcamcctcgttttagtttctgggccaaaggaaacatacctgataaagacctacatcctttgatgtttctgagctgggggaggcaaagaatagtgacaagattct

SEQ ID NO: 530214 - DNA, 201 bp, Homo sapiens
ggctgacacagatccagagtcggatcctgggcccggggaggaagtgctgtgcgctggccaacctggctgacatgctgactgtgtttgcgctgacagaggaygacccccaggaggtgtctgcaaccgtgtatctggacaaactggccacggtgatctctgtgtggaactcggacacccagaatccctaccaccagcaggcgc

SEQ ID NO: 530215 - DNA, 201 bp, Homo sapiens
ccgccatatggaagtgtgctacatttttgcctctgagaagaagtgggccttctcggacgagtgggtagcctgcctggggagtaacagggccctcttccgavagccagacttggtgttgaggctgctggaaacagtgatagacgtcagcacagctgacagagccatccctgagtctcagatccggcaggtgatccacctgat

SEQ ID NO: 530216 - DNA, 201 bp, Homo sapiens
aaataaagtccttgcaggtatcctgcgttcctgggggcgaaagggcctctctgaaaagttgctggcttatgtggagggttttcaggaagacctcaatacadcttttaaccagctcactcagagtgcctccgaacagggcttggcaaaagctgtggcctccgtggcccgcctggtcatagtgcacccggaagtcacggtgaa

SEQ ID NO: 530217 - DNA, 201 bp, Homo sapiens
gaccgcttcagcaaatactggcagcttcccaaggagaagcggtgcctctctttggataggaaggatctagcgatccatatcctggagctcctgtgtgagaytgtatcagccaatgctgagaccttctccccggatgtctggatcaagtccctgtcctggctccaccgcaagttagaacagctagactggactgtgggcctg

SEQ ID NO: 530218 - DNA, 201 bp, Homo sapiens
ttcgcatctcactttgtctcttctaagtcggcctcagcaatagcccaggattaaatatgctctgaaattgggtttagtgtcttcaagatcaaatccagccrggaggaacatgttcataactggacttttccatcctagattttggcaaataagcccaaagttgaaaccatgtgagtggaaaaagcattacatggtacgtat

SEQ ID NO: 530219 - DNA, 201 bp, Homo sapiens
ggccccaacatggcgggtctgcagaagatcagcagcttcttacctgtgcgggagcgaaaaagctgggcttcaacatggcaggtctgtaggggtcagacccragcagcctggactttacagttatgtgaaactgtccacaaaaagtcatggcaataatggtgtaaagaaaatagtttcttgggtatttgtaacgtacaaact

SEQ ID NO: 530220 - DNA, 201 bp, Homo sapiens
cagagccatccctgagtctcagatccggcaggtgatccacctgatcctggaatgttacgcagacctctccctgccaggtaaaaataaagtccttgcaggtrtcctgcgttcctgggggcgaaagggcctctctgaaaagttgctggcttatgtggagggttttcaggaagacctcaatacaacttttaaccagctcactca

SEQ ID NO: 530221 - DNA, 201 bp, Homo sapiens; identical to SEQ ID NO: 352039

SEQ ID NO: 530222 - DNA, 201 bp, Homo sapiens
aaggagaagcggtgcctctctttggataggaaggatctagcgatccatatcctggagctcctgtgtgagattgtatcagccaatgctgagaccttctcccyggatgtctggatcaagtccctgtcctggctccaccgcaagttagaacagctagactggactgtgggcctgaggctgaagagcttcttcgaggggcacttc

SEQ ID NO: 530223 - DNA, 201 bp, Homo sapiens
cggatgtctggatcaagtccctgtcctggctccaccgcaagttagaacagctagactggactgtgggcctgaggctgaagagcttcttcgaggggcacttsaagtgtgaagtgccagccacactttttgagatctgtaagctttcagaagacgagtggacctcccaggcccacccagggtacggggctggcacggggctcc

SEQ ID NO: 530224 - DNA, 201 bp, Homo sapiens
cttcatccagactctagaggcaaacgcgtgccgagaggaatactggctccagacctgctccccgtttccactcctcttcagcttgtgccagctcttggacygcttcagcaaatactggcagcttcccaaggagaagcggtgcctctctttggataggaaggatctagcgatccatatcctggagctcctgtgtgagattgt

SEQ ID NO: 530225 - DNA, 201 bp, Homo sapiens
cctgaagaacggcgccaaaccctgttgcagaagatgagcagcttctgacttggcgtggggagctgggccccaacatggcgggtctgcagaagatcagcagmttcttacctgtgcgggagcgaaaaagctgggcttcaacatggcaggtctgtaggggtcagacccgagcagcctggactttacagttatgtgaaactgtcc

SEQ ID NO: 530226 - DNA, 201 bp, Homo sapiens
gccgggcggaggttgtgagcaggcctaagcgcggccgccgtggctcctgcgtctcccatcgtgccgtgcgtcccgcgccgcgttcgagttctcggaggggrgggggcgttagccccgcgcagccgccggcgtcgccgccatggacctaggtgggtgccgcggctccccggccccgggctgcgtccagcaatgcgccaccag

SEQ ID NO: 530227 - DNA, 201 bp, Homo sapiens
cggtgatctctgtgtggaactcggacacccagaatccctaccaccagcaggcgctggcagagaaggtgaaggaggcagaacgggatgtcagcctgacctcrctggccaaactccccagtgagaccattttcgtgggctgcgagttcctgcaccacctgctgcgggagtggggggaggagttgcaggccgtgctccgcagca

SEQ ID NO: 530228 - DNA, 201 bp, Homo sapiens
accccctgctctcccagtttagtgcaatggcccataagtacctgcctgccttagatgagttcccccatcctccaaagaggcttaggtcagacccagacgcrtgccccaccatgcccctgttggccatgctgctccgcgggctgacacagatccagagtcggatcctgggcccggggaggaagtgctgtgcgctggccaacc

SEQ ID NO: 530229 - DNA, 201 bp, Homo sapiens
atatatcacatgatccccaaaggcataacatgaagtctgtattatccccacatatgcagaaggaaggcttggagaagcaatctgaccaagatcacatccctttttttttttcggagatggagggggagtctcactgtgttaccccagctagtcttgaactcctggcctcagggatccacctgcctcagccccccaagtagc

SEQ ID NO: 530230 - DNA, 201 bp, Homo sapiens
agtggggggaggagttgcaggccgtgctccgcagcagccaggggacaagttacgacagctaccggctgtgcgacagtctgacttccttcagccagaacgcracgctctacctgaaccgcaccagcctgtccaaggaggacaggcaggtggtctctgagctggcggagtgtgtcagggacttcctgaggaaaacgagcacgg

SEQ ID NO: 530231 - DNA, 201 bp, Homo sapiens
gtgtgattgctgctgtgcccattaccctgtggccgtgtgattgctctgtgcccattaccctgtggccgtgtgactgctgctgtgcccattaccctgtggcygtgtgattgctgctgtgcccattaccctgtggccgtgtgattgctctgtgcccattatcctgtggccgtgtgattgctctgtgcccattaccctgtggcc

SEQ ID NO: 530232 - DNA, 201 bp, Homo sapiens
gtgtgattgctctgtgcccattatcctgtagccgtgtgattgcttctgtgcccattaccctgtggctgtgtgattgctgctgtgcccattatcctgtggcygtgtgattgctgctgtgcccattaccctgtggccgtgtgattgctctgtgcccattaccctgtggccgtgtgactgctgctgtgcccattaccctgtggc

SEQ ID NO: 530233 - DNA, 201 bp, Homo sapiens
tcacctgctatgagactttgagcaagaccaacccttctgtcagctccttgctccagagggcacacgagcagtgcttcttaaagtccattgctgagggcatyggccctgaagaacggcgccaaaccctgttgcagaagatgagcagcttctgacttggcgtggggagctgggccccaacatggcgggtctgcagaagatcag

SEQ ID NO: 530234 - DNA, 201 bp, Homo sapiens
gtggcctccgtggcccgcctggtcatagtgcacccggaagtcacggtgaagaaaatgtgcagcctggctgtggtcaatctcggcacccacaagttcctggsccagattctcactgccttccctgcccttaggtttgtggaagagcagggtcccaattcatctgccactttcatggtgtcatgcctcaaagaaaccgtctgg

SEQ ID NO: 530235 - DNA, 201 bp, Homo sapiens
tcttacctgtgtaccacctagcacagtgtctggcatggagtaggtgcttaataaacctaagaagcgggctgtggcaagcactagttaaccatccatgatasagtaccggagtattttccagctagtaaccgccctgggacttactacttcaaactgtgcgtacttaatgcgcctggaaggcaggtgtttagggccaaacat

SEQ ID NO: 530236 - DNA, 201 bp, Homo sapiens
ttttgagatctgtaagctttcagaagacgagtggacctcccaggcccacccagggtacggggctggcacggggctcctggcctggatggagtgctgctgcktctccagcggcatctcggagaggatgctgtctctcttggtggtggacgtgggcaatcctgaggaggtcagactgttcagcaaaggctttctggtggccct

SEQ ID NO: 530237 - DNA, 201 bp, Homo sapiens
tgtcctggctccaccgcaagttagaacagctagactggactgtgggcctgaggctgaagagcttcttcgaggggcacttcaagtgtgaagtgccagccacrctttttgagatctgtaagctttcagaagacgagtggacctcccaggcccacccagggtacggggctggcacggggctcctggcctggatggagtgctgct

SEQ ID NO: 530238 - DNA, 201 bp, Homo sapiens
gtttgttcccctgctcaacctgaagccctttgcccaggagttgcaactctccgtcctcttcctgaggactttccagtttctctgcagccatagctgtcgtrattggcttcctctggaaggctggaaccacgtggtcaaactcctctgtggcagtctgacccgcctcctggactcagtcagggcgatacaggcagctggccc

SEQ ID NO: 530239 - DNA, 201 bp, Homo sapiens
gctggagaagcagctcctccatgtcccttatagcctggaatatattcagtttgttcccctgctcaacctgaagccctttgcccaggagttgcaactctccrtcctcttcctgaggactttccagtttctctgcagccatagctgtcgtgattggcttcctctggaaggctggaaccacgtggtcaaactcctctgtggcag

SEQ ID NO: 530240 - DNA, 201 bp, Homo sapiens
gccactctacgttttagccttggaaaccctcacctgctatgagactttgagcaagaccaacccttctgtcagctccttgctccagagggcacacgagcagygcttcttaaagtccattgctgagggcatcggccctgaagaacggcgccaaaccctgttgcagaagatgagcagcttctgacttggcgtggggagctgggc

SEQ ID NO: 530241 - DNA, 201 bp, Homo sapiens
acatggcgggtctgcagaagatcagcagcttcttacctgtgcgggagcgaaaaagctgggcttcaacatggcaggtctgtaggggtcagacccgagcagcmtggactttacagttatgtgaaactgtccacaaaaagtcatggcaataatggtgtaaagaaaatagtttcttgggtatttgtaacgtacaaactatcataa

SEQ ID NO: 530242 - DNA, 201 bp, Homo sapiens
gaaggcagggcttgtctgattccttctgtgcccattgctctgtggctatgtgattgctctgtgcccattaccctgtggctgtgtgactgctgctgtgcccrttaccctgtggctgcgtgattgctgctgtgcccattaccctgtggctgtgtgattgctctgtgcccattatcctgtggccgtgtgatcgctctgtgccca

SEQ ID NO: 530243 - DNA, 201 bp, Homo sapiens
gctgctgtgcccattaccctgtggctgcgtgattgctgctgtgcccattaccctgtggctgtgtgattgctctgtgcccattatcctgtggccgtgtgatygctctgtgcccattaccctgtagccgtgtgattgctgctgtgcccattaccttgtggctgtgtgattgctgctgtgcccattatcctgtggctgtgtgat

SEQ ID NO: 530244 - DNA, 201 bp, Homo sapiens
gtgctgaaggaatttgtcctgcctttcttgaggttagatgttgaagaggtagacctcagtctgaggatcttcatccagactctagaggcaaacgcgtgccragaggaatactggctccagacctgctccccgtttccactcctcttcagcttgtgccagctcttggaccgcttcagcaaatactggcagcttcccaaggag

SEQ ID NO: 530245 - DNA, 201 bp, Homo sapiens
ctgctgtgcccattaccctgtggctgcgtgattgctgctgtgcccattaccctgtggctgtgtgattgctctgtgcccattatcctgtggccgtgtgatcrctctgtgcccattaccctgtagccgtgtgattgctgctgtgcccattaccttgtggctgtgtgattgctgctgtgcccattatcctgtggctgtgtgatt

SEQ ID NO: 530246 - DNA, 201 bp, Homo sapiens
acggtgaagaaaatgtgcagcctggctgtggtcaatctcggcacccacaagttcctgggccagattctcactgccttccctgcccttaggtttgtggaagwgcagggtcccaattcatctgccactttcatggtgtcatgcctcaaagaaaccgtctggatgaagttctctacacccaaggaagaaaagcaatttttagag

SEQ ID NO: 530247 - DNA, 201 bp, Homo sapiens
gtgtgattgctgctgtgcccattaccttgtggctgtgtgattgctgctgtgcccattatcctgtggctgtgtgattgctctgtgcccattatcctgtggcygtgtgattgctctgtgcccattatcctgtagccgtgtgattgcttctgtgcccattaccctgtggctgtgtgattgctgctgtgcccattatcctgtggc

SEQ ID NO: 530248 - DNA, 201 bp, Homo sapiens
tgtgtgattgctctgtgcccattatcctgtggctgtgtgattgctctgtgcccattatcctgtagccgtgtgattgcttctgtgcccattaccctgtggcygtgtgattgctgctgtgcccattatcctgtggccgtgtgattgctgctgtgcccattaccctgtggccgtgtgattgctctgtgcccattaccctgtggc

SEQ ID NO: 530249 - DNA, 201 bp, Homo sapiens
gtctcagccactgtgagatgagatggattgcctccacaagtgggttacatagtgctgagcccttggcctgctgccgctcccataaatggtgggaggggtargatggtccttagtctcctggagtcagtgttttctctgctggtgtctggcctgtgaaaatggggaatatgagctcttgggggcatgacagactgaggaagg

SEQ ID NO: 530250 - DNA, 201 bp, Homo sapiens
accctgtggccgtgtgattgctctgtgcccattatcctgtggccgtgtgattgctctgtgcccattaccctgtggccgtgtgattgctctgtgcccattaycctgtggccgtgtgattgctctgtgcccattatcctgtggccgtgtgattgctctgtgcccattatcctgtggccgtgtgattgctctgtgcccattatc

SEQ ID NO: 530251 - DNA, 201 bp, Homo sapiens
gcagggaagggctttgcctgacaacacccagctttatgtaaatattctgcagttgttacttaggaagcctggggagggcaggggtgccccatggctcccaractctgtctgtgccgagtgtattataaaatcgtgggggagatgcccggcctgggatgctgtttggagacggaataaatgttttctcattcagtctccagt

SEQ ID NO: 530252 - DNA, 201 bp, Homo sapiens
gggctttgcctgacaacacccagctttatgtaaatattctgcagttgttacttaggaagcctggggagggcaggggtgccccatggctcccagactctgtytgtgccgagtgtattataaaatcgtgggggagatgcccggcctgggatgctgtttggagacggaataaatgttttctcattcagtctccagtcattggtt

SEQ ID NO: 530253 - DNA, 201 bp, Homo sapiens
gtgcctgcagattctcatcctggggtgcatcaggaagcactttgctcatcagctcacctccacaagtttggaggggctaagatgtcagcctccaaaagggracagcaggctgggcgaggtggctcatgcctgtaatcccagcactttgggaggccgaggagggtggatcacctgaggtcaggagttccagaccagcctggc

SEQ ID NO: 530254 - DNA, 201 bp, Homo sapiens
gcagcggagccggaccaggctcttgtgtcctcactcaggtttgcttcccctgtgcccactgctgtatgatctgggggccaccaccctgtgccggtggcctytgggctgcctcccgtggtgtgagggcggggctggtgctcatggcacttcctccttgctcccacccctggcagcagggaagggctttgcctgacaacaccc

SEQ ID NO: 530255 - DNA, 201 bp, Homo sapiens
ccaagagggcctgtccaccttcaccaaggtgttcaggcagaggctgggtgctgtagaagtgacttgggctgaaggtgacgggggatgggtagtctttgtgrcttggcctgtcttggttaaacctctttcaaggtgaggttgggctggggatggaaggactgcccttcatccatcaggtacctaagcagaatgattcctgca

SEQ ID NO: 530256 - DNA, 201 bp, Homo sapiens
ctgtcccacacctgctgaggtggagcaggcgtgggtggtggccttcaagtttagggaggtggtatggggctcttcccaaggggctggagctcccctacatycaccctgggtcctccaggtgtctgagttcagagctgtatccacaggcctgagttagtccccttgtagtgccctgtgcatgcagggccctctgtggggtgg

SEQ ID NO: 530257 - DNA, 201 bp, Homo sapiens
ggccaacatggtgaaaccctatctctactaaaaatacgggtgtggtggagggcacctgtaatcccagctactagggaggctgaggcagaattgcttgaacmcaggaggcagaggatgcagtgagccgagatcgcactattgcactccagcctgggcaacaagagcaagactccatctcaaacaacaacaaaaacccaaaag

SEQ ID NO: 530258 - DNA, 201 bp, Homo sapiens
gcggggcctgtgactgccagctccagagccctatggagagctccctgggacaacagggcaggactggcaggggagagtcctggggccatcccagagggatsctgatgctcacagacctgtcccacacctgctgaggtggagcaggcgtgggtggtggccttcaagtttagggaggtggtatggggctcttcccaaggggct

SEQ ID NO: 530259 - DNA, 201 bp, Homo sapiens
cccgctgtgtgtgcccctcaggcggccaccagccctaccaggtcctcccctcccggcaggtcttcgccttgatcgtgttctcctgcatctatggtgagggstacagcaatgcccacgagtctaagcagatgtactgcgtgttcaaccgcaacgaggatgcctgccgctatggcagtgccatcggggtgctggccttcctgg

SEQ ID NO: 530260 - DNA, 201 bp, Homo sapiens
gggggaggcattaactctagggttccgcagctgggagggtctcggcctctctgggaggggcagggagcagctcactcctccagggcatttttaggaaaggkttttcagctagtgtttttccgtgcttgaatggcaccagccctgcctggggtagctagaagctgagtggacctgcagcacacccgagcagatgggctttgc

SEQ ID NO: 530261 - DNA, 201 bp, Homo sapiens
tgaatggcaccagccctgcctggggtagctagaagctgagtggacctgcagcacacccgagcagatgggctttgcctctgccccttttgtcccctaggctrtctgctgtggcccaccctgccaaggcccgagtgtgggggactttggaggtggctcccggcccggcttccaagtcctcccctccatagtgtggaggctccc

SEQ ID NO: 530262 - DNA, 201 bp, Homo sapiens
ccatgcctgggcctggagcttctgaggtcctccagggcgcccacaccagctcccagccaggctgtgggatctgatcgcctctgtcctgggctgtgtccaaraatcaggtgcccagtgggtcgggatggcagtgccaggagtcctggatgggcaccctgctcccatcatcccggagatccggcttcatctccatctgggggc

SEQ ID NO: 530263 - DNA, 201 bp, Homo sapiens
ccatcctgtgcagctgacacacagctaaggagcctcatagcctggcgggggctggcagagccacaccccaagtgcctgtgcccagagggcttcagtcagcygctcactcctccagggcacttttaggaaagggtttttagctagtgtttttcctcgcttttaatgacctcagccccgcctgcagtggctagaagccagcag

SEQ ID NO: 530264 - DNA, 201 bp, Homo sapiens
ggctggctttatggaacttgtagtttgaacaaggcagtggcaatccgccccctccagcctgcctggctggcccccttccctctgtctggggtcgcattccrcacaagcctttcatcaacatcttaaaatagtaactgtgctcagcttgtaaacaagatgatttttctggcctgcagtgccagggtcctgctgctcccttcc

SEQ ID NO: 530265 - DNA, 201 bp, Homo sapiens
atgcccacgagtctaagcagatgtactgcgtgttcaaccgcaacgaggatgcctgccgctatggcagtgccatcggggtgctggccttcctggcctcggcyttcttcttggtggtcgacgcgtatttcccccagatcagcaacgccactgaccgcaagtacctggtcattggtgacctgctcttctcaggtatctgcctgt

SEQ ID NO: 530266 - DNA, 201 bp, Homo sapiens
ccctggactttcccatgagcctcctggaactgccagcccctctctttcacctgttccatcctgtgcagctgacacacagctaaggagcctcatagcctggygggggctggcagagccacaccccaagtgcctgtgcccagagggcttcagtcagccgctcactcctccagggcacttttaggaaagggtttttagctagtg

SEQ ID NO: 530267 - DNA, 201 bp, Homo sapiens
gcttccccccggcccgggtcaggccgtgggagccgctattatctgcgttctctgccaaagactcgtgggggccatcacacctgccctgtgcagcggagccrgaccaggctcttgtgtcctcactcaggtttgcttcccctgtgcccactgctgtatgatctgggggccaccaccctgtgccggtggcctctgggctgcctc

SEQ ID NO: 530268 - DNA, 201 bp, Homo sapiens
gactcgtgggggccatcacacctgccctgtgcagcggagccggaccaggctcttgtgtcctcactcaggtttgcttcccctgtgcccactgctgtatgatytgggggccaccaccctgtgccggtggcctctgggctgcctcccgtggtgtgagggcggggctggtgctcatggcacttcctccttgctcccacccctggc

SEQ ID NO: 530269 - DNA, 201 bp, Homo sapiens
cgagtgtgggggactttggaggtggctcccggcccggcttccaagtcctcccctccatagtgtggaggctcccccgggaggtccctgccctacctgcccgygtcccctcccagagtcctggaaagcccctccctttccatggaactgacgcttcacccgtcctcccccagctctctggaccttcctgtggtttgttggttt

SEQ ID NO: 530270 - DNA, 201 bp, Homo sapiens
ttgctatggttaggatatggtttgtttggcctcagcaagtcttatgttgaaatttgatccccaatgttggaggtaggtactggagggaggtgcttggtttsagagtagatccctcaggaacggcttggtgccattctctccagagtgagtgagttttcgctgagttctcactcttagttcccaaaagaactgattgttgaa

SEQ ID NO: 530271 - DNA, 201 bp, Homo sapiens
cttgcatggaagatgatctcattgagtggcttatgcaatgttcgtaaaaatgtagcatgtagctcagaaactatctgctgttactaaaggtgaaagaaaaaataatgagtagttatctcctatctgttccacaagttatgttttgaagttaggtgtgcagtgctaatagcaaacgctcagccatttatcatcttttgttag

SEQ ID NO: 530272 - DNA, 201 bp, Homo sapiens
gtatttatatcatcagtaacattagggcatcagtcacgagtgccctagtaagaattacctgataaacgaatggaatgaatgttcactaaatagtctttctyaagaggcagcaaaaacatacacttataataaaattatttatctccattgctgcagaaagtttacttctccattttaccttgtgaaagatgagtaaaagtg

SEQ ID NO: 530273 - DNA, 201 bp, Homo sapiens; identical to SEQ ID NO: 118271

SEQ ID NO: 530274 - DNA, 201 bp, Homo sapiens
cagttcttaaatatttgttgaataagagtccctagtcgttcaggggtggcctaaagctgcttaaagttgcaaattaggaatgaactttttttcaaaaaaaraggtaaccgatgtgatcatttgtatgcacttgctcattaacggactaaaaatgactggacattgctatggttaggatatggtttgtttggcctcagcaag

SEQ ID NO: 530275 - DNA, 201 bp, Homo sapiens
gaaagcaataataaagagcccttaacaacttcttgtgcctgatcctgctttgtgttccagtaaggagggtgagaaaggtcactaccagcactagcaacagyctctattgatacatgtttattaagcatatgtagaagagctgcaaaatgatagctaaagatgactttcaagttgcacatttgcaagagtaaatatatggca

SEQ ID NO: 530276 - DNA, 201 bp, Homo sapiens
agcagcctggccttacctcaactaattcaaaagtttatagaaccttatcagtaataataaaaacggccagttcaaactaaaaagggcaagaaaactgtccrtcctttctattgtgtagtccttgggtagcactgatctgtggcatggcatacactgtaaaacaaaaatggtttccacataaaaacataattgctctatgtg

SEQ ID NO: 530277 - DNA, 201 bp, Homo sapiens
tatgacctcatttaaccctaattatctctttaaaggccttatctccaaatacagtccacgttgggggttagggctccaacatgtaaatttgggaggcacamaattcagtccacaatagcaagctacctaactttatgccttggtttcctcatctgtaagttaaaaataataaaatgataaaaattaaaatgtacgaaagaa

SEQ ID NO: 530278 - DNA, 201 bp, Homo sapiens
aaatctgccagcaacctcggagtgtctgttcttccacactctggtcaacagcaatataaatcaagagcatgttctcagttgagaggagatattgaatataytgctagaaggaaagaaaaattcatagggggacaattctgtgcaacactaggcaattgcaaaaatccttctgcaaagagaataggggataagcaatcatgc

SEQ ID NO: 530279 - DNA, 201 bp, Homo sapiens
aaaaagaaatgtatgcatttgagatagatggctgtgagagggaccaattaagcaacttgaattttatattttcccaaatgttagaaaaatacagaagcatrcagcatttctttgaagggatgaattacaaaatcaaggcagtgtggagaatgactgaattccctgtggagtacctcttccgtctgtttgtccattctttta

SEQ ID NO: 530280 - DNA, 201 bp, Homo sapiens
tgtgtattaatgggttttgtttgtttgttttaaaattctactatggttcccaattacatagtatatcaaaatccaaacttgagcatcattacacagcctcyttctcaggctctcccttctgtgccatccactaaatgtgggtgttcctcaggcttgtacctaaggccctcctgtctgccagcctgtcattctgtattctct

SEQ ID NO: 530281 - DNA, 201 bp, Homo sapiens
ccttgactctttcttctccttaatcctctgccagtaccctgttactaagtgctgtcagtcattccttcactggcagcgtctcctaggcccttttgctttcyattttctccccaactaccctagtccagacctccagcaacgtacttctccttagccctcagctagtctccctgactccagatgtttctctacttcttcttt

SEQ ID NO: 530282 - DNA, 201 bp, Homo sapiens
tgttttcttttatgagagaaagctgtttttatgctctactgaaattcctttcctgctctgaaattggtaagagggacagctgctttctatatttttctctstggtatttttctacagcagattttaaattcattcttcagattgggaaaagcctctctttgcaccctcatggaaatttaaagatgcattgctaatattcaa

SEQ ID NO: 530283 - DNA, 201 bp, Homo sapiens
ttttgcttcattttcccatattttcctggagggataaagagaaagaaaatggagtactgatttcatcctgtaacaatatggcaatatttcaaaaatatatrttaaaaaacagtaatgccagaaggaaagtactttaactttcagcagaaaagtgaaatattctgtcatattcagaatgcatggtctaattttcaacacttg

SEQ ID NO: 530284 - DNA, 201 bp, Homo sapiens
gaacaaaatactgtgcattaaaaacactgccaaaaataaatttaatgattataattcaaaatgtcatgcacatttaaatacattttctttccttatccaaytacatgtaaactccagcagtcacaaaaaacaaatgattatctatgaaccaaatattcatgttgaaatgaatatgaattataacaacttcagctgaaggtt

SEQ ID NO: 530285 - DNA, 201 bp, Homo sapiens
tttgccaaggtaggattttcaacaaaaatggtttctttcataataattctactgccatgggaacaattctttcaaaataacaagactcagtattctccacrtcttaaattcttgtcatttgtttcttcagaataaaagcgaaatgcaccaatgcatatctattagtgcctaacatagcaccttatacatagtgaattccca

SEQ ID NO: 530286 - DNA, 201 bp, Homo sapiens
actataattccttgataattaaaaatcatagctgaggagaatgtgaagagtctataaagtcttcaagattagaaaaagcgtatctaacatttattgaccaratattagagaaaaacaagataatcgattccatcttgagtttgaaagagatgaatctaggacaggtgaaagaaagtcccattttacacagagaattagaga

SEQ ID NO: 530287 - DNA, 201 bp, Homo sapiens
aaatatatcaaatataaataaattgaaaagatgtgtatcttttcaagtaaatcaaacaatttcattcttttcaaagaatcaaagaaaatgattcttttatrtgtatgaaaaatacatatttttaattcccatgtcttcactgagaacgcatattagaaaaggtaattattggaacaaaatactgtgcattaaaaacactgc

SEQ ID NO: 530288 - DNA, 201 bp, Homo sapiens
aatcagagaatggtaacacaacattttcaagttattagaaaacaatgtcattcaaccattctctgttcctcaaatgctggttaaagactctctatataatrtaatcccaatggtcagtcattgccagtaaagagtgaaaaaagttcgtatcccacaattatctctctggaagcaagttcaggaaataaagaattataggca

SEQ ID NO: 530289 - DNA, 201 bp, Homo sapiens
tagtaggtttatcttttattctaatgttgctagaataagaacaaaattaaaataagcacacacacacaaaatgcctctgtgaatcagtcacaggatttctytaagtctgggctggtgtcctttctcttctgctgcttgcatagctctttgatgttctctatctctgcaggactaaacttggaggttagcatcacattgtca

SEQ ID NO: 530290 - DNA, 201 bp, Homo sapiens
gtaccttccaggtgatttgtacataaggtaaaattcccaagtaaagattccatgaagtaaaatctaacaatgataattaaaaagaagaatctgatacttcrtctttggtcaaagcatgtaaatacatttgcctgatgattgtgtggagacatagtattgcatccatccaccagaggccagtgtaggatcattccctgaatt

SEQ ID NO: 530291 - DNA, 201 bp, Homo sapiens
tcctatcccatcccaatgaacctctgatgaacaaatcagagaatggtaacacaacattttcaagttattagaaaacaatgtcattcaaccattctctgttyctcaaatgctggttaaagactctctatataatataatcccaatggtcagtcattgccagtaaagagtgaaaaaagttcgtatcccacaattatctctctg

SEQ ID NO: 530292 - DNA, 201 bp, Homo sapiens
ttgcatggaagatgatctcattgagtggcttatgcaatgttcgtaaaaatgtagcatgtagctcagaaactatctgctgttactaaaggtgaaagaaaaaataatgagtagttatctcctatctgttccacaagttatgttttgaagttaggtgtgcagtgctaatagcaaacgctcagccatttatcatcttttgttagt

SEQ ID NO: 530293 - DNA, 201 bp, Homo sapiens
ctgcaaatttctctcaaggtaacattatccccatggcctatgtcttcagttaaagtaagtttattgctatttgccatgatattttcaattatcttctcttyactgttaaattcacatttgcaaaagcgcttcccgagttgccttttttttcttaatgtggctaacgttaaaaaggaaacagaaaggcactgcaaatggcct

SEQ ID NO: 530294 - DNA, 201 bp, Homo sapiens
tgcatggaagatgatctcattgagtggcttatgcaatgttcgtaaaaatgtagcatgtagctcagaaactatctgctgttactaaaggtgaaagaaaaaataatgagtagttatctcctatctgttccacaagttatgttttgaagttaggtgtgcagtgctaatagcaaacgctcagccatttatcatcttttgttagta

SEQ ID NO: 530295 - DNA, 201 bp, Homo sapiens
aggagctctgattctacttctgtcctgtagactcatccacagtgtaacctataatagactacttaatctcagtcttctcatgagtaaaataggaatactcyccactcctatcccatcccaatgaacctctgatgaacaaatcagagaatggtaacacaacattttcaagttattagaaaacaatgtcattcaaccattctc

SEQ ID NO: 530296 - DNA, 201 bp, Homo sapiens
aggcagaattagccctgatttacagattcagagagtaagtgacaggcctgtggtcttaagaaattagtatatgcctggactagtacccaggtcttctgaayccaaggattgaagtgtcccttcccattacactggccctgcccgtaacaaaatgagaactataaaagcaacatagtaaattatttataaaactaaatatct

SEQ ID NO: 530297 - DNA, 201 bp, Homo sapiens
aaataaagaagctgatcttgtagcccttcagatgataaaactccccttcccgtttttgttaattagctgagcataacagaccaaattcagtaagccatagyggaggtcagggaataggtttcaggagctctgattctacttctgtcctgtagactcatccacagtgtaacctataatagactacttaatctcagtcttctc

SEQ ID NO: 530298 - DNA, 201 bp, Homo sapiens
atccttctgcaaagagaataggggataagcaatcatgcttataacaaggttgggtactctgaaagtcagggtgtgatttttgcattacactccttgcctaragcaatgtttctctggacaataatatttgctcttgatttgtccagccaaactacttcactccactgcttcttgatcacatgctccttgttatctggcctc

SEQ ID NO: 530299 - DNA, 201 bp, Homo sapiens
ctctgataaatgagtgcacacatgtaaatttccacaaagggaattatagtaggtttatcttttattctaatgttgctagaataagaacaaaattaaaatargcacacacacacaaaatgcctctgtgaatcagtcacaggatttctctaagtctgggctggtgtcctttctcttctgctgcttgcatagctctttgatgtt

SEQ ID NO: 530300 - DNA, 201 bp, Homo sapiens
tttctcctctgcctccctccaacccatcatatccacagaccactgcagctgtgttacccttgtcaatttatgtaaacttttctgatcctgagtagtttgartgtaaaaataaagggatggggcttgaggttggcttccatcttctttttccaattatgtttccttttttgtccaattactaggccaggatatcccattact

SEQ ID NO: 530301 - DNA, 201 bp, Homo sapiens; identical to SEQ ID NO: 118294

SEQ ID NO: 530302 - DNA, 201 bp, Homo sapiens
gcattcaatttttgaaatacactgttttagttgaagtaaagaaaatccagactcatatagataggtagttggaaaggggaggagtattttaatagtctttytatatagttgtggatatttttctttgatactacaccacgatctgaaaaatcatagagtttttcaaaggttattttccatgagcattctgaaaacttgtca

SEQ ID NO: 530303 - DNA, 201 bp, Homo sapiens
aatatcaccaattttgccagaaaagcctttaaatattgagaagctgtcaagctcacagtactagatacgagttctctaaaaatctaattttcgcttgatcyattgccaattttatcattggcaatgaatactattagttattagccttgaagagacaggctcactttattcatttttgagaaatatagtttgtcagtcact

SEQ ID NO: 530304 - DNA, 201 bp, Homo sapiens
tcaaactaccttgtggctataatatccaaacttatggtactagagatgtagaaatttattcttaaaaatagaaacatcttattttcctttaagtttttttwaaatacatttacattcttctctgtcatggaggatgattttcttcatcagtcacttggtactaaccataacaataacatggaataaagttttcagcaagtc

SEQ ID NO: 530305 - DNA, 201 bp, Homo sapiens; identical to SEQ ID NO: 118296

SEQ ID NO: 530306 - DNA, 201 bp, Homo sapiens; identical to SEQ ID NO: 118299

SEQ ID NO: 530307 - DNA, 201 bp, Homo sapiens; identical to SEQ ID NO: 118301

SEQ ID NO: 530308 - DNA, 201 bp, Homo sapiens; identical to SEQ ID NO: 118302

SEQ ID NO: 530309 - DNA, 201 bp, Homo sapiens
taaaaagaaatagtgcacgtgtcttaaggatatgacccagaagttgcacataccagtgcccctcacatctcattgacacaaacttagtcaaatgactatayccagcttcaaggaagactaggatgtaatctttattttggctggccatagagtagataaaaattctactgctatagaaagagtatgttattgttttactgt

SEQ ID NO: 530310 - DNA, 201 bp, Homo sapiens
acagtttaggaaaggtgggtaggctttgttccatgaaatgacccagggattcaggctgctggagttttctgtcatcgtaagcacatggcctccatgtctgrgtctaaaggagttgttgtaatgattcccaatttccagccaggaggaaaaggataaaaagaaatagtgcacgtgtcttaaggatatgacccagaagttgca

SEQ ID NO: 530311 - DNA, 201 bp, Homo sapiens
ctctgattctacttctgtcctgtagactcatccacagtgtaacctataatagactacttaatctcagtcttctcatgagtaaaataggaatactccccacycctatcccatcccaatgaacctctgatgaacaaatcagagaatggtaacacaacattttcaagttattagaaaacaatgtcattcaaccattctctgttc

SEQ ID NO: 530312 - DNA, 201 bp, Homo sapiens
agaatttgatttctctctcatgtaacagtttaggaaaggtgggtaggctttgttccatgaaatgacccagggattcaggctgctggagttttctgtcatcrtaagcacatggcctccatgtctgggtctaaaggagttgttgtaatgattcccaatttccagccaggaggaaaaggataaaaagaaatagtgcacgtgtct

SEQ ID NO: 530313 - DNA, 201 bp, Homo sapiens
gttggattagagcagttcaagaggagacttaaattatatatgtctttcacattctctcattttatcaggaaactccaggagagccttcacaaaaaaaaaawaaaaaatagaacaagagcttaaagtaaaataagaaggaaaaagtctgaaaatccactgttctaatcattcttattgttattttattaactcataggctgt

SEQ ID NO: 530314 - DNA, 201 bp, Homo sapiens
ttagctaaggctgatttcagctaccatatcaaggaagcacaaaaaatggagcagctcaaacaagaatttgatttctctctcatgtaacagtttaggaaagstgggtaggctttgttccatgaaatgacccagggattcaggctgctggagttttctgtcatcgtaagcacatggcctccatgtctgggtctaaaggagttg

SEQ ID NO: 530315 - DNA, 201 bp, Homo sapiens
agtctgagagttttttaaaagggactttgttccagattctatcccagaatatataccaccaccatgacagttgaaaacagtgtttctgggttttgttttcmttttattgcttttgcctgtcaagcaaatggtggcggtggctctggctactgtcataacaccgtgctttctgatagcactctgaggagccagagagaagaa

SEQ ID NO: 530316 - DNA, 201 bp, Homo sapiens
gacccagattgtgcattatgaaaattgtaaagccctggtggccttttcagtaattagaatagattgctgaagcctaggttgattttcagcataggcttcamacatcattctatgtgtgggaaggtcttgacgagttcattcaagtcttggttcagcctcagtaatcttttatacacaaatacaagaaggcttgttatctga

SEQ ID NO: 530317 - DNA, 201 bp, Homo sapiens
ccaaccttctccacatggtccaggatgacacccccccacacccttgttccaagcaataggatgaagaaaaggaaaaagaaagcacacacctcacttctctrtaattagctaaggctgatttcagctaccatatcaaggaagcacaaaaaatggagcagctcaaacaagaatttgatttctctctcatgtaacagtttagga

SEQ ID NO: 530318 - DNA, 201 bp, Homo sapiens
ccataaaatgagcttaccttcccaactaacttagtcaagaccacaaaagaggtggcccacactgggaacagatgcagcatatttgagcatagcctcctacrgctccagaattcctaacagagcaacagctgctggtgacaatatcaacacaaggtagaatctgttacatccaagtttgtttcttttttgcaccacagccct

SEQ ID NO: 530319 - DNA, 201 bp, Homo sapiens
actatgttggtattacctgttcttccaaacattgtgatgaagtacgaagaaagatggttttatttctaagatggtagtcatctgcttcatttttatgagtracttttgctgaggtaaaaatgttttctgaagaatcagttccaaacactccccttttggacacatgatcctctgaaataagaagttatgcactattagaaa

SEQ ID NO: 530320 - DNA, 201 bp, Homo sapiens
aaagtttacttctccattttaccttgtgaaagatgagtaaaagtgttcagaaattcttcatcatatgtttgctcatgacaattaaggaatttatccaagaygtctttgattaattgatcttcatccattatttccaatcctgacatatgggcagacattcctattcatgaggccacagtatctgcaagacagaaaaatacc

SEQ ID NO: 530321 - DNA, 201 bp, Homo sapiens
gtgttaggcacttacagagagaaaaatatgaacagagtgtaatgtttctgaaagcttattttcagacagaaaaaaaaattctgtgtggtggctgagttacrgagctcattcaatccaaaagttatattctggtcatcaactatatgcaaggtgacaaagacagttaagactcagtccttgttgtcctcacagagtttacaa

SEQ ID NO: 530322 - DNA, 201 bp, Homo sapiens
aatatatgtaatgatgactttcaataaagtgccccaatggcactccttctagaattaggaattacagatctaataactgtctagtgtttagtagggtctcttttttttgattcatgaagaattcttttcttctgagattgtttctatacatgtactatgttggtattacctgttcttccaaacattgtgatgaagtacgaa

SEQ ID NO: 530323 - DNA, 201 bp, Homo sapiens
gaaaaatgtgtgtgaaaaatgccagatgagggacacaatagcagtaagttgaaacttttgaaatgtccagtgttaggcacttacagagagaaaaatatgamcagagtgtaatgtttctgaaagcttattttcagacagaaaaaaaaattctgtgtggtggctgagttacggagctcattcaatccaaaagttatattctgg

SEQ ID NO: 530324 - DNA, 201 bp, Homo sapiens
agtcaggaataactgtgctttccctgaggctggatgataattgactcattattcacagtcatagccatcaacctgccaaggcacaaatgcacaaccctggyctggaaaaatgtgtgtgaaaaatgccagatgagggacacaatagcagtaagttgaaacttttgaaatgtccagtgttaggcacttacagagagaaaaata

SEQ ID NO: 530325 - DNA, 201 bp, Homo sapiens
caacgaagtttctaatcctcaatctagggagaatacctacatgcatcttcttcctttttaaaatggttttcctggaaataatgaagaaggaggaaaaaaawatatatatacacacatatatatacacacatatatataattttacatttttttctattgtaggtcaagattctcttaatatttaactttgatgtccctctt

SEQ ID NO: 530326 - DNA, 201 bp, Homo sapiens
tactgctttccactgcaagctgacaatgagacattttagattaacaaaatggtaacatttagacatgaactaattcatctcaagtgaatatcaaagagtgyaaataagaaaatgatctcaccactggcatgaatgagacctagtaaaggaataaggttgcaatgccttttatgctcatgacctaaacatgtgcataataaa

SEQ ID NO: 530327 - DNA, 201 bp, Homo sapiens
tcctttttcactgtcaaaatgccttttaaataatatacaatggtgacattcaacaaaaatgtcatatttaaagtaaaataattgttcttatgctttgagtgggggggggagtatcacaatttcatgaaagctacagaccttattcataaaaaaatataatatatacaaaaatggacaaaaagtgttgaaaaattcatttat

SEQ ID NO: 530328 - DNA, 201 bp, Homo sapiens
acttatcagacagccaagtggtttatgcaaatcctagtgggtttctaaaaggaagcaatgcattttcaattaccattcacatacttttgtgtttttatcaygaagtatttttctaaaagaaaaagagggggagagagagagagacacttgcctagataacagaattctttgttttgctttggtttttatgttttaaggctt

SEQ ID NO: 530329 - DNA, 201 bp, Homo sapiens
tttcgagcaaataaaactgaaaattacttcaaaggtaaaaagcagggcaaatgacctttacagacacaatagcagcatttcaatgaaaaactattccacakggaatactgctttccactgcaagctgacaatgagacattttagattaacaaaatggtaacatttagacatgaactaattcatctcaagtgaatatcaaag

SEQ ID NO: 530330 - DNA, 201 bp, Homo sapiens
aggcacaaaattcagtccacaatagcaagctacctaactttatgccttggtttcctcatctgtaagttaaaaataataaaatgataaaaattaaaatgtamgaaagaactcactaggtcattataatgattaaacgagatgatacatgtgaagagctaagcattaatccctagaacttaataaatgttagctgctatcagt

SEQ ID NO: 530331 - DNA, 201 bp, Homo sapiens; identical to SEQ ID NO: 118307

SEQ ID NO: 530332 - DNA, 201 bp, Homo sapiens
gtgagcagggcaaaaactcaagtgttctctctttcgagcaaataaaactgaaaattacttcaaaggtaaaaagcagggcaaatgacctttacagacacaayagcagcatttcaatgaaaaactattccacatggaatactgctttccactgcaagctgacaatgagacattttagattaacaaaatggtaacatttagaca

SEQ ID NO: 530333 - DNA, 201 bp, Homo sapiens
agtgcaccagcatggcacatgtatacctatgtaactaacctgcacaatgtgcacatgtaccctaaaacttaaagtataattaaaaaaaaaaaagaaaactcaacaacaacaaaaaaagaagtaactctaaactttactaaaacaaggctacatattcgtcttgaagacgtagtgtttaaaggagatagagatatatcagta

SEQ ID NO: 530334 - DNA, 201 bp, Homo sapiens
gtgcaccagcatggcacatgtatacctatgtaactaacctgcacaatgtgcacatgtaccctaaaacttaaagtataattaaaaaaaaaaaagaaaactcaacaacaacaaaaaaagaagtaactctaaactttactaaaacaaggctacatattcgtcttgaagacgtagtgtttaaaggagatagagatatatcagtac

SEQ ID NO: 530335 - DNA, 201 bp, Homo sapiens
ctggttctacttaatgtcttgaagcccaaggcaagtttgggttcagtagttatcctagactcatctcaagcagcccctctgatgactagactttattgccstccctccaaacacaggctgggtggccctcctataagctctcagtctccactgtgatacttatcatgcattagtctaatttcctgcttgcttatttatctc

SEQ ID NO: 530336 - DNA, 201 bp, Homo sapiens
caagtttgggttcagtagttatcctagactcatctcaagcagcccctctgatgactagactttattgccgtccctccaaacacaggctgggtggccctccwataagctctcagtctccactgtgatacttatcatgcattagtctaatttcctgcttgcttatttatctctaccactggattatgagtgcttgagaacaca

SEQ ID NO: 530337 - DNA, 201 bp, Homo sapiens
atgaagactggtatttatatcatcagtaacattagggcatcagtcacgagtgccctagtaagaattacctgataaacgaatggaatgaatgttcactaaayagtctttctcaagaggcagcaaaaacatacacttataataaaattatttatctccattgctgcagaaagtttacttctccattttaccttgtgaaagatg

SEQ ID NO: 530338 - DNA, 201 bp, Homo sapiens
aacaatgacatggcgagagagaattctgtaagggcggcaatctccttggccttgttgctctatatccctaataacaggtaactctgataaatgagtgcacrcatgtaaatttccacaaagggaattatagtaggtttatcttttattctaatgttgctagaataagaacaaaattaaaataagcacacacacacaaaatgc

SEQ ID NO: 530339 - DNA, 201 bp, Homo sapiens
tttaagaccaaaggtttcacaatcttcaaaaagctttgacctttcaggtgaaatttttgttactgaaaaaaatagctcacaactttagttcttcctgtctyaggagaggtggaggtaagaattgccaaaaacaggaaagctgtctaaagccttatttgtagtttctagaaagaggtcaggtagtatagaaaggaaatagaa

SEQ ID NO: 530340 - DNA, 201 bp, Homo sapiens; identical to SEQ ID NO: 118272

SEQ ID NO: 530341 - DNA, 201 bp, Homo sapiens; identical to SEQ ID NO: 118274

SEQ ID NO: 530342 - DNA, 201 bp, Homo sapiens; identical to SEQ ID NO: 118276

SEQ ID NO: 530343 - DNA, 201 bp, Homo sapiens
atcctttgtcaatcttctcatttcattcactgtaacaaatttatttttcaaaacccagctcagaattccatttgtctctgaagactttatcccccatctcycactactgcaggaagagttaatcttaatttatctgtgctgctcctgtactagggtttactgttaaatttatcatgctgtatgggaaacagttgtgtacat

SEQ ID NO: 530344 - DNA, 201 bp, Homo sapiens
cttttcataaaagtaaatgtattataaccccctaaatatatcaaagtccttgcaaaaagtttttattcttctagggtacaaaaataaagtcagccttacaratgatttccaaaataatgtgaattatcaaaatgtcattagcataccaaaattcattaattctgccaattttacccttatttccaccaccccaccacagcc

SEQ ID NO: 530345 - DNA, 201 bp, Homo sapiens
atcccataagcattctggtgtataactattataaaaataaatagaacagtcaatcagtggaaatggtaatggacttgagaaactaaacttactaaagaaaygtacataagtatgcatggtgataactactttaacagagaaaaggctcagtgtgtatcaacaaaacaactaaacacattgagacaaatgaagggcctggaa

SEQ ID NO: 530346 - DNA, 201 bp, Homo sapiens
ctgttcatatcctttgctcactttttgatggggttgtttgtttttttcttgtaaacttgtttgagttatttatagattctggatattagccctttgtcagwtgagtagattgcaaacattttctctcattctgtaggttgcctgttcactctgatggtagtttcttttgctgtgcagacgctctttagtttaattagattc

SEQ ID NO: 530347 - DNA, 201 bp, Homo sapiens
aagtttacttctccattttaccttgtgaaagatgagtaaaagtgttcagaaattcttcatcatatgtttgctcatgacaattaaggaatttatccaagacrtctttgattaattgatcttcatccattatttccaatcctgacatatgggcagacattcctattcatgaggccacagtatctgcaagacagaaaaatacca

SEQ ID NO: 530348 - DNA, 201 bp, Homo sapiens
agcaattgtgaatgggagttcactcttgatttggctctctgtcagttattggtgtataagaatgcttgtgatttttgcacattgattttgtatcctgagastttgctgttatcagcttaaggagattttgggctgagatgatggggttttctaaatatacaatcatatcatctgcaaacagggacaatttgacttcctctt

SEQ ID NO: 530349 - DNA, 201 bp, Homo sapiens
tctgattataaataagccatcctcccccaacactaatgaccataaaacatgtttatgaccacctaaagacagtaaacaatagttaaacatcaacaaccaarcctccgtggaaactgccccttctgtaaaattaggcattgactttgatatattcttgcatgttaaatcaggaatgagtgtttaaaaaaaaaaaaaaaaaac

SEQ ID NO: 530350 - DNA, 201 bp, Homo sapiens
accatccctaaaccaactttacctagtcactttaacttctgtctgattataaataagccatcctcccccaacactaatgaccataaaacatgtttatgacyacctaaagacagtaaacaatagttaaacatcaacaaccaaacctccgtggaaactgccccttctgtaaaattaggcattgactttgatatattcttgcat

SEQ ID NO: 530351 - DNA, 201 bp, Homo sapiens
ggttcctctctcgtcatgcagtttctgcacatgtggttcccctttggcttccccagaagcacacgctggctccatgcttcttgcacagcctgcagaaccaygagccaaataaacctcttttctttacccagcctcaggtattcttttacagcaacataaatggactaaggcagaagtacagtactggagaacctgaaaatg

SEQ ID NO: 530352 - DNA, 201 bp, Homo sapiens
tttgtttggcctcagcaagtcttatgttgaaatttgatccccaatgttggaggtaggtactggagggaggtgcttggtttcagagtagatccctcaggaayggcttggtgccattctctccagagtgagtgagttttcgctgagttctcactcttagttcccaaaagaactgattgttgaaaagagcctggcacctctttc

SEQ ID NO: 530353 - DNA, 201 bp, Homo sapiens; identical to SEQ ID NO: 118300

SEQ ID NO: 530354 - DNA, 201 bp, Homo sapiens
caaaatggcctttcagtaagcccttcaggacccatttgctataaactaatgattatgttcttttactagcactgggtgctttaagatgaatgttatcaaaycaaggcagtgttggtacagtacaggttgaatatctcttctccaaaatgcttgggatgaagtgttttggatttcagattttggaagggttgcagaatatat

SEQ ID NO: 530355 - DNA, 201 bp, Homo sapiens
tgagggaaacaaaacaaataatgaaaaacacaacatgggtttggcctcatcacatccagtctaaagggttgtttccattctacagaaaccacaacagcagyagcagcagcagcagcatcacaacagcaatacaaatacctaacattcagtaagtacttattatgtattagtcactacactaagagtttcacatggattatc

SEQ ID NO: 530356 - DNA, 201 bp, Homo sapiens
caattaccattcacatacttttgtgtttttatcacgaagtatttttctaaaagaaaaagagggggagagagagagagacacttgcctagataacagaattstttgttttgctttggtttttatgttttaaggctttgagctccacatgaaagactcaaaacgtcttgtgataagtaaatgtgtataaatatctgctggtaa

SEQ ID NO: 530357 - DNA, 201 bp, Homo sapiens
tatgtcataaaatggagttgaaaagatttaatgtcaatttctaagtcattggcttcttaattatacaatctctgtgtgacagcaacatgagcagtaattaycactctaaaaggtaggagcaaatgcttcccaaatgggatcatgtggtaatcctggtgtggaaggcaattaaaagaaattgcctttttctttcagcagttt

SEQ ID NO: 530358 - DNA, 201 bp, Homo sapiens
aaagtggctgtccctaccagtttagccagtaatcaatttgggagtttaatataagcctgcacgcatcctggatatactttcatgatgtcagtgaacaaaartacttattagaaagtggcaatttaaaactgaaatgtgtggattatttatgactgaatggctaattctataacagaatatcttttagtaacaagactagta

SEQ ID NO: 530359 - DNA, 201 bp, Homo sapiens
tgcttcccaaatgggatcatgtggtaatcctggtgtggaaggcaattaaaagaaattgcctttttctttcagcagtttagaagtaactctattaggaaaaraggaagtcaaattgtccctctttgcagacgacatgattgtatatctagaaaaccccattgtctcagcccaaaatctccttaagctgataagcaacttcag

SEQ ID NO: 530360 - DNA, 201 bp, Homo sapiens
tatcagtttttttatttaaatttaaattaatttaaagtaattaaaatttaaaactctgttcctgggtagcactggccatgtttccaatactcaatagctayatgttgctagtagctactgtgttggacagtgcaggcctgtatgatcacaaatcatacggttactacaccattcatgaaatttgtaatgctggaaaagcac

SEQ ID NO: 530361 - DNA, 201 bp, Homo sapiens
ctttcatgatgtcagtgaacaaaagtacttattagaaagtggcaatttaaaactgaaatgtgtggattatttatgactgaatggctaattctataacagamtatcttttagtaacaagactagtacctcatgattaaataatccaaaaagaccctaaggattttgttagaaagcaataataaagagcccttaacaacttct

SEQ ID NO: 530362 - DNA, 201 bp, Homo sapiens
atatcagtttttttatttaaatttaaattaatttaaagtaattaaaatttaaaactctgttcctgggtagcactggccatgtttccaatactcaatagctrcatgttgctagtagctactgtgttggacagtgcaggcctgtatgatcacaaatcatacggttactacaccattcatgaaatttgtaatgctggaaaagca

SEQ ID NO: 530363 - DNA, 201 bp, Homo sapiens
caaaagtttatatataaagtttatataaaagtttatagtttcatttaataagccaaaagcctggaaatctatactttcataaaagtctgccatcacaaaastctcctgatattcagccaagtttgagaactacttgtcaatagtagagctgcttacatatgtggttttaagttttcaagtagacatgttaaaaataaatat

SEQ ID NO: 530364 - DNA, 201 bp, Homo sapiens
acaatgactttcagttccctgagctataaaaaggaagaataatagctaattctttgcatcatggtggcaattaaataagttactcgagacaaatacttagyaatatatccataaatgaatctaaaataaagagcactagacagtctctgccaactctacaattgaaacagaaacacactttaagcaattatctggtatttt

SEQ ID NO: 530365 - DNA, 201 bp, Homo sapiens
atctctcactcccagatgtttctctgagagaggtataattgtacagaggagggtcagatgtctggagtttgaatcctatctgacctcaggcaaattatttwatctacaatgactttcagttccctgagctataaaaaggaagaataatagctaattctttgcatcatggtggcaattaaataagttactcgagacaaatac

SEQ ID NO: 530366 - DNA, 201 bp, Homo sapiens
aagagctaagcattaatccctagaacttaataaatgttagctgctatcagtagtaatattagacttgttttttaataatctctcactcccagatgtttctstgagagaggtataattgtacagaggagggtcagatgtctggagtttgaatcctatctgacctcaggcaaattatttaatctacaatgactttcagttccc

SEQ ID NO: 530367 - DNA, 201 bp, Homo sapiens
atcatcataaacaatagctgtcaacattatgaaatatatgtaatgatgactttcaataaagtgccccaatggcactccttctagaattaggaattacagayctaataactgtctagtgtttagtagggtctcttttttttgattcatgaagaattcttttcttctgagattgtttctatacatgtactatgttggtattac

SEQ ID NO: 530368 - DNA, 201 bp, Homo sapiens
aaaacaagataatcgattccatcttgagtttgaaagagatgaatctaggacaggtgaaagaaagtcccattttacacagagaattagagaaaggagctctyttgtcccaaatagaagacaagctaaaagaaataatttcaataatttatagatggcagatccttaagaacttttgaacaaaaattggggataaccagttat

SEQ ID NO: 530369 - DNA, 201 bp, Homo sapiens
ctagttgatattgccatgaggaagtaacagatcttctcactggatccccccaaaaaaaacacaaatcaagattttcgtgtaaaattacccaactttcaaaygttggctcaattaataagcaataacactggatgagggaaacaaaacaaataatgaaaaacacaacatgggtttggcctcatcacatccagtctaaagggt

SEQ ID NO: 530370 - DNA, 201 bp, Homo sapiens
tcactgggcaagggctcctgagctctagttgatattgccatgaggaagtaacagatcttctcactggatccccccaaaaaaaacacaaatcaagattttcrtgtaaaattacccaactttcaaatgttggctcaattaataagcaataacactggatgagggaaacaaaacaaataatgaaaaacacaacatgggtttggc

SEQ ID NO: 530371 - DNA, 201 bp, Homo sapiens
attgaaacagaaacacactttaagcaattatctggtattttaaagcagtacagacagtcctgctttttaacagactgccttatgagaatctgtagcctaartcagtggttctcaaaactagtggtacatcagaatcacctacagagccttgagaatataaaaattttagaccccttgctatagtttcatttaataagccaa

SEQ ID NO: 530372 - DNA, 201 bp, Homo sapiens
ttttttttgttttattctccatgagaattatctatgattctaacccagtattttactgttttgaaattgctaaaagtttttggagtcactatgactttttwaatcagagttagctgaagggactgaggctctagataatcatttcttaagtgaacacagaaggatgtgcctgataagctggttttcattgatggtggagca

SEQ ID NO: 530373 - DNA, 201 bp, Homo sapiens
ctagttaattattttccactagcgaatgtgttggtaaactagtccatgggcaaaatctggcctaccacctgttttgtaaatgaagttttctcccacaaccwtgctcatttgttgtatattgtctatgactctttgccctacagtgacagagttgagtagttggcagcagagactgtatggccccccaaagcctataatact

SEQ ID NO: 530374 - DNA, 201 bp, Homo sapiens
gaatatggataaataatggatggatgaataggttgatgaagattattgctgaagttaaatgtcagaaataaagaacttttattcttcctgcctatgaagaygaagtgttttaaaaataagatgtcccatatggcttaatgtataataccagttaaaattctaatatagtttgcgtaagttgaggaagtgttagggaaattt

SEQ ID NO: 530375 - DNA, 201 bp, Homo sapiens
atgtataataccagttaaaattctaatatagtttgcgtaagttgaggaagtgttagggaaatttatgtggaaaaatttgcaacaaatgcgatgatttatamcaagtaaaacagcaacactggggcagaggcttagccaactttaaaacaatcctaatatgtaatgatacaaaatgagtaataatttatttaataaatcaaa

SEQ ID NO: 530376 - DNA, 201 bp, Homo sapiens
gatttataacaagtaaaacagcaacactggggcagaggcttagccaactttaaaacaatcctaatatgtaatgatacaaaatgagtaataatttatttaayaaatcaaaataggacaaagggaataggaagtccagaaatgaatcaaaattggcacttcatattatgtattgaattaatgactttgcttccctgtgcaagt

SEQ ID NO: 530377 - DNA, 201 bp, Homo sapiens
cacatggatacataaggggaacaacacacactggggcctatcagagggtgggaggagggacaggatcaggaaaaataactaatgggtactagtcttaatasctgggtgatgaaataatctgtacaacaaactcctatgacacaagtgtacctgtgtaacaaacctgcacatgtacccctgaactaaaataaaataaaaaaa

SEQ ID NO: 530378 - DNA, 201 bp, Homo sapiens
gagagatgggatctcacgctatcactcaggctggaatgcagtggtgcaagcataacttaccacaaccttgaactcctgggctcaagcagtcctcttgcctsaggcttccaagtagctgggactacaggcatgcactacgatgaccatctaattttttattttttgtagagatgagctcttgccatgttgcccaagctggtc

SEQ ID NO: 530379 - DNA, 201 bp, Homo sapiens
aaaggcaatgtatctgatgtaaatacacctgatgatcttaaacgttgaaaggacaaattgtaaaaagtgattttgcaaagagttcacagttccctactackgccaccctatgaatgaggaccattgttacttttttagtaggacaaaatatgccaaatcttttgaaacattcaaaagataagaaaaagtacttttttatta

SEQ ID NO: 530380 - DNA, 201 bp, Homo sapiens
aaaacaaaatgtagaaaactacaaattttatttaatgatatgaaaacttaattggataatcaagggattttgcatgtgctggataggaagatttattatgrcatcagttcttactaaatcaaaaagttaaatgtaacaataaaaatgattttggctgggcgcagtggctcccgcctgtaatcccagcactttgggaggcca

SEQ ID NO: 530381 - DNA, 201 bp, Homo sapiens
gggcggatcacgatgtcaggagatcgagaccatcctggccaacatggtgaaaccccgtttctactaaaaatacagaaaattagccaggcatggtggcacaygcctgtagtcccagctactcgagaggctgaggcaggagaattgctggaacctgggaggcggaggttgcagtgagccgagattgcaccactgcactccagc

SEQ ID NO: 530382 - DNA, 201 bp, Homo sapiens
tgcccaaacctttattcagcacttccagtcctaggcaaccactaatctgctttctgtctttatagattttcctatctggacttttcatataaacagattcrtacaatacgtagtgttccgtggctgactcatttattatgtttttgaaattcactcatgttgtcacatgtgtcaatacttcattcctttttattaccaaat

SEQ ID NO: 530383 - DNA, 201 bp, Homo sapiens
ttttattttgaaatcatttcagacttacagaaaagttgcaaagatagtgcaatcaattgctgtatacccttcacccaaattttcgatgttaccactttacyatatttgctatatttttctttgtctctcttgaaactttttaatgttatattttgtacttaaagcatctcttcctaaaggttactctgagaatatttgaaa

SEQ ID NO: 530384 - DNA, 201 bp, Homo sapiens
aatataattacatataaaatataaaaggcaaaacaagcaaggacttttaagattaagtagtggagattaaacagcaaagcaaagcagcatgtaacacttayttgcattagtggtaaatttggtttaggggagagaggggaacatgattaggggcttttaaggttgctttccatttcttggcaattagtgtctttttatatc

SEQ ID NO: 530385 - DNA, 201 bp, Homo sapiens
cctctgggctacaagactttgagttgccctgttgataatactggtgctggtattatggtctacacacaacaacattcattttcctcttttccctctccttygttttcctttgtcccattattctcatcatttgaggaagatgaaaaataattctgtcgggacttgagtttcctgctatatggtcgattttcccagtggaaa

SEQ ID NO: 530386 - DNA, 201 bp, Homo sapiens
aaatcatttcagacttacagaaaagttgcaaagatagtgcaatcaattgctgtatacccttcacccaaattttcgatgttaccactttaccatatttgctrtatttttctttgtctctcttgaaactttttaatgttatattttgtacttaaagcatctcttcctaaaggttactctgagaatatttgaaacaataagtta

SEQ ID NO: 530387 - DNA, 201 bp, Homo sapiens
cgggcatctgtaatcccagctactcgggatgctgaggcaagagaattgctttaacacgggaggcagaggttgcagtgagccaagatcgcgccactgcactycagcctgggccacagagtgagactgtctcaaaagaaaaaaaagggaggggtggggggtacacctgaatagagcacttaaccatgaatggagcttgtacga

SEQ ID NO: 530388 - DNA, 201 bp, Homo sapiens
ttatgtatattattttagctaaaactaccttatagataacagattattgggagtcaaaataaagtgttccttagctgtagaatataccacaggtaggtatrtgtcattttaaattaagtctatttaatgtgtagaaaaagatgcttgtagtgggttatcaatgatcagtgactgttagtttttacgttttttctttttaca

SEQ ID NO: 530389 - DNA, 201 bp, Homo sapiens
ataattgtaactcactgtagcctccaactcctgggctcaaacgatcctctcacctcaggctcctgagtagctgggactacagacgtgcaccactactcccrgctaatttattttatttatttttctttttgtagagacagagtctcactgtgttgtccaggctgatcttgaactcctgggctcaagagatactcccacttc

SEQ ID NO: 530390 - DNA, 201 bp, Homo sapiens
gtagctgagactacaggtgtgtgccaccacgcccagctaatttttgtatttttagtagagacggggttgcactgtgttggccaggatagtcttgatctctygacctcgtgatccacctgcctcggcctcccaaagtgctgggattacaggcatgagccaccgtgcccagccatcagatatcttctggaagctgggaattgc

SEQ ID NO: 530391 - DNA, 201 bp, Homo sapiens
agtcctcttgcctcaggcttccaagtagctgggactacaggcatgcactacgatgaccatctaattttttattttttgtagagatgagctcttgccatgtygcccaagctggtctcaaactcctgggctgaagctgtcttcccctcttggcccctcaaagcagtggagttacaggcaccagccatccccagccaactgtct

SEQ ID NO: 530392 - DNA, 201 bp, Homo sapiens
agcaactttgtttaacttaatacacatttatttacaatgtttttttaaaccacaaaattaagtacagtaatgttggtgttccttgaactaaattctaccartggtaaaaatggagtgtactataattgatccagaggcacagatcttactttctcaaaatagtttcatatgtattttcacttcacacaagttattctaaac

SEQ ID NO: 530393 - DNA, 201 bp, Homo sapiens
ggatcttgaaataagcagattgttttgcacttgcattgagattcaaataatgctgctagaactgtagtttggagtcagaaaacatatctgctgcaaatctktgttggaatggagatctcatctctttttaaaatatctgacaacaaaggaagtttatgcagcttaacattatgattcaaacattagttgttgaaatgacta

SEQ ID NO: 530394 - DNA, 201 bp, Homo sapiens
taaattagtgcttcccaatcctggccttgcaggtttctcagtcatctgtgggacttctttaagaaagtttcagggtttctgattcaggagttgtcacagcrctggcctgggtaaaatcttgctgccattcttaatggcagatgtatcatgaaaactgacacaccagagcatattcaatcttctgaaattatcttgtttcag

SEQ ID NO: 530395 - DNA, 201 bp, Homo sapiens
caaatggatcttgaaataagcagattgttttgcacttgcattgagattcaaataatgctgctagaactgtagtttggagtcagaaaacatatctgctgcaratctttgttggaatggagatctcatctctttttaaaatatctgacaacaaaggaagtttatgcagcttaacattatgattcaaacattagttgttgaaat

SEQ ID NO: 530396 - DNA, 201 bp, Homo sapiens
caagaatttttcattatctgaaacaattctgtacccgtttaacaatatcttcccattcctccctcccctgtagaccttggtagtctctcgtctactttctrtctctatgaatttgcatattctaagtatctcatgtaagtggcaccacagacaggcatatgactttgtcacttgaaaagcatttacagaattctatttgat

SEQ ID NO: 530397 - DNA, 201 bp, Homo sapiens
gacggggtttcaccatgttggccaggatggtctgtatctcctgacctggcagcctcggcctcccaaagcactgggattacaggcgtgagccactgcgcccrgactattgcatttttaaatgcttaaaaatatttttgatgctatttaattgagtcattaataacatcactaaaaaattaggtaacttctccagggattccc

SEQ ID NO: 530398 - DNA, 201 bp, Homo sapiens
gccactgtggaaaacactttggaggttccttaaactataagtagaactaccgtatgatccagcaatcccactcctgggtatatccccgaaaaaagaaaacrgcgtatcgaagagatacctgcactcccttgttcattgcagctctgttcataataaccgaaatatggagtcagtctcagtgtccattggcagataaagaaa

SEQ ID NO: 530399 - DNA, 201 bp, Homo sapiens
agttgatgactagctacctagattagtaatcttggagttgtgtatttcagtttactaatgtaaggagtagaatgaaaagtgaaaagttagtgaactgaggsatccagtattacttaagtgcctagattcccaacttgtttcacagggatttttcttttaatgagaaaaacaaaaatcataccagatgcaaatgtgtattca

SEQ ID NO: 530400 - DNA, 201 bp, Homo sapiens
agatcgagaccatcctggccaacatggtgaaaccccgtttctactaaaaatacagaaaattagccaggcatggtggcacacgcctgtagtcccagctactygagaggctgaggcaggagaattgctggaacctgggaggcggaggttgcagtgagccgagattgcaccactgcactccagcctgggcgacagagtgagact

SEQ ID NO: 530401 - DNA, 201 bp, Homo sapiens
taccttgaaacaaaaaaatacatcataccaaaatttataggatgcagtgttaagagggaagtttgtagctgtagatgcttacattaaaaaggaagagagakcaaaatcaaaatcgacagcctggctgtgatttggttctttgaaagtatcaacaaaattgacaaaccgctagctagatgaagggagaaagaagactggaat

SEQ ID NO: 530402 - DNA, 201 bp, Homo sapiens
gccattgcactccagcctgggcaacagggtgagactccgtctcaaaaaaaatagaatttgtgatatcagtaacataaagtgggaatgtggagccataatgrtgcagagttattgtattcagttggcattattgatgtaaaatagttataactttaagatgttttatgtaattgattgcaaagaaaatacttacagaatata

SEQ ID NO: 530403 - DNA, 201 bp, Homo sapiens
acacagcaacatgaagccatataaaagtataacattctgtgttaaaggcaaataaatggacaaatatagtaagtagcctatattattgtaatcctggtatrtaagttgatttttaattcttgcatagaatgtaacagacaaaagtattaaaaaaaactgtaagtctatgttaggggttaatacaacatataaagatataat

SEQ ID NO: 530404 - DNA, 201 bp, Homo sapiens
ttcccttccttcccttgctactatttcttctctcccttttctttctttctctctctctttttttttttttttttttgactgtctccctctgtctcccaggytgaagtgcagtggcatgaccacggcttactacatgtagccttaacctccagggcttaaaccacgcttctgcttcagcctccttagtagctgggactgcag

SEQ ID NO: 530405 - DNA, 201 bp, Homo sapiens
actcagagtgctgaagggaatggtagcatagtttggaagctgcaggaaacagaagtgattgctgcagcacgtaagagctgcggagatctgcacttctgctrgaagaggtctgagggacacagcgattatgggtttctgagaggaaacagcgataagttgctagggaaattaagactgtcagaaacacacatagaagcccag

SEQ ID NO: 530406 - DNA, 201 bp, Homo sapiens
tggtgtatatatatcacaaattttattgtaagataccataagtaatataataaaaaaataattggatacccaggaataaatctaaagagagatgtgcaagrcatctctacttgaaaactacaaaacattattaaaagaaaataaaacctaaataaattgaagatatgttcatggataggaagactcaatattcttcctttc

SEQ ID NO: 530407 - DNA, 201 bp, Homo sapiens
gtcatcaacatgttggagtaggaagtttcaggcccttattcctccatggaaacaccaagttaattgcaatataatgacaaggacatgttagtgagaattayagagaccagttgagaagctgcagcactcaggctaaaacattaaaaagaagggactccttcaaaaggagtggaaaagtttgtggcattttgcatgtgtgtt

SEQ ID NO: 530408 - DNA, 201 bp, Homo sapiens
tgattttggctggctgagacccattttagacttctgaacctacagaagtgtaaaataatgaatttgtgttgtttaaatgttaagtttgtggtatttgttayggcagcaataggacacaaatacacctttgtttagaattttgtctcttagtacctacatcaattatttccctaaatctagccttattttagaagtaactgc

SEQ ID NO: 530409 - DNA, 201 bp, Homo sapiens
agacattcattgttgcctcggagaattcagagaagagtctgatcattttctcttcttccctccttctcctcctccccccaccatagcatcctgccattggygcccaaaatttatgtccttctcatacgcagaatacattcattccatcccagtaccccaaaattcttaactcgttccaccaccacatacacatacctcggt

SEQ ID NO: 530410 - DNA, 201 bp, Homo sapiens
tagttatatgcaaaaggcacataaccattgtctccagtgctccattcctagcatataccacttagtctgttttatcctactatagcagaatacctgagackgggtaagttaaaatgaacagaactttaatggcgtatattctagaggctgggaaatccagtatcaagatgctggcatcttgcgagggcttcttgttgcatc

SEQ ID NO: 530411 - DNA, 201 bp, Homo sapiens
aaagctagacaaggaaataagaaacacgtatacatatgtaactaacctgcacaatgtgcacatgtaccctaaaacttaaagtataataaaaaaaaaaaaaaaagaaacaaattcttaatgattgaaatgaaattactgacaggttattagaaagaggatggttgaacaagtattctatagccaagtcaaaagataaaccaa

SEQ ID NO: 530412 - DNA, 201 bp, Homo sapiens
caaagctagacaaggaaataagaaacacgtatacatatgtaactaacctgcacaatgtgcacatgtaccctaaaacttaaagtataataaaaaaaaaaaaaaaagaaacaaattcttaatgattgaaatgaaattactgacaggttattagaaagaggatggttgaacaagtattctatagccaagtcaaaagataaacca

SEQ ID NO: 530413 - DNA, 201 bp, Homo sapiens
gattttgcctaataggaatttaatattagggtaaataatcttttgtttgccttgttgaataagagccagtggatgttttaatttttcaaatgatgatatttcactcaaaaatttaagtatgaaaagaatgaaaatctaaatgaatatttataaatgcctcacatagttctgattttaatttgtttttaatttcctttttcg

SEQ ID NO: 530414 - DNA, 201 bp, Homo sapiens
gccaccgcacctggcctagagtaggtttgctgatgacacaaactcttagtttttcttaacatattttgatttcctttcaattactgaaggatattttcacygggtatcagattctagtgtgacagttctttactttcagtacttgaaaaatgtgccaattctttctgccctccatggtttctgataagaaatctgtcattt

SEQ ID NO: 530415 - DNA, 201 bp, Homo sapiens
ctagattttgcctaataggaatttaatattagggtaaataatcttttgtttgccttgttgaataagagccagtggatgttttaatttttcaaatgatgatatttcactcaaaaatttaagtatgaaaagaatgaaaatctaaatgaatatttataaatgcctcacatagttctgattttaatttgtttttaatttcctttt

SEQ ID NO: 530416 - DNA, 201 bp, Homo sapiens
caaaaaaattaaaaaattagccgggcacggtggctcacacctgtaatcccagcactttgggaggccaaggcgggcagatcacgaggttaggagatcgagascagcctggctaacatggtgaaaccctgtctctactaaaaaaacaaaaaagccaggcgtggtggcccacgcctgtagtcccagctactcgggaggctgagg

SEQ ID NO: 530417 - DNA, 201 bp, Homo sapiens
tgtaatcccagcactttgggaggccaaggcgggcagatcacgaggttaggagatcgagagcagcctggctaacatggtgaaaccctgtctctactaaaaawacaaaaaagccaggcgtggtggcccacgcctgtagtcccagctactcgggaggctgaggcaggagaatcacttgcacccaggaggcggaggttgcagtga

SEQ ID NO: 530418 - DNA, 201 bp, Homo sapiens
gcactttgggaggccaaggcgggcagatcacgaggttaggagatcgagagcagcctggctaacatggtgaaaccctgtctctactaaaaaaacaaaaaagmcaggcgtggtggcccacgcctgtagtcccagctactcgggaggctgaggcaggagaatcacttgcacccaggaggcggaggttgcagtgagttgagagtg

SEQ ID NO: 530419 - DNA, 201 bp, Homo sapiens
attttcgatgttaccactttaccatatttgctatatttttctttgtctctcttgaaactttttaatgttatattttgtacttaaagcatctcttcctaaargttactctgagaatatttgaaacaataagttaataaagtttataatgcaaatgttattttctttgcagttgccttgccaactaatacgacctcatcgaga

SEQ ID NO: 530420 - DNA, 201 bp, Homo sapiens
aaatacagaaaattagccaggcatggtggcacacgcctgtagtcccagctactcgagaggctgaggcaggagaattgctggaacctgggaggcggaggttrcagtgagccgagattgcaccactgcactccagcctgggcgacagagtgagactccgtctcaaaaaaaaaaaaaaaaaaaaaaaagaaaatttctccaatg

SEQ ID NO: 530421 - DNA, 201 bp, Homo sapiens
accattgtctccagtgctccattcctagcatataccacttagtctgttttatcctactatagcagaatacctgagactgggtaagttaaaatgaacagaaytttaatggcgtatattctagaggctgggaaatccagtatcaagatgctggcatcttgcgagggcttcttgttgcatcatcacctggcagaggacaagagg

SEQ ID NO: 530422 - DNA, 201 bp, Homo sapiens
ttatcctactatagcagaatacctgagactgggtaagttaaaatgaacagaactttaatggcgtatattctagaggctgggaaatccagtatcaagatgcyggcatcttgcgagggcttcttgttgcatcatcacctggcagaggacaagagggcaagagagagcaagagggggctgcactcacacatggcggtggagcct

SEQ ID NO: 530423 - DNA, 201 bp, Homo sapiens
tgaacagaactttaatggcgtatattctagaggctgggaaatccagtatcaagatgctggcatcttgcgagggcttcttgttgcatcatcacctggcagargacaagagggcaagagagagcaagagggggctgcactcacacatggcggtggagcctcatggccttatcttcttaaaggtccccactcttaatactatta

SEQ ID NO: 530424 - DNA, 201 bp, Homo sapiens
gcattctgcctgcaggccccccacatctcatgtcctcataaacaaaataatttatttcatctaaatagccccacaagtcttaacttgtaatagcttcaacrtaaaagtccagagtctcatctaaattaaatgtgagagtagtctttttttaaatgaatcttttccctttttgcttttatgctccaaaggttcttccttatc

SEQ ID NO: 530425 - DNA, 201 bp, Homo sapiens
ataaacaaaataatttatttcatctaaatagccccacaagtcttaacttgtaatagcttcaacataaaagtccagagtctcatctaaattaaatgtgagastagtctttttttaaatgaatcttttccctttttgcttttatgctccaaaggttcttccttatctagtgactgtgtaaactgtcattaatagtcaagtgaa

SEQ ID NO: 530426 - DNA, 201 bp, Homo sapiens
cttctagattttgcctaataggaatttaatattagggtaaataatcttttgtttgccttgttgaataagagccagtggatgttttaatttttcaaatgatgatatttcactcaaaaatttaagtatgaaaagaatgaaaatctaaatgaatatttataaatgcctcacatagttctgattttaatttgtttttaatttcct

SEQ ID NO: 530427 - DNA, 201 bp, Homo sapiens
gcggtgacgggtgcctataatcccagttactcgggagactgaggcaggagaattgcttgaacccgggaggtggagtttgcagtgagccgagatcacgccayggcactccagcctgggcgacagagtaagactgtctgaaaaaaaaaaaggaaagaaatgagtaaaatattaccttattataaattcccttttcctcccctg

SEQ ID NO: 530428 - DNA, 201 bp, Homo sapiens
catccagctgcatccatgttgctgcaaagaacattatttcattattttttatggttgtatagtattccatggtgtatatgtatcacattttctttatctgmtccaccactgatgggcacctaggttgattccacatctttgctattttgaatacagctgctgcaataagcatgagagtgcaggtatctttttggtagaaca

SEQ ID NO: 530429 - DNA, 201 bp, Homo sapiens
aggtagtactaatatacaagatggcgtttctagaatgtatgacactgaagtgactttttgtaaaaatatattaggaaaattatttcttaaaattatgtgawtatttggaataaaattggtgcttatgtgagaacagggttaaataatactgtctttctattttcctaatatattagaatccttgcttttgaaagcaaaaat

SEQ ID NO: 530430 - DNA, 201 bp, Homo sapiens
ctggcttcatttgattcatgttctaaaaatatatcttttcccagtctttttcttttgacctgcttatatctagaatgagtttttttaattaaatagcatayagctgcatttagaaaaaataaactttgtcaagctctgttttaattggtgttttaggccatttacatgtaatgtacttattgatatgttagggcttaagct

SEQ ID NO: 530431 - DNA, 201 bp, Homo sapiens
tcacagcactggcctgggtaaaatcttgctgccattcttaatggcagatgtatcatgaaaactgacacaccagagcatattcaatcttctgaaattatcttgtttcagctttactaggaaacaaatccttatttaaaatccatttagcacgtttgtataaattacattttgaagtaggtaaacatttaggaagcagcaaca

SEQ ID NO: 530432 - DNA, 201 bp, Homo sapiens
gtgatacaattatttttttaaagcctagatgatgaactggattctttccatgatttgaagaaacaggaaacagaagaagagttaattgaaaatgattataragttagtacctcgaaaataaccaagcagtcttttaaagaaatagaaaaaggtaaaataaatattttagaacaatcaattcagtagtaactttgtcaagta

SEQ ID NO: 530433 - DNA, 201 bp, Homo sapiens
atatgtgtaccaatttaatctagaaattgttaaaagaagttgtaggaactttatctgatagaattatttggtttactgatagctttcttttttttttttttgagagatgggatctcacgctatcactcaggctggaatgcagtggtgcaagcataacttaccacaaccttgaactcctgggctcaagcagtcctcttgcct

SEQ ID NO: 530434 - DNA, 201 bp, Homo sapiens
acaagcgtgagccaccacgcacagctttttttctcttttttgaaatggagtctcactctgtcgcccaggctggagtgcagtgctgccatctcagctccctkcaacctccgcctcctgggttcaagcagttcttctgcctcagcctccctagtagctgggattacaggtgtacgccatcacacctggctaatttttatatta

SEQ ID NO: 530435 - DNA, 201 bp, Homo sapiens
acccgccaccacgcctggctatttttttgtatttttagtagagatggggtttcaccatgttagccaggatggtctcgatctcctgacctcatgatctgccygcctcggcgtcccaaagtgttgggattacaggcgtgagccaccgcgcccagcctcattttattcttaatagatatatcaaataccattagatcatatatt

SEQ ID NO: 530436 - DNA, 201 bp, Homo sapiens
cccaggctggagtgcagtggtgcgacctcggctcactgcaagctccgcctcccgtgttcacaccattctcctgtctcagcctcccaagtagctgggactaygggcacccgccaccacgcctggctatttttttgtatttttagtagagatggggtttcaccatgttagccaggatggtctcgatctcctgacctcatgatc

SEQ ID NO: 530437 - DNA, 201 bp, Homo sapiens
cctgggctcaagcaatccttctgcctcagcctcctgtgtagctaggattacagacgttcgccaccacacctggctaattaaaaagttttttttttttttttgatagaggcattgtcttgctttgttgcccaggctggtctctaactcttggcctcaagtgatcctcctgccttggcttcccaaattgttggaattacagac

SEQ ID NO: 530438 - DNA, 201 bp, Homo sapiens
tctaatagttcttcttggtattacatttgttttaatttaggatctttaagatggagagtacccctccaatgattagaagtcatagaagttggaagtaaagsgtttttcttgtttgtttgtttgtttgtttttgagacagagtctcactctgttgctcaggcaggagtgcagtgatgatcatagatcactgcagcctccagc

SEQ ID NO: 530439 - DNA, 201 bp, Homo sapiens
tgtggtgaaactctgtctctactaaaaaatagaaaaactagctgggtgttgtggtgggcacatgtaatcccagctacttgggaggctgaggcaagagagtygcttgaacccaggaggcagaggttgcagtgatctgagatcacgccattgcactccagcctgggcaacaagagcaaaactccgtctcaaataaaaaacaaa

SEQ ID NO: 530440 - DNA, 201 bp, Homo sapiens
gctagacaaggaaataagaaacacgtatacatatgtaactaacctgcacaatgtgcacatgtaccctaaaacttaaagtataataaaaaaaaaaaaaaaasaaacaaattcttaatgattgaaatgaaattactgacaggttattagaaagaggatggttgaacaagtattctatagccaagtcaaaagataaaccaatat

SEQ ID NO: 530441 - DNA, 201 bp, Homo sapiens
aaaagcagttttatctttttaaagtgctatagtaaacttctagattgctgtgatacaattatttttttaaagcctagatgatgaactggattctttccatkatttgaagaaacaggaaacagaagaagagttaattgaaaatgattataaagttagtacctcgaaaataaccaagcagtcttttaaagaaatagaaaaagg

SEQ ID NO: 530442 - DNA, 201 bp, Homo sapiens
ggttggtctgagacttgggtaacagtttaaaatcctaatgcatttctcaaagcttttgctatgctgctctgggtgttttttgtgcaggtaaagaggcattraagtgttagccaagacttaggtaatagttttaaactgagctccattctccaagcgtttgctctactgcttttggtctgtcctgtgcccgcctgagcggct

SEQ ID NO: 530443 - DNA, 201 bp, Homo sapiens
atatggtagttgtgttttcgtttttttgggaacctgaatacttgtgtttttcgtaatggctgtgctaatttatatccccaccaacaatgtaaaagagtttyccttctccacatcctcaccaacgtttattactttttgtctttttcatagcctttctaactgggatgagattgatacctgatcatggtttcgatttgcatt

SEQ ID NO: 530444 - DNA, 201 bp, Homo sapiens
gttttcttttagtaataaggtacagttattccaacttcctgattatgacttttcttgccttctctcagttgtcatttaacatgtttttaatattagttggrgaggtttttggtgtttttttttttttttttttttttgagatggagtcttgctcttttgcccagattggtgtgcagtggtgcgatctcggctcactgcagc

SEQ ID NO: 530445 - DNA, 201 bp, Homo sapiens
tagtagtatcttattatgggctttgatcattttgatattttgataaattttctagttctttataaattgagaaaattggagtaaattgaaaaggtacagaytttatattcagggactgaagataatcgaagttttcatctaaagggagttagtttctatttgaaaaaaattgagaaagtgaaaaattgctcttcagaataa

SEQ ID NO: 530446 - DNA, 201 bp, Homo sapiens
gaaggtgtatattgaaatatctaactttttctaccctttagttaaatgaagcaagtgaagaaaacaggaagatagacattcaggctaaaagagttcaagcwcgtttagataatttacaggtaagttgcctgttcttctctacagacagaagtatgtttttagatgattacctttgagtttactcatttagatacaattgtt

SEQ ID NO: 530447 - DNA, 201 bp, Homo sapiens
gttcacatctgtagtctcagcactttgggaggccaaggaaggaggatcgcctgagcccagaagttcaagaccagccttagcaacatagtgacaccctgtcyctacaaaaaataaacaaaattagccaggtttggtgatgtgcgcctgtagtcctagctacttgggaggctgagatgggaggattgcttgagctggggaggt

SEQ ID NO: 530448 - DNA, 201 bp, Homo sapiens
ctaaaatatatgtatatgcttttaagacatctggagtcttgtacatttttcataaaatgaagtaaatgatcttacaaaccattaatattttagggaaaaaygacaacttcagttgtgatctaagttaatcatgaatgctgtctctgttttgttacattggttagtaatatcaaccagattagatagtagattgggaaaccc

SEQ ID NO: 530449 - DNA, 201 bp, Homo sapiens
tgtactgcatacttaggattttatacttttctttatatgtgttatagttcagataacagtgtacttattaataaaaacattttcactaaaatatatgtatrtgcttttaagacatctggagtcttgtacatttttcataaaatgaagtaaatgatcttacaaaccattaatattttagggaaaaacgacaacttcagttgt

SEQ ID NO: 530450 - DNA, 201 bp, Homo sapiens
gttaggcaatttgacagaaaccaaaggcatggctcacgcctgtaatcccagcactttgggaggccgaggcgggcagatcacctgatgtcaggagttcaagwccaacctggccaatgtggtgaaactctgtctctactaaaaaatagaaaaactagctgggtgttgtggtgggcacatgtaatcccagctacttgggaggct

SEQ ID NO: 530451 - DNA, 201 bp, Homo sapiens
catgaacccaggaggcggagcttgcagtgagctgagattgtcccactgcactccagcctgggcgacagagagagaatatgtctaaaaaaaaaaaaaaaaaattaaaaaaatttaaagattacattacatacttttggatcactgttcctgaaaaaaattcatcagagattccattcccattcccatatgtaaacatatatt

SEQ ID NO: 530452 - DNA, 201 bp, Homo sapiens
ttacccatatcacttgatagacttttgggttgtttgcatttgttggctgttatgaatggtgttgctatgaacatttatccacaaatttttgtatgcacatrttttttcatttttcttgactacatacctaagagtggaactgctaaagtgccagactgtttgtcaaagtggttcaacagttgttgagtcctgccagcagtc

SEQ ID NO: 530453 - DNA, 201 bp, Homo sapiens
ttagagagacttaggagacacaaaaaccaagagcaccaagcaggcctgattatatcttgtttttgttctggtggtgggttttttgtttgtttgtttgtttggtaacagctttattgagatataattcacatatacaagtagcattttaactgtgcaattcagtgtttttttttctttattcacagagttgtgcaaccatcg

SEQ ID NO: 530454 - DNA, 201 bp, Homo sapiens
cttagagagacttaggagacacaaaaaccaagagcaccaagcaggcctgattatatcttgtttttgttctggtggtgggttttttgtttgtttgtttgtttggtaacagctttattgagatataattcacatatacaagtagcattttaactgtgcaattcagtgtttttttttctttattcacagagttgtgcaaccatc

SEQ ID NO: 530455 - DNA, 201 bp, Homo sapiens
acttagagagacttaggagacacaaaaaccaagagcaccaagcaggcctgattatatcttgtttttgttctggtggtgggttttttgtttgtttgtttgtttggtaacagctttattgagatataattcacatatacaagtagcattttaactgtgcaattcagtgtttttttttctttattcacagagttgtgcaaccat

SEQ ID NO: 530456 - DNA, 201 bp, Homo sapiens
aacttagagagacttaggagacacaaaaaccaagagcaccaagcaggcctgattatatcttgtttttgttctggtggtgggttttttgtttgtttgtttgtttggtaacagctttattgagatataattcacatatacaagtagcattttaactgtgcaattcagtgtttttttttctttattcacagagttgtgcaacca

SEQ ID NO: 530457 - DNA, 201 bp, Homo sapiens
gagtagtgagtgagtgtgaaagtctaagacatgcaggctacagtaaattttataaacagtatgcacttagactacactaaatttagaaaaaaaaattttttcttcattaacaaattaagcttagcttactgtaatctttttactttataaactttttagtttttttaactttttgactctgtaatattaacacttcattta

SEQ ID NO: 530458 - DNA, 201 bp, Homo sapiens
atggacaaatatagtaagtagcctatattattgtaatcctggtatgtaagttgatttttaattcttgcatagaatgtaacagacaaaagtattaaaaaaaactgtaagtctatgttaggggttaatacaacatataaagatataatttgtggccgggtgcggtggctcacgcctgtaatcctagcactttaggaggctaag

SEQ ID NO: 530459 - DNA, 201 bp, Homo sapiens
tataagaatttcagcagatttctcagcagaaaccttgcaggccaacaggcagtgggatgatacattcaaagtgcaaaaaaaaaaaaaaaacaaacaaaaaacaaaactgttaaccaagagtactatatccagctaaaccgtccttaagactttctcagataaacagtagttgagggagttcagtaaccattacacctgccc

SEQ ID NO: 530460 - DNA, 201 bp, Homo sapiens
tacaatgagtttggaagaattctctacccttcagttttttgggatagtttgagaattggtatttgttctttaaaagttttaattcagcagtgaagtcattkagtgaatttaaaagtacagttcagcagtgaagccatttagttcgggcttttctttgttgggaaactttttactacaattcaatcttgttacttatgattg

SEQ ID NO: 530461 - DNA, 201 bp, Homo sapiens
atagccccacaagtcttaacttgtaatagcttcaacataaaagtccagagtctcatctaaattaaatgtgagagtagtctttttttaaatgaatcttttcyctttttgcttttatgctccaaaggttcttccttatctagtgactgtgtaaactgtcattaatagtcaagtgaaattcacaaatttggaggctctttgatt

SEQ ID NO: 530462 - DNA, 201 bp, Homo sapiens
acccttcacccaaattttcgatgttaccactttaccatatttgctatatttttctttgtctctcttgaaactttttaatgttatattttgtacttaaagcrtctcttcctaaaggttactctgagaatatttgaaacaataagttaataaagtttataatgcaaatgttattttctttgcagttgccttgccaactaatac

SEQ ID NO: 530463 - DNA, 201 bp, Homo sapiens
atgtaacacttacttgcattagtggtaaatttggtttaggggagagaggggaacatgattaggggcttttaaggttgctttccatttcttggcaattagtstctttttatatcctttaaaatattttattttgaaatcatttcagacttacagaaaagttgcaaagatagtgcaatcaattgctgtatacccttcacccaa

SEQ ID NO: 530464 - DNA, 201 bp, Homo sapiens; identical to SEQ ID NO: 221980

SEQ ID NO: 530465 - DNA, 201 bp, Homo sapiens
actctgagaatatttgaaacaataagttaataaagtttataatgcaaatgttattttctttgcagttgccttgccaactaatacgacctcatcgagacctyggactgagtgttgtagtgatgcaggtgactctcctttgaaacctgtcagctgtccaaaatctaaagcatcagacaagcggagtttacttccacatcagat

SEQ ID NO: 530466 - DNA, 201 bp, Homo sapiens
cttgcttgaattttaatgtaaattcagtacttgttggtcagccagtacgatttattagagcgaggaaagattgatcaaagtgtagcaaatacttctttagytgttggtttttcatttttctaggtttgagattggaaacccattttaccatatatttaattttctcatgctatttttttctttttttttttaattttagat

SEQ ID NO: 530467 - DNA, 201 bp, Homo sapiens
ttgagattggaaacccattttaccatatatttaattttctcatgctatttttttctttttttttttaattttagatttagggggtacatgtgcaggtgtgytacatggatttattgtgtgatgctgaggtttgggcttcaactgaactcgtcatttaggataatggcatccagctgcatccatgttgctgcaaagaacatt

SEQ ID NO: 530468 - DNA, 201 bp, Homo sapiens
ctataagaatttcagcagatttctcagcagaaaccttgcaggccaacaggcagtgggatgatacattcaaagtgcaaaaaaaaaaaaaaaacaaacaaaaaacaaaactgttaaccaagagtactatatccagctaaaccgtccttaagactttctcagataaacagtagttgagggagttcagtaaccattacacctgcc

SEQ ID NO: 530469 - DNA, 201 bp, Homo sapiens
atgtttttatatatatgtataatttatataaataggaaacctggggctctgagaaattaagtgacttatttaatgtcacagggctagggccagggcagtgrtaagaggaataactaagtcttttagaagaagaagaggtggacacaagagagaagctccccgctggaagctagaactccagaactgagagattccagagtg

SEQ ID NO: 530470 - DNA, 201 bp, Homo sapiens
tctataagaatttcagcagatttctcagcagaaaccttgcaggccaacaggcagtgggatgatacattcaaagtgcaaaaaaaaaaaaaaaacaaacaaaaaacaaaactgttaaccaagagtactatatccagctaaaccgtccttaagactttctcagataaacagtagttgagggagttcagtaaccattacacctgc

SEQ ID NO: 530471 - DNA, 201 bp, Homo sapiens
ttctataagaatttcagcagatttctcagcagaaaccttgcaggccaacaggcagtgggatgatacattcaaagtgcaaaaaaaaaaaaaaaacaaacaaaaaacaaaactgttaaccaagagtactatatccagctaaaccgtccttaagactttctcagataaacagtagttgagggagttcagtaaccattacacctg

SEQ ID NO: 530472 - DNA, 201 bp, Homo sapiens
gcatcatttatcatgaaaaataaataatttttttgaactgtaaaaatgaaatctgtagaaggtattggaacttttggaatgtttcagttcaggtaaggtartactaatatacaagatggcgtttctagaatgtatgacactgaagtgactttttgtaaaaatatattaggaaaattatttcttaaaattatgtgattattt

SEQ ID NO: 530473 - DNA, 201 bp, Homo sapiens
aaaaaggatcagaaggcatacaaaggaacagggacattgatcaaatcaaagaagaaaacaaagcttcagaaactcaccctaaagaaatgcagatctctgaactttgtgatatatgatttaaaaactgtaaccgataatttaaaaatggaaagagaacacaaaaaactaagcaaagtcaggaaaatgatgcaagaacaaagt

SEQ ID NO: 530474 - DNA, 201 bp, Homo sapiens
gagtaggtcagagactcaaccccctcttgctggcttttgaagatggagaaagagggccatgagacatggaattcagataatcttttttcttttttttttttgaggcggagttttgctctgttgccaggctggagtgcagtggtgccatcttggctcactgcagcctccacctcccgggttcaagtgattctcctgcctcag

SEQ ID NO: 530475 - DNA, 201 bp, Homo sapiens
ctgccttccctacccccctaaccctgccttccttttctgtttccttcccttccttcccttgctactatttcttctctcccttttctttctttctctctctytttttttttttttttttttgactgtctccctctgtctcccaggttgaagtgcagtggcatgaccacggcttactacatgtagccttaacctccagggctt

SEQ ID NO: 530476 - DNA, 201 bp, Homo sapiens
tttggtggagtctttcggtttctttgcattgaagatcatgtcatccaaagaaggacaatttgactcatttccaatttttgtttgtttgtttgtttgtttgkgatggagtctcactctgtcgcccaggctggagtgcagcagcacgatatctgctcactgcaacctccacctcctgggttcacacaattctcctgcctcagc

SEQ ID NO: 530477 - DNA, 201 bp, Homo sapiens
ctgtagatgactttggttattttgacagtattaattgttccagtccatgaacatgaaatgttgtgtgtgtgtgtgtgtgtgtgtgtgtgtgtgtgtgtgtkatcttcagtttcattcatcagtgttttatagttttcatcgtggaaatctttcacttccttggttaaatttattcccagctattttattttatttttgtag

SEQ ID NO: 530478 - DNA, 201 bp, Homo sapiens
tctgtagatgactttggttattttgacagtattaattgttccagtccatgaacatgaaatgttgtgtgtgtgtgtgtgtgtgtgtgtgtgtgtgtgtgtgtgatcttcagtttcattcatcagtgttttatagttttcatcgtggaaatctttcacttccttggttaaatttattcccagctattttattttatttttgta

SEQ ID NO: 530479 - DNA, 201 bp, Homo sapiens
aaatttggggaatcttcagccaatatttcatcaaatattttttccactttctttcttgtcttctcttggatctccagtgactccttgtgctatttccccamagatttctgaggctccattcctttttttcccattattttcttcagtgttcttcagatagtttcttgatccatcttaaagttcattatttcttttttaatc

SEQ ID NO: 530480 - DNA, 201 bp, Homo sapiens
ctcagaccttcacattgctcatgttctcatggttataaactggtatcacattgcagtatacttatttatataagtattgcaggccaggcgcggtggctcaygcctgtaatcccagcactttgggaggctgaggcgggcggatcacgaggtcaggagttcgagaccatcctggctaacacagtgaaaccccgtctctaccaa

SEQ ID NO: 530481 - DNA, 201 bp, Homo sapiens
tttgcctgattgcttcgtaacgataatatgtagacaaaatatttttggcaaggatattgtataggtggtataatataccttgcttcatattaagatatatwttactgtacatataacttacttggagtaaaattcattgttgtacatttctatgagttttgaaaaatgcattcagttttgtaatcacaaccatcaacaaga

SEQ ID NO: 530482 - DNA, 201 bp, Homo sapiens
acattgtggatttgcctgattgcttcgtaacgataatatgtagacaaaatatttttggcaaggatattgtataggtggtataatataccttgcttcatatyaagatatattttactgtacatataacttacttggagtaaaattcattgttgtacatttctatgagttttgaaaaatgcattcagttttgtaatcacaacc
